United States Patent Application Publication US 2008/0276334 A1 - sequence listing, part 11

SEQ ID NO: 73903 - DNA, 394 bp, Glycine max
  Clone ID: jC-gmfl02220086b06d1
ggcaaacacaaaaaagattgttttctatttagcatgttagcataatcacaatatgctcgtacaagtaaaaaattttactgccccaaacattaacaaaccctagaagaacatcaaaacaacccgaacttttcaacaatttaaaggggaaaaataaggggcgcgcccacacaactttgccatcttaatctatgataatttggcactatgatattccacccccactaataatgggggggaaaagaatactttttaagaacaccaattagaagatgcttcaagcattttcatagcacatactgttaaactgggatcacatcattcttggatgcatcttcacattttaaaactataccctcaagactagctggaaaaatgcatttggtccattggcaac

SEQ ID NO: 73904 - DNA, 356 bp, Glycine max
  Clone ID: jC-gmfl02220086b07d1
gggaaaaaaaaaaaattttttttaatttccggggcgggggccgggttccccccggggggaccccccccccttcaaagggggaacccccccacaagacccaaaagggggaagggttttcccccccttttttccccccttggccccccggggcaaatttaccccccggcccccccttggtccccccgccttttttttttcccccccccctttggttccctgtttcccaacccccccccctgggggccggttcagggccgggcccccccggcgggggggtttcaaaaccggggggttgtccccccccccccccccttggggctttttttcttgggcccgggggggcccagttctttcct

SEQ ID NO: 73905 - DNA, 466 bp, Glycine max
  Clone ID: jC-gmfl02220086b08a1
agtagttaaaattgtgaccaaatacataagttcgtatgataaattataaaaactccaacctatataataactgtaacttctacatttttcatgtaaatgagtccctcacataaatagtagttagatcaaccctccctccaacctttcgtacaagaacaaaacatgattagcatgcatctagagcttatctcataataagcaacttatggtttcaaccagccatggtaaaagatgaatacatattaagaattgatcagaaacacttttgcaatatgggaatttacagtcttataactttaagaggaaattacaagcttttgggtcttatgcattatgatggggagcttctggctgatgaaacttggatcaccatacgcaccagaatcaaaagggtgccctttagcagacaaatcttgaaatgtagattctctccagcaactctctcgaagtataatgggatttgtat

SEQ ID NO: 73906 - DNA, 337 bp, Glycine max
  Clone ID: jC-gmfl02220086b09d1
attgggaaagggccccaaggatttgccccttaggaaaattattccccggttttttttggtataaaaaaatttgtttcaacccccagaaatttttggaaaaaaaaagtcccctttctttttccaccttttgggggggcaaaaccccccttaagggcaaaaaaattttattttttttttgaaaaaaaaatttgcccaaaaaattgtccaagggacccttttttgaaagacttaaaaagggtgaaaaaatttgggggtgaaaattttttaaattggggttgaaaaaaaaggttaaaaaaaaaaaaccccccccctttttttgggaacaccccaatttttc

SEQ ID NO: 73907 - DNA, 452 bp, Glycine max
  unsure (1)..(452): unsure at all n locations
  Clone ID: jC-gmfl02220086b10d1
cgnacacaaattaagaaactttattaacttgtgaaaatgtaagatatcacagtatatagtatcagttacatacattacagtaaaaacatttattctttagctagctagcctctggtatcatatcatattatctatatttgtttcacgtacgaaacattttgtactcccaaacacaaaaaaacaaagatcattattccttggattgatgagggtgatgatcgctccaacaataagatggaagaacgcgccgttgcaacaacttgcatgcatgggcggcacaagagagagagattcgatgaatgaagtaagtaagtaataatgcgatcgatcacataattgtgcaagcagaggtgttttcttcacagaaatattcatcgcaacggctcacgtaacaaggcctgctcccaccgtaactatcataaacaggccttccataataagcgttataacat

SEQ ID NO: 73908 - DNA, 316 bp, Glycine max
  Clone ID: jC-gmfl02220086b11d1
aaaaaaaaaaaggttttttttttttaagggtccccaaagggggggggggaaaaaaaaaaggggtttaaaaaccaatttttttttttgggggccccccccgggggaaaaaatttttgggggggggagcaccccaaaaaaaaaaaaaggggggaaggggccccccccttttttaaaaaaacaaaaacgccccccttctaagggggggggggggggcaaaaaaaaaaaggcccccttcttctaaaagggtgttttttaaaaaaagggggggggggcaaatttttaaaaaaaccccctgttttttttttttaaccccccc

SEQ ID NO: 73909 - DNA, 463 bp, Glycine max
  Clone ID: jC-gmfl02220086b12d1
ggacaaataaatcttatttttccattgataataccatggaaaatttcatcagtaatgcatatcataaaaaaaatatccgataaattctatgttagctatataaatgacaaacataggcagagtaactaaaagactaaaaccaacagaaagagacgtgacaaaaattacttgagcacggtaactgaagatgcccacatagataaagagccgccatccaccaaatctctgatcacacactcacttcttggatttcttcagtgcttgagctggctgggatgctgttgcaggtgtagtaatttgtgctgctgatggcctctctcctggaccttgggccaagcgctcctccctccgagcatttttcctctccctgctagccttgttcttggcacgcttcgcctcaaactggtcagacaatgtcttttctcttgccttctcagccttggacttgtgtatgctctccatc

SEQ ID NO: 73910 - DNA, 133 bp, Glycine max
  Clone ID: jC-gmfl02220086c07d1
gctaagaaaaaaagtacattttattggcaatcatgtttctagagtaccaaatcctagcaccaaatgcaacaaaatgaagtagcaattactaatggatgactaatgcctgactcacggtaacaacaaagttttt

SEQ ID NO: 73911 - DNA, 492 bp, Glycine max
  Clone ID: jC-gmfl02220086c09d1
ataaaagaatagtttattataacgacacaaaatagactacatcatcctcatagtccaggatagatcttgatgtaataatataattaagcagggtcggtccatcaacatatataacatgataatatgaaaatgtcgagataagactccacatcaagattgaattaaatagacattagaaaacccgaatcgaaagtagattaataataacagtcttactgaaattaattacgtaattaattctcattgtcgaactcctcgtattgcctgaggacctcagcacagccagaagcaacctcctgagacatgaagcccatggcattggcgaacctatcatcggatgcaatgccgatgtagcgggtgagaataaccacagcttcgtcgcggcccggggtgacttccttgcattgagggtgagggctgcttacacgcttggcactggatatttgatctgcgtgatcctcgtgcacgtacattgcgtatgctccagttgag

SEQ ID NO: 73912 - DNA, 471 bp, Glycine max
  Clone ID: jC-gmfl02220086c10d1
accagagaaacaaaaccagatgtattataacacagcaagggggggctttccttcaactccttgcctcactagtttacaaccctaaaacacaagctttggcgtatatatgttattgagttttggggggaaatttcacaaccacaagacacagacaacaacagaaaatatatatacacatacaaatgaacctcttataattttataacttaagcaaggattcttgtaaaatgatttcggagtaaaaaaaaaaaggaaaaaagaaaatgtaactggcaagatttcatgagttaattgttttgctctttatcttgcccactgttctcttcagggctgctttcctgcgcatgaataaccgtagcggttccgcaatcctcattgtgtttcacctcactatcattggttgtctgtgcctgcacatttgaagctgaatttgtttgctgctctgttatcaagctagtaaggccattttgc

SEQ ID NO: 73913 - DNA, 442 bp, Glycine max
  Clone ID: jC-gmfl02220086c11d1
aataaaactccaacaattttattaatgaaaatactttacaatttcagcacatatacactgccatgaatataattttgcacgctataattatctttcgccacaaacaatggagtagtgctcaacaaagcacaaaccaacaataataacagttttagttgcattaatttacacaagaaagtaaattaacgtaataggcaacacatgtgtgtcacgttcatgaggatcattttataatgatatgcaacattgaattaaatattctcatgcaatggagcattctggaggaaggccttgagggaaacgtctgatatcagtgcaataattgtaaatcatgtaattcttttgcacccaacggatctttgcctgccccgtggcgtccagtgattggccagtggaggaagaagtttgggaattgaagtttctgtatgaggctgtgaatggg

SEQ ID NO: 73914 - DNA, 514 bp, Glycine max
  Clone ID: jC-gmfl02220086c12d1
gagtcgttagttaaataacacagctctaacacaagccaatcttttcgttcagaaagtgccaaaagttcagcaaaacaaataccattggatggaaagcctaatttagaagtcttgaaatcttagactaaaatacgtctctgcaaacaaactacaacagcagaaggaaaacacgaaataaacagatagatattactttcttgatctcacgggcatgcttcactactattctctgcttcttcaagcatttgcacaacctgtgcaaccccttcttctatttccttcctgatgactccatcaggcatatcaaatgtccttcttttgaagtagagcgatgctgatcttccaccaggctggggatctaccacatcaagcattgcttccagctcatccaccattgacctcttcgcagatcttaccataatatcagatccctcaatggcatcaacagtgaggagcaagacaatgattttctcagaaaaccgctggcgttccccgcatcacgagctacatgacg

SEQ ID NO: 73915 - DNA, 455 bp, Glycine max
  Clone ID: jC-gmfl02220086d04d1
ggacaaggggtcaatttttatcatatctaatgtttatacaatggatcactacacatatgacataattatctcatgcaatataatatatttttccatgccataccaaacattgcataatatattgatgttatcatcttatacaattaggtctcaaagttaataagtcttatctaacttgcgtaccaaagaggctcttaaagaaccctaccactccaatacttttcaagcctacaatgttgtaacgtgtgataaaaatctcactctaccttaacctgttttctgtacgaaggctttgatgtcaaatgcatcaccagcagatgtcttcgtaatgacacccttctcagtgatgatccccgatattagattagcaggagtaacatcaaaagctgggttccacacagaaattcctgaggcagcaatctgctctccaagtcctccatgtgtgttcagcaatt

SEQ ID NO: 73916 - DNA, 535 bp, Glycine max
  unsure (1)..(535): unsure at all n locations
  Clone ID: jC-gmfl02220086d05d1
agtacacttcaaaatccagcatgcatttattagtatattcccataccctgcggctcaaaatttaaggacttacaaaacattaagaaacaagacccttttgcaattcacactgactgatacagatgcagatagccactcttaactatctagtatcctagctacaccgctgcaaagtagtctttgctaagtttagggtctggtttcatggacttctccccaggcttccacccagcagggcaaacttcatctgggttctcctgcacatactgtaaggcctggagagttctctttgtctcgtcaacacttctaccaattgccaagttgttaatggtagaatgctgaataaccccttccttgtcaataatgaacaaacctctcaatgcaattccctgatcaggaatgagaacaccataagatttcgatatggatttggtgacatcagaaatcaaaggataattcaagtcaccaaggccacctgactttctatctgttnggatccatgcaaggtgcgagaacacactgtcaactgaaacac

SEQ ID NO: 73917 - DNA, 521 bp, Glycine max
  Clone ID: jC-gmfl02220086d06d1
cagtcagataaaacttgtccttccaaaatattcaaattaaatactataaccttcatgccacatcctatgtctatggctaaagttttaatagttttaagtcagtcactgctgtttttatgccaaaacaaattaacagaagaacaagcagcatttacacatttccaacagcaagaggcattttgactttggccttaggtgtttgctaattttatttatgtagccatctaaaatactgagatcttaggtcaaagcatccatccaggaataaatccattgacttgttgagcttgagttgtggcagctagctgctgctctgaggcttcagggatgtacctgtagtcagaacctatctgcaatgtggggttgcactccaaaggctggaagaagccttgagagtgagcattttgggttccatatggcatactttgctcaccagcttcccatgtttgcctatactggtttcttgaattgatttcttccagcttcatggtcaaagatctgtttgcttcaccaacatatgc

SEQ ID NO: 73918 - DNA, 295 bp, Glycine max
  Clone ID: jC-gmfl02220086d08d1
agaaccacaaccctttatccatgacttgattcaaataatttagtcaataagcaaaccataatgtacatgaaggagctggaattgtattttaggaaggtatggtattggcatggctaggctttaaaggaagtagccatacaattccaagtaacaaatgcagaaattccagggattgggggcatcggggggggttcctgtgagcacaacccggaaatacctgaagggaaacaaagcgttggggccaattatgggccaagaggcaaactggccaggtttacatatactccgatcattt

SEQ ID NO: 73919 - DNA, 149 bp, Glycine max
  Clone ID: jC-gmfl02220086d09d1
gaaaaatatgattaaaatattttcataaggtattttagaaagcttataagataaatccaaatatactgcaaattagttctgccaaaaacatcctaaaagttatgatcttcatcataaaatgaaagagggaggtgggggcgtggagggtg

SEQ ID NO: 73920 - DNA, 471 bp, Glycine max
  Clone ID: jC-gmfl02220086d10d1
aggggtaaggtaagattagatgatttgcattcaacggtcttgtaccagagttgacactcaatcaggtcacagtacagaagaaattaacaggtttcattgtggtaaactagtagcaatgcacatcacaactgaaaagatgttattctaaagctaatcagggatgaaaattgtagttgagaatcccttttaacacagttcaatgctttcccctcgaaaaattttgccttcaaatttgtagggcattagcaatagacccggctagactcagcacttcaaaaggagctgtatttgctacagctttgacagtaagagggcaagaatctgtaatccagaagtaggcaaatgcattctccaaggcgtcttttttatgagtgaatcgctcccatgattggttaggaaacacgccatgggtaacataggcactcacctttgctgcaccattggctgccaaaactttctgacactcaatca

SEQ ID NO: 73921 - DNA, 504 bp, Glycine max
  Clone ID: jC-gmfl02220086d11d1
ggttctaaaaaaattaataatatactgaataaagtgtcgaagaacaataattaaattaattcaaggaattaaattaaaacaataattatattgatcaactaaatctaccatatgaaaatttcattctttacttgtaaagagccgaaattatcttcaccttaataattgtagatgtagaagaataatcagaatcttcctaaatccacgtaatttcttcgaaaatgctttgcccaacacaatgatattgtcacaccagaagctatgcggcgtcttccatttgatattccatttatcgcctggagatttacaatgctaatgacctatttctgcattacaaacgttgttgcccgaaattggacttcttacaagtagataattgtgcacaaagccggcaatacaaatgatccatcttatttggagaaaagtagccgtgtttgccaaatcaaataaaaaaagaagggcacaatatagttgatacaatgataacagtacatcttcacaatt

SEQ ID NO: 73922 - DNA, 493 bp, Glycine max
  Clone ID: jC-gmfl02220086d12d1
ggttctaaaaaaattaataatatactgaataaagtgtcgaagaacaataattaaattaattcaaggaattaaattaaaacaataattatattgatcaactaaatctaccatatgaaaatttcattctttacttgtaaagagccgaaattatcttcaccttaataattgtagatgtagaagaataatcagaatcttcctaaatccacgtaatttcttcgaaaatgctttgcccaacacaatgatattgtcacaccagaagctatgcggcgtcttccatttgatattccatttatcgcctggagatttacaatgctaatgacctatttctgcattacaaacgttgttgcccgaaattggacttcttacaagtagataattgtgcacaaagccggcaatacaaatgatccatcttatttggagaaaagtagccgtgtttgccaaatcaaataaaaaaagaagggcacaatatagttgatacaatgataacagtgca

SEQ ID NO: 73923 - DNA, 447 bp, Glycine max
  Clone ID: jC-gmfl02220086e02d1
aacaattaacgatgttgatataagatatataacatgaacagcagcaaatgttgcaccaccaaaacaatgttcaagtagttaatgtatgatctaacatattttcttgctaaacattgactttgacagcacccacctaatttgttcagtttcttggtccttttattcttaaaattgattaaaaagttattgtaacaataattcccaattttgctaacagaaagccagtcttagccccatgctttatatctatttacttttgtatttcttaatttcttgctataccatgggcaaaaaatttcttcataaatacaaacacttatgagactattacaacagaacatagactatgacaaaataattattacggttttggaagtttggactgtgtgtcacttggggaaggaattacccggccaaggtgaagaagcttctatacacacttgcaag

SEQ ID NO: 73924 - DNA, 466 bp, Glycine max
  Clone ID: jC-gmfl02220086e03d1
gacccaataatagtagttatgatttgtatatatcagaacaacaaaatatacataaactgtaatttttttccagccagtgatcagattttatttctatcataattctaagtgttttggaaacacattgggcgccaatacagaataatcaaaagggagaacttaatttctctcccttttcaagccttctccttagatggaactgtcccatctgtgcctgcaagcatggcatatttgctcttcctagtcaaaattgtgcactcaaatcccaaagtccctgcaagaaccctttgaatgtagtttgcaacttcaatagctgatttccctccactgcatgtgagctccttgggaagctggttcaagaaagcgatctcatatgttggcattggattcatgaacacaaaagacgggtccaacaacttgtgtccgcaaaccgtggtttcgtagaacacactttgctttgtgttaa

SEQ ID NO: 73925 - DNA, 509 bp, Glycine max
  Clone ID: jC-gmfl02220086e04d1
gatagccagaagagtttctttttagggtgtgaagtgggcaaaaatagccatcaaagtagctttaaggcaagaagaaataaaaccaactattgggtaaaaaaaaacttgagaaactactctggccattcaaccaaagatggaataacaagttattttacagattcctctgaatgaagtcccacatcctcccttccatgtaaactcgatcgctatgacgccttggcatgtgacgttcatctgggaaaactattaactcatacggttttccagctgccacaagtgcattgataagtcttgcagtgtgcctgaagtgaacattctcatcaatcatgccgtgcacaagcaacaaccgccctttcaactgctgcacttggttcataacagaaccgctttcatatcccaacttgttttcagatggcaaccccatgtacttctctgtgtaaaacgtgtcatatccgtcccatgatgtaacaggggcgcccgctattgcacacttgaagaaatctgga

SEQ ID NO: 73926 - DNA, 478 bp, Glycine max
  Clone ID: jC-gmfl02220086e06d1
gaactctaaaacaagactagttggtgaactggtaagatagatatccaaacataattgtcaataaaattgggcaaatttgggatgttaagtgtaacttcaaattgaaatcttcagttatgcccagaaaaactatgctagcttgatcttctttcaaggtccctcactgtcatttagagctaatttgcaatagtttcaactaaacaactatcctccattgtcatcagctaatgatcatcttgtttaaaaactcagcttgctcgggaaaatactccatcagttcatcctttgtcacccagacatgatcctcacattttccgatgttgaatttgtttttggcaataacttgagacttgaagaagaatctcttaaaagatgtggatctagactggtcttctgtaggctgaacaaccatatgggccattggagcatttccaacaaaatatgtgttagaaagatctcctaagactgatttcaatgc

SEQ ID NO: 73927 - DNA, 549 bp, Glycine max
  Clone ID: jC-gmfl02220086e08d1
cacaaggaaaactatccatacaatgtttttattagactagtcacggaaacaatcttgaaaatcagacaaaaaaaaatgataaaacctacatataatacataatggagtaacatataaagccaagctgtatacattaactgccacatcccccacccccaaggaacttgtaatagaatgggaggggagagagaataatactaaagatacaacaattctctgctatgttatacttgattgggccattacaaaatatataaatttcagacacaatacgttgacctgtgaaggaaattagcatactgtgcgcccatagcacaaacaagcaaggtaaaggttttttgaccatttttccttaacatgtgtgcttggaaattgagatgtacgcagagtttcctgggtttcatctcctggcctgcgcctaggaatgctaagtataagagcagattgatcccatgtagcagcccgtgctgtaatcctataaccattatcccatcgtctgtggattccctcactaggatagagaaaatcaagttcaacaacctgatcact

SEQ ID NO: 73928 - DNA, 448 bp, Glycine max
  Clone ID: jC-gmfl02220086e10d1
aacaaacaaagacattttcatttgggatagaaaaatattattatccaataataggcatcctacaaatacaattaaagtataagaaaaagggcaagcaaagtagagaagctgtataaaacggcaaaaattaattaattaaaaatgaagtgaggcaattttcactcaatgatggattggataacacctgcaccaacggtcttgccaccttccctaatagcaaacctcattccctgttcgcaagccacaggcacaatgagctccaccaccatcttcacacggtcaccgggcatcaccatctgcgactcttcatccctatcgttggtgatagccgtaaccttcccagtcacatcggtggtcctcatgtaaaactgaggcctataccctgcaaagaaaggtgaatgtctcccaccttcttccttcttcaaaacatacacaatcgctgagaact

SEQ ID NO: 73929 - DNA, 425 bp, Glycine max
  Clone ID: jC-gmfl02220086e11d1
gaacattcatcaactcattcggctacaagaaaagacaatgatagatatgctaagcatattatataggggaaaagaattacaatacaacacgtcaaatgtcttggttgaggagaaaaaagagcgttaacacccactcaatggctcggcagaacaagcaacgaaaagtatacaggaaagaaaggaaggatccagaaggggacagggaacatgtggagtagaactcttctttcctctctccaaataattaaagatctacacagacagcaatgcaaagccaaacgtggatgacaacaatctaatctaatgtttctccattttccttcccaaatttcgcttaccctcaattttttatttattctggagtccacaattaatgactgcaaccacgtccttgacctcaagattatgatattttggttacatct

SEQ ID NO: 73930 - DNA, 467 bp, Glycine max
  Clone ID: jC-gmfl02220086f02d1
aagattggatgagcattttatatattgtcttctcattgttcaattcctcaggccaaaaaaatacagatactaaataggaatattcggaaagcatgggtatataatctttaacagtggtggaacaagaagtagctaatgtaaccataataattgagaatcagctataagttccatttgtaggcaattttaagcattctgcaactttgaatctatgaattataggtgaatgatcttggttgagttctaagatgtaggaaaaggcacataggattgaacactaagataataacttctcttgtaatacaaaagggtggacttctagttcctagtacggaagattttcttattgcaacaaagaaatactactgaacttgtaaatagtcccgttgaaattcacattggtggtggcagccatgttatcataatggggcttctcacagtgtgcaaaccatccttccattccatac

SEQ ID NO: 73931 - DNA, 465 bp, Glycine max
  Clone ID: jC-gmfl02220086f03d1
gcaaaataaacacaaagcctcgttaacagcaaggtggtggtgtctatcaagaaaacaaagttacatcccctcccctgtttgcacaggtttgaccaatacaccgaattactaaaattgatatgaaggaacactaggaaaaacaaaaagcaaaattccaaacgattattattctgggaagagtcgaagcacaatactcattaacaagaaaattcggttgtacccataaaataccgattcctacccgcacttagattgatcagtacttgtagtcctcaacatggaggctctctgaggcaccatcagcaagctttgagttacccttgtaggttcccagagttgcctctgagttggccttggctcttaccaaaagggcttcctgagccttcttcacattctcctcttttccactccatgccttaagggtgctctgttgaagtgcccttccaaaggagaaagagagtgacc

SEQ ID NO: 73932 - DNA, 396 bp, Glycine max
  Clone ID: jC-gmfl02220086f05d1
ggggggtctaccacaagtctttttttaagagaaagacaacaaagttcccattttattatttcacatttttttctaattcttaaaaacaagggtaccattttttatctaaatcgggccccagcagaaagaccctacactacagtggaacatggtacaaaaatccaaaagttgcatcgaaacaaccatgaaggaaaataatgaagcttttcccagattccgacctccatgaagccattttcaggggcacagcccctaaacatgccattgcaattgaaaccataagccacttccccagcgttggacacagcaatgagaccagccattcctttattgagacggggcttgatcacaaaatccacgggttcttgaagcttcaagcctttgtatttcataacc

SEQ ID NO: 73933 - DNA, 284 bp, Glycine max
  Clone ID: jC-gmfl02220086f06d1
gtaacagaacaaaccaatcattttttaaaatttccacaattctggcaatacaagggtaaaattttaaactttttaattgggcttacatttcactgttttaaaaggggcgtttgcattctgcaatacaaacaacaaaaaaaaaatttccccattcattttcaactgggggggccttaatcgaagaccccaaattttcataccagggtgtttggcctaaacactgaaagtaaaaaacgctcttttttttatgtcaattaccccatggcatatttttggggcccgct

SEQ ID NO: 73934 - DNA, 438 bp, Glycine max
  Clone ID: jC-gmfl02220086f07a1
ggcaagagaaaattgtattaatccagaatcggtcgttacttaacagtcaacagattgtccagccaacttacccaacaaagggattccaaatcagatacaattacatcctacattacaataacaaaagtttagttttactatgaaaatacccaactacgggttttctttttcttgggtatcggcggaactttggagatgacttaaggtaactctcgccttttttgggtgggaagactttttttcttttgggccatcttaattacccttcttccttttatttcccacattgtctttttcatcaatagcagctgcagaagggtcagaactcaaatcacctttagaacccaagggggatgtttttggatcagaatattcagctttatctttggctttctttccagattctacattctttgctggcttaatatattcctccaa

SEQ ID NO: 73935 - DNA, 460 bp, Glycine max
  Clone ID: jC-gmfl02220086f08d1
aaaaccttaaattaaataataaaacctaaatattaaacagtacaatttacatcaggagctttgcacaaatgggtgaacttgctacaaaaagccaagtccttttcccgcacttaataatgaacaaaagatgatacatattaactcgtcactctttactatgatttcttctagtggcatttaatctaaatctaaagatgatattcacattaaggaagcactttacgacacctaatttaagtggataagatgctgtcatttcttcaaggcccatctcttatcaatattagagtaaacaatctcctgacaacgtacaagtccacaagctcctccaaagcacaaccatctttcactacctttgttcatgttccatctcactctgtgcaatgcggctactttgggagggaaggtttcaggtatattcccaaaatctgacttttcattatcagcctcggggagtatt

SEQ ID NO: 73936 - DNA, 470 bp, Glycine max
  Clone ID: jC-gmfl02220086f09a1
agaaacatagaaagaatattcaatcagatcaaagaacgaatcccatcaacagactaacatcatcataaacaagcgttttcgcaataattaacatctcctcatccgtgataattaacagcattgtttatcttaattaattttctcgtcatttagagagcgagcatcacgagggaagcgatggcggaagcagcaccaaagagtcccatgtagacgcgggaagcatcgctgctgggacctggtgccaaagcagaaggtgactgtgcaatgttatcaccggcaccgtcggcggcggttgttgcaagtggcaccgtagcagatgtcgctgctgctgccgcagattcaacgccaggtgcaacgataggcttgctaacctgaagaaccgaaacggtgtcgggttggctcgtcacggacctcacaagcacaacctcgaaaggtgcattcggtgcggcggcggcggaaccgaacgcaat

SEQ ID NO: 73937 - DNA, 415 bp, Glycine max
  Clone ID: jC-gmfl02220086f10d1
aaaacaaaagcctttggataatttaaaaataattttaacatagatttcaatacagtttttattattattaactacatattaactattttaacatgcttctgattgaatgggcctataaacccaatgttcacgcaaaaattaccaagagggttagaggctatacatagaaaacctgaccaacatttaatagactctcatgaggaacattggagatcacactattttccctgcatatcttcctcaaaaatgcgtatatttaatcaacagcttttttcttgtggaatcttgaatccctctcttggcctcacaactgtgtttccaagaatgtgaaccaccccagcatccctgcaggtgtttaagaactcaacttcatcaacctcagtgtgggtgctaacatgaccagaggattgaattg

SEQ ID NO: 73938 - DNA, 459 bp, Glycine max
  Clone ID: jC-gmfl02220086f11d1
gagaacgtaaaaagagtgataagattattattaattagcattcttcctcaaaatgaacctctagaactcatggccactataatgaaccggtggtattttacttcgacatgccatttggcattatttatttgataaaatgatctcttgattacatccaacacaagtgatatacgatgaaatctagggaaataaacaagaaaaacactagacatgtcaaaggaacactaaattcagatcacttgagaaggaacttttgcaaccaaaaagcagagaacttggggtatcttttcaagttgttcttgtaatccacatatatgagcccgaatcgaactgtgtaaccagcatcccattcaaaactgtccgaaaatgaccatgcataatagcccttcaaattaacaccttccttgatcgcttgaagaaggaatttaagatggccatcatggtatctaatccttatac

SEQ ID NO: 73939 - DNA, 457 bp, Glycine max
  Clone ID: jC-gmfl02220086f12d1
aatcgaaataaattatctaatttttattaaaaatattatccggagacctccaaagataaatgcaaagaataacaaattgtcacacggactatgaccctcaacatgacaaacgctaacactcaattaataatgtgagcattgatagatatttggtttaatttcaagctttcatgaagttaagtgcatgaggaacatggagagccttcaaccagtcagttccaccgttggaaccagcctggaggaattgggcaggggtgaactgagcagcttcttgctggctaatgagaccgcggtaacccttccacttgatccttccgttaacgttggcaccaggtccatcgttgttgtattcagcatagtacagggtgtcttcgaagtgttcaccggcccatgggcaccatccttccgggtgaaggaagtcacccacggtggattccatcacaattgtccttgagaa

SEQ ID NO: 73940 - DNA, 479 bp, Glycine max
  Clone ID: jC-gmfl02220086g05d1
aaccaacaaagtaaactcatttggaaatgaacattgttcaagaacaattagatcaaagctcaatgcaacaccaaggatgccacaaaaccctcttattttgaaacctatcctatattaagcctctacaggagcaagagctcgcagctctcattgtaccttaatccactgttggctgaaacccaaccataataataatataaagcacaaacttcaaaggaacgaatgatttttgctcaagcatcatcaagagcaaggacaccagggagttgctttccctcaagaagctctaagctggcaccaccaccagtggagatgtggctcatcttgtctgcaagtccaaccttctccacagcggcaacggagtcacctcctccaatgatggttgtcactcccttcccactcagctctgccagtttcttggctatagcctctgttcctgtggcaaacttatcaaactcaaaaacacccattggtccatt

SEQ ID NO: 73941 - DNA, 442 bp, Glycine max
  Clone ID: jC-gmfl02220086g06d1
gatataacccatgttaatagtcttagattcgagacatgaacaggatcaaaataaaattatataaaaaaaaaaacccaccttttggagccaaatatagcctgggaacctgtgtcatatctagactattaagaaacgctttaatttatgctaatcttgaaagacctgcactcattacactgattcgaatagtgtaatttccgtgtccatgtacatttctataatctatttagaagaaaacaaaaatttggaagaaggatataaaacataatattaataacaagcaaggggctgggagaacttcacgagactcagactaggagaggcttccctcacatctttgttcttattattatggggttgccacattttcctttgcctgtggagcaatttcttctccatcacttccaggttcactgccaggaactcccaagcttagcagcac

SEQ ID NO: 73942 - DNA, 417 bp, Glycine max
  Clone ID: jC-gmfl02220086g07a1
ggagaaaatatgattatgcaaataacaactccatagtatgaatcacaatattcaaagccacctacaagagcctactgtatggccgggagatgattgtcctccagctaaattcaacgatttgaaacacatactttgccaagtcctacccaaagtaaaagtttgtcacaacacttattaaaagaagaatcttgcagctttactcttcaagcttttgatgttcggtaatttcccgcaatattaaaaagctaaccaggtcattgatggaatgttatgaacacagaaccaacacctagaacagagcaacataaggaagaagaagaagccggggccaaaaggagaatcattagaccaaggtccctggatgactattcacccaaattacagccgccacgtcagcaaggattttagaaaattgcc

SEQ ID NO: 73943 - DNA, 314 bp, Glycine max
  Clone ID: jC-gmfl02220086g07d1
aaaccaaattggaattcattttactgggaggggggaattggaacataaagggggagaacaaccaaacttttaagcaaaaggccaagtggttttaatttttctaggcaaaaatttttggggccccaacgtttggttcccgggatttccaataaccggggttccgataactaaactcaaaagccacgtggttaaaacattagaaaaaaatttggttttgaaaaaaaaagccttaaacactggaattggttttttccaaactggggggaacttctcgcccaaaaataaaaagcaggggctgacaatgtttttaaaga

SEQ ID NO: 73944 - DNA, 440 bp, Glycine max
  Clone ID: jC-gmfl02220086g08d1
gcagccaataataaagacagtgccacttattttcatttataatagaggcaaatataaggtatacatagatgagccagctagctaataagacataggcaactgaacacaacacatgatatccccacaaaggataaatcataagacgtacaaaagcacaaaggtaaggactattattaattcatggcccttaaaaaatactaaaaacaccaagggggcatgcaaatgatacatatgtaattattattaattaagcaagaatctccttcaaaggcttggcctcaagttttgccttctgatcaagttcttgcaaatgcttttcattctcaaggtcctgcaaatgcttttccttagccagcttcttcatccttgcaatctcaatgtccttgctcatcttcctcctgtacatttcagcaaaagtgattggttcctccatcacaggc

SEQ ID NO: 73945 - DNA, 500 bp, Glycine max
  Clone ID: jC-gmfl02220086g09d1
gtacaaaaatatcactgtccttcaaatggcagcactcatgggaatgcgatatatatattatgtatatatgattttttttctctataaattaacaaaatcagattagtgggttaccccttgttcttttgacaaatttgaacttggctgattcttggcgcattatattatagaatttgggtcaatatatgcccagagcatctctgaattcgcttccctttgcttctacttcactatactactactctaaccaccaccatcttaccagttacacggcttaagttccatagtttgtcatcttgaaccctggttggatgagtaccatagctttttctggcatattaatatcttctgcatgtcactgccattgtcagtatcttctttacgacattcccaacgcatacccttaccaatggtagtgatagcatctgtaaaataactggattcacgaatgattgcatacccccaaggccgtaagaatcgatccatttccagcaatacat

SEQ ID NO: 73946 - DNA, 355 bp, Glycine max
  Clone ID: jC-gmfl02220086g10d1
ggtggggggtgttttttttttttttttttttttttttttttttttttttttttttttttcttttttggggaaaaaggggggaaccatagggggggggggggacccccaaaaaattcccccttttggggggggacgggaaataaatttccccccccaccccaaaaataaaaaccctcaaaaggcccaaaggcaccctttttttttgggccccccccgggggggaaaaaagggggggggacccccccccctttgtgttggccgggccccccggggggaaaacaggggtctccaaggggccccctccgggggaaagggggggaaaaaaaaacccccaaaaggggaaacggggccaccc

SEQ ID NO: 73947 - DNA, 358 bp, Glycine max
  Clone ID: jC-gmfl02220086g11d1
gtacctgaatcatcatcgacaacaactcctcgatgtccatttcggttcattactgcattcgccttttcaacaattcccctttctgggtaaaagacgacacaccccagaggccaaaacataacaaagaagcaagcaaataactaaaatatctcagtcctgaaacaagaattaacaaaaacaactacaaaggaacgacaattagcatgggagtcttggttgttcttcaagcgagtgtaggattctctgcaggagaagtcctccacacgatatctttaagagctggacgaagctccttgctacagaactggttatactccaaggtggtcaccgttgtccttcttaacctccaccaccaaaa

SEQ ID NO: 73948 - DNA, 458 bp, Glycine max
  Clone ID: jC-gmfl02220086g12d1
gggaaataagaacttttgcagctaaatttatttaagatttaagatatcttatacattgaaactgtcatgtgaaggtaccatccttacagcaggcagatcttgttaatacaacactttgaacccatgtcagccagactaacatctctctttcgggctgcaaaatcgcattatttgtgcagtttcatttgcaaggatagctttctagccaaagtttattccctgagctaatggtagttcacttccataattgatggtacatgtagaacgccgcatgtattgcttccacgagtcacttcccgcctcacggccaccaccggtcgccttttctccaccaaaggcaccaccaatctcagctccatttgtaggtatgtttgcattcactataccacaatcactacctcgtggcccaatccacttgaatatagttccaggtctttgggtaaagatgactacttaat

SEQ ID NO: 73949 - DNA, 376 bp, Glycine max
  Clone ID: jC-gmfl02220086h02d1
aagaaaaaccgggtttaaaaaaatccacttcccccaaaaaatccccccttttgaaacccaaaacccgtggggggggggccctaatggcccaagaaaaattttttctcccaaatacccatggaaagagccgggttgggtttttaatcttaaaaaacaaaccgggggtggctggaacacatgatttttgctccccctgggactagaaaaaaagcccaaccccccccccaaaagggaataaatggggtttgaatgaaatcgaccgggcaattttaaaacactgggggcgttgcaaccctgggagggtaaagcggggtttacaatggggaaaaacccaatttttgggcgaacccccaaatctttaaaaaaaaaacatcgg

SEQ ID NO: 73950 - DNA, 362 bp, Glycine max
  Clone ID: jC-gmfl02220086h04d1
gaggggcaaggggccaaaaccttttttgaaaaaaaaaaaaaaaattaccgcccccccccccacttttcatggggccaaaaaaaaattcccccatttgggaacctaaaaagggggccccaaacccccacaaagggaaaaatgggtaaataacccctttttttttccgaaggggacaacccccccccaaaggggggggtcccgggccccgggggaaaaaccgccccaaatcccagggaaaaaacccccctggggggaaacccccccccccaaatggggcccccaggggtcccccggaattgaaggcccccacccccggttaatatccccccacacaaaaaaagggggggcccgcccccttaatt

SEQ ID NO: 73951 - DNA, 325 bp, Glycine max
  Clone ID: jC-gmfl02220086h05d1
aaaaaaaaaaaaaacccccccgggatttaaaccctgataacctttaccaggtgggggccctaggggggcgctaaaatttttgccaaggggggaggggtggaaaaaggagggggcataccccccctgtataccttggccagggggcacattccttctttttttttggggggggctaaccggggggggaaggttttttacccccatttctaccaccaaatcccgggccgggggaaaaaagggggggggacactttgaggggctccccttacagattcgaaaccaaaaccatggcgttgtaaaagggtcctatgccagaagagaaatt

SEQ ID NO: 73952 - DNA, 466 bp, Glycine max
  Clone ID: jC-gmfl02220086h07a1
cacaacactgggaaactgaaagtcatatgatacacgatgacaggttttaaatgataacttgacaagtttagccaaagaaacgaactacaattcttactcaaaaaaataagaaaatatccggaagaccgagcttcattactcagttttaactaacttacactgatacaagggattggcattgccgattcctaaggattttgggccaccatcctcttcaaatccttattttctttgctgagaacgtcgacgcgagactggagaatggtaatcattgcttgtgtgctcatcatctcaaacctgatcgtgtccttttcaactgaaagcttctgcatctcactcttcattaccttgatgaactttgcgcagcttggaggcatggatgactcaagattttccacgtcaaaatccggtgtcttaattgaagcaaggctgtcctttgattcaggggactctagcagtgaaaact

SEQ ID NO: 73953 - DNA, 486 bp, Glycine max
  Clone ID: jC-gmfl02220086h07d1
gggtaaatggaaaaacgttgttacctataaaaatcagctgtctaaatgtaagtgtgagaagaaacaccgaactctacaaacatgactatatgagatgttacagcaatttaggtggggtggattgatcccggctgaaagtgttctcttttaaactcttgctcaaccaaatagcagctgccctcggggaagctatccctggcccaaacggatttaataaaactgcaaggtgtccatacctttcctgctgtagtaatcttgcactaaattcaagcgaaccttctaagggctcagtcctttgtcggaatgatgatgtatcaaactgtccgtggcgcaagtctgaaaagttgaggcttgatgctccagcagttgcattttgatcagatgagccacttttattctcatcgttatgattggacatgctgttcgtgattgcctgccaagcatccgtacatactgggctaacataagatgtgtcacataccttga

SEQ ID NO: 73954 - DNA, 490 bp, Glycine max
  Clone ID: jC-gmfl02220086h09d1
aaaggaagaaatatgattttttgtcataaaaaatgtactgtatgaaattccactgtctataaggatagaaatacataatttgcactgaaaaaagggagcaaacgtacatatcattagacagaacagtgaaacacaaggactgcagttaaatataaaaacttccactttgtatttcacgtttcaatggaagtatttccaatatcatcgtcccaaatcaccatccatattttgcttgtgtttcagctttggtaagcatgccctttgcacgccgctcagtgagtttcatttcgttttgtttcatatcaaagtacaatgaaccaatttgatgcttcctcttgtgcagctttgtaggcttcccctttgtcgaagcaggctgataagtgggtccgaatgcaatcccagttagcttggcctgatcctctcttggccggtttttaatcaactctttttgcttcacctcaatcacttcagttggaatctcatgcctccc

SEQ ID NO: 73955 - DNA, 439 bp, Glycine max
  Clone ID: jC-gmfl02220086h11d1
aacttgaacactctctttttgatattgatattaagagacacattggtagggcatacatacaaacagagagtacatgtttttagttgatcacgtaaaaaattacaaaagaacatacaaataacaaaataggaggaagaggagagaaacacacagagtaagagacgtggaaagttatggatattagacatattataagggcaacgctcaaaaaacttccagcatagagcagtggaatgaattacttaggccttctcccacttgaggggtttgaccacttcccatgtgaagtcagggtcttctcttccaaagtgtccataggcagcagtcttcaaaaacctgttatttccacccctcttgagatcaaggttgatggagatcataccaggcctgaaatcaaagtttttcttcacaatgttgagaatctccttatcatggatct

SEQ ID NO: 73956 - DNA, 185 bp, Glycine max
  unsure (1)..(185): unsure at all n locations
  Clone ID: jC-gmfl02220088d06a1
ctcacccaatattatacgtatcataactataactctcttcatcacaccagaatactccactatcgntacgcaactacacatgtatactttaatagtccacgtacaatactgacgatctctatcattatcctatcatcttctcatatagaacaacgatgtatgtactatgcaagatctatgacgtt

SEQ ID NO: 73957 - DNA, 409 bp, Glycine max
  Clone ID: jC-gmfl02220089a02d1
aaaccctcaaaacgaacaacttttaatcaaaaataataatacatgtacagggcaaacatttttggtctcaaaagttataaataaaagtaataattttctatttccacaatttattgatatcaatatgctaaaacattgactttgtagaaaacaagaatttacacgttgacccaagttttttgtttacacctgcgttttgcatgcggaggtctgtgggtcccacatggccggcaagaggtacttccttccgttcccggcgcctgacaaattgtagctcgcccccgtcgttttgtccaccaaaacccgacccggataacctggatatgccccgttcccgaaaatccccgtgcaggccgaaacagccttcaacggcgccgtgggaggaccctgttagaacccctcgttgaac

SEQ ID NO: 73958 - DNA, 472 bp, Glycine max
  Clone ID: jC-gmfl02220089a03d1
aaccaacaaagtaaactcatttggaaatgaacattgttcaagaacaattagatcaaagctcaatgcaacaccaaggatgccacaaaaccctcttattttgaaacctatcctatattaagcctctacaggagcaagagctcgcagctctgatgggagcttaatccactgttggctgaaacccaaccataataataatataaagcacaaacttcaaaggaacgaatgatttttgctcaagcatcatcaagagcaaggacaccagggagttgctttccctcaagaagctctaagctggcaccaccaccagtggagatgtggctcatcttgtctgcaagtccaaccttttccacagcggcaacggagtcacctcctccaatgatggttgtcactcccttcccactcagctctgccagtttcttggctatagcctctgttcctgtggcaaacttatcaaactcaaaaacacccattg

SEQ ID NO: 73959 - DNA, 539 bp, Glycine max
  Clone ID: jC-gmfl02220089a04d1
gaacgaattcccattcatctaaacatctactttctataaacaacaagtacatggacagagcgctaaggtaacaacagctataaagaaattacaataaagattcaaacaatggttctatctacaagaaggatatttcaatatccaaaaatatatcctaataaaggtgaaacttgcatagtcacaagagcctccaatattgcaaactatagactataccagcaaatgatatttagctggctggctgtcctactcaattccaccgttcatctctcctcgagtctaattcttcaaacttccatcaagcatggatcctctttggggattttctccctttcgctgattttgttgtagcatctgcaaaagcttgtgcagcctccgcatcagcttctgctgcctctgcttcctttgctgcctcctctgcttctgcaatggcggcttctgcttcagcaactgctcgagcagcaaatgcagctgcctcttgtggagtcatagaccttatcttttctaactctaaatctatctgagatctagtaaggatg

SEQ ID NO: 73960 - DNA, 467 bp, Glycine max
  Clone ID: jC-gmfl02220089a06d1
ggacagaaacacataatttagtatttaataaagcaaaagcaaaatgcacacacattccccaaacaaaacatgcttattcaacccaaattggtttcatatcacagaaaccaacaggatgtcttcctccttacccgtcccacccactcgaacagaaattctacggaaattaaaaataaaaaaagctaaacttcttctacctcaaatctgaaacgtctaactaccaaaattcaaaaaaaggaaaattaaacaatcaatccgattcataaaaccgattttggctttccctcactttccgttgataatctcaattacttagtacctgtaatgagcaggcttgtatggaccctcaacaggcacactgatgtaatcagcctgggccgggctaagcttggtgagcttagctccaagtttgccaaggtgaagtgcagccaccttctcatcaaggtgcttgggcaaaacgtaaactt

SEQ ID NO: 73961 - DNA, 527 bp, Glycine max
  Clone ID: jC-gmfl02220089a08d1
agaatagttattatatatatatacattccactacttgttcagtttttatacacaaaaagtgagcaacgatataatatactcgagatataatagttctccatggtacataacaaagaaattttgtatccaaatcagtgctcaactatagtcagccaaacgacttcaaacagtctactcctcagctccacctatgtagttaaaggcagtccaatttgaatcccaaaaaacatgtaagtaaaaagaattaacaaatattgtcacagctaaattctccattttaaaaaatcttacagagaattagcatattaaaagaacataaacaaatcaaatttcttgtattagttgtatagttgtattcctcttatgcacctgtatatagctaaaaaggggacaacaacctaagagacagattactagcagatgctcgaaccagttgaaaatgaggcagatgatagacttatgcacgtcgccttctctagtcatccttccttgcttgcatgccctttgaatcagggttcagatcatca

SEQ ID NO: 73962 - DNA, 559 bp, Glycine max
  Clone ID: jC-gmfl02220089a09d1
aacggaagatctcaaaccgctcttgtagcttgagaccaatttctaacatcaataattccactcataacaagggaaacatagaggcagtgttgggtctcaatgcgaaaaaacaataacaattgtatcataaactacaactctactttcatctattttgatttatagaaaagaaaacaagttttttctagtaaaaaggagaggacccctggttgagttctcaggagcatgttttaggaacatgatacaacatccgagaaatctttcttcagaaggcatatctatgagggggcagaaaatagtccaccttggtccataatttggtaacaggaagtgaagttgattatgacatcatggctcatggcaattcaataatatacatgaacatgattccataatgctcgagatcgatagttcttggataaacaggtgcattagaatttagaaaatgtctgtgacaaattgaaactggatatacttgttacttcctgatggagaggagctcaaaactccgcagaggatcatcgcggttgcctcttgtggatccagagcgcatgtaaat

SEQ ID NO: 73963 - DNA, 499 bp, Glycine max
  Clone ID: jC-gmfl02220089a11d1
agtcaaagaagcaatagattttattctaatcaagggggcataggggtacaccattttaagggggggcacaatagaatacatatattccaaggcacacagatacagaagaaactggctaagtacatataatatagagcttaagggaaatgaactagtattatacatacgacaccacctttagatgttgggagttcttcattctggtttagatgcttattctcgtaacataaagaaaggggcctttattatatgccttggcatgtaaactgtgaagatccattgacagaagagagggagcatgccggtgaacacattggattcatctaatatggaaggagttgtagccagaattctttgcaatgttcatctgaattcttgcccagacatcagcatttctgcaacggctatctgtaaggtgctgccctttgcttccactgcatacttcattgcaagtttcagcattgctattccggcgccgctcgttatgtctggccaagcg

SEQ ID NO: 73964 - DNA, 517 bp, Glycine max
  Clone ID: jC-gmfl02220089b01d1
gacccaaaataataagatattttcattatttagcaaactcctacatgcaagacgataagaattacagtgtttccaacagatactattttcttttacataaaaagcatctaaacactgatatacatatattaaaataaaataaaaacatctaagctttctttggagacttggtagccttggatggagattttggttccttagcaacctgagtcttcttaggtagcaaaacagggttaatgtttggaagaacaccaccatgagcaatggtgacaccagcaagcaatttccccaactcctcatcgttccttacagccaacagcacatgtctcggaataatcctgttcttcttgttgtcacgtgcagcattcccagccaactcaagcacctcagcagctaggtactcgagaactgcggccaagtaaacgggagcaccggtaccgacacgctgggcgtaccttcctttcttcaaataacggccaattcttccgacggggaattggagaccggccttgacgga

SEQ ID NO: 73965 - DNA, 574 bp, Glycine max
  Clone ID: jC-gmfl02220089b02d1
ggggggaaatgatttgtagtttaaacagaaatatttgtagaagtgaaatgtggcaagggcaaaataagcaaaataaaaacaccacgagcatggaatttttaatcgaagcattttcaggcaataagttcatttgggaacaaagaagacataagtgaagcaacaaaatcagactcactagtaagccagcggaaggagttttcaaaagattccttttcctttggccactgaccgagtcattttttgtatccaaatagaaacaaaaaaaaattgccatccatatgaaatgagctaggcaatagatggcatattttgagcttcatttgagctctttttggacttgtgctttgatttcttctcccgcttcttgccctcgtcatgagagtgatgaccccaacaagacttcagttttcggttgatatgcttcaattccttctcagaaggacttttgtattttctaacccaagaatcaattgcatccagtgattcagaaagctcggacattgtatgcatggaattctcacgggaaaaaatacccctaagataactatcaaagtcaatgactctgtggaatgca

SEQ ID NO: 73966 - DNA, 509 bp, Glycine max
  Clone ID: jC-gmfl02220089b07d1
gtaaaaagcaagtaacattaagttggattgggatacacaagataattcacattatctgaagtacattgcaataacatatacttcaccaaacacaaatctaaaaactctcaaaagtccacaagtcatccttttctttcatgctcacttgccggggacgaagttggtggcgtaggcccaggcattgttgttgactgggtccgcaaggtgatcagcaaggttctccaatggacccttaccggtgacaatggcctgaacaaagaacccaaacatagagaacatggccaatctcccgttcttgagttccttcaccttaagctcagcaaaagcctctgggtcatcagcaaggcccaatgggtcaaagctgtcaccagggtagattgggtcagtgacctcaccgaggggcccaccagcaatacgataaccctcaacagcacccattaggataacttgggtggcccagatggcgaggatgctctgggcgtggacaatgcttgggttgccccagtagt

SEQ ID NO: 73967 - DNA, 436 bp, Glycine max
  Clone ID: jC-gmfl02220089b08d1
ggggccaaaaaaaaaactaatcagcccataaaaaaaatatcttttgaaacccttatttaaattatccaaagggggaaaaaaaccttaaacaaaacgttcgatagttcccccaaatttattttaaaaagaacccgaaacgatctgaaaaaagaccaaagaaaaagagagaaagagagtaacaaagccttcctccttaatcgagaggggccttaacattcccatggggaatctcctggtgaaagtccttgggaacctttccattaacggggcatccgacggaaacccccgtcccgagaatttccttaaggctgcccctgagggccttcgccattgacctcgggcttaaaaccctagggatctcgatgacgtcgtctagcgaaaagttgcccgtgggcttgaaggtcttcggtttcttgggggcaccctcgggctcctt

SEQ ID NO: 73968 - DNA, 447 bp, Glycine max
  Clone ID: jC-gmfl02220089b09d1
aaaacaataaattttgttttacaaactgaaagttttccttgctcacagatccctcaaataaaaaagaaatttattcattaacaaatttttaatgcgtgtttgggtattcgacgaaccaacattggggaaaaatgaagtttgcaaaagcatttccatcattccttttgggttaatatacggttgaccattgaatttaaaattgaaattcgggctaacaagatgaacggaaagtcaaacatgcttttaatctcattaaaacttaattattctcaagcaaaagaccaattatcttgagctcaaatttaagcttcaccatttcatcctccggaaaaatcatgggcagaaacttcccattaacaccattctccatagaacctttgggcaatggattccccaaaacaaccccttaatttccaacaccttgaagggtgtagtaaacaaactttg

SEQ ID NO: 73969 - DNA, 453 bp, Glycine max
  Clone ID: jC-gmfl02220089b10d1
aaaacaataaattatgtattacaaactgaaagttttccttgctcacaaatccctcaaataaaaaagaaatttattcattaacaaatttttaatgcgtgtttgggtattcaacgaaccaacattggggaaaaatgaagtttgcaaaagcatctccataattccttttgggtaaatatacgggggaccattgaatttaaaattgaaattcgggctaacaagatgaacggaaagccaaacatgcttttaatcccattaaaacttaattattctcaagcaaaagaccaattatcttgagctcaaatttaagcttcaccatttcatcctccggaaaaatcatggccaaaaacttcccatcaacaccattttccatagaacctttgggcaatggattcaccaaaacaacccctttatttccaacaccttgaagggtgttgcaaacaaactttggggggg

SEQ ID NO: 73970 - DNA, 550 bp, Glycine max
  Clone ID: jC-gmfl02220089c02d1
gattggaaggccttaaacatacctccaccactcactgactcattcttaattcctagagttgcccatatagaactctttgcagcctcacttggatcatcaattctcaacgttttgggaaccaaaacacccccgtttcttggctttgaagcttcttctttaggcaaagagtattgcttaatcatgtcaccgtcgcgcgagtgcttccccaaagttggagaatttggactggagcttcgagactcgaggtttgaagcagatgaatgtgaggaaaacaatggaacattccaattccctggcatgccacagttccaaaatgtagcaggatagaatggtaggggaaatcctgaaggacacatagcaggtggaggaactggagaattccatgtatagggccaagaaacaccaggaatacatggaagttgaggaaggaaaccatgattttggggcactgattgttgttggaaggtgtttttggtattttctcccttggaacttgaaactgtgatggaggatgtagttgaagagtcattaccattttccccacttttgc

SEQ ID NO: 73971 - DNA, 503 bp, Glycine max
  Clone ID: jC-gmfl02220089c03d1
aatggtctggcagaagtaaacccagcggcacaacttccttgcagaaaactttttgttcatatatacataagggaaacaatatttacacctataatcataaagtcaacaatggtaattccctgaacgtaggcatctgagagaagaactgttaaatcatatagcagtcacattgcatgagaaaaaaacaatgttcgtgaaggtcatatttgctatatctatgataatgacgttacagacagaaaggggcttacacctcatttaaaaagaagaagaagcatgactccggcgttagatatttcttttagccaaactgtataccatacaggagattgctactagagtcggtcgttttgagagttggcctttgtaagagctttaacgaagtaattacggatctctggtgttatgcgctgaatcagaagagagtgccctggccttgaactcaatttatcaaattgctccaagataaaaaggatgcatgcatgcctcaatgatattgcgtt

SEQ ID NO: 73972 - DNA, 489 bp, Glycine max
  Clone ID: jC-gmfl02220089c04d1
acatatataatatccttattgaaattaaaaaaaaaacaacagtaacatcggaagattaaaaaacatagcctcttaatcctcccatccccatgaacctgcagtggtctcggttcattgaaccagcccatttaaaggaaaagaccttaattattttttgcataatatattacagattttcttcctcgatcatagacaaggggaggaaaattcaagggtcctgatcatggtgcttgttggcaacattgcactgctttctgacctcaccctttgtgccagtgagagggttgttctctgagagcaaggtaatggctctagagaactccttgaagaaatagtcttggctcttggccattttcttcacataaggcttggtcctcttgtcattggctagttggtgatccactatcaagagacccttgctgtctaacatgtccctgaagaatatgttgtctagaatcatgggagtgccacggtccgttttcacgtact

SEQ ID NO: 73973 - DNA, 478 bp, Glycine max
  Clone ID: jC-gmfl02220089c05d1
aaaaaaaaaaaaaaaaacggtcttttgcttatattccaatttcatatttcccctaccaaattgctaagctgtctttgttacttgatgacccaaacatgacttttctaattaataaaaatttacaatgcaaatacggggggaaccatttctagatttcattgggagccttgcccctgtttttcctctgctatggctcccatttcatgtacttgttcgtctttctctgcttttgaaaattgcgtgtattttggacttttgatagggggattagaattggggggatttggaccaattgggtcaatttttttttctgaaattccaaaatttttggaaactctcaagcaagcaaggatctctcctctcttttaaggatactactaatttttggggctctcccccttagaaaaaatccaaatcccctgttgtgaataaccgcttaatcaatccacttggggcaccaccaggcatgcatgctaac

SEQ ID NO: 73974 - DNA, 414 bp, Glycine max
  Clone ID: jC-gmfl02220089c07d1
accaacaacacttctcagctgagcagttattatatctgactttcacatgaaagggttataaaggcagataaaagcttttacattcaacacacacgaccataagggtcaagcccaagggaatagtatgacttaaacggggacacatttcagcaattttttttaaaacactggaaattttctgaatttgttcaaaatacaagagccttgttactggaaaaccccacatttttgggaaccagccaccaccaccacagtagggggttcgtttgggctgactggattaacttcttttttgacactttgaacattgacattctccaatttaccacagccaatgggttcaaaaacaagatcattgactttttgaaaccttttttgagaaagggacacctcagcaagaagccttcaagcatt

SEQ ID NO: 73975 - DNA, 458 bp, Glycine max
  Clone ID: jC-gmfl02220089c08d1
atcaatcaaccgtaaaaaattaattaaaccaaggattaatgaaataaacagtccaaaacgtctacctcaatcaataatttgaacaaaagggttttcttttcccaaacgatggggcccacaaattcgaaaaagtttgagctgggttagatcaatggaaaaaccccagccacggattgaatgaatcacagcaaagatttggagctacataagagcattgcaggaactagttttccaactattccagttgactcccagatcaaaaactccatataacggatgcaatacaaactcattttcacaacataacggattgtttacaaaacattttccttttatggacacctgggaataattcaataccctatccctttcggagacagaaggtcaaaaaatgtgggcgatttgaccgcttttaagaaagatgctgtaaccaacaaactccccttgcgtttaccatt

SEQ ID NO: 73976 - DNA, 545 bp, Glycine max
  Clone ID: jC-gmfl02220089c09d1
atcacaggaaacactcactgagatgtatacatacaaaatgtgaacctgggaatagcttataatacatagctactccagaaaactggaaggcacgttagtattacaaataaaacaataccacaaagttcggttctagtttgttctcttatgcatcttctataaacaactgcacataacttaaacataacggctacaaaacaacaattataattacaacccaaaacacaatacactacacttgtcttttggtcttctagcagttaatgccacactcctcaacatcaggaccagtgacccttgtggtgaatggatcaattctaacccacaagagtgagaaaatggatgcaagcagaacggaccacaccaccacaatggttggtgttctgttttggcgccccatgagacctttgaagaaagggtatagatggatgatcacccaaaatgcaaagaaaagcttaccaaagaggggtccccaagattggtagccactgatgatggcatacgagatgccagcatccacccccaccaagtttattatgagaagg

SEQ ID NO: 73977 - DNA, 459 bp, Glycine max
  Clone ID: jC-gmfl02220089d02d1
gatacatacacacacatatgtttgatttcgtttatcatcgtggagaacatcctgcttacatataagaggcatgaagaaatctagccatacgacactgaacccctcacaacagatactcactctggtgatgacactaaacaggcaacataccagacgttaggactcatatgatcacatgggcacaaacccattcgaaggcgaaaaaagcatcatgcaatagaatcatgggtactcataagaaccatagatgataatccagaacacgatagaaatcacattatgccattggaacagctaatgcgccctgcctaataggctcaaggaccagcccaagattcctcatttcgaatttctacatgcttgcagaagtaacgaacgaaggcctcagcctccggaacgagctattgcccatgaacggctccaagctcacaggctgcttcaagctcttcatccatgaac

SEQ ID NO: 73978 - DNA, 369 bp, Glycine max
  Clone ID: jC-gmfl02220089d04d1
gattggagtacgaatgacccgatataagggtaataccctacattacattcttatactgcacatggaaagagatcatctttgggaacttacaaagggggaactgagataaatgaggaaggcaataacacatatgtgcggtattcagccaaagcccacattggaaaaatatgtccatcgaatgagtcatgaaccaagctgttactgaggtgtactccaagagtgtcttgtaggggccaatcgccatcttctaactgagaattcatgacataactttgctgcgtgatgaaggggagttggatctctctgaggctgcttagcatgaattagagccatcagaagcccaagatgtatgtacaacatttgatcgac

SEQ ID NO: 73979 - DNA, 490 bp, Glycine max
  Clone ID: jC-gmfl02220089d05d1
ataaagaaaggcagcacgtattatgtcaattgttaagtaagaaaaaaaatatgatatcaatcaggctaacaaaattaaacatgaaatcatcgacaaagaaacttcaaacttttgaattgaaacaccatggcgataaaccctatcactcccaggaaaggaagacacatatttcctttttctacatttctgcactttgtgacgaacttgagtgacacaatttagtagaaagcggtatggttgaacctaatccttggacttaatttcagataccaggaagccaggcttgtctaacaaggcagagaacttttcaacatcagctttgagatcttcaatagccttgttgatgacgagacccttgctgaaatccttgacaagttcgccatgctccttctggatcttcagtgagagagtgacagcacggtgatggaactcaccaatctgctcaaagtctgtgtcaaccaaacccctagaagtcatggctggggcacca

SEQ ID NO: 73980 - DNA, 403 bp, Glycine max
  Clone ID: jC-gmfl02220089d07d1
aaaattctaccatgtggcctgaaacatggtcacatttctaaaagttgggcggtgattacatttcatcatgtgcaaacatgctccttgcaagcatccctttttaaccatgatcaggttctggtagcattttgtatactatgcctccattcagctcttactcaagctttagcaatgatactcactggtgagactaagggggatactgtctttgcatactgtaggtctgtagagcgctaaccatattttctgattccctatgactcccacttagaaacatatgattcatatatgcacgcttgtggcttactggatggatctatgaatactgttctacagtctattaccgtgagtcaggcttttgcttagatctgtgaatgcttgtacaggggtaaactccagaatg

SEQ ID NO: 73981 - DNA, 527 bp, Glycine max
  Clone ID: jC-gmfl02220089d08d1
ggataacttgatattattttattacatacatgcatagatagcctgctctcaaataagtcggcaggaacaaagatagagagattcaacgatcttcaaatttcacatttgccagaaatatataacagaaaagaggggtatgggatatgagttaagttttgatcacattcaactacactatcccaaaccgttactcttaagactttgaacttcacttgtactctaggatcatgttgttctcaggagctaatccaacacaagccctcaggatgttttccagcatagctcgctgctttgacaacgcattcaccactggtgtacccggtggaaccagaggggccttggtcaggtaactaaggatggtcgcaactgggtggaatgagtggaattttccctcattttcagctttaaactcgattcgagtgctgagctcagcaagaaggaccaagtccaagataataggagcagctaacagtgaatcctcacatgtgttgtgcaacacaattgtgttctttccacccatgaatatc

SEQ ID NO: 73982 - DNA, 478 bp, Glycine max
  Clone ID: jC-gmfl02220089d09d1
aaattctgatgtattgtgcatcaaatatctagataatcctcactcaggggcatactgccggtcttgaaacaaaggaaggatcattctcaaaaaacctttgtcgggcgaatcacatggaaactgtatgggccataacatatcaagagaagcggggttccactgatcatgaaccgatgcacagaatcgagctacaagaacacacatgtgtttgttggggccatttgcccatgaatctcggaacaaaggtggcttaatatcactaatgcgtgcatatttgatgccatatgccagggctactgatttaaaaatgaattgacgggattccagaatgtaatgccaaaaactttctatcatgcggtcctgaagaagacagcattaactggggacgggtcatgattgcgtgtgacgatccagagcatacgcatgaatctgagaggctctaaaaccaagtcttttgttaatggtaccataatggaat

SEQ ID NO: 73983 - DNA, 473 bp, Glycine max
  Clone ID: jC-gmfl02220089d11d1
gagagtgaaatgtatcataaggatacatatacttcaacagcttagggcagatgtccatcatatacaagaaaagaaatatagcttcgtatatatatgagagtgaaatgtgtcaaatgagtacttatacttcaacagcttataccagatacccatcgcatacactcaagaaaaaatgtcctacgcctatatatatatatatatatatatgactatctgacagtggagtggcgctttaacaaaaaatttataaaacaaaaactgaaagggcccccctgtgttcatccattttcaagagagtataaactctctaatgtctaaacaattatggataattataattgctacaaaaggatattatgccaacatactgtaattagcagtctttagaaacaagcttatatcccgaggccattcagctgtgaaacatcgctgtcgaacaatatctttagttgctgaagatattgtggaggatc

SEQ ID NO: 73984 - DNA, 552 bp, Glycine max
  Clone ID: jC-gmfl02220089d12d1
aatgagaaatgagaatggatttagcagcttgattcaatagagaggaaagaggggagaaagggattctcttgtatggatacaaaatcctggttatcaacataaattatcaatacaccataggaactagcatgtacaacaacaagctcatatctaacccaatggcatgaatctgaaactgaatccaaaagcaaggccctagtgtaccatgcattctgaataagcacacaaatcattcctgccaacctgatcagcatgtattaactccatccttgcaacctttagtcaacttatagaacgtctccacgcttgtctttccacggtaaaagacctctgtatccactgcaactctcatgtacccatcaaactcaacaggctttccactgacgataagcgtggtctcgttataccactcgcttgcatttccccacagctccttataatcatcaagcaaatgcaccttgtaatttgaccttaacttatcaaagcaattatcataaggctcattggtggcaatatacaaatgcctccaaggctgaaccatccatctgagct

SEQ ID NO: 73985 - DNA, 529 bp, Glycine max
  Clone ID: jC-gmfl02220089e02d1
gaagaaaaaacccaagcacagtatagcatgggaaggtacaaaaggtcaaatgtgggtgtacatgactacatgatttcaggtgtaaatttatttgttataacaattgaacacacaaaaaaagtatccatatcaagcatggcaacccgacattaaatctcgctaaatgtatttttttttcatgtcgccctaggcaagactatgtgatttttcaaatggaaaataatggataatcatcatctaaaggtttctagaagctttggaatcaaataacttgagacaatgcgatttgtcttctccgtaggatgaaatgcatcccaaaacacgtacttttcggcgtctgtgcatgtaagtggattcttgtcactgcacaagtagctcatctcaaatgttcctgtcgaacaacacgccttctctacaacctcaaatccatatgtggaaggttttgtgatgatatcattgacgatggaatatgcatttgccgacaacgctttcaaccgtggaagctccctattaagcttcgtgatcacat

SEQ ID NO: 73986 - DNA, 546 bp, Glycine max
  unsure (1)..(546): unsure at all n locations
  Clone ID: jC-gmfl02220089e03d1
ataaaacttcgttataaattaaatgcaacttaaaacatccctcagcagcaaaggaaatggactaaaaccctatagctgcttgtgaaattcgaaatatctcagactcttcttaccatcaaaacaaaaaacagtactcatcaaaaacaaacagcaatgaaaattgaccaccgccgatcaagaacctagttttgaaagttacggctacatgaaatcggcagaaacttaaaaatataacttaaacaaaacacctaagactctgcaaggataaaactactataaaggagtaaccacgatgatgatcacatgtgctagcaaaattgcccaaatgcaatcacttcttcttggcagcggccttggtgaccttggctccggtggggtctttcttctcaacactcttgatgactccgacagccacagtttgacgcatgtccctcacagcaaaacgaccaaggggaggatactcagagaaagtttcaaccaccatgggctngggtggaatcatcttaaccatacctgcatcaccattcttcaaaaatttgggctcct

SEQ ID NO: 73987 - DNA, 506 bp, Glycine max
  Clone ID: jC-gmfl02220089e07d1
gggaaaagtcattaatttattagcgaatattttctcaattccacaaatatatagttgtataataatactattctataatacaacattgatttgggcaaccgaaaggctaattaattaactacttaggcatgaatttcttcttaaaccacctcttgagcattatttgcagcctttgatgaacgaagtgtatattgacttgccatcactgcatcatccaatattagataaaacgactccttcccaattttctcaacaaacttggacattaggatcttctcgaggggctccagccttggggtgacgggcgttaagtttaagtgtatagtgggggaatattttaattaactcgtccaatcctttaatagcagggagaccaatggctgtcactcctgacaaattaagtatgatgtgctcaactacatcttcagtagagctttcctcacttcgaatatacctcataatcctatctttgacgtatatagaatttgccaagtaaacgggagaac

SEQ ID NO: 73988 - DNA, 571 bp, Glycine max
  Clone ID: jC-gmfl02220089e10d1
aggtaaaatttggctaatgatccaccacattatataaaaagggaacacatgatgataaatactggaagaaagaaagaaattaaataaaaaaaaaaaacaaaacaaaagggatacaaatacacccttgacataaaagcattcttatctacaaattcaagagccccaaacccacggtatttggcttttgccccaaacccacgggtaagcagaaaagccaaaaaggaaggaactccaagaattgaactgaaacactgttattgttttgggtgacacaggacaaatgatcataatttaggtagtggagattattaattaagtgttgctcctgaatgatccaagagctttgattgcagcagctctaagaatgtattgatggtagaatgcagccaccgcagctccaacaaacggtccaacccagtaaatccattggtcgtcccaggctttgtcgttgttgaagatcacagctggtccgaaactccttgcagggttaatgccggttccagtgacagggattgtagccaagtgaaccatgaagacggcaaacccaaatggaagtggtgctacacaggaa

SEQ ID NO: 73989 - DNA, 593 bp, Glycine max
  unsure (1)..(593): unsure at all n locations
  Clone ID: jC-gmfl02220089e12a1
tcgagcaaaaacccaaccatactaaaatcagttgctgcaacatctccaacatttaacatagctatggcacctcctcaggcagacctaaggaagatcggtgcagaaggctttgctctgatagacaagttctatggtccagcaagaaggaacagtgtcaatgatgcattccatgggcgaagaggagatcgttgttgggttgtttataatgtgtctaatgatgtcatggaagattctgctgcaattggcatggaggcaacaactggccattttgctgcgaaatctgctatgaattatccaaaggcaggtaaacccgaaattcgttattggggtagacccttaaaattttaagtttttttggcttatgcatgttatcaatatcaggtgtcttcaaatgggtctgtatttcatgttagcttactcttgtttgatatatacgtgtataaaaaaaaaaactcggagaccttcatctatatttatatcaaggtcttctgtagtttgtggaaggtaaattacatatgtagttgaataaagtactcaagtatcaagggatgtaatgaaactactnngtatgcatggactactattttttttag

SEQ ID NO: 73990 - DNA, 470 bp, Glycine max
  Clone ID: jC-gmfl02220089f01d1
aaaaaagggggccaccccaaaataattaacccaaaaaaggcccccccaaaaaaaaatccgtaaaaaaaaccgccttaaaaaaaatttcagggcccaaaaaaaatttgggggcaaaaaaattttttaaacaaaaaaacccgccaaaaaaaacggggccctttggaggcttaaaccccccaataaaacccccaagaaagggaaacccccccccccatccaaggaaatcggacccctttttttttaaagccccccaaatttttgggctctccccggaaaaaaaaaggcccccttttttttgggggcggcaaaaatttctcgtggtaaaacatattttaccacccaaactttttggggcccaaaaagggggaaaaaccctcttgaaaacccgggagggaaaattgcggggggggccaaacacacctttccctccccttcgggccccttttttaaaaccccggggggccccttta

SEQ ID NO: 73991 - DNA, 589 bp, Glycine max
  Clone ID: jC-gmfl02220089f02d1
acaaacaagaaaaaccaaatcatgaagcatgcttttcttattgaccttataccgtcgtcaggtacacatggaaattatacatgaacaatgagtgtcagtaacacattcactaacactcttttttaacacattcttctattgcttaaaatttaggtggatcctactaatttgtgaacaagacccaccaaatagaaaatgaaactcaccggacttttaactaacaggagatgtatgtcacaaagagtgttagggaaagtgttgttgatacatgaatatatatatatatatatatatatatatatatcatcatcatcaaaagcgtcagattgaataacaaaaatgcttgcagagtcagtcatctgaagggttcaaccggagcggattcttcaagagagtttgctgtctcaaaacattctgcagcttctagaattgtaccctcatccttgtgaaaaataccaagattataccaagcagaagcattaaatctgtcatgccgtagtgcatccatcagaaagcttctgatagcaggatttgatcgattactgcaccatctaagaacaaccgcagcagagatcaagctagggacatg

SEQ ID NO: 73992 - DNA, 328 bp, Glycine max
  Clone ID: jC-gmfl02220089f04d1
ggagtaattaatttaacctcttgtgttcataaaattgccttgaaatggtgtcacttgcacataggtttggataaattgcaaaattggatattcccatgtatgacagctgacaggaggaagagcataaaaccgagatccaggtgtcttccagtatacattcacaaaatgtaacttttctaagatgattggagtatctgcttatcatctaggaatgcgccatggaatggtgccactatggcattattacatcctatagtgccttacatcttccatagatgacttgctcatcgtgactcaccatgagaatgcctgcttggaacagcgcatg

SEQ ID NO: 73993 - DNA, 570 bp, Glycine max
  unsure (1)..(570): unsure at all n locations
  Clone ID: jC-gmfl02220089f05d1
ggaaaaataacgaagtttttttatcttcaccatctcatcagacaccacagctaaactatgttctgtacctaattggaagagagcaacattacatgtaaaatggacagactaggaacacatgaaaaaaagactttgagaacttgactcgagtggaggtggaagatatacaagattatgcagaagccactatcttatcaactccaatgtcttgtccactccatatccgcatgcgttcagctgtttgttccacctctttcttccaattggatttgtaaagtatcaacaagagcagcaaggtctggagaacaattgcacatatcataccaccccaaagtccctcaacccccaaatttgctgtataaccaagaacgaaccccagtggaagcccaaataagtaataacaacctatgttgatgtaggccaccagggcttgccacccaccttcaatagcaacacctgaaaccactggttgaacactgnttagaaccattgtcacagaaaggaggtatcctagcttcgcaacggccttatgcaaaacctaactggttgaaaaataatggcataataatc

SEQ ID NO: 73994 - DNA, 537 bp, Glycine max
  Clone ID: jC-gmfl02220089f06d1
acctagaaaccaacatggggacatagtttatacattgacaaaagttgttgtagtttgtgactttgttacattattatcacaatattttctctcaagtgaatctaacatgcgattcatggaactcgatgaattcggtatggaaaacgcaagattaccaaaagcttaatgggatccatgttcactggagctacctctagacaaacttctcaacttctgccagaactgccttttcttcccaataattagaggccctgaacgagaatactgcctgaacgactcaaattcctgacctgaagtactgagcaactctgatgctgataatcttaccttttcttcattagattgatagccagaaaaagttttttgacactctgaaaattccactctttcacctgaagcttcggaaaaaattcctttcacatcggttagaagaccctcttgagaacccttcgattttataaagtctgtgttctcaaactcactgcatactagcttcaaggccttgacaacttcttccattgaaagacgttgagagac

SEQ ID NO: 73995 - DNA, 422 bp, Glycine max
  Clone ID: jC-gmfl02220089f07d1
aagattaaaaaaaattactaccttttataaagggttttccaacagcattttgccattttgacatggtgaaaaaacattgggaaaccctatttttacaaggggagccaatggaataaaggggagggatctgctatatatccaaggtctggaaaatcaatggacaagcggtccaggaattttagaagccctatccttaggttggggacctgccctttgggccttcacttgggcatgccttacagagccttttgatcaagcctgtaattctccttgaggcggcgaatcaggcttctgaaccaatcacccgtttgggcaaacttgttaacagatggaaggggaggcgggctcatcgaatttcggacagaatcgccttttgagagggggggccttgttttcccaataaatgaaacccaggctttact

SEQ ID NO: 73996 - DNA, 577 bp, Glycine max
  unsure (1)..(577): unsure at all n locations
  Clone ID: jC-gmfl02220089f09d1
gaaccaacaccgatgcaaaatcctattagagcaaaaatacatcgatgcaaggaccaaataacagcattacaacattcacgggcaaaaccacaaacaaaactaacagaaattaaatctaaagtagcattgttcacaagagaaaataaattcgactaagttcaaagtaaaataattcatgaaacaaatttaaagcttgtcttcaaactcggagagaggagtcatctgttccttcaagcccttcctcttgcgaatgtcagtgacaagctgtgcagcttgtgatccagcctccaatgggtcagaagacatcatgtcccagtgatcaaacacacattgtgggaaggcctggcctgatgttgcagccctcaatgtgctcgagaaaccaaaggactcgatgacagggaggtatgccttgatgttgtatagtggggtacctggcctctgcatttcctcgaacacgtgtccacgcttctggttaagaacactgtagattccaccaagagcttgttcaggagcctgtatttcaccaggtagacaggctcaagaagcctgggttnggcagtaatctgggaagcataga

SEQ ID NO: 73997 - DNA, 563 bp, Glycine max
  Clone ID: jC-gmfl02220089g02d1
aaaagtgaagttgactgcttcgatgtcaaagaaagacaggaacaaaggtgtacagtctatcaactgcaacgattttcctcaagatatacagattttcctacttaacaaactcaattttgtgtgcagctatattcggatggttgtcgtctaactctacttgctcacttctgataacctctttacagattcgtacaagtctaaacactccaaaaattcagcatcaaactgagaccattatgtccttaaaaatgcagaagatgatcgtacgattaaatttttgagatgtctttttactatagttcggccagtattgagaaagacgtgccttttctgttcctgtttttgagctttataagcagctgtcaaatcgagctgcttaagtgatgggggcaaagagccataataagtcaacaggtacatcaacactgaataaggcaccttcactaatctgatataatttcctccaactcaggatcctcgaagttcagagcatcatagtccgaaattgttcattaaatgtacccttctctgctagatcattctgatcatcatcatcatcatca

SEQ ID NO: 73998 - DNA, 549 bp, Glycine max
  Clone ID: jC-gmfl02220089g03d1
cttacagggcttttgctgataattattcctgatggtgctctaggagaactcctgctccggtgacttcgagaatgggatcttacagggctcttgctgacacttctaagagaacgagttctcgcagggcttctactgacacttctaccatgcctgcctctcactgggcttctactgacacttctccaattcctgcctctcactgggcttctactgacacttctcccattcctgactcttactgggcttgtactgacacttctcccattcctgactcttactgagcttctactgacacttctcccattcctgactctcacagggcttctactgacacttctcccattcctgcctatcacagggcttctactgacacttctcccattcctgcctctcactgggcttctactgatgcttctgcttggactcctgctgatgcttctggcgggacttctgctcatactcctctgtgatggaggagggcttctaacacttggacttttgcttaatcccctttctggagaacacttgggctctagctaatctcctttt

SEQ ID NO: 73999 - DNA, 431 bp, Glycine max
  Clone ID: jC-gmfl02220089g04d1
gggagaaagataaattaaacattggtaattgccaatttggttattgtcattactggacattggccaaattttagatcaatgaatcaagaaattcaaagatacattggggttagctaccgaatgtcatttgaaagccacctatgggaggaccactcggaacaattttgggacatgttatgggtaaaactctttatggtgaagcttagacttaaaagccaaactggttgaaattgctgtaatcaagtttattcaaccgtatggcacataataaatgctttggcaagtcttcggccttggttccctgaattgtcaaaccaaaatccaggttacatagcttaagtctttcaatgaagccttaaaatacctttcttgcatatagctaaatctgaggacatccaaatttatttcaaggtagttttctcccaagaaaa

SEQ ID NO: 74000 - DNA, 481 bp, Glycine max
  Clone ID: jC-gmfl02220089g06d1
ggaaaaaataatgaataatagaacttttaaacctggtattgaccaaggttaataatattacattttctcttcattagtcaaagataaattcacaaaactaagagttaacaagcaaaactcgatcaaaaggaattgtacaaagtaaatggctgaacaacgttccttcccattaacttgtatctggtggggccctattattacacttgaaacatttacgcagcgatatttttctccccacagagaaaaattacaagatgaacccaaaaattcgataaccaattgccataagaaacaaaaccaacaaatttttccacttcgaattggtgtccggggagatattggacacattttggagagcttgaaacccaaatatgggccttacctgccccactgcaaaggaggttcctagggactcattctccaatagcccctgaatagagtaagtttgaaaggctatatatgacattggatacacccacat

SEQ ID NO: 74001 - DNA, 500 bp, Glycine max
  Clone ID: jC-gmfl02220089g07d1
ggtatacgaaactttcattacattaatgggttgttgttcatagggtgggagagaaacaactatgtacagcaacaactacaaggtgggattgttttaaaaaaaaaaaaaaagcaaggtcgatatcaccctatatcacctcactcaaaaacacaattgattaaatactagggattgtataactgggcaggcatatactactaattccgggatttccaaaattggacggatactactcttttaatgccatcttatatatttgatttgaagcagtcactgataagcagcagtcagcctcgatttcatcttcaagttatgttttccaactggatggatggcttcatgacagttccttactttccatcccagaatctgaaagctatggaaatcaatctactaatcattaggcgtcaaggccattttctgaattgaactcttgatgtggctgacatttaacaacttttgcatctgcaccatcactagccatcaccgactggttctct

SEQ ID NO: 74002 - DNA, 488 bp, Glycine max
  Clone ID: jC-gmfl02220089g08d1
aaataatctgcattttttttacgatcaaaagaaaacaaagatcgaccatgcttggttgatagatacaccattgcaaaacgacagtgtccatcaaagccacattaccatgctaaatactagtctccaatatcccctaccacaacctggtatggaatttgttgtagccagcaaaaatcaacaatcaacctcccaagtagaagctttaatcaaaacttttattttctgccagatcaaaaattaataacaaagcctttcctgagttttttcaaatccagctgatttttctcgctcctcatgacactgttgatgccccactaatggtctgtttagccacatatatttgctttacctttgttgaggaaaagttcttatctgatcccagagattgatttcttccttggtacactctacgatgggaccattcgcccccagaattatttctctgagaaacaccacctctctgataattaccatgtcctgaggaatgg

SEQ ID NO: 74003 - DNA, 596 bp, Glycine max
  Clone ID: jC-gmfl02220089g09d1
agaaaaactaaatccttagtatttgtataattactgaaagttacaattcagcgagtgattgtatacatgaaacggccatatatacaggactcagtactagttagcagctggaggtaagccacattggcaaatcaacataacatttataattgcttagaatagtcacctgaaaagagaaaattcaaattccaaaaccattctaagatatattcatgaatcataaacatatcatcacgtatctggcatgacgttaatagtttggccttccacatatggcctaatgaaagtcctccgccaccacacctgaaaagctctctgaagattgggacagccatcaccagttttcaagaaacttgcaacccatgaaagcaaaatactctgctgatcctccaaaggcaaggcgagaattgtccttgcaattccttcctgcacaagtttcctatcgaatgacccggacccgtgctgcaaccagttatagtcattgattagaggctgtagccatgtctgcaacaagaactggcgtgtgtactttgatggcaaaacctaccctcttccaatgccaacatatagtctttctgaaatgcaactgacatgat

SEQ ID NO: 74004 - DNA, 556 bp, Glycine max
  Clone ID: jC-gmfl02220089g10d1
cacactaaattagtattatatcttctaaatacatccctcaatcgtcattccttaataaaaaagttggtttattgggaacaggttttataaaagatattggtttcttcacctttgcgtggattgttgacaaaatgttaacatcaaatccattgagttgataatctggaataaactcagcttccaacctaagtactgctttgtctttatctctaaacaattcttcaaagtgctgcctcgtaccacttaaactccattcgtatctacctcaaaggcttaaagcctttatcatgcatcctccaacctcccattccctactccctactcttcaaatagtatttattcaaataacagcagcaaatagtaacagtttaacccataaccacataaaaattcagtgaactggactccaaataatctaaaaaagcataaacagataaattaaaataaataaacagaagaaagccttgttctttctttaaccaaagaaagagaaataatagaataaagaaataaatgcgtattccatgtcaaccagtggtggaggaggatagccact

SEQ ID NO: 74005 - DNA, 441 bp, Glycine max
  Clone ID: jC-gmfl02220089g12d1
attatattatctttttttttttttattactttggtttgggaacattttttttatctttttcaaagggggaaccatgtaaatcactgagtagattcaccgccgaatgaacccaacttgaaaaccctaaacaacagcggcaaccaatgcgtaacagacacaaacaccaacatcttatcccagggagccttctaaccctctgtaagcccggataccgcaaagggcctgatctgaacggagatgctcctaaaaaagaaacccaccaacacagactgcgaacagggccaaaaaaggagggggaaccccggaatggggaaaaaaacatcttaagagcttgccaccgttgaaagcaaggcacgaagcctgcaaaatttcccctaaaccggaagcgcccactggcattacaggacccaaaaacctcaaaaactgaagccccaagggggg

SEQ ID NO: 74006 - DNA, 498 bp, Glycine max
  unsure (1)..(498): unsure at all n locations
  Clone ID: jC-gmfl02220089h01d1
gacagaaacaaaaaccaaacttttccatatgtaaatatttttagcatagaattggataacattaacatcatatttctttgaacagattctcttgtaagcatcatttcacatgatatgataaaattacaacaaaaattctgataaacataactgggcaaaaatgaaggaatgcgctttgagcaagaaccataaccttatgtcggttattcaggggaggacattacaactgataagtacaaattgccaacccaagatgtattccaatcctttgtgactatagctcttctatctccaattcaaatttttaactcttctgatcagggtggaatgggcgtataaatgcagaattcatttgccaaacttttagtgaggctgtcacagtggcctcggtagcattgttgaacaagaacaacctagcagctccatagattgcctttngtggataaacccgagatgtcacaaccgtccttccaccttgagcaaagctttcaacaatag

SEQ ID NO: 74007 - DNA, 426 bp, Glycine max
  Clone ID: jC-gmfl02220089h02d1
ggctatatatatatatatatatatatatatatatatattatgggacaaattttcattttgaaaggccaaatatatacaaaaaacaaaaacataaaagcatttcaataacaatatatcaactatgctccctgcttttatttcttctttaacacccttttcttaatagcttttttttttcttctcttattcacgccaatgaacaatgagaatttttctccctttgcactaggaaatctataaacaacttgtagtgggttgtccaattattccttggcagtgctggttctttgccctgatgatgccattagcacagcaacagccacaataaacataaacaacatactccctagcagtatatatggccttcttgatgaatttctggactccccaaacagaaccacgccccaaaaagtgcttacaagtgga

SEQ ID NO: 74008 - DNA, 408 bp, Glycine max
  Clone ID: jC-gmfl02220089h07d1
caagcaaaattcgcaaaataataatttgaaccaacaccgatgcaaaatcctattagagcaaaaatacatcgatgcaaggaccaaataacagcattacaacattcacgggcaaaaccacaaacaaaactaacagaaattaaatctaaagtagcattgttcacaagagaaaataaattcgactaagttcaaagtaaaataattcatgaaacaaatttaaagcttgtcttcaaactcggagagaggagtcatctgttccttcaagcccttccttttgcgaatgtcagtgacaagctgtgcagcttgtgatccagcctccaatgggtcagaagacatcatgtcccagtgatcaaacacacattgtgggaaggcctggcctgatgttgcagcccttaatgtgctcgagaaacc

SEQ ID NO: 74009 - DNA, 417 bp, Glycine max
  Clone ID: jC-gmfl02220089h09d1
aaaaaaggaaaaacccactataaaaaccaccaaccaccattatcttttccccacccaaacgtgaaaaaaaaacccggcccaacggaaaggaaaaaacccctccaattccccctaagccctaaaacaaaacacaatcacacttttaaaacccgaataaaccctccccgcgttccccaaaactataaacccccaagcccaaaatcccccccctgtttataaaacaactcaatttttaccaacccccaccaaattaaccaattccaggcttaaaaaaaccccccaagggcacgccaacccaagcccccaacttgcaaaccgccctcaaaacggatcccccccttccggctttggaacccgggacccggaaaaggccctgccccttgccggcggcaaaaaaaaaagccccccccggaaaaa

SEQ ID NO: 74010 - DNA, 586 bp, Glycine max
  Clone ID: jC-gmfl02220089h10d1
tcgcgatctagaactattagagactgaaataacaaaaaagcaatggatctcagagagggtcaaactcaaccaattttggatcctaaccaaccctctcatgtatatcatctggctttggatattggaggatctcttgccaagttagtatacttcacaaaagatgatgatcatttggttgatggcgaggagggaatatctcatagaaaggctttggaaaaatccaatggcagtaagcaatatcctgttctaaatgggaggctcaattttaagaaatttgaaacaagcaagataaatgattgtatagagtttatcaagtccatgaaacttcacattggaggtagtcagccacaagaaaatcctggaagtcagtcaatagctattaaggccacaggtggtggggcgtacaaatatgcagaccttttcaaggaaagactgggaatcatttttgacaaggaagatgaaatggattgtcttgttgcaggagcaaattttcttcttgaggtggttcaccaggaagcatttacctatatgggtgatcaaaagcaatttgtgcagattgatcagaatgatctgtatccctatcttc

SEQ ID NO: 74011 - DNA, 534 bp, Glycine max
  Clone ID: jC-gmfl02220089h12d1
caagaagaaacaagcattaatagaatttttatttctcacacaataaatacaagagattctgcaaactgaaaaagggatttcttactaaagcaaactcaaacaagaacaacttccactcatttggcatctaccgtagtagaacaggatcaaaagcagctctctgatagaacacacgtatgtattatattgaacatcttgcacagtggttcatttctcacagctattgcaacttaaaatacttgcaaagcttctgcaaattccaaactttctttttctcccttctttatggatatgacaaagtgatcagatcatgaaacaataatcaatccattgaatttgaatctgatttttggtttggatcgatgccaccattcttcatcttaggaagggacaacaaataggccaaagcctactaattaagcgcttaaaactgcattagtggttggtttaagtgtgatgttagtatcatcagcttgattatcaaagggtgctctttgtacgaagaagcatgccccaataacaatgtagcacagc

SEQ ID NO: 74012 - DNA, 480 bp, Glycine max
  Clone ID: jC-gmfl02220090a03d1
actcacgccaaataattcacacatttggtgtttattttttaaattatacaccatgagatccggactaacgcggcaaatcaggcatgctaaatacagttttggctaccaggaatgaaataagacaacttctccaggaatgaaaaaaaaaataaaaaatcttaccatgcattatttaaatgtgtatggcaacgattattgcattggtaaactaattcaattggataagtgatgccttacaaagaaagccattgtagcacgcattcagtagtacaacaaagcattagattttacttcccccagaaacaccaaattaaacttctggtagaaaaaatatatattgtaatcgagtttcccaccgttgaggccgccggaaatataactgaatagtagcattattgtgaggagacatcagtcatataactgctgccatttgttgaatataagtatatgccatcaaaaattatattttgtgaaccttac

SEQ ID NO: 74013 - DNA, 464 bp, Glycine max
  Clone ID: jC-gmfl02220090a05d1
ataataactacacatatttatataccttcttctgcagaatgcagatatatagttttctgatacaaaaaccaagctggaattaagcctgagatagacacgattcatggatctctaaaagcaatacatgaacgtctggttgaacacataccaagatgatgatgatgatgatgaaacacagcagaaactacacatacaacaatttcgataccacactaattaagcacatggatggagtatgagatggtcacacacatcgaacttggtggatgcagttgatatttacatatggttgagttggttgattcaaaaggaaagaagaaccgtgttctacacaaacccttcagaaccctttttttttattcatgattgaagcagcaaaaaccacaccaacacataggttggatttttttcttctcacgtacacagcaatcatgatcatgtgcggcacatgcatggagcacacc

SEQ ID NO: 74014 - DNA, 453 bp, Glycine max
  Clone ID: jC-gmfl02220090a07d1
catatccatttggtattatcgttattatcccacaggtatccaagaaaagtcttggcggcatccaagcttggaaaatacgttggttcaaggaaaatctgagtcaacgagtcagccgaatcgcaactcaacccaactcggttaccgttagcctctgaacttcccatcaccaccgtcaacacctgcttatacgcgtagaagaatctcttcatcgccgtctaaatcgcctgcattgcctgcaacaagtgaaccttctcgaactcgctcttcgaaacgtagagcttcatcgccgcctcttgaatccttggtcctccctttggatccacctacacctgcaatatctgcggcaccttgtgcctcagatctctgcacatcttcgtcagttccactaactcattcgatctgaagcagaacgatgccgtttcgccgctcgaggatttcaccgagagttgattc

SEQ ID NO: 74015 - DNA, 519 bp, Glycine max
  Clone ID: jC-gmfl02220090a08d1
gcgggccgccctttttttttttttttttttttttttgagagcaagaaacaagcttacttcacaagattatacaacttattagttaagcaaaaattactcatgctctcgtagaggtatttccagatcatgacagagacaacgcaatccggaagcaagacttaatagaagtactactaagtaaaaaataaaataaaagcccttcatagttaacatatcctttaactttgtgttttcttgaatctaaagcacaataaaaacattaaacacccatagtggatactcaaaagtatagtgaactctttactttgccaatgatccaagctcatggctcgaagttctcatgttcatcttcaaactcctgctggttctggttcccgttgtagttgccacctctgttgttggaccagttgttagtgttcacttcccttgatgagtcaccatagtttggtggattgtacttctcggcggcaacgtcatgaaagtattttccacccttcaaaaaccttgtgtcactcattc

SEQ ID NO: 74016 - DNA, 510 bp, Glycine max
  unsure (1)..(510): unsure at all n locations
  Clone ID: jC-gmfl02220090a10d1
ctcagacaacccctcatttttatttacagaagcagcaacaatgtaaaatgggaacggccatggtggggaccgaatctaatccgccaaaattagctagcaattgtctctacatgtaccaaacataacccagaaaaaacacctcccaattaaataaatccaaacaccttctaccccctaaccaaatatcccttctatccctacaaaactgctggctgctttttagctctctctgaaacagcctaaaaaacagattaattttttaagaaaggaacatttgtcaatcacaagaattgcatttacaatcaatttccctcaatcaagctcttcaatctattacgggcctcttcagacaaactgcaagctttgaatcttctccttnggggtggacatgattcaacaatgctttcaatgggcgacaagcatacaacaattacagtgagattatctgatgtatttaggcgcaatgcttccttgactagctctccggcacattgctgtgggtcatcatgc

SEQ ID NO: 74017 - DNA, 518 bp, Glycine max
  Clone ID: jC-gmfl02220090b05d1
acaaagtgaaagtgagaacacactttattatatgaaaaccgagagcatccaaatacaatagtgcagaagttcaggcaataattacgcatagacatgcataaagtctatgttattcagaagtacaacatagataaggaaaccacaaactctttttaattagatagagatactgttgggaattcctttgaaagtcaacccttcctcacttgaacgatggagcaaagtgtatggcagctgaactggcccagtccggtttctcagacttggatcactgttccttgcattgatttttccttcaattccagtcagtttgcttccaaaccttttgaaagcttctaatgccttcttatcagtagtccaatttggagtctccctctctccaaggtatatctcatcagaagcatgccttgacaatatctctatcactgaaagatcaataagggtctcaaacttgggtgtgattgttctcagataagccttttgaggattcttcaccatctcatcatactctggggttc

SEQ ID NO: 74018 - DNA, 495 bp, Glycine max
  Clone ID: jC-gmfl02220090b06d1
cgattaattatggaaaggtagctaggcattaatctgcgttaaaaacagaatccattaatagaaaaataattgtccaacttcaactagctcaaacactcgagtctccaaaaacaggagaagatctacacccctgaagcaaataatcttttccttttcttaaaaggaagaaaaaagaaaatcctgaaaacagagtgcacctaaaatgaaactaagcccaaaatttatctggggggatgatgatactaaacagggcgccactttaaaataaagattcaaccatttcaagtttctcgccttggcctccgacgcgcagcattagatgcttcctctttctggttctccttctctttggttccttcattctctccactaccttggttattggaagcttctgtgcgttctggtttcttctccacctttgcaggtttcttgccaccaaatatgagtctgaagaaaattgacacgaagacaaccagaacagctacaagaattcca

SEQ ID NO: 74019 - DNA, 446 bp, Glycine max
  Clone ID: jC-gmfl02220090b08a1
accatcaaaacaaaaaacagtactcatcaaaaacaaacagcaacgaaaatgttaccgccgatcaagaacccagttttgaaggctacggctacatgaaatcggcggacacttcaaaatataactggtaaaacaaacacctaagactctgcaaagataaactactgtaaaggaacaagtttttttgaaaccacgttgatgatcacatgtgctagcaaaattgccaaaatgcaatcacttcttcttggcggcagcctttgtgaccttggctccggtggggtctttcttctcaacactcttgatgactccaacagctacggtctgacgcatgtccctcacagcaaaacgaccaaggggaggatactcagagaaagtttcaaccaccatgggcttggttggaaccatcttaaccataccagcatcaccattcttcaaaaatttgggctcct

SEQ ID NO: 74020 - DNA, 334 bp, Glycine max
  Clone ID: jC-gmfl02220090b08d1
cctaataagaaaacaaataattccaattcatatatgaacatttttgcctccttatttcttgaaaatgtggaattggaattccccgaggaattccgatctcatttcctttggcttcaggataggcctaataagaaaacaaataattccaattcatatatgaacatttttgcctccttatttcttgaaaatgtggaattggaattccccgaggaattccgatctcatttcctttggcttcaggataggcctaataagaaaacaaataattccaattcatatatgaacatttttgcctccttatttcttgaaaatgtggaattggaattccccgagg

SEQ ID NO: 74021 - DNA, 476 bp, Glycine max
  Clone ID: jC-gmfl02220090b09d1
cattcaaagtgcagggagctgctatgcctatatccctgaagccgatactgatactgatacatagctagctagcctagctgtagatcaagagaaagaaattgaaagcattacaacttagtgcaagatttagataagcctataattaaaatcaacttattatcatatcataaccaaccttcaaaatgagaatcaaacctcttgaacttcaacagcactggcaactggtttaacttccttgagttcttccttaacttgtttcacttccttgtgttcttcctccttttccttaacttccttaactggctcttcaatctcgaaagccgagacggggaatgtcctgaagagccccgaaggagtcttgaaagtgatcttgccagtgggaggatcatcaacaaagatctcactgagtgtgatccaaaccaagagcttcttggttttcacaccagtgagctttttgatcttaccaacctcaacat

SEQ ID NO: 74022 - DNA, 506 bp, Glycine max
  Clone ID: jC-gmfl02220090b10d1
gaggcagcaaccacgcgtctgtaaattgctattcaagcattgaacattaaagtagaaatttcattgttttatctaacttcatttaccataccagttcccctaataaaacatgaacacataaactgaaattaatgcctacttttgtggcgaaccaatataccaacaaggtgcttaatatttgttttttctgctgctatgctcatcaagccaagatataatatcaccaagcacgtgaaatatagtttcatcaggttcaccttcaagtagagtatggaaagcatccttatagaggcagagtttcttgtccttcactttagctttctcatacaaagccttactagctgatggatcagtaattatatcagcctctccatgcatgatcaacaatggcagagaaacctagcaattgaaattcttcagtggatttcattgacacacggaaaattccaccagaaacatgtgcaatagctcaagaaagtgttaccttaaaataacatgtgcaatag

SEQ ID NO: 74023 - DNA, 426 bp, Glycine max
  Clone ID: jC-gmfl02220090c06d1
ggaaattaaacaaattggttacattttaaaaacattcacattaggggatcaattcccgcttttttttaccaccagcaaaattccccaacattttcaaatacgacaattatcaaataaaaattttaaaaaaccccgagaaaaaaaaaaagggatttcacttcgaatcccccttgaaaaaaaaccctaaactctttttttttttttaattaacccacattaaagctttaacgggaacccaaaaaccaaacttaaaaccaagggaacaacaccaccaccggaccttccgccgttacgtttaacggggtcgttactattattggggggcacattggcagggttatcgggagaatcagcaggggccttaaaatcatccgccggggcattaaccgccttttttttctttttccccttttttgccggggcaag

SEQ ID NO: 74024 - DNA, 323 bp, Glycine max
  Clone ID: jC-gmfl02220090c08a1
gggggaaaaaatttccccccccaaaggggggggaaaaaccccggggaaaagaaaaaaagggggcagggcgggcccccccccccctgtggcccccaaccaaaaggaaaaccccccgccctttcgggggccaaccccccaaaaaaaaaccccggggggggggggggggcccccccccctggatgaacgggggccccccccggggaaaaaatcccgggccccggggaaagggcccccggcctttttgagggaacccccccggaagccccgggggggcccaaacccccgttccccaggggaaaaaagggggccctttggcccccggg

SEQ ID NO: 74025 - DNA, 451 bp, Glycine max
  Clone ID: jC-gmfl02220090c08d1
cggcggccgccctttttttttttttttttttttttttttttttagaacttttatgaagagggctttcttgtttctccataagcacttcattaagcatttgtaaccataactcttcaaagggcttgtgaaaactctgctgaaaccaatccaaaatttctgaaaataattcccttggattctccttacacaccattctgagcatagcagagctatcaatcagcctgctctttaacttgctcaaaagatttcccacccttttttgaccaaatgcttctctcttcataatactttcagggggggctgacatgtattttctaacagattttaaacatggacacacctggcctttaagcaaagcataggcaaacacttgcacctgatgttcgccattgctaatgggcaatgaatgctttcgaagctcccaacaggaacgcccaaaggttgggattac

SEQ ID NO: 74026 - DNA, 463 bp, Glycine max
  Clone ID: jC-gmfl02220090d03d1
gtagtaaaacaccttctattatttgaagccacaaagttcagcagaaccacaatgaacaccaggaaatattaattgattatctcaagtgttttttttagtagtgagacaatgtaactcaaaattataaaggataacaatccaatatgaacaagataaattatttgattatatcaagtcatagcttctcttcaagtggagaatgcttaggttctcagggtgtgtataagcaggttccatcatcacttcttgcagttgggtcgaagtttgaggcatttggatcagtacaaccttcaggaacgggaatttttacttgctgggctgctttgccatagaaagttcctcttttgatggcatcctgattagcatcaccaagagcagcctcgttcaagtacttgtctgccagttgtactctcttcacattctcttgttcttggacaagcatgttaccatactccaagagctt

SEQ ID NO: 74027 - DNA, 479 bp, Glycine max
  Clone ID: jC-gmfl02220090d04d1
aaccttaaaaagcttgaaaatgaccctccatctttatttctttaaaacaccaataggccatttcaaaaagatacgagcgtgcagacaatctaaccgggtttgacagagaaatgttaactaagattgtcttatcttaccctcattttacctaataatctcaaataaaatacatcattaggtacttgcgtgttcgggtcgtcttactcttgcactgctgatgttgtgaggagcccgttatattagttctgatgccgcgatgattacaagtacacagattttcacacactaattcccacccagatgaacagaagaccaaaaattgatacaaaaatgatccaccggggcttcttgtcaccatattatcatatcatgtacaaagaaacaaatacaaggatgcacccacattttaacaacaaacaccattttcttgagataaagcacaccagacatggattcatggcatgcgattatcatctgac

SEQ ID NO: 74028 - DNA, 412 bp, Glycine max
  Clone ID: jC-gmfl02220090d05d1
accaaatatattgaagtactgttggatatcactgtagactgtctagaatctcaaccaaacaggcaaacacatcagagaaaccatactgaacactactacttcactgataaacacgagctgatcacttattcatataatagcattagtactatgaaaagccagaactctttactccagctccttcagaaaatcttgattgtcaaccaaaacagttttccatccatcaggatctaagaaagaagtgatctttgtgttaaggccaggaactggtcctggttgccgagtaatcttccctccaagctcttgtgtgactatgttgacaacctcagcactcttgtatacatcatcagtaccaatagcaacctgtgcataagcatttcccttggtgtattcagtgacaccataagtatat

SEQ ID NO: 74029 - DNA, 402 bp, Glycine max
  Clone ID: jC-gmfl02220090d08a1
ataaatagttgaatccaaacacttttacaagggtttttgttgaagcaactttggtataagcttcatatttgtacagaaaaaatctgtatataaattatacaaacatcaattagatttaagagtcaacctgaaggggcacagctactggtaattctgctaaagagcagcttttatcatataaagatatgaacataaaagaactatcagcatttccgaagagaaaatgaggagctatgcctttaaagctttacccgccaaaaaaaaaggcaaaatggaactcaaaatttcattttatttaattttttggtttacaaacaatttcaaggacccattagtattctccctatgttctgagggcaaggataagcagaatggtttaaagatggaccatcacttggattt

SEQ ID NO: 74030 - DNA, 480 bp, Glycine max
  Clone ID: jC-gmfl02220090d09d1
atcaaagacgccccataaggggccagatttattcagttgcccgcttatcttgattcccttattttgccacaatcaaacacacaagtgagaatgctttaacagtttgagacttgggaaagtccaaatgaactaccaagtaagaatacaattatataacggaaattacagcctgggcatttgccttcaactacacaataacttggacttttaaaatatttaatatcattcttttgtgacagccaccttcgccttcgcctcagaggaataatcatgccgcaatttgcgtgaaagttggtataagcctgtccctgccattgcaatgtttacactaaacaggttccaattttttggggtgattacagtgctgtaacgagaccagataattccagtagctgtgaccgctatttgctgaggataggaaagtttctcgggtggttttgagaaatcagcaatgttggcaatgctgatgccccaattaaa

SEQ ID NO: 74031 - DNA, 413 bp, Glycine max
  Clone ID: jC-gmfl02220090d11d1
agactaattcaaaatattggacccatacaatcacaaaatacgatgggaaagcttggtatgattcctagttattacaacaagatggcaaccatcaatcttaatcgagcttcaattttgcaaaaaggttaaattattgaaattatatcaccaattaaagaaatagctcagaaacatacaccaacaaattgtctagttttaaataatcaaaggtgcaatccatctaactcaggagaaactgactgaagggggttaaaaagaaatgataaaaatctgaagaatattattttccttttctgccattgtatcaacacaagcctttgttcccatttacatgtcttggggatcttgattatcatcaccccctctgttggatccttcttgatcagttccaaacgtccttttgctcatgttag

SEQ ID NO: 74032 - DNA, 56 bp, Glycine max
  Clone ID: jC-gmfl02220090e02a1
atcctactattcggctgccgtccttttttatttcattcttttttttacttttcctt

SEQ ID NO: 74033 - DNA, 489 bp, Glycine max
  Clone ID: jC-gmfl02220090e02d1
cggcggccgcccttttttttttttttttgagaaaatttccattgtattcagtttccttgttttgaaaaaactgaaactattggcacaaccattataactcaacgaggtagggtaatatacaaaaggaaacaaaaccaaatttgattcccataaaaaagaaagaaagaagaaaaggcaaacccgaaaatctgagtcatttggcagagaggatcacccactgttgtaagcacacacacttttccacacgtataccatttacagctacattcacaaaaatttccctgttctctcttgagaccctttgttggtggaaagaaaaaaaaaagtaaaccaaagctcgccacttaacttccctttgttactttccttttcggttacactttttttttcttcttttctaaaactggtttctttccttttccggaaacactgtcctcagttccgttcgttaatttgttggttcctcgagagatctcgagaaatcctatg

SEQ ID NO: 74034 - DNA, 425 bp, Glycine max
  Clone ID: jC-gmfl02220090e03d1
ccatctaaaattaaatattcttttttttttaacggttttggacatgcggaaatttttaaacccaaaaacaagggggattagaatgaactcacaacaagggttaaggaaacttttcatacttactatccatgacagacccttaatatggagtattcacaatggctataagcttatattcttccatgcctaaatggctgacttcatccacaacacaaaccttgtaatcaagggaaagtcgtttcattgaataccatcacctttccacaaacaggacagttggcacttttttccatccactcataaatgcacccaaggggaaaatgatgagagcatttgggcattatcttgggattctctttagggttttcttcaaaacaagttggacagacatcctcctcctttgaggatgcttatacaagaccaac

SEQ ID NO: 74035 - DNA, 437 bp, Glycine max
  Clone ID: jC-gmfl02220090e05d1
atgaattatttgcaatgatattcagtatacgaattgatccactttcgttatgtacaattcaaacagcaattatttgcaaatgaatgagacatttactatggaatgtaatacatgggatttggaagcttgaaggaccgaacagatactgaagaacctaataaatcgctccactggtcaccagaatttccaagaatcctgtatccatctttctccatctcactcctcttctctgatttgtagagtacagctcgtttcccttgatcatctgagtttcttagtatgagctggtcccattccttaaacccagcattgatcaaattatcaacagtgacactcctgtgcctttcactccgtcctgtcagtagaataaccttgaatcccagattcaaaacatcttcatagagctttaaactgggttcaatggctggagctacacc

SEQ ID NO: 74036 - DNA, 404 bp, Glycine max
  Clone ID: jC-gmfl02220090e06d1
aaaaaaaccccccaattttaaaacccttttttggaaaaaggggaaaaaatgggttacggaaaaaaaaaccaggggggaaaaaaaccggaaaaaaacaccattaggggggtttaaaaaacaaaaaaaaaaccggggggggaacacacccccaaaggggaaggggagtgggaaaaaccaggggggacccccgataaaaaaattggggccccccccttattaaacccggggggggggaaaaaaaggggcccacccattgaaacgggggggggcctctagaatttaaaaaggggggaggggggtgttccaaaaggaaaaaaaacaccgggtttaaaaaaccgtaaaaaccctttattttataaagggggggggcgaaaaacccccccacaaaagaggggaattttttt

SEQ ID NO: 74037 - DNA, 438 bp, Glycine max
  Clone ID: jC-gmfl02220090e08d1
ggataacttgatattattttattacatacatgcatagatagcctgctctcaaataagtcggcaggaacaaagatagagagattcaacgatcttcaaatttcacatttgccagaaatatataacagaaaagaggggtatgggatatgagttaagttttgatcacattcaactacactatcccaaaccgttactcttaagactttgaacttcacttgtactctaggatcatgttgttctcaggagctaatccaacacaagccctcaggatgttttccagcatagctcgctgctttgacaacgcattcaccactggtgtacccggtggaaccagaggggccttggtcaggtaactaaggatggtcgcaactgggtggaatgagtggaattttccctcattttcagctttaaactcgattcgagtgctgagctcagcaagaa

SEQ ID NO: 74038 - DNA, 524 bp, Glycine max
  Clone ID: jC-gmfl02220090e09d1
atcagccaaatagaattatatatattaagataacagtaccaggggtactgtggttacaatagagttaaagaaaacgtagtgaatccacctgccaagctactcagcttggggaaatccacccactcaggagattacataatcaggccccttggcttgtgaaccctcctaaactacatccccgccattagaacccatcctaatctgctgaaaagcatattggtaaattggtggaccaataattgtagtgaataatgaagtctttctccgatgctctaagccacgaccacaacaggaacagagcatcatccattagcttagcagcgttaaatgattcattcgagaaaaggatcttatttctgtgctgccatattgaccacgttaatgccacccaccagcacttccacctatgatttctttttcctccattcatcccgttttgatgctgcaaaaaatggtacctagggataatggggaatgcccctactattccagtccatgctagagtatcccaccttagagctaga

SEQ ID NO: 74039 - DNA, 469 bp, Glycine max
  Clone ID: jC-gmfl02220090e10d1
aaaaaagaaatttctgaagtgaataaaaatggccgtatctaagaaaattccagatacatagtttggcatcactctaaagcgtaaaaacagcctgtttccaaccaagttaccatgtctctaggtatgcaggcatagaactaacaatttctaagccaagtacaagggactgctctttccagcaatcattcaaaaagcaaatgaagcatataaagttagctacattcattgcccatgtcacttggaagtctcttcatcttttgtcgccttaggatgtattcccttcaacttaagaaattgttacaaagaacagaaaccaaattaaagaaaaatcacgatccaattagatcaggtgtttcagcctcaatggacagcaatgcagtgtgaacttttccagtccaactgtccagtcgatcccgtaaggatttgatctgttgaatacccagaactcttggctgcacccaggaaacat

SEQ ID NO: 74040 - DNA, 393 bp, Glycine max
  Clone ID: jC-gmfl02220090e12a1
cctcggggaattccaattccacattttcaagaaataaggaggcaaaaatgttcatatatgaattggaattatttgttttcttattaggcctatcctgaagccaaaggaaatgagatcggaattcctcggggaattccaattccacattttcaagaaataaggaggcaaaaatgttcatatatgaattggaattatttgttttcttattaggcctatcctgaagccaaaggaaatgagatcggaattcctcggggaattccaattccacattttcaagaaataaggaggcaaaaatgttcatatatgaattggaattatttgttttcttattaggcctatcctgaagccaaaggaaatgagatcggaattcctcgggggtaccgagctcgaatt

SEQ ID NO: 74041 - DNA, 467 bp, Glycine max
  Clone ID: jC-gmfl02220090f03d1
caataattaaacctatttttaaaaatttgctgtatttccatgttcatatcatattacatccatatctcatatatatcatatgcggttcctagcttttagcaagtaggaactagttattccccaatcaaaaaaaaaaagaaaaagtaggaactagttactatttggtgcaagacctcgaaggcagtttcttttacagaaaagggtgaggaatcgaataagttaaatacatagcaattggggtgcttataaaaataaaaataaaaacatagcaattgtggataagtattggctactcattccggacaagaaatcttcacgtatggttgtactgtaaccacagtttcacaccttaattaggcaatttttaaccaacttgtccatttatgcttttccagattcttgtgttggcataattatcttttacattaagcaaggttgtcccagtgaaggaatccaccatgtcccct

SEQ ID NO: 74042 - DNA, 508 bp, Glycine max
  Clone ID: jC-gmfl02220090f04d1
actaacaaaatgtgaacagagaatatgcattatggaacaatattctcctacatgtgcttggtctaaatcatacatatccatcatgggatgcttctttcgcttgatccaagctgaggcacacctttattcaaggagggctaaacttgactattctatgcactatacaatggtaattttccaacaaagttggaattaagactaccaaggtaaaggtggtcctcaaactccacagctgaagtcacaaaattaatcaccttcccatcactatcatcaagctttcttattatcctgccattagttgccacattcaccaccgttgctttcttcttgcagccattgacaaggttaattagccttggaaacgatgcaaccaagtgcttagttatcttgtagttgtggacaaactcaaatccttcagaagtcaactgaatcaaagcgatccagaaggatccatcgggagcaagattgatattatcaggtgcaccaggaaggttttcaatgaaaatat

SEQ ID NO: 74043 - DNA, 515 bp, Glycine max
  Clone ID: jC-gmfl02220090f06d1
ataaaaacaaactttttaacttaccatagttcaattattttgtggacatcatcatgctaagatgttcactcatgacaacacatacaacaaataaaatcgccaacttctttcaagtaacatagtactgtttacactaaacatgcaaatactactacagcaacttgaatacacattattatccatattttaaacaagattattacacatgaaacagtcacggccattggtctaacatttatagaaagaggtcataggagcaaattgaacgaaaccagcttcagttaacatcaactcgaggaacctcaaactttagatttggaatcatagtttcaaatgcttcccatgaaccaggtcatgtcttaggagctaatagaatgaagccagtttaagttaacctcgactcgaggaacctctaacttcagatttggaagcatagcttcgaatgcttcccatgaagcagctgtctcttcatcacataccaccaacttcaaattctcaagattggttactgagta

SEQ ID NO: 74044 - DNA, 490 bp, Glycine max
  Clone ID: jC-gmfl02220090f08d1
aacataggacactgagaaatcctgtctgattcaaacgaaaaacatgtttaaccaaatccaaaacgcactatcaaaatgataacattattattcaaccttccaacctttctcaatgtagaagagagagagagagagagagagagaacttatctgagcatgcgttccctttagcgtagcaatcacactatcacttcaggataagctcttacccttgaaaaaaagccattcttttgtagacctttgcttggtatccatatagatcaaactgaatggaaaatcagaaaattaaccaaacataactttgactaaaacgaaatgtttgttcaaaccgcaaaacgttgaataaaaagatgtcttgcaactataataatgaacttctcacactgccctcatgatatcaatccataacttgtgaggagaagaaattttgacaactttattttgcactatttgtgcatcacttggaggcaaatcctggtctttttgggaa

SEQ ID NO: 74045 - DNA, 493 bp, Glycine max
  Clone ID: jC-gmfl02220090f09d1
aaaagttaaaacatgcatgattgcatttattattttggtttccattatactaacacaactctctttattaatgacaaatacaaatacattcagccactccaaatacatgacttaagcatacacaactgattaaggaatctggttccttcaatttcacatttatttaaaaccaggaacagtacttaagcaaccatagggtccttagatagagatactgttgggaattcctctgaaagtcaatccctcctcactagaaggatagagcagagtgtaaggcattttagctggcccatagcggtttctcaatgtctcatctttgttcttctctataagcttcttttcaatctcttcaagcttctttccaaacctcttaaatgcctctaatggaccggcatcagaagtccagtagtcaccaccatctctctgcccaaggtagaactcatcagatgcgtgccttgacaagatttctataactgtaaggtcaatgagggtc

SEQ ID NO: 74046 - DNA, 553 bp, Glycine max
  unsure (1)..(553): unsure at all n locations
  Clone ID: jC-gmfl02220090g03d1
cataaattcctttcttggctaaattttgcacatgaaggtgtatcatggtctaaaaacattcctttggcaggcaccaaaaataattgataaagcaaacagtacattgaatatgttgctttttaatattactagcataattatagacagaagagccgagtttacaaaaccaactattgttacctcccttgcacttccaaactctcagtgacaccctattgcagaacatacacttggtcaaattctatctttcaaggtttccttccagctaaatcttccaatgtaagattcagtgtgtcaactgaacctcttttcacttcttctccacgagcagccaggaagtcctcaacgcttcctggttcaccaaaccacccaaggtgatctgcaatcaggtgaaggttattacaccccccacatcttgccaccactacacctttctcatacgattcgcgacaagccgtcttaatggatctcgtttcacagaccttgcangtgaaaaccatagcangatcatgcctttgagatgtcntcaaactggacttggcagaaaacttta

SEQ ID NO: 74047 - DNA, 512 bp, Glycine max
  Clone ID: jC-gmfl02220090g04d1
attaatcagaataaatcttgatatcaaaaaaatgaaatttacagaagatatcaaaaaattgtaagttatatgtttttttgatgatttgataatctccgtataagtacttacgttttctatgtttatatagtaaaagaagaaaagagaaaacttcaaggcaattgccaaatgcgatcctcaaaatgctttgctttgtcaaaatatcttcagcagttatcagtttcctcatcagtagcagttgaactgatccccacctgcaaccatggcgaagaactgccaccagctttcatgtcctttagctcactcagtttcgccaacttgatcttactatcagcttcattatccatgttttgcattgagttgttgttgttgttgtttttgtcctcatcattgtcaacatcaacattgttattagggttatggagactttgacaatggctattattggtatcatctttagcatcctttgatgcaacccaaggctgcaagtaaaattctgtgttcacattcct

SEQ ID NO: 74048 - DNA, 222 bp, Glycine max
  Clone ID: jC-gmfl02220090g05d1
aggaaaggaaaataattcattcaaaattgaacgggacaattaccatttaaaggtgccaaaagttttccacgggggaaaagccaaaaacccttcggggcaacccattatttcacaaaatggttatacaagggctgttaaaaaaaaaattgctttaaaaaaaaccgggaactgggccctttatatgaaacggggggattacaaccttgggaataaatttcaagg

SEQ ID NO: 74049 - DNA, 435 bp, Glycine max
  Clone ID: jC-gmfl02220090g06d1
gataatccagctaactcatactcaaaatgaaccagtcaaaaacttatcaatggatatgaaaagaactggaccatttaaaaaaaaaaaaaaaaaacccaactttcctcactttttgcaaataaatgatcactccaacaagagaataccatgaaaaggataacaaaagctaaaatgaaagggttacaatctgcaatgcattgcttccagacaaatcatgatgatagtagtctttcgcttaaataaccctatttttaaaacagttttaaaagcactttttgggcacaattgatggaccaaactcggcatattctgcctttgcaatccacatttgctggaaggggctaaaagatgccaagattgaaccaccgatccaaacactggattttctttccggtggggctacaaccttgatcttcatgctgctgggtgccaatg

SEQ ID NO: 74050 - DNA, 323 bp, Glycine max
  Clone ID: jC-gmfl02220090g07d1
atgaaaaaagttcatgtaaagcagtggattagatgaggaaataaaaaatttcatgatcgagttttgtacgatcaatgaaatacacaagaaattgattaagataagacgaatagtagcttagctagtcacaaggagatgaaaggatgatcgatcagaagttgatgaaagcacggagaagcgtgagaaagtcatcaaagcatcgaaggaagtacaagtagcagcagcagtagttgttgatgatttgtctgcgcttgagttctttgatttccctttgctttctcatgctttctatcacatactgcttatacatacaatcattcatt

SEQ ID NO: 74051 - DNA, 249 bp, Glycine max
  Clone ID: jC-gmfl02220090g08a1
gaccatctgcagtcaattgtctgtgcataaaattagattgaagttgttggtgcatcattttacatgctaatgtatacaaaaattaaaataataataataataattcagcacagcaaatggtggagatgctcatttataaagtttcttcgtcagcttgaaaaggatcattcttagtcaccacaataaaaaaaaattaaaattaaaatttgttaaataacaggaccgggttaacagctaaaaacaagggaa

SEQ ID NO: 74052 - DNA, 375 bp, Glycine max
  Clone ID: jC-gmfl02220090g08d1
acaacaacttagtttgtacctttattccataaattaataaaataaaaaagagacatgtatatctttccttggtcttatacatcgacatacggtagctccaattattagccaacattacaggaaaagaaatttcaagcacacaacacaaacacaaattaattgaagatacacatttattatgctctctcaaacacaactgggagcacattaccatccaaggccaagaaaatcttcttattctcacgcaagccaccaacaatgccacagtcaaacttacagaaggggcacacatcaataggacaccaaccaatattataaacacctttaacttgggtctccgaaatcctaaagtaactaccaacacctactacaaca

SEQ ID NO: 74053 - DNA, 555 bp, Glycine max
  Clone ID: jC-gmfl02220090g10d1
gatgtataatcaactttaatttacactatttcaaatccaaaaaggaaaaaagaaagttacaatatacttggtctacttcttgccatcaagatacaatagtcaccccgttgatagttgtcccacataaattagtaatgtccaaaagcactattaccttgtaaagcttttttaaagggaactataagtagtcattttatacatctttgataatcatacaaaagccatctttatcaatgtaccatttgactagtttcattggtctccaaccattgttcacattttatcttccacttggcatagaggagcatcttggaattgcttcagctttggaactgcattgcactgaagatattgaggcagagggtcttaggaggggtgtaacagccctacttgaagtttcattagcaatgggagaaggggtagctgtaacagcttttacttggtgtaaatctactttaggagtatcaattaattgatcatcttcttcaatggacaagacagtgcttgtgtctgtgtgaatggtggagtcatcggtgaacatgccatgtcttctct

SEQ ID NO: 74054 - DNA, 493 bp, Glycine max
  Clone ID: jC-gmfl02220090h02d1
gacataaaaaactaatgagttgaaaagtgtttatatgcacacatcccatagctggcaggtagcacaaaccggatctacccacactgaaaaaaagaggccaataaaataattcggaaaacagacaaacaacaaatacaaaacctataataaaaaaaagtacacatggcctcctacatgtcggtggcagcgttttatttccttgacatatattaaagaaagaaaagaatcttaattgaaacaagtgtatagtagcgacactccataatccatgtgggtgtttcatagagccaaaaaagccataattaaactgaagaagaccatgaagaatctcacgtgcaatccgcttactccattgctgtcttcatccgcagccttctgatcttccgaatcagcgtcgtcgtcggatggtccgtccgacggtgcatccgccgcatggctggatgtcttgttcttgttcttcttcttggcgggctttggcgactgggcaggtgca

SEQ ID NO: 74055 - DNA, 458 bp, Glycine max
  Clone ID: jC-gmfl02220090h04d1
gcaataactataacagtgggtaatgatttgtggctagactagctagcatagagaattacagaataaaagcataaacatgtgcttagcagtttcctccttcataacattacatcgtgcaaattatttacatacatactatactggtgcccctaccacgtttaggcatccatccttatatttaattgttagaaacatgtatagcagcgacagttgagaccatcgagtccaccccacatacattgcgacctctgcagatcttgtaatatccctcttctccccagctctccccccatgaattctttatgatccagtaaggcttttccttaaaacgaattggagcataagcaccagaaccataccccaccaaaagaaccccgtgatccaaatgcttgccgcagatatatgggcatgagacgccaccaatatatgtctgcataaaaactgcattgataccaact

SEQ ID NO: 74056 - DNA, 368 bp, Glycine max
  Clone ID: jC-gmfl02220090h05d1
gcaaggcccaataagtccgggctttttaactttgaaaaaatcaataacaaacccccgaacttggccatattaaattattcttggacaacattttgctaccaaaaatccccaagggaaactaggaataataacaaactttcccggggatttccggggggtccttattggccacttttaaatcactaggccccggattagcaggatttatccctccaagggaaccctgggaaaaaaaacgggtttaacgggtaaacccggccccaatcccaatagccccccccactttaacccttttccagggggacttttccctttctccttaaactttttccccatttcatcccgaagggacaaaacacacccccttg

SEQ ID NO: 74057 - DNA, 355 bp, Glycine max
  Clone ID: jC-gmfl02220090h07d1
acccacacaacccaaacctattggtgcattatggctcaatgggtgtcagcagactcggcactacaagtgcgatgaaataaatacatggaatttaacaatgacaacaagaaacaagccaattcaatcctacacatccaatctcaaacaaaaattttaaaaaaatatagatgtatagatatatccgcagtatttgatgaaatctggagataactgaatcgaactgtgcaaacgatgcagacatctaagcgattttatttgcttaaactttctggagcagcaggagcgggagacttcaaaaatggttggagtgctttaacaacaatgctcatatttggcctaaactcagcttcatact

SEQ ID NO: 74058 - DNA, 339 bp, Glycine max
  Clone ID: jC-gmfl02220090h08a1
aaagtaaatatatatagtatatattgaaagttaaaattacaatttacttattaaattacataattattggaaaacttagcagtaaaaggaaattaaacacttgaaatcatcaacaacaaagcttactacacttatgctttgttgcagggtggcaaaggagaaccacagagacaatcattatcaacaaaagcacttgccggaaacttattcttgggaagctgaccaccatgatggacatagctaacattcaacttctcaagcccaacaacactgtttggaaccttcccaaacacccaattacgaagacaattccaaaaacttaaacctttcccaaaactt

SEQ ID NO: 74059 - DNA, 328 bp, Glycine max
  Clone ID: jC-gmfl02220090h10d1
actggagacattcacattgcatagcaatttcgatattagactacaccttctgaacgagagatagcatagattgaatttactggtgatctaacacggcaaagggctataattgccggacatgatagcgtatcgaatgacgacttacacatacaggcttgggacccactaagaggcagttgagcggagtggggagaaatgaccatatccatttctgtattaccctccaagctagagacattatgatcgctcagaataagcattcctgtcaaaagaacacgatgtttccgtacagactattcacagacactattctataggcctatatact

SEQ ID NO: 74060 - DNA, 297 bp, Glycine max
  Clone ID: jC-gmfl02220091a01d1
aaccaaaccttgcgaacccttataaattaaattcatgtgtcctcgggcatagaaaaaaatacataaaaattatttgttcacaacttggagaggagaccaaattgagtttcgggatttacaccatacgagattgtattatagcaattctgctcaccttagcagacgatgtcgtgcacacttgtggtgcaaagacctccaagaaagacaaatttttttggctagagatcagactggggggtgggtgaaagttctttttttaactctctttcaaataactgtttttccatagctagatgt

SEQ ID NO: 74061 - DNA, 404 bp, Glycine max
  Clone ID: jC-gmfl02220091a03d1
aataacaatcattctgtaataatttatgggccatggggatattgtttgcatcattcatattcatcataccgcatcatgattgcaaggaatgaaataccgaaattcattcttcatttaattctcttcaaattcaatataccttctactagtgaatgtaaatgacttagcaccccgtattggcctttttcttccttcagagtaactcgagttatgcttcggtattaccacaacatttaactggtaaatttcctaggcatgtcataaacctttatagaaaataacaacctcatataaagatattctaggcatatacagttcgcttcgaatatagaggccataaagttgtactatcttttgaatagttaagtccaagggaaccattttcaaacagttgtcatggattt

SEQ ID NO: 74062 - DNA, 318 bp, Glycine max
  Clone ID: jC-gmfl02220091a04a1
aaaaaacatgccttttaaccggcccaattttttttaaaaaaaaccaaaggggggcaaagttccaaccaacttaaccccccccaaaaaaaaagttacaaacaagtgggaacttttttttttctattttgaccccaaccaacaaattctttttttttttagctttaacaaggccaacaacaagtttgttttgcaaaaaacccaaactcttcctagcagggggggtggctaaaatctttggggcaagggggttttttttttttccaaaaaaaaaaagaaaaggccaccccccccccccccttttatgtttgttgtttttta

SEQ ID NO: 74063 - DNA, 575 bp, Glycine max
  unsure (1)..(575): unsure at all n locations
  Clone ID: jC-gmfl02220091a05d1
aaccaaaataatccattcaatgattcaaccgaacaatcaacaatacattgcgtaattttgataacatagtcaccaaacaaatgaaccatcttgttacaatgcaacatcaaattcaatgcccaaagaacaccacagatacatacatacacacatagaataacttttccttccctcaaccttggtagtgttaaatcaggtccacagcagctcaatatgtttcatcctcattcaatttattgagattgagaatatactacatgttacatccagtaaaatatcacatgagactcaattcatacaaacttatagacttgtagtagtaatagtagagggtatatcaagaaatcaaaactaaactacttcacttgcgatcgacaaaggtaaagcgcaatgaaaacactacctgccgacccaaatttgaatatcaaacatggaacatgaaagtaaacaaaaagagacagcaaagatacctaactaaagaaagcaaaaaactgaccagagattgtgaccctttcttgataccagancaacactttattagcataaaatcctttaggcatangtttatgcaatgc

SEQ ID NO: 74064 - DNA, 565 bp, Glycine max
  Clone ID: jC-gmfl02220091a06d1
ccaattcattcattgcttaaaagtagccgagagagagaagcgaattataaaaaacaataatcaaccaaacctagggcgcaatttatcaaagtagtgattaacacatttgcaagccacgaagcaacatactcaactttcaaaaatctgacaataatgcagtcaactaaaattctgttctaacacctcaagaaatgcaagagttctgatattaacttgaagagcatcaaaaggccaccattctctttggcatcgaaagtgaaatatagcaactccagtcgtataccatacgaagtttaaagtcttctaccccttctaccactctttctacgtgtactatccgaaggaatgggagtaacatcctctatacgaccaattttcattcctgaacgtgcaagggctcgaagagctgattgagcaccaggaccaggtgttttggtcttgcttccaccagtggcacggagcctgatatgaaaagcagttatgcccagttccttacatctggcagcaacatactgtgctgcaagcatagcagcatatggagatgattcatctctgtcagctttaa

SEQ ID NO: 74065 - DNA, 532 bp, Glycine max
  Clone ID: jC-gmfl02220091a07d1
atatagaagacccatttattatccactaaacaaaaagttatcaagagaggaattgtgctacattgatttcaattccttgagataaaaaaatgtagctaactctaaagttaagtaatgaaataaaaataattaaagaataaagaagcacaatcattactttttaattaatttatattgcttgctttcgcaactcattacttttattgccaattaagtattgtctttttgtgcctatggtgtttcggcacgccaggaaagtaaggaattccagtaacctcaatccaatcagttccatgaaaaaacttagatggtgagaaccaacgtgctgcttttgaattgaggttccaaatcccagcccatttcacacgcttggatttgtctgaaccagggccaatgttgtggtactcggcatagaagcaagtatccataccagaaggaccctctagtccttgccatggcaaatacccaatcgcgtcaatcaaatcatcaatgtatgtgtccatgataatggtcctagagtaattcttccatg

SEQ ID NO: 74066 - DNA, 495 bp, Glycine max
  Clone ID: jC-gmfl02220091a08d1
ataagagaataaaaatcttttatttatatcacagtcgtacatatgatataagtaacatagggctaacacataaagagacacataaaaagggttacattatgggaacacccatgatttattaacccatagtataatgccaccagaccagaccagacctacaaagcataaaatatttaagacctaaactattacatgggaagaaaaatgcattaactgctttttgagtcaagggactttcacatgaccctatttaatgacacaatcaaagtccgcgatacacgagttaccctctgcgcattttcactggtaccaaattgaaacctcttgctgattctgaagagaatccattcctactccttgtatatcctacttgaaatcaaaggatgacacatcacaaggggaattaaacatcaaatggatatcattgttgctgtggctggtatcaaaaggagtgttcatgatcatgttcatgttcatggtggccttgaaccggtc

SEQ ID NO: 74067 - DNA, 425 bp, Glycine max
  Clone ID: jC-gmfl02220091a09a1
aaatcataatgcataatagagatcatttcataaataagtattcagcaagcaatttatggatacaaaaggcggctccgataaaatttaatgttattaagcaaacaaggggaaaaaagaaaaagagtagcagagtcggttttccacgagacgagaagagacacgcaactcgataagtatcacaaaagattacagaagaaaaggaacattctcttctcaactatatcctatttgttgctgttgctgaggtggttggtaaccaggataccccggataactgccatacatgttgggatcctgtccagcagcaggagcatacccataattttcataaccttgtgcagcatacccatagtatccaccaccagaaccagcaccaccattccactggtttggatctgcctgagcctgtttgtttgaaggactgc

SEQ ID NO: 74068 - DNA, 542 bp, Glycine max
  Clone ID: jC-gmfl02220091a09d1
atcgtaattcaatgttgcaattgaggtgcctagcttggataagcaaggctatcataatcacaaacacaaccacatgctctgtaaagatcatagacagagaataattgttgcccacaacgccaacacgcttgagaaagattcggggcacattaaccatcaaaatgggttacatagtcaagtgcatgcatacagacatagtaatagtagtattaaagtagataatgaaaacgaacatacaaacatatgtatgcatatgtaactatgtatactaaaatattcaattttgacagtgtaaacaatagcggccaaaatagttcatgaacatactcaacatagcgggttgaaattataaaatgaaagggtgtgaggaataataataacaactttacatagataattatgcatgcccatgtttccatcttcgtgtaaacaataatgcaaacggaaactgttcctgttaacaaaaggatcagtactactggtataatgctacattgacataatctactttgatgaaatggcatttcatttcttcctgagct

SEQ ID NO: 74069 - DNA, 391 bp, Glycine max
  Clone ID: jC-gmfl02220091a10a1
gcaaaataaaattcatttaagtttacaagttttaatccaaacatgccctaactagtagtaatgatcttgtacatagatacaagagatcgttattaattggaggccaagatcctctgaatatacaagatatgccattgtcttgcacaatggaaaaaccatttaaagaataacacttcatacaaataatcatattttcagtaacaaacaaatagaagtggtagaactactatcggtaaatttatcaattttccaggcagagaaccaagagtgaactcatgaggattgaattccttattctggctcggcttggtccatatgtatatatatgaattgcaattattcttagcctaggagcaagaatggggggacttatgggcctatacttgtgtga

SEQ ID NO: 74070 - DNA, 437 bp, Glycine max
  Clone ID: jC-gmfl02220091a10d1
gaaattgaattttcgggaactgtttgtatggttgttagttatgctgttaagtaaccgaagcctctgactgtctaaagggacattggctccccacggatgtgcccagagcaagattgttgcacctactgtaagcacaaatcaaatgccatccctaaaaatgaagagcaaagtaagcgtgagctgtttaacagaaacaaaggatcttcatgtgtgtccgaaatcaaaaataatttccaaaagcccgtgttctaaaatcatgatttctacacaaaaggctgaaatagacaccactgttcaaaattgcctagatgtttcctcaaggacgcagcccaaagacattgcatgggatcaatctattgataacaaagaatttctggataaagaaaactctgaatctgagccccaattttctggttgctcctctgtcctgggaaaaa

SEQ ID NO: 74071 - DNA, 412 bp, Glycine max
  Clone ID: jC-gmfl02220091a11a1
aatagtcaaataatattagttcccaaaataattaaggaaaattcaacatttacatcgcatactccattgaaatcacctctatgtaagtaattatgaactatgaacatcttgtttattgaacaagggtgaagtccaatcatgcccaatttaggaggcaacaagtacaacttatttttctttcagggagttctcaatatctatcacaaaccggtacttgacgtccctattgatgagcctctcaagagcttcattggcatactcgattggaattacctctatatttgggtgaatctcgtttgcagcacagaagtcaatcatctcctgtatatcttttgtaccacctgtaacacttccggctacagtctttgatcctatattaaggcttgcagggctgaatttgacttgacttggg

SEQ ID NO: 74072 - DNA, 562 bp, Glycine max
  Clone ID: jC-gmfl02220091a11d1
aatgaaattaaaatacaagaaattgaattgcctcatgcaaacaaaatatttacaaaatgaaaagaatttaaatcaagacaatcaaaatgctgtcaatttgaatttcctaaaaatctttaaattcctcatccaaacacatagttaaacattttccatgctccagatatacggttttgtgaaacatgaccttcaaccatagttgttattgccataatatctggcttaattccttttcccagcatctcatcatacaacatgcaagtttcttcatacctattcaacctgaagagatgttgtatcaagtctgtatatgtggaaatagtaggcacacaaccagattctttcatgcattgaaacacctcaagcgctctgtcagcatcatttcttcccaaatacccatttatgacaatcccatgaacccttccatcatccatatcccttctcttcataatatcaacaatctctaaagcatatgtaatcctgcctgccttacacagccttttaccaagttcttataattttcaggtccagatctaaatctttatttttgaggtcacgaatc

SEQ ID NO: 74073 - DNA, 417 bp, Glycine max
  Clone ID: jC-gmfl02220091a12a1
agacggagtaaaacacctattattatataatttttgggacaaacattattagtagcaccagcctctagcaagctagggcgttattacatttttcttttgtcacatttaactacgatgtttggaggtaaaagggccttattgagcacaaagcttggaagatccaaagcatcattgctgctaccatctgacaacttggaagcaaaagaccaagaaatcacatcatgggtttcaacggagccttcatgcaacccggtggtggcagagaacccaacgctcacccattcgggaagattactcttcaagttcactgtgtcagagaggatgtaacttgttttctttgaagggtggatcagagaagcaaccaagaggctcgtggcggcattataggtaacgagaatctccgccacttgtccattg

SEQ ID NO: 74074 - DNA, 526 bp, Glycine max
  Clone ID: jC-gmfl02220091a12d1
catccaaagaattactatgtcaatccatttatacaaggtaaaatttggctgctggctggccaatgatgaaaatttgtctatccatattttacagggtcatttcattgtacatgagaatttaattaagttcgcagaaggggttaagtacaggtagcatatattagagtactttagagaaatctggtgggcatgtactcatttatccggagaggaagacggtaaaactcatcatttctaacatctcccttcctattctggaaaggaccccaccatggaagtcctctgtccacagctgtttgtttgccttcaagtgtgttgtcaacaagagtcccaacaattatagccacagttggggcagaagagaatatggtgttcaaaatgtcattaaaccatccaccacctgttctaactggaccatgaccatccggtgcagtgttcatgacaaaatattgtggtattgatatcgcaaggaacaaggttaggcccagaacatagatatttcttatggaattggtatttgcaaact

SEQ ID NO: 74075 - DNA, 407 bp, Glycine max
  Clone ID: jC-gmfl02220091b01d1
accatattattattttacaggggtttgtgatttttagaaacaaggaataccattttttatctaaatggggcaccaacaaaaagaccctacacttcagaggaacatggttcagaagtgcaaaagttgcatccaaacaaccatgaaggaaaataatgaagctattcccagattccgacctccatgaagccatttttagtggcacagcccctaaacatgccattgcaattgaaaccataatccactttccaaacgttggacacagaaatgagaccacccttcccttaatagagacggggcttgtttacaaaatccacggcttctttaaacttcaagcctttgggtttcattatcgctgttacaaaaagaacaaatgtgttaaatatgattttctgaccttcacccgtgca

SEQ ID NO: 74076 - DNA, 418 bp, Glycine max
  Clone ID: jC-gmfl02220091b02d1
gaaaaaatgatgcactgcaggtttccactggtccatcccacaagacatctgggtaaaaagaaaagaactacattttatctttttatcctaggggcagatattgaacatcctttagtatttgttgtaggagagctacaatcacattttcttcttcatttgcaagccaaacacaatatgaagcattgactgcaccttctctttttataagaagatacagaaaaagggggaaagaatattagggttggaagaaggtggaaaaattgaacaaaaaaagagatgctgctcatcatccagaaacaaaataaggttctgcctacccaggaattttgaaacagccacttgtggatcttttttctaaaagctcctgctaaagattttgaagggcactttgtagtgtgagttaatgtagcctccaact

SEQ ID NO: 74077 - DNA, 393 bp, Glycine max
  Clone ID: jC-gmfl02220091b04a1
ccaacaaagttttttcctttttcattaaacttccttttttaaccccaattgccaacaaaaaacctattttttcttttataaacctattcccctcctgtagaagactactactacattttcatttttaccccccctttctttaaccccctaccattttttctaaatcacccccaccccaaaaaaagattaaaaaaacacttttccccaccctaacaagcaaaagatttatcatcattatcagtttgtccactcctggggcagcctaatctcatgggacactggtggctgagatttgagggtgcgcttctgttgttgagaaaggacataattactcctctgcctggaaacagctgcaccattttccatgttggaactagcattaaatcgttgtaa

SEQ ID NO: 74078 - DNA, 128 bp, Glycine max
  unsure (1)..(128): unsure at all n locations
  Clone ID: jC-gmfl02220091b04d1
ggacccccccaactccatgtaacctcnattgcaanaacncgnnacggaattatatacccgccgtcgaccacgctcactagatcggtcggccgcaccttatttttttattttttcttttattttctttt

SEQ ID NO: 74079 - DNA, 446 bp, Glycine max
  Clone ID: jC-gmfl02220091b05d1
aatggtgtgctgacacataattagaaacttagatagtattaagaattttacactgataatatattgaatttgtactctccctcccccttattacattgaatatatggcaatctttttcagccaacaagtgaagcataaatctggtagagctttgtctctataattaaaagactgaaagaaatgcttgctgtccagctacatctgaagatctgcaggcatgtatcatagtgcatatatctgtcgtctctaggattttctctgcatggtcaaaaatcaagtgtccatactcgaaaaccattctcttgcacttatttgcatacttctccactgaattgcacacctttagtaacgtctcaattatctctagcttagtatcactctccttcaacttttccaatagagttgaaacagtatcttggcaaaactcacagctatcatcttgaact

SEQ ID NO: 74080 - DNA, 540 bp, Glycine max
  Clone ID: jC-gmfl02220091b06d1
aacagaaatgcagatacattcattttgtaataatttatatacaatattgatattgtttgcatcaaccaaaaacaacaaaccggtacatgatgcaaggcatgaaaaaccggtatacattcaaaatatagaagcaaaaaaacaaaaaactgctaactagagaagtaaaatgccgaggccagtagttttggcctttttcttacttcaaagcaaatcgtgttatgcttcggtattaccaaaacatatcactggaaaatttcctaggatgtcataaacctctatagaaatcaacaacctcatataatgatattttaggcatataaagttcgcattgaaaatagaggcactagagtagcagtatcttttgatagcaatcaccaagggaaccatctccaaacagttgtcatggattttcatgttgtataagggactacctatttcccagagtaccagttttgagcacacttggcatcaacagagaggtcaactttaagaatatttttgccgttaagggtttggacatgcactcaacaactatggact

SEQ ID NO: 74081 - DNA, 538 bp, Glycine max
  Clone ID: jC-gmfl02220091b07d1
gcaagaatgtgatcaaatttccttcacgctatggcaccatgttacaacagaggtcaccaatttaataaatataaataaaggatatcaaaattaatacccaacaggaaaaaagaatacatagatattcctaactaacatgatacatatgactcagtggaagtacagttaaacaggaatttcgagtagccaaaaaaccaagaattttggcatctcatctccatgcttaagcaatagcatactcgagcttttcctgctccttaggtcgccacttggacttttccacacataacaaaccctccttatccttggagtaagtcatgcgaacctttcactgcatagacctagccatgctctcaagctcttcaatgatctcaacagtatcgcgaacaataagttttccttcaggcctaagaatccgatcagcctcagccactacagcagccaaattgcaccttttcttaagctttgaaaacaaatgatcagcatggaggagatcataggtcctaggatggtgctaaatgattcacaccaatcatga

SEQ ID NO: 74082 - DNA, 434 bp, Glycine max
  Clone ID: jC-gmfl02220091b08a1
attccaaacccaaaaccataaagtttgcattaaatttcgaagaaacatgatatccatctcaagacatattaatgaacacatgtaagagccttaaatgatacaaactaacagaaatcttaaatataaatgttcttagagtgaatcaacacacaaaattaaactaattaagattacttaataatctatcttgctcatcatggtctaggcttcattcttccttcattggccatcttgaagagctgggcttgtgcttctgcggccttgttggagttgagtgaggccacaaacctgtccctgacttggttggtagtgtaagggaacttgttgttcaccatggagttgaggaaggaagctgtgccttctctgtagagtgctcctagcccatcagttcttgtgttggaaagtgcttgtggcaagctcaggccaggactgaa

SEQ ID NO: 74083 - DNA, 429 bp, Glycine max
  Clone ID: jC-gmfl02220091b08d1
catcttaaaagacttcatggttgattttgttcatgtggattacaatctttaaattcaaaataactgtttatagtaatatctaatctatgttaccacactatatatacgcctctaaccaactttatcattggagatgaaaacaagagcatattgtacaaaactagtcatgcacctattcagcagtcttaaaccacaaaagaacccatatatctgcccccattcaaatcaagggctttttatttccacatcttttcctaacaaaattgtttaaaacttgtgtccttgagaggccatgccttgaccttggtcaatctgcatgattgttcaacaaatagtgaagggataggtgtcttttcccatgggatgatcccaaaatcatcagtaaactcctgcattcctccaactaagatttgccatactagagcacct

SEQ ID NO: 74084 - DNA, 420 bp, Glycine max
  Clone ID: jC-gmfl02220091b09a1
aagtatcagccattataattgttattgatataggttataatatgagatgccaggaattaccatgacatacacttgtaagacatattgtatatctgctaacatagtataacttctgccagaaattcgttctcctgctttggaattggcttaaaataaaaataaccatagaagtcaaatttcaattaactacatctaccagaaattaaagaaaaaaaaaacattggacattccctccttctattgaacatggttgtattaccaaccatttttttttaaaaatcatgataataaaaacatttagcagtttcctatatacctgagatggtactcactaaccttttctattacaaaagatcttctacggagaataaagaaagatggaagttataaaaagagggaagggctgttatgcattcttga

SEQ ID NO: 74085 - DNA, 382 bp, Glycine max
  Clone ID: jC-gmfl02220091b09d1
gaaatcataaaattctatataataaagacaacatatataactgtatcctatagattacacacaacaatttcgagctttattctataaattaagaaaaagaaaatagacatgctatctttctttggacctaccaagtagctccaatcatttcacaactgttacaatattacaagatcagaaatttcaaacacacaattgaagctagcacatattagtatgctttctcaaacacaactgggagcacattaccatccaaggccaacgaaatcttcccattctcacgcaaaccaccaacaatgccacagtcaaacctacaaaaggggcatacatttgtaggacaccaacctatataatatgaaccttcgactggaggctcaagaat

SEQ ID NO: 74086 - DNA, 523 bp, Glycine max
  Clone ID: jC-gmfl02220091b10d1
agtatataattatgtatagcatagataataagattcatacaccccacagaaaaaaaaggtatattttaggtgccacccaggcctatactgctagcgtggccaaacttccgatcagaattaggaatgatcttgttccatctgatttagatggaacccaccttggttattcttgtgtacctctaccttgaacttctcttccttctgtcccctcttgactttgagaagcagattaaacttggcaaagtcatcaatgacctcagcctttgcatcagcaacctcatgaagctcatagggtactagtgaattagacctttgctggatagtcttgatcgcatgatttgctgcatcctgaacttgagggtcatgtgttggcacagattgccatccaggttggtgaccatcctttttgacaccaagatcagcagaggtaaatgatggtacatcaccagcaggctcgaactcttggagttctttgaaattcaaccatggcttcacccacaccttggcttcatagagcttcttc

SEQ ID NO: 74087 - DNA, 397 bp, Glycine max
  Clone ID: jC-gmfl02220091b11a1
acccgacaaaactcgtaatataaacctcatagccattatctgggggattttattttagggtttatttaattggacaattttatattttatttcattcggggcatattaatcctaaagccgctggtgattgtgtaattgcacccaccatatccagtgctacgcagggctggtcagtaggtacaaaatgacccgctccaaggatccaatagaattgggggtttttgtatgacttaaaaaaccctttgggcgttttgtcacttccacagtagaggggggttttgtttttttccaagaaattttgaagccctgtccactcgagttttttaagccaagcttcagtccccttggttgcacaaatgagatccacttgcccactgtacacagtcacgttgacccc

SEQ ID NO: 74088 - DNA, 394 bp, Glycine max
  Clone ID: jC-gmfl02220091b11d1
ggctatatcggccctactcggagccaattccgatctcatttcctttggcttcaggattggcctaataagaaaacaaataattccaattcatatatgaacatttttgcctccttatttcttgaaaatgtggaattggaattccccgaggaattccgatctcatttcctttggcttcaggataggcctaataagaaaacaaataattccaattcatatatgaacatttttgcctccttatttctcgaaaatgtggaatcggaattccccgaggaattccgatctcatttcctttggcttcaggataggcctaataagaaaacaaataattccaattcatatatgaacatttttgcctccttatttcttgaaaatgtggaatcggaattccccgagg

SEQ ID NO: 74089 - DNA, 362 bp, Glycine max
  Clone ID: jC-gmfl02220091b12a1
gggggccgggggaaacttttttttaaaaaaaaaaaacatggggttatcctcccccccaaaacaaggggggaatcctggcggtggattgaaccggacatatcctttattgcccctagggggaagaaaaataataagctaaaaagcggggccccgcccaaaatttttttttttgcaacaggggacaaacatatttccaaacgggtcccatattatgggggggccaaaaaaaatttttttttcccccaaaaaggccctaagcggggaaacttggaaacaagcaaaagctcagcttaggcggggggagcccccaagttttgcccactaaatttgtttttgcggccccaaaagggaggggacccaag

SEQ ID NO: 74090 - DNA, 410 bp, Glycine max
  Clone ID: jC-gmfl02220091b12d1
atgcactacacacagtacaagtagctatcatttaatcaaaagaaagggaaacgcgcgcacgcacaaaaacaaaccatgatttgctgccttgattgcatgcgtcattgggataaagacaacacgcccatgtacatctcaaaagggttggtttatataacagctgtctggtctctgcattacatcaacgataatggcttacacgttccaaatcacaactcagatctctatacagcagctttcaaccctaaaccgcattatctatttaattatctataagggccaaaccagaaatatgaacctggaaggttttatggaaaaagcactggtatgagtcttcaaaatgatgatccgtttcatcaaagatctcctcctgcaaaagctcttcaatgacattttccatgggaataatt

SEQ ID NO: 74091 - DNA, 412 bp, Glycine max
  Clone ID: jC-gmfl02220091c04a1
ggagggcgacccaaaaaaggtaaaaaatataatagtttagttaattgggacatttacattattcccccaaaccaattttagatggcggggtggccagaccagaccagaccaaaaaactcttaacaaggcatctaggttttttaaacgaaatagggagcttttttatttaactgggaaaacaacaccggttcaagagttcgaaaaaattggcatataaaaaaatgttgaggggggactttattttttccaagctgggggaacatattttactaatataagggtaccaacatgggaagggcttcaagaaaggtgcattatatacataaccatgcaggggtacttgaacatgggtttcactaagctttggatagatgactgcatacatatcaaactaaaggggttggcgtatttc

SEQ ID NO: 74092 - DNA, 541 bp, Glycine max
  Clone ID: jC-gmfl02220091c07d1
cataggaatagttttcattcgatttctaaatatatataaatatatatatataaaaagaggaaacgagaagaaaagaaatagcggatcataacagacctagatttattagtcaagagattgtgcagcgaaagtgcctagcctatctataaaattcaaatccaaagggcctaatctgttttttcttcagcattgctagcattttcgcgattgttgctcatcatccgcttgaactcggggaagttgacgttgccgtcgccgtcggaatccacggatttgatcatgttgtggcattcctccacggagcacttcattccgaggcggttcagcacctggcagagctccgtggcggatatgaggccgttcttgtcctgatcgtacaggttgaaggcatcgtggagctcggtgtcgccgccgtccgcggtgtcggagcggcagaaggcggcgaactccgagaggttaatgaagccgtcgtgatcggtgtcaaggtcttccatgacacgctggagctcctccggcgggacgccggatccgagggagcgga

SEQ ID NO: 74093 - DNA, 409 bp, Glycine max
  Clone ID: jC-gmfl02220091c08a1
atccgcaaaaccaatcacattttaaaaggtaagagtattatttccatgataatctgatttaaaagtactccgcaatataaacagagtataccaaaaaacactcgatctacagctagtaactaaatcctccattttatgatacggataaacagccgaaagaaagaaataaagggcaaaacataaccctgcattaattggcggcacgttgagttgagcatgcattatttgactatgcagatctttatgacagaggcagctccaatacgatgcagggcaacaactgcatcaccaggcttacaaagggccctttctgttgcggacttaagagcagcttcgagaatgacctctgtggattctgcatcggtagcctttgcagatccctcgcccagtataggaatcaagcccctgt

SEQ ID NO: 74094 - DNA, 382 bp, Glycine max
  Clone ID: jC-gmfl02220091c09d1
ccaaactgttatcaaaagaagattttccgacatgcataaacgcagttgatagtttcatatttatagatttctataaatatcatatggtgatgaaggcggttaggccagtcaattgaccgtccacaggacctttaagcatggcccctatagtttccaatgcgaaatgggggccacatttttaacttagggaacccataggaggcccttgataagggatgatgttcatacggaaaaagaggatccacggccaaactgagggccccaaagctcaaaagatcccttaacaaagtgatagtatcctccttttagcgacaatgtattgtcaaccaagccttttttaacaaatggatatgttaaaaggttcccaagggaaacattcaca

SEQ ID NO: 74095 - DNA, 420 bp, Glycine max
  Clone ID: jC-gmfl02220091c10a1
gaaacataattgacatcaacacgaataaaaccgcacaaccattgaatagtgggaaagtaacaaaacgctttacttgaagcggacaatttcccatttatattgtatcactatcgtctaaataaatgactccataaagcacatttacagcagcacaaaatgcacagccactgccttttattaatccataaatcacttcatacatagcactgcattactaactatgacgttcacacttcaatggctgaccaacttaagagagtttgccttctcttgcagagaatccaggaggctgtcaaagctcttcttaaacgagtccactccttcaagttcaagctgggaaccaacaaagctccagtcaatacccaatttctggagagcattgtatattccttcagcttcagatgcatttgagtctattgt

SEQ ID NO: 74096 - DNA, 526 bp, Glycine max
  Clone ID: jC-gmfl02220091c10d1
cagagattatttctgtattttcatcaaatacaacaaatacaaagctgctgcatattacaagcacctaaatattttaccaaaaagacgggcttgagaaccattaaatcgccctacactgtattgagcaaataacaaaaactataatacaggggtgcagcaaaaagaggtgtttgccgctcacagcacaatctactacctgcctggtcaatcccctttccctccccatgattcatcctctcttgcaatactcccagtctgaccgccatacttgtcagaattggaataatgcattttgattgcagccacaggatctgagaccccactgcacgatcctcccacaagaatccccggtcttccaacaccattcattcccatcactcccctgctctgctgctgtaaacttgagattgcttcgaatccatttcttctctgcatctcagagaatacatcttggcagtgcttgacatctaccataaatggttgcacttttggaccatcccttctaaacaactgataatcaatcaca

SEQ ID NO: 74097 - DNA, 425 bp, Glycine max
  Clone ID: jC-gmfl02220091c11a1
cacgatacaatttaagcttatttttctaacctcaaactttaatgcatcatttttctaaattttgttacctaattaactacttaagtatcaagtacgattacacttttctaccattttgttccatctttgcccattgaagcatacaagttgcaaccgaatttgatcattactatgttttcacggtatagatagctctatttctcatttaccgtcacactctaataatcagggatggcagaaaagcggtatcctttagcacccctccatgcataatatgcaattcgagtctcataaaaacctgggagaaagctaaggaaccctagggctaaaaggccatatgcttgagacttttctccccccatatgaccagtgaagataaagtatgaaaggaacaaaagtcctgtaccaaggaataacaggaacag

SEQ ID NO: 74098 - DNA, 456 bp, Glycine max
  unsure (1)..(456): unsure at all n locations
  Clone ID: jC-gmfl02220091c11d1
ctgcataaaaatactagataatcctcacatctcaagacattttttacatacgatggtaaaccgtcacattacataaaaacttttattccatgcataataaaacacgcaatgattttgagggtttgaacagagtatttagtttggtagacaaagtaactgttcagaaaagttcttcatcaccctgaccatcctcctctctgaggacccacagagctcaacctgtcaagtactgagttgaaatcaacggcctgtccactctcctccatcctctggatcacacttgcaacatggtcacccctgaatcccatgctcaccagtttctcaatcaactcattgtagggatggttgcggacgaattgtgactggttcggatttcggaccatgaggttatgcccttgtggngggttctgaagggaagcacttgctgggggatatccaggttgagcaaaatgagga

SEQ ID NO: 74099 - DNA, 341 bp, Glycine max
  Clone ID: jC-gmfl02220091c12a1
aaacccccaggggtaagtaaaaaaacgtaaaaaacaggcccaaaatttttaaggggaaaaggaaaaattggggcccatctaattttggggggacaggggggccctttttttttaaaaaaggtaatttagccctttattttttaaaatgggttaaagaggacccttgggccggggtaaaggtacccctttaaaaaaaattaaaatcggggggggaaaaggggggtttccccccttaacccaaaaaaaaaaaaaaaatccggtttttgaaaaaaaaccacccaaggggaaaaaaacaaaccattggaagctaaaagggccccccaaaaaactccggggggcaa

SEQ ID NO: 74100 - DNA, 430 bp, Glycine max
  unsure (1)..(430): unsure at all n locations
  Clone ID: jC-gmfl02220091c12d1
acttagataagtccggtagaatagataatatgacgtgaaaaaaaaaatcaaaataaatgacgtatccatatataactactcagcgtatatacagtcaccaaaaggaaacaattgaacggagacaaacaccatcacatacagaaaataaattatctcccaaatcaggtctcaggcactgggtttacttccactcttatacatgttgtcaatggcattctgatagtatttaagcaactgtggcctcttcttcttgtatgttggagtgataaggtcacgttccatgtcaaatggaattgagtcaaggtgaactgcttttataaactcaaaacctttcaacttcttttccttcgcaatctttgagagctcttcaattatgtaactttntgctcgagcatcttcacagagagaattgaagtccatggatatacca

SEQ ID NO: 74101 - DNA, 415 bp, Glycine max
  Clone ID: jC-gmfl02220091d01d1
gcataatattgatcatttcatttttggggattgggcaagcaatttatggatacaaaaggcggctcccattaaatttaatgttattaagctaacatggggaaaaaataaaaagagtatctcgactccgttttccaccagactagaagagacacgcatctcgataagtatcacaaaagattacagaataaaaggaacattctcttctcaactatatcctatttgttgctgttgctgaggtggttggtaaccacgataccccgaataaccgccatacatgttgggatcctgcccagcaactggaacatacccattaattttcataacccttgtgcagcatacccatagtattcaccaccagaaccagcaccaccattccactggttcggaacagcctgagcctgtatgtttgaaagac

SEQ ID NO: 74102 - DNA, 427 bp, Glycine max
  Clone ID: jC-gmfl02220091d02d1
aagataaagacttcaaagttaccatattattatttcacatggttttgtaattcttagaaacaaggttaccattttttatctaaattgggcaccagcagaaagaccctacactacagtggaacatggtacagaaatccaaaagttgcatcgaaacaaccatgaaggaaaataatgaagctattcccagattccgacctccatgaagccattttcagtggcacagcccctaaacatgccattgcaattgaaaccataagccacttccccagcgttggacacagcaatgagaccagccatcccttcatcgagacggtgcttgatcacaaaatccacggcttcttgaagcttcaagcctttgtattccaacaccggtggcacctcacgcgccagcgtgccacgtatgatggcctcgcctttacccgtgcac

SEQ ID NO: 74103 - DNA, 73 bp, Glycine max
  Clone ID: jC-gmfl02220091d03d1
cctaaaggaaccggaaggccccttcaatatatatattcatgggaatttgatctaaaaaaaaaaaagcacaggg

SEQ ID NO: 74104 - DNA, 468 bp, Glycine max
  Clone ID: jC-gmfl02220091d05a1
ccagacaaggaaagattttgatatcgggggcacgcaacccctttttccaaaatcagattcagccgggtgctagtccaataaaaacaactaatagaaaagagatctataaatattaaaaatctacattgttattctagaatatacaatgcatcttcacagaatatttgcaagggctagatcacttcaaaggagacctcgacaattctaagatgcttcttcaataagaccttgaaaaaattaacttcattcgatgagaagaggtagagcaaaatggattggagatggatttagatttccagattcattttggagccaatcttgggtgcatataaaagcctctcgcgtgtccgggtttagtgaactacgagaagaatctagcactctgcccccagtgctaaatgccaattctggcgccagagttgacattggagtcccaagaacatcacgtgccatcatagacaaaattgg

SEQ ID NO: 74105 - DNA, 533 bp, Glycine max
  unsure (1)..(533): unsure at all n locations
  Clone ID: jC-gmfl02220091d05d1
gaaatcataaaattctatataataaagacaacatatataactttatcctataaattacacacaacaatttcgagctttattctataaattaagaaaaagaaaatagacatgctatctttctttggtcctaccaagtagctccaatcatttcacaactgttacaatattacaagaacagaaatttcaaacacaaaattgaagctacacatattagtatgctttctcaaacacaactgggagcacattaccatccaaggccaacaaaatcttcccattctcacgcaaaccaccaacaatgccacagtcaaacctacaaaaggggcatacatctgtaggacaccaacctatataatatgaacctttgattggtgtctcagtaattctaaagtaatcatccctgcctgatgcagcaatgagcctccttccactctcactatccttctcagccaaattccaatttgtgccctgcacacatattgaggcagctgagaagtcancctgaagtccctattcaccttcacaacatcatcttc

SEQ ID NO: 74106 - DNA, 538 bp, Glycine max
  Clone ID: jC-gmfl02220091d06d1
gaaatcataaaattctatataataaagacaacatatataactttatcctataaattacacacaacaatttcgagctttattctataaattaagaaaaagaaaatagacatgctatctttctttggtcctaccaagtagctccaatcatttcacaactgttacaatattacaagaacagaaatttcaaacacaaaattgaagctacacatattagtatgctttctcaaacacaactgggagcacattaccatccaaggccaacaaaatcttcccattctcacgcaaaccaccaacaatgccacagtcaaacctacaaaaggggcatacatctgtaggacaccaacctatataatatgaacctttgattggtgtctcagtaattctaaagtaatcatccctgcctgatgcagcaatgagcctccttccactctcactatccttctcagccaaattccaatttgtgccctgcacacatattgaggcagctgagaatgtcaccttgaagtccctattcaccttcacaacatcatcttcttct

SEQ ID NO: 74107 - DNA, 581 bp, Glycine max
  unsure (1)..(581): unsure at all n locations
  Clone ID: jC-gmfl02220091d07d1
aacacggataatttattttagcatttcgtgtaccggtagtcgaagaaggtatcgtgcccttaagcattctcgttataatatacaatacaatgatgagcagctagcagcactaaatggctgatccagagagcaagatggctgaagcattcgccttagcaatcttgagtgtttttggatttagaaatggtatcagtctcctgtaagcatgtacacatccatccatgttagatgaacaaagaacctggaaaggataagccttctaaaaaattgctattaattatggcattactggctgatacaatcaaggcggtgcaccaagcgattcaacagatattttgactcacggtgtctaccttttccgagtaaagatttaaaaacacgaaggtaggcaaaacgggactgcggacttcccttactccatgccttcaggaattttacagcatctactacggacccaaactttgaaatatactacacaaagggttcactgaatggagtaaatgtgtgtgaaatcatcaaacaccaaagggcaagtgcctnctcaaatttcccaatttcccataggttattcatcagtttca

SEQ ID NO: 74108 - DNA, 412 bp, Glycine max
  Clone ID: jC-gmfl02220091d08a1
aaattaatctcagatttataaatatatctgatataaattgttcacggactcataattggaagtttacaatttacatgattaattaccaatgtgacttctaagacaacaaagataactcctttctcaatcaatcaacagtatttatttaccttaccccattcaaatccaattaatcatgaaccaatcactccactccatcttcaaaactcccaaataaagcctaacctaagagaagaaaagtgtaattacccccatgaaactatgggtcgaagtttcgaccatatcaaacaattctcaactcaaggtttggatatccagctcgagctttgtgtcgttcaaatagatcttgaagcgcttcaacaaattggctatgtattctggccacctcctcaggagttggctcgtaattttt

SEQ ID NO: 74109 - DNA, 485 bp, Glycine max
  Clone ID: jC-gmfl02220091d08d1
aatcataaataatagtattattaatccctttcaaataaaaaacattagaatacattaaattagctggagcattcaactcaactggtatacatatttattaaacatgatgatgttaattagagccttttaactgtacaggcctagttgagctggtacacctgtgccattgatccatgtcccttgcaagaaagcctcaaccgtgtacctggtagcctcatccctattgatgactttgcggccaggccaattaaccctagcagtggtgctagaaccagccccattgttgttgtactcaccatagtaaagtgtgcttagggcaaagttcccttcccaaggaagaaacccatcagggtgaattaggtcatcaatctgagtctccatgatgatggttcttgaatactccttccacggccttccgaggtagctcttgattgtgtctttgaggggtaccaagtcggtgtcggccttgatcacgcatttctgga

SEQ ID NO: 74110 - DNA, 392 bp, Glycine max
  Clone ID: jC-gmfl02220091d09d1
actaatacaaatacaaatacaacatattcctttgaactcatcatacatgatgtgcagaggacacaagttctagcaaaacaggtaaaacctgattccctcacttatagttacattagcagatgcattaaagtcataaggacaagcaaatcccaaatattaccattattcttgggtgaaccattcaccccaccctatccttttttcccaacaaaaaattaaacggaggttggatgaaacttccttgcacaaacatactagaattaactgtatacatggcctcagtgaggtgaacaccatcccaattgatgtactgagaagggcttgagcacacagtggcattaggtgtgccacatgtggcaaacgcagtgcagttgtaaagcggttcttgcgat

SEQ ID NO: 74111 - DNA, 418 bp, Glycine max
  Clone ID: jC-gmfl02220091d10a1
atcatccatgcaaaaactgtgattacttcctgaatttacattaaatgcatctaaaccttaaataggtatttgtacattgaatcttcaatctatgcatgacaatagaagtagccattttacaagctttcaccaacataaacactcccacctaaaaccatttaagcgttacaacttagttaaaaaggtttgccaatgtttctccaaggcttgcaatcatagagttgttccaacacttctcacttgggagtgaaagcagcaaaaatagtagcatggccaggatctgcaaggtgagcaaagaggttgtcaataggaccagtgccagtgtaaatgtgctggaaccatgcccccatcacagccaacatggccaacctcccattcttgatctcctttgttctcaactccttgatcttctcaggag

SEQ ID NO: 74112 - DNA, 515 bp, Glycine max
  Clone ID: jC-gmfl02220091d10d1
agtatataattatgtatagcatagataataagattcatacaccccacagaaaaaaaaggtatattttaggtgccacccaggcctatactgctagcgtggccaaacttccgatcagaattaggaatgatcttgttccatctgatttagatggaacccaccttggttattcttgtgtacctctaccttgaacttctcttccttctgtcccctcttgactttgagaagcagattaaacttggcaaagtcatcaatgacctcagcctttgcatcagcaacctcatgaagctcatagggtactagtgaattagacctttgctggatagtcttgatcgcatgatttgctgcatcctgaacttgagggtcatgtgttggcacagattgccatccaggttggtgaccatcctttttgacaccaagatcagcagaggtaaatgatggtacatcaccagcaggctcgaactctaggagttctttgaattcaaccatggcttcacccacaccttggcttcatagag

SEQ ID NO: 74113 - DNA, 366 bp, Glycine max
  Clone ID: jC-gmfl02220091d12a1
aaaaaaggccaaaaaacctttttttcaaacaaaaatattccctttaggggctttaacccaaaggcaacaggggcccaaaaaaaaaaatccctttttttcttttttgggttcccctcaaaccgacccccagaaaagcctttatgggaaaccccgggggtttttttacaactaaacccaacaggggggggggggtttttggggtttttgggccgccctagttactttccacaatcccctagttcttgggggccaaccttaaaaaaacaatttttccccatgcccagcaggaagggggaccttttttttaattaacccccaaaactggtcccgttaaacgggtaggggttaccaccaaccttggaaaag

SEQ ID NO: 74114 - DNA, 397 bp, Glycine max
  Clone ID: jC-gmfl02220091d12d1
aaatcataatgcataatagagatcatttcataaataagtattcagcaagcaatttatggatacaaaaggcggctccgataaaatttaatgttattaagcaaacaaggggaaaaaagaaaaagagtagcagagtcggttttccacgagacgagaagagacacgcaactcgataagtatcacaaaagattacagaagaaaaggaacattctcttctcaactatatcctatttgttgctgatgctgaggtggttggtaaccaggataccccggataactgccatacatgttgggatcctgtccagcagcaggagcatacccataattttcataaccttgtgcagcatacccatagtatccaccaccagaaccagcaccaccattccactggtttggatct

SEQ ID NO: 74115 - DNA, 414 bp, Glycine max
  Clone ID: jC-gmfl02220091e01d1
aagtatcagccattataattgttattgatatagggtataatatgagatgccaggaattaccatgacatacacttgtgagacatattgtatatctgctaacatagtataacttttgccagaaaatcgatctcctgctttggaattggcttaaaataaaaataaccatagaagtcaaatttcaattaactacatctaccagaaattaaagaaaaaaaaaacattggacattccctccttctattgaacatggttgtattaccaaccatttttttttaaaaatcatgataataaaaacatttagcagtttcctatatacctgagatggtactcactaaccttttctattacaaaagatcttctacggagaataaagaaagatggaagttataaaaagagggaagggctgttatgcat

SEQ ID NO: 74116 - DNA, 414 bp, Glycine max
  Clone ID: jC-gmfl02220091e03d1
aatagtcaaataatattagttcccataataattaaggaaaattcaacatttacatcgcatactccattgaaatcacctctatgtaagtaattatgaactatgaacatcttggtaattcgaaccagggtgaactccaatcatccccaatttaggaggcaacaagtacaacttatttttctttcagggagttctcaatatctatcacaaaccggtacttgacgtccctattgatgagcctctcaagagcttcattggcatactcgattggaattacctctatatttgggtgaatctcgtttgcagcacagaagtcaatcatctcctgaatatcttttgtaccacctgtaacacttccggctacagtctttgatcctatattaaggcttgcagggctgaatttgacttgacttggga

SEQ ID NO: 74117 - DNA, 460 bp, Glycine max
  Clone ID: jC-gmfl02220091e05d1
gaagacttaataataaaacactccagagtttcatattactcatcccattcttagggaagttctggagtatatgtcaacattgttaaagaccaagaatgtataaaaataagaagaagaattttaagttatatatatatttggctaatccctacttgataatgaaagcttcattatttgagtcaaactttgatgccttcattttgtttgagtggaaacataggttctgagagatggtgactgagtgagaacatcaggtgcaatagtagtgttctgtgctccactcttctgctgcattctcctcctagcaaggtaccctctcacccaaggcgtaacatcctcgttgactttgatcatgatgaagaaaatgatgcggtagatcacaatcatgctgaagatcacactcaggtttatccactttgatctgttgacatcaatttggaatactttctccaagatgtat

SEQ ID NO: 74118 - DNA, 486 bp, Glycine max
  Clone ID: jC-gmfl02220091e07d1
acccttaaacagaaatacattcattaattagataaagacttgagacaatgggatctcaagcttaattgacgggcactagcggacaagagaatattcatcaacccattcggctacaatgatagatctgctaagcatattatatagggggaaaagaattagaatataacacgtcaaatgtcttggttgaggagaaaaaaagtgttaacacccactgaatggctcggcagaagaagcaatgaaaagaagaaatgatccagaaggggacagggaagatctagagtataactctactttcctctctgcaaataataaaagatctaaacagacagcaatgcatagccaaacgtggatgccaacaatctaatctaatgtttctccattttccttgcctaaatccgcttaccctcaatggatttattgtagagtccagaattaatgactgcaaccacgttcctgacctcaagatgatgatattctggctacatc

SEQ ID NO: 74119 - DNA, 394 bp, Glycine max
  Clone ID: jC-gmfl02220091e08a1
ggcgccaaactattatctcaaaatgatatcatttagttgcaaagttttattaaacaataagagtttattttgggacatatttgctactgggaagattttgataatttggtacaagcaaagggcgaaggtttcaaatcattaacctgggcaaaatctgtcatttcaaaagcttatttttcaagaaatatagctcacttcaacccaaagagatattttgccaaagagattgctgattccctttccaggatcactttgttttacaatagactctccaaccaatatagctttaacaccagcttcctgaacataggcaatatcgtccggggtaaagagaccagattccccaaccataattatgcctctctcggggattattttgcctcgctctccttca

SEQ ID NO: 74120 - DNA, 178 bp, Glycine max
  Clone ID: jC-gmfl02220091e08d1
aaacagggatttttatctttttattattggtataggtaaaaaccactgcacgataccacaaataatggcaaagaaataacctgtacccttactatgggcataaattaattcctcctgaatttattcagctaggcttttctgagtagaccagaacattgaaccagttgaaaatcagtat

SEQ ID NO: 74121 - DNA, 429 bp, Glycine max
  Clone ID: jC-gmfl02220091e09d1
acccataaaaagggggcactaacacataaaattataggactgatccaaaattcaatatgcggcccatggtctaattccatgactaaaactgtaaagctcaaatatactatcctcctaaaaggattagatgttgaaatccaagttattccaatgaaagacaaactttttcgagtgatagtcccttggtatcttaaaaggagcattattcaaaattgaagctacacttctgcgggcaaaccatgggaacctactaacaaggacagtatccaagaaggagcaatggattctaatttaggcatgagtaagccaatgccttgtactgaaaaagcttttctgcggtcaagtccaacttattccttgagaactcatcaatgggaagtccttgaactattgtgcattccccattggcacaagtgacatggaatgaat

SEQ ID NO: 74122 - DNA, 427 bp, Glycine max
  Clone ID: jC-gmfl02220091e10a1
aacagaaatgcagatacattcattttgtaataatttatatacaatattgatattgtttgcatcaaccaaaaacaacaaaccggtacatgatgcaaggcatgaaaaaccggtatacattcaaaatatagaaagcaaaaaaacaaaaaactgctaactagagaagtaaaatgccgaggccagtagttttggcctttttcttccttcaaagcaaatcgtgttatgcttcggtattaccaaaacatatcactggaaaatttcctaggatgtcataaacctctatagaaatcaacaacctcatataatgatattttaggcatataaagttcgcattgaaaatagaggcactagagtagcagtatcttttgatagcaatcaccaagggaaccatctccaaacagttgtcatggattttcatgttgtataaggg

SEQ ID NO: 74123 - DNA, 380 bp, Glycine max
  Clone ID: jC-gmfl02220091e11a1
ctggaccttgggaatttgggggattgtgggacataaaaaactcaccatggggggaaccggcaaaatgccccacctgggggtggggaaagcataacggcattcgccctagcccaagtacaaccgtcaccgaaacccaacttccgaagaacctaaacggcaagccctaaccccaaggccgggcgccgcctttggggctgcccggggaagcccccacccaagggatgggggccgacaccgctggagctaccacagctccgaccaaaggcccaaaagggtagctggaaccgccccccgaggcccaagcggtggacccggcgcaaactccccaacgttcaaaaaagaaccatgcttgcttgggaattggaccggtgacaaaggaa

SEQ ID NO: 74124 - DNA, 470 bp, Glycine max
  Clone ID: jC-gmfl02220091e11d1
caaagcagtgtgtgtaggcctactttatatatgcaacatcaacaaactaagctaagaaactgcccttttttccttctctctttatctcccaaaaaaaaaaaccaattaaagaatatcttagggtacttaaaatacaattcagcacatatttctgcattagtctctttttatgtttcaatgcttaatgacataagcattgctttcttcgtcccatatttctccatttggcaaccactttgtgtgctttcaaatatagaaccctgctccccctccgtgtcacaaggcaagaattgcagggcaacaatatgcatcattgccaatagtatatctctgcttaaacttcagcaagagatactacattttggcttcaccttctctttgctaactggaatgccctcttcaagaaatgatttgcagctctgtcatttctactgcacagcaccctcagtattgcgtttggatctgaccta

SEQ ID NO: 74125 - DNA, 429 bp, Glycine max
  Clone ID: jC-gmfl02220091e12a1
cttacccaaaaccataaagtttgcattaaattttggggaaacatgatatccatctcaagacatattaatgaacacatgtaatagccttaaatgatacaaactaacagaaatcttaaatataaatgtttttagagtgaatcaacacacaaaattaaactaattaagattacttaataatctatcttgctcatcatggtctaggcttcattcttccttcattggccatcttgaagagctgggcttgagcttctgcggccttgttggagttgagtgaaggccacaaacctgtccctgacttggttggtagtgtaagggaacttgttgttcaccatggagttgaggaaggaagctgtgccttctttgtagagtgctcctagcccatcaattcttgtgttggaaagggcttgtggtaagctcaggccaggactg

SEQ ID NO: 74126 - DNA, 465 bp, Glycine max
  Clone ID: jC-gmfl02220091e12d1
aaaataatagcagtttcatattgtcttccctacaaacaacaggttacataaaaacggaaacaaacagaaccagttttatagaacagtaatggaaactagatctagccggaacagaaccatcccctcaaaagagacaatcaaccggcaacaggaagttgcggcatgttatacatcttcaagccaccgcaatacattaccaagttcaaaatcacatatcatgttggccatactcctcctcctactcttcctcctcatactcatcctcatcagcagtggcatcctggtactgttgatactctgacacaagatcgttcatgttgctctcagcctcagtgaactccatctcgtccatgccttccccggtataccaatgcaagaaggccttcctcctgaacatagcagtgaattgctcactcactctacggaacatctcctgaatggaagtagagttgccaatgaatgttg

SEQ ID NO: 74127 - DNA, 405 bp, Glycine max
  Clone ID: jC-gmfl02220091f01d1
atccgcaaaaccaatcacattttaaaaggtaagagtattatttccatgataatctgatttaaaagtactccgcaatataaacagagtttaccaaaaaacactcgatctacagctagtaactaaatccttcattttatgatacggataaaccgcagaaagaaagaaataaaggggaaaacataaccctgcattagttggcggcacgttgagttgagcatgcattatttgactatgcagatctttttgacagaggcagctccaatacgatgcagggcaacaactgcattaccaggctttcaaagggccctttctgttgcggacttaagagcagcttcgagaatgacctctgtggatttttgatcgggagcctttgcagatccctcgcccagtataggaataaagccc

SEQ ID NO: 74128 - DNA, 394 bp, Glycine max
  Clone ID: jC-gmfl02220091f03d1
acccgacaaaactggtaatataaaccttatagccattatttgggggattttattttagggtttatttaattggacaattttatattttatttcattcggggcatataatccctaaacccgttggggattgggtaattgcacccaccatatccagtgctacgcagggctggtcagtaggtacaaaatgacccgctccaaggatccaataaaattgggggtttttgtatgacttaaaaaaccctttggtcgttttggcacttccacaggagaggggggttctgtttttctccaagaaattttgaagccctgtccactcgagttttttaagccaagctttagtccccttggttgcacaaatgagatccacttgcccactgtacacaggcacgttgac

SEQ ID NO: 74129 - DNA, 526 bp, Glycine max
  Clone ID: jC-gmfl02220091f05d1
aacataaataattgcctgtaaaacaaattccgaaaaaatattttggagtaacacatagtagagtcgttgtatatatcgtaaaatcaaactgtacacaaatttgcagaaatcacatgtaacaaataatcgtcagtgtaaaacaaattcatataccaacatgcatgttgtaaaggtggcaccagttaaagaattgtgacacctgtgaagaggtattgatgtgtgtatacttgcatattcccatctcccatggatttggacatttggtcgagtgtatacttgttaaaaatgatgccaaaattcaccttacagggatatacaaagttgtaaaggtgaattcatgctatttgatatataacttcactggcttcagagcaatggtgtcaattcataacccaatttacagtccacaaagctagcataataagctctcaactgtcaggaacctgtctgcgatggaagaagaggtggctgtgtacctttgaaaaggtggcaagctctgttggtgcgacaaccaatcttaaccact

SEQ ID NO: 74130 - DNA, 426 bp, Glycine max
  Clone ID: jC-gmfl02220091f08a1
aaccaaaccaggtgttcctttataaattaaattcatctgtacacgggcatagaaaaaaatacataaaaattatttgttcagaacttggagagtagaccaaattgagtttcgggatatacacgagacgagattatattataacaattcttctcaccttagcagtcgatgtcgtgcacacttgttttccaaagacctccaagaaagacaaatttctttggctagagatcagacttgaacaaatgttcgtgttcttcttttagctctctctccaatcgtgtatttccatagcgagatttctggtctatccaaccaataatatcggagaatacaatctgcaaattttgtggtggctctccatacaatagaccgtgccacatttctggatacgactttagtgtcttatctgagcttgccgcctcatcatat

SEQ ID NO: 74131 - DNA, 418 bp, Glycine max
  Clone ID: jC-gmfl02220091f09a1
gaaaaaatgatgcactgcaggtttccactgctccatcccacaagacatctgggtaaaaagaaaagaactacattttatctttttatcctaggggcagatattgaacatcctttagtatttgttgtaggagagctacaatcacattttcttcttcatttgcaagccaaacacaatatgaagcattgactgcaccttctctttttataagaagatacagaaaaagggggaaagaatattagggttggaagaaggtggaaaaattgaacaaaaaaagagatgctgctcatcatccagaaacaaaataaggttctgcctacccaggaattttgaaacagccacttctggatcttttttctaaaagctcctgctaaagattttgaagggcactttgtagtgtgagttaatgtagcctccaact

SEQ ID NO: 74132 - DNA, 331 bp, Glycine max
  Clone ID: jC-gmfl02220091f10a1
atgggggggggggggaaaaaaacccattaaagggcgggcccccaacccatttaaaaaagggggggaaaagggaaccggccaaaaaaaagccccacggtaaaaggggatttccacgggggcaaaattgggaggggcccataaaaaaaacaaatttatttggggggccccaaaccccaggggggactagaatttgggcagaaaaaaacccccctttgggggagaaaatttccccggggaaaattgccccaggggggggggtattggccttcaaaacaaaaaactaccgcgggatctttggggggaaaaaaaagagatttgggaaccccttggg

SEQ ID NO: 74133 - DNA, 464 bp, Glycine max
  Clone ID: jC-gmfl02220091f10d1
aagcttaaaatgaaagggcttaacattaatacttctcacattacataaacctgtttcaaatacagtcacaataaaacaaggactttcaccctaatactaagctgaaggaatcgattgcaaaataataacccttagaaaacactacggctttgtaaatcataaaccctaagctctctcgcccctaatcctacgagctagctgaatgtccttgggcataatggtaaccctcttagcatgaatagcgcagaggttggtatcctcaaagagcccaacgaggtaggcctcagcggcttcctgaagagcggagacagcgctgctctggaagcgtaaatcggtcttgaagtcttgagcgatttcccttacgagcctctggaaaggaagcttccttatgagaagctccgtgctcttctggtacttccgaatctccctcagagccactgtccccggcctgaaacggtggggct

SEQ ID NO: 74134 - DNA, 414 bp, Glycine max
  Clone ID: jC-gmfl02220091f11a1
aaataacaatatggagaaattaaacataaaatcctgaaaatcaaacatgatctatacatattcatgtatgtacacagctgggtcattagcctaatcaagaaatgcaattctgactcatacaaccagattcaattgacctacaggttctgctctacatgatatgataaacccaaaatgtcccaaggtctagcttggctaacaaaataatgtacatgtcaatgtcacagctctaatttatttattttcgccaggcgattgatctaaatatggtacaacaagctgatgcacttagacatgcttaatcattactgtcactgccactgctggtgtccagaaagctatactctctccatctgctgagtttaatcaacacagttccccggctctcttgcctacattcaatggcttctctat

SEQ ID NO: 74135 - DNA, 522 bp, Glycine max
  Clone ID: jC-gmfl02220091f11d1
gtaaaaagcaagtaacattaagttggattcggatacacaagataattcacattatctgaagtacttcaccaaacacaaatctaaaaactctcaaaagtcatttcgttctttgacgctcactttccggggacgaagttggtggcataggcccaggcgttgttgttgacagggtcagcaaggtgatcggcgaggttctccaatggaccctttccggtgacaatggcctgaacaaagaagccaaacatagagaacatggccaatcgtccgttcttgagttccttcaccttaagctcagcaaaagcctctgggtcatcagcaaggcccaatgggtcgaagctgccacctgggtagattgggtcagtgacctcaccgagggggccaccagcaatacggtaaccttcaacggcacccattaggataacttgtgtggcccagatggcgaggatgctctgggcgtggatcaggcttgggttgcccaagtagtcgagcccaccctcgctgaagatctgggacccggccttg

SEQ ID NO: 74136 - DNA, 579 bp, Glycine max
  Clone ID: jC-gmfl02220091f12d1
ccaaatgtaattgaaacacatcctattcatattgattttattttgttacaaaatacaattgaaactcactgaacttttagcagatggtttccacctttgcatttgatcacagtggcttcaccagtctggaagaacgtattgaacctgtaacattctaagggattgcgcttatactatccctcagagtgctgtttgcagccctttggtccataatgcttagtgccacgcctgacaatcgctttgcataagtagcagtaatggcgttggcatgcccagcaaaacaagtgattattatttccaatctttggattatattgacgacaactaggacacgccaagccatgttgaggaaagagctcagcctgtagttgtcctaccgcctggcgatgattaatgcgctcttcccaggaatcaaccatttctcgtgggaacaattcacatgaaccatccctgaaatgtccatatggatctgatgcatcaattgctttgttgcagcggtaacagaagtattgttcacagttaccacatttcattctgttacaaccttcagttcgagaaattgcatgtcacaagaagggc

SEQ ID NO: 74137 - DNA, 466 bp, Glycine max
  Clone ID: jC-gmfl02220091g03a1
caggttgaacaaagtagttagccttcatagctagattgcaatcaaatgtttacactaacaaggaaatgtaagagcacaaagaatctggctccagaaaattgtggtcacctaggatagtagtctctatgacttcgaaattctaactaacaactaccctctacacaaacttccatcatcatcatcatctaaatcaccattggatttgacaaagtgaggactaatgtagctgttcactttcccagcttagcttagagacaactctttcatgttgtgggaaatattcctccatctctttgacaagctcttttggtgttggggcagatacaattatatggcgagcagtggggctgatgaagccttcctccaccgctttgtcaataaaagacaaaaaggtattgtagtatccatcaacattcagcaatcccaccggtttatcatggatgccaagttgagcccatgttatcac

SEQ ID NO: 74138 - DNA, 422 bp, Glycine max
  Clone ID: jC-gmfl02220091g03d1
acgatacatatttaagcttatttttctaacctcaagcgttaatgcatcatttttctaaataaagttccctaataaactacttaagtatcaagaacgattaccctttggtaccattccgttccaacattgcccttgaaaaaaacaagctgcaaccgaatttgatcattactatgatttcacggcctagaaagctctatttttgatttaccgtcacactttaataatcagggatggcagaaaagcggtatcctttagcacccctccatgcataatatgcaattcgagtctcataaaaacctgtgagaaagctaaggaaccctagggctaaaaggccatatgcttgagacttttctccccccatatgaccagcgaagataaagtttgaaaggaacaaaagtcttgttccaaggaataacaggaac

SEQ ID NO: 74139 - DNA, 573 bp, Glycine max
  Clone ID: jC-gmfl02220091g05d1
atataacagctgtctggtctctgcattacatcaacgataatggcttacacgttccaaatcacaactcagatctctatacagcagctttcaaccctaaaccgcattatctatttaattatctataaggtccaaacaagaaatatgaacatggaaggttttatggaaaaagcactgttatgagtcttcaaaatgatgatccgtctcatcaaagatctcctcctgcaaaagctcttcaatgacatcttccatggtaataattccaacagcttcttcttcttcagggagctttggaagtggacttccatctatctctaaaatatccgagtacatattttttgaccattttctgctccgagaacccctatttgatgactcgtttgtatttggaaagcttttccacttgtggagtggcatcttgggtttcaaagctttctctttgggaggcttttcaccatcaatatccaccttaacatctctcaccgagtcatttgcattattttgggcagactgctgctagtcttgtcacaccgtctgacaacaacagccatgtgactatggcccttctgaaactca

SEQ ID NO: 74140 - DNA, 414 bp, Glycine max
  Clone ID: jC-gmfl02220091g09a1
actaatacaaatacaaatacaacatattcctttgaactcatcatacatgatgtgcagaggacacaagttctagcaaaacaggtaaaacctgattccctcacttatagttacattagcagatgcattaaagtcataaggacaagcaaatcccaaatattagtattattcttgggtgaaccattcaccccaccctctccttttttcccaacaaaaaattaaacggaggttgggtgaaatttccttgcaaaaacatactagaaataactttatacatggcctcagtgaggtgaacaccatcccaattgatgtactgagaagggcttgagcacacagtggcattaggtgtgccacatgtggcaaacacagtgaagttgtaaggtggttctcccgatccacagcaaacgttgaaggtct

SEQ ID NO: 74141 - DNA, 426 bp, Glycine max
  Clone ID: jC-gmfl02220091g10a1
aaaaaaatataattaatgacagattaacatatgttatttgatagagtacaattggccatcaagtcacatggttgaaagaatagccaaactttcctcctttattacaccttatttttctcaatcaaaccaaatgatttagaaaatccacattatgaaagtatgtatgtgtataaacattaaccaatctataaatgtttttagtcatgaacgcatggcgtgcgcttagcacctaggaagatcagctggaggcggaggcactgataaagaaggagtgggcccattctcaacctcgaaagccatggctagcccccacggcaaatgagtttccaaatggcaatgcacaagccaaacacctggattatttgcttggaatctaacaacggaccatcctccgacggggacagaaattgtgttacgtatctgagg

SEQ ID NO: 74142 - DNA, 371 bp, Glycine max
  Clone ID: jC-gmfl02220091g10d1
ggaaccaattaaaaacttaacaaaatttaaaaaaaaaaggggaccgttttaaaaaacagctttggtgccccccgggaaataaaagcatttttcaactggagcaatattgcaagggctgaaatagcctacacaaaaggggagccacacatataaggatgctttctcaaacacaactgggagcacattaccatccaaggccaacaaaatcttcccattctcacgtaaaacccctttatgggcacaattaaacgtccaaaaggggcatacatctgttggacaccaccctatataatatgaacctttgattggtgtctcagtaattctaaagtaatcatccctgcctgatgcagcaatgagcctccttccactct

SEQ ID NO: 74143 - DNA, 427 bp, Glycine max
  Clone ID: jC-gmfl02220091g11a1
gatgataataagcaaacatttctctattattataaaatggtttacaaacgagtttatctgaaatttctcaagatctaaaatacatagagcacagttttttttttccaaactaaagaaaaacagcaaacttttgaaatcactttcacgatgtgtagttgtacttgtacacaataataatttctaacaacataaataatgacgagtctttatgtgacaagagatatgccttgtagaattaatgcatcagctagaacttggttagcagcttgtgaaggatggacactgtcccaaaacacatactgtgtggcattagaacaagttcctggtgattttggattacacaacaaggatgttgtctctacagtcccggtaccacagcatcctctgtttgcctccacaaaaccagattttgaaggggattgaacaa

SEQ ID NO: 74144 - DNA, 387 bp, Glycine max
  Clone ID: jC-gmfl02220091g12d1
gaaacaaaggaaggatcatttttaaaaaatttttttttgacaatttacaacaatttgattctgatataatttttcaagaaaaggggggtgcaaatgagccagaattgcaacattgccttaagcaacgggaacccacctgttttttttggggccatttgcccatcaatttgggaacaaggggggcttaagccagaaatgtatggatctttcatgtaatatgcccatgcttctggtttaaaaatgaattgacggggttccaaaatttaatgccaaaaacttgctataaggggttcctgaaaaaaaccgcatcaacttggcatggcccaaaaatgcatgggaaaaacccaagtttaggcatgaatatcaaatgccctaatcccaggtttt

SEQ ID NO: 74145 - DNA, 405 bp, Glycine max
  Clone ID: jC-gmfl02220091h03a1
ggggggggaaaaaaagggattttttttaaaaaccccccccaatttccaaaaaaaaaaaattttttggaaaaaaaaaacccccaaaaaaggggggtttttaaattggggggaaaaaaagggtttttttttaaaaaccttcccaaaatcccccaaaaaaaaaaaccccaatcccccccccttttttttttcaacaacgggccccaaacaaaggaatttccccccaaaaaaaaaaaaattttttaaaaagggggggggaaaatccccccttttttttttttttaaaccccgggaaaaaatattttttatttttatcaaaaaacccgggttattaaaaggaaaaaagggttttttttaattccaaaaccctccaaaaaaacccccaaaaaaaagtcccttgggcccctt

SEQ ID NO: 74146 - DNA, 522 bp, Glycine max
  Clone ID: jC-gmfl02220091h04a1
agactaatacaaaatattggacccatacaatcacaaaatacgatgaaaaagcttgttatgattcctagttattacaacaagatggcaaccatcaatcttaatcgagcttcaattttgcaaaaaggttaaattattgaaattatatcaccaataaaagaaatagctcagaaacatacaccaacaaattgtctagttttaaataatcaaaggtgcaatccatctaactcaggagaaactgactgaagggggttaaaaagaaatgataaaaatctgaagaatattattttccttttctgccattgtatcaacacaagcttttgttcccatttacatgtcttgtgtatcttgattatcatcaccccctctgttggatcctccttgatcagttccaaacgtcctcttgctcatgttagttcgctgcactaatcgaaccagcgcttgaaccacttctgacataggtggtcggaattccggctccggctgaacgcatagagcaataacatccgcaaatcgagaaaggga

SEQ ID NO: 74147 - DNA, 419 bp, Glycine max
  Clone ID: jC-gmfl02220091h05d1
ggggatcaaaaccccatattttggggcaaaaaggaaaccggaaacaacaaaagcccccaagggaaaactaaaatcaggtttaaaactgggcccacaggaaaaaggggccaaaagggggcccaacaacctatttccctaacattaggggcaaaaattaaccagagaaaaaccagggggcaaaataaaccctacctgaaaccccgccaaaaaagaaacctttgggccaaataaacctggccaaaaccccggggggccaagtaaattggctggttggaaaaaccgaaaccccaagcccttggggggtgggacccctgggaaccccatctccaggaaattttggaagtgcctggtccccaccccggggggcaaattgccccaaagggccaaaccgggaggggggaaacccttgacggccaaaa

SEQ ID NO: 74148 - DNA, 447 bp, Glycine max
  Clone ID: jC-gmfl02220091h06d1
gtccaaaagacaactatcctgattatgaatatcctaaacaatcaaattacaagataaataaaaaataaaaattatgaaacaagcaacatacattgggaaggcagtgtccacaaattccgacagaagggaatatcaacatcccacaacgcaatcgaccccatcccaaactaacacaacttattttccccccaaaagaaaaaatggctcaggaatcataacatctatggggtctactttgcgactaaccgaccaactcaaaatatgaggaactcaaacatactcaatcctttattatatttatgctgcatagaagaaatgtggatttgggggggagaaagcatagaaacaaataaattgctgatgacagtagacactggttgagaaggataccaaggtatacgaacttgcttgcttaatcatcaattgccagcatctcggctataaaac

SEQ ID NO: 74149 - DNA, 430 bp, Glycine max
  Clone ID: jC-gmfl02220091h09a1
aagagaaagacaacaaagttaccatattattatttcacatttttttctaattcttagaaacaaggttaccattttttatctaaatcgggcaccagcagaaagaccctacactacagtggaacatggtacagaaatccaaaagttgcatcgaaacaaccatgaaggaaaataatgaagctattcccagattccgacctccatgaagccattttcagtggcacagcccctaaacatgccattgcaattgaaaccataagccacttccccagcgttggacacagcaatgagaccagccatcccttcatcgagacggtgcttgatcacaaaatccacggcttcttgaagcttcaagcctttgtattccatcaccgctgccacctcacgcgccagcgtgccacgtatgatggcctcgccttcacccgtgcacgat

SEQ ID NO: 74150 - DNA, 416 bp, Glycine max
  Clone ID: jC-gmfl02220091h09d1
atcaaataggcaacacctccaaaaaagggcccccacaaaaattaataaataaaactgatttacaaaattccaaagatttttcctcaatttcctccaaattacaattacaacgggaggaccttaatgactgacacataacaattgtaagactttacgaacctaacaagacagttgctcattttccccctgccatgttttcttttattgatcaaaaggcaaaaccacaaaaaaaaaaaaaaaatcctgcccatttgaaattttacataacaccaaactcaaaaacagagtagcacagaccacttatatacacaatagtcctatttgaacttgattgagttttaatcctctaccatcttttctctgcttcctggattagctctcttttgtttatacatatttttagttcaaaatgggtt

SEQ ID NO: 74151 - DNA, 450 bp, Glycine max
  Clone ID: jC-gmfl02220091h12d1
agcggaagatctgaaaccgttattgggactcgggaccacttgataacatacataatctgactcattacacgggacacatataggcagagtcgggtctgaaagcgaaaaatcagtcgctcactgatcatagactacaactgtgctataagctatggcgatgtataggacagggtacacgtggtgactagtgaagaggagaggaccactgtttgaggtgtcaggagcctgtactaggaacatgatcctacataccatggacctttgttcagaacgggatatctatgagggggcactcaatagtcgaccttgggccataatcagggcccagggagtgaaggctgtcatgagatcatagctcatggcagaccaatcctatgcgtgcacctgatttcctagtgcttgagatcgatcgcacttggataaccaggggcgtccaaatggagaagatgc

SEQ ID NO: 74152 - DNA, 535 bp, Glycine max
  Clone ID: jC-gmfl02220092a03d1
aaaaataatatcgaaataaactatacaagtgaagagtaattttcaccttactgtacaaaatcataaaatcatttgaccattttttttacatgtacaacataataatctgtctaaagaagacttttttttttattttatatatattaactttctgtcaaaaaatcactgttctccatattacgaatctttgattatttctaaactgtgaaataaaaaattatatgaatggatttagctacaaactagatttaggcaaaatacgaactagtcctcgaacaactgctcccatggctgtgtagaaaatgtgtagaatttgccttgcccttgtctcccttttaacaactcctattgcaaaagaatgatctatagaaagttatttgttttgttatattcctaatcacggtcttgaaagctcccaagtgaacaacaaacatgtaaatatgtagatgagaaaattgatggacaaagcattagatttggactccataaccatttctgggactgggagataaccttgtaatccaatgttgaaaac

SEQ ID NO: 74153 - DNA, 212 bp, Glycine max
  Clone ID: jC-gmfl02220092a05d1
ggcaaattaaggagtttccattaaatagccaaaagcaaaattcccattgcttctcccatcatcagtctatggtatatgcatactgaagacagagatgaagtggttgatccaaaaaggcataaatcgtaaatatgaaaagcttattgaatgaatccaaataggttcctaagacattggaatggctttaggggcctgcatggaaatgagggaat

SEQ ID NO: 74154 - DNA, 436 bp, Glycine max
  Clone ID: jC-gmfl02220092a06d1
aaaactcaaaaacaaatgtaacggtaataatgaaaaatacaaataatttattcagctgttccttcatgattcacccatacatgaacgatgattactttgtttagctggcatagacttgcatgtaattactaattacacctcatcaattaattctgagaagcaataatggtgctatacattacattacaggacacatgtataatggacagaagcgtggaagacaagccccacacacgaaccatcatgtctcagcttcacgacaacgacactttcctcagctcactctccttcacaaacagcccatggaacccgtacggcacccgccgcggaagcctcaccgtcgtcacaacatctagctccggcgacttcgcgtccatcaccaaaaacctcgactcccccttcctctcatcgtgcacgtaactcaccaagtacccat

SEQ ID NO: 74155 - DNA, 496 bp, Glycine max
  Clone ID: jC-gmfl02220092a07d1
gaaatgaggatggttttttcatataaaaagcacacaacacttgcaagtgggatacttctacgtcttaaatggataaatacattcgtggtttcaaaaagtaaccagagctacaattataacagcttatttacaacacgcttaacaaatttacaaagaaaatcctccagaaagcgtaattagactgcttcggcaaagccaacttggagatttccatagtcaaagacggtgtgatatgccctcatgaaaacatcgccaagaatccacaatggaccctttggaggaggaacatcaaaagcaataaacccactaaggcagacttctgtaatgccttctccaggtcttagaatatactgctctggtgtgaggacaaaagggttatttccaattgtgaacgtaatgtttggcatcttggaaagactattacagcttatcactgactctccagatggacttggcagggtctcacacaggtgattcacatagttgaatactctgt

SEQ ID NO: 74156 - DNA, 506 bp, Glycine max
  Clone ID: jC-gmfl02220092b02d1
agttcaaaaacaattgctctattatttaacctagaattaacaaacgtacagcttccacattattactagtaaacataattaagatgatcgaaatacaaagtgacagtgaaaacactcttattacttgcaaaccgatcgagagcatccaaatacagacatacagccaataataaccatagacaagtattggctattttattcaaaagcacaatagataagcaaaccacacacacattttagatggagatactgttgggaattcctttgaaactcatcccttcctcacttgaacgatggagcaatgtgtatggaagctgaactggcccatgtcggcttttcagacttggatcattgttcctctgtgtgatttttccctcaatttctgccagtttgtttccaaactttttgaaagcttccaatgcctttgaatccgtagtccaatttggattatccctttggccaggtagacctcatcagaagcatgccttgacaatatctctatcact

SEQ ID NO: 74157 - DNA, 463 bp, Glycine max
  Clone ID: jC-gmfl02220092b03d1
gttcatgctcttggatgtttaacgaaatgtgacaaattaagggagtaataaacgaaggaaaggagatgtacagtgtacagatgtgaaatgtagcccaaaattccaaaattcttgcatgggtaaactaagactttacaaacttaagctgtgacctgaacagactttgtgcggggggaaaaagaatatactaaaacgtgtataagctatacactaagcttgaaattttaatatgcaacgtgtctaatctactcaagttggccttattttttttggaagctgggtccccatattcgaatgggataatcatcacttgcagatgccaacatttgtgggattttggggttccaacttacacaggttacagtcatgaagtgcccagattgaacctttacaggcctggagttccggcagtttcaaatgtatacctgtgaattcttactaccactggcgataaacgtgttat

SEQ ID NO: 74158 - DNA, 527 bp, Glycine max
  Clone ID: jC-gmfl02220092b05d1
acagacaaaagcattaatgtgttattttcctcatactcaagattcagcaacatataaagggtttttgggcctaggcctccttagtaacaaaaaacaaaccacaaagggtcaaaggataacaaaatgcagccactaaggcaggcattgggaaagattgcacaaaatctctcttgatatcattttaatcagtaggaaaatctgttacggctagtcctgagggacctacgttcttgctgatggaagcacattttttcctgccccagaagcaacattgatctcaatactgtcaaaaatgtctgatcctgattttgtaccgtccttaattggcaattcatggccctcactgtttccttctttggttttgttcaatttgtctttgctttttccccataccacggtgtaaagtccactcacaatgataatagctccaatcacacttcccaaataaacttgctcagccaaaacaatggatcccaatgcagcagtgataatcatacatagagggctgaaagaagtcacaaacacag

SEQ ID NO: 74159 - DNA, 539 bp, Glycine max
  Clone ID: jC-gmfl02220092b06d1
agtaaaatagacgatgtaaatgaacatgtttaaaaattaatgtcagatgtagcttttacaacatcaagactcaagtaaaccaaaaacataacaaatttgaatactatgacacattacccagttgattatgttctaagatacgcaaccaatacaatagccacgataaggtgtaaaaattgcacgggaagacctcacaccattcaactcttgaaagaaattcaatcatcgacactcatgaggaaaatgattgtagcgctctatcaaaactttcttcagctgatgatacccgtttgaccaatacatgctctgggtgagaaagtttcagctggctgaatgatttgttagatggtttgccgagatgaagacagcatacaactagattggctagagtttctggatccctggcatccttgttaagagcttcaaccaaaagggtctcagcttcgtcgaagttgcccatgtgcatgcagcaaacagccttgccattcaagagcaagctggtggactgatacctctgcgacaaatcctggaagatcaga

SEQ ID NO: 74160 - DNA, 507 bp, Glycine max
  Clone ID: jC-gmfl02220092c01d1
catacaaaaacagaactcatatttcacatttgatcagaagcaacacaagatccatatctctataaaaactcacaattacatacaccacacaaaacacaaaattaaccattaaccaaccacatagaactgtttgttctttttttttttcccctcaaaggaaaaaacgaaaacaaaaaacaaaaactttcttcccaactccccctagtgttgtgcagcatactgattaataagcgagagagcattgctagtaacctgagcaacattgaccattctagccctaatcgcctccttaatcttcccattcagcgccttcccggcgaacccatcgccgcaagtgctctcatcggtcaaagccgaactcacccacgtctcaacgttgctgatgtgccacgtgaagtcctcacccttcaccttacacaatttgagttccttcagcgaccggctgagccggtcgacgctgtcactgatttcttcagcgcagtccttcaaggcagcgtattctctcgg

SEQ ID NO: 74161 - DNA, 534 bp, Glycine max
  unsure (1)..(534): unsure at all n locations
  Clone ID: jC-gmfl02220092c02d1
agagagaattatttttatttctaaagttatagtggtgaataaattaagaacacatttcaactatagacaattcaagtgcgctatttattactggaacatatgtctgcctggaatagattaagattctatagctagcaataagaaaaaaaagtaagcataaactgcgcccccttgacaaatttgtattagcagatgtcaacaaaaaggacaaatgcaacctggattcggtcatccactgtataaccttcaatttagtaccctcattattcatgctacattacactttcattttccccaaaattcaaaagaaaaatacagatcaaacaagatcatcaacaaataaaccaataataagcctcccaaagttccaaaaagactaggaaaccaagttaacaaattaagccttaaaatatatctcttttaagaccctaatgaagatgaagatgttaatgtgaagagaggaaggaagcccttagacacacgcacacacacacatatatataaactctgatgagatgatgatatngattcaca

SEQ ID NO: 74162 - DNA, 413 bp, Glycine max
  Clone ID: jC-gmfl02220092c04d1
gcaaaatattacattgcatatactctcaatcgaagatatattgtaatctttaccaattgaaattttatgacaccaacccatctatcccattttgaaaaattccaaatatgatatacaacctcaaataaccatagactttcaaatctctaagctatctaagaaactaaaatggttctatgcaaggtataaacctatactagagtaaaattccttctttctttacactaagattttatcactacttccaagaaacaagcacatggattagaagaaaatatgagagacccatattaccaatgtcaccaactatgacctatgccctgttgaatggcttatttaggccacaaagtctggtagcaattgtgcagctaacctcttggggctctgcatggtgatactctcaaatgctgctg

SEQ ID NO: 74163 - DNA, 368 bp, Glycine max
  Clone ID: jC-gmfl02220092c05d1
ggatctgaagagtgttgagcaggtgatactgtcacattgtttgcatcaagcagagaggcagttcctgcaaagatactttgcaaacctgtactggaagtagggagactggaagtaatattctttatgacagaggaaggaggcagagatcctttgactgaacctagcttaattgtatctgaggcaggtgatgcagaaatatgggtgctattgtcaggtgcaggagttggagaaccaatccatggtccttgaaggggggtttgggacatccaaagtgtgttatgtccaagaaaattcctcacaggagtagtttgatcagggtgtcatggagtaattgcttgtggattatccatgacagaaccttttgcaat

SEQ ID NO: 74164 - DNA, 511 bp, Glycine max
  Clone ID: jC-gmfl02220092c07d1
agaaaataggaaagaacgaaaagttcacacaaaaatagtagacagtggaatgcagcaataaattatacatatccagaccttgatacaatcattaaaaatatccactaaactattgttgtgcctttaaagatcttgtcttgacacaattttgagtcaagcgaacaggttctaacaactaggtggatctgccaagcaaacaccagggtcaggagaaaaactgaaagagcccttttcaagacccaacgaccttcttttcactttactctgcagcagtttcgtcactgtcatctccttcatttctgatatcaggcagtgtatcaagatcggttcgagcctcggccacatcctcgtggatatgagtatcagaagaatcgattgcatcttgttcagctgaatccatagtttcgttggcagagaaagagtctgatgtttcatcagtttcacctgtttgtgtgtcacctttgaacatctcatcttctgtggcatcaacatttggattttcatttgtttc

SEQ ID NO: 74165 - DNA, 343 bp, Glycine max
  Clone ID: jC-gmfl02220092d05d1
gggggaaaacccctttgggggggaaaaaaaattggccctgaccaccccaacaggggcttggaatgaaagacccccccattatttttaaggtccagaacgacccccccgataaaaaaaaatagaaaaaaacccccgtataccccccggaaaaccccccatttaaacggaaaagaccccttaccaaagccccccccctaaacccatgggcccacaagggggcccccaaaacggaaaaaatttcccccccccttttccaactttggccccccctgtttaattttccccacccttcccaacgtttctgtactgggaacgttggccccaaaaaaaggggccacccttt

SEQ ID NO: 74166 - DNA, 544 bp, Glycine max
  Clone ID: jC-gmfl02220092d06d1
ggaaaataaatggcaatttcatttcattatcatgtccagtaaaaccattccaacaaaccaaatgcaactgtaatgacttttacaacatctttaattcaagtgcgtaggtgactcaccagcactcaaacatatactaaagtggacatatgtgatacaactatataaaccactgctcccgaacttactattttaactaagagtttaacattgtttccctctaatagtaactgagtccatttactttaaattattatgcagtttttaatcccccctctccctttcctctcttcgaactatacatgatttccttacacggtgccgacacccatttatcatgggacaagaatatcacctgttgcagttataacattacatggggattcaacgaaaagtaccttgctcttcacaaaaaccagtgctatgatttagggaatctgaatatatccatgagaccaagcctcttcccatattctataactaaccaagccacaaaagataagtatgccaaaagataacaagcgcgcctgatgagaacagcattgac

SEQ ID NO: 74167 - DNA, 543 bp, Glycine max
  Clone ID: jC-gmfl02220092d07d1
gcagcaaaattcttattattttcaatacttaactgatggcaaattggcaatgcttttgattttgcaaatactagcaaccatctaagccggacatttttaactgctcagcccacagtaagaaaattctgtatgatggataagataagccaacggctacaccatgacaaacattactactgtcaaactaaataaacgacactaaccgaaatcaaatatcattctcaataatcaataatgtgtgagatcaaatcaaatggcttcacttatcgaggaggggaagggggaggcggtggcaggtttgattttgcaaatcccacccatgcaacaatgccgactgccagaattatccatccaaatatgtcatacttcagatcactgctcttctttttcttctgagtctgaaaaataatcaaacaaaataggtaatgaatgagcacacaagtacgaagatcagagtctatctatctccaatgtgatttttgtagcacaaggagtgcttacccaaaatgcagatatcataaataactagcagtccaagagcca

SEQ ID NO: 74168 - DNA, 454 bp, Glycine max
  Clone ID: jC-gmfl02220092e01d1
caatagaactgtttgatttataccagcaggctaatagaaaccacacacatgacacaaccctcaaaagaagccatagtcaattctcaattccggaatgacaaagcaaaaccccaccttttagataaaataaataaaaccggccacacacaaagttccaaggcaaatgatcttttatctcgcattaaaacagcactagattggcatgatcatcaattaagtccaacaagaaagtttcaagagaaaacacaagccggactgcagcagcatatattcactaaaatactgatactagcacataatttgaatggctatttgaactctcaagatccataaaaattgcccatcagaactcagaaagtaatgcctgcttttattaatagctagtaatagcctgctacaattcttcaatcctcatcatcgtcatcgtcatcataatcacgatcttccttctttt

SEQ ID NO: 74169 - DNA, 553 bp, Glycine max
  Clone ID: jC-gmfl02220092e02d1
aaaagaaaacaaaaatacatgttaaacaaaccatcaagtactccaaattacaaatagctaattaaccaacaaaaagtacaaacacaaattagtatgccagaagatctaactgaaaatggaatgcttaggtcctactctagcacaatctccaaaatttaactaagaaatagattttttgtattgtaagtttcgtattattgcccgagtaattcagtcatacaacatgaccacatgggaacaattaaggcaacgccaagggatgaggtgaaagcagttcaggtggcacaagagtaaagaacataagaaaaaatcttacacaacagcatgggagtttttgaaggcaacaaattagctccaagggcccttctttcctgatgattcatcttgatcacctatacactgcagagattatgcaatggttgtgtgctcgaacttattatcaacaattttggctttgttggcaaacctaatttatgctcgcaaacagccagcttgtgatagactcgtcaacatctcaaatggtatacagagtccatgcagcaacactggttta

SEQ ID NO: 74170 - DNA, 420 bp, Glycine max
  Clone ID: jC-gmfl02220092e04d1
aactggagaaaattggtaaatagaattttcttttctaatactactatcatgaaacaatttcattgtattaataatgacatatatcataattattttagtttcgttcaatatcaccgaagcctaggacaaatatgcggattcctttggcatttaggttacaaagcgagtatcccttgattagttcaattcttggtttggatcagtccacttcgttaaatgcaattttgctctttcagcctctttgtcccagtcgcatcgaattgtaatgaggctcaatattaatgtctgagttgctgtgccaccaaaaatcatccctgcccagattcccataactccttgattgaagacccaacccatcaaaattccaagaggcaccccaataatatagtagcaacccaaatttatgtatgcaacatatga

SEQ ID NO: 74171 - DNA, 477 bp, Glycine max
  Clone ID: jC-gmfl02220092e05d1
agggtacatagaaagcaccatattttattagaataatggccatgtacatgtacatgtacctgtttaaaaataattatgattacataaaaatcagtattatatatatcaaaacatttttcagggattaaatgatggggttgaatcagtttcaggaggataaaatatctgatacattttcctatcgatgaagttcctgtatggatcctcctccctcttcttgatcaagtaatttaaattgtgttcaacttctgacttaatctgcaggtacatttggttggcactttctctgtcttttagcatcttatccatgccttttgttcttatgggcttcccaaatagaaagtaaaagcgacctggtatctttggtagaagcaccggaaaagagagattttggcttgccaccttgccacttggttcatctctaaacttaactgagtcacggttcatatttcctatttgatcgttgactatggggat

SEQ ID NO: 74172 - DNA, 463 bp, Glycine max
  Clone ID: jC-gmfl02220092f01d1
agggtcataataataataataataaccaaaagaagatgaaaacggagagtaacaaagcatggggagacacagctaccgaagcttctaaaaacaagggacagagccaacaagttggataactagggagcagagaagtagtagcaattaaagcaaacaagaaaaatagacactcaactaacaaaacctaataaccccaaatcaagatggacctaatgggaatagaattctcatcaaaacttatctgccctgtccctcttctctttatatgcttttcaaatttaggttatggttggaatgggcctcacttggccatcatgactttgacaaactcctcataggtgatctgtccatcaccgtgaacattgggctcacggatcattttatccaccttcttgtccgtgagcttcttcccaagatttgtcatgacatggcggagctcagctgcagagatgaaaccattctg

SEQ ID NO: 74173 - DNA, 512 bp, Glycine max
  Clone ID: jC-gmfl02220092f02d1
aggactaatccaaaattcaatatgcggcccatgggctcaaatatcctcctcctaaaaggattagatgttgaaatacaagtaattccaatgaaaaacagactcttctccagtgatagttcctttgtatcttagaaggagcattattcaaaattgaagctacacttctataggcaaaacatgggaacctactaacaaggacagtagacaaaaagcaatggtgtctaatttaggcatgagtaagccaatgccttctcctcagaaagctcttctgcagtcaagtccaacttcttccttgagaactcatcaatggaaagtccttgaactattgcccattccccattggcacaagtgacggggaatgaatatataagtccagctggaacattgtaggaaccatcagaatatactcccattgatacccaagtgccctgaggagttccaagaacccagtctctaatatggtcacaagcagcactagcagctgatagtgcacttgaaagctttctagcttt

SEQ ID NO: 74174 - DNA, 368 bp, Glycine max
  Clone ID: jC-gmfl02220092f03d1
ggtatcccatttcaaaaatttggtggccaattgatggggcccaactggggctgctgatatgcgccaacctgtgccccaggagcagctgcagccaccccaacttcgacgttgttgccaatggctgggggccctaaatggggaggactacccatggctgctggctgtggaggagtgtgggccatgccggggaactgcatgtgaaaagactgagctgcagctgcattaaaggaagcatgacctgtgtgtgatggcatgtaagctgcatgaggggtttgccctggcatgttatagtatggagtagattgcatgccaagaaggtcccttggattctgtgaccagatttctgatgtctcaacctgaggatttgg

SEQ ID NO: 74175 - DNA, 356 bp, Glycine max
  Clone ID: jC-gmfl02220092f05d1
gcatcgaacaatatattaaaattaaactaataaatgtacattaatagaagaaaaaaggcagaatgaacatctttgtacaagttcgaatccacaggggatccaaacactttcaattgcttctgttctgatacatctttcactacacatcattgacctgtatatcagatttctaaaataacatcactaagcacaattttcactgcctattcgtcaacgtcttcctcaaccctttgataattttctgaaaaccaaatcacggtcataactgatagtgccagtggcacaacaataactaacacttgtgcaaacgcgtgcatatggtcaatctggcccaagtgcaagtagaccttgtaaaa

SEQ ID NO: 74176 - DNA, 504 bp, Glycine max
  Clone ID: jC-gmfl02220092g01d1
aacaatccatgatattattaaatgagagacaattattcatagtttcgacataatttatcaggcaaacctgattcaactaaaagaagattacataatttaacaatggactttccacaaaccgctaagacatgaatcacatgctttcatagataacaattagaagataatcgtggcttaattaaaatctcaagtggagtagctttagtcttgcctaatccaacggtttcagtcatatcaataggttcatttgatggatttaagaatgaaaaagaatgaaaaagactggcaagaatcaaatgaaccatttgaaggctaaaggatattccaggacacactcttctaccaccaccaaatggtaatagctcaaaatgatgtcccctaacatcaatgtctttatgggtggttagaaacctttctggtttgaactctaatggatttgaccaaacactaagatctgtgtggatcttccaaatatttggaattagacgagttccttttttgaca

SEQ ID NO: 74177 - DNA, 508 bp, Glycine max
  Clone ID: jC-gmfl02220092g02d1
aaacaagaagcagggaatgacattcattcaggaatctgaacctgaaattaacatacagtacatttcttgctccaaatgacaatgtattcaaaggcataacacaaatggttatgtaacaatagagacccctggcttataagaaatcaaacggccaacggccaaagcgagaataaaccgtgcttacattcccaagcatgaagtgctgagcattacctatttccaaaaggagactagccattcccgctaccaagacaatgagtaaccgaagcctttaagcaatttgcaaatcaattattctcaccaaggattacctaccggacaaaacttatgcagtttcttagatgcgtttggtcttttcctccaacaggatttgaagttttaccttggtaatccaaggtaataatgatataaaactccaattctgataggagaacaccaccaaaagcacctatgtaactacataaaatttcgtccctacctaccaagtaccaccacaccttcatcaaac

SEQ ID NO: 74178 - DNA, 496 bp, Glycine max
  Clone ID: jC-gmfl02220092g04d1
gttaaaaagttcaaacctgcatgattgcatttattattttggtttccattacacaaacatggtttattaatgacaaatacaagtacattcagccactccaaatacataacttaaacatacacaactgatgaaggaatcagattccttctatttcacatttatttaaagccagggacagtacttcagcaaccatagagcccttagatagagatactgttgggaattcctctgaaagtcaatccctcctcactagaaggatagagcaaagtgtaaggcattttagccggcccatagcggtttctcaatgtctcattattggtcttctctataagcttcttttcaatctcttcaagattctttccaaacctcttaaaggcctctaatggcccggcatcagaagtccagtagtcaccggcatctctctgcccaaggtagaactcatcagatgcgtgccttgataaaatttctataattgtaaggtcaatgagggtctctt

SEQ ID NO: 74179 - DNA, 399 bp, Glycine max
  Clone ID: jC-gmfl02220092g05d1
ataaaaaaaattgcccccctacaaacaataaatctcaatttcatttggaaagggcccctaggaattgccccttaggacatttattcccaggtctatattggttttaaaaattttggtttaacgccttgaaatttttggaaaaaaaaggccccctttcctttttcaccttttggggacgcataatcccctttaatggccaaaaaatttaccttattctttgaaaaccttgggtgcccaaacagttgtccaagggtcgctttctgcaatgacttcaaaagggtcataaaccttggggtttgaactttcttcacttgggcttggatcaacagttttaacagaagcatttccctccctcttttctgagctaccccatttttcctccaagggccagggccctat

SEQ ID NO: 74180 - DNA, 433 bp, Glycine max
  Clone ID: jC-gmfl02220092g06d1
catcatataaaatatatatgttctgaaagaacacatacaagtacacaaaaaaaagggggaaattcataaaaaaatacagaaaaaaaaaaacagaattgagtaagagggaaggaaacatagagaaaattttagcaatcagataataagaagccagtagtagtgcaaaagtcccttgccaagagtgttggaaccccttttagttaagcaggtaccttctcccccttgagtggcttcaccacttcccatgtgaagtcagggtcatctctgccaaagtgtccatatgcagcagtcttcaagaacctgccatttccacccctcttgagatcaaggttgatggagatcatgccaggcctgaagtcaaaactctccttcacaatgctgaggatttccttgtcagggatcttcccagtgccataagtgtcaacaaacacac

SEQ ID NO: 74181 - DNA, 454 bp, Glycine max
  Clone ID: jC-gmfl02220092h02d1
aaaaaataaactacctcttcaactttaaaaattaaaagccatttctggtagcaacattttttgaccatttacatgaacacgcttttatttgctacttacaacctacacaatcaatcacacaatggatgtcaacccatgatgatgacaaaatttgacacttatgccatcctttgaaacaagaacattctttaaaggcttatgaggggggggggaggataccactgatgagcatataaggtcaaactcttaagggttatatgaacctcctcttaaaattacgaatagttgctcggtatgagcgtactaacaagctaacccctataccaactactacaaagatgccaagcccaattccatcaccaactgtaaccccagcattaaaccatgattgttcaccatcttccccatctacatatactggccttggccaatacatgctgatgtaatccttttc

SEQ ID NO: 74182 - DNA, 447 bp, Glycine max
  Clone ID: jC-gmfl02220092h03d1
acgcagaagacaagaataaattgatgtaattcttagagttcagcagcataatataacaaaaccaccaaaagagaattgcttacagagaaaatgatcaaataagacaaactttcgagtataaaaaacataacgaaaatcagtatcactcatttcatgaaagatgccatctggaaggcattccctaataccatcaaagtgctccagctcaaataaactaacgctatcatcatcagtattgtccaaactgcaattgatgatgattaccaactagcttctttaggagagggatgagaccaatcaaagcaatctgaagctggtctgaactatttaatggaatacttatttgtccgggccctcgactgctcaaattggccagggcaacaagggttggattacgtcctactgggatctgagaatgcacattgtaccccacagcaagatctccat

SEQ ID NO: 74183 - DNA, 355 bp, Glycine max
  Clone ID: jC-gmfl02220092h05d1
ccagggcattgatcctttgattttaattctcaagtatgctgggaacatcttcatattgactcgtttattatcgacatttaaaaaaaatcatttgtcatgaaaaatggaaatcacccacaaaatgtcatacccatcatagacataaatcccaacaaaactccgcatgaattgagtccgcaaaattcttgacaaaaacagggctctcttatgaatagagaccgctaatgggattacattagtttatgggcaaattctacaacatgcagggccaccaggcacgcacagacatggctctccaatattcaccattaaggcctaaggggctgcaaaaactcaccatggactccagataacc

SEQ ID NO: 74184 - DNA, 558 bp, Glycine max
  Clone ID: jC-gmfl02220092h06d1
caaactcaacacgttttcaaggtaattcaattctcagaaacaaagtaacaaaatacaaattacaatggataacaagtcccttaaataagagataccttgtatcttttcactagcagataaaaaacaaccaagttcaagatggtttaagaagaataaccaatatggcaagggtgcctcccctattctggaggattatatatcaggaaccaaggctcagaaccgttcaccaagaacagtactagatggtctagagggacaatcgaacagcactgaagatgatacctttagcactagggtctcaagcaccacaaataccccatcatcggattctaagaggcgatccaagataagaaaaccacagttcccattcaggttcatagtctcattccttgcttcaccatttagaagcaaaaactttagcatatccaaaaatgaaaagcgtcagcctttgttgaagtgcttcagctatgaacagatttccaatgctaccaaagacttccaccaaggtatgttagtttttttggacaaaacttagatacattttctgaagtatcttta

SEQ ID NO: 74185 - DNA, 270 bp, Glycine max
  Clone ID: jC-gmfl02220096a05a1
cctcggggaattccaattccacattttcaagaaataaggaggcaaaaatgttcatatatgaattggaattatttgttttcttattaggcctatcctgaagccaaaggaaatgagatcggaattcctcggggaattccaattccacattttcaagaaataaggaggcaaaaatgttcatatatgaattggaattatttgttttcttattaggcctatcctgaagccaaaggaaatgagatcggaattcctcgggggtaccgagctcgaatt

SEQ ID NO: 74186 - DNA, 240 bp, Glycine max
  Clone ID: jC-gmfl02220096a05d1
acaggcccggtgataaaacccttttgggaaaccaaaaaaaaaaaaccctggcggccacaaattgaggaagagcccctggaccccacctaagggatgcaaaggtgtcccccccccgccccgaaaaaaagaaaggatcttgagtgagggataaaagggggtttttcgaaacattagaaagaattgtccccgggttcaaaaagaacacaaagttcccacccttaggagggcggaggagggggg

SEQ ID NO: 74187 - DNA, 233 bp, Glycine max
  Clone ID: jC-gmfl02220096a10d1
cgaaagtgttgctcaggataggcctaataagaaaacaaataattccaattcatatatgaacatttttgcctccttatttcttgaaaatgtggaattggaattccccgaggaattccgatctcatttcctttggcttcaggataggcctaataagaaaacaaataattccaattcatatatgaacatttttgcctccttatttcttgaaaatgtggaattggaattccccgagg

SEQ ID NO: 74188 - DNA, 526 bp, Glycine max
  Clone ID: jC-gmfl02220096b01d1
aaacacagaaatacactgatatatggcaaacttagtaatgaaagttcagaacacaaaagggcagtcactgaaaacaagaataatctgctgtaggaggaagccactttcatgtttaagagtttgacagttccttggatcttgaacatcagctatgtgacagtttccaaagtgatctgcagcacttcaaagagataacatatgtccagagaggatggctcatctagactagtggagttagtttcatccattatttggtgaagacttcaagttcatgattctctcaccagaatctgtgaataaccaacagggagaggtagatcaagagggagttatccctttcatatggtaaagaagtcaactacttgttttactttctttatccaaaagaagaaagtcaactacttatatttgatacaacttttttgctcttatctgccacaaccataaaagccttaacaagctcctccttaaccatgaatagaacagaagcttgcaaaacactttgtactatctttgtgctcatccc

SEQ ID NO: 74189 - DNA, 484 bp, Glycine max
  Clone ID: jC-gmfl02220096b02d1
cacgttacaagtttttcacaagtactactaatccaactaagtgaaaatgttctaattacaaccaaaagccgaagaagaaaagacttttacaatatgctagtaatagtgacgaggcacaagaaagactcttcttcttaagaggaggatgagaaggtgtcaatgatggttgtgtggagtgggtcactcaagtgggtggcccagttgttgagcgggcccttgccggtggcggcggcttggactgcaaagcccaagaagcccaccatggcaagacgggcgtgcttgatctccgccaattgaagggtggctttcttctctgggtctgaggccaggcccaatgggtcgaagtaactgccacctgggtacaacctcttctctgggtcgagctctgcattcctctggaactctatgtagccaattacgagtacctcgatccaaatcagtgtggtgattgagaatggaagtggttgcccaaggtatgatgacc

SEQ ID NO: 74190 - DNA, 397 bp, Glycine max
  Clone ID: jC-gmfl02220096b03d1
ctagttggagcttgggcatctttatcccatctgtcgggatttttcgtctttcaaacgtatttccaaacacaaagtaagcagcctgtgttacattgtttctcctatgtacagattcaccctctactgaaaatagtaatatttagccctatactcactgcaatatgttcctgcctcacagtcagcgtagcaacccaaataatgttctgagcacaacctagaatgtattatagccagcttctcctttttccaagagagtagagtactactgggtattttccaaatatacgatatttcctggcataaaaagcttttattctgattacatcattgccacacttctcaggaagagggatttcccaccatgcaggttgataatcagaagatcaaactgtgatct

SEQ ID NO: 74191 - DNA, 528 bp, Glycine max
  Clone ID: jC-gmfl02220096b08d1
gcacacacaaaaaaaacatcttattttatagaaaggaataacttaaaagtacaattttttatttgccgaataacttaataccatccagaaaatctagttcaaagaagttacataaggacatctttcagctacagaaacagattacatcaaataagtttgtctaaactacctcactctctttgaatttcatcacattactcgtccttttactgcttggacgtaatatctttaagcttttccttcaaatcacccgtctgatgcatattaagaacaatatctgatccaccgataaactctcccttaatgaaaacttgtggaaatgttggccagttactgcagagaaagaacacacgagagaacagtgggacatcacaaaaagtatatttgacttttctgtcaataattaaacttggcagcacctgcacttctagtactaccatgtttgagaactaattaatatgatcccatataccgctttaaagtgcaggacagggtttggctgactaaattccagaggatttaacatga

SEQ ID NO: 74192 - DNA, 501 bp, Glycine max
  Clone ID: jC-gmfl02220096c03d1
ctgtctataaaacttttagttacataacataacataacataacaggtagcttcattgacttgtctcttttttttaatgttttgagttctttttctctcatggatttgattattgatactaatttgcgttatgtataggttcttacaaatgggaaatacaggagtgtggagcatagagctgtggctcatgaggagaaagctagactctcaattgtgacattttttgctcctagctatgaagtggagcttggtccaatgcctgagtttgtggatgaaaaccacccatgcaagtataaaatatacaatcatggagagtacagtaaacactatgtaacaaacaagttacaaggtaaaaagaccctggaatttgccaagatccaaaccaagaacacaaactaggaagttccctaactagttaggagaactataattagactgactaatgactgtgtgtgtagaattaattatctaccacataaaagcatcatggtcaaatctctcg

SEQ ID NO: 74193 - DNA, 407 bp, Glycine max
  Clone ID: jC-gmfl02220096c06d1
ggcggccgccctttttttttttttttttttttttttttttttttttttttttttttttaagagcaacaacgttttacggaaacatgaaatccaatttaccagatgggcaaaaataaaaataaaaagccagccaattttagaacaaaccgattggggccgcataacatgtacccaaaggtcccaaactccacttttactaccattaaagtattattccgcaaaccggccatacacttttaggaattacaatcttcttcacgttggaggggagagcaaacccactttcgcatcacattgtataagtaagacacaggcgtctttacattttagtgtcttcacatatgggggggtgcttcaacatactttttctccttatcctcggactcccctttaacctcaaaaggggg

SEQ ID NO: 74194 - DNA, 271 bp, Glycine max
  Clone ID: jC-gmfl02220096c09d1
aatccacacaatggggggggacttccgttacaagctaacttaacatatccttaacacaaaatgaaacaatttagaaaaggacctgggttccgggattttctttatctgtcaaaattgttctattctgagcagtctcaccagctagttcagggcgaaacctaatttaatttcagttcttacttgattcaaaatgagctttctataaacagtctcgaactatgcctggattttttttttacaggactagcttaattatgcttatttgcaaacc

SEQ ID NO: 74195 - DNA, 508 bp, Glycine max
  Clone ID: jC-gmfl02220096c11d1
aactaattaaatgactttattgaaattggattccccaagtataattttcattatctcttcctccacttattgggaggttgaaagttttaccagttactatagaacaaaattaatctctctgatgcaaatatctaagatacataaataacatttcattaatttccattatgtccaaagaggctcccaagcagtaccaaaactgttgtcctctatgaagcagctcatatcaacgtgaggttgaggctgaagcacgtgctgctcctgtgactgactcatttccatgcaaattagggccactaaattggcttgttggcactgcatgttcactacctcagcttgtgctttggccagctgtgcttgtagctcactaacttgcttttgaagttggcatattgcacctgcacacccataaactgggtctctgatcctagcatttgcctcataaaccatgctgctcacagcatctgctctctgggattctggcagttcctgcaagaacttgatgatg

SEQ ID NO: 74196 - DNA, 509 bp, Glycine max
  Clone ID: jC-gmfl02220096d08d1
gcataacacctttgggatttcatctttcattcatttttcctgtctgttcctaaaccaggaaggttcagaaagatattaaatactagtaacatggttaaatagaatacaggcccatacaatcccccaaactcaccccaaaaataagataacataatcatactgttaacgctattctttatccaataccacttcccaaaacaaatactaaatttcattgagactccacgaaaaacagaggtccctttggagatcacgccaacacgagagatgcaaattaaaattgattctgtaactgttttgggaagcatctttcaattttccggaacccattaggtcaaaaacagtggcagcagctcacgtcttgaaacgtttggacaaaagtggtgcccaaacatatatatgtgggaacttaaaaaaagcttcgtctgtttgaaacgtttggacaatctgatgcacgatgcccagattccccgcaattaaaacaggtccctccaaatctgtctgatgat

SEQ ID NO: 74197 - DNA, 368 bp, Glycine max
  Clone ID: jC-gmfl02220096d09d1
gacccggggccccctgggtttatttttccctgggccccaaaaaggaaatcccgggggccgtttggggccccaaggttgtgggaatttaaaaaccctttccccctgggaaaacccctaaaaaacttttggccaacaggcccccggtttttttttttttcccccaaaaaaaaattttttttctctccccccggggggcaaattttttttttttaaaggaaaaccaacacccggcaggggcattatttccccaaaggggggggggggggaaaacaggtaccctttaaaaaggatacgggggagaaaagtgcccttcaaaaaacaaaccaaagaattttttgaaattgcgcctccaaaaaaaggaggggggg

SEQ ID NO: 74198 - DNA, 422 bp, Glycine max
  Clone ID: jC-gmfl02220096e01d1
agtaaaatgcacgagaaaatttattagaaaatcacgatggctagctaagtttcaaagccaagtacattctgttgtaatgtcaaatggaaattaaaaagacacggaaggaggagctgattcgatgtcatgagctattgaaccctaagaattgatccacaggcttagccacacagttggcaagtgtatcacctgcttccggtgtagatgcctcagaatacacaccaacatcatcttcagtgccagatggtcgcacaaagcaccgaccttgggggtacttaacagattcttcatttatggcttcttttagacccggggggctcacaaccacagctattgcatttgttgtaacaataaccgctctgtcagcaactttgaccttgagctgcttgctgggtaaatcatgataaagctcattccattta

SEQ ID NO: 74199 - DNA, 394 bp, Glycine max
  Clone ID: jC-gmfl02220096f02d1
aaaccgggaacggacaattttttaatggaacaagagctcattattcatgaaagcctccaaaggggaaaacaacattgtttaaggcccctccatgactaaagaataattctcaggatttttttttataaaaattaaggggcaacttaaaggcttgttttgagagcttaatcattgtccaagggattaggccccttaaaagtcctttcccctttgttgcttcccaggggggcactcctttggtttccaacgtttccaaagattttggatcccttcttttccaactttttttttttaggtgatttgttttcaaaagattacttaccaaagtcctcaaatgggtccctgagaattaacttttcccatgggttgaaaccaaccctctttaaattcttgg

SEQ ID NO: 74200 - DNA, 450 bp, Glycine max
  Clone ID: jC-gmfl02220096f03d1
caaaagataagaaaagcttatacttcagtctgcaatgaaactgcaagtattcggcaaagatctggaactctatttaacatactagtagcaacaaccttaacaagatcattacctgcaatgaaactacaaagtattcctgcaaagaaattaaacacaagctttcacataaagaaactaacgaatacaatccaagagtagaaactcagggccttgcccaacaaaatagactcatacttcagtctaagcaccactatagattaacaaaatctcactattctcttaacaatcacagataccaagtctcaaaatcaacttctgcttttgcgtcgttccctaaggccatttccattagcatatgggacctcctcacgcccacgataaggaggtgacctggtgtagctacgtccacgaggtgacaaactacggcgcctatgggaccgcccacgagga

SEQ ID NO: 74201 - DNA, 351 bp, Glycine max
  Clone ID: jC-gmfl02220096g01d1
ggggaaaaccgggccccaacccccccaatttttttttttcacccgggggcacctttgaaaacccccccccccccaggggggtgtaaaaaaaaaaaaccccccccccccccttaaaaaaaaaaaccccttttgggggcccccattttttggccctttacaaaaaccccctttttttttctccttcccccccccccaaaaaaaccccccagggggggccccccccgggagaaacaaaaattgccccctttccccccccttgaaaaaaaaaccttttttaaagggtctaaggggggggggggggacccccccgggaccccctaaatccacaccctaagggggctaaaaaccccc

SEQ ID NO: 74202 - DNA, 503 bp, Glycine max
  Clone ID: jC-gmfl02220096g08d1
ccagggaagaaatttctcctacaaatcgatttttgttgaagttgctattacaaatattttcagtaaattccactttactgaaacaatatacatatgatttcattcaattatgaaatttaattagtaaaaaaaaatattaaaatacatatagacaggaatagcacaaaattaagacctaacctatgcagaggttagccctttaggaagagattcattgtctggatcaggtgtaagaaaccttcgacaagcataaaaaacagctgaatggaaggcagttgggttgtcaatgaacgcaaagtgcccaccctgaggaatcctgatgatttcgcatggaaccttcatatgcttgcgagcttcttgggcaccttgataattcatccagtcttggaaaccatacatgaaagtggtgggcaccttccactctgaggcactgagaagaaggggcatcctagcaaatgcttcaaatgaaaaaatatattttaagcacagctcttcactagctt

SEQ ID NO: 74203 - DNA, 499 bp, Glycine max
  Clone ID: jC-gmfl02220096g09d1
caaaagagaagaaaagcatatacttcagtctgcaatgaaactacaagtattctgcaaagatctggaactctatttaacatactagtagcaacaaccttaacaagatcattacctgcaatgaaactacaagtattctgcaaataaattaaacacaagctttgacataaagaaactaacgaatacaatccaagagtagaaactcagggccttgcccaacaaaatagactcatacttcagtctaagcaccactatagattaacaaaatctcactattctcttaacaatcacagataccaagtctcaaaatcaacttctgcttctgcgtcgttccctaaggccatttccattagcatatgggacctcctcacgcccacgataaggaggtgacctgctgtagctacgtccacgaggtgacaaactacggcgcctaggggaccgcccacgaggactgtaactccttcgcccataacttgggctcctacggaatctgggtggacta

SEQ ID NO: 74204 - DNA, 347 bp, Glycine max
  Clone ID: jC-gmfl02220096g12d1
attaggcaaaaaagaaatgccccaattttattgggggggccccaccaggttttttttaagcttctaaaaacaaactccattcactcactttttgaccccccccccccccccccccttattcttttttttaaaaggaaagggggagggttttaaaaagattttcttaacaccacaatccccttaagggcggcccgggaaaaaaaaaaaaaaaaaaaaaggggcaaacccccccccaaagaaataaccccaattcagagattaaagccccgggtcaacctcgcttaaaaaagttccccccaatgggcaaaaacaacaggcttggagggcctgccccaacaggaaccccc

SEQ ID NO: 74205 - DNA, 131 bp, Glycine max
  Clone ID: jC-gmfl02220096h01d1
acttctcaacatttttccaaacacgttaattacatagtacaactttcgaaaaaaagatataatatatatatatatatatatatatatatatatatatatatatataatatgtgaattatttttactatctg

SEQ ID NO: 74206 - DNA, 352 bp, Glycine max
  Clone ID: jC-gmfl02220096h02d1
aggaaaaggtttggggatcccccctaaaattgggagtaaacttcaaggtttaaagctaaaattcaaaacttttaaaggttaagaacggactggcttagctctgggaatcagaactaaaaaatttttggccggggccttataccaagactattggtctaaccattgccttattgggcccaactaaaaccccgcctccaaaactcattggtcaaactcgggggggtctcccgggtttttccccttgaaaacttttgtagggctcaacagggggacgggagttagctccagcatacactggtttcgcaccaagctccttcttaatttttaagagctgggttttttttacaagacc

SEQ ID NO: 74207 - DNA, 406 bp, Glycine max
  Clone ID: jC-gmfl02220096h09d1
ccccgaaaaaaacccaccctttttttttttttaaaaaaggggttccaaaagggtttatttgaaatttctcaagacctaaaaaaaatagggccccgttttttttttcaacctaaaaaaaaacccccaacttttgaatccctttcccgagggggggggggcccaaaaaaattttacccccaaaataacccccagtttttttgggacaaaaaaaatcccctggaaaaaaaaggcctcacctaaaacttggttagccccccgggaaggggggaccctggcccaaaacacatactgggggggattaaaacaagttcctggggattttgaattacccaccaggggtggtggttttacagtcccgggaccccaacaacctttggttgcctccaaaaaaccaaattttgaaggg

SEQ ID NO: 74208 - DNA, 161 bp, Glycine max
  unsure (1)..(161): unsure at all n locations
  Clone ID: jC-gmfl02220097a02a1
cacttccataacttctaacccatcttatataatttgtaattcatataacataatcaatctattctgcattactatcaatcatacttcaatactatcacactaccaaaaatctataattatctaatnnnnnnnnccgcgcgtcgtactgagacagctatgac

SEQ ID NO: 74209 - DNA, 492 bp, Glycine max
  Clone ID: jC-gmfl02220097a05d1
aatatatatattgaacatatgattctataaggtatattttatctttacaaagtaaaacataaaactagaaatggttaaaaatctgttgcatactatcaaggcagaatacacgttctgaaagggtatagattcagtctactgtactttatatatagatcaaaccctcaaagccacctggtcttgccatgaaatcttcctcttccctgccctatttgatccatccccaacacttctacaggcagccgagagcttgatgtcgctgtgctgctcgtcagtcgcaactctttgtgtacttctctttggttcttcaatcctcatggcctcactgttcccctgcaattcctcctcttctctcgaaatctggttcaagtcgaaaaatggagttacactcttctttgtggcttccttgctgctgtgaatcctttctttgtgattcaactcaaacactggtggagcagaaccgttaaaggaagcatcttttttactagaact

SEQ ID NO: 74210 - DNA, 334 bp, Glycine max
  Clone ID: jC-gmfl02220097b02d1
aaaaagggaatctggccaaaaatttaacttaaaaacgaatgtttttttacgggaaccaataacccccatgcttttaggggggggggttactccaattttactgattaaattggggccttttataaaatgacttgccaggggggggggttttatacccgaaaggccgcccttttcctttattttttttttcaaaggccaaaagaaaaaccctttaaatgttccaatttgggggccccccttcccctgttttttaacagcacaactttacttggggccttatagcgctggatacccaaaaaggaactgggcgcctaaaaccccaaacttttttttt

SEQ ID NO: 74211 - DNA, 231 bp, Glycine max
  Clone ID: jC-gmfl02220097b03d1
gaaaagggaaaaaaaaattgttttgcccccggtccttccaattttaacatttaaagtggggaacgggggggatttctcgacttggccaacaatccgggcccagggttggtttgaaaaacaacctttaagccactggaaagggttagttttaactggttttttggggccattgtgctaaacatgaacggcacccgggaagcattcctccaaggaaaaaggggggcccccccg

SEQ ID NO: 74212 - DNA, 311 bp, Glycine max
  Clone ID: jC-gmfl02220097b06d1
agcaagaactcttcttacattaattgaattggaagatgaggttgattgtggttcacatgcattagattacatcatatcatgtaccatttataaaaaaagtaattacaaaaagagcgcgtaaagatcccatccacatacaaattctccaggctttcctccaatgtagccatccaccctctcttatctagacatccttggcaatgaggtcgccgttgatgagttctctgtaggcagcaacgggccagctgaaacccctgaagagcaagcgagaagccagaagaacatcgatgatgatctccttgcatgggggg

SEQ ID NO: 74213 - DNA, 435 bp, Glycine max
  Clone ID: jC-gmfl02220097b07d1
ggaatgtcatatttcttgtgtttttgtagctagttcttttcttgttaatacaatattttgctaataaaagattaaaatatattttggattcctaaaattatgataagtgatgtgaccaaaaaatatgataactggaaaaaattaggcaaagcaatatgataaataaaataaaataaaaataataaattaaaattttgaatgtaaattgatgtgtgtgtaggtgaaaagtatgctattgtacaagtcaactcatgaattgtactcaccaaaaaatctcaacgtgaattctggaccatacaaagtatatcctatggtatcagttttcttttcttttattttaaatcttaattagtacatcaatattaatgtaaggcgtgtgtgtgtgttgaagtacgttgttggaaaagtatgctattgtacaagtcatctcatgaa

SEQ ID NO: 74214 - DNA, 477 bp, Glycine max
  Clone ID: jC-gmfl02220097b12a1
aagagaaagacagaatcgttaaacatttaatattggaggactataactcacagcatcttgaatatgatccgaatttctccacacactatatagcaagttgggtgacagacagtgtgagagacaactgtgcttcttgtacctaccagtacgactttgtcaacctaacgtatctaaggtaatatgtagcataatagatgccaaaagtactcatgcagcctttaatgccccaccttattaatttctctagctagcaatgcagactttagcatacaaaagccatcttggtcttggtcacactgtatgtacacctgtacctagctagccatgtaattgaggtagtcccaccacagaacatttttactttttttattagggaaaatatttaaaacactggctcgaattctttgaggaagattttttgcccacgtgatagaatcattcttggatcaaactgatgctttctttctaagaatttca

SEQ ID NO: 74215 - DNA, 337 bp, Glycine max
  Clone ID: jC-gmfl02220097c01d1
ggaacaaacctaaaacctttttacttttgggaagttaaaatcttttgggggattgaaaacgggggctttttttatccagacataatcaacttttggcttgccctaaatataggaacattgatcccttgggcagggggggtcattcaaggggacaactttttatcccaaccgggggggccccccctttttttaggttaaaaactggtcgggcttttttgaccaggatttaccccataaccttgacggggggaaataccccttgatgtaccaggattgggggaaccactcctttgataagttttttttgcaccaccaattgaccccccggatacaaaac

SEQ ID NO: 74216 - DNA, 247 bp, Glycine max
  Clone ID: jC-gmfl02220097c04d1
cgccaacataccgggggtaattgtatatcaactccacacattggtaacaaacgagaagaacattaatgggacaatagagtttaacacaaaccaaacttattcgcaccggaactaccccacccatgagccataacatttcttcttaaaacgcttgggaaaatccgacatagactatcacacccaaatgccgctccagcttaaaacccctcacgaagacgctccaccacgtgccgagttgactcctttc

SEQ ID NO: 74217 - DNA, 216 bp, Glycine max
  Clone ID: jC-gmfl02220097c07d1
aaaaaccagactcttctccatatattttccaacatgtcaccttaaatttttaaaaaattcagggaaaacgggccaaacaaaactatgaatcaatggaagccatgttcgttggagactttttttttggcgcatcaaaatgaaaaaaaaccaaagccgcatctgctagaatcccccccaacggcatgtgcactcaaattaggggggggcgtggattta

SEQ ID NO: 74218 - DNA, 288 bp, Glycine max
  Clone ID: jC-gmfl02220097c12a1
ccgaaaaaaaaataaaaaccccttgggcccaaaaagcccttttttaaaaaccgggtttcaaaaaacccccctccccccaaaaatcccccctttttgaacccaaaacccgttgggggggggcccttctggcccaaaaaaaatttttttccccaaaacccattttgaaagaccagggctcgtttttttttctcaaaaaacaaccgggggggggcggaacccccggtttttggcccccctgggaactggatcaaaggcccccccccgcccaaaaagggaaaaaaaggggtt

SEQ ID NO: 74219 - DNA, 468 bp, Glycine max
  Clone ID: jC-gmfl02220097d01d1
caagcaaataataagttcatttctcatatattagtcccatgtggagacttacaaaggtaacattctccaataatatgttccatacttaaaaagataacaaagaaatcacaaatagcaagctgaatttataacttgaagtgtgaattctaacatttaggtgctagaattctttcgacaaatacaaatcattcctttgaatcgagcattttgtttagtgcagtaatataagcctctacacttgaagtaacaatatccactccttctccggtaccactaaatgttggataaataacgtttccattcaaagcaggagtaggtgactgcttattctctctacgaattacaacacgtgtagtagcaattgcatcggtgcctcctgtaactgtacttggtgagtattcaagtacttttacggtttccttcactatgagattaatagccttgtaagctgaatctactggtcctaca

SEQ ID NO: 74220 - DNA, 450 bp, Glycine max
  Clone ID: jC-gmfl02220097d05d1
catgacgatcttattaggagaggaaatataaagggaaataaagagagtaagaaagacaatcaacaaaatcataagaaaggcttcactttctccctcacatcacaattggaaaatcataagacatcgttacatgataatattagttaggtgattacatatggtcgtgaagcttcaaaagcaaaatctcctccgactctgaatttcaacgtgtatgcaacaagaagttgctgaggaggtaactacaagcaacaccacttaagcaatttaactcacccccctacccattgactaatactatacatacaggggataaattgcccaacacattcaatctcataataatgaagaaatacatttgaaaagacaagaaaaaaaaaaatctttgatgagaagcacatggggtacacaataccatatgacaatgacattgctggtgtcactatatttgca

SEQ ID NO: 74221 - DNA, 422 bp, Glycine max
  Clone ID: jC-gmfl02220097d12a1
aaaataatccaattcaaacacgtataattaaaaactcaatttagaccataagagtaacaagtgtgtcactcttctgacttatacaaatgcaaggaatagaaattgacaaaagagataaaaggatgaagaccaggaaaatatcaacaacgtcataactcataactcgtgtaacgccaaaaaaaaaaaaaaagcaggattttatttttatcatcattatcattgaggcactgatagttattgattatccaaagaaggctagtgtttgctcaaagccatgctgggtttttcaggggattaacaacagccttcacttgcaagtagtttttgagactatactctcctttttctctgccttgaccactcatcttgtaccctccaaagggaattgcagcatcaaatgtgtcaaagcagtttatccacac

SEQ ID NO: 74222 - DNA, 255 bp, Glycine max
  Clone ID: jC-gmfl02220097e01d1
aatcatagaaaaacacaacgtcatatttcacatttaagaagcatgagaagagccatatatctataaagactcacatatataataattacatggagcacataaaagaagaaaagtaaagcattaagcaaccaagatcattgttcccaactagtgttgcgcagcatagtggttaataagcgagagagcattgctagttacctgagcaacattgagcatcctagccctaatagagtccttgatgttgccattcagcgc

SEQ ID NO: 74223 - DNA, 292 bp, Glycine max
  Clone ID: jC-gmfl02220097e02d1
ggggaaaaattctggatggggttgatgtaaacattacaatattacatttaataaccggctataagtttgacctcacaagcaaaacccttctaattagaaagggatcatattgttatcaacaaataaaagtggctcaggacaggccaaaaaacacagttactagtagctttagtagcatagctttcaatggccattaactttaagaccatttagtgaggtgggaaagccattcttttgattctccaatttggggaactcagtttctatgggcttggctattttggcatcatca

SEQ ID NO: 74224 - DNA, 312 bp, Glycine max
  Clone ID: jC-gmfl02220097f06d1
gcccccaacttcaaaataaacagatggttaattgccaaattttgcttgtttagaaggaaggtccataaaactaaagcagagggggaacattggggaggggaagagttttacaaatccaaactgcacccccattacaagaatggggtccatctgaattttccctacaaaattttcaattgacatccgcctcctgttcatacatgcatgagtgggggccaaacgaaacacccaaacaattttggcaatcggatggggttcatctgcccccattttatatcaaacacttgcagagaagttccaaataaataatca

SEQ ID NO: 74225 - DNA, 338 bp, Glycine max
  Clone ID: jC-gmfl02220097f10a1
gaaccaaataataactaagatacaaactacagtagttagatagcattgtcacaacaacagttggactcctgtacctccttactttgcttacctaaatcttctcaacgaacaaagcaaaacactaagtgagaccttttgttcacaatgtatttacaaatgtcaccaggaaaataaaaggatacttactgacaaccattttgcagtctacaaaagtataactagatactaatagcagttatcctggaggtagctacaaatatttaactagcttaccttctttgaaaagtattgttgcactgagaaaagtgtgtttgaggatcaactccagtgaaaccctg

SEQ ID NO: 74226 - DNA, 339 bp, Glycine max
  Clone ID: jC-gmfl02220097g01d1
gggccccaatccaatttccggccattacctttcatagggatcttaacctcatcagtattttttaccggcgtccttccctttcgatttcgggcataattaacattcacaggagaacacttaacatcaagcagaagcatttctgcttagcctctccaatttcacgttacaagtttttcacaagtactactaatccagctatgtagaaaatgtttaattacaacccaaagccgaagaagaagaaaaagacttttacaatataactagaatgaccaggcacaagaaagactattcttcttcttttgcttcttcttaagaggaggatgagaaggtgtcaatgat

SEQ ID NO: 74227 - DNA, 437 bp, Glycine max
  Clone ID: jC-gmfl02220097g05d1
gattctaataaacatactttttgaggaaacattttaactatggggggaatttgggaaaataaaaccagcaggaaaagggagtgcaaggtctaataacaaatataacaaagtgataaactgataatacataaacacctaaacatattgtgtgcccttttctacagcgaaacatcctaaagatacgtctaccaaaaaaagagttgtaacataatactatccccaaatcacaggaaagatacatccccctcaataagcccgtgcgaacaggaaaaattttgtgaactgtcatgggtaattttcagtgtcagttcgacatctatgttgtgtgcttgtctagatgccctcgcttatttttacgttttgcatagaagattgatccatctggaacaggtttattcaactttttgctacagaaaacagctgaaaacactctaccc

SEQ ID NO: 74228 - DNA, 338 bp, Glycine max
  Clone ID: jC-gmfl02220097g06d1
agggggtcacactgaatcatattaagaaataagggcatacatgaactgtttaccaatatatttatgggaatcggcacattaaccaggggcacatgtttgcaataaatattacataaaacgcacttaatttattgaaaaaagccgattggttggtacaagcaaatgcactacacaccattccatactttagggaacaccaaaccactcaaatacaagggccaactattcttttaacttgatgcattttaaaagccattgaaaatttctttaattgaaatcagtaagggaagaacttccactggtgggtatcacctttgttacagtcccaaaagactatt

SEQ ID NO: 74229 - DNA, 190 bp, Glycine max
  Clone ID: jC-gmfl02220097g09a1
aggtgaaaaaatgttttacaatagctctgttaaatgttccaataaacagggtccttattactcaaaattggaataaaaagccacatagaatgcctaagcccctttgccttcgccaattttgcttaaagcaaacacccttttggaaacaccaacggatccccctgggaacattttggacaagtttaattgc

SEQ ID NO: 74230 - DNA, 212 bp, Glycine max
  Clone ID: jC-gmfl02220097g11a1
ctggaaccaaaaggggaaacctttttttttttttataaaaaaaacccaccctggggctttttttgccccccaggtccaaaacgtttcccaaaattttttaacaaccccggggggcacaaattgttttttaattaaaaaaacttccgcaaaataataaaaatttttgtttcccccccattttgtattttttttttggaccccacttcccacct

SEQ ID NO: 74231 - DNA, 143 bp, Glycine max
  Clone ID: jC-gmfl02220097h03d1
actctcgaggggtctccctttcttttttttttttttataaccaaacgcggatataaaatgagatccaaggtgcaggaggcggggtacatgaatactattagggtgatcgtatgaggataattgaatttccacagtgtttaatt

SEQ ID NO: 74232 - DNA, 296 bp, Glycine max
  Clone ID: jC-gmfl02220097h06d1
aattaaaaatttttattttttgtaaagggacaaaaaaaaaaaaaaaaaatggagaaaaaaaaaaaaaaaccgaaaaaaaaaaaagggggggaattttaaaaaaaaggccaaaaaaaaaaaaaactatttttccgaaggggggggaacacaccaaaaaattttggcaaaaaaaaaaaaaaaaccccggggagggaaaaaaaccccccgcaaaaaggggggagaccccttgaatagaaaagaggagccttcccccctggggggggcaaccccccccccccaggaaaaagggggccttt

SEQ ID NO: 74233 - DNA, 354 bp, Glycine max
  Clone ID: jC-gmfl02220098a03d1
aacaggaactgtaatacaattttattgaagacagttaatttacatgcatagcataacctgacagaaaaatcaagagttgatcttttgtccaaaatgtaaaacacaacaattgttttttatcaactaatatggaaacagtttaatcctttttgtacaatcaagagaattctatatatcattccgtgtgaaacacatgatcagcaatggctacagtgaagaactctgagcctttttttggaaccacacagctgcaattgtcacaagggaagcataaactgaattgggtatcttttgcaccagtttcccaacacccggaacaccttcagtagccttctttgttgccactgcaactgt

SEQ ID NO: 74234 - DNA, 341 bp, Glycine max
  Clone ID: jC-gmfl02220098a06d1
agggggatgaagggaatatagttttttttttcctggtatcttacaaacaataaacaaaatctccatttcattatatgaatgatccatgaccaaaataaaactaaaaatcagacaaaacctgggggcacattgaattagtatctccattacagttatgggcgttgcatccaaacccaatagaaagctcagagttttccacatcccaaaaagtaaaatcctactacagtttagcaccgagatgtcctaaaccactttacatgaacacaaattcgagttgtcttggaagaggaccaagaaataaaagctagataatgttcaaccctgcctccaaaaataccaat

SEQ ID NO: 74235 - DNA, 418 bp, Glycine max
  Clone ID: jC-gmfl02220098a07d1
agagacaaataacaatttgctattacaaaacgaagaaactattattggaattcattcaaattgaagtgcacatgattaataagattcaaccaaactagagaaggccaccacggagcctaaggacaacatagacatagaaattttgttatatcatacacattcaaggaagagaaaatctcaatagcaagattcaactgaaactagaaatcgccaccacggagcctaagaacaaggtgaagcgtggattccttctgaatattgtaatcggcgagagtgcgtccgtcttcgagctgcttcccagcgaagataagacgctgctgatccggtggaatcccttccttatcctgaatcttcgccttcacgttatcgatcgtatcagaactctccacctccagagtaatagttttcccggtgagcg

SEQ ID NO: 74236 - DNA, 363 bp, Glycine max
  Clone ID: jC-gmfl02220098a08d1
ataatacacaatagttaataatatattgtccatcatggaatacaagatgtttgttttagcaacactttgcttatgtcatccatgttacaaatatacacatgaaacatatggagaaaagcttattcttgttcattttcatccatgcttaaattctaagctatcttgaaaggaggggatttgagagatggattagcgaaagggccctcaactagtcccttagctattagcctatacgctgcttcagtaaaatgaggcccatcccaatttatttgttttgaaggatctgagcaaactattgcagcaggactaccacataatatttgaaaactgagattgtaggttcacccttccacaacatgcttg

SEQ ID NO: 74237 - DNA, 519 bp, Glycine max
  Clone ID: jC-gmfl02220098b03d1
gaacaaactcaacggaacaccgctgatgacaaacaaatttaaatgtataaaatgcagaagcttgtgcgaagatccatgtataaattgcagcttttggtgtcaatccatggttatatgtattcaagacatcctactatacataccacaagtataaaaggagggccacccaggacccacttcagggtggatcctctcttgaacccggaaaaaaaggatgactcatgagccctcactaggcagggataatgaataatgaaattgatagcacaaaaagatattttacatcaataaaacatgctacattaataaacatttgaagaacccaacgaacccctcgaaggatatcaattacacccaagaagattttagagacgccagacaaggaagcagtatttcaccattgatgaattgtaacttcaatcaaaacaaatatgctattagggaggtaatgaaacagggttgtggtcccctccgaatagaatcgttgaaccaattaccttgaagtagatcaatgtatca

SEQ ID NO: 74238 - DNA, 398 bp, Glycine max
  Clone ID: jC-gmfl02220098b05d1
cttcattatatcacaaataagagcttattaccaattctcatattccaatcctctaaggaatttcataaggattttcatcaatccaactaatcatctagacaactacatacacattagagctaaaatgctaactatcaccaaatcttacccagagagaacaatcattgtcatcaaataaccataacttcacaagccacttaatttcactattttaagctataaaactaataaaaatgactcaaacaattttgcttttttttttgttctttgagtcaatgcttctcagagccagaatctctcttctcccaaaacttgaactgcacagatctttgttctagcatcttctccacttcctccataggaacccctttggtctcaggcacaaaaataatgacaaa

SEQ ID NO: 74239 - DNA, 178 bp, Glycine max
  Clone ID: jC-gmfl02220098b07d1
atcttcattaaacaaatcctccaacggggaaaaggtttgcttcaacaacctgcactcccctcatccctataaattaaccttccgaataagaccttatatacaaaactcctatcaaactcttactacatgaactatttatttaatatacactgagactgtttcaaaacagcacctgtaa

SEQ ID NO: 74240 - DNA, 460 bp, Glycine max
  Clone ID: jC-gmfl02220098b09d1
agacaaaactctcagatacacatgttttattcaaaacaaaagcaaaaaacaaatcaaattcaatacattgattaaaaaagacaagttgattgccaaagccaaccaaaacaagtaaaactttaacattatatatatagagagcactctgcaaaagttacaggtagcaaataatgtacacacctctctcacaaaatgcaacaagcggcaattcatgagtactgctgtgctgtccagtgcacatcctacttttaatatatatatttactttgttttatttaattattaattaactaatacacattaaaaagaagattgattttaagtttgaggtacagtaggtgatgaggaggatcagaaggaagaagccttggcgagtgacttgatggtaacatcgggacccagaacaactggtttaaaatcgaacgtaaacgtgtcgtaacgcaggaagaattccaccaag

SEQ ID NO: 74241 - DNA, 528 bp, Glycine max
  Clone ID: jC-gmfl02220098c03d1
aaagttattgacgtgaaataagaataaggcctttgtctagttgctacgacacaggcatgaaaattaattgcagaaaattaatacgtgaacataatctttatatatttttggggcttgcaaagattgcagagacattttatgggtctacaagggattctcacgtcaaaattttatcgcgtgtaaatgctctattcttgtatgttctgatatataattttgactggatatgaccgaaatgggatggtctctggctctacaaaattttcaaatcacaagctcatgtatgaaaaaagagatggcactaggtcaactacagaccaggcaagccctgcatactgaacaaatctaattccggtatcaacatcgaatgccttgtgctgggaaaggagcttttgcaagtaaccttgtttaagcttatcagacattttacctgtcacagatccattcagtgtaggtatatagccggttgatttatcgggatgcccaaggtgtcgctccacaggaatggtccatttgcgagagtctact

SEQ ID NO: 74242 - DNA, 217 bp, Glycine max
  Clone ID: jC-gmfl02220098c04d1
gccaataaggacaataaagtttctagccttattttatatattgctggattgatgtttttagctacattggtatgtgccagagataacatatataacaagtgtatgtattatagcataatccttagtttaggggcaaaaatgttcctccaacatgaaggttttaaaaacttgaccaagtcctttcccttgcacagaccataatatcactgatcaatat

SEQ ID NO: 74243 - DNA, 353 bp, Glycine max
  Clone ID: jC-gmfl02220098c05d1
ccaaagaaaggggaaaagtctttatttttttagcgaattttttctcaatcccccaaatatatggggggataaaaacccttttctataaaccaccattgtttggggcacccgaagggctaattaattaactccttgggcatgaatttctttttaacccaccttttgagcattatttgcagcctttgatgaacaaagtgtttattgacttgccctccctgcttcatccaattttagataaaacgactccttcccaattttctaaacaaacttggatattataagcttctccatcacctccagccttgggtttacaaacaaaaccttaactccattctttcccaatattttaatta

SEQ ID NO: 74244 - DNA, 420 bp, Glycine max
  Clone ID: jC-gmfl02220098c06d1
aatcaaaatagcatatggagttattatatcaaatacgtgattgttacatgcaacaatcaacttagatacatctagtgatcactcacacccaacaacaaagactatgaagtgtctgaagaaatagaaactaatacaataaaaggctcgcataagtgaagccctacagtcacactcgatttctcttattctgatagtaagtgcttcactgctgcctcagtatcccgctgcagaaatgagcaaatctgtccatggcttgttcagaacctgatgcttgcacagttagtggagcggctgatcttgtaagggacattgaccttgcagaaaccagggagtgcctgagcatactggtcattgatgttgtacctagcagcatccgccttgagacagttgcacacagtttgtttgtcaacggtggtgaca

SEQ ID NO: 74245 - DNA, 375 bp, Glycine max
  Clone ID: jC-gmfl02220098c07d1
atgaatgcgaattatgcatttgctatcaatgtggggtctttgtacaaacaatgaatgtagccgcagaaattttccacagcaaaatgctacttaatctcgatattcctatctctatcctcagaagctaattcagcgagcaagagaaaactaatccaaggtacaattaaaaaaatctatctacacaatgtatggggggaaataaccagctgggctgcttctgccttaatgctggcctgtgactccagaaagccaagaactataaagatgatagtgtccgtgtgaaccattctgataggcgtttgatttttgctgacagcactgcatccttttcgagaaaagtggtggcattggacagtagaatggtcacatcatgct

SEQ ID NO: 74246 - DNA, 309 bp, Glycine max
  Clone ID: jC-gmfl02220098c08d1
gtgtataggaaaaaatgcccctcgtttccctcgggagattttttgcatttccatttttggaataaaaaacagggagtcttttgtttgggacccacaatcacaccctcctacatcactccaactaattactttgcctactttttcaacaaaaattgaatccaaagatttgaccctgatgcttttatgggggataaaattaattctacacccccagcctttagtcagcctaattatatttctcctaactagttagggaacctcctaaattgggtccctgggttggaacttgcaaatcccaggggcctttta

SEQ ID NO: 74247 - DNA, 468 bp, Glycine max
  Clone ID: jC-gmfl02220098c09d1
attaatataaaatactaattttttcttttattttattttccccccccaaaaaaaaaaaaaaaaaaaaaaactcccaaaaaaattttttcccaaaaaaaaaaaaaaaaattggggaaaaaaaaaaaaaaccccccctcaaaaaaaaaccccccaaccccactttttttcacccccccccacaccccttttttttttttaaaaaaaaaaaaaagttatttttttcctctttcccccccccctttaaaaaaaacaccgcccccccccaaaaaaagggtcctttttaaaaaccaaacaactccccccaatttattataaaaaaataacccccaccgcccccccacaaaaaacaaaaatgggtaaaaaaatctcccccgggataaaaaaaaaaaacccccccaaccaaaaattccaccccaaaacacctaaagggggtccccccccccccaaccccccccaagaacacaaaaa

SEQ ID NO: 74248 - DNA, 178 bp, Glycine max
  Clone ID: jC-gmfl02220098d04d1
aacaaccaggcctttttttcaattcaaaaacaattgggggacaaaaggggaaataaccttccccaaaggggccaaatcccgcccacaatttttaaatcgggaatcttcttcccggggtttgcccttggcatttgatacccggggaaggggacccccttgaacaaaaatcccttgaggg

SEQ ID NO: 74249 - DNA, 425 bp, Glycine max
  Clone ID: jC-gmfl02220098d05d1
aaaataaaaacataaacaacatactttcgctggaacgagttcaatacatcattttaaaacataataaacagcagcacttaaaccagagatgcaaagcacaagttcaagggagacactgaacaaacagattagacatatgagaacacttcataaaagggattccccttagcaaccaccacgaaggcgaaggacaagatgcaaaggggattccttctgaatattggaatctgccaagggacgaccatcttccaattgcttcccagcaaaaatgagcctctgctgatctggagggataccttccttggcctgaatcttagctttcacattggcaatagtatcagagctttccacctccaagggaatggtcttccctgtcagagtcttcacaaatatctgcatacctccacgaagcctcaacaccaaat

SEQ ID NO: 74250 - DNA, 495 bp, Glycine max
  Clone ID: jC-gmfl02220098d06d1
caatgcaacaaagtctacaatttgttcctcagcagttcaatacatcaatattttgtatataggttttttttttcctcttcaatattgggccatcaacagatgttctgtttaaacaataagaaagaaaaactacaatcatagcacccccgaaaatgttaattgagcaccaatggctgaactccgttaatcagtagttatccctcaatttcgctgctaacatctaaaagaatgaacagataatacctagatctataaaggaattatattgctattgtctacaaagctctcaaggcagtatgcaactgaaaagagtgaacataatattcaactgatactgatcttcaaacaaatttatgagagttcgcataagagtagggaaggttgagcttgtgatcctccaatcaagccaaggagcataccttggcttgtctgatactactgcagcaaagccgactgtcatctatgtaagttgcttggatgcccatcatccatgat

SEQ ID NO: 74251 - DNA, 420 bp, Glycine max
  unsure (1)..(420): unsure at all n locations
  Clone ID: jC-gmfl02220098d07d1
aaattaaacaccattcaaaattattgtttatttatgatttacagatacaaaaaaccagaaggatatcagcaaacaaactcctttctacaagggggaagagagtctgggagatcacccactttctcactttctactacacagagagaaaatcaccgagagtggaaaaacaagattctctcgactcatacagagtctcagatataagattcctaaaacaaaacaaaaatctacagaagcgtgctctgttccgttccttcctctgccaccacgagtagaccaccttattgagacagtngagagaaaagacaaaaggagcaaaattagctacactgcaccatgtaacttaggtcatgtctctctctagctacattctcaagtgagttcagccgtgtcacccgcactcaagatccaggatatctc

SEQ ID NO: 74252 - DNA, 421 bp, Glycine max
  Clone ID: jC-gmfl02220098d08d1
gcacgcaaacaaagtgatttattaatccattcgatgttcaaatggtaatagaaacaataaaggtctaaatgcccaaatggtctctaacagaagctaaaaaagacaacaaagaaaaacaataacgtatctggaaaaccagacttattttcacaaggacagaataataaagacacttaaggaaactactcttcctcatcttcctcattccagcactttagagttgatctaggtgaaccacagtcactagtcttcccgaatttttggtagacaacagaaccacccattccaagcccttcgtggctcctctcttcacgacagtatcccttaacatccagaaagcaggtctgctcaaacgacttgcttgcaccatccacatgaactgcaacagataactcagttgggaggaaacatgccaataccc

SEQ ID NO: 74253 - DNA, 411 bp, Glycine max
  Clone ID: jC-gmfl02220098e01d1
aataccaaggaatctctcataatgataaggaaaaagtttaattacaagacaattttaaatgtaaagcatgataatatgtcgctacaactacaacagacaaacacatacgtcttaaaattattactcgtattaagaagcactcacacaaaacaagcaaagatcgatatataagaaagccaagtctaacaacatgattgagagtcattatgttcctgttcatgattagtacttaattagacatgcatctcatggttttggttgatgaaatattataacaaaccataatgacacaaatttactattattcaaccacttagcaatgtccatccgtgtctgctgcagcttaattatccttactttagtaactaagccaactgggcaccgcaattacaaaggatggggcaggtcatg

SEQ ID NO: 74254 - DNA, 495 bp, Glycine max
  Clone ID: jC-gmfl02220098e02d1
aagatgcatgaatatccatatattgattccccataatacacttatgaggtcatttttcaaaaaacaatataaaaatttcacatgtattagctgtacagttttctcatgtttaatttgtacaagatatgatatgattccaccctagcttggaagaagaatcacaacaactgtgctgaaaacaaagctaatttatttattctacatagacacattaatttgcacacaaaataacaaaaaaaatcttcccaagattaggctgcagtatgatgccctatttggtgaaaccaatagtataaggaacgccagtagccttcaaccaaccatcagcatctccagcaggtccacctctgaggaattgggcagcagtgaattgtgcagcttcgttcttattaatattgggatggtaacccctccactttacccttccttgaacgttagaaccaggtccaacgttagcatactcagcatagtacaacgtatcaagatcaggttccc

SEQ ID NO: 74255 - DNA, 524 bp, Glycine max
  Clone ID: jC-gmfl02220098e03d1
cacaagacttgaataaatttcatttcaattatacgtttccatatatacatcaggcacacaagtaatccattcatatgttaaattgttacacaagcatacaacagtgtcatgatttcctcaggtccacaaatattggaagtttgaatgccaatagcctcgaatatgcaacttgaatcttagcccaaaacttttacttagttattggctttgccatagcttcttgggaaagggataacgtccctaacattgccaaggccagttgcgaagaggaccatcaggtcaaaccttagagtgaacccagagttcttcactgttccgtttcgacgaagatctaggtaccattcatacttctctcgcgggaagcctaactaatcaatcctggagcttatcatgttaagacgttcctcgttttggctaccagatattattgttccaagctttgggacaaccaagtcaaacgcagctacagttccatcatcattctggcgagcataaaatgggctagcttcttttggataattgat

SEQ ID NO: 74256 - DNA, 325 bp, Glycine max
  Clone ID: jC-gmfl02220098e05d1
ctgtagcattgactataggtaatagccatccatcaaggttgatatgaatcatcctatgacgagacacccaaattaaacaaggaggcaaccatatgcctaatgaggaattaaaagtatagaatttcaagccaggaataataaaatgagaaagaaacagaaagcagctgtaacattttaaagaccaacttataactacccttattgatcctaaccatagctttcacatgacctcactgatagattcataatactagtgccttagaattttgcttcagttgttgagaggtgcaagatatctgttgatgcaatcaaaccaagggttcct

SEQ ID NO: 74257 - DNA, 449 bp, Glycine max
  Clone ID: jC-gmfl02220098e06d1
aataaatgttaaattaataaattaagtcttgtaattaaagacagtgggagtacatcttagttctactattttctttgcctcagatccctcaaatcatataatccaagggaaaaggaagaacaaagcgaggaaaaggaattaaaaaaccacggaagcattcacttcgggtttgatatgtacacgacttatttatgttacaaccacaaacgaagctctttatttggttcaacacgacttgtttacttcacattttagaggacctgcaaagcgagtgagactcgatacggctttcccaggctttgctatgatttctgccttgggattttttgctacgtttttcccagactgaacaaagaaggctccattcatcaataaatcaccctctgatctccaattccagttcttccacacactttctggtgcatagtccccttttgcacttctttggc

SEQ ID NO: 74258 - DNA, 202 bp, Glycine max
  Clone ID: jC-gmfl02220098e07d1
aaaaaccggggtaagggatatgccaatatatcatatcagttcaacacactactaaaacagggaacagaaacacccaaaacgggtgagtaaaaagaatatgccacacaactgattctagcacaaaagagtaacaacagtttgatgaaaatcaggaacgcagcaggaacttggaatccttaatcagctaacaatctgcatttgt

SEQ ID NO: 74259 - DNA, 369 bp, Glycine max
  Clone ID: jC-gmfl02220098f01d1
caaaataaaataattctgggacaacattatgctacgataaatccacaagggaaactagtaataataacaaactttccctggtatttccgagggttccttattgatcactcttaaatcactagtcaccgcatcagcatgatttatccctccaagggaacactgtgaagaacaacggtctcaacggttagacccggcccgaatccgaatagcaccccccactttaacccttctccaggggtactcttcccttcctccttagacttcttcctcatttcatccagaatgaacaaaacacacgcgcttgacatgtttccgtactcactcagcacatgccgggtggactggagtttctccggcttgagccggagc

SEQ ID NO: 74260 - DNA, 501 bp, Glycine max
  Clone ID: jC-gmfl02220098f02d1
gagaaacatgagcagagattacaatttaatatataaaatatacgttcgtgttaaccagattataaactggactgaacaagaggggagagagagatcatcataatacatctaaaatatagtggtaattattgcttcatattaatctacacatacatataacatatataaatatatgtaaattgttgttacttttgtatcatcaggcagaaatctaggaattggcagacccacctcccttgattgaaagaggagaaccacagagagaggtgttctcagtgagttttggattaagaaacaccacaatcactgttatgtcatcatggatgtgtctcctcatcccttgctcaatcttttggaggtcagaaagtctcatttcacacttcttagctgcttctctaagtgcagctttcacaagtcttctagcaattccgttaggtggattgttgctgactatgctaacaacctcttggttggaagatgctcccataagccatcagaagc

SEQ ID NO: 74261 - DNA, 384 bp, Glycine max
  Clone ID: jC-gmfl02220098f03d1
aaaaaaggtatccccttaaaagggggaccaaactttatttggggcatacaattatctataattcagtagttaaattcatctaccttcaaattaataggggccaagagaaagagaaagaccttccagttgacgtgtaaatagagttccataatacaagaattttatgatgaaaattaaaaagccctcttgaagacaaagtactgggcgggtaaaatatacaagcgggaaaggaagtaatttttttctccatcattttgccgaacagctccgttctgtacagttatctcttcaacagcaaaacttctttttctcgaatttgcttctttcctgactatcaatggatgccagaagttcttcttgtctaatcaaagcttcatacaaagc

SEQ ID NO: 74262 - DNA, 212 bp, Glycine max
  Clone ID: jC-gmfl02220098f04d1
aaaaaaaaaaaaaccttcctttaaacccggtgaaaaattttccctttccaaacttttttttaaaaaaaaaaacccccaaaaaaccctttttttggaaaaaacccccttaaaaaacctttttttaaaggggggtaaatttgttacccccttttgccccctaaaaaaggggggttttggcccttccccccggggcccccaaacccccggggggc

SEQ ID NO: 74263 - DNA, 398 bp, Glycine max
  Clone ID: jC-gmfl02220098f07d1
cataacgagaggacacatatttgcattgtgtgtcttccttgtgccttgtttaacaatttctagggaggaatttgactacaagttcaatgccagaacagaagtgttctgtcttattccctaaggattatgaaagcacacaaagacaaaaaagattaaattaaggtacttaatttcaatctggtgggtacatatataaatacatggagtggtggtagcaactagcaagggcattaagagacttaataggtaaaatttaaagtttcaggggcattttggtcctcctctttttgtcttccagttgttgtagcaagggcaaacttgcttgttgccaaaagttccaggaggcacacacaagcacttggcacagcacttttggcagaagaataggcacggtttct

SEQ ID NO: 74264 - DNA, 540 bp, Glycine max
  Clone ID: jC-gmfl02220098f09d1
acatcaaaatagtaatcacacttaacatattagcagaactatgaatacattgtttttcattacaaagggcataataatcgatctcgacccaactaagaacaaaaacggcgtataaaaaaagaattacaaaaatagaacagactttgttacataacaccgagaatagttgtcatacctcccagactaaaaacaaaacagaacagactggaaggtatcctcaaatccacatccatgcaattgccaacttcagcttccacagctttgaatagtttacgagatcttccatgttatacctatttgctcaatctcaaatctgaaaactgtctttgtctttgtcccagctgcaattatatcctctcccaaccagaaaaaaccatctcccttttaaaaacaatctaaaataaagcactccaaactgctccatttccttcaccacactttgagtggacatatttaatcttctccactgacttacagattccactgcagctcccatcaaatgatgcaaacacatatgtaccggcctgcgccttcactaca

SEQ ID NO: 74265 - DNA, 508 bp, Glycine max
  Clone ID: jC-gmfl02220098g01d1
gctagcaactgtacttttcattgattaaataaacctttacatttaccttaggcctacaaaaatttactcatctcatactgggagagggtggacctgtaaatgacagcatccctagaaattcgctaaaaatcgcagaatagcagggctagatttataatcaatattgactgtctatatacagtactgctaactacttgcataaattctcaatttgtatttttttttttcttttgagaaattgaatcaaaaagatttggacagagaaaccacttggcaatcttgtgctagggcttttgctgggaagggtcatcttcccctgagcaacaaagtttgcaaggattggaggatttctgggaacaccagtgatctggaacactcaaaaaatatgtagacataaactttctgaacctctttttgtattctttaggagagattacagttggcaacacatttttggcacaacaagtgaagacttcatccatgtctcaagatgtttgtcccaagtata

SEQ ID NO: 74266 - DNA, 481 bp, Glycine max
  Clone ID: jC-gmfl02220098g02d1
agtaactgaacttcttgcttaacaagaaggagatgatatgtgaagtaataataatccaacaacaaataagatgaatctaaagaataactacacacacacaactaattacataatgatgatagccaacacaaacacacacacatatatctctatcaggagaaaaaagcatccaattctccaacgaatcaacatatttgaaagattatcatcaaaacagctgcaacaacttcaaaaggaacatgtcattgttattcttgtgtttcttcttgtcatcacaagaatcaaacttgaaaaggccaaggccaatccttcaagtcctcatcctgctgcaccttcccactcctcacaggcacaacagccccactattcccctcaacacaagcataatacttcaagaaaaatgcaagtgtcaaaaccacccactccaagcaaaagatcaaaatggtgagtccaccagccaaattgagaatcacagcaccat

SEQ ID NO: 74267 - DNA, 414 bp, Glycine max
  Clone ID: jC-gmfl02220098g03d1
gggccaaatgggcttggagcctctattcattttttcaaggcatctgggccttccaaatggcagaccaataagttgacatgcttcaaacaaatcaacttaaaggatcggtggaaaaaacactgaacataaccatatctctactttttcctttaaagaccacatacttcctgagaacaccctccctttgaaaaccagccttttccagcaccttttgagaagccacattttccacatcaactaaagcccgaagcctctccaaggggggaaactcgctgaatgcaactttaatcacttggttcacagcatgggttgcaatcccttttccccaatttttggaggcttaagcgtaaccaagttcaacaaatttgtgcctgtttctacgctggcccccacatgagaaaaaatcaatacccc

SEQ ID NO: 74268 - DNA, 512 bp, Glycine max
  unsure (1)..(512): unsure at all n locations
  Clone ID: jC-gmfl02220098g04d1
catcaattacaagcccttcagcagcaactcgaggacctgcttccacaggaggcttcttacgagcttcaactgcagcatcagcttcagccaactgtcttttcagtttttccaaaacaggactttgccgagctggatctataaagacaaccctcaatattctttccactgtcactagttccttttgttcatcaaactgcatgacagaaggccaaagaccaaatttaattatttacttttatcattcacgggtaaccttgaaaatattgcctaaagcatgaatagatgaaacaagctattatcaatataacaagctgacgctaccatgaaaatagcctatctacaaatatctgttaataaatcaatcctatccagaagttgaagttcagtttttggcatatgttaatgttgtagggcctatagctaacccaaacaaactagtatcctacatatggagtaatattatagaataccaggagtngaaaaccactagctggctaaatcatctaatcaaa

SEQ ID NO: 74269 - DNA, 487 bp, Glycine max
  unsure (1)..(487): unsure at all n locations
  Clone ID: jC-gmfl02220098g08d1
cagaatacacaattgcatacctgcaatatatataggggtacaaatcaaatcaggaggcaggaatcctatcacagcaggattaaaaaacgaaaaccacactaagattgttttctactcgctaattgctaatataacgaagcacatgcgatttagatgcactttctataaataatatcatactataacaatggaaatacaaacctacaacattcggcaacagttgactaggttgttaaaaaagcacactatgtaaccaacccactattgttttttttaaatagaaaatcaatcttatcggttgatatgtcattcccaatgagacttctctgaattatgttgtctcaaacccaccacctatctgcatatgcagccacccaggatgtgatgatccctgagcatacccccttgctgcttgtgatccaaataccattccagcaatgtcaaatggctgagtaccaacatctttngaaggaaacccatcaatagt

SEQ ID NO: 74270 - DNA, 291 bp, Glycine max
  Clone ID: jC-gmfl02220098h01d1
agttaattaattgagaatgaaaaccattcttcaaaaaacaagattattttccccattcctgtttacagtgcaaacattttattaaaaaaatgctcctagcataataaattcccattagctctaaaacctttttttttttttctcaacaacagagctggtaattaagtaaggtaagaaaattaatgtgatggatggataggaagctatgcgcatgcagggggcattagcaagcctccaaagagaggtcgagtattgacacatcttgaggtggttggggtgagcccaatcttg

SEQ ID NO: 74271 - DNA, 441 bp, Glycine max
  Clone ID: jC-gmfl02220098h05d1
agtctcataaattgcataatttgtaaaataataattaattccatcacatgaacatatattacgcgtacaagaattgaggagtttgactaagggcacacacggaaagaagtagagaagatacgttgttacacgttttactacagtgagagtgatggaagaggccaaagagagactctcatgctaacataattgaccacctaacatattattgctacaaattgaggcaaacacgttacttaaaagaaccctaaacaccaaacttcacgtactgttcttgcgttaagatgaggccccacttggcaaagtaattaagtaataatcgcacttttagcttaaatattttggggcctcattttttttctttctctttggactcgattcattattgctttattctcacacactgctagctatctcaatcacaggcacatgaccattttt

SEQ ID NO: 74272 - DNA, 255 bp, Glycine max
  Clone ID: jC-gmfl02220098h06d1
aaacccttagtaaaggttatagattacatttcaaccacaaacatgttctcccttgggggtcaacaagaaatcaaatcacacaacaatttctttccagcatttaataataacgctaaaatcactcactcatatacatatatattataagttataaatatacaaccacaaaataaattcgagtcactgaatgactttatctacttcattaagcctcacatagaagatggaaaaggcccaaaacatgaaaatagtctt

SEQ ID NO: 74273 - DNA, 548 bp, Glycine max
  unsure (1)..(548): unsure at all n locations
  Clone ID: jC-gmfl02220098h08d1
aaaatcaaatagttgagcattgagtacaagattaggatgtatggcagatgaagcttgtcaacaatcgccttcattagcgtaagcacccaccacctgctaatgactgaggtacaatatagacaacagcaaacctaaccatgccgccaaatcatgaaggagaaaaagaaaaagaaagccaacttttcaactgtaatcaagaacgaacgagagtcgggccacagagctatatgaactagcaaccatagacaattagtggtttctacatactacagatactttcgtgcaagggctcggactttagtatcaaaatgtgatgacgtgatccgggagccaggcaagcacaggggattaaggagagtctctatgtaaagctcatgcacctctnggaagaagctcttaataccatcatcattacgggagtcatgtagcaacataagtcgggtatgaccagctgtaacatacactgacacccatgttcattaaacctgtctactgatttcaagtacattgcactagtagtccatgcaaggtcctgaacatatcaagag

SEQ ID NO: 74274 - DNA, 538 bp, Glycine max
  unsure (1)..(538): unsure at all n locations
  Clone ID: jC-gmfl02220099a03d1
aacacggatgacaaccattccagaaagcaacaaaaatggaaattacattttttttttcagacacatggggggatgtgtccaacaagagaacaacaaatgcaacaaaaatcaaaaacagagaaaaacaacttgtagctttatttacacacagggagaccaaagaaaaagcggttcagaaaactccaccagccatggaaggaatgtcatcaaagcaccaaaggttcatgaggtttccaccatcctgagttgtgtcaccagatagcaaggattccaatgaagtatcgccccagctcccttcaagataaggcatctgaaagaacttcaactcagattcaatatccacaagctcctcagagagtgtctttgcagaatcatcttcaatagataccacattctgagagttaggctgctgctggttggcattttgcacaaaatgagattcacaatccaaaggagcagaaagcatggatgagatctcaggagcataatcaanatgaatactcccttgatctgaactgaagtaaagggttgcatcatc

SEQ ID NO: 74275 - DNA, 386 bp, Glycine max
  Clone ID: jC-gmfl02220099a11d1
gctcagcaaaaatagataatatattaattgagtaccagaggtactaaatatacaaacggggcattataagaccacagaccaatggttccattgtcagactaatgtagtcttgatggaaaccagagcctagattacatgtgaccagtattttgcacctatacattgtactgtcgacaactaatacacaaaccctgatctaagattgctggaccaatgattgtagctgatgctgaaatccttctctaagtgccgaagccacgtccacaataaaaaagatgcatcttccatgattttattagcatcaaatgattagaccaattctctaagctactgcaatactaagcatgaccttccaacataattagaccaatgggagttaatttagc

SEQ ID NO: 74276 - DNA, 545 bp, Glycine max
  Clone ID: jC-gmfl02220099a12d1
ccagcaaacatcttatattttttattaaatcgtagtcaattaacaaccaaacataaaccattttttatttttcagatccataagagaaaaaatagatacccaacccaaggagagaatgcaaccttgaaaagcagcaaatggctcgtataacttcatattcaaggctcgaagaccatgctctctgcttctcgcttcacggattcaaagagcacagatgataaataacgctctccaaagcttgggaagaccgcaataatgagttttccagcattttctggcctctttgctatcttaattgcagcagctgcagctgcaccagatgatattcccaccagcaaaccttctttcaaagcaagaagtttagcagttccaatggcttcttcacttgaaatttgaacaacttcatcaagtaaatcgacatccagaacaccagggatgaagccagcaccaattccttggatcttatgagggccaggttttcctccagacagaattggactttctactggttcaatgccatatagcttaatataaggggtctgatc

SEQ ID NO: 74277 - DNA, 614 bp, Glycine max
  Clone ID: jC-gmfl02220099b03d1
aactgtcctcctcccccccggtaccccccactcccccacacccccaacccaaaccaacaacctcccccccggggcacccaaagggggaaacctctcaaaaaaagggccaacccccaccggccgccccccgacccccccccccccaaaaccccaaaaggaaatgctcccgccaacaaaacaccgcggcgaaagagggggcctccggccccgcaggacaaaaagcctccaaaagagggccccccccccccaaaacacctagggggaggggaggcaccccggggaaaaaaaacaccccccggggggaaaaaacccacaaagggggccccaaaaaaacccccacaaaaagggcccccgggaccccccgggggggggcaccgggggcccccccaaaaacgggggggggccagaagagaccccgggaaacaccggcccccactggggggcgggggcccccccgaaaaaaaaacgcccccccggggggccctcaaccccggggcccccaccccccccgcgagaaaggggcggccccccccccccgggccgcgcgaaacaaaaccaccggggggccatccacaccggcccccccccggagagaaaacaccggtccccccccc

SEQ ID NO: 74278 - DNA, 546 bp, Glycine max
  unsure (1)..(546): unsure at all n locations
  Clone ID: jC-gmfl02220099b04d1
ccagcaaacatcttatattttttattaaatcgtagtcaattaacaaccaaacataaaccattttttatttttcagatccataagagaaaaaatagatacacaacccaaggagagaatgcaacttgaaaagcagcaaatggctcgtataacttcatattcaaggctcgaagaccatgctctctgcttctcgcttcacggattcaaagagcacagatgataaataacgctctccaaagcttgggaagaccgcaataatgagttttccagcattttctggcctctttgctatcttaattgcagcagctgcagctgcaccagatgatattcccaccagcaaaccttctttcaaagcaagaagtttagcagtttcaatggcttcttcacttgaaatttgaacaacttcatcaagtaaatcgacatccagaacaccagggatgaagccagcaccaattccttggatcttatgagggccaggttntcctccagacagtattggactttctactggttcaatgccatatagctntatatcagggttctgatctt

SEQ ID NO: 74279 - DNA, 377 bp, Glycine max
  Clone ID: jC-gmfl02220099c10d1
aaacttacccatttaacccccccaaacaaaaggggggccccccaaaagacaaacacttaaatcccccaaaaaccctaaaggggggttttaaaaaaaaaccccccaggcccaagaaaaaacaaaaatgggcccccgggggggaaaaaaaaaaatttgggggggcccaaattgggaaaaccccccgaagggggcaccccccctttttcaaacttttaaacccgggaaaaaaaccttttaaaaaaaaagggcccgccccggggcccttggtaaaaaataaaaaaataaaaaattctttaaaaacccccccgggaagaacaaaatgccgcccaccaccccaaattttgaaaaaaggccaaaaagggccaccaaaataaaaa

SEQ ID NO: 74280 - DNA, 500 bp, Glycine max
  Clone ID: jC-gmfl02220099d04d1
aacccataacataaaacatttattaatatacaaacatttattacaaagggaaaccagaaatacagcaagggaagatttcatccttaagaacttcttccagaacaaacagattactgaatttattatttctcagagtcaagtcaagcattatgatacattattccccaaaacaccaacaacagttcttaggggagcagttattacatcgtactttcacatgaacgcgttataaaggcagataaaagcaaatacctccaacacaggaccttaagggttaagcacagcacaatactatgtgacttaaacggggacacaatttagcaatttttcttaaagcactacggatttgctgaatttggtcataattatagagccttgttagtgtagaatcacacattcttgtgaaccagctaccaccacagcagggtgttcgcttgtgctgactgcatcaacttttttgacactttcaacgttgacatcctccaattaccacagccaat

SEQ ID NO: 74281 - DNA, 423 bp, Glycine max
  Clone ID: jC-gmfl02220099d11d1
atctaatcatcccaaatattttaataattcagcgaaacacatttattagtcacatactgtattttatgggtaaaagaacacatttcattttaatccgctttttgaagattgaaacaagccttaaaaaagcagtgaaaagtttcacatgactggatttgcattaatgttttttaattttttcaatatacaaattttcccagaccatgttagcattcattgaccgaggaagggagagacatgactgcaatcagcttaactgttccgaaccccattgattttttaatataagattggttttacaattaaagcattcagaatctggttttcatgttttttcccgccctaagttgattaagttggtccctgaacaaaacagcatctttttagggtttttcaacaacagctttcaacatattgtgtaaa

SEQ ID NO: 74282 - DNA, 371 bp, Glycine max
  Clone ID: jC-gmfl02220099e04d1
ggggggggccctgattatatatttatatgccggggtggggaaacaatttattccccaattttctatcccccatttgttaacccggcccacttatttttttgccccccaaggaaatggcccttcaaattcgaaaaaccaaaaaacaatccctggaaaaggggggggtccttaaacttttatttttgaaaccaattaaacgggttcaaattcaacaaagcaggggccttacataattagagggccctctaaaactttatttgcccatattcattggccctaaaattggaaaaatcaaaggccccattgaccccccccccttcattgggtttggctaacaagttgcccccccttacaatgtaattttgttctgg

SEQ ID NO: 74283 - DNA, 431 bp, Glycine max
  Clone ID: jC-gmfl02220099f03d1
atctaatcatcccaaatattttaataatacagcgaaacacattcatcagtcacatactgcatcttatggataaaagaacacattacatattaacagcttttgaagattgaaacaagcctcagaaaagcagtgaaaagtttcacatgactgcattagcattaatgtttataaatatatacaatatacaaatatacacagacaatgtaagcatacatagaccgaggaagggagagacatgactgcaatcagctcagctgtaccgaaccccatcgatattctaatataagattggatttacaattaaagcattcagaatctgtttttcatgttttttcccgccctaagttgattaagttggtccctgaacaaagcagcatctttattgcgttcttcaacaacagctttcaacatattgtgtaaaagattaaact

SEQ ID NO: 74284 - DNA, 560 bp, Glycine max
  Clone ID: jC-gmfl02220099f04d1
gaaagagaacaatttgttgtttactaatgagagatgaaggaactaatcatttgtcttgccatcgcaaaagaatagaactcccataattccattagagaagcaattaatatggggttaaatctaaaatccaaacaatggttgccccaaagttaaacaattaaaataaaagttgcaactttagttgccaactattcattcctatagaagttcctagcaggaaatctaatgcagattttttcgggtaacttctatggggacataaggaattgctgtaatttgaatttcaactttctgcttgcagaagaacccgcataaaaaagggcaatacaggcagaacataaacaattcattgtgcgtctgagtctgttggggtagacttttccgttaatgcagaaagctgtgtctcctgctgtttcttcagatacctctgggcagttgcattcactatcttgacaaagaagttcataagcatgagccacacaacagtgttccagactaaagtgaaagaaaaatccccacttttcccctgcttatttggggaaactggatgggaatctttt

SEQ ID NO: 74285 - DNA, 439 bp, Glycine max
  Clone ID: jC-gmfl02220099f08d1
ccattaaaaatttcaactcaaaaggggttatttatgggatgtaaagtcgttaaaacatccacctaaactaaccaaattttatgatcttcaacaagatcacattctatttttttcttcgagatcaaatcaatttccaaaggtggcacagctacaacaagcttgaccgaactcgagtgcccatggaccaaaagcctgaagaattcttcacaacaagcttgcacttaatagtccaacgggcctttctttcccaaaggattcttcatcaaaatcttcgtttgttgaattttcttggcataactctcgagtaggatttaaatcaagagcctcccaagccattgaattaccatcacaaacattgccttttttagaagcttgattgacatccacatgtgcctctgcatttggccttgtatcagtagacaaaggttccattccctta

SEQ ID NO: 74286 - DNA, 433 bp, Glycine max
  Clone ID: jC-gmfl02220099f09d1
ggggaaaaaaaaagatcctgccctttaaaaaatcaagacagaataattcctcccaacaaaggggaaaacaatgggtttttccctctaatgaaaaaaagccaatggccttatgggtaaaggaacgtttatttaacccgggcaaaacaatttgtttcccctcccacaaaaatcataaaaggtaaaattcaataaaaaagcctcaaataagttttaaacaaaaaaaggggggaaagccccccccccttttggcccctttctcaatcttggggcccgccccccttccccccgaaggggccggtttatttttcttgggtggcccagcccccgccccccccatggtggggcccgcccccccttgggacattttggcaaagaaaggaatggaaaagccttccaaatcccttattttggccccaaaaacaattggttttgg

SEQ ID NO: 74287 - DNA, 374 bp, Glycine max
  Clone ID: jC-gmfl02220099f10a1
gggtgggaggaataaacttttttccaaacccaaaaccataaagtttggattaaatttcgaagaaacatgatattcctttcaagacatattaatgaacacatgtaagagccttaaatggtaccaactaacagaaattttaaatataaatgttcttagaggggatcaacccccaaaattaaactaattaagattccctaataatctattttgctcatcatgggctagggtttatttttccttcattggccattttgaaaagctgggcttgggcttctgcggccttgttggagttgagtgagggcacaaacctttcccttacttggttgggagggtaagggaacttgttgttcaccatggagttgaggaaggaagct

SEQ ID NO: 74288 - DNA, 521 bp, Glycine max
  Clone ID: jC-gmfl02220099g02d1
agtcactacttcctctgagtctagcgcgtgtatgccccccgaacatgaagagaatgcgcgaaatggaccagctcaaaacagtggtaggaatgacaaggagcatgagcatcccttggcctcagagacaagagttgagaagttgaatgagatggaacaagatgcatatgagagactggagaggagttcatcctatgtgtcctccaaaattgggagtccagtaaatggtcatacctctattacaagtactccaaatcatagatcagcaacaaccccaaagcaggctgcttctttgaatgctgattcttcgtccccaatcttggaggaaaattctaagagcaggtccataagcagtgatgatgaaaatatggatcaggagggttgtgaaaaagttttcaatggtagaaatatgagtacaggtgttcaaataaacaatgacgaaagtgattttgacatttattctaagcacactacatctctagacagtaattacctcgtggacaagaattcaagctttggtttgg

SEQ ID NO: 74289 - DNA, 339 bp, Glycine max
  Clone ID: jC-gmfl02220099g05d1
cttggggccaaaaaaaaccacccttttcaaggggggaaaaatccaccccccctgccccgttaaattaaatcaaaaacgtaacccccccccagggggggggaaaaattctttccccccccaaacgggaaaagggtacccccccttacccccccccaaaacgggggggggtcaaatttccctcccaaacaaaaccccattgtttgccggataaaaagggggaaaacaatgggtggccgcaacagagggggaaaatttttttccccccctaatgacccgccaaatgccccaaaccaataaaaaacccccccgggcccaaatccgaggttccctccccggggc

SEQ ID NO: 74290 - DNA, 439 bp, Glycine max
  Clone ID: jC-gmfl02220099g07d1
caataatacaactaggtggacagcattgattagaagttttaacattagtttttttacatcagaattaacaataaaatgtttttaaattgtcttttgggcaaaacgcagatgttttgaacaacaaaagaagggggattaaagaatgtacaattgaattgtcaaaggcagatgactaagcatcatctgcattacttccaccaacatgtgcttcattgccgacccaataattattattgttattgccatcaggacctgacaccttgtaccgttcaattacagattttccttccttgtacttctggcttttttcatgagcagtctcatatttccaacccacaattgatccacagcccacacagaaaatgtcagccacagtatgcatcccaggggccatctgtctgtcctcattttctccaggtgtaacattcacgaccttact

SEQ ID NO: 74291 - DNA, 513 bp, Glycine max
  Clone ID: jC-gmfl02220099g09d1
gatgataataagcaaacatttctctattattataaaaggggttacaaacgagtttatctgaaatttctcaagatctaaaatacatagagcacagttttttttttccaaactaaagaaaaacagcaaacttttgaatcactttcacgatgtgtagttgtacttgtacacaataataatttctaacaacataaataatgacgagtctttatgtgacaagagatatgccttgtagaattaatgcatcagctagaacttggttagcagcttgtgaaggatggacactgtcccaaaacacatactgtgtggcattagaacaagttcctggtgattttggattacacaacaaggatgttgtctttacagtcccggtaccacagcatcctctgtttgcctccacaaaaccagattttgaaggggattgaacaaggtcatagagaggcttgtaaatgtcgaaaaccgcaatcttaagaccaggaagttgcttttgagactcgttgagctgagttgagcttt

SEQ ID NO: 74292 - DNA, 390 bp, Glycine max
  Clone ID: jC-gmfl02220099g10a1
aaaaaaaaagaaaacccctttttttacccaaaaaaaactaattttgataagcccttacgggtcccgggtttaaaacagcctgggggggttctttttcaaatcccaatcccccctttttcttgggacccaaaaaacaggggggggggggggcccaagtttttgcaaaaaggggaaaaccgggttcccccccttatgggtaccttggggggggccttaaaggcttaggggcggggcaacccccaaattttgtttttttttggggggagaccattcaccccccccttttttttttttccaaaaaaaaaaaaaagggggggggggggagaaatttcttggaaaaacattctaaaaaaaacttttttccggggcgcgggggggggaacccccccc

SEQ ID NO: 74293 - DNA, 518 bp, Glycine max
  Clone ID: jC-gmfl02220099g12d1
aacaaatgttatttgatttaattgaagtatgctgttaagttaactaaggaactagatcatactagctaaaattaacggtgaaaaatatctaataagaacaggaaggactaatttaactaaacaatatggtgagcttcatagccagaaaaacacccctattacataacagattgtccacaaatataattctttttccactatgcccaagtcaatcaacagatagaaaataaacagaagactaaattaagacgaaaaactcaaacttaaaatccaactatatttttcagtatttcccaccttgcttctacccctgttgaaagtaacaaagtaaagctgctctgcaacaaagtagatctaaatttacaagacaggaaacgaccaacaaagttaaataaaagaaagaaaaaagaaaaaaggccaagagaaggataaacccgaacaaaaaccaaaagatataagcatcttaggcagaaaccctaaaacccaaaaaaccctaggagtaaagcctgttaggagct

SEQ ID NO: 74294 - DNA, 403 bp, Glycine max
  Clone ID: jC-gmfl02220099h02d1
agagtaagaatcacatttatatatatataaaagggtggggtgcaagaagattaaaaaaaataatagcatatacgaaagggataactagacaaaaaatgggaagaaggaatggcatcaaactgtgaagccaatccatccccgtataaatcgaaattacaagagagcacatttgtaaactcagatcttgcctccctggaattggaaagatgatgacagtatcctgaagagtccatccgggttatcagtatgcacccagtggccagcatcttcaaggacatgcatttcaactccacctccttcctcaacagcaagctcttcagctgcatggatccgctgaagatcttcaagagcccatctatgtaagcttctttctgctttcaaaaagttcacatgcaccccacga

SEQ ID NO: 74295 - DNA, 451 bp, Glycine max
  Clone ID: jC-gmfl02220099h04d1
aactgtaattatttttcagccagtgatcagaggggatttttatcataattctaagtgttttggaaacacattgtgcaccaatacagaataattaaaagggagaacttattttttttccctttttaagccttctccttagatggaactgtcccatctgtgcctgcaagcatggcatattagctcttcctagtcaaatttgtgcactcaaatcccaaagtcccttgaagaaccctttgaatgtagtttgcaactttaattgctgatttccctccactgcatgtgagctccttgggaagctggttcaagaaagtgatctcatatgttggcattggattcatgaacacaaagtacgggtacaacaacttgtgtccgttaacctcggttccgtataacacactttgctttgagttaatagcaactgggacaattctatcaactgtgttcagcaaat

SEQ ID NO: 74296 - DNA, 400 bp, Glycine max
  Clone ID: jC-gmfl02220099h05d1
gtgggttataaaggaaacattgattagaaaccagtcaaaggggtgcccaccaacaacatcagataactaaaatctgtcactgaaatcttcagaaaaatagcggaaaaaacatctccacaagacatcacagactatattaagattattactaagtagtaatgaaaacacagattatgatgtaagcaataacaagtttgtaacaaagtacaaaatcaaattaagtagtgagaatagggggggaggtagtcatctttgccaccaagaatgccagccttggtgtctggaaagaatttaaatcctggcagctcggcgacatctatctcacttggaaccccaatggggtagcggagattgtgacctggaaggtcatgctcaagtgacttcgtttaattcagatccc

SEQ ID NO: 74297 - DNA, 462 bp, Glycine max
  Clone ID: jC-gmfl02220099h06d1
ggaatccaataaatgtttcaatatggaattgccaaactttaaaaagcttacaacatacaaaactgcacattattctcattctcatagtaactaaaaaatgataaggcagaaaagagagatttaaaagaataaggatttctccccctaggcatattaatcccatggactcaatgaacactcctctggggtagttggataacgttcagaatcctggcagtagtcatagatcacaaggttcctctgaacccaagcataatcctttttctgatcatcagagaggggccaagcatcatactgatcccaccaatttttggttgtggttgagacacaagcagggtatgggtcttcccattggcaaccatccacactgaagtccttgtaggatgacacaaatggggctaatttccagtttgtcttcttaagcccacctcttggggcccagtcatctgcattccatatgct

SEQ ID NO: 74298 - DNA, 325 bp, Glycine max
  Clone ID: jC-gmfl02220099h08d1
acggggaaagtgttcatttttaacccgctattgtggggtcaaaccccaaatatgaaaaagaccaaacaaacacaaatcaaacaccttaaaccaaaagttcaaacccaactaacaccacctacaactgggggatccaaatttaacagccatccccggttcaaggttttacagctggaccctactcgcaagggcctgggtcacaggggcacctaggaccacaaaagccccccccggtgttagaggcaacacccatttcacccccctctaattgggcccttaaagggccaaaacccaaaacaaggggccttggggggggttcttccag

SEQ ID NO: 74299 - DNA, 321 bp, Glycine max
  Clone ID: jC-gmfl02220099h11a1
gtaatcagatccaactgtagtatgctgataagtgaactaaagaactagatcatactacctaaaattaacggtgaaaaatatctaataagaacaggaaggacttatttaactaaacaatatggtgagcatcaaattcagaataacaccctgttctcatacccgatagttcactaatataatttttttttccactatgctccaattgagtccacagatagaccatgaacagtaagactcattttaagaccaaataactcaaaccttataatccaacttttttttttgagatattccccaccttgtttctacccctggtcgaaa

SEQ ID NO: 74300 - DNA, 471 bp, Glycine max
  Clone ID: jC-gmfl02220099h11d1
atctctgaacaagaagcaaatacattctaaatgggggcatactacatatttcatctcctatcctagtagtgttaaagcttccacgcacatttgttttcccggtataaggagacgccgggtagaaaatgatatgtccatgctactgtaggatttcaagtaatgattctttcaccagtaatccccacaagagcattttccatccttgaaatgatgaaaccttttgttatctctgacaattaattccctccctacaatcctggacatgatcttgatggcattgtgacagtcaccacagactcgaaggttcttgatgattctaagaggtgttcttggtggagtactaataagaccataggcaattgctagacgttcactgtggtagagcaaggcttgctcctttgcttcctgatcaatgtcatgaagaacatatcttgtgtcaggaacataccctgcttctttcatcccactcaa

SEQ ID NO: 74301 - DNA, 392 bp, Glycine max
  Clone ID: jC-gmfl02220100a01a1
caaacaaagggagataaattcttttttttttattccgtttttttttttcatattattttctctggggccctaaccctaactttattaccttggcacccacaatacatcactcaactggggctcagctgctcagggggttaattccaaatctccatcacgtttttgtttcagttattctcttcgttcgcgacgccattttgtttcgctgaaaagggcggtatcctttgtagtcacgggtttcgttttctctgttcgatttttatatttgttttgttgggtttccaacttctgcctttcatttttctgcttctgaataggacgctatttcgtttcgtctagttaggggattgggaatttttctgataattgcttttgtttttgttgagaatttg

SEQ ID NO: 74302 - DNA, 516 bp, Glycine max
  Clone ID: jC-gmfl02220100b01a1
gtccataatggattgagttcctcatcttataaaatgagccaaacttgttatgctttgtgctgatcacttttggagttcactttttattctcatcaagatatcatcataattccaatgtctaaacttgtgatttcactagatcattctcaaactatgcataaccattcccaagcctttcgaatttgtatagataatcattaggagttcttttatacattctgccattgaaggtctttcattactctcagtacggacacatcttgatgccagattggcaaacatgactatagactgaatggtgtaagaatttcgagccatctctggatctatcaccttacgaagcttcttgcggtcattcagtatgtgcctcacctgtagtacaaggttttgatcgttgggaccttggtttagatctacagctcgacgtccagtcaaaagctccaaaagaacaacaccaaaagcataaacatcactctgtagagtgagtttccctgtcgatgtatactcttgatcaaa

SEQ ID NO: 74303 - DNA, 408 bp, Glycine max
  Clone ID: jC-gmfl02220100c01a1
gaccgtgaaaacactcttattacttgcaaaccgatcggggggagtcaaatacagacatacaggccataataaccatagacaagtattggttattttttttcaaagccaccatctataagccaaccacacacacctttttatatggggaaactggtgggaaatcctttgaaacacaaacctttctcacttgaacgatggagcaatgtgtatggaagctgaactggcccatgtcggcttttcaaacctggatcattgttcccctgtgggaattttccctcaatttctggccggttggttcccaaccttttgaaagctttcaatgcctttgaatccgcagtccaatttggattattcctttgggccagggagacctcatcagaagcatgccttgacaatatctctatcact

SEQ ID NO: 74304 - DNA, 119 bp, Glycine max
  Clone ID: jC-gmfl02220100d01a1
ataggggcccctaagcccccgggcggaaatccgggtttacctaaccgggggaggggaaaaataacttttttatgggggcaccaaaaaaaaaataaaggggcgggggttaaaaaacaggg

SEQ ID NO: 74305 - DNA, 389 bp, Glycine max
  Clone ID: jC-gmfl02220101a01d1
aaggacctaaaaatcaagtttaccatgttcaaagatcgaactatagtttggtttatagaacaaatgcctttggtcaccatgcccaaaagtttgtttattgggttatagtccttgagaccaaacttttgaaatgaacagccatagtatgacttttaaggtcccaaaatgcaaaactccctttagaaaaaaaaaaaaaaaaacattcttttggacacgttaaatgtgattaattattgaaccagaacaaataccttccgctgtcatgtccaaaagttcgtttattatgttatgggccttcagaccaaacttttgaaatgaacaggcatactattcattcaaaatgatgaatatgcctcttttaggttaggcatttctttcctactcgggca

SEQ ID NO: 74306 - DNA, 454 bp, Glycine max
  Clone ID: jC-gmfl02220101a12d1
aacaacaaaataacatttttacttgggaactccaactaacaaggaaatagctatttccaaccagtaaaatcatcaaaaatcatatttaaacacctgaattcaacaacgtacatccactttaaaggtaaatatttcacacaggaaaaatgtggaacgtctgtgagatggatcgatgcctgtgaacattgaaatctacaaaaagtaccgaacaatcacaccaaaactcgacaaatcaaaatactcattggcttcgttgacatcaacataactaataattgatattacttcccgtaggcaaacttaatcgagctcaaaacaatcgatctatgtacttttcaagaacataatttacgagctttctgtaaactccttctgttggatgataactatcccaaaagacatattccgaagcattggaacaagtggcatccaaagggttgcataacactgcaac

SEQ ID NO: 74307 - DNA, 500 bp, Glycine max
  Clone ID: jC-gmfl02220101b11d1
aaaacagattacatatagtttaaaaataaaaaatacagacagcaggttcacacaactaacacataattaaatattagatactttcataacaactaggagataggcgtggtttaataagaatctcaagtggagtggctttagtgttggttgctctaaagacttcagtcatatcaagaggctcagttgatggatttaagatttcaaaggaatgcaaaaaactagcaagtgtcaaacgaactgtttgaaggcctaagtttattccaggacaaatcctcctaccacctccaaatggtaatagctgaaaatgttgacccttcatgtctatatctttatcagtcgtaaggaacctttctggtttaaactctaatggatttgaccaaacgttatgatctgtgtggatcttggaaagatttgtaattagacgagttccctttttgacagtgtagccacctatagtgcaatcctcttcaaactcacgaggtcttgagagaggagctgga

SEQ ID NO: 74308 - DNA, 372 bp, Glycine max
  Clone ID: jC-gmfl02220101b12d1
cttaaccataaaaccatgttttcccttggtgatgaacatagacaatgggcttttgaaatgggctctactcaagggtctcggatttaatcaacagacatttactcgttccaatcagcaggggaactcaacaattggaacacgtgaaataactacccgagtaaaatcactttccaacatgctaccaatatgcctcccaaaggaattctacaaataaaaccccaaggggacttttaagattatttttcctcctcttcatttgggggcttggcttcattcttttggtggggctcaaactgattttgcatggaagccagcaaatttttgacagatgggtcatttgggccaaccccaggaagcgatgcaaggatagaa

SEQ ID NO: 74309 - DNA, 470 bp, Glycine max
  unsure (1)..(470): unsure at all n locations
  Clone ID: jC-gmfl02220101d01d1
aaagcaagacggacgtattgagattgcaatatgctcaattgctcaccaactgtgaacatgaggctacaactttccaatgtaagtttcacgtttctaatttgtccattgaacaactacattctattcaaagttttgtacaatatgcaatgatttcacatccttcaaaaaagcttgggaatgatcatgctgcatgcaaatgaatagttacaggtttcacattttcatataagatcaccatattgtcctgtctaccttaagtacagggaaaaccaacaaatgagagagaatcatgatttcactaacagaagaagcaggagagtgtatgcccagcaatggtataacagttctctccagctgacacaaccacagggggccagctacgtgtcctatgattataagttataacagtagccctccctgtctaccttangtcatgctgcatgcanatgaatattacaagttcacaatta

SEQ ID NO: 74310 - DNA, 531 bp, Glycine max
  Clone ID: jC-gmfl02220101d11d1
acaatgacaaaaatcctcacctttatttattgtttttcaccgatgattaaaatccacaattcagacaagctaaatcatatgattcagatcggattctgctacgaaaaaaaaaagaacgaaacaaaaagcacactacacttctcaatttcatctcaatgttcccccgtgagtgcccgtttctcttcctcctctaaccttgcaagccatttgaatccaagctcacaccctgcttttgccgctatctgaaacttttctcttgccatctctactggatcaattgcaagagctcccttattcctgccccgtctatgagctgcagcacctctcgtcaaactgaactttattaccgattctggaacctcaacacctttaagaagaagagatccatatgctatagcagccccagcatggcccttttctgatgctctgtggaaacaccacagtgcagaagcaatatctttcctgacacagtcgcctgtcaaatatacagcacccaaaaggcaaagagcacctggatgcaactggtccaca

SEQ ID NO: 74311 - DNA, 573 bp, Glycine max
  unsure (1)..(573): unsure at all n locations
  Clone ID: jC-gmfl02220101d12d1
gaaaagttccaagatccaatcatatattagcaattcaatgttaaggtttaggcacctatatacatttctgtttgttacatcaaaagaattctacaaacaatgtcacttctctacaaacctaagatacacagcttacaattttacacactcctatgtacaaatgtgtgtatttattattattattattattattattacgcatgtacgtagcaaatatatcacaggttatcagtcaaatgtttataccaaggtccatgaacactaactgaaatagtggctgccacaatcaaaacaccagcagtttccactaccttatcagtcagaataccagccccaactttcatgagagccatttctgctaatttcctcccacggatcccacttccaccaagcacaacgccgcgcaaagctgaatagacagcattaaacaccctctcgaaaacaacatccncagcttgtaagctctttcctagcatactagcagcaactaccttccttgactcaagtttccccgtatcttcaacttcaactgtgggaaaatngcagagcacttctacaatgcttcaatatcag

SEQ ID NO: 74312 - DNA, 391 bp, Glycine max
  Clone ID: jC-gmfl02220101g12d1
aacgggaccaacataatttaccttggctttatagtgataaacaaagatggggctaaaatggcggtccctaggcgaaaataggatacatgtttttttaaaacggggataaaatgaacatggaatgcggaggttaaccgcttgcgaggctgctgcaacaggtggacctcccttggcccaggattttccatacgggggatgttaaaaccggggtcttctattcgaggacccttgaggcaattgagttccggccttaaggtgactggggcctttcaggtaaggaagctggtgaccattgctgccagaactcagacgttttttaagcagaaacccccacggggcgacctctaacaagaagctccgcatgggattggctcatggtgattacacgctg

SEQ ID NO: 74313 - DNA, 529 bp, Glycine max
  Clone ID: jC-gmfl02220101h10d1
gatgcatgctttcactttcacagataaaagattgtcacggtcgaggaagatcaaggtttggaccatccaactacaactcattgaatgtgaataagtgtgggagttgaattagttcaagggcaacctcatgcaagagactcccattacgagagtagctatacatgtacaaaaaattctttagaattttaatttgtaataattacacgaaaacgatttttcttgagtgtaaactcatgacattctcaaataaaaattaaagacaaatctgtagaagtatcaaaaaaattcatttaagaaactgattttttctaataattgttttttatcagttcatataccatttaaaaatttaacctactgatcttatatttaaaagatgaagttatttatcacattttaataattactttgaatgattgaattagttgagttgatgaatgattgagttagttggaactgagaaaacaatgcatacatgtgcaacatcaacaacaactaattaagtggagtgatgatgagagggactcac

SEQ ID NO: 74314 - DNA, 474 bp, Glycine max
  Clone ID: jC-gmfl02220102a01d1
ggcggaataaaaaataatttacacttaaatccaatttgcaagggcattaaggtggacacaatatcacacgagggacaaatatacatttgagtaaatttaatttgaatacccaacaaaagatccttttttttttttaataaaatgaacaaaagcctttaaaactatattgctaacaaacacggagatattacatcaagaacatacacatcatcactgaacaagagaaatggagcctctcaacggggcactctttttctacttagtatctcttgttcttttagtcgatgttggaatcttgcaaggcgtgcttggagactaacgagactagctgctttgcgagaaagcacgaaactcaactgggttacgtagttgtcaataagacttcctggctggtccacttctgccagtagtttcatttcttcacgaacaatctccattgtgtcttcaatttcctttctatgagcagcaattagt

SEQ ID NO: 74315 - DNA, 361 bp, Glycine max
  Clone ID: jC-gmfl02220102a03d1
acaatgatacaatgagttaatatcattactattcactaaggatacattatgtactaattgtgaagaaacttacattttccgttgccaacacaagaaaaacagaaattaagaagcaagctatgatcttgacattactaaaattggagccaggggtatattacaaatatttcacaatttcagaaaattcagtaagtggaaagctacactacattgcagtggcatataagcaattcaaacagcaactggagagggagttgaatgagggacccgattttcagcaggaatttcaacatactcggacaggagagcttggaattcatcttcagacattggctcaggctgcaatagaacttccacaatc

SEQ ID NO: 74316 - DNA, 344 bp, Glycine max
  Clone ID: jC-gmfl02220102a07a1
gtctcggaattcggctcgagctagcatctctgtagccctatagttaggacaaagcatgtgaggactgctgatcatcattggaacaagtactggctaccagagatgagtactatattacgtggatactacataaatgctcactctgcacaatctacgttgaaaattgatccggtatatgatattgcatcctgatgtctaggagagggtctctagaagccctaatgtgtaatggccatgccaaccctaatcttacttgcgctactcataaagtaatattcaattgtgcgcctactgggatactcgactctacatcatgctcaccaacactgagtagattcagagat

SEQ ID NO: 74317 - DNA, 377 bp, Glycine max
  Clone ID: jC-gmfl02220102b01d1
gcaaggataacaaccttctattcattcataacttttttgctttactattaaactttatacacttgatcatcacatgacctacttcattaattcacacataaacccttgaaaccctcaccttgttgacagtaaaaaacccactttaattggccagaaccagaaaaattattaagttgtccaagatcattatgaaactcacttaacctctatatgacatattggagtattattaattggaaaaaaaacttgactatctgttacaaaaagattgaacgagactatccaattgcaactatttctcggactacctaataatttctcgaataacaaacctgattcaatcaaaagcttctaaaaggagcatttggctttctttg

SEQ ID NO: 74318 - DNA, 462 bp, Glycine max
  Clone ID: jC-gmfl02220102b02d1
cgtccaaaattcactttggaaatagcattaagtccaaatgttaatttgcacagcctatttatgtggtttttcacatgcacacatatacatattcacaatcaaatacaaaaagagcaggggccagaaaactacaatacaaacaactattgttggcccttgtataacaataatatatatcttttttggagcataattgaatgaaccgtgtgtggcaatcagatcaaatccgctggttttcatttagatgccttgtggccctgtcctttgatctgactagcggctgcagacatcacacgcaagcggcgagcaatttcggcaaaggatggccttactgctggattaggtgcccaacactgctccattagtgttttccactcaagatcacaataactagggattgtaggtcttaatgtgttattcacaatgcctcctatgattgcgccatagtgcatattagcatat

SEQ ID NO: 74319 - DNA, 416 bp, Glycine max
  Clone ID: jC-gmfl02220102c01d1
cgttaaactaaacaacttcctgatagaaacaaagcgtatatcataaaataaggtaagacatcaattcatgttgacacgaaattgaccaaaaatacggcttactcaacttcaaaaagtatccaaaattttggacctagaaaataaacagcacatgtaaataaaatgattgactgaacgcaaaataagagagttttagttgtgcaacgatgacatggaatctgcaatgaactttcactcatcatcttcatcattatcagcagcagagttgatagccgccacacgagcaatcaacttagccttcctctcctcataagtgagtttcttcagattgtacctcttgagttccttcgggggctgcttctcagatttcttgagagaaggatcagcacggatggcagcatgaaccttcttgtaca

SEQ ID NO: 74320 - DNA, 430 bp, Glycine max
  Clone ID: jC-gmfl02220102c03a1
ctcggaattcggctcgagccgagaagctctccgctctcaaatccgccgtcgccggattgaacgaaatcagtgagagtgagaagaacggattcatcagcctcgtcagccgctatctcagtggcgaagcgcagcatgtggaatggagcaagatccagacgcctacggacgaagtggttgtgccttacgacactttggcgccaactcctgatggttcttcggacgtgaagaatctattggacaagcttgtggtgttgaagctaaatggaggcttgggcacaactatgggttgcactggtcctaaatctgtaattgaagttcgtgatgggttgacatttctagatttaattgcgatccagattgagaatctcaatttcaaatatggaagcaatgttcctttggctctgatgaattcattcaccactcatgatga

SEQ ID NO: 74321 - DNA, 491 bp, Glycine max
  Clone ID: jC-gmfl02220102d01d1
acaataaaaaccacatttcttgcttaatatgaggttacataaaagtaatgtacctcagttctcatatggcacattctaagcacacaaaaaaaaggaactatgatcatttcaaactgcacaaaatgtttaagatacactcacaccagaaaatatgaccttggaagcaagcttgtaatttgagaggacaaaactctcaagaccaattctagcatagaaaatagattgtcctctaagcatgaagaagagtattagctagctagaaaaatttacaaagaaatactatataagcagcacattgtccactccagatccaaggccaagcaatctaacaggtcttattaccttaagaactttagaatccactgtcttaactgcaggtggcacggggaacgctaaagcacaatttggaagagggtgaattagcaccaccaccacattcttcacaatctcccttgaaatcattacatgatccatagcttaagagcttcttc

SEQ ID NO: 74322 - DNA, 443 bp, Glycine max
  Clone ID: jC-gmfl02220102d02d1
attgcaaatgtatctttttataggggccaatatcatccgtcaaaactttacatgcccatgtggaataaatgttttcaagaggatgacccatcacaacacaggcctcaaaaaaggttcaagttcaaagcgaaatttgaattcatacttggacaaactggtccgaaaacattggtaacagagactcaaatgatccggatgattaatacaatgcaaactaatagccctcgaacagctcaaggggtgatcccagcatagcataaggcctctgtccagcctaaagttgacctcagcgagggcctacatcatccttcgcactagtttgtggagtgtaccgcctggttaaaaattgagagtaaccaggttgacttggggacgaacccggactgggactaaattggggcgaacttgggctatagactgggctcacaccagaattataaggg

SEQ ID NO: 74323 - DNA, 401 bp, Glycine max
  Clone ID: jC-gmfl02220102d03d1
gagaattgatcacacacttaataatatattccagtacaaaagcacaagtacattcacaagctacatacaatcagtataaaagattccctaattcccatgccattgtcctctgacagggtgataaatctagttgtaattcatcatatcatctaattgagaattaagcacacacttcctaatttgtttcactacgcaagaacattcacaagctactaaattgaccatcaacgattcataagttctcatgtcattgcccactcattgacatcatagacacatttagaatccatcatagattatgcgaccatatcatactattgcaccaacccttgagaaagagcaaggaagaagatgtcatccagcctattattactaggagagttgccagcatacagcaacaa

SEQ ID NO: 74324 - DNA, 393 bp, Glycine max
  Clone ID: jC-gmfl02220102e01d1
gcacaaaactggtaaaattccagatcaataaggattgcggcgaagccgcaaagatacaacattcattagggaaaacaggagtggggaaaaataaggggggaggggttgaggaagaatcaattgcttacagagcatgctaagacacctaactatttcacacacagttattgaaacaacccaatatagagaaaatttttctacggtgtattataatataaagcagagccaaatgactaggaagattctactttcttataccattcacttggcaagtttcgtgcggatgagtgttgctgcggcaaccatgtctgtgagggctggcttcacctaagtgtacttacgggtcttgagcccacagtcagggttcagccacaggatgtgcttttacgagca

SEQ ID NO: 74325 - DNA, 502 bp, Glycine max
  unsure (1)..(502): unsure at all n locations
  Clone ID: jC-gmfl02220102e04a1
attcggctcgaggaaggctgccaaccttttgatggatgaaaattgtgtacaatgtttcctttatctgttgtttcttaaaagtataatctgatgcaatgcttcttctgctcctccccccctcaatgactaacataatatagcacatgtgtggctaaatacagtgaattctataaactgggcatacagaactgaaagtagtacatttgttccattgcagactgtaaaggtcgctgattttggggttgctagagttaaagctcaatctggcgtcatgactgcagaaactggaacatatcgatggatggctcctgaggttatagaacacaagccgtatgatcacaaggctgatgtatttagttttggaattgttttatgggagttgctcaccggaaagcttccatacgaatatttaaccccactacaggcagctataggagtggttcaaagggtttgcgacccaccatcccgaaaacactcatncaaagttgtggagcttcttgag

SEQ ID NO: 74326 - DNA, 437 bp, Glycine max
  Clone ID: jC-gmfl02220102g01d1
gaaattcattaaacacggataatatagataaactcataaacaaaatttgaaataaacgatcagtcttccctgaaacaaaagtttggccaacttaaggagaaaaaaaactcactacccgagaatccataatatcaaaacagaaacactacaaagtttataagtgatggcaaccaaatagaattccagcatttccatccaattaacataattatgctttgaggcgtccaaagaacttctgcttctcctgtgtggtctggaagcgaccatgcccaaactttgaagaggtatcgataaacttgagtttgatctccttaagagcaacacgagaagtctgcttaaggagggattgacgcaatgtaatgaccctcttcttgggaccaacacagcatcccttgaccatgataaaatcatccttaacaacaccatagtgagggaaa

SEQ ID NO: 74327 - DNA, 384 bp, Glycine max
  Clone ID: jC-gmfl02220102g02d1
gataaactagtagattaatcataggtagcatgcagaatgaggtttcaattgcggttttaagtcaacaaaagaacccataaaagcaagaaaacaagttgatgactggtactgatacaaaacgcacaatgataaaatgcgagacaacttattcatacaaaagcagcaggactacttatttcatataaagcttgctcttcacttcagttcttccaagaaatcaacgttgtcaaccaagacaggtttccatccatctggatctaaaaacgaagtggtttttgtattaaggccaggaattggccctggatgccgagtaatcttccctccaaccttttttatgacttggttaactacctcagcactcttatatacatcatcagtaccaat

SEQ ID NO: 74328 - DNA, 320 bp, Glycine max
  Clone ID: jC-gmfl02220102h01d1
gttcatcaatgatctaagcagtcacagatgtctccacagcaagcttgccaggataagcaacttctgattttatgtcatcttcccatagttctggcactgcctccctaaggttgtggatgctttctaatgcataatctgctcctttaattctctgagattttccaaccagcacagtgtgaagacccacacgttttccagcttgtgtgttgcggacactatcctcaaagaacaaagttctttgtggattaaggttggctatcttgagggccaactcaatggcattttctgatggtttgcaaataattggtgtctttggaaac

SEQ ID NO: 74329 - DNA, 410 bp, Glycine max
  Clone ID: jC-gmfl02220102h03d1
ggtaataacaaatagtaatatttagctgacagtagtttcaaactaagcaagttacaatatcattggtgtttacattttcttctgtaaaattaggggagtacaaaaatgatacaagattacattgcaccctgaggcttaaagggacgtaactagtttgtcagtggccaaaatgtcacaaaacctgttttagcttttaaggactatgacaagcaatgtaacttcacagtttatatatatatatatatatgggggccttctctgggttgcaaagctcgcattattggttcaccaaaaaaataggttagccttaccagaagtttcactgaatcagggaatgccattcatgaacgattaagggatcattcttttgacacgacacattttagtggtcacaccgtgacatgatgcat

SEQ ID NO: 74330 - DNA, 239 bp, Glycine max
  Clone ID: jC-gmfl02220103a03d1
gggtggtggtgtgtttatagactggaaatatatcttttttgatgatgtttttagtgctgttgatgcacacactggcactgaaattttcaaagaatgcgtgaggggggctctgaaaggcatgaccgttatttttgctcacaccaagctgactctctacataatgcggattttataggggtgaagagggacggaatgatattccaatcggagaagtacgatgatctacttgcgtctggaat

SEQ ID NO: 74331 - DNA, 351 bp, Glycine max
  Clone ID: jC-gmfl02220103a05d1
ggaaaaaagggggggccaaatttttcctttaccaataaaaacccgggccctttggggggtttcacccccggccccccggggggtttttaaaaaaccaaaacccggccccccccccccaagaaaaaaccccaaaggccccaaaaaggggtttggcccccccaacaaggacccccccgggtttcaaaacccctttttttccccccccctttttttgggtggggcaaaaccctaaatcggggctaaacaaaaacacccgggaaaatggggaaaacccccccctttgaaggacccccctaaaaaaacttttggggccccaaccccaaaaaaacaagggcccggggggtgttcccc

SEQ ID NO: 74332 - DNA, 410 bp, Glycine max
  Clone ID: jC-gmfl02220103a06d1
agcaagaacccttcttacattaattgaattggaaaaagaggttgattggggttcacatgccttaaattacatcatatcatgtcccctttataaaaaaagttattccaaaaagagcgcgtaaagatcccatccccatacaaattctccaggctttcctccaatggagccatccccccttttttatttaaacatccttggcaatgagggcgcccctgatgaattctttttaggcagcaacgggccctcttaaaccccttaaaagcaagcgagaagcccaaggaacatcgatgatgacccccctcatgggggggtttttctcggccctgatcgcaatcaggtaggtccgacccacccagccgatccatcccgagatgttcaggaattgttttccgggtgtgatgaacccaccc

SEQ ID NO: 74333 - DNA, 363 bp, Glycine max
  Clone ID: jC-gmfl02220103a07d1
aaaaaaaaccccccccgataaataatgttttaaaaaaaaaaaaaacaaaatttttttttggcaaaagggggaggggggaaaaaaaaaccgcccccaaaggggggccaaaaccccccaaaaaagggggaaaaaaaaggggggaaaaaaaacccccgggaaaaaaaaaccccaaaaaaaaaaatggggggggggacccaaattttctaggggggggggggggtccctggggagattcccggcggggaaaaaccggggggggaaaagggaaaacccggggggggtttttttttttccccccccccctttttataaaaaccccaaaaaaaaaacagggggggaaaggggggagaaaaaagggggggg

SEQ ID NO: 74334 - DNA, 472 bp, Glycine max
  Clone ID: jC-gmfl02220103a08d1
ggggggcggaaaaaaaaaacccaaaaaaaaccccccctttaaaaaaaaatttaaaaaaaacccccctaaaacccccccccattttttttggggggggccccgggaacccccctccccctggggggggaccccggggggggggttttccctttggggcccccccggggggggggggggccccccccgggcccccccctttaaattttccccccctgggggaaaaaaaaaaaggggggaaacccccaaaccccccgggggtttttttcccagggcccatttttttgttgaaaaccccccccctttaaaaccaaaaaaagggggggggtttccccccccgggaacccggccaaaaccaccaagggggttttggggagccccccccacgggggggccaaaaccttttttaaccctccccccccccacaagggaaccaaaaataattggggggccccccccgcccccccccgggggg

SEQ ID NO: 74335 - DNA, 369 bp, Glycine max
  Clone ID: jC-gmfl02220103a10d1
ggcacgctatttatgccatgattttcttacttgatttacagtatcttttaacttatttaatacattataccaacccaaccaggagcaagtgccacaacccaaggacacttatcgacaaactccgaagcaggacaaggaaggaaaaaaccaggggcgatacaaaaatgcaatttatgccacaactggataagacgcacaagttgcaagaccacacatgaatcagcggaacgccagaaggaaggagacattctcaccccaacaaaaaccccatgaatttatttatgagccacccggggagggggggaaaaaaaagacaccccccagggagggcagaaagagacacatccggagaagggccagcgcaaaagg

SEQ ID NO: 74336 - DNA, 477 bp, Glycine max
  Clone ID: jC-gmfl02220103a11d1
atcgaaatcctcccataagccgaagatattcttgtcatttgaaactcttcaagccatccactcagttcattcttttcaagcagagagaagttgtcaagaatgcattcaactataagtggtcaatgatcccgtcccttatatggcatctcagggaggtaacttggcatgtataaaacttgcctaggatgaccaagaagttgtccatactgtggtccatttggatgaaaatatggttgggatggcatttgtgccgcttgtggattatatacgactggttgtggccctgcaaaagtagtcccaactccaatacccatggacatggctggcatatttggtatggtggatacagtagctgggaaatagaaggaaccatcagacatgggggagcggggcctagcatgtgattgagacggaataaaactctttgcattagggttgagcctgaactccttggcattgggattcagagttgatttt

SEQ ID NO: 74337 - DNA, 456 bp, Glycine max
  Clone ID: jC-gmfl02220103b01d1
gttagaatatctaatacactaaactaaacattaatttgaagcaaaagtattactcatcattttcaacaattataaaatcatttaattatataatacaaaaattaacataattaatgagagtctacaaattttctctaaatttacattactataaaattgagaattcttgaacttataagcaatttaaaagtatgaagggaggaaaaaaaaagactaactagtagcagcatcaacaaattttccatcaaataagagttgggatgtgttctactttaactagtggtttaattggttcttcaatggcagcagcagtgctgaatttactgagccctgcaccaagagcaccacttccacttgaatatcagacaaaagggtcaatttattaaaataaaataagaccattaatgaaagctccaaagcctaaaaacaccaatcataaggcatgatcattcatca

SEQ ID NO: 74338 - DNA, 371 bp, Glycine max
  Clone ID: jC-gmfl02220103b02d1
gcacgacccaaacgctaacacaccctaattggcctttatttataatcataatgataacatataatcatccctctcatgatacgttgcacctaattatgaaataattcgaccgtacaaaacagaaattaccaaagcgagaggacaagacaaaacagaaaactaagaacacatgcaccaacatagttttataaaactataacttaagaaaacgccatttattaattaatcaattatctcccttctagtaaattaagtgacgggtgggcacaacgacttcgtgcagcatccacaggtcatccatgttgtcccactcagcacccatgttgtccaaccctaaaaaccgttcaagttgtttcaggtcgagttcatct

SEQ ID NO: 74339 - DNA, 433 bp, Glycine max
  Clone ID: jC-gmfl02220103b03d1
aaacgcgaatgggttttgaatctcataaaagaaaaacctaaaaaggcttttccactgcaatcacactgcgatcggaatttcacaaagcagatttccaatcttaagtaatagctgaaataatggaatggaatgtgaaaacagcgtatagcggccttctcaggagttatttaaaggagaaactaagatcgcgaaaatgaaaatgacataaattaggcataaaacgcagtagagagttcaagtgtagatgggaagatcggtccaggcaccagagacatgtccattctcacaaacataagccctaaccataggctccccatcgtcatggaagccaaagccaggcctcaagcaaaaggaagagtgcagatcccacgtgaactcacacgcgcagaaggcgcaaggcagatccatcttcctgttcttcccatcctgaata

SEQ ID NO: 74340 - DNA, 451 bp, Glycine max
  Clone ID: jC-gmfl02220103b04d1
atcaacaataaatgcagttaaaagacctacattctatttaaattgtttgaatttttgcattacatcaaatcaattatacaatatttttgcaaacactaataaatatttgatgctatctaacacatctctccctgagctggtgtcaaatctaatgctctgaagatggatgtttttttgtttgaaattttggttgttcacaatattattcattttgccccactttcactctatggtacaacaataggagccaaattgagccaaatctaatgctctgccgatggatggttttttatttgaaatttttggttgttcacaataattactcattttaccccactttcactctgtgctacaacaatagcaaccgaactgtgatacgaggttttggatcctttcttcaagcttcaacggcattctgatccactctttctttcttttctgctaacatggc

SEQ ID NO: 74341 - DNA, 524 bp, Glycine max
  Clone ID: jC-gmfl02220103b05d1
aaaaagttcaaacctgcatgattgcatttattattttggtttccattacacaaacatggtttattaatgacaaatacaagtacattcagccactccaaatacataacttaaacatacacaactgatgaaggaatcagattccttctatttcacatttatttaaagccagggacagtacttcagcaaccatagagcccttagatagagatactgttgggaattcctctgaaagtcaatccctcctcactagaaggatagagcaaagtgtaaggcattttagccggcccatagcggtttctcaatgtctcattattgttcttctctataagcttcttttcaatctcttcaagattctttccaaacctcttaaaggcctctaatggcccggcatcagaagtccagtagtcaccgccatctctctgcccaaggtagaactcatcagatgcgtgccttgataaaatttctataattgtaaggtcaatgagggtctctttttgccagtaatagtcttcaaaaactccttc

SEQ ID NO: 74342 - DNA, 440 bp, Glycine max
  Clone ID: jC-gmfl02220103b06d1
aaaaactccaacaattttattaatgaaaatactttacaatttcagcacatataccctgccatgaatataattttgcacgctataattatttttcgccacaaacaatggagtagtgctcaacaaagcacaaaccaacaataataacagttttagttgcattaatttacacaagaaagtaaattaacgttataggcaacacatgtgtgtcacgttcatgaggatcattttataatgatatgcaacattgaattaaatattctcatgcaatggagcattctggaggaaggccttgagggaaacgtctgatatcagggcaataattggaaatcatgtaattcttttgcacccaacggatctttgcctgccccgtggcgtccagtgattggccagtggaggaagaagtttgggaattgaagtttctgtatgaggctgtgaatggg

SEQ ID NO: 74343 - DNA, 504 bp, Glycine max
  Clone ID: jC-gmfl02220103b07d1
gaaatcagcattattttgttaattactaaggattgtacaaaattattattattattattacaactttaatctagggaccagggataatgttggcacaattcaggtatgttccctaaatgaaacgatgactgactcaaaagggggagggaatatgatattacgtacacttggatgaagataagacagtctttttccttttactgggtttgtttgagcagtttcgggtgctactgcactttgggcaaaaccaatcctcctcagggacagctgttagtggaggatcgcagcaatcgatatgggtaccgattccacacccgacggaaccactttcatcaccacaaatcagcattacatctcctctatcccgggatccacatactttgcaaattatatcatcatcacgggaatcttcaggagcaacgagttcttcaacaatctcttctgccttgcttttaagtttatcaaatgatttctctgcccagcatgactgccatataatacatg

SEQ ID NO: 74344 - DNA, 356 bp, Glycine max
  Clone ID: jC-gmfl02220103b08d1
ataatatcataaaaaatttaatgtacaatttttggaaaaaaaaaaaaaataaagggaaaaactgaactggaggggggggggggaaaacgccaagggaataaaccaaaaacataattaaaacaagccggggcggggcgggcccaaaagcaaaccacgaaaagcctacgaagcgggggggggggctttaagagggggaaacaaaaaccacaggccatcatgttcaggggaaaccaaaggggataagcaaccttaacctaacatgggggccttccaaacgtgcgaaactgggggggggggaagggaaccaaagggcaggaaaacaaccccgaaaagggcttgagaggggcaaatccggg

SEQ ID NO: 74345 - DNA, 468 bp, Glycine max
  Clone ID: jC-gmfl02220103b11d1
acaatcagtcattaaaattaaattcccatggaaatgatcgggtgtttgtgaaaaatgaaaacagaccaataatttcactccgttatcatttcctttaaaattataattaaccacatgttcaataaaacgaagaaaaaaaatacatatttgtgatataataaattggtttctatggtccaaatcaaagttgattgatatattcctatgcgtgactcctaagctatgcaattttgaggtagaccgtttccctgaactcgaacctcctggtttcatggtagaaggtcttgtgcttgttaggccaatacgttatccatatccaaccccttatctcccactccattgtcttccccacagcacctttgtccactttccaacacacactttctccatactcatcaccagcaaagataacccctccttgcctcgtgaaaggacgataagcacttgagtacctgtctttgaaccatg

SEQ ID NO: 74346 - DNA, 378 bp, Glycine max
  Clone ID: jC-gmfl02220103c03d1
atctgctaaacaagttggcatgttttgaaatttgctcgttgatgtgaattgtaaataggtttgcttggggatcaatattgcaaagaaaatatatcttgggtgatatactcctggttcctctactggtatctttctgtttttttctaatagggaataatacatcaaaaccaacccaaaaaaaaagagacacaagggggctaacaaacaatcaattttcactctacatctagtctagaactctaatttaaaaatagaatttaatatatcatttttctggttttcacgatgatttattgggtaatctaaagaaatgcatagacccactacccactagaaagacacgtatgctatgagcatattcagctggacttcaatttg

SEQ ID NO: 74347 - DNA, 509 bp, Glycine max
  unsure (1)..(509): unsure at all n locations
  Clone ID: jC-gmfl02220103c05d1
acacaataaaaaaaatcaattccgttcatctattactggtttaaagatttacaacagctggaaattcatcctatacttaataattgtatctatataatataaccctgtaaaaaacttataaacaaattaacaaagaaatacaaaatagaagcaagaaagaaagagatggagatctttctctccttctcctttgccctgttgatatctacacagggtattccccattacctaaatatagcagaaggccctgcacatttaaattttcattaacctcctagacaaacaagattctgcaatttggagaagaaatcaatcaatttccaaaccaacgagagttttccttggtcaatgtcccttattgagtatcattgtttgttccaaaaacaatagttcctagtgatggcatgagaagagataacacaacaatcccaacaaccttgagtggcacgccaactttgagcatgtctttaatttctatgtgtccagnggcaaagccaactacatttgat

SEQ ID NO: 74348 - DNA, 484 bp, Glycine max
  Clone ID: jC-gmfl02220103c06d1
aatccaaaccaaatcatatctatgcttttggtatttcaaacctttttatctcaaacatgtacatgattgacaaataaaaccaatatatatcccaggaacacatgaaatacccttctcaccttttccttacactgcatggaaaacaaatttttaaaaaggaaagaaggggagaaagaaacagaagtacaaatctatggagaatttaatcatcatgcttccaaggttctccactgcaactctatctggaggcgaccattcttggagtctataagatggtacttctcattgattcttttgttggcaacaacatccccaagattgatgtcgatataacccaatggttccttttggtggagcaggtttcttgatgaagtactgacaacctccacatgcaatctatcattggtgggaggctcctccaccataaattggaactcatcttcccatcttggatctctgttctttttaatgcgcctagtttttt

SEQ ID NO: 74349 - DNA, 262 bp, Glycine max
  Clone ID: jC-gmfl02220103c10d1
attcaaaggttgggttttatttgaaataaaagggggggcaagccaagagaggatacaccaaagggggcatacaaagccaaaaaactaaagtgtaattgtttctagttccaaatacaattatattgccccaaaaaggattcttttcaaaaaaaaatcccggggcaaagccattcatcgaatcaaaattggggaaggccccccctttcactcccctttaaataggaagaaaccaatgattttcatccacgaaagtacccccttg

SEQ ID NO: 74350 - DNA, 371 bp, Glycine max
  Clone ID: jC-gmfl02220103d01d1
aaaggaaaatttaatgttataaatctccgatgttgatggacaaaccccgcagtgcaggtgccaaaaataataaaagaacaaaatcatgacaaatcaaagcacacggagaacttttgtctctaaatttgcaatacacgccttcctgaaagaaacgaaaaaggtaaaacaaatgtgtaacttattgttttcaaagttcactgaatagggaaaatccagaatttaattttcttcaacatgggggcatgtctggcggtggtggtggcaatcttagattttcagactctccatccttcacaataaaaactgtctccataccccaagattggtggcgttctatatggcagtgcataaaccatactccagggtttaca

SEQ ID NO: 74351 - DNA, 392 bp, Glycine max
  Clone ID: jC-gmfl02220103d02d1
aaagaacaaaacacaggaccttgttggctttcattaaatattcgcataaacaaatttatattcagtgggaaaaaaatataacatacacctcaacatgactgattattcttgtaaggaacatgttgataaataaatataaataatagaaacagagagggtaacattcccatctatttcaggggttcaatcctccagacaaccttgataggctgaaaattcttgctatatacacgacagcaaccttgtcatgaatcttacaagagaactaacagttgataccacattgaccattggttaatttgttggagtcagaggtgaagggatcaatcctcacccacagcaaggagaatattgaagcaagaagaacggaccaaacaataacaatggttggg

SEQ ID NO: 74352 - DNA, 353 bp, Glycine max
  Clone ID: jC-gmfl02220103d03d1
aaagcaaaaggaatttattgcattttctttgtggaagatgaaaatgttagaaaattacataatttaacaggatttttatgtacaatttgttacacagctgtacaattttcatagccccttgccacgacaatgatgatgatggatagctgcaatatttatacacagtgcccgtacaaccctacctgttacccctgaatttccatacacaaccttgggaaatcttggaacaatatggagaagattgagtaaccaaaagcgccatcatcatgattggaagagagttattgatgcaatataaccattcttcatgacctcaaaggcaatattttgactaccatatacaagagtagaac

SEQ ID NO: 74353 - DNA, 481 bp, Glycine max
  Clone ID: jC-gmfl02220103d05d1
ggaacgaaatatatgtatattttgctgttgtatgggaaacaatgaacattttattcagtccttaaaggcttaaagtactagaagagcttaaaaatgatcatcatacaagttggcgtattaccatactaaagacgatgggggtttgtaataaggttcctatttattttttataaggtttgagcaaatcaaggttcctgaacttgctgtatttccagtatttcagatggtttgggaacttccctgagctggacggagttttcgaagcaattgaagaaaccataatgggggaatttctcataccaggtttcttctcttgcgtgtgtgtcccagtgttccccaaaactgctctggccgtacttgtgaatccaaccagagccattgtgttgctcaccccaagttcggttccagcggtcgccatgcctaccttcccaccagattttcccctgcttcacaccattagcatttggatcaaaatttttat

SEQ ID NO: 74354 - DNA, 367 bp, Glycine max
  Clone ID: jC-gmfl02220103d06d1
ggaacgaaatatatgtttatttggctgttgaatgggaaacaatgaacattttattcaggccttaaagggttaaagtactagaagagctttgaaatgatcataatgcaagttggcgtttttccatcctaaagacgatggagggatgtaatagggctcctttatcttttttatagggcttgagcaaattaaggttcctgagcttgctgtgttgccaccttttgagagggtttgggaacttccctgaactggacggtgttttcgtggggattgaacaatccatagtgagggaatttttgataccaggcattttattttgcgtgagtgccccagagggccccacaactgttctggccgtacttgtgaatcc

SEQ ID NO: 74355 - DNA, 557 bp, Glycine max
  unsure (1)..(557): unsure at all n locations
  Clone ID: jC-gmfl02220103d11d1
gggaagatatggataattcagattcaaagccattatgatacatacatacagatgcgaccattatctttttctatgtacaattattgttattattccatatataaagttttctcctgaacttcagcctacggaataaaaacagcaaagtgaataagtgagatacataataaaaacaagccgtatcgggccgggcccaaaagcaaaccacgaagagcctacaacacttgagtgggcccttttatttgggtcatacattttccacagcccatcatgtccagctgaacgcaattggactaccaaccttatgcttcccatccgtccattccaaacgtgcgaagctggtcgtcccagacggcatcgaagtgtatgtaaacgacaccgtatagtccttcttctcgtacaattccgtgaaactcaacgtattcggttccaccacagtcttcacttttcgaatcccccacgacatcaccgaagctttgtacgttcccggagnctccacgttagtcaaaaccctagagtacttcacggtcttcagagtatcggaaccctccccaatc

SEQ ID NO: 74356 - DNA, 516 bp, Glycine max
  Clone ID: jC-gmfl02220103d12d1
gtaaaaagcaagtaacattaagttggattcggatacacaagataattcacattatctgaagtacttcaccaaacacaaatctaaaaactctcaaaagtcatttcgttctttgacgctcactttccggggacgaagttggtggcataggcccaggcgttgttgttgacagggtcagcaaggtgatcggcgaggttctccaatggaccctttccggtgacaatggcctgaacaaagaagccaaacatagagaacatggccaatcgtccgttcttgagttccttcaccttaagctcagcaaaagcctctgggtcatcagcaaggcccaatgggtcgaagctgccacctgggtagattgggtcagtgacctcaccgagggggccaccagcaatacggtaaccttcaacggcacccattaggataacttgtgtggcccagatggcgaggatgctctgggcgtggatcaggcttgggttgcccaagtagtcgagcccaccctcgctgaagatctgggacccg

SEQ ID NO: 74357 - DNA, 514 bp, Glycine max
  unsure (1)..(514): unsure at all n locations
  Clone ID: jC-gmfl02220103e01d1
gatgcaacttcaagaaattgcaaaacacaatatttatcatggtagatttaggtcaataatatataaagctacatccacatcccttgccaaaatcaacatattttcttctaattttgacggctctatataaagattagctaagaggagtttagcatgacgtgttacaatatttattacatcaaattttcctcctacgagagtctcttgaggcacttcataagtgtatctgtttgttcaggcttcccaacagtcacacgaacgtaccctttcagctctttcttgtcatagtgacgaatcatcacacccatttgtgctaggtcctcctttagcttctttgcatcctttcctgatgtaacctcacaaagaatgaagttagaatggcttggaaatggccggaggaatggaacttctttcaaaaggtcataaagtctccctctttctttcaacaaagcattntttacattctctagataggtaggattttgcaatgctgcacatgcagaaatttcagcag

SEQ ID NO: 74358 - DNA, 459 bp, Glycine max
  unsure (1)..(459): unsure at all n locations
  Clone ID: jC-gmfl02220103e02d1
atgatgaactcaatgcattttatgatagatgagcaaacgagtatttgtttaaacacaaacaaacaaaagggttagtgtctaatcatcctccccctcatctgtaacgaatttgccagttccaggattcaaagcagcaatgaagaagaaaagaacattgaacaacactaggggctcgatttcgttgattggtaccccagtctcaatgttgagttgggctagtgctccctttccggttataatttctccaatcaatgagaaaacgaaacccaattgagccaatcttcccacaaatagctcgtttgctttcgtgaatccaaataaaggacctgaaccaagaccaagagcttccctgaagcctttgcctggaggaataacaccntcagtagtaggttcgtcatcaacaaattttccacggtcacctaaacctccattggcntctagcagggtgaagaggatgaa

SEQ ID NO: 74359 - DNA, 296 bp, Glycine max
  Clone ID: jC-gmfl02220103e03d1
gataggaggggaaaaagcttttcgactaacaaaggctaacaatttgtaacaaggatagacgatggtatgaccattacataagcaaagaggctcacgttttacaagccatcaatgattgcaccttgaatactcacacgcctaaacactaatccattatgtttactgatgtactgaaaatctgcggtctgagtgtcattatgctcaaggagatcattccttatgaacaccccaggctctgagacatcccctatataaagtttcccccactcgtatatgttaccaacataacttatttt

SEQ ID NO: 74360 - DNA, 485 bp, Glycine max
  Clone ID: jC-gmfl02220103e06d1
acccttaaacagaaatacattcattaattagataaagacttgagacaatgggatctcaagcttaattgacgggcactagcggacaagagaatattcatcaacccattcggctacaatgatagatatgctaagcatattatatagggggaaaagaattagaatataacacgtcaaatgtcttggttgaggagaaaaaaagtgttaacacccactgaatggctcggcagaagaagcaatgaaaagaagaaatgatccagaaggggacagggaagatctagagtataactctactttcctctctccaaataataaaagatctaaacagacagcaatgcagagccaaacgtggatgccaacaatctaatctaatgtttctccattttccttccctaaatccgcttaccctcaattttttattctagagtccagaattaatgactggaaccacgtccctgacctcaagatgatgatattttggttacatc

SEQ ID NO: 74361 - DNA, 482 bp, Glycine max
  Clone ID: jC-gmfl02220103e07d1
caagcaaaatatagattaatagacaaaaataaaatgtatggaattctattctataaaattatataacatacactgatgattaatcttggtagaagaaattaacttaatctgaaagattatgatcagacatagatactataccgtttacaagaacttctataaaagatacaacaatattacagtatctttgtcggccatgaaacagcattattcacttcacattttgccttcggcttagggcctgcctcgcctcaagctgcatgatggacatttgtattgctttatgctctcagcttttgcaggagtgatcttcacacatttcccatggaaccacctctcacatatatcgcagccaatccaaaattcatctgcattgtaatttccgccacagctcccacaaagggtttcactgtgctcatcatcctcgtcttcataaccatcatctgcaaactttgggttgctcttaacttgcccatcacttg

SEQ ID NO: 74362 - DNA, 560 bp, Glycine max
  unsure (1)..(560): unsure at all n locations
  Clone ID: jC-gmfl02220103e08d1
gctgaaataattgtttatttgattcaatatataccacattttaaacaaattagtgtactattgtgcatgcacagcttttaacatcatgtggttacatttaaatctccagctatggacaatgaaattgtgaattgtattgatgtggaatctgcaaaccaatgtatccaaactccatgtgattgccagcacaaatatatttttttgtttaaagtgattgctgttcttggcatgccaagaaccattgctgcatgtccttccccgttggtgcagccggatattatgagagtgaattatttcttgtcggaattcttatagaagcaaagctttgagtgaaaattgttgaacatcaatcagaccaccctccattagtcctgcaggtacaggtgatccctggaaacttgtcactgaactttttcctgatgacatgcctgttaagagaacacantataaattaagaccacatggagtgcattgntctcatgaatttgaatccctccttacatagtagngcaactctaccaaaaacattngatgatgaaataccataaaacacaatcatg

SEQ ID NO: 74363 - DNA, 357 bp, Glycine max
  Clone ID: jC-gmfl02220103e09d1
aaactctgtttatttatgacaaatacatgttcgataaaacaaaccaaataccaagcccaagacctacacaaatggcgaacgaaccagatgcctcctctgccaggaacacaaaagccagaagacggacttgggtgacacaaaaagccacaagctagagatacgggagggaaaaccacaggaagtcaaggccccccaaccaaaaggatagagcaagggagcaggcctggaagccggaccatagcggatcccgaagggcccaaaatgggccacaaccagcagcagattgaaaacctgataaagaaagggtccaaaccgggggaaggggtgtaatggtcaagcaccggaaacccaggaggg

SEQ ID NO: 74364 - DNA, 518 bp, Glycine max
  Clone ID: jC-gmfl02220103e10d1
acatgctagcaccaaactttgatgcaaagccattggccatggctttaattgctgtaaaagttatgttgtacagagcaaaggttgagaacgatgtatataggacgacattacttttaaattgctagactcgttattgacatttttcctgcccttttgctgtcatcaacatcatgatgattgtagtgtgaattagagtaaaatgaatagcgacaaaatctaatctaacttcccagcattgtctactttagcaaaatgcaacgtatgatagctttgttgcacctaagaaaatagacaacacaaaattaatgcatccttacgatgaagcttgattcagcagtcaatttggctttacaaatttttacgaagattgggaggtgctcaaaaccaagcttttgaggtccagcatttggctctctagaagctcctttctactcaaaatcctatcagatgcacaatcctcttcatcaccgggtgaagctgctaataatgtcaaaagagtcactgtggcagtttgataa

SEQ ID NO: 74365 - DNA, 385 bp, Glycine max
  Clone ID: jC-gmfl02220103e11d1
gatagcaaaatgatgatattgtatatggtggttcctagcaacttttgttattttatgacacaaacgaacgctagggtccgggtatctgtctatcgtacaatgaatagcacaacattcccactgtacattcgccagggggtggtgatattgattctccgaacactggatgaaggttacaaagaactcatatccttcttcagttagttttcacgcaatgggatgctcctgcacaaagggacaatttacttcttataccaaaaaacttgttacgcatgcatatggaacacaatcttagttaccctttggggatgacacagtgaccactttttaattaactgtcatgcttacggtggagctgtcagggggtggccatacacaaaccaat

SEQ ID NO: 74366 - DNA, 262 bp, Glycine max
  Clone ID: jC-gmfl02220103e12d1
aacagagcaaaccaatcattctttaaatattcgacaatactggcaatacaagggtaaaattttaaactttttaattgggcttacatttcactgttttaaaagtagcgtttgcattctgcaatacagaccaccgaagaaatttttccccattcatcttcaactgggggggccttaatcgaagaccacaaattttcatacaaggctgtttggcctaaacactgaaagtaaaaaccgctcttttctttatgtcaattagcccatg

SEQ ID NO: 74367 - DNA, 309 bp, Glycine max
  Clone ID: jC-gmfl02220103f02d1
aacaaacatttattataacaatatcatagtatccctcaaagatgaaagggatctattaagttccaaggcaaataactaccacacactaattaagaaacaacaaatgacccatagagtgtccccggagaaacaaaccctagcagtagcacacacataatttagatttattcatcgtctacctcaggataaacacgctttattcttacgaccttaattgtaacaggcttgtctccatatatgggagccagtgtgacagaaataccatcatcgccttttgttactcccaagtctttcaactgatacgttaat

SEQ ID NO: 74368 - DNA, 595 bp, Glycine max
  unsure (1)..(595): unsure at all n locations
  Clone ID: jC-gmfl02220103f04d1
aactatgaactatcaatatatgatcgttatttatgtctgtgatacacacaattcaggccatgatattcttacgtgatttacagcaacttctaacttatttaatacatcataccaacccaactaggagcaattttcattatacaatgacacttatctttaaactctgaagcatgacaaggtggtagtcaccagggaccatattcttatgcaatttatgccacaactggataagacgcacaagttgcaacaccacacatgttcttccccaattccattttgaagtagccattctcaccccaactttctccccatgaatttttttatgagccaatatgggacgccattttcaactccataccccacagcaaggacggcatggttcacatcctgngaagtgctaccgcaaatgtcactagtgtaaactccattctcgtagaaatggaacccattcaccacctgaaaggccacactaaccggccgaacaaatgcaactgcatgttttaattcattctcagcacccaaggtgatattgaccgagtcaatgacttgaaacgggcacattttcagctgagaatttgcatacaccatctttttc

SEQ ID NO: 74369 - DNA, 366 bp, Glycine max
  Clone ID: jC-gmfl02220103f05d1
acatacgggtatcaaatccaagttggggacatagagaaatttgatttgacattcatagatcagaatatcagacttacatacgggtgaacatgatacgggtgaacatgataggagcacaatactatacataaaaactgacacaacaccctattagatatgaaaaactagatagcatccaattacaaaacttaagcatacataagaaaattatgcacacataagtttgcacgtttatttgtcaatgagaggtacgttggaaggaaagaaaaccacacaccacacaccacacacttttattagatagagatgctgttgggaattcctctgaaagtaaggccttccccactggtaggaagaagcacagtg

SEQ ID NO: 74370 - DNA, 490 bp, Glycine max
  Clone ID: jC-gmfl02220103f06d1
attccatcctcttccatcaatctaaacataacctaacaaaaaagaaaaaaaaacagctaccaagaagaaaaccatgtaacatagcaaactaaacattttattatattactttagtataacaagttgtctcgatttcgagaattgaaaatataacaactatttcaaaacatagtaatacaaattttgtcgccctcaatagaaactcttggctcaagttggaatactaagtatgaaagttctattgttctgcttggaagggcttgtatttcttgatactaaccgaaaggccttggatggaacccacaagtgagataatagaaatgatcaagcaaacccaactcaatatcttgagccaagtccaggtgaaggaaaatctttgcatatttgacttcttaatgtacatctctatagggaagtaaaccgtcaatggccagaaagagagtgcaccaataagggccaaaaagtcattgaagaatgggagtaacatagc

SEQ ID NO: 74371 - DNA, 443 bp, Glycine max
  Clone ID: jC-gmfl02220103f09d1
cgaggggaaaattgtaattatcttttgccacttcaaccaaagtgggaagccacgagtcactgcccttgcacattgttttagtacagtacttctaattcatgaacgttttttttttttaaagggaccttatcatccttaagaccaccccaaaagagaaagaataatttgaacaatattgccactaataagggccttcaataatttttccttctgaggtgtatacggagggtacctaatggtagaatctgcatcaaaacttctatagagaactgacttcctgtggctgaaactatcaaaagagaattttccatggtaacaacccattccactctcttcaactgctccaaaaggcaacccacgagttgcaacatggatgacggcgtcattgatgagcatcccttcagaagatatcttatccacataatccttcttcagctggtcat

SEQ ID NO: 74372 - DNA, 480 bp, Glycine max
  Clone ID: jC-gmfl02220103f11d1
gaaagcatattacttagagaataataatataaatggccagagaattcttccacaaaaagaaaaaaagaaagagagaaacatatactatattcaatcattttggggtaatacagtataattttcttccctaaactgataatttctttagtaaagacaccaaagtaaattgcatagctatacttattgctcatcttcagttttaacttattgtgcacacatcactcggttcgtgctcttacatacagctctcgtttgtgttctgaattacactcaggcagcaagtaacttctggatatccttctcaatttgaaaaggagacgttgttggtgggtatctttcaataactttaccatttttgtcaaccaagaatttctcaaaattccactttataagatcacccaaaaagcctccagcactcgatttcagaaactggtacactggagttgtaaatggtccattgacatcaaccttatcaaaaat

SEQ ID NO: 74373 - DNA, 452 bp, Glycine max
  Clone ID: jC-gmfl02220103f12d1
ggaaaatcaaaagcatataaggctatgtaaaactttattatggataatgaggtaaggtaagattatcccggttagtcatactctataatggggggtttaaatttacaaaacaggatgcagtcatgttcatgaagaacatgaaagaatccccattcaatattctgtgagttggaacctaaagaatcgctaagtaaactaaaccactacttatttaccactttattataattcataataaactaggaaatgatttaacttccaccttaaaatagctaaagaaaaactttagggacctattgggcgacagggttcaaaatgaccccaaaagagaacatatttcctatatccgacattcatcgacatcaattggaggaatctgcagatgcaccatagccataagggtttttgctagcccaattccattgatcgcggcacatatcatcgatgcttta

SEQ ID NO: 74374 - DNA, 460 bp, Glycine max
  Clone ID: jC-gmfl02220103g01d1
caaccaaaaggtggtggtccataacataccaaaagtgtctaatctaacgaaacaaactcaacctgaaaactgtatcaaagccagtgcagaaaataacaatccatcatcactacgtaaactccaaaatataaaccttaagaaacaaggttgtcattaagagataacgaaacaaactcaacctgaaatctgtatcaaagccagtgcagaaaataacaatccatcatcactaagtaaactccaaaatataaaccttaagaaacaaggttgtcattaagagataaggaagccagctgatcagcagtaccgccagcctgctgctgagcaacattccttaggacgtccattgcctcagccacctttgctttcagggcttctggcgactcaagcaaatgcagaacttcagtctggtccatctcaagaagcatgcctgtcactttggcagcattatcaggctctaact

SEQ ID NO: 74375 - DNA, 520 bp, Glycine max
  Clone ID: jC-gmfl02220103g02d1
caccatctgaaattctatcaattgcactaggaatcatagataactgagaatgattggctatgaatgacagttgaacaaatagtctgtccggatcaggtattagaccttcatggaccatcatattgaaaaataaaacacattcctttactttattttgtttactcatgctttgaaaaagtatacactatgcttccaaatcaagattgcttcctaccatcgacatttgtgagaggaatgctaacagatcttctgcccttcttgattttgacagctcatgcatgatagtcgtgtgtgtagcaatacagcatgacataccacagaaataagctaattgccatagacattttatcaacttgtagaaggacaaggaatgaagagagcatctcttcattgacatatagtgaaacacttcaatggcatcttcagaatgcttgatgttacagacatatagtgaaacacttcaatggcatcttcagaatgagcatctcttcacaaagccatctaatgagaatattccaag

SEQ ID NO: 74376 - DNA, 392 bp, Glycine max
  Clone ID: jC-gmfl02220103g04d1
aggaagggttctaaaccggggattttttattcacttcaattcaacatatatgtaaagggcaccctcccagattaaatggcaaacatttaactttaaaggaagacattacaaaggggagggtacaaaaagattgggaagacaatgaaacccaaaaagggggcctgggtccttaataatgactgttgattttccacaaagcttactgtaacaaaaagtgtgttaacggaaaaatttcctccatttacttccctaagaatataaaacagggaaaccaacaccctttgccctatgtgccgtttgggcgtgctctaaacattttaccttttgtataccctatcacgggttgttgaccaccaagattttggttggagctctccaaaatttcaccggct

SEQ ID NO: 74377 - DNA, 478 bp, Glycine max
  Clone ID: jC-gmfl02220103g05d1
caataacaaacacacgatcttgttcatattaaattattcttgtacaacattatgctacgataaatccacaagtgaaactagtaataataacaaactttccctggtatttccgagggttccttattgatcactcttaaatcactagtcaccgcatcagcatgatttatccctccaagggaacactgtgaagaacaacggtctcaacggttagacccggcccgaatccgaatagcaccccccactctaacccttctccagtggtactcttcccttcctccttagacttcttcctcatttcatccagaatgaacaaaacacacgcgcttgacatgtttccgtactcactcagcacatgccgggtggactggagtttctccggcttgagccggagcttctcctcgacttgatcgaggatcgcgggaccaccgggatgtgcgatccagaagatagagttccagtcgctgatcccgatgggctc

SEQ ID NO: 74378 - DNA, 542 bp, Glycine max
  Clone ID: jC-gmfl02220103g06d1
gaataaaaaacctgcaacataatatatataaatattactcaagtcaaggtacattacattcatagatgatgattaataaagctttaataaacaagagaagatgagtacttaattatgaagagtaaaatgagaaatgactaaggatgcacaagacagaaaaggaacactcaaggaatacatacatggaaattaaaaaaaagaaaaagaaaaagaaaagacacaaaagggatacaaaatacacccttggacacaagcatgcttatctacaatttgatgcatgcccccatggttttggccttctcttccaaacacccccaacaactgtagctgatgagaggaaaagacgaaaaagcctaaattagggaactgcatagacagatcactagcactcctcaacatagaaattattattcttcgggggaaacaccatgcatagcccttgttggcaaattaatcaaggtagctagcttaattgattaattaattaaagcgtgctcctgaggatccaaagagcctgatagctgctgctctaaggatgtatt

SEQ ID NO: 74379 - DNA, 487 bp, Glycine max
  Clone ID: jC-gmfl02220103g07d1
gaaattgcaataacactatagcactgtggaatttaccatgtaaatttccaccccatcaaaattctatttgtatcactttgttggattgtaggttacaatgaaatcttggaccacaggagcagacatgtcctgatttttttccccttttttggaagggaggtgggggtgaacatgttgaaaaaatatatatacttacgtaaaaaaactatatacctacctatgtctatgtacaacagacataacattatttttccccgctctctgtatagcatgctatatatagggttgattgatgattcaaaggcccgttgatcattgacgtgcaagatcttaaagttgcaacattttccgactctgacttttcaatgcgatgctacatatctcacagttttcctgctaatcaggctagctcctataagcttcatccgtgcaagagcagatgcctcccttgaaatggtgaaattgttcagcatcccttacagaaatc

SEQ ID NO: 74380 - DNA, 464 bp, Glycine max
  Clone ID: jC-gmfl02220103g08d1
acgaaagcattcaaatgcagagtatgtattcatcatgtaaatacaacacaataacaagtcatccataagcagcatataggatttcttgagaggtacatataaagccagaagaaaaatatataagatacttttcttccacagtgtctctagtaaaaggaccctaaaaaaataaaatatgacatcatagggttcctgaaaccccactacaacatatttgtcagaatctagtgcccacttcaatctttctttttatctttcagaggtcctctgggtatcttgctcaataccttcgcatcaaacactgcatattgcttcttaatctcggcaattgctttctcaccaaaagagtcgacatgatcttcatatttctcataaagcacaggcacagtgtgaagcaaaacaaaagctatgtagaacaaggtcaagaagttggcccaacaacccagaatagagataacccataa

SEQ ID NO: 74381 - DNA, 420 bp, Glycine max
  Clone ID: jC-gmfl02220103g10d1
caaatcatacattaataatcaatacatgaagttgatttttcgaattaaaaagccctgtatggcattcaataacagcttcaacctgcccaaaatgctacggtagcacagatcctcaggccatgactgataaccatatcagtaactggttttatacaaattaaacttcatgcctgacgtgctaaaggcctgtgtggctttggagcattgggatttccttgctcatagaatgttcgaaagagaagaacagcttttgatgccattatacatccagtacatttgaaacactttccgggtgaaacttcattattgagcgggggggtgttacttaaatgcaatgacagtttcgatccacagcctccaaatttatcatttgaacagccataaaatacttcctttatacctaaaattgataaagcagat

SEQ ID NO: 74382 - DNA, 504 bp, Glycine max
  unsure (1)..(504): unsure at all n locations
  Clone ID: jC-gmfl02220103g11d1
gcaacataatttagagtcattatcgtttgtgttcataatttatacttacgacatctcacaactttgtttgaaatatatattatataacaaaccataatgatacacagatttacttaactatattttttaacaccctgctctctccctctgtgtctgctgcagcttaaccttgcttcagttactaagtcaactaggcaccgctaatgatgatggagcagattttggactggtaactactagtctagctcctgttcttgcatttctccacggctcttggtgccagtccaatagcttcctttcctttcatgatacgtaaacgcttgcatgattcaacaaacatctcccatggcacatcaccgacaagcatccagtcgccatccctgtcttcataggtcgggacatagtcggagctgttcaaaagatccatcaactngctctcattcatgaaatccttgaagccttgtgattcacattttcaatggtgtaagagctaaacattttgcc

SEQ ID NO: 74383 - DNA, 418 bp, Glycine max
  Clone ID: jC-gmfl02220103g12d1
gcaaaagccaaaaggtaaactctatcaatttaaaattcaaacatgataaagtttatataaggaggagtaattacaccagtaacttaggcaaaacaggtatatattgatcttggaaatagatttgaagtgaaggttcagatctatcgtctacataagaaactagcaggaataggaaaactaaaattgccaacacgcctcaaatgaagaagccttatttagactaaaaagtgcattctagagtttgcgtaaaatgagatgagccccacgctcaggctgaagagtgataattaaggagggggcatgagcataggagggggaaaaatggagggagaaacgtcttaggatcattgacacagatacttttgcttttaacaagccaaagttttgttctatgcagagtcgtggaccccatccaaat

SEQ ID NO: 74384 - DNA, 405 bp, Glycine max
  Clone ID: jC-gmfl02220103h01d1
aagggaaggcaccctatctgatattcaataaacggtcgtagcaaatttgtaaaccaagcaaactccccatacgcacttaaaatcaaagaataataatggggccgagaaaccaattactacaataactttgatgatttactaaccatgctgatctaaaagaaaaaaaaaaagaaaaatgtttaactctcatccagatgacattgaatacaccaaaaaaggaaaaaattattataatctcatctacgcttggacaaacaaggtttaagcattggccattcaatttccttccgcttagaaatttgattctccttttttgtgaagaaaaacaaaataaacattttatttgagaaggcctgttttacagagctgaaacctatctcggaaatagcatttgagaacttttta

SEQ ID NO: 74385 - DNA, 312 bp, Glycine max
  Clone ID: jC-gmfl02220103h03d1
ggagcaaattcatttttcattgatatacatgggttatatacaagttacaggggggggaaacaaacatactcttttttcaacctccaataagcttttgctcaccagggtgacatcttccaaggactcaaaattagtaaaaaaaaaaaaaaaattacaattacaattccaaacaaagctaacatctaattcttagacatcagggtcacaaaattttccatccatcctgttctgaacagctttcacagcagcaactctagcagcagtggcagccttgctcgcagcgattactgctttgttaacctggtcatctac

SEQ ID NO: 74386 - DNA, 383 bp, Glycine max
  Clone ID: jC-gmfl02220103h04d1
cccccaaaaaaggcccccggccaatttttttttttttttgcccaaaaaaggggggggcccccctttttgggcttttttcccccccccttttttttccaaaaccccttttttttccagggttaaatccccccgtttgcccaagtttttccaaaaaaaaaagtttttttagcccccccccccccccccccccaattgtccccccccaaaaaaaaggggccccaaaaaccaattttttggaaaaagaaagccccattttaaccaaaaccaggtgtttttgtcctttttccccaaaggggggattttttccctttaaaggaacccccccccggctggaaggcccgggtttttttttcagggggaaaaaaggggggaccccccccaaa

SEQ ID NO: 74387 - DNA, 375 bp, Glycine max
  Clone ID: jC-gmfl02220103h05d1
ggggggcaatcaaaactcaaaaagattaagggccgggcagtacattttgattttttaaaccccagccccgcctgcgagattttgttttaagatattttttcaaccgtttcctatgaaatctgtttgactcaaattgaaaaggtctccccctccaaaacaaataaccaaagcctaatacttgtggggccggtcttgtacacatattttccttttcaaaaatcattttcggaagtcccccccttcacacttggatcaaaatataccgaagctgattcatccccatcatcatttttttcatacccgccaaaatactttggatattgatttggcaaatgggtcaggcagtccgtccaattttcaagggaagataaaatt

SEQ ID NO: 74388 - DNA, 420 bp, Glycine max
  Clone ID: jC-gmfl02220103h06d1
agcaaataaatgggactcatatattgagtacattacttccatgctaaatatgaaatattccatatgtaaaaaaaccacgtttatgagtgactatgggtgacacaaaaccttagcaaatgaaagacacagaatgacccattacaacttttttttactttccacaggggagagaaacacttgaacaaagcttgaacgattaacgacacgtacaagcacaaaccacaattttttcccgaacgaaaaataaagacttgtgtaatccaaagaaacgtgacggagcatatatgcatgcatgcatgcatgttcatcatttcaagggaaaggaagaacaccgctgtcaccaccaacgccagtttcaacgccaccaccaataccggcaccgacaccggtaccggtaccggcaaacccttcgatcccacc

SEQ ID NO: 74389 - DNA, 397 bp, Glycine max
  Clone ID: jC-gmfl02220103h07d1
ggaaaattggaaagcctttggttcatttcccccattttttattggaaattgggggtcccgagcaggttccaaagttggggaaccccccccccccacccaaaaaaaacaaagatcccgaagatcccggggttctaagcaataaacaagttagacccccttcctgttgatttaaatttgcaacaatttaccttttttttttttttttggggctaaagaaaaccctgcccgggggggccatgacccctaagtaattttcccattgaattaggagcggggaacaaaggggttggaaactttaaaaacatcaataaccccagcaatggaacccggtgcggctaattttgtaattacaaagcttgccacactaagcatttggtggcctatccattttatgccc

SEQ ID NO: 74390 - DNA, 470 bp, Glycine max
  Clone ID: jC-gmfl02220103h09d1
ggaaaaagcaagtaacattaagttggattcggatacacaagataattcacattatctgaagtacttcaccaaacacaaatctaaaaactctcaaaagtcatttcgttctttgacgctcactttccggggacgaagttggtggcataggcccaggcgttgttgttgacagggtcagcaaggtgatcggcgaggttctccaatggaccctttccggtgacaatggcctgaacaaagaagccaaacatagagaacatggccaatcgtccgttcttgagttccttcaccttaagctcagcaaaagcctctgggtcatcagcaaggcccaatgggtcgaagctgccacctgggtagattgggtcagtgacctcaccgagggggccaccagcaatacggtaaccttcaacggcacccattaggataacttgtgtggcccaaatggcgaggatgctctgggcgtggatcaggcttgg

SEQ ID NO: 74391 - DNA, 487 bp, Glycine max
  Clone ID: jC-gmfl02220103h10d1
gcgatctgaaacagctgctggatcgggagatccaaatcagtcttatacgaattgaacctcgaaatatcacgagaaggttggaagccgaggttagggttttgtttattcaagcaatcgaacgatttgcattggtaatgatcccaaattacagcgttgtcagggagggaggaagggaaggggcttctaaggtcttagttgaggagaaaaaaagtgttatcacccactgaatggctcggctgaagaagcaatggaaagaagatatgatccacaaggggacagggaagatctagagtataactctacttttctttttccaaataataaaagatctaaacagacagcactgcatagcccaacgtgtgtgccaacaatctaatctaatggttttgcattttcctttcctaaatccgcttacccttaattttttattttagagtccagaataatgacttgaaccacgtccctgaccttaagatgatgatttttg

SEQ ID NO: 74392 - DNA, 402 bp, Glycine max
  Clone ID: jC-gmfl02220103h12d1
ggaacactacaaatagaaaggtgacatttaataaaccaaagcaacacaacgcagcaaagtcctgaaactcgctgcgcttaacaaaaatgtaatcaggggttccgacaaacacaacacattaaaacacagataaataaaagcaattttgccaccgtcgatcaagaacccagttctgggaacaacagttgcgagatgatgggggagacttcaaactttgtccgaaaaacaagcttcctagaaaagaagacacatgagtccagaaaagaaaccaacatttattgtaaccaacatcccctgatgaaccagcccgcacgattcacttctttttctgggcagccttggtgaccttggctccggtaggatccttcttctcaacgttcttgatgactcccacagcaacag

SEQ ID NO: 74393 - DNA, 358 bp, Glycine max
  Clone ID: jC-gmfl02220104a04a1
tcgaggtggggtaggtactctttggaaatgtctgctgttatttacaaggactgggttttcactgatcaagcattgcctaatgatcttgtcaagagaggagttgcggttaaggatccatctgctccccatggagttcggcttttgattgaggactatccttatgcttctgatgggctagagatatgggatgccatcaagtcctgggtgcatgaatatgtctcattctactacaagtcagatgcagcaattcaacaagatcccgagctccaagcttggtggaaagaacttgtccagtgggtcatggtggatttgaaagataagccatggtggcaaaagatgcaaactcgggaaaagttga

SEQ ID NO: 74394 - DNA, 497 bp, Glycine max
  Clone ID: jC-gmfl02220104a04d1
aaggacaacccttgctgtaatggaaatcgtttacataagatgatgatttattctagtttgcactttgccatgccagctatcattgttgaaacatgcgcgagaacacttaacagcaatttatacaaacagaatttcttcattaacacttaacagcaaacacgagaacattcaatcaccccaaatacataacttaaccatacataggtagatgaaggaatcatattccttctattcacttttattgaaaaccagggaaagtactgcaacaaccatagagcccctagatggagatactgttgggaattcctctgaaagtcaatccctcctcactagaaggatagagcaaagtgtaaggcattttagccggcccactgcggtttctcaacgtctcgtccttgttcttctgtataagcttttgttcaatctcttgaagcttctttccaaacctcttgaaggcctctagtggaccagcatcagaagtccaatagtcaccacca

SEQ ID NO: 74395 - DNA, 316 bp, Glycine max
  Clone ID: jC-gmfl02220104a05d1
gacggcggccgccctgcatgagcatatttgtcattgcttttgttgatgattttttttttccatgttaggggtattggttgttgttttagtgttaaagttggtgcacggcaacaacagaccaacgaaccagaaagagacacataccagagcacaagagaggcaaaaacccgagaaggacaacaaccagacaaacgcaaccggcagaaggaaaaaaaacacaacgaaaacagaaagagccgaagaaaaggaagaggaggcggggaagaccaaaaaggagaaaggaaaggccccacaagcgcacaagcgaaagagggag

SEQ ID NO: 74396 - DNA, 507 bp, Glycine max
  Clone ID: jC-gmfl02220104a06d1
aagtggacactttaactcaaaattatagaggaagacagtccaatatgaaaaatatagtaaaatcatctcaaacttggcatcttctctttgcacctaagacattgagaattctaagaatgttacacgcaagtcccatcacaacttctagcacttggatcagcacaaccttcaggaacagaaatatttacttgccaagtttgctttgcctccaattcaagattggaagaaagttcccctgttaatagcatcctcgttagcatttccaagtgcagcctcgttcaagtacttgtcagccaattggactctcttgacattctcttgttcttggacaagcatgttaccatacgtcaagagcttctccagagtcatcttgggctgctcaaaggttggaggtccatcttttgagttcacaagcttcttcccaatgccgtcaacaccaacaccagaaatccacttcctcacttcgtcatcatatactctggccctcagtgcaccaaagaaatcaat

SEQ ID NO: 74397 - DNA, 462 bp, Glycine max
  Clone ID: jC-gmfl02220104a07d1
gagaaagtaaagttattatagtattaatcaattaaaactaaatttatggaaaattaaagaaaaaaatgaacaattacaagtggggcccatatgaaatttactccaacaatgattctcacgtgagggggaggaagttgagcatggtaactaatcatgatggggatgatgctgctggtgatggcgtcctttgcgggtatcaacggtcgttgactcgtgcgaatcacaaacctgagtcttaaacttgcaaccgaatttccggtccagcgacgccctccaaccgccgccggaggcggcaaacttgtcaaacttggaaatgactctcttcatagaggaacactcgcgttccagttgatgcacgcgcgtcctcatgctatccatgtccaagcgcagcacctgattatccctcaccgacacgcgccacgtgccgttccgttcctgcacgtgctctaaccctaatccttc

SEQ ID NO: 74398 - DNA, 336 bp, Glycine max
  Clone ID: jC-gmfl02220104a09d1
agagccatcaaaatgatttattttgcaatagtcttcagccatgacaggaaccaagaacgaaggtttttaaataagaaaaagaaaatttatgatgctatatatggcttattttttttttttgagaaaatgctttgtatgggagtaacttcgaatggccctccttggtttttaaaccaatgacatgctattaaagcaggggtctatgactcaaaatatgggtgtagattacaagtgcaatgtgaacctgaacagagagttccattatctgaaagtgctacatactggaaggtgcagctttttattaaagctacgggggcttttttaacagatttagac

SEQ ID NO: 74399 - DNA, 434 bp, Glycine max
  Clone ID: jC-gmfl02220104a11d1
gatgaataattattttggtcatattaaataattaataattcaaggagaaactgacatgataggatataattatataaaattgtacataggaagtggaaatgtgaatgtgtggcagggtgataaaaatgaaaagagaagcaacaataataaagtgaatgagaaatttaaatatcacggactaaaatatctattcactcgaaatttaaatgtcacggtctcttttgcactcaggaggagagatatgaggatagcgtttagtgtcagtgcagtagttgtagatggtgtatttctggcgcacccatctgagcctacgccactgggcggcgtcaaggtcacggaactcaggctggtcccaccacctcttggcctgcgtgtcgcaaaacttggcgttcaccgaagcctagcacccgtcgatgtgaaaccccttgtacgct

SEQ ID NO: 74400 - DNA, 554 bp, Glycine max
  Clone ID: jC-gmfl02220104a12d1
actcttaataacataatattcatattcattacttataaaagtgaaataacagacacgtacgtacataattaagcagtagtggactaggtagtacgtactctagtctccttatttgtccttaattattggcacacaacacaacacaacatagcatagctagatgagatttattaagatggaaagtgaatgaccagaatcatccgatactgttgttgaaggctaaagaccatgagtgaatggtatttgcttgtttctgctgtccagttgaagcagataatccaaccctaacccattcaggaagcactttgttgagctcaatatcatgggagagtgtcacagtttgagtgccaggatagaaagcagcaacagtgagtctcttagaggcagagttatagctgatatgtacagtggctattttgccattttgccactcccacctagcagttgccttggagacaatagagttgacatcgataccaatgtgtctataatctggatcccccttatcacgaatagggtaggtgtcaaactcgacagcaacaacattgtctgat

SEQ ID NO: 74401 - DNA, 407 bp, Glycine max
  Clone ID: jC-gmfl02220104b03d1
catgaaatattctttcaaagtcattgaattcagctcaatgaactcaattgctttttcttatccttgtagtcaaccactacatataattgaggaaatgagattgtcttaaaagtggatcaagatatataaaaagatacaattgtttcagaacatattacattacttgggataaagaatggtcagaagcttatggcgacaaaatgaagcatgatgacatcttcaataggaagcagcaagatatgactatttcgtgtcaacagcatgtcagcatttcctaacactttcaggagctcccgagtattacattgaatgtttcttttactttccgaaccaaagcttccctgtcgggtttgaaaactatgttcttgtatacaaaccacccagtgtatgcaatgccctcgagccca

SEQ ID NO: 74402 - DNA, 433 bp, Glycine max
  Clone ID: jC-gmfl02220104b08d1
caccaactatcggttaatattaattgtgggaagcagaaaagaaacaagtccacaataaagccaaacattacagcgaggtcccaaaattcgagaaaccatcacaggccacaaatgcaaaccaattcaattcatttaattcaaagctgcgaagaagtcctatgcataacaaaagcaggaaacaaccccaactgtctactactctctgtcttcatcactgcaggaggtaagtagatgaagaagcattcattcaacaatgccgcatcatcatcatcatcatcatgtgtaaatgctcacaatttcggttggaagagcaattagaacaatggccaaagccatcacaatcgcataggtaacggtactactgggttgaaccatgcttccatacgatgcgttttggctcttgggggtcgtagtttgtgagtttgaggttgca

SEQ ID NO: 74403 - DNA, 418 bp, Glycine max
  Clone ID: jC-gmfl02220104b09d1
gactgaactcttaatcaacttattgaaataaaaaaaatcatatcaaacatcataattcaaaaaaataaaagttgaaataaccataacagctatgcgaatcaaaatttaagtacgtaaaaaaatgatactaggaaacccatatttgaacatccccaaccgtaagatctatcaaatatccccaaagcaagataagaaccacatcaacaacattggcccaagctatatccacacaatacagtgacaatttacaggaaaaaaacaaatacattttaaagcagaacattggttctgaaactatcaaatttactgtggtcttccactgtatcaaaaccagacggaccaaccttagttgtcatcatttatccaactgttttcatcttctactagcttggagatgctgaaatggctgaccctgatc

SEQ ID NO: 74404 - DNA, 448 bp, Glycine max
  Clone ID: jC-gmfl02220104b11d1
gttaatcaaagcaattttaaaaattttcattaaaaatatttccggtagacctccaaagataaatacaaagaataacaaattgtctacggactatgaccctcatcatcacactctctaacagtactcaattgatgatgcatggatatgtgtttgtgtaatttcaattaagccttcatgaagctaagtgcgtgaggaacacggagagctttcaaccagtcgcttccaccgttggctccagcctgtaggaactgggcaggggtgaattgggtagcttcttcgcggctaataagaccacggtaacccttccacttgatccttccgttaacgttggcaccaggtccatcgttgttgtattcagcatagtacaaggtgtcttcgaagtgttcaccggcccatgggcaccatccttcggggtgaaggaagtcacccacggtggattccatcacaa

SEQ ID NO: 74405 - DNA, 436 bp, Glycine max
  unsure (1)..(436): unsure at all n locations
  Clone ID: jC-gmfl02220104b12d1
aagttaaaatcacttaatagaattagaagaaaaaaaaaatcaaaatcaagattctagatattcattgccaaataaacaacgaactttgacagaagctgaaccagaaaagactaacaataactgcttaaaataaaatcatgccagacactgaattatgtggtcctattgattaactgaaagctccttccgcttatatcggaccatcactttccccttcactcccacaaccatggcattccaatcgatctctggaaaaggtgacaccaactccagctcaaaattcctaagcagatgagtccatattgcttttatctgcagatatgcaaatggctccccaaggcatccatgtctgccccctccaaatgaaatgtatgagaatgcacctgccaccttgtnctcttccctccccacagcaaatcgatcgggatcataccta

SEQ ID NO: 74406 - DNA, 258 bp, Glycine max
  Clone ID: jC-gmfl02220104c05d1
cctagaaaggggaaaattattgagttaccagttcacaagtaaatgacctgtatgaaaaataccattttagtatttggaaaaccaacattacatggcttttggggacaatgccaattacaactccaggccccctaacatgacaagcctctgactttgtgattaagtttcaggcgaaacattttggtacagtttctacatcaagggcttcttcctatgtattaaacccaaaagggaaatggaatattcaccaatgagaat

SEQ ID NO: 74407 - DNA, 146 bp, Glycine max
  Clone ID: jC-gmfl02220104c06d1
ggagaagataattatttcaaccattgcctacataatacatatacaattatatatccatgattccatcattctgtatcacatttaaagaaaaattatggcttgttgagcacaggcaaacgaaaaggatatgcatcaatcccccaact

SEQ ID NO: 74408 - DNA, 500 bp, Glycine max
  Clone ID: jC-gmfl02220104c08d1
aaagcaattgataataatttagtattttcttgttcattatatcataaataatagcgtattaccaatccacatatttcaatcctctaaggatttccagcaatccaactaatcagctagagagctacatactcattagagctaaaatgctaactatcaccaaatcttacccaaagagaacaaccattgtcatcaaataaccataacttcacaagccacttaatttcaacattttaagctataaaaactaaaacatgactcaaacaattttgcttttttctttttattgttctttgagtcagtgcttctcagagccagaatctctcttctcccaaaacttgaactgcacagatctttgttccagcatcttctccacttcctccatagaaacccctttggtctcaggcacaaaaacaatgacaaagaagattgccacaatggccacaattccaaacagcatgaatgtccatgctgtccctatagcttctgtgagggacaagaag

SEQ ID NO: 74409 - DNA, 354 bp, Glycine max
  unsure (1)..(354): unsure at all n locations
  Clone ID: jC-gmfl02220104c11d1
ggggggcccaaaccgggggggtaaacccccccaaaaggcccccccctgggggggaaaaaaaaatcctgccaaaaaccaacaatcacccccacccgcctcctatacaccacactcccctcttacgaccacatttccacccacctaaatctccaacataaacccaccaccacccccgggggggggagccctcaccactctacgacacccctcnncccccccttttatccccatgcccccagccaaaaaggggccaaaaaaaaaacccccccccccgcccgccggaaaaaacaaggggggggccccctttggcccccacgccctttggacaaggacaaaaaggggaaccccgggggg

SEQ ID NO: 74410 - DNA, 404 bp, Glycine max
  Clone ID: jC-gmfl02220104d04d1
gataagaacaaaaacagtagtttcaagaaatcaggaaaacaaaaataccataatcagttataacatttgcaactgaaacttacaaacctcaggtcatggcacataatctgagaacataattacaagtaatttataaactgaagcagatgtggcttcacttattctctcccatctccacactaccaagactaaatgagaaatcaccaattcctcacagcttaaataataccaactccaaatttagacagaaatgaaaagaaaagctaaaagagatcctgttgtcaagagatcagtcactaaaatcaaagcttccactgcgagagctgctgccgttacgactatgtaaagagaggcccctcatgtggccagacaaattagaaccatccttgttttccagaaaaacc

SEQ ID NO: 74411 - DNA, 432 bp, Glycine max
  Clone ID: jC-gmfl02220104d05d1
ccaaaaaaaaaacagtttttataagacataatttttttacaaggggggcagtatctcacccttcgttctttacattggtggcatttctaaccttttgccagtccgcacaatgggttaattttacccctgcaggagcttttaatctaccatttaggcctaacaaacaaaggatggggtcccttaccttgtcaggttttttgccctggactcctataattgttgttaacaccatcagaaaggggaacccataagctttgacttttttcaacaccattttcccaggttgggggtctaacactcctatcatgggtggccccaccatcaaaaaattgggcccacacacttggacactttccttctccactaaattcctcctagcatcctgccacagtttttagcagttctgattgcagcaagggacaattttcctta

SEQ ID NO: 74412 - DNA, 480 bp, Glycine max
  Clone ID: jC-gmfl02220104d06d1
gggtgctaaagatgagtttatttcattaaaagctacacaaaattcattcgacatgctaaaattacagtcgaacaggaggtaatgtaaaatgcaaaaaactcataacttacggcatggcacatttgattctgaaagtacataaccctgactaatttgcatataacaactaatgctctcgcacgcttcaaatactcaaaggtatcatcttggttgattccagaattacgtgttccagcaactttggcaaggcagtgagctattattccatgttttaggaattggcttccctagcacgatgagaatttcatgacagtagggtaatcttcacttcatttcaagttttttcaaccaataatcaagttggctggcaacacatgctgacccggtggagccataagagacaaatttcttaatcgcattttctactccaagaaattcatacacatcctcctcaaagactggatttatacttctcagctc

SEQ ID NO: 74413 - DNA, 369 bp, Glycine max
  Clone ID: jC-gmfl02220104d09d1
atgggggaaaaaaaccctgcgactttattttataaaactggagatccactaaacttacttttaggtcccgggctttgaaaccgcataaaggtaaattccataatcaatacctaacaacccaaggggaaaatactaaagactgggtagctaaaaactcagttggatgccccccaggcctgatgggcctagcaaattttttttttatgatacaaaccagcggacgatccagggtcattggtctcattcacaggcgggtttgggaccaaagccgctccagccaatgatccagggccatcggtctcattcacagggtgggtggggctcaaagctgcccaagcatatggcaaaagcttggaaggccaaaagggg

SEQ ID NO: 74414 - DNA, 304 bp, Glycine max
  Clone ID: jC-gmfl02220104d10d1
agatcatcatcacacctttaggctaacagcagaaacataattagcaaagtgaaaatatgtatatgcacacacatatgtacatgctaatgaaataagggctttcttcccaggatcttatatttccctttggaaacacattgatcttattcctaattactacaatgacaagtatgaccacatcctactaatatataccctaacaccacatacacatgtgaccatcatcatcttggaagcatctctggcacaatatctgggccactaaagggaggtgaatttggttcatggcggttttcgggtcttt

SEQ ID NO: 74415 - DNA, 371 bp, Glycine max
  Clone ID: jC-gmfl02220104e04d1
gagttgaggaacttcaaaaatcatcaaaggcagttctagccaaataaaattaaccttaaagcaggtcaccaatccctccatcttggtcaacgtggagtgtacaatatcaacatttacatatttacaagacaaataatgacgcgatgaacatttacaatgagtgtgacttagcagctgtacaaactatgtcttcaatgccaatgtccaaaaggagaaaggaatgaaaggcgacggtgaaccattcaattaatcatcaaacttcgaatacaaatcagcaagtgcacgatagagaatggcagcggcaggtggcctaggcaacgagccaaaaagtatatctgttgcagttatagactggctgccatagaaacggg

SEQ ID NO: 74416 - DNA, 395 bp, Glycine max
  unsure (1)..(395): unsure at all n locations
  Clone ID: jC-gmfl02220104e06d1
ggcaatgtagtagcttatcgtgctaggggagtacaacaccatggacagaaggctaaaagttagacctctttttgtagaaaacaagagaataagaggttttattggttctacttgattcatttatttgnactaatttctagctgactattttttagtttcgacgtgcagatttcatgctccatgcttttaggtattccacggtgatatgctcagtaccgttattgaacacaaacaaatgagcttttttctttattgctagggtaggataaaccctagacaagatgtttgttcttccttcggctccaaaactctccactactgagtgatcaatcaaactcttgagagagagctttttatttttggctaaatccacattcacaaagcctgcaaatgat

SEQ ID NO: 74417 - DNA, 145 bp, Glycine max
  Clone ID: jC-gmfl02220104e07d1
cagaaaaggtgaaaatatcattaatagatgaaactggtagtgaagacttgccaaagtttaattacataccatgtaatataatatatcaaagtactattgtaaatatttctttggctcggatttcggatgatcagggttgctgttc

SEQ ID NO: 74418 - DNA, 317 bp, Glycine max
  Clone ID: jC-gmfl02220104e08d1
acatataacatacagattcatataacaaccgggtgggatattctccggttcacattcagtaattagggctacaagaggaaaccattcacttaatcaaacaaagggatgaaccaatcctcattttttatttcccctcctgccattgacctcaaaacgttaaaaggggggctgaagcgttgtatacgggggttcgaccaaaccccccaaatgaaccgagttctggtactgccaaagccggggataggtgctaccttccaaaagacacaaaccgagaggaaccggaagccgttgtccccaggtcacaaaactctcaaatt

SEQ ID NO: 74419 - DNA, 458 bp, Glycine max
  Clone ID: jC-gmfl02220104e09d1
aacattatatatatagagagcactctgcaaaagttacaggtagcaaataatgtacacacctctctcacaaaatgcaacaagcggcaattcatgagtactgctgtgctgtccagtgcacatcctacttttaatatatatatttactttgttttatttaattattaattaactaatacacattaaaaagaagattgattttaagtttgaggtagagtaggtgatgaggaggatcagaaggaagaagccttggcgagtgacttgatggtaacatcgggacccagaacaactggtttaaaatcgaacgtaaacgtgtcgtaacgcaggaagaattccaccaagtagagcctgcacatgagcaccaccagattcttggcgggacactgtttatcatccggtgtgggctcctccgtctggggtcccgtggaccacaagacgtgtctcaagagcttttccccgtc

SEQ ID NO: 74420 - DNA, 424 bp, Glycine max
  Clone ID: jC-gmfl02220104e10d1
gctgattaatctttcaagcattcataaaaaaatcgcagtttatcagatgcaatgtatgcagcaagaataccacagcaagaggcccacattaatgaaagcacactgaattgtaacagctgggagaaataaactactacagaaactggagatggagatagcaccggcaacttaaaatcacattttgcccagggcacaagattactccgtcaatgcttcaaaaaacattctcccacaaacccgataaataatcttgtatgttttcatccgcatcctggtgagacaggataatctaacacgcccttccatcttcctatctttgagaagggtacacagcaccagttgccctggtctgctgtttagaagcaaagcttgagactagccttccatttgctgagcctgagatttgggcactgctcatacttga

SEQ ID NO: 74421 - DNA, 361 bp, Glycine max
  Clone ID: jC-gmfl02220104f04d1
agacgattcaatataaattaataacatttattccagtcaagccaaatttacaaagtaaacaataccatttgaatatacatagataatggcatttattacactcagatcaaatttacaatatatgtatagataaagtggtgatgattaaccaaattcataagaccggtctcaagtaccttgtaacccaactccatgccatgctccattctggaaacgataagattttagattattcctcttacgcttttgttccccttgacctagctgaactacactctccatgcagatgcagttatcttttgttttgtatatatgcatatacgtcttctagagcttttctctttttcgcttttatacaaca

SEQ ID NO: 74422 - DNA, 522 bp, Glycine max
  unsure (1)..(522): unsure at all n locations
  Clone ID: jC-gmfl02220104f06d1
actaaaataattaattttcattactcgaacattaattacgtatacaagggaaaagtgaattaaaatgagtttgactgggggatacactgagaaaagagaatatactacgttacacgtagtagtacaatatgagagtgatatgggccaaattagagaggctaattnttgcgcccaacagatacagcttcctgatcagagcaatttaatatttacctttttcttttttattacgtatcacttataccaaagactacgtactattcttgcattgtagatatgagcgatattagatgtgacctcactcagtaaagtaattgaacgtttaattaggttattttctttttttaacttttcttgtcattgatcccttgtttctccacattcatataatctcaatgacgaaatcatatcagactttgccaacagcaccaccgtgattcggttccattgttcctatcttcacaacgtcaatgatgtgcccattcaattcttgagccttcactgggctctctagtgccactg

SEQ ID NO: 74423 - DNA, 471 bp, Glycine max
  Clone ID: jC-gmfl02220104f08d1
aatcaagttgataatcaattgttaaaggtctttgcagtatacaaagtgaagatttcatcttaaaatgttatgtacattagagtatcataaagaaagctaggccaataaattcaagttgttaaagcagacgtggataaatcaaagactgaaaccaacacaactagtaatcaacatttggagttcattttgtcgttttggatggggttgtccgactccaaaaatttgccccagatggggtgtttctgccaaaccatactcatttcctcaagtgggatgccctttgtctcaggcaataacttgtagatgaataaggtcatgatcaccacaaagcacccaaagaagatgaacaaaccaaacttcatgtgacagagcattgatgtgaagaattgagctatgaagaaagtgctgatcatgttgacaccaactgtgatactctgagcagcaggtctaatctcaggggaaagatttcac

SEQ ID NO: 74424 - DNA, 439 bp, Glycine max
  Clone ID: jC-gmfl02220104f10d1
acggtgcaataaataaccatacatagcacaatgcccagtggagactggttttatttacagaaacacattcttcagaatgtcaatcgtagagtacagactatatgcagatattcacaaaatataagagaatcataataataaaaaaacttacctctaggacatattccaaggcattatcatattacatcaatatcatcaacattaagccaatcattggaatccttggtcacagaattacgagcacttgaatgctgggagccaacatgtttgccttcaacagagtttatatccttatcagagttaggcgaacttctacctaactgaacccaatctcgagagtcttttgttgaagaatcagagcctgatctagtttttttataactttcatgtacatcaccatcatcctcctcaagatcactggatgacacatcctcgtcat

SEQ ID NO: 74425 - DNA, 486 bp, Glycine max
  unsure (1)..(486): unsure at all n locations
  Clone ID: jC-gmfl02220104f11d1
aaaccatcaatgtaaaacatgatagttcaggaatgatctttagtctaaaacttgcgattacaaagcatgaaattcaatgcaccaggaataagttttagtatacattatctataaatgttaatgatagcattcaccaatctaaacatctggcaacaaaagggctantcccaatatttntntccattaaatccattccanttttcttccatctctttcatctaacanttcntnttctcccnnnnnnaannnnnnnnnnaaaaacctatttacctccactatcctttctaggaattctttccatgttggcatctcctttattatcccctaaatcaccatacatgtctttaagttgagctagattactcgaagcagaagttctcttactctcctctctctgaggactagaacgtgattcatactgagcagtgccagcttgcaggcttcgacttctacttcgactcctgctcctacgatagtgcttactac

SEQ ID NO: 74426 - DNA, 284 bp, Glycine max
  Clone ID: jC-gmfl02220104g04d1
aacaactggttgggattttttggggggcacattctggattttgtgcccccagaggaaacccttcccttgggggaaaaaaagggtgaaccaaaaaaaatcccccatttccccccctgccattgacccaaaaacgtttaaaggggggaaaaaaaaatggctacgggggttttaccaagcccccctaatgaaccgaattttgggcctgccaaaaccggtgaagggcgcccccttccaaaggacacaaacagaggggccccgggggccgtgggcaaaaaaccacaaaa

SEQ ID NO: 74427 - DNA, 440 bp, Glycine max
  Clone ID: jC-gmfl02220104g05d1
agggggaactgggcaaaaaaaaaaaaagggagggggggcccccttagccccccccccgaaaaaaggaaaaagcccccggcctttataaatacccccccccctcaaatttatgagggaacaattttgggcccccccccggggggcccctttttatacccccaaaaaaaaactccttcactggggggggggggggggttaaggcattccctggcaaatccccaaaccaccgggggccttggggggggggcccccccccccagggcccccttggggaaaaaaaccccccccccccattgggggcccccggaacaatttttttccatctccccccccaaagtccacctccccccggggtaaaaaaaccaccaaaatggggccccccaatttgggaacccccggggggggggcctcccacccacaaaaaaaggggggggcccccc

SEQ ID NO: 74428 - DNA, 327 bp, Glycine max
  Clone ID: jC-gmfl02220104g06d1
actgaaaaaccgccgaaggcatttcccattgaaaatatatctgtccaacatattaacatgatatactggtaaatcttggcaaccccagtaaaagctttcaaatagcttctaacctaaaaatgtaatacagtttgtttcctccccaacccccccaaaaaaaaaagaaaaaaaaacttgtcaaccaaatccgaatccttcatttgcttcatgaatggcaagcaggaacctttcttccaaatgttgtttagatggatactctggcaaatctaattgattgaaacaggtatgagcagaaggcaagtgatcagaactcccatatgccttatg

SEQ ID NO: 74429 - DNA, 484 bp, Glycine max
  Clone ID: jC-gmfl02220104g07d1
aacacgaaaggacaacacacacaaactttcctcattcaacaaattgcaacatccactgcaacatgtaacactcttacaaagcatttccttcacgaagattagaaaagaaaaaaaaaaatacttgcaagctcagaaaaacaaaactcaatatatttcaagactaaaaaatcggtaatgattttcaagcaatattgtggtatggtttaataataatagtataatctatatatatgaaggcaaacattatgcagcttgcttgagcttctttgtgatgccggcaatgtacttgccttggtggaatgcttgctgtaactcgagctcacttggctgtcttgagccgtcaccggcataagttccggcaccatatggacttccacctttcactttctccatctcgaacatgccagcaccaaacgtgtaaccgattggaatgaatatcatcccatgatgaaccagttgagtgatagcagtgagcgctgtagtc

SEQ ID NO: 74430 - DNA, 348 bp, Glycine max
  Clone ID: jC-gmfl02220104g08d1
agagagatatcttagaccttatctcctttatttatattatagccgatctaagatatgctcgcttgtgacaggaagagatggcaagttaaacaggaataagtgaataacattccatctcccatgcaattagtcgacccctttggaccgtttggcccacacaagctctccacagaaaatttaacaaagatcgaaagcagatctatcaactcatctatttcaaaacgtatatcatacataatggcaggacctgtaatgattctaccaccaagatacttagcggctaccatgtaaacaaaaatcggagtgaaaacagaaaaactatccctttgtagagtgcatgctacagat

SEQ ID NO: 74431 - DNA, 491 bp, Glycine max
  Clone ID: jC-gmfl02220104g09d1
gaaaagttccaagatccaatcatatattagcaattcaatgttaaggtttaggcacctatatacatttctgtttgttacatcaaaagaattctacaaacaatgtcacttctctacaaacctaagatacacagcttacaattttacacactcctatgtacaaatgtgtgtatttattattattattattattattattacgcatgtacgtagcaaatatatcacaggttatcagtcaaatgtttataccaaggtccatgaacactaactgaaatagtggctgccacaatcaaaacaccagcagtttccactaccttatcagtcagaataccagccccaactttcatgagagccatttctgctaatttcctcccacggatcccactttcaccaagcacaacgccgcgcaaagctgaatagacagcattaaacaccctctcgaaaacaacatccccagcttgtaagctctttcctagcatactagcagcaactac

SEQ ID NO: 74432 - DNA, 522 bp, Glycine max
  unsure (1)..(522): unsure at all n locations
  Clone ID: jC-gmfl02220104g10d1
gtacatgcatgggaaaataagttaaattacaaatggcaaaaattggcacgaatttcactcgaccttccaggctcccaactgtcataattacattgcaagaccagagaagtatgacacacgaccttaatgagatattccatgtattgctctgaaaactcagtagctgaagatcgttctgaatttcttcccttgaggcaccggctggtttcttcaagtataacaattgaagcagagtcatattgttaaacccctgctgcagcttttgcttgagagcccgacttaccctcagacgattcactctttcgtatcttcctagtaggtgtcctcatggtaacaaattcctcagctgcacttgggtgaatgcctacagtggcatcaaagtcagccttggtcaagcgagctttaagagcaactgcaaacccctgcacaatttcaggagcatcttctccacacatnatgcaacctagaacttcatttgttttgcacagactactaatttcataaaaacccggtctggaagcc

SEQ ID NO: 74433 - DNA, 564 bp, Glycine max
  Clone ID: jC-gmfl02220104h02d1
caccaactatcggttaatattaattgtgggaagcagaaaagaaacaagtccacaataaagccaaacattacagcgaggtcccaaaattcgagaaaccatcacaggccacaaatgcaaaccaattcaattcatttaaattcaaagctgcgaagaagtcctatgcataacaaaagcaggaaacaaccccaactgtctactactctctgtcttcatcactgcaggaggtaagtagatgaagaagcattcattcaacaatgccgcatcatcatcatcatcatcatgtgtaaatgctcacaatttcggttggaagagcaattagaacaatggccaaagccatcacaatcgcataggtaacggtactactgggttgaaccatgcttccatacgatgcgttttggctctggggggtcgtagtttgtgagtttgaggttgcaggtgcagaaggagttgtcttcgaagaatttgatgtgaagatagcagcatcaggggaacttggagatagacccaaaagcttaggacagttggtgatgctggcgtttttgacgttcaaacagaagggagctg

SEQ ID NO: 74434 - DNA, 445 bp, Glycine max
  Clone ID: jC-gmfl02220104h03d1
gtaatctaccccatttattgaagatgattattatttcttcaaacaaattcaagtaaagaaaggcaaaagaaggaaatatcaataaaattaaaaagaaaaaaaaagaactacaaaatcttataaaccatgtgtccaatcaaagatgtttgcccagggaagattaatgcctgtagaatgctgtattcattttctgtatgcttcatttccaagataataacttctgtaatttccttatgtatctctgttgaatattcacaaaaaaaactgtttcgagccaccgactctgaatatgcagaaccatgaacaatgaccacccattcatttatactaacacaagctttaaattaatgtcacagattatactgtgaacactattacaatatgtagatatctgaatgaagtgttgtcaagtcctctaaggtgtgggatcgaaaataccaacata

SEQ ID NO: 74435 - DNA, 509 bp, Glycine max
  Clone ID: jC-gmfl02220104h05d1
aagatacactaactatccaacccaagtacattttattttgactatatcaggatacaaaaacaaacttcctgcaagaagtgaaaaagttgataacaacagaaaaaagaaagaggtccacatccagagaaggggaaggaaaacccaaggctgcataggcaaacaatatacccaaagtgcttaaaacacccaccaaaagatgtgtcaaggcctgaagccaacactagggcaatgtttaaaaactgggaggaaaaataacttgagctaagaaactcaggttacatccatcctcccaatgactacaatgagccagaggagagcttcccccattcatcttggaaggagtgtagtgaaaattaaaaagaaaggtgctgatatttttcggtgccgttgacttgagttaaaccaacaattttatttgcatagtatacttgtgattcttttctttcactggtcccttttcacaaataatatctgtgagttaggatgatgctgatgaagattattcttca

SEQ ID NO: 74436 - DNA, 535 bp, Glycine max
  Clone ID: jC-gmfl02220104h06d1
aaaagcagaaaatttacatcttcattactgccataaaagcatatggcggagattcatgtttttccatggacttgttatcatttccttatccatgaacttgttatatatagaatagaaatttatctattgttgttgtttggtcgcagcaatatggctaaaatttcagagaagtgaggacgttttgaaggggtgttgttccagcactttgtcataatgtgttttagagtttgttggcagtcttttgggatttcaggtcgaaggccacatgcagcaatgccaactgctgcttgtacaggtgaaaatgaagaataagctgcttcaccagttaccatctcccaaattaccatcccaaaactataaacgttactcatccatgtctctgtcacattctctggatcccctgcaattatctgttcccagcccaacaaaaaatgagagtaaaaccagtcagcatgggggcattgaaaacaatgtgtactaaaaaaatgtcatatttgaattaaataaatactatatgcatcaacaatgtaaaaga

SEQ ID NO: 74437 - DNA, 371 bp, Glycine max
  Clone ID: jC-gmfl02220104h08d1
agaaaggagaaaataattgattacaagttcacaagtaaatgacatgtatgaaatagaccatcttagtatttggaaaaccaacataaaatgcatataggcgacaatgccaatcacaacccatgcccctaacttgacaagcctctgactctgtcatttaagtttcaggcaaaacatattgttacagtatctacataaaggccttattcatatgaataaaacagaaaaggaaaatgaaatatcaacaaatgagaatgctagtttcattagcctctccaattgactttctgcttccttatctctcctaatgcttcaacaggtgacttgcagcccaccctctgctggatctcaggtagatcaaccctcataaaggg

SEQ ID NO: 74438 - DNA, 466 bp, Glycine max
  Clone ID: jC-gmfl02220104h09d1
attgaagaaacattatatatatgataattattttaccatagtcacgttgaagtatttattcacaggagaatacaattactagacacctccttttttaatggggatggcttgcttctctacataggaaaaatagtaaaagaaaattgataaggaaaaaggccattattgttgctcattctaggctgcacaagtaggagcttttcctgttattgtgggcttgacattagcacatttagctgttgctgcacttccgttgaatgtcagatcaatatcagccatctctacagcctcacatggtacaccactactacaaacaagaaccaccccttctttagttcctgaagtgcccttaatgttcttgaaggaaaccttgcttatcttgattcttgacggattctgtttggagcattggttccaaggacaatactcttggtctatgatgatagggttcataacattattcatg

SEQ ID NO: 74439 - DNA, 437 bp, Glycine max
  Clone ID: jC-gmfl02220104h11d1
cctcaaatataagagtgagcatgaatgatgaatctatagaactcaatattaaatgaattttctaacgtaccctgtggcaatggcaaaattacaagaagattatctagttccatttcaatttttgatcctatgagcacccagaaaatataaaactcatttattgcaacaataaggataccccacattctgctgttctatggatagtacttgtctttcacatatcaacagatcataaactacacagatacattctgtcatttacctggtttatatttcttatggtcctcgcatcttctcaacaatgtgcctgctcttttcttcaatgtgacgccttttctcttccaatttctcgctcatcttctttcccagatcaagcatccttttccttctccccattttctttggcagtccatcctcatgttcacagaatgattttg

SEQ ID NO: 74440 - DNA, 348 bp, Glycine max
  Clone ID: jC-gmfl02220104h12d1
agatgcaagtatttatacgagttgtcgatattataaatgtataatgcagatacaaggggaatgcatccaagattagagcataaaatttgaaacttctcaagggagaaatctggctgtacaggacaatgattcaagttgtctccctagtgtacattattttgcttacaagccaagagcaccaaggggtgtcttgccctggccagcctcaaagtagaaaatcagcatagccaacatagcaatcctagcatgcttaatctcagccaatttcagtctctctagcttgtcggcatccggaatgtaaacgccatccttgatagctccagcaaatcccaaagggtcaaagaattt

SEQ ID NO: 74441 - DNA, 431 bp, Glycine max
  Clone ID: jC-gmfl02220106a01d1
aaccacataatcaaacctgctgaagaatatatagagtagtatacatccacgatggagctcaacaaaatacaatgcataaatagttaacagtttctgatatgccttctttcttggaaaacttttgaataatgataagcctattgaaagaatagggtacatttaaatatggaagaaactattgagaaaattgataatctaatatcaaaagaagtgtatgccagctttgttaaacagagaaagcaggtataggaattcctgcaatgtgagcttggatgaccttttctttttaaaatctccctttttcagaacacccaaaaccttgtccttgaattcagattgcacctcatctgcttgcccatcctcaacttccatttgatcataatctgctgcatcatcattcatgtccataccttgatcatcaccaaaactag

SEQ ID NO: 74442 - DNA, 431 bp, Glycine max
  Clone ID: jC-gmfl02220106a02d1
accaacttgttcaacaactaattttgtattttgaaagaaattacaattcaaattcatcttcaagcttcaaggcctctgcggcagcctcttcctcttcgtcatcgatgacaaaatacggattgtgagcctctggcttgaacttgtagccagtaaagaaatagaaagcaagggtggccaactcagcagcaaccacactggtccaagaataacgataggaggtaatagtctccaaggcataaacgacaaccctggtgaagtaaatgtaacagataacgacgacatagtagtgcctgaagagagtaagcttcatcaaattaacagcggccttgccgtcggtcctagcggcctcacggaggttcttgatggaccagacaatggggaaaagcacagcgcagcaacagacgacgtcaacaaggaggaagacctgtttc

SEQ ID NO: 74443 - DNA, 518 bp, Glycine max
  Clone ID: jC-gmfl02220106a03d1
ggaacaagggcagaagatttattaaagccgcgtaagagacaacaagtaggtacgtggagtgtcttaggtgacttacccacataacataaagtgacattaacaaacatagctaatgctcctatttgaatagtgcatatcagcataccttattacatatagataggagcaaactctagctagattgttgagagaggtgaaggtactactcaatgtagtacatgggattaggaagcttaaaggtcctgctttcgcctctgtggtctccaagcagatcgctccattggtctccaatgattccaacaattctgtatccctgcctcaacagattctctctcattgctgatttgtatgaaagtgcatttggagtgataagatgtggatccttgagaattaactgctcccatgtgtggaagccagccttctttaggtttgcttttgttacggccattttgtcaagatatcttcctgacaagaatacaatcttgaagccaagagacaacagcttgttgtaattttta

SEQ ID NO: 74444 - DNA, 454 bp, Glycine max
  Clone ID: jC-gmfl02220106a09d1
ggtatgcaattttcaaaattgcatatggagttattatatcaaatacgtgattgttacatgcaacaatcaacttagatacatctagtgatcactcacacccaacaacaaagactatgaagtgtctgaagaaatagaaactaatacaataaatggctcgcatatgtgaagccctacagtcacactcgatttctcttattctgatagtaagtgcttcactgctgcctcagtatcccgctgcagaaatgagcaaatctgtccatggcttgttcagaacctgatgcttgcacagttagtggagcggctgatcttgtaagggacattgaccttgcagaaaccagggagtgcctgagcatactggtcattgatgttgtacctagcagcatccgccttgagacagttgcacacagtttgtttgtcaacggtggtgacagcagagccatgattgttcttgact

SEQ ID NO: 74445 - DNA, 508 bp, Glycine max
  Clone ID: jC-gmfl02220106a10d1
gcgaaccaaatcaaacagtatgatatataaagtcataataaaatgcttatgtgaaatgtacccacacgatacatctatttaggccaacaagctcacactttattaattaggaactacttccctgctcaagaaggttttgtgtgttggggttcttgccccaagctctctccctccatattacttccacttcatcaaaggtcaatcctttggtctctggaacataaacaagcacatattcaaatgctaccacagctatgacaccaataatcagaaaagttgaaccaatccctataccctccgcaattgaaagaaaggtctctgagacaatcaaatttgagacccaacacacagtagctgacatgcccccacagataccttgatattcttccggatatatctctgaactcagagtccatggcacaagccccattcctggcgagaaaaaaccaatatacaaggcttagcctacaactgcaagccatccatacaactcatttgacgtggatga

SEQ ID NO: 74446 - DNA, 373 bp, Glycine max
  Clone ID: jC-gmfl02220106a12d1
ccggaaaaaaaagggccttctcttaaactatgggcttcaaatttgtcgaaaccggaaaaacaaccttgaccccctctggaaccattaagtgaaaggcccctgcgtggggtgaaaaacaaaaacaaaactgtggtacaaatctactcttggcccaacccttaaattaattttggttcccctttcccagttccccccaactggaagaaaggccaacattttttaactaacataatgcattaccccaaaatatttcaaaacctttcttccccccaggagggaatgcctcctccctccccaggtccacacccccaaacacctgttatcatccctttcccaaaggcaattgcgcccatcccctttccttattggggat

SEQ ID NO: 74447 - DNA, 481 bp, Glycine max
  unsure (1)..(481): unsure at all n locations
  Clone ID: jC-gmfl02220106b01d1
attataaaattgtattctttattttactgtatacgtgcttttcggatgaattcaaacatgatagatgacacataagtttgacttgacatatacattattgatgaacataaaaataaacagacactttgaatattgtgactaacttactagcatataaattcataaaaataaccaattttgctgagatcgacaagtaacttcttcttttcacatacgtgtctgaaaaatattactacttctctttgcctgaagagtgttgttttttcagttgttcaaataaacttccatcgtaaacacctcggattgtttctttctgcagtaatccactcttatctttagcaagtttgtaaagaattttccattcaaccacactaccaatccttcctgagaaatctttaggctctctatttgcctttatcatctncgttaactcatcatatgtcaaaagcatttggatgtgtatgtgcatgcttgttaaaaa

SEQ ID NO: 74448 - DNA, 386 bp, Glycine max
  Clone ID: jC-gmfl02220106b02d1
aataaaaaaaggacaacaacggattacaccttcaaacttggtcacttaaacaaaaatttaaaaatgaaaaagaaagaaaaaattccaaatctttgggtttttgttggcttttatactaggcggggcaacctacaggggggccacccacttacgttacgagtcacgagccgtattgatcaaaacgacatgatcgattcgaggctctttataacggttttatttgagtcaccacaatggggcttcgaaccacgtgctttccattcgttcacgttagggacccgaacaccgccccggacggacccattttcagctttcgggtgtcccccgccaccgtcaccacatagtttcgcttttttaccgccttcaaaacacgagcctcgacgggt

SEQ ID NO: 74449 - DNA, 367 bp, Glycine max
  Clone ID: jC-gmfl02220106b10d1
aaatgtgaattcttagctttcaaagccaataaaattgtcacaattcatgacatttattgactgatcaaggaggagtaggtcataataattttgattcttctcttgctgccactggcttggtgattacatatacgtactcgatgacatcaaatgctcaattattgattccctcattggcacgtaataaagtcgaaaagtactggttcttcttggaagaaacaatgtaccttgtgtttggagcaatggctctaggctggacgatgtggtggttaagcacacagtccaactccttctgatacctctccatggctccagttggctcacataccggtgttacctacccttcctctcctttagcattcttaaa

SEQ ID NO: 74450 - DNA, 531 bp, Glycine max
  Clone ID: jC-gmfl02220106c02d1
caatccaatgtgccacacgccacgtgcttttttatccatcagacaactttataatataatattcttccaacgtgataacaagaaccccactgttcagattaccataacatctactttaacctaatgaatgcttctcgatgacttgaccttggataatccgcaacttggtaatataattaccctaatacgtgaactttgagagcagcaagcaattttttcgttatacatgatatgaaaaatactagtagaactatattaaacaagatcgaaaatgtaaaaagaaaatgaatggcatacgaacctaatttgatacataaaaaatttcatatgagaaaaaaagccagtttgggcataattaagcataatcaggcatggtttccttcaaaaatgtaattggacgagaatcttcaggggcaagttcgtcgaaggcaacataattttgctccttgtcgtacacatgacacactgtcatgattgtcttcatcaatctccaattccaactagcctcattcagatactgtccccagtttt

SEQ ID NO: 74451 - DNA, 271 bp, Glycine max
  Clone ID: jC-gmfl02220106c03d1
agctctcatccattaattttcattgaagtccgaaaacagaaaccaaaaatacaggatgatgaaatcttaaaaagcaaaaacaaatgggaatgtagtttaagtgcaaacaaacaaagtggggtggcggttacaaatgctttgcaaatttttcacacttaaaagcctgggggcttgtaggccataaaactgaagcactgcacttggcagaacgttgacaaatccgatgatacggatgaaaccgatggggtgtgcaatcttagcctgttgaagc

SEQ ID NO: 74452 - DNA, 482 bp, Glycine max
  Clone ID: jC-gmfl02220106c12d1
gaaggaaaaagtttcatctatatactggtgttaatgtgtacatggtacaactcaaaaaacacttattccctgcattctattcccaaatctttaacgagtctatcctaggatttcatcacatttcactctcctttctggccgccaaatcagcttgatgattaatttggtttccgaaatcatttgtacaaatatatcacacctccattcctcgtgcatggttcccagcgccacattgcaaacaggttcttccaaccccaacccacaactcaaccaccaacatttacaatccctggtccatgtattcaagcaacgccctcaaaggatgcccatgatgctaacattttttttatccgcctaccaacatgatcatgtttgatcattagtcacaaaccccctgactgttatgattgcccgttgtctgcttcataatcactccctgaggaacttcccgaatccgtatcacttgacgatgaggaatcact

SEQ ID NO: 74453 - DNA, 483 bp, Glycine max
  Clone ID: jC-gmfl02220106d02d1
agttcaatattgccattcagtttaggtacgtaacaggagcagcgaagcataaaagcaatgcatccaaattaaaaccacatcggtactggtacacatctgaacatcaaacacaacagaaaacagaccacaagaacaagaatctgaagtagattctagtagtcttcatcctcttcctggccctcaccagactcagcacccacttcttcataatccttctcaagggctgcaaggtcctcacgggcttcagaaaattcaccttcttccataccctcacccacgtaccagtggacaaaagcacgcttggcatacatgagatcaaacttgtgatcaatgcggccaaacacttcagccacactggtggagtttgaaatcatgcaaactgccctctgcaccttggcaaggtcgccttcaggaacaacggtaggtggctggtagttaataccacacttgaaaccagtagggcaccaatccacaaactgaatg

SEQ ID NO: 74454 - DNA, 492 bp, Glycine max
  Clone ID: jC-gmfl02220106d03d1
gtgaaacgatattgatatttaaaataaaaacataaacaacatactttcgctgaaacgagttcaatacatcattttaaaacataataaacagcagcacttaaaccagagatgcaaagcacaagttcaagggagacactgaacaaacagataagacatatgagaacacttcataaaagggattccccttagcaaccaccacgaaggcgaaggacaagatgcaaagtggattccttctgaatattgtaatctgccaaggtacgaccatcttccaattgcttcccagcaaaaatgagcctctgctgatctggagggataccttccttgtcctgaatcttagctttcacattgtcaatagtatcagagctttccacctccaaggtaatggtcttccctgtcagagtcttcacaaatatctgcatacctccacgaagcctcaacaccaaatgcagagtggactccttctggatattataatcagcaagagtacgacca

SEQ ID NO: 74455 - DNA, 372 bp, Glycine max
  Clone ID: jC-gmfl02220106d08a1
ccttcgtcagctaggaatgctgctggggcgttgatctctatagacgtttccataaatactcggaacctggcatggaccaggcatcactgtatgactatcacagtcgaataccgggcttacttactaatccagctgccaagctcactagagccttccaaaccgtgttggagtcattatgcaaactcaaccagcacaatatgccgagaacactcatgacgacgcctacatacaagatctctgctacgactttgttcacaatagcgacacagtccacatcgttgccgacgaatacctacccctcagacacttacaagcacagctgagtaccagaagctcggcttctacgccctgataggactggccgccacctac

SEQ ID NO: 74456 - DNA, 359 bp, Glycine max
  Clone ID: jC-gmfl02220106e01d1
aaaaaaaacacacttgtaaatccattatttagaacatatagttcactgtattagcataaactttatgtactcaataatggatgtacaagtgaacttttttagaccgacatacagtagttgctatgatcatgcatgcatgaccagaacacactgaaattctcacagcacttgcaagggggaataatccaagtattaatttgtgccgcacctggacacatattgtcatatatataacagacagtggtactaacctccaaatacaaagtaataattatagttaaagcacgaacaatccaatcgcttgtctaagaaggcgaatgaagaaaactatattgggtgtgatgagctgcgggcaatta

SEQ ID NO: 74457 - DNA, 422 bp, Glycine max
  Clone ID: jC-gmfl02220106e02d1
gaatcctacatattctttctgtaattagattgaatcaggtcagatacaagattgttaaacctagttcacgagccgactcaatcagatatatacaaattcaacccaatcaaaccttttgttttttcccttgaatcagggagttgcttcggtaatatataccttgatcaccactactttgtattatcatttcttattattctgctagccgtggcaaaggttcccagactgaaatactttgacaacatccagcatataaaggctaggcatataaatgtgtccatgaactgaaatagataccctaacgaaaggtagctactgccctatttctcattattattctatttcattcccaagatgatagttggtcattttcattcaccaactccatccccaaaaggaataaaaataataaataaaataaa

SEQ ID NO: 74458 - DNA, 489 bp, Glycine max
  Clone ID: jC-gmfl02220106f01d1
gcatgacaagactaagtttatttagcaagtaccaaaccatacagtattattatcagttaattaatacaaacaagcataggaaggttgatggtatggaggttttctgcagttgatgaatcctgcccataaaaaagatctcgataccttaaatatcaaaacaaaagcgcaattataacaccctttcacttcagctgcgactttatatctggttgaattcgtttttggacaagatcagaacttgttgataaaatcgtatatgtaattatcgatttcctctgctgcttcttgattattgaagtgagccactcctttctgcacaatcacttgttctaaatttggcacatcttgcttgaaccctccgccgtggatatactccttcaagttcagcgagttgtataccatgtccaactcacctgttatgtattttacgggcaccttgatttgcccttctgtccatggtgccgtcaacttccaatttaagttgaaatt

SEQ ID NO: 74459 - DNA, 444 bp, Glycine max
  Clone ID: jC-gmfl02220106f02d1
gcttcgaaacaatctattctgtaattatttatcgattgaatatacattgaaaaatgttgcatgcaaaaaaaccagattgcttcatgtcaacatgaccacctcatgaaaatttatcatactaagctcaattcatctttagtatttgatatttttaagtcgtctttaaactcagcgtcgagcttcttccgcaatgccactaattcttcccctgcatcgcagatataggccgaagcttgtctgccagacaaggttgcaccttccatgctgtctatgtagtcctgctttgtgtaagagccagcaagaaagaaattcctcactggtgtcttttgatcaggtctatatgggatctttaccaggaccctcacggtacagagattggccaattttaacaacagaagacctagtcacttccaaaccttgagatgatgggaacagtgccaaaac

SEQ ID NO: 74460 - DNA, 473 bp, Glycine max
  Clone ID: jC-gmfl02220106f10d1
ctcggaatccaaagactttttactttttgcctgtttggcaaaaaaaaaaaggggcgcgggatattgtttaattttaattttccaaccctatgatttttcactttctctaggtaacattaaaattttttaacaatgggtttccaaatttgaaatttccaaagaattttaaattaaagagagtaaaaagttgagttaacttgttaacaccaagcatatgcgacggggagagttcttcccatccagccaaagcaattcccaccgtttttttcttttaccgggacttggttcccagcgccaccgtgtcgcgctttgatcgaatcaacgactcgctgactcaggggttttaacctgaacccagccatgcttttacgcgcgcgccatttcccaaacacctggcaccgttccacgcggtcccttcctttgcacgccaccgagttcaccaccttccgactcagtccctcctcgatcctgac

SEQ ID NO: 74461 - DNA, 431 bp, Glycine max
  Clone ID: jC-gmfl02220106f11d1
ctgcttcggctatgtttgactgctaaaatcgacaggaagaaaaactatgattgtcaccggctatttctgaaaatttggctttgaagtttaggattaggaagtgctatcataaacattctgattcaacagaaacacaggcttttctctgggacctaattgttattatatcgggcctcaacacagataccattttatttatctacaacttccattttcctcttcattccatagggctattacaatttttcccccttttggttgcatgggctttgcgtcaaataacatctgtgtgggactctcacataaggcttatgtagccccaccttgctttggacaggactggatcccgctaaccatatttgctgggacaggtatgacaatcattttaggatacgacaggtttagatttcccatgaggttcttggaagttt

SEQ ID NO: 74462 - DNA, 475 bp, Glycine max
  Clone ID: jC-gmfl02220106g09d1
ataaagcactactataaattttattttacatatataagttcttcaaaaacattataagatgtttatgcttttaacagcactagaagttataaatatccttaactgtcagtgattggcacacttggcacatagcttctaagggatatttttttgacacagtaagtccctttccttcagtcatatcaatttcttttttagtagtccttttccactcaaaacattggattaataaggccagagttatgctcagtgtgcgttgagccatgtttgctccagggcaagccctcctccctatcccaaatggaagtaacttgtttgcttcactttcattctctaacctctcaggcttaaagtgtgttgggtcactccacaacttgggatctctatgaatggcccaagcattctccaacaatattgtgttctgtgggatattatattctcctatggcgcaatcttctgaagacaatatggggtc

SEQ ID NO: 74463 - DNA, 385 bp, Glycine max
  Clone ID: jC-gmfl02220106g10d1
acaccatattcctcttattccttttggcgcaacaccattcttaaaagcgggcaacgaaattttagaccaaatttacacaacgactgagattcataggaatttctggcggtgacataatttggaaagaaaagaaaaaacagattcaaaggatcatgagaaggccaaccatcccacagatttatccacattcaggggaagcttaagtgccacaaccttttttagagaaacaatgaaaattttgtcctcctcataaagctggtgcagcccgggccagttagacatctggggcagtgggatcaaatgatggggggagcccgccctctttcaaggcatgctccaaatagaaactgaatttctcgttagcgtttggaatgtccagagcgag

SEQ ID NO: 74464 - DNA, 336 bp, Glycine max
  Clone ID: jC-gmfl02220106g11d1
atcacgaggatctttttctctgattacatattgttttcctgcactccggtccaagtgggctgggaacattttgtggggttgacacgtgcacatccctgtctgctattaagatcctcaccacgatgttgtgtccacacctaattattactgccggaccattaatcttcacgtgatctgggaacgttaatagcagcttagtcctgggccaccggtcttttgatagggacgtggctacatcgcctcagactttactgtttctggaggcccctttaggcttgttcatgaccgaaaggaattcgttcttgagcctggaatgcaacttgttttatggtgggt

SEQ ID NO: 74465 - DNA, 476 bp, Glycine max
  Clone ID: jC-gmfl02220106h09d1
gcatgaacaaatttattttctggggggaaaaaatttaacattcacctctacattacttctgactattcttgttaggaacatgtagataaataatagaaacagagagggtacattcccatctatttaaggggttgaatcctccaaacaacttcaataggctgaaaattcttggtatattcacgacatcaaccttgtgtatctccaagcataagggaattacagcactaaatgaatcatacatgagaactaacagttgatgccacattgaccattggttaatttgttggagtctgaggtgaagggatcaatcctcacccacagcaaggagactattgaagcaagaagaacggtccatacaataacattggttggggtacgactttgcctgcccaagagacccttcaagaatgggtatagatgggcaatgacccagattgcataaaacatctcgccaaatagtggaccccaacactggc

SEQ ID NO: 74466 - DNA, 415 bp, Glycine max
  Clone ID: jC-gmfl02220106h10d1
aaaatagcaataatctgcagcattgaacatgcaaccaaacaaatattgaagaccgtctattgaaaactccatatgttgggaagaaattggctctgaagaaggtgcccaaatagtctaacaaacaaactatcagataaaagaaaaacaatactgaaaaacttgcaatcaaatatattatccctaacatcgttctctttaagccttatcagccttggcagcagttgcagcagcttgtcctctaagacgaccagtcctcctagcagcaatgagaccaacctcttgtgcaggaggagcatcacgcctgacagtacttgcgtgaccaatatgctggtgattacctcctccgtggggatgctcaacagggttcattgcaactccacgaaccttgggccagcaattcctcttcactctgaac

SEQ ID NO: 74467 - DNA, 459 bp, Glycine max
  Clone ID: jC-gmfl02220106h12d1
gctcacttggctggagccgaccttctgattgttgcgagaaatggtgcaaatgtactactccattctacgagctgggtccgcaaaaaaacaagttgcatctggagacggtgctcccactcggctggtacgcctgggttgctcaccgagcgctacccgctcagatggaaaacccttccccccgtggtgcaccgggtggatgcgtttcgggctttgccacgggacgtggccctgccccgggtctcaccgctctgagctggcgaacctgactatgatggcttgtagcgtctcctgccgtggtgatgcggttatttagccgagcagtcattcgtggcgcgatgttgagtccgtgactggtttctcatattgatgatacctccattgacgaacggcctaactcagagacaacatccaaaactgcatgctgtctacttgtactgatatgtgggtatggctgcgtag

SEQ ID NO: 74468 - DNA, 473 bp, Glycine max
  Clone ID: jC-gmfl02220108a04d1
acatagaaatgacctccctttatttcttattctaataagatacacaccagaaaaagcacaaggggcaccagacggtgatacacggtaaatataggtagtactatagtagtggaactacgaactacaaagcttttatttagtgacacaaccaaattttgcccttgctatataaagtgttcagaaattaaaaagcattcaacattacatcatatatatgtaggatcgttattcataagctccatatgcattacatcagcaacggtggtgttggtggtgtggaggccctggagggggaggtcccggtggcccacgaggcggaggagttggatgagcatacggtggcccgggtgggccatggtgttgatgaaagcctggttcgggtgggccgggatggtggtgtggaggcccaataggcggaagagttggataagcatgcggtgggccgggtgggccctggtggtggtgtggaggcc

SEQ ID NO: 74469 - DNA, 525 bp, Glycine max
  unsure (1)..(525): unsure at all n locations
  Clone ID: jC-gmfl02220108b01d1
aaaaattactcgagcttctatcagaacctaataaaaactataattaaaccggaaaaaaaaaaaccgtaatccgcatttatacatgaattggacgtgcgtgccaatcagaggctctcatataattacaattatattataattatgaacaaagtgaaaaataccctcaatagtctctcagtaaagttcaataccagccagatcactaattaaacatcaagaaaactatcactcaattacagtattgcaaatgcatgatctggcccgaatatatatgggggactaaaaattgcaaggtggtcctcaagtggaagcgaagtgatgaactacattttgctcttaacaaaacattacaattacttccacgctcaactgcactggctgccaataaatttctatgaaaaggaatagtacattctacagcacaatcctatgcaaaaggatttncccggatcgaatcaactgattccggtttctggatgttctgtatttgcgtacttggtgattgcatagccatgaatgacaaac

SEQ ID NO: 74470 - DNA, 417 bp, Glycine max
  Clone ID: jC-gmfl02220108b03d1
accagcgacaataaaaaatttataaatcactaaaccacatttttttcatccataaaacacattagacaatcccctggaacaattgtaaatcccaagcgcaacgcgcccttgaaatcataaaattcattaataccataatcccactatgggaggccacattggatccatattatggggaatacatatccaatcaactaccacattggaactggcatcggctattcgcctgggtggtgcttaaatgtttccttgatctcatttccaacatcggccgggatgtctggtgtccccaaagccaaattgtcccgggaaagttgcctgaacaatggactatctttggatgacccttcccccaatggggcaagctcggaaattgcctcatcaaaagcccgcttgggaagattacaagcacgatct

SEQ ID NO: 74471 - DNA, 354 bp, Glycine max
  Clone ID: jC-gmfl02220108c01d1
ggggaaaagaaccgggccgggtttgcccttatttgaaaatcccccgaccccatggccccccccctcccggttcactgggtagttggaccctaaattcccggtctaaaaattaaaccaaaacccctgttccctagggatttacccccccctgttttaattcccggggatccatgttttttggaaaacgcccctttcacccacttttttttttggggggggaatgccaccttctaaaaaaccaccttggttatcttggggagggggcgctatgatttttgcgggcccccgcaccctacacccgccttggaatatgtgtgttcagccccctgggcccccccttttatttcaaggcca

SEQ ID NO: 74472 - DNA, 457 bp, Glycine max
  Clone ID: jC-gmfl02220108c02d1
gggaatctcttccacctctaaagaaaagaaagaaaaacttataaatgttcaacagaaactgtaataagaaaaaataatgaggccttaataataataataatcctttctaatttctgacaactgtacatcatgtcatataacccagtagttgtcatgacagatttccggtgttagtttcattcattactaccatgtcagcctctgcatcacccttgttctattcatctggcaaagatatgttgatgtctggagaagtcctctggtctgaatattcctcagaaccattccaagtagcagcagcatcaggagtagcatctaggttctgtttgtcacttgaaacactgatagattctctctggttttggtctggaatctgatagataggtataggtatcagaaagttctcaccatcagcagcatttgcttgtgagataggtattgctgctgtcactatttc

SEQ ID NO: 74473 - DNA, 486 bp, Glycine max
  Clone ID: jC-gmfl02220108d02d1
gacaaagaatgtaacacatttgtactttcaagcctgagaaggaaataacaagggaaatctctgaataagataaaagttgatgagaaaacaaactatccagaagaatttgatagtggtaactagatgatttgagcttgaggaggttcacatacttgtagagatgaagctttctcccttaatatttctcccgaaggacgtgcaacaggaagttgtgatttgtctacattcttctgatcatcaattgaaatttgttttaactttgattctatgtttgatagcctgcgatttctatgttctttgtctcggaacctgtcatcaacaacttcaatttttataggacttttggtcaggccggcattcctagaatacttttgcgtatatctaggacttctgctttcatcatataaaaatctgagattcttgtcatcactactagcaccagggcatgaatgaggacttatgatttcaaaacgaaaagaactcttt

SEQ ID NO: 74474 - DNA, 601 bp, Glycine max
  Clone ID: jC-gmfl02220108e02a1
tcctaagccaattctctattggttttcttctgattggttcaccattcaacgagggtccttggaaaatgtcaccttcacatctgatccagaaacttttgaacttggatttgattaccatgtggccaattcttcatctggtggcaatagaatccttggcaggccagtgaacaatagcaccataacatatctcaggcttggaattgatggcaacattaggttctacacttacttccttgatgtgcgtgatggtgtatggcaagtgacctacactctatttgatagagattctgatgagagtgagtgccaattgcctgagagatgtgggaaatttgggttgtgtgaagataaccaatgtgtggcttgtccattggaaaatggactacttggttggagcaacaattgcactgccaaggctgtgacatcatgcaaggctagtgatttccactactacaaaatcgaaggagttgagcattacatgagcaaatacactacaggggatagagtgagtgagagtacttgtggaaacaaatgcaccaaagaatgcaagtgtgtgggttatttctaccacaaggagaattcaaggtgttgggagcttatgatc

SEQ ID NO: 74475 - DNA, 304 bp, Glycine max
  Clone ID: jC-gmfl02220108e03d1
atataatgccttttttttaattttatatatatttggtttttatgtttttggcttttatcaggagggagaaaaggcctctcctttgtcagctaaaccccccctgggggagagtaaaaaaaaaaaagaaggggtttggttgccccccagctcaaaggcaaaggcgtaaaaaaaaagaaaaccccgggaaataatccatgagcgggaggcccccccggaggaagaaaatgtggctagcccccctaaaacacactgggcatccccggggggggaaaaaacccctgacagggagaaggtactgacaaaa

SEQ ID NO: 74476 - DNA, 385 bp, Glycine max
  Clone ID: jC-gmfl02220108f02d1
gggtcgtgaatatatttttcatggagtacaagtgagagcgactacactttatcctatagtaatggagcaacagagtgggttaccacatgtgaggaatttggtcgcaagtgacaaccctgatatcatgataattattgaggattttttaactctatatacaacaaaaaagaataacgatgaacgaattgcacaaagtaaaaagaatgaggggcgtctatgcggaaccgatacaacactcatcttccctccggggctgtgctatgaaaatgatttgtgtagggggaatgccaaaaccaaaatgatcaatcatataatcacacaaccaaaactgtataattggcttcatggttatggtccttgcttccggcacgaatttaccgggggg

SEQ ID NO: 74477 - DNA, 371 bp, Glycine max
  Clone ID: jC-gmfl02220108f03d1
aaaaaaaaatttccctgttgccttcatcattagaaacgaagatccaaactaaacatattcctacgggtacgggtcagcacatagaacaatcaggtatgtgcctattctcatctaaaaaggtattaaatcttatttggaaagaccaatccatcaaagggtttgtccaaaaaacctagcctacatatactttatacacaaaagcacaagttacatcacatcatagtatttccttgggggatatgaccaatgaccatcaactttgttctttataagggggccagaacagttgggtaacataaacctgcaggccccctttgccagcagctttaagagggcgacccaacacttttggatgtgggcatataacatgc

SEQ ID NO: 74478 - DNA, 51 bp, Glycine max
  Clone ID: jC-gmfl02220108f05a1
cgtgatccagtctatactactatagtagaccgaaatataatttcggggcga

SEQ ID NO: 74479 - DNA, 556 bp, Glycine max
  Clone ID: jC-gmfl02220108f09a1
ctcggggaattccaattccacattttcaagaaataaggaggcaaaaatgttcatatatgaattggaattatttgttttcttattaggcctatcctgaagccaaaggaaatgagatcggaattcctcggggaattccatttcacattttcaagaaataaggaggcaaaaatgttcatatatgaattggaattatttgttttcttattaggcctatcctgaagccaaaggaaatgagatcggaattcctcggggaattccaattccacattttcaagaaataaggaggcaaaaatgttcatatatgaattggaattatttgttttcttattaggcctatcctgaagccaaaggaaatgagatcggaattcctcggggaattccaattccacattttcaagaaataaggaggcaaaaatgttcatatatgaattggaattatttgttttcttattaggcctatcctgaagccaaaggaaatgagatcggaattcctcggggaattccaattccacattttcaagaaataaggagggcaaaatgttcatatatgaattgg

SEQ ID NO: 74480 - DNA, 351 bp, Glycine max
  Clone ID: jC-gmfl02220108g01d1
ctctctcatttttcttatagtcttcaatggttcctactgttattatggggaccccccaggcccctgggaaaaccctagaaacgaacttggttattggccccggaggatcgttcgggggttgcctacgcccacttcagtgttgagatcccagtgattaatgttgccggacccgacaacgtggatggacacaaaatagagatgcccgtgaagaacgaggaggcttgcgataatggggcgttattccaagaagctgatgacggagtggatcaacaactcgtggtctagatgacccgcctggcggagagttctttgctttggcaccgggcgagaagctttcacatgatatgggcg

SEQ ID NO: 74481 - DNA, 402 bp, Glycine max
  Clone ID: jC-gmfl02220108g02d1
aaataaatcatgtaatttttattaaaaatattatccggagacctccaaagataaatgcaaagaataacaaattgtcacacggactatgaccctcaacatgacaaacgctaacactcagttaatagagtgagcattgatggatatacggtttaatttcaagctttcatgaagttaagtgcatgaggaacatggagagccttcaaccagacagttccaccgttggaaccagcctggaggaattgggcaggggtgaactgagcagctatttgctggctaatgagaccggggaaacccttccacttgatccttccgttaacgttggcaccaggtccatcggtggtgaattcagcgtagtacagggtgtcatagaagtgttcaccggcccatgggcaccatccttcc

SEQ ID NO: 74482 - DNA, 464 bp, Glycine max
  Clone ID: jC-gmfl02220108g03d1
gattgaacatgttttgttagttattgtgactttgaaaagttgtcataagtacatgttctcatttataggaatacttttgacacaaaagatccttacattgtcacaccattagcctcgataccctttcttaggaaatacaatgggtaaaatatctagaagacccatttattagtcactaaacaaaaaaaaaaatatcaaagaggaattacgttacattgatttcaattccttgagatacaaaaatgtagctcactctaaaattaattaatgaaatcaaaataattaaagaataaagaagctcaatcattccttattaattaatttatatttcttgctttcacaactcatcacttttattaccaattaagccttgtctttttgtgcctatggtgtgcgggaatgtcacgaaagcaaggaatccccagtacttcaatcagtcagttccgtgaaaaacttagatgctg

SEQ ID NO: 74483 - DNA, 437 bp, Glycine max
  Clone ID: jC-gmfl02220108h01d1
aacttacataacaaaacattattatcatatataaaactgaaacaagagtccgattttctaatctgtactccaatgtgcgcgattagttgtttccacactctatgcacttaccacagtgctaactttatccccttcgcgcattaataatataaggaagcggatcaaaatgtgggaaccacttaatattatgagaaactagcatgatctcacaaggatgttatcacaatcctcgggatggaaactcctgcccattacacatttgggcaatgaaaatcacccgcatagaaggactatagcttattacaagatatgaacaaagacctgataaaatgcgaattacaagatacatatgccaactatgctttgctcattcggtatctcgcttggaactagattcagcattcttctccttcgtgccatcatactactattttagt

SEQ ID NO: 74484 - DNA, 378 bp, Glycine max
  Clone ID: jC-gmfl02220108h04a1
aaagaaaactactaagtgaataaaaatggccggatttatgaaaaatccagattcattgactgcctgcggtctaaagcgtatgaacagacaggtggcgacccaattgtcctgggctgacgtctggaggcatagaacaaccaattttttggcgaagagcatgggactgctctttctagggattattgggaattgtgaaggagcatatcacggtagggtcgtttatagctcatggcacctggaagaactctacacttttggccggctcaggaagaataaccttcaacatagggaatcgttacttccatttgagacgaatgaaacgaaggagcactacccaaatatggtcggggtttaaaactcggtgggcaagaatgccca

SEQ ID NO: 74485 - DNA, 521 bp, Glycine max
  Clone ID: jC-gmfl02220108h09a1
agcataacatttagtgttgatgggagaaacaccctcgagatcacaaaaaggacaattacaaatgttgcatcaagccgttacagcattcaaagttcttggtaacctataaaataaatgattaacaacatatattacacagaacttcctatctgaaacaagccaaaacagatagctatttttctttttcctctccttttgaaataacacctggtttttctatgataaaaaagaaatccaattgcaatcaattgcaataacaagcagctcatactaattttactaatgctctctaaatatcataactgagaactaaaaaggtggtgggatgctgatatgcaagattatttatcacctcacatatacatccattggacttttaccatatgaggctggttaataagataaactatagactccttttttgatctaagaatggatgaagtatccacaaaataagaatggccatgtaccaaccttttaggtcaagcatttatttctgaattgcattgatgcttcccgac

SEQ ID NO: 74486 - DNA, 494 bp, Glycine max
  Clone ID: jC-gmfl02220112a01d1
aaaggaatatggggcgatatattggagtctgcatgggcaaataaatgctcagtaaaattatgatacatgtacattcctcagcacactaaaacagatcagtggccaaaaaagaaaaaaccaaaaaccaatcagaaacagattggagaagataatatacattgataactgtgaatgatgagtggcatacgcaaagtaatcttgcaacatgtatgggactgagaactccctcattgtagtgtaagtcacaaaaaagccgcacaaacagggtggaactagaacgagatctcacaaggtgcatgaaatgttcttcctcgacatattggttccaggttttcaccagcatacgaacagagtggtgacacttcaacacctgttgcatataagggcactgaatgagctaagaagccacctgcagcaactacccaacgagtatggagtcgaagaacaagtagtttcgcactgtctggagtgtcaacattggaaccatttgcatt

SEQ ID NO: 74487 - DNA, 414 bp, Glycine max
  Clone ID: jC-gmfl02220112a07d1
aataaaaaaaaaggcaacgaaaaaccattcattaaactgattcacataataatcacaataacaatttataaatttccaacccaaattaaaaaaaaggcataaaaatttaaaaattattcattaaaaatcagaaaaagaaaaaggatcacccaaaaattcatctttccggttacaaattccccgggtttccacccacgcgcctagacccgttttgaagaaaagaccccacgcgagtgattaataattaattaatcaatcacctaaccgcgatcgagtggaaacgtcgtccttttgtgttatcccctttttgccccttctttttctaaaattggtctccgatttaggggtgtcaaactttgacaatctttggggcctttaagacggggttctttttcgcgatgggcttttttcccg

SEQ ID NO: 74488 - DNA, 516 bp, Glycine max
  Clone ID: jC-gmfl02220112a12d1
aaaatgaaataaagctggtcgataagaatcaagttgaagcaccataaaataaatttgggattgctcacaaattagtcgactatgcgttaagtttaaggtttaggattgcccagaaattcatttacatcctttctgttccatacttccaggtggtaatgtcactttcaaacaaaactggacacctataagaccttaaccttcctatgaaccaatgacttaattagatgctcaagcgaagtactcttctgggacataaaattttaaaccaatggcctctgcaaatttaatatcagcgacactgtgatctgattctctcccggctgcatcaccaacaaaaaaggatttatccatatcaatggcaatgccagagttgaagtgttgctccataagatgccacatccctggtttgggtttgcgaaaggatcatcttcctttttggttactttacctgatttactacctaccccacaagctataaaaacctgaactggaaccttcactttcacaataaaatta

SEQ ID NO: 74489 - DNA, 471 bp, Glycine max
  Clone ID: jC-gmfl02220112b01d1
agcataaatcttgagagaacatttttttttggttcatcatataaaatatatatgttctgaaagaacattttcaagtacacaaaaaaaagggggaaattcataaaaaaatacagaaaaaaaaaaacagaattgagtaagagggaaggaaacatagagaaaattttagcaatcagataataagaagccagtagtagtgcaaaagtcccttgccaagagtgttggaaccccttttagttaagcaggtacctttttccccttgagtggcttaaccactttccatgtgaagtcagggtcatctctgccaaagtgtccatatgcagcagtctttaagaacctgccattttcaccccttttgagatcaaggttgatggagatcatgccaggcctgaagtcaaaactcttctttacaatgctgaggatttccttgtcagggatctttccagtgccataagggtcaacaaacacagacaa

SEQ ID NO: 74490 - DNA, 509 bp, Glycine max
  Clone ID: jC-gmfl02220112b03d1
atccaaaaactagaatgattcgattctcgtttaccacgaacgcactactaactcaacacaataccacgacgctgaatatgtaaaaacaagtataggcatattacaaggcatgcccaaatagctacctatctattttttctttttggtttttctaaaatccaattaacacggttcaaaacaccgaaaactaaaaacataaccttattataatatataagaagcaactaaaacccttaatagtccaaattgaagcgccacagagaaacaaatctgagaattattattcatttcattcagagcgattggcgaacctctcaaccttgtcatcggtcaaattgataccaaccatggcttcacccaatccgcagctaacctccgccaaaatctcagggtcgctgtagtgagtcacggcctgaacaatcgccctggcgcgcttcgcgggatcgccgctcttgaaaacgccggagccgacgaagacgccgtcgcagccgagctgcatcatgagcgcg

SEQ ID NO: 74491 - DNA, 491 bp, Glycine max
  Clone ID: jC-gmfl02220112b08d1
ccttcaattctcctttattttttatttatccaaaataaaatctccacaacaaacaagcccatgtgaaattgatctcatatgattgtcacattgtttgccatgtggcctacatgcaagcctttacaccaacagcagaaagtagtactagaaagcagtatgaaagcatgaactccattcttaaaacctaaatggcctcatcttgatcaaatttcgaagccatcgagagagtattcaattcaattgcatacgatcccacacaatccaaggtccaagggcaaaagcaaaaccttctcaaacttaattgagtgggtcccattaggcttttaataatagaaacctaccgctatatatcaccataaattattaataacaacaacagggttaaatatgtaaattacaagatctatctaatctagcacttgttgggcgagactcccaccaaagagtttgctagatcgaagctgacacgtgtcccctgctgctgcacgttc

SEQ ID NO: 74492 - DNA, 491 bp, Glycine max
  Clone ID: jC-gmfl02220112b11d1
agaaattatatcttttttaaaaggaaataaagctggtcgataagaatcattgttgaagcaccattgaataaatttgggattggtcacaaattacccgactatgcgttaagtttagggtttaggatagcccagacattcatttacattctttctgttccatacttgcagctggaaatgtcactttcaaacaaaactggacacctatgagaccttaacctttctatgaaccaatgacttaattctacgcttaagcgacttgctcttttgggacataaaattttaaaccaatggcctctgcaaatttaatatcagcgacactgcgatctgattctctcccggctgtatgaccaacaaataaggatttatccatatcaatggcaatgccagagttgaaatgttgcttcataagatgccacatccctggtttgggattgcgaaaggatcatcttcctttgtgattactttacctgatttactacctacccccaagc

SEQ ID NO: 74493 - DNA, 368 bp, Glycine max
  Clone ID: jC-gmfl02220112b12d1
gtaagtacaaacttgagttttataccaggtatatagctctagatataaatacacatattatccataagagggacggcctagtaatagatacattatacatgcgtaaaactaagggaaaaaacgagggctacagtttcatactaagtttccacccaaagtaaagggcttagtctacaatgagtgacagactaatgaagattctctggggggccttcaaaaaacttgacataggaatttttatttgattatctgttgagaaagaggagggatttaagaggacctagagatcttacagagaatctgatagttcaagaggatctggttacagtgggccgtgggatgaagatagtgctgagaaacatcataac

SEQ ID NO: 74494 - DNA, 532 bp, Glycine max
  Clone ID: jC-gmfl02220112c01d1
aagattacaaagacagagaacacggcagagcttatactactcctatctatctagaaatttcaaacgggttaatcacaaaaaattatgtctttccttttcacagaatcttgagatctttattgaatcgaagatcagattcatattaagaccatggaatccccaattgaaagccaaaaacaaacttttgatattgtattcaattgtcctcacagcagtaaagaacatctaattgtaaaatgaagaaattagaaagaaaaaagaataccaagggtaaaactagtcacaacatacttgaattaactaacctaaatgagatcaaaatcggaatgaaaataaccgtacatgaccaaaagcatatatagttacaaactctgactttacctgtacaaccaggtatgaacagaaaacttggtaaatgacaacatgagagagagaacgagagtgaagttgtacaaacaaactctggtttcccgcagcagagaaatacatgcgagtgattaagtgaataacgcaaaagcggaaaggaccaaag

SEQ ID NO: 74495 - DNA, 359 bp, Glycine max
  Clone ID: jC-gmfl02220112c03d1
atatccacccttcaaaccatctattacacataagagttactctgttaacattcatacaccattttcatgaatctatacggacatataatgactacactacggccatggaacagctagaagcttgaccacttatcaatatccaaatatttttagcatatgggttatactcggggacatgaccgctaaacgtaacgtactctatgtgtacaaggagctatgttaatattaaaatgccatgactactgcgcttagagctcgagacacctaaactcatcatctatggcgacctaatgtagaattggaataccatattctaattgatcattgactgaaacatggggtgcatgattccttaagcc

SEQ ID NO: 74496 - DNA, 303 bp, Glycine max
  Clone ID: jC-gmfl02220112c06d1
gctggagctatctcctttgtaatgattggttacaaatttatcactgatcttggtgcaacttatttcatttggcttaaaaaggcctaaaatcgggcctttggtggggtggaagaaagggccacttaaaatggaccggaagaacctaccaccccatggtcctaacttccaacctccttttatgccggaaccaaatttggagaaaccttaccggtgcttttttttaaaaaccttttccggggctttctaagttccaccggaactttttaaggcccagtggttcacaaggggttgcagtttaatggt

SEQ ID NO: 74497 - DNA, 595 bp, Glycine max
  unsure (1)..(595): unsure at all n locations
  Clone ID: jC-gmfl02220112c07d1
ggcaactctttataatttatgacatgaatatattcactgaaattcatcagttcctaaaaaccatactcctaaaaacacaaggaaatctccgagagactgcaaataatacaaccaagcatgaaactatgcttctaaccttccgttaaaaagctacatctttgtgttttccacttatcttaagacatgtctgtgttaagcaaaagagtaaacaaatgttgggaaaatctgcatggtgcaaaatagtctaaggactataactgtgctaagaggcaaaggtgacgactgattaaataatctgaaaatcttccataggcactgaaagtcaaaagggccttaattaattaatccgagacatggccacaggttgtcctcacataaggactcaaagggctcaatgcgaatggtgaaagacttcctcttttcttcacaaaactgctctcggagtcagagacatggccgcttgatttctttcttctcatataggggcttaatgccaacgatgacaacctaccttttgtcatctttaaaccgttatccaaatctgagacatgataactacgacttctgtntgtgcatattctctgagagcataacg

SEQ ID NO: 74498 - DNA, 440 bp, Glycine max
  unsure (1)..(440): unsure at all n locations
  Clone ID: jC-gmfl02220112c08d1
gggggggaaaaaaacccccgggggggaaataatttttttcagccttgtttttttaccccaaggttttttttccccaagggggttttttttccccccccacttctttggtgggggggggaaactttcccccccgggaaaaaaaatcttggggaaaaaaaattctttttttttattttttaacagagggccccctctttggagcccccaaatatttttccccccccctgggggtggttttgcccccccccttcttggtgtcccaggggggaaaatttttttccctctcccccccccccaagggggcccccgtggggattttttggggggggcccccccctttttttttttttttttgggggaagccccccccacaaaatatacactctttttgggaaagatttcttttnttttttttttttgggggtggggggccccccccc

SEQ ID NO: 74499 - DNA, 490 bp, Glycine max
  Clone ID: jC-gmfl02220112c09d1
agagaagagcatttcgttatgttatcatttgatgaacaaacctctacaaacaaggtaacatggagaatatccatatacagcacagcctatggatcaaatcacattctaatttaaataaatactaaagtcaaatatgaccgaccgtctactgaaacataggaagcaagaattttcattactaggggggctctctattataaatatacacatctatgctaggtatgtcggtcatctaaataacaggccgggcttttaagtgtccgcatcataatgattgggagctcccttccatttaactacttggatttacgatcatgtgaaacacgctgaatttttgatatgatcaaagaactgtccaatacttataataggctatatgttcgctggatcctgcgataggatcttcaaggctcaaccatgtcggatgctgattgcatggaattgccgtttaaaggccttaacatatcgactttacctgatttaacacgtg

SEQ ID NO: 74500 - DNA, 398 bp, Glycine max
  Clone ID: jC-gmfl02220112c11a1
gattaatatatagaagacccatttattatccactaaacaaaaagttatcaagagaggaatcgtgctacattgatttcaattcctggagatagaaacatggagctaactgtaaggctaagcaatgaaatctatatacttaacgaataaagatgcgcaatgattactttttaataaaccgatattgcttggtcgggcaagtcatctatctaatggccaagacaccattggcttcttgtgcctatagagcttccgcacgccaggatagtaagggactacagtaacctcaatccagtcaatggcatgataaaacttagatggtgagaacgaacgtgctgctttggaattgaggttccaaatcccagtccatttgacacgcttggatttgtctgaaccagggc

SEQ ID NO: 74501 - DNA, 367 bp, Glycine max
  Clone ID: jC-gmfl02220112c11d1
aacaaaatataaacatttccctgggacaaaccttatgttcgggaaattaattaccttggaataagccaggttagtggtaaatttttatatacagcattttttacgggaattgcacaatgaaacggggacgcaatgagcattcggaatgatagaatcggtgaactggctaaaaagggtcaggcaaacctatgggagccactctggggggaaccttttccgttgcggaatgcacaatcaacccccccgcagcactgcctacaagacttttgaagccaaaatgcctgctattggagatcatattgcccgacacttcctgatacactaaatctaacggagggtccggtcccccacacaaaggattatccaa

SEQ ID NO: 74502 - DNA, 511 bp, Glycine max
  Clone ID: jC-gmfl02220112c12a1
ataataaatttagggacatattacactttatttcaaatataaatggctgcaatgataagcatatgaagctcattaaagttatgtgaaatttctcttacatgcccttttcaagggaatgggcggatctgtgaaagccccagaagagattaaatcaaagacaaccttgctagctgcttcagtgtagtgggttccatcccataccactctaacagatggtctttcgcatgaacccacaacaatatttgtgccattgacctgtatggttcctccacattcaacactctggctgaagttgtacgtccctacatagccacaacaagcaacatgcgggagttcaaagccatatttctttgggtttttgaatagcaagtacttagcagagtagatatctacatatgtaattgcagccaaaggaagctccgtacgaagttgaactaaagcttccttcacattgtggttaaaagactgagccacctcattatatgcctttgcgcaatcatagctatcccct

SEQ ID NO: 74503 - DNA, 504 bp, Glycine max
  Clone ID: jC-gmfl02220112d01d1
gatatcaaacagtagtaacattaatgggacaatagagttcaacacaaaccaaacttattttcaaaggtcattacagacccattacacatcacatttcttcttaaaatgtttgggaaaatccaacatcgaacatcacacagaaatcagctccagcttaaaaccccccacgaagacgcaacaccaagtgcagagttgactccttctggatgttgtagtcagcgagggtccttccatcctctagctgtttgccagcaaaaataagcctctgctggtccggtgggattccttccttgtcctggatcttcgccttcacattgtcaatggtgtcggagctctccacctcgagggtaatagtcttacccgtaagggtcttgacgaagatctgcataccaccacgaagacgcaacaccaagtggagagttgactccttctggatgttgtagtcagcaagggtacgtccgtcctcgagctgcttgccggcgaagaacaacctttgctggtctg

SEQ ID NO: 74504 - DNA, 451 bp, Glycine max
  Clone ID: jC-gmfl02220112d02d1
aatgaagaatatatagaagacccatttattatccactaaacaaaaagttatcaagagaggaattgtgttacattgatttcaattccttgagataaaaaaatgtagctaactctaaagttaagtcatgaaatagaaatacttaaagactaaagaagcacaatcattactttttaattaatttatattgcttgctttcgcaactcattacttttattgccaattaagtattgtctttttgtgcctatggtgtttcggcacgccaggaaagtaaggaattccagtaacctcaatccaatcagttccatgaaaaaacttagatggtgagaaccaacgtgctgcttttgaattgaggttccaaatcccagcccatttcacacgcttggatttgtctgaaccagggccaatgttgcggtactcggcataaaagcacgtatccataccagaaggaccc

SEQ ID NO: 74505 - DNA, 249 bp, Glycine max
  Clone ID: jC-gmfl02220112d03d1
aattgaaactgatgcttgaagtgaaaactaaagcaccaccctcctgttgcttctttctttcaggggtggaaaaggattaaggatagaggggcatatattgaagtgcccccaccatggaaaaataaaaataaaaattacagagtcaaagtagaaaagaaaagataaattttttttttttttgtgactttggaaagtggattgcttctcagctattaaatccatgcgttttctttcccgtgctggcctttt

SEQ ID NO: 74506 - DNA, 560 bp, Glycine max
  Clone ID: jC-gmfl02220112d06d1
gaatattaaaatgacaactggtacaattatgtttgggaagagttgcattatacatcaaagggttagtagaacccagtagtctcttgtgcacatatattcaattacataatcagaagaatgtgctgcacaaatcaaacgaatgaataatacatacaaggcgaggaaagaatcatcaaagacctaagtggcaccacaagcacccacctaatgatgacaccacaggaaaatgattctattcggatgctgatcagccaacttgatagctttcgacattaaaacaaaactaggccaatgcacatccgaataaaagccacttgaaatgagattttgcgataagaatacccgatggctccctttagaagacactcttccatgccataaaccataacctcatgtagacaattgaaacctaccactaggcttctttcttctccatcccaaggcagcataatatacaaaagtcaatccagccaatgcaacaaatgcaatctgaaagacgttgtacttgtacaaatatttaattccacgaagagattccaaggtgtggccaaatatttcct

SEQ ID NO: 74507 - DNA, 544 bp, Glycine max
  Clone ID: jC-gmfl02220112d07d1
aatagttcgacattttataattttaaaaaaagtgcacaaggcttaaataaactatcaaaaattaaacacatcgttacttagttttttttttggggggtggggtacagatacacatgcaatagccaaattcaaatcaaggttgcaaatgtcaaaatcttgtcaaataacttggttttatgctgttaaaaaccaaacaccttatccaacttcccttgaaccatttaactctttccattatttttgcacctctcaacaatgtatgttctccatgattattgcacctctcaagcatatatcttcatcatttgcacctttatcaaacacaaactctacatctgttaagcactcatgatagaaacacctacaattcaattgtaatattagcttacacccacctattatcacatgaatatacaataacaataaagaagctagaggacttgaaggaagcaacactgcacaaacagcaaatttttctatatgccaggtcataacttagcaatcaaaagcttttggaaaggaaaatgtttcgtttgtcaaacca

SEQ ID NO: 74508 - DNA, 270 bp, Glycine max
  Clone ID: jC-gmfl02220112d08d1
gttccaatcaagagatgatatgttgttattttatattactccagcaagctcatttaatattcttattagcgtggaaatacaagcgtacaagccaagtcgtgcatagaaccatttaccacgggcgtgcattgcgctcactcagacactattgaactgcatatattaatcaaggggcacatttgtatcctgtttaaaacgccaaatatgctagtgctctaactgtaaatgacatgctggctactttatcgatggctgacactagaaaatgct

SEQ ID NO: 74509 - DNA, 539 bp, Glycine max
  Clone ID: jC-gmfl02220112d11a1
gatgttaccccttcgacaataataaaaacgcaagtgatacactgttcactttctcacaatcatttcatcaaacactacttatctttaagccacacactacagttatggaacatcaacagtattatcatcatatcatcattttcatcaattctgaatctagcttccacacaaagtcattactgctgggcgcactgtaccctctgtgcaccaccaggcatgtcatcatcctcatcatatgcctcctgagcttgttgctgcttcctcctagtctcctcctccatgttgacatcatggagtgtagtttcctcacattcatccagctccatgtctgtcaattgtgaagaaggctttggtggcagaacagcctccaaggccttaacttgatcacggtctatagactctggaaactccacagtgaagtgaatgtaaagtttccccttcatgaatggcctctgatacatgggcattccctcatcatttatagcccttgatgaatcaagctttacaacttccccgggattgatgtaataagaagctga

SEQ ID NO: 74510 - DNA, 455 bp, Glycine max
  Clone ID: jC-gmfl02220112e01a1
cctcggggaattccaattccacattttcaagttataaggaggcaaaaatgttcatatatgaattggaattatttgttttcttattaagcctatcctgaagccaaaggaaatgagatcggaattcctcggggaattccaattccacattttctagaaattaggaggcaaaaatgttcatatatgaattggaattatttgttttcttattaggcctatcctgaagccataggaaatgagatcggtattcctcggggaattccaattccacattttcaagaaataaagaggcaaaaatgttcatatatgaattggaattatttgttttcttattaggcctatcctgaagccaaaggaaatgagatcggtattcctcggggaattccaattccacattttcaagatataaggaggcaaaaatgttcatatatgaattggaattatttgtcttcttatta

SEQ ID NO: 74511 - DNA, 507 bp, Glycine max
  Clone ID: jC-gmfl02220112e02d1
attcaaaaacaagaatgattcgattctcgtttaccacgaacgcactactaactcaacacaataccacgacgctgaatatgtaaaaacaagtataggcatattacaaggcatgcccaaatagctacctatctattttttctttttggtttttctaaaatccaattaacacggttcaaaacaccgaaaactaaaaacataaccttattataatatataagaagcaactaaaacccttaatagtccaaattgaagcgccacagagaaacaaatctgagaattattattcatttcattcagagcgattggcgaacctctcaaccttgtcatcggtcaaattgataccaaccatggcttcacccaatccgcagctaacctccgccaaaatctcagggtcgctgtagtgagtcacggcctgaacaatcgccctggcgcgcttcgcgggatcgccgctcttgaaaacgccggagccgacgaagacgccgtcgcagccgagctgcatcatgagcg

SEQ ID NO: 74512 - DNA, 538 bp, Glycine max
  Clone ID: jC-gmfl02220112e07d1
cttggacaaatctgcttatggttacaatagaaaattaaacaacttgctgaaaatggtatttgcaattgatgatgatcattgacactgcgtggataaaatggaaaacggtaatccccatctaaaggcaacccatcctgaagctttaatttggcatcacaaattatgtcccatttcatcaccattttgactaaataaaactattggcaaacatgctacatccacatgaggttctgcctccacctcagtttctgtctttgttaacctcttcaacccatgttctggccagctctggatcctctagtggaatcagaatcagttcatgttctgcaaataaatcactgccttataatttcaacttatgtagttccatgtacacccattaactgaatcatagaccatatgctagattttatcctcatcttctgtaacagagctactgcagcctagaatagtctccatatgtcgatccctctcactcaaaaactttgttgagttgtactcttctgcatctaagagttcttcagagtatgtcctctga

SEQ ID NO: 74513 - DNA, 418 bp, Glycine max
  Clone ID: jC-gmfl02220112e10d1
ggggaaaaaaaacaaacctttttttttttttaaaaaaggggcacacacccagttttttcgaaatttctgaagaacaaaaaacccgggggcccggtttttttttccccccccaaaaaaaaacccccccctttggaaacccttcccccgggggggggggccccccccccccaaaaaatttttccaccccaaaaaaaagggcccgtttttttgggcaaaaaaaatcccccggggaaaaaaaggccccccccaaaacttgggggccccctggggggggggggaccctggcccaaaaaaaaatgggggggggataaaaaaaaaccccggggggatttggaatccccacagggggggggggttttaaaggcccgggcccaaaaatttttttgggggcccccccaaaacccaatttggggggggg

SEQ ID NO: 74514 - DNA, 462 bp, Glycine max
  Clone ID: jC-gmfl02220112e12a1
aattcaaattttcattcaatcgtcaatctcaaaatttgaaagaaagcgttattttggtaaaacctgaaaacagtgcataggagaaaaaaaaacaaaaaatcccaaagaaaatcaagaggcattccctcctaaattgatagcaagcaaatccaacggaaaattgaaacattagaggaagaaaacgaaatcatgctagcatttttgtcaaaagattctatgcgcctttgatcagtttcagtgcatcctcctctttgggaagggcgggaattgctcccttttgggtagttgtaattgctccacatgcatttgcatacttgagtacttctcttaaccttggttcatcttcaagaatggactgatcatcgacaatcttggacaatagagcaccaacaaaggaatcaccggcaccagttgtatcaactgtattaacatgaaaagcatctactgatcctttgaaattct

SEQ ID NO: 74515 - DNA, 410 bp, Glycine max
  Clone ID: jC-gmfl02220112f06d1
cttggacaaatctgcttatggttacaatagaaaattaaacaacttgctgaaaatggtatttgcaattgatgatgatcattgacactgcgtggataaaatggaaaacggttatccccatctaaaggcaacccatcctgaagctttaatttggcatcacaaattatgtcccatttcatcaccattttgactaaataaaactattggcaaacatgctacatccacatgaggttctgcctccacctcagtttctgtctttgtaaacctcttcaacccatgttctggccagctctggatcctctagtggaatcagaatcagttcatgttctgcaaataaatcactgccttataatttcaacttatgtagttccatgtacacccattaactgaatcatataccatatgctacattt

SEQ ID NO: 74516 - DNA, 351 bp, Glycine max
  Clone ID: jC-gmfl02220112f09d1
aaaagagatccagtacttctaattgccaggcattcaaagaaacatcggcgaacgaaagtaatatctacactgaaattcatttaagggagaaatgaacaaaagagaccctttggtgtttgtctagcaaagttgggtttcaaatttaagatttatgcccatgctaaagagctcctggcataataactttgctccatacgggacatgagccaccacaatgtcatccgcagattcacagtggcggcaataaggtcctcgtattttccggccaccagagacaggccgcaagatcacatttgcaacatttttgcatttgctgcagatatgaatctgagaggagtcactggagtgtaa

SEQ ID NO: 74517 - DNA, 423 bp, Glycine max
  Clone ID: jC-gmfl02220112f12d1
gaaaccatggccttattgattccatgattttatttatctatttgatatcataattttatacataaacaaacaaacttattttatgtaccaaaaaaaaaattatgttttttctctggagtgcggaccttattgagcacttggcagactcactagataagccccagatccagcaagacgcctatttgaggcgtctgatacaacccatttacccagtttgtcagggttacttgacgcagacctttgaataaatggtgcataatggctaaaccactccccaacataaacctgttgaggtctcataatctttgtatcaggaacattcaaggactctcgccaatgtgccaagcacccggccattcaagggatggcaaatacaacagcgaaaaacccacgttgaaaccccatggccctataaatgagccc

SEQ ID NO: 74518 - DNA, 578 bp, Glycine max
  unsure (1)..(578): unsure at all n locations
  Clone ID: jC-gmfl02220112g01d1
agcagccgaggtccagcgccagcttcaccgacgaccagtcgtgcacggcggagacgatgcgctgcgccatgtcgaagtgcagcggcaccgacgagtagaagaagttcgccgccgcgaagaagaggcacagcgcggagagcgccgtcaccgagccggtgattccggccgcgaatctcgccgtgcctccgccagcgccggaaaagatcctctcgaaaaagttacacacaagatcgaagtaaagaagatacaaaacagacaacactgaaaacagcatcgcctgacacaagaggaaaattagggtctgccattgctccattccgtagatcgcgtacatctgcgtccagtctctgttattattcgtcgattttcccatccgcttcttccagaaccttctcttcacgcttcggtttgtttaattcaccgcttcagcgagtcgctgaataaaagaaaccgcaataataattcagtgcgaggtttatgagaaaacgtgcttctcgttttcgctttcattgcanaanaaaaaaaaaaaaaaagtgaatcgtttgaatgtttgtcttgcgagtgagagaatttgaaga

SEQ ID NO: 74519 - DNA, 413 bp, Glycine max
  Clone ID: jC-gmfl02220112g02d1
ggaacagacaaaccgaagccggccattgggttttttgggacacaggaaagcaatataagattatacatataatatttacaattttgcaatggaaagcttttaacattacaaaggttgggttgaaaaatcatacatgcaattttacaaatttgctttgcttgcacacaaattttaaaccctggacctacttgccaagccaggcaacctatcattttttacaagtaaccgggcattcattttgggtctggacaaattaaaaagacatttcaattggaacaaacaaacaaacaaacttaccaaggaaccaaccaatcacatcatgaattgcattagtttgaaccaagccaaaccaccaccaacaccaccacattccgggctctctttttttggcttttttgcacaagacgcaaacg

SEQ ID NO: 74520 - DNA, 405 bp, Glycine max
  Clone ID: jC-gmfl02220112g10d1
gcaccaaaaacatcgcatatcattatcaaatgtttgaacatgaacacgaacactatacactaacataaaaatctagcctacaaaactgtaacaagacgatggcttgattctagctgttaagataaacaatgtatcaagcgcgatcagaatttcaccggattaaaaaaaaagttgctcagatgacacggtcagatttccccattggactcttaagataaaagctcctgacattgttgccagttctttttcaacgaagagacgaggggattaacactcagttgaacattttggaagatttgcttttcctccatactaacattcgagacagctattgtcatgcagagcaccttcttaagttgaaatttaatcatggccgtggactgggtcacctttgactcaagagtt

SEQ ID NO: 74521 - DNA, 526 bp, Glycine max
  Clone ID: jC-gmfl02220112g11a1
gtagtaatgtgacaaatatttgaattctggtatgcttatctgaggaaaacaaaatgacagtaactataagaggacttgcagtgatttgaaacacaatattatataaaattaatcgcgtttgattggagtagcttgaactcgaagaggctgaaccttctttaatgatatcgcatattgctcctccatgttcatgtgttctggaattaacccatcagctagcttccattcaaagttgtgtacaagggatgctactattaaatgcattgtcctgtgagctaatggcaatcctgggcatatccttttaccagcttcaaagggtatgagcttaaaatcgtgacctttaaaatcaatctcacatttcaaaaatctttcgggcataaaaattgttggattctcccaaatggttggatctcgatccatgggccacacattgaccaagatttgtgcatttttaggcacattgaagccagatatgtttaccatttcatcacacttatggagtactaaaagtggacctggtggatgc

SEQ ID NO: 74522 - DNA, 463 bp, Glycine max
  Clone ID: jC-gmfl02220112g12a1
gacgaaaataacagtactgtctcatcagaaacaagaaacaatgttgcatgcatgcacacacagagttgttaatcaacgcgtgtggttaataatagtaataataaggacctattgttctctagatctcacccactgtctctctcacacgacaatttacatcttgtgattgttaacaatgccgtccatgacggcgaggcaattgccgctcaactggaacagcttggggttatcttcagggaagggcatgtcgaccccgggagactctttgaaagcatccttgcatgcttctttgtacgaaaggacagagctgaacctgtaccaagcattcaccacgttctggtttgccaacaactccacagattcctttatgttatctagaatgttatcgtactgcgactggcagatgcccaacgcgtccatggcgttcttcgtcgtggtcgggtcggctagcatatttttgatg

SEQ ID NO: 74523 - DNA, 541 bp, Glycine max
  Clone ID: jC-gmfl02220112g12d1
gcaagagcaaaaacatgcagccacacgttaacattaatatgtacaagttctgtacaactgagttttctcagctaatcattattaggctttatggacagaggaaccaaagaaacatactgtaattagatctcacactaaaaagaaacttgggagggaaactggcacccaggtcaacctaatatgggatgttagcatgaaatccacttttgccaactgtagaatgtgttgggctaagtttattataaaaccccagctaaagcagtcgatattgtgggtgtatgccatcggtgtcaacctgtcagtaagtcagaatgctttacagaggttagtcttcatgttagatgaaccttgctgatcaagtggacttgtggttgagggaccccacaacttggtcctctttgtttcggatatcctcacacgtgaaactgcagtggaaagtgcatcaatccacacacagtcctcatgattctctgaattgcaactttcagaggatgaaaatgggcttgaataatcctcatcaagggaaccatcatcatctatc

SEQ ID NO: 74524 - DNA, 429 bp, Glycine max
  Clone ID: jC-gmfl02220112h02d1
aaaactccaacaattttattaatgaaaatactttacaatttcagcacatatacactgccatgaatataattttgcacgctataattatctttcgccacaaacaatggagtagtgctcaacaaagcacaaaccaacaattataacagttttagttgcattaatttacacaagaaagtaaattaacgtaataggcaacacatgtgtgtcacgttcatgaggatcattttataatgatatgcaacattgaattaaatattctcatgcaatggagcattctggaggaaggccttgagggaaacgtttgatatcagtgcaataattgtaaatcatgtaatttttttgcacccaacggatctttgcctgccccgtggcgtccagtgattggccagtggaggaagaagtttgggaattgaagtttctgtatgaggc

SEQ ID NO: 74525 - DNA, 463 bp, Glycine max
  Clone ID: jC-gmfl02220112h05d1
ctgaattaaattacattgccctgaatattgggtcagacaacattcccctttgaataagggtaaggttaaggcaccagatgagagatggtgcatatttcacaaggggaaaaaaatggtttgaaactgtacacatttaaaaaaaatgaaaaaagggtgaaaaggggtcaagactccactatcatagggaaaggaacagcctttgatgaatacaacagtttccggaagctcttgttcagatgatgaacccttgagttgaaaaaagaaaaattccttattgaaggatttaagaagcatcactgagtgagactaaacagatgctaaagattgttcactttgtactcaatctatgtgtcgtggtgaaaatgggggtcgttaggatcatctgtccaatgcatctattcacattctgtatcttaccccaagcttggcttaggcgtctgggaaattccatacgttcgtacca

SEQ ID NO: 74526 - DNA, 580 bp, Glycine max
  Clone ID: jC-gmfl02220112h07d1
agcaataaatttcatttcatttcatcagaataatgggtacattacaaagctttcttatatcacaaccaatatacgcgcactaaaatacaaagaaagagggccacaagaggtttattttaactcaaacaacctatgccccgtctgattcaaacacaggcttcgtccaacgtacgagctcggacccatggaataattcgttatatgcacaatgtgtacataacacaacaaaaacaaattaacagtgtaagaaacaaaataacaaacatgtactacgtattagtgaggcatgcatgaatgttgtgaaccactgaaaatttaattaaattaaatgccagcaaggcactctggtggggtcactgggaaccttgacttatccttacaatagtcatagataacatggttcagacgaacccacctgtaccttcttgcttcaatggagttaagggcttggtatgctgccccttccaccagttacttgggttggaggcacagtttgcaggtcctggcactgcacatccttcaatgttgaagtccttgtagtaagcgtagaatggtgctttgctccatctatttctccaat

SEQ ID NO: 74527 - DNA, 516 bp, Glycine max
  unsure (1)..(516): unsure at all n locations
  Clone ID: jC-gmfl02220112h11a1
agtgtcggtttattgcagcggaatcatcacatgtaatctcgcaacccacaaccacaaacaatcccattcctccttttttttttgtatccataaccgacaacataaattggaaaagcaaaagcaatctagagtttttcttttaataaagctgtagtaacatatagatatatatgctcctctcactattcttctccagtaatgtatttcactacaccggtaaaaaaaagaatactaatactgtaataatcctgaaccctaacagaaacgtgcgtagtcacgagtgttattacccattggaggaatctcgaaatgccagagccttccaacacctttgaccaagtgcttcctacacagaaactccttcgcgtaaaccttctccaccttccgatccacatcgtgcaagaacacgtgcgtcacaccggatcccttcctgtccctagccatcaccgtcgncgagaatattgccgtcatgcgccccggcgccttcgaaagtaccccttcggcgcgtcgatcatg

SEQ ID NO: 74528 - DNA, 510 bp, Glycine max
  Clone ID: jC-gmfl02220112h11d1
ggataatatcataatttaagaaattctcaaataaggcgaatgttcacttcaggtgaaccccaaatcattgcactcaaataaataggtgttttgcttgtcatcagggaaaatagcacgaaacgtccaaatttcacaagaaaatgtcatatagagaagaaagaagaggtacaagaggggaaaaaaatcaaccaggcaaaagaatataaatgagcaaacactcaatttccagccactgcttcaatcaagatcttttacgatcctgtcataagtcagtggtaaggtatgtaccggtagtatacaacaatgctactttcagtactatgatgcatatatccagctctaccctgaaagcatgagtgacagaatataaaagtgaaaaaggcattatcgtttaacgaaattcctcaccaactcagtcggtgacagttcaaaagaacattttcctgaaaaggcaacttcagtacaaaatcacatcattgagatgcccctgtgacagtaactgctgattcg

SEQ ID NO: 74529 - DNA, 565 bp, Glycine max
  Clone ID: jC-gmfl02220112h12a1
aactaattctttctactgaaatgattataattaatgaataaatcaatgaaccataggatacaaaatacgtgtaagatgattagtggtaacttacatataaccttaacatttaaaattgctcaaacctcagaatcaacagttacaactcaaaaacatagatgacttactcacagcacactggctggtgttctttctgtaatttctcccaaaggcatagcaccatcctcggactttgataatgggcaattacataatttgattcacatccagcgttgtaaaacctctcatcattttcataatgtacttctttaccatcattcttgaactgttcaatccatatgcccatggcaacatcttctaatttaaagagcttgagttttctttcttggtgggcatggacaataaattttgctatgtctcgtgagataacatagccaggaccatgtgcccatggtgggtatgtatcatggggccattcctcctcactgatgtaccacttgctgccttcgtccctctgaggagatgatttagaagatatgagaccgtacaagaggcctttcgatgg

SEQ ID NO: 74530 - DNA, 387 bp, Glycine max
  Clone ID: jC-gmfl02220113a03d1
aaaacccataaaaaatcccggaaaagggggccaaaaattaccggttttaaaaccccaccggctaaaggggaaaccagaccaaaagggcaaaaaacccaataatgggccaaaccccaaaggggcccaaaaaaaaataaagggccaggcaaaaactttgggccaaaaacaattaaccttaaaaaaaacccgaaacgataaatccccaacaaggccccggtttaaaacaaacaaaacgaaagtggagccccacaatttccccccccaaatttaccgggacttttttttaggccccaaaggggtaccatgaccccccttttttttacgggggttcacacccccagggggccaaccagcctaacatttgggggaaaaaaatttggcccgggg

SEQ ID NO: 74531 - DNA, 544 bp, Glycine max
  Clone ID: jC-gmfl02220113a04d1
caatataaatatatatgcctctgaaaagggtaaatttaagagagaaaagaggagcaaaacaaaactgatacctacatgatcctatatcctagctcttctacatcataatgatcatattctgttttgctaaatagtgatacaacaagcaaaacttacagtaaccctactgtccacttcgatcgacggagaaagtacaaaaataaaatacaaaaatctctttacaaacttgtaactttctactttcaaaatcaaccttgtacaccgtacctatagtctataaatctaaaattcacatcataactgatgcctgcctctaggttccaaatgagaaatttacaagatactcagaattgaagcctttaatgttcctaagtttcacctttcgtttatgcccctcgattactgtcttctcattctttactccccaattaacagtacaagagatacttgtacagtgtattaatagaatcaaaatgcccgactggctaactctagctttggcatattaacacaacggcattgtcaaattcataactgtaatgat

SEQ ID NO: 74532 - DNA, 531 bp, Glycine max
  Clone ID: jC-gmfl02220113a05d1
ctgaccctactattaaacaaatttatttagtccagcagtctgaatgatttttggttctcacaagtaatacaaaacttgggaatcaaaaacattaggaatacaaatacaaagttacaacactgaagtaaccaacactacacctgcatgacaaatacacatcaaaagcatcatcagaagcttatagcttcctcattgagtggaaaaaagactaatacagaatatcctttcacagcagtaactagactagctaggaagaagtgtccttgagttcctgaggtagaatatccttccacctaataaagttaggatccttcaagaacgtatccttggctagtactttctcatcatcagtccaatttttaaggtctttttgaagctgcttaaccctttgctcgacatgatcatcaagaggcttcttgctgttaatccagctataaagttcctccacttcagcccaaaaggttgattcagtgataggagcaggtggcatccctttagcatgttccaaccatctttgagtgtacctatacc

SEQ ID NO: 74533 - DNA, 550 bp, Glycine max
  Clone ID: jC-gmfl02220113a07d1
caatcaagaaactcattagagatctcttgctatacaaatgaaagaaataattggtctatggccgctaaagatattaactagacaagagcatacccatagttaggacatgcatgtgataatttacagagaaatatatgatttgataaatttccttgcttttcaaattttgtgcattgatataatcatgaaccagcatgtaacaatgagaacttagcccataaacatatcttacccttatccaagaccaagcttgccccagtgaccaaccaatggccaggactatcttgtggacctttacacaactgtgacgtttctacaaatttcaacagcttttgtgtttgcacaggcactggaggtcctgttggaaacacacttgaatccaaaaccacaactggttttttctggttctggtctttaccagaaattgatgtgcttattactgagaaaatgccagacctttgggataacccggaggagccctgtgtccaacttgatttacaactgcacaattagacaccttagagaacaacagcctcaatgaaggacactc

SEQ ID NO: 74534 - DNA, 493 bp, Glycine max
  Clone ID: jC-gmfl02220113a10d1
aacacaatgcatttgtattatagaaaacacagtatggtacaaagtcactaaaacaaatgattaaccgaccatgctggcaatcatacccatatatttttcaaaagtgcctaactaatgtctatctcaattcaacatgagttcattccccacattaggccgaaggcaaacacaaacttcatgctcttctgctcctggaagaagttttggcaccattatctcaagcacagatcctggcccatcgtagtacgcttctatattggcatcttcaggaattcgagttgaaagtgggatttcacgaacaaactcaccaggagggcagtgctctgacgatggctctgaaagcttgaatgtcctatcgtttcttttaataaatggcttgcaagatatgctcacacaagaaacctttatgataccatgagtaacaatgttcctccatgaaactttcacactaggaagaaccacgaatggcagactgataatgatcaagaaacct

SEQ ID NO: 74535 - DNA, 440 bp, Glycine max
  Clone ID: jC-gmfl02220113a11d1
gcaatcagaatcaacaaagagccgagtccatcagcaagtatataataatccaaaaactccatcccctacacagaagagacaacaaaaaaaagcttaatgctcctaacagggtaacaacaccggttcccgaaaccgatttattcatacttctcatttctgcccgagcaagaagacactaaatcgcagctagacaccagcacataatgtctagacaagctacttttttttcagtacaaccttaaaaagacttcttggcaacgaatacaagcaggtcaatgacacgtgagctggatccccactcggtggcataccaagagacaagcttcacaaagttgttattcaatgcaattccagcctttgcatcaaaaatacttgatctgctatcgcccacaaagtcggcggagaccacatcatcttcagtgtaaccaagaatttccttt

SEQ ID NO: 74536 - DNA, 520 bp, Glycine max
  Clone ID: jC-gmfl02220113b03d1
aaacaaaggctttttattgatgataatagattatacgagtatttacatactccaaacacacgagatattaataccaaattacgcaaattattggtgctgataatatggtaaactttgtaatgcaccccgtatcaacaaacaagttaacataaaatcacaatgtccaattactttttgttgtaatgatggggcaccacacttttcttgaacatttacttccagtcaagcatgtccaacagccacaagacttcttccttagaatttgctacatcacagaaatccatttggatcccaaatacatccatgagatcttcatttctatcttccatgaatagcaaagagatccatgcacggatgccagacaaaaatgggtagccaggggatatgtctaggtaatcaaaagccaaggctctatatgatgaacgatcgatgtaatcaaacatggacttgtttattacacgagcaaccttatttgaatccttccttccaaccatcacagagacactaacattctggtttt

SEQ ID NO: 74537 - DNA, 553 bp, Glycine max
  Clone ID: jC-gmfl02220113b05d1
aatagacatattactagttattacggtaaatggtcacatactacaaagggtaataatatcgcaatcgctgaacaatgttatttaacaaaaggatcgaccacaaataaaaacaacccaactccaatcatcatcaccacgtccagcaaaatacattcaaaagctatctaaaaatttgaggaacccacagtggcgcattagaaaccatgaccatagaatttatgagagaaatattatgggcaccgtgcctctccaacaatccccaaaacgttgcttaggcttcagcaaacccaagctcagaaagcttttggtgagcctcagcgtaatcagcgaagaaagcatcttcgtccgatgcatatttctcaacaagagggcggaacacagggtcagacaaaagtgccttgtcagaaggtagctgaaggaggccttctttctcaccactcaacaactccttgaagtatgagttgtcgaaaataagaggattagaggtccagggaccctcgaatccagaacgctccttgtgcgcagcttccatagtgtgacccccagacagagc

SEQ ID NO: 74538 - DNA, 564 bp, Glycine max
  Clone ID: jC-gmfl02220113b06d1
ggggagataaatataattcatgattcagagaaaatagtcaaaatacagtgaatcatacttgtacaaacgaaaacacaatttaatatttgcctctcatcaataaacaactgaaacagataaatagcttgactcaatcaaaagtacttactgcccaaattatatatataataaagaagtacaataaggcagaggcataggcacaacacccccttgaagctaacactaacaaacaccattcatcttgtcattgttcttcttcctcttcaacacaaacttcttccaaatggcagtgatttccctctgagtctccataggattcttcttagcaaccactaccttgccattttcttctgcactgagtgtcacagtggtgctgctgatgacccttgcaggaagtgaatcaagctcatgcagcaccttcttcacatcggacacgagacgcttcgcgagggtccttgagaagtcctccctgatgacaacacgaagcactgtgacatgttgagcatcctggggcatggtgtatgctggcactattcacccaaagcgccttaaaaagtctgagat

SEQ ID NO: 74539 - DNA, 424 bp, Glycine max
  Clone ID: jC-gmfl02220113b09d1
acaaaagactacataattaaaaatataacaactcttggacactttttagtttgggaaacaaacaagaaatgattaccaagtgagatcagacaataagattcttccaaacaagaataggcctaaacagatccaaaataaggggggcctcgtgtattgatctttccaaacatacgacaaatattctatagacaagcaattacttaaggggttgataaatccggagaaataatatgggaaattctccatatctctctctctctctaattttcgaaataagctgttccaatcatccaaaccaaatactaaggtttgggttcctgaggaatttccatagctgcttggagaattatcttaaatgcactttgcatggacaacttcaatttatggtcggctatgaaggctttttccgttttgaggggaacac

SEQ ID NO: 74540 - DNA, 509 bp, Glycine max
  Clone ID: jC-gmfl02220113b10d1
atgtaataatggtacaagatgaattctcattttacagtactctcaggattttaataaatacaaggattatttccagaaccttgtttaaacgataatacagtctgttagtagaaaaaggaacttattatcttcaatcagtaagagttatgttgatctattccgcttcatattctgttgatcagatcttcagcaactacaagaattatgcacatgcaatgaaagaataatgagtccaattttcagtttttcaattcctttcacctgcacccaacagttgcatcactatctcacaagttcccagtcctcttttgacatgtcataaatttcaacacaaccatcctcaaacatgatcgagtgttttcgggaatatttatcaaatcgtttaataattccaaacctctcatttcaagttggtttatcctaataactttaccaatgcaattgtgtaagcactttggttggtcaaacacacgagaacttccaatttgcaaaccttcattctgataaac

SEQ ID NO: 74541 - DNA, 414 bp, Glycine max
  Clone ID: jC-gmfl02220113b11d1
gtattattgagcgagagagaaaggtaaaaaaaaaaaaaagattggaagagtatgagcgatttcggggaagggaatgagcttttataaatgtctggtgctgttgaggaatcgatccactctccttccttgccttccttccttcccctttcaacgatgttgattgcagcgtttctaaaactcgccattaccattagacaagactgcagtgtgctgtttcgggttgcggtaacacgcgacttccgattggtgagaatagactagggtttcattataagtgaggaacataacaaaacataacacacaatgcccagcttaaacaaaagattttgattttaggttattggtacttactgcacaatgcccaaaggcagttgatagcaatagagggaatgtccacggtaagcttgcggaggt

SEQ ID NO: 74542 - DNA, 459 bp, Glycine max
  Clone ID: jC-gmfl02220113b12d1
ggaaaatagttgctatgtattaatgctttgaagtacaacgtgattcatgtttaggcgataatgtcttacaaagcaattactttgcagcatgcattgttgggggcgtggcgcaatcaccattgcgtcctttctcagtataataatgagtcaaccgttctttatcttgctctcctcgaaaagtacgaccaccatcggaagctgatcctttccaagcgggagtgaataacacaaaccatcacgatggccatagaattcaaattaaactaaaatccccaattatttacacaattacactttgtgaggcttcacttgactccgtaaccccgaacccaacttgctgacccataataaacccaaacccgaatgggtcacctgagcccggtaacaatcgggtatctggattcggttgaaaatgccccggcccgtcgacccgtcgggttctcacaccactttgaacct

SEQ ID NO: 74543 - DNA, 506 bp, Glycine max
  Clone ID: jC-gmfl02220113c02a1
aaattatgatttagtacttctaattgccaggcattcaaagaaacatcggcgaacgaaagtaatatctacactgaaattcatttaagggagaaatgaacaaaagagaccatttggggtttgtctagcaaagttgggtttggagtttaaggatttatgcccatgctaaagagctcctggcataataactttgctccatacgggacatgagccaccacaatgtcatccgcagattcacaggggcggcaataaggtcctcgtattttccggccaccagagacaggccgcaagatcacatttgcaacatttttgcatttgctgcacatatgaatctgagaggagtcactgagtggaaacaggcgttcatacaggttggctgatgcaccatgagctattaagcaatcacgctccatctcaccgaacttgatacctccaaatcgttttctgtcagctacaggctgtcgggtcaaacggtgaactggaccaagtgttcggaatttcacttttgt

SEQ ID NO: 74544 - DNA, 375 bp, Glycine max
  Clone ID: jC-gmfl02220113c04d1
aaaaagcggaaaaaaccccggaaattttggccccacccatagaaggaatggccccacttataaaattttatttaggaggggggaactttatcagcccatttaccccctcacccctttggtcccgggccttcccaggaaccctttttaaacctcatttaaaaaaaaccccctttgggggaaaaaacccccttccaaagggggttaaacttaaaacccctggggttcaaaaaaccctttattccccaagggaggaaccccttggcccgccctaaaaggggggggtggacaaaccccattttccgggtttatttaaacccccccgtttaggggggggccaaaagggtccacaatggcggaaaaacccttggttttccc

SEQ ID NO: 74545 - DNA, 552 bp, Glycine max
  Clone ID: jC-gmfl02220113c05d1
aaaaatagttttatatttcatgtctgcagttgaacatcagccatttctgaataattatatatgtaaaaatgattcatggatactgtaatacacctagagatagaaaaagagaagaaagacaacttacttagataagtccggtagaatagataatatgacgtgaaaaaaaaaatcaaaataaatgacgtatccatatataactactcagcgtatatacagtcaccaaaaggaaacaattgaacggagacaaacaccatcacatacagaaaataaattatctcccaaatcaggtctcaggcactgggtttacttccactcttatacatgttgtcaatggcattctgatagtatttaagcaactgtggcctcttcttcttgtatgttggagtgataaggtcacgttccatgtcaaatggaattgagtcaaagtgaactgcttttataaactcaaaacctttcaacttcttttccttcgcaaactttgagagctcttcaattatgtaactctttgctcgagcatcttcacagagagaattggagtccatggatata

SEQ ID NO: 74546 - DNA, 507 bp, Glycine max
  Clone ID: jC-gmfl02220113c07d1
gagcttcaaggacttcttcaagatgaattatataaatctgatctttctaaagttaaaaagcactgtggcttagcactgtcaggaaagaggattagtagaagatacatgttttctttcaccgtagaaattacatgatggcaactttagctattctcattatgtatatttacatcattggtctgactctaagtcactattttcgaagtctttcactataacaatctccgtattttcgttttgtcgtctcactttggcatccacgtgatcttttggaagcacattacagtcgatggtatgccatactggtctctcctcttgaaataatgggtgcttgcatagctgcggacattgcactgtaagtgcatacttgcaagtggaaatctctgcgattgaactaatcattgctctcggttcagagcatacaaaccttaccttggtctctcgtggcttatttgtaagatcacataccgtgccattagtatattgatgagcatgatacccttgaga

SEQ ID NO: 74547 - DNA, 457 bp, Glycine max
  Clone ID: jC-gmfl02220113c10d1
aaaaactaatgacctcaattaagagaaacaggccacgggaaccaaaccctatgtaatgtaactagattatcgcgctttacacaaagacactgtttacagggggaaaagataatgtttactgtgaactgaattatataaaacacctacctagtaactaacatataggtcacaccgaacaaagcataagatgatggggcaaactggtacaaaacattgaagacccaccaaatcgcttcttctggtgaccatattcttagaccggacaattccacaggacgctgattataccgctccctgactctttgtggaacccccaaatattctgtcctttaggggttacacacctacacgggggtacaagtaggcccagaatagcatgcacttataatgtctcaatggcccaaacacccttaggaccaggggtggaagacatcaaacgggcggagcgtacagggaa

SEQ ID NO: 74548 - DNA, 465 bp, Glycine max
  Clone ID: jC-gmfl02220113d04d1
aggtcaaaacagagtatctgatgaaaaagttagaagtgtcaacagggaattaattccaaataatagatacacacagcatctaatgagatagaatggtttgcaaatttccaattatacacccaaaatagtgtaaacctatggatatcatgagtgtttatttgtgcttcagcagcaatgttgtaaaatatcaaagaagcaaccaccagaccactacagtactgatggtgcaatattgcagaaacgagtagtgaaaatgttaaacaacaaatgtccactcaaatacttggatatatagacaatgaaattttcaacagaccgggcaaaatagcgcaatcagcaaagtgcaaactcaacatttgcaaatagtatcccacatataaaatggacgaatatgttattgaagagttaattaaaactaagagcagagcataggctaccccaatttaagccgaaagagagcacagt

SEQ ID NO: 74549 - DNA, 442 bp, Glycine max
  Clone ID: jC-gmfl02220113d05d1
aaaaaatcagtttgatagtatttctaaagtgacaaggaacaactttaacaatatcttgtaatgttacaatgtacatttgaaccaaaatttttttttaaaatgaaatgatgttaaaagtaaaaggaatcacgtaatgattgctttatgtttaaaccctttgggatttattgaataatatacattacattcgaattctaaaaggatagttcggcaatatggagcagtaataatatatactagtatattgtaacctgtaaggcgttagcttaatatgcatggctggttatccacgcgatgcctattgtgtagcacgagacctaaacctttttaatcgcctgagtggcttcaagaagttacgagccaatggtgttttgggaactggaataaattttccgactttatcaaggggccaactgacaaatccattaccaagagaagcaag

SEQ ID NO: 74550 - DNA, 552 bp, Glycine max
  unsure (1)..(552): unsure at all n locations
  Clone ID: jC-gmfl02220113d07d1
ataagaaaatatatcaaattctacattgataaaccaggagacagtattttctataagtaccacccctaaagaaaatccagaattaaagccaacttaacaaaaccagcatccaccatatataattcagaaacaaatgcaaagctaacaaatagaacctaagcctcggtggtaggatactcaaacacaatatctttgcccgaaagtttcctgtatactgcagcaaaagtctccaatttgtactcggtgttgtttcgctccttggggtccaaaaagaccttcataatcttggaaccatcaattttatacctaacacgctttccaacaatctcagcaggcaatacaatatcttccagcattgcctcgtgtacagcagtgagtgttcgggtgcggggacgctgaacagcagaacctttctttggtggcctcaatatcctccgggtggcaatcaggattacatcctttccactaaactttttctcaagttctctcacaagcctgacatgaatcttccggaatcctttncttaatctgtangggacatggataaccaca

SEQ ID NO: 74551 - DNA, 306 bp, Glycine max
  Clone ID: jC-gmfl02220113d09d1
gttatattaattttttattagttttgatagcttttattatctcttcaaacaatttgggtataacataaatatagagcactagctataaccagccaaaaatgcccacgacgaacggggacaacacagaagaagaagacaactgcaagaaaaaaaggggacccgaaaagcgaaaagaaaggccatttcctgcacaaaggcaccaacagaagggcaagagaagaaaaggctataaaagacaacgatgacaagaagaacccaacgagcaactgaaccataagcatagaaaaagccatactaagaaaacca

SEQ ID NO: 74552 - DNA, 359 bp, Glycine max
  Clone ID: jC-gmfl02220113d12d1
gtgtattctgttgtctttttttttagtttatttgttgttcttgttgtagccaaaaaaacaaaacttttttgccttgggacccatagggggcccctggggttggccgactccaaaacggtcttcttcccctttacgacatgggggaccccccctaccacaaaggggccgccataaaaagccttttatatcaggagagtctctcccacaaactcaataagaacaggaagcccccgttttgggccccccaggtcaaaaaaaatatggggcaaatgtggttttgccgcatttttgagagagccccccttggaaaaaaacgcacccgctcattcttccccccgtgttaggccccctttcttccc

SEQ ID NO: 74553 - DNA, 593 bp, Glycine max
  Clone ID: jC-gmfl02220113e03d1
atccaaaaaaataattatatatatgatctattacaaaaaaatcctcaaaagacaaaggaaaatgcataaaaactgcatggcatatcattccctgaaattacattatcaatggagaaaagctgttggaatacctaaaaccataaagagataagaaattatgctgttaccaattcccgagactccagccatgacttggctgctacctgtgtagtcaaaaaccagccagccttatccggagcctcatggaatggagcattgagttcgttcaaatgtgattcaactacacttgccaaacctttgtccgaatacctgtgtttcccatgaccagtattaattccaagcagcggtggaagatcctctcctgattccaaagtcttggacaagtcatttatccaagcatgtaatgcagtcagcgaagctccaagcgagagactctttagatgtagagaccactgagtttgagacttggactgtacatccgtatatatttcaagggtcaaccccaggtctagaagctcacatgctttgtccaacaaattcaggttgacacaaagatcaatcagagaattgcaaagggcttctttacttcatca

SEQ ID NO: 74554 - DNA, 567 bp, Glycine max
  Clone ID: jC-gmfl02220113e07d1
aaaaagaactctcatactctatttcttcttttttgtttcactgtatactattctactagcagggtcctattaaacaacaggaagttcatctttggtatcttcattttctcctcatgctcagaaattatatccagcatgattatttcactagttcttagtaaagagtctatgctttgcctgtatattagtagcttttttctgatagagctttccaattaaccaaaaggaaaatctccttatctaacagccaccttcgcctaattttaacactcatgcccctaaagagatatatttaaagcacattttttgtctcatcactttcatattccaaatcctgcaatatcataattcttaattctaaacataactcatggagctccaacacatcccccagcattcaagtcaagtggctgagtaatgaataatgcttttgacgtatatgttggagaatatttgatcacagtttcaatttcatgtacttctcatagaagtcttgtatctcctcttagtgacgccttcatcatattctccagcactttcttccacccagcgaacgtaaaatgcatc

SEQ ID NO: 74555 - DNA, 466 bp, Glycine max
  Clone ID: jC-gmfl02220113e09d1
acgttctattatatatatatctatctatattctatatatagatatattggttagggtatcaagttttaatctgaaataaataagaattgctgcttctaatacttataataattactacaaattctaataattactacaaaagggatatatgttagataaaatagattaattaatctatttcacaaaaaaataatggatccatagcacagtttcgtcttataatacctcgggggctaatgaactattttagtgaaatttaactgtctcaattcccgggcgattgcccaaaagattcgagttccttttggaattccttcttgatcaatgacaactgcagcattatcatcatactgaattattataccgttgctacgtttgagttctttacaagtacgtacaattacagctctgatcacttctgaactttctaaagtcgtatttgggactgcttgtttgattaccgcaa

SEQ ID NO: 74556 - DNA, 522 bp, Glycine max
  Clone ID: jC-gmfl02220113e11d1
gcatatatcacatgtcctctttctcattaattatatcatcacacatatcattacactctactagaaagccacacagctctggtaaagctatgttcttaattcctatcacaaatcatatatagatccttaaaggatcataacactagtttggtccccaacttcccataacctataatagctagaagtacaaagtacatcaagaatatctactaccttttgaacaccatctacctcacaatttcccttgtggcctccaaaggaaaaactcacgagaggaagagatttaatcaaacacacttatccttattgttcaaccatgccaaaccctaagaaaaccaaaggaaacaaatctcattatgagacaattaaggttaaaataaagttaattttatttactgctgcaaccttttcttcttcatcttcttcaggaatcacctccttcttgcagcagtctctccttgagcattgaagtaaactgcagcaactggtaggccaaggccattctcttctgagaacctcctt

SEQ ID NO: 74557 - DNA, 471 bp, Glycine max
  unsure (1)..(471): unsure at all n locations
  Clone ID: jC-gmfl02220113f02d1
attcaaaacgaaaatctggtaaaaattgcgagcatataaacataagaaatcaacttttgacatggacaattctgaaaacatgacagaggtcgcaaacaacaggtcctaaaccaccaaaatagaagcataatgatgatatcacttcacagtttgaataatggagaactatatcacacaggagtaaaaacaaaaaggaacgaacaatactggttcagggtaatgtaacgaagcatataccctttttactcgaaacaattacattgataataaaaccttcatttatgaatagtcctctccttcctcatcatcttccgctccttcagccccaacctcctcatagtccttctcaagagcagcaagatcctcacgagcttcagagaactctccttcttccataccctnaccaacataccagtgaacaaaggccctcttggcatacatcagatcaaatttgtggtcaatgcgagagaa

SEQ ID NO: 74558 - DNA, 593 bp, Glycine max
  Clone ID: jC-gmfl02220113f03d1
gaataattgataaatactttacaaacagaataattaatgagtaattacataaagaatatatattgtcatcaaactagtatcacccccaaaaccaatcttgttataacatcacaaatagcactactataaccagttaagaagtaaaagaagaagttgcctacattgattatgaagacaactgtaggaataaaatgattacttgatcagccaaattttattccatttcctcccccatggcaccaacagtatggcttgtgaagaaaagttgatagagacaactataaaaagatgataccatcttttatttgattcatcttcattcatatttctattctaagtacaccaatggcacgcatgagcatgatgcatccctacctgctccctccatttctcattctcactttctcctcagggatggtagcattagcaacactcttgttggaagccacatttcccggtctagttgaaacagcataccttcttgtaccggctggagaagcagggaaagaaagcctcttctttatgagagcagaagctgctttttcaggtgttccattactatgttcgccaaccaatgcacttctcactttgga

SEQ ID NO: 74559 - DNA, 596 bp, Glycine max
  Clone ID: jC-gmfl02220113f04d1
aggatgtagcataataaaatccttttatctgccgaacaaacaaaaacagaatataaaaagtcacgacggaataaaatttactagaataatattaaattaacaacacagataacataattccttcacactgatcactcgtttcataaaaggatctctaactagataaaataagaggcaaacaaagaaacccatagtagaatgggtaacccttattctcaaacacaaagtggttaattaacaacacgagtagaaagatgatagatctatcatcttctatcaaagcactcttaattaattttttaaaattaacaatgtttggtgcagaagcatctgcgacggaagccacggcagtgtcctccagtgaaacgttcggttcggcaaacagagccacagttggtgtcactcaaacatggccccttgaaacggtggctctgagactcacaagttcttgcttctgccaccattgttggccccatcatctcagtggccaccagaagcagaagcacgacaaaaatggttgaaaccaaaggcactgagcgagacatgtgtgagagtacacagtttcaagaaagactgaacaagccggagctcgagct

SEQ ID NO: 74560 - DNA, 410 bp, Glycine max
  Clone ID: jC-gmfl02220113f05d1
acattaaatgccctggacggatttgcattaaaaccaagttccggaagggaacttcaactaattctaggcttacaacaattaccattaggaagggaaaaaaagagagtttcaaaaaccatcgagtattggggatcaaaaaaaaaaccaagggaaaaaccgtaaagggcaacccggggggggggggggttccctggtaaatataccggataaaaaattaacccaccttcaacatgcaaaagcatttcaaattttcaccccaattttggaacattaactttatacccaaattgggatttaaaaggttcatattgaagcttcaatttccaggaaacccatcaaaattggaaatttgagggactctttacaaggctattccctttttttttaaagaagtcacccttacttaaaca

SEQ ID NO: 74561 - DNA, 469 bp, Glycine max
  Clone ID: jC-gmfl02220113f06d1
acaacaattaattgtttttttttttgtacaaacaattatttatagctatacatacaggatattcttcatgtcacaatgaaaaagtacaggatatgtaatcaattaatattggtataatcctatctactatctataatcgaatcatcgatcggatccagctatagctccttcgttccgtcgacaaaaggaatgcagacagtggacaagggaagacgaaagtacagcaatttgtgtaccctcgaaagcacccaacacaaactacatgacaatttcattttcctatattttatcaacaacttgttatccattttttggaaatcaattccgccccacaacacaacacatccgttttgtttcataaacctgcatcaaagggtacgccactcccaggaatccacgagcccccagccaagaaacttccaacggtgaattttacagcctcagtactggagatcacgcgaaacccttt

SEQ ID NO: 74562 - DNA, 393 bp, Glycine max
  Clone ID: jC-gmfl02220113f09d1
aggtaaatatgattcaatgaaggctcttttcatcatttttcaacctaaaagaaaaagaaaaaaaatgctatctttctgggtgctaatccttacctagtgaaaaggttcatgtgggtaccatgtagcccattcatcttggagatatttcacccttttttttcatttttattttctccctaacctttttttcttcttttctttatgggactcgtataattggtggctttttatcactgaaattgaagatattgggggctcatgagtggctgcttgaacctgaaggtcccttggggattctgggtctggaggttggtgttggggaaattgccagagggaccctgatatttctttaacgggtataataacatgttggcctcatgatccctgtttgga

SEQ ID NO: 74563 - DNA, 526 bp, Glycine max
  Clone ID: jC-gmfl02220113f11d1
ataaattatgtttatttaattatagtaaaattagtattattgggaacataattttaaaatgcattggttaagcatatatataagtatagcgacacaaaagagcatatataattatgatattatcaaataaaaaactttagaaaaatatataaatttaaataaatcacaaatgaattcagtaaaaataaattaggcccatagaggaatataaacacatacaactttgattgacattaattctctgagcaacaatgtcaaatagtcaatattaaagctagtagtagatgcaaattatgcaatgtaaattatcattgtttagaaacatattatcattagtgagatctgatttcattacctatgaatacattgtatactcataattaatatcgagaaacttaaagagtgccaatatttttcttcacaaattatgaaatacatgttacatacaaagttgtagaataatcaagttaattattaaattcatgatcataaattgaaaaatggtagaaacttgaacttacatgat

SEQ ID NO: 74564 - DNA, 339 bp, Glycine max
  Clone ID: jC-gmfl02220113g02d1
ataaatactagtttgacaccctagttgacaaaggtgcttagaaaattgaggaaatgatgacctatatgattgcatacctgtggcatgtgcatatttatttctaccaactgcaacgcctatgtgaccaaagcacaaacaaccacactactacaagacaataacatgggattaatgcatgcctttattttaagagccatgagattggactctaattgattaaaccatatactctaatatattttggcatgagtggatgcatgggagttcgtaacagctacactagatcaatccatttcccgaatgacgatgctccttgtggggagggttatagtgaccatc

SEQ ID NO: 74565 - DNA, 447 bp, Glycine max
  Clone ID: jC-gmfl02220113g03d1
gccaagggtaaataaattaaaaatgtatttggggattaaaaaagcctattccaattcagttaaaacttgccaccaacgcacattttccaattaaagctaaaacaaacctttttgaatgttgtcatggttaccttggcttgtccatttggtcccaagcaaagcaaaagaagcccaacattttgatgatcctgccctggttcattgaaccattggctgccaacacacattctatatttctttgcccaagcaacaatgaccaattcaaaacctagtgaagctagtaatggcccaaaactaagctaatggttttgaagcatttcatccctaagtaactctttcctactatgttggcccaatggaaagattccagattgaattattatccttcacaaacaggcgtttaaagatgtgttgcgggaaaacttgaccttcctacccgagttactt

SEQ ID NO: 74566 - DNA, 556 bp, Glycine max
  Clone ID: jC-gmfl02220113g04d1
gtaaaaagcaagtatcattaagttggattgggatacacaagataattcacattatctgaagtacattgcaataacatatacttcaccaaacacaaatctaaaaactctcaaaagtccacaagtcatccttttctttcatgctcacttgccggggacgaagttggtggcgtaggcccaggcattgttgttgactgggtccgcaaggtgatcagcaaggttctccaatggacccttaccggtgacaatggcctgaacaaagaacccaaacatagagaacatggccaatctcccgttcttgagttccttcaccttaagctcagcaaaagcctctgggtcatcagcaaggcccaatgggtcaaagctgccaccagggtagattgggtcagtgacctcaccgaggggcccaccagcaatacgataacccttaacagcacccattaggataacttgggtggcccagatggcgaggatgctctgggcgtggacaaggcttgggttgcccaagtagtccagcccaccctcgctgaagatctgggacccggccttgaaccacaca

SEQ ID NO: 74567 - DNA, 570 bp, Glycine max
  Clone ID: jC-gmfl02220113g05d1
aattgaaccagcgagaaattaacccttttatcatagtctgcatttataccaaatttaatcaacaaattacatggcacaataaactgcaagttacacgaagaattacactcttcaataagttctccattccgtgcgctattataatatcccacttacataatcaacgtcactcgatcaccttcacttcacttcacttcacttggtataccaattcacaaagatattagccttgaaatggaaaaaaaagggtattaagtattaacccataaaggaggaggacatagaaaaataaaatacagaataaacaactttagagagaaagatgatgatgaagatgattaatatctctctctaagtagtagagttagttgttgtctttggcatgatcttttgcaatattatcgttttcaacttctcctccttccgtggtaatagcagaagaaacgtagctcagcaccaaagaattatcgtcggggctggtggtggttgcatttcgagcttggaactgttgtttgcaaagtggcaagtgatttggagcatggtggagttgatttgcttcattgcatgttc

SEQ ID NO: 74568 - DNA, 449 bp, Glycine max
  Clone ID: jC-gmfl02220113g08d1
aacaccaaaacacatttattaaacaaaaataaagaccatatataaatcgattggtttatttatgcctgtcggcaaataaatatataatgtaaaaaaaaaaaaccacaaataaagatctaaaaaattgacactattatatacatctcaatatcaatcatcacatatcaccctgatcggtatgatccaccggagttgttgtacggcccctccgtcgagattgccggtggtgactgccgccaaatttcaaccttccggtctccttaaacctttgtttctcggagggtacaatgacacactcgggttgtggcacagggtaccttaaagtatcatagcaatatgaatagtacatgtaacgctgacggaaccgccgcatggtgaggcggcgcatgggggtcacgccggcatagtcttgagcctcgagatcggcgtgttggtcggagcaagacttg

SEQ ID NO: 74569 - DNA, 476 bp, Glycine max
  Clone ID: jC-gmfl02220113g09d1
attcaggaaaagtacttactacataatcaaattgttcattacatttatctttaccacaagtagcatcacttgctgctctttgcttaattttaaccgcacaaggcagcttgcaaagatgggatccatgcttacacgaataatgaaaacagagaagttgaacagagttctgcaaaatactgaaaacaaaagttttcataccttttcttcattttggcacaatagcattccgttgatctgagtcattaaccagtaagtttaatttgttcaagtggcaaagtaatcccatcccaatatagatagcggaagttataaaataactgctgaataggtttcaaacaaataagataagatcgttgtgtagtccccagattgaaatccagtattgtgatcaatgaagtaaggaacctttttagatccagaagcatccaagagtaacttcattcgaggagacccttctcctacattttgaagaatgt

SEQ ID NO: 74570 - DNA, 445 bp, Glycine max
  Clone ID: jC-gmfl02220113g10d1
aaagagaacttcatgatcatcaaccatccaaggatttaagacgaaaggaacaagtacaaccctcgaaagtgaattaggaagaaaacacaaggaaggaaaaccatacacagaagaagattccagagaaattcaataatacacaatccttttttttttattttcatttccccccctctagtagtcagtggcgggaagctgctcgtgggtgtggctgataaagacagcctcgtaaacaaggccagcgaatccaccaccgatgagaggcccggcccagtagatccagtggttggtccagggccagctcacgacagcaggcccaaatgtcacatcggggttcaaggccgatccagagaatgccccacccaacaaaatgttaacgccgacaatgaaaccaatggcgatgggagcaataattcccaaattacccttcttggggtcaatggca

SEQ ID NO: 74571 - DNA, 449 bp, Glycine max
  Clone ID: jC-gmfl02220113g11d1
gctggtgtaaaaccttcacgactttctatataacagaatataatagattgttacattctaatatagcaactattgtcaaaatcaaggcaatagctgttgttggtgtgggagatacaacaggtaaatgaaataatctacatgtaaaattctaaatagacgagggtttagatgaactccaataattacattaacttacaaatatggattactaaaagaacacaaatggcgagtacattcacgtaggccagcaaactagtgaatgggggtatgtgcaaaatcgagctaaattaacaacgcatagggaagagtaagagatgctgcttgcctatgcttcaaaagaaaataaaagtgtcctataaagttagctctctaaactttggtcagcctctggctccttggattgaatggctcctccattcattcttgcacgtgcctctgcaaacattctt

SEQ ID NO: 74572 - DNA, 420 bp, Glycine max
  Clone ID: jC-gmfl02220113h05d1
ggaaaagtaaccacccccttaaatttttttgagaatctcaagggatttagcatttgatccacgtcggagaccaaatttttgacagtatcttggttagaacccagtttttttattttggttggaagttgaaatttccccataaccattcaccagtcaaagttttacccttttcaaattttctaccgcaagaaatagccatccagagaatttgccatcaacctagctacccagggtgggtatgcacactccaccttcagggttttgctggtctttccatatccttcctgttactcggagcttcaactttttcctgtctccacccgagaagaaaagcgccatgttgcggtaaatgatgagaccctcatgggtggctcttaccttcttatgggtacctctaatgctttttggacccccctaaaa

SEQ ID NO: 74573 - DNA, 470 bp, Glycine max
  Clone ID: jC-gmfl02220113h07d1
atattattatataaagatagtctataatcactagaatttctatatatttatacttagtatataataattctagtgattatagctaagccaatatatatcataatataatatacccttttcttattcaaagaatttatggctatgccttatcatttttagtcaaagaaaagaaattatggaattgaaataactcactcagaacgccctttaaaagattacgcggtacgattgaatcaaataagcccttatggaataaatattcagctgcttgtgaaccttcaggtactgccttattcaatgtttgttcaattactcttttaccagcaaatgcaatataagcatttggttcggcaataatgatatcccccaacatgccaaaactagcagttacccccccagtagtgggagatgtaagtatggatacatagaataactttttatatttttgataatcatataaagcagaagag

SEQ ID NO: 74574 - DNA, 525 bp, Glycine max
  Clone ID: jC-gmfl02220113h09d1
gttgataaaaataataattttaattaatgtttatgaaatactgaatttataacaatttcttacataaatgccacacaagcaaattcaaaggagcccgaacaaacttacacaatcgaggattattttttgttcatttcattgcccttgatcttcaaataagaacagtaaattattcatatcacagttacagcacatttattaaacaagttgtgaaattgtctgcttggttccttgggtaatggaacaaatttgtacaataagattattcaccttccacattattaaatcaagcttccaaccaaaatgattgcatgggatctttacaccaatagcttccaagtttctttgtagtccttagtaagcacaccagtctttggtcttcggtcttcggtcttctacaagatgtttattcttgaatagaacaagtcatgtgatccaagaaatcaagagttctgaaactgggatttgtagatgtcatgaccagaagtggctggatttactgggcacagcctaacagagaatgag

SEQ ID NO: 74575 - DNA, 499 bp, Glycine max
  Clone ID: jC-gmfl02220113h11d1
acgtaaaattaaaaccagtatatgtcaatgtagtagcttatcgtgctaggtgagtacaacaccatggacagaaggctaaaagttagacctctttttgtagaaaacaagagaataagaggtattattgtttctacttgattcatttatttgtactaatttctagctgactattttttagtttcgacgtgcagatttcatgctccatgcttttaggtattccacggtgatatgctcagtaccgttattgaacacaaacaaatgagcttttttctttattgctagggtaggataaaccctagacaagatgtttgttcttcctccggctccaaaactctccactactgagtgatcaatcaaactcttgagagagagctttttatttttggctaaatccacattcacaaagcctgcaaatgatggcttgtacaattctctctttaaagaggaacttcttgcatcggagcacatgaaaatcacgtgctcgtttggagctttaaaa

SEQ ID NO: 74576 - DNA, 405 bp, Glycine max
  unsure (1)..(405): unsure at all n locations
  Clone ID: jC-gmfl02220113h12d1
gcgcgggataattgtgatctttcttgtgaaaatagttgcgagcgtagtagcattacactaaatcattaccttatgatgatttgattagcacaaatttacattagtttcatggcatccgatgcaaaaatgattcacaaattaacaaaggcatccgagtaagcccgaaataattatatatcatcatatacgacgatgaccgaaaaagtataaattgtacgacgaaatgcgccaacgctggtttcactntcatgaggggtaaccttgtaaaacctttttttccattccagtaaaattttcttgacagacctgtttctcagtctttactggtggattgatcactgatccattatgcatcgnggcactggatttgaaaggaaagtttcgttaggaagcaacaccgatgga

SEQ ID NO: 74577 - DNA, 527 bp, Glycine max
  Clone ID: jC-gmfl02220114a01d1
ggtcgtaaaactaagcaaaaaaacaaagtaaaagtaatttcacaagtatcttatcatcggcaccaaaaaagcaagcgcagagcgcaggggaattcttaatttcccatatatgataaaaatttagactaatctagagctcatcgtgagaatcatcctcgtcttcgccttcgccacctgcaccacctggggctcctcctgatctctgatacacagcactgatgattgggttgcaaacggcttcaacctccttcagcttctcttcataatcttctttctccacactctggttgtcatccagccattccaatgcttctttcactgcagtctcaattttctccttttcatctgactccaacttgtccgcgagcttgtccttgtcactgacctgattcttcatgttgtatacgtaggtttcaagactgttgcgagcatcgatcctctccttcaccttcttgtcttcctcggcaaactcttctgcttcacgaaccattctatctatttcttcctggctaagacgtcccttttcg

SEQ ID NO: 74578 - DNA, 559 bp, Glycine max
  Clone ID: jC-gmfl02220114a02d1
gaaggagcaactacaaacatcacaaggataatacctaattttggcggtgtaacacgaatcacatgatcataattccaaagaaatttgagatctaggtgaattagttgataactcttggaactttacatagtgatcagtagaataatactcaaatccaagttcgtttggtcacttttaatgacaacatactgataaagaacctgtcaggtaatctacatgtctcctctcctgtacaattccatccaccttcagtttctgcaggtaaaatacaagcaattcttccctcaccaaaagagaaactcaaatgacaattttgtattgaagccagctatacaactcgaacccatgttccaccacacattggacatccataagcccagcggctgatccaccaaatctcccggtcattttgactgggaagattggtggaagctggtgaggcaaaagcacaagtctgccgcagacatcttatacactgtatcaaacagaagttaaatggagaatgagaaaagtaaataatatttacatgcaagcagataatgaaattaaaaggtcagga

SEQ ID NO: 74579 - DNA, 523 bp, Glycine max
  Clone ID: jC-gmfl02220114a03d1
gtaaagctagaagaatttattactgtcgaaatctcaccataacttacaaagaagccctatggtgaggatcaccttagaacgttcaacaggatctaatgtgctcttaacttaattcattttccacatataattgcttagctttgtcaacttctgagaacttctggaaagttatacaattatttctctaacttcaatctttacaaaacatgttataccccaattatttgatgcaactagaacggtttatcacatcatattttctcaagcgatcaagtccatccaacttgttctacagttgctttcacgttccattctatctatgcagccgaaaacactctttcttgatatagggagggtttacaagtacaaagcctctactccattagtggataagttgtctccgaaatgtgaacctgactttgctgttctttatgcgacaaagacgactcatgactactgtgcattaaattaccatctttgcctagttttgcatcagcaatggttgacagaactccggatcagt

SEQ ID NO: 74580 - DNA, 544 bp, Glycine max
  Clone ID: jC-gmfl02220114a10d1
gggaaaagttttttttttattagcgaatattttctcaattccacagatatatagttgtataataatactattctataatacaacattgatgtgggcaaccgaaaggctaattaattaactacttaggcatgaatttcttcttgaacaagcttttgagcactatttgcaacctctgatgaacgaagtgtatattgacttgccatcactgcatcatccaatattagataaaacgactccttcccaattttctgaacaaacttgggtattataagctactgcatgaccttcagccatgggtttacgaacaaaaccttaactccatactttcccaatattgtaattaactcgggcaatgcttgaatagcagacgtggcaaggtctgacactcctgacaaattaagtatgatgtgctcaactacatctacagtagagctttgctcacttcgaatataccttataatcctatctttgacggataatagaatttgcagagtaaacgggagaaccaagttgtacaacaagaaactctgggtatgacgataca

SEQ ID NO: 74581 - DNA, 542 bp, Glycine max
  Clone ID: jC-gmfl02220114a11d1
accggttcaaccacaggaaccgtgttttttggcaaaatttcataaccaaaccgatattttgaacattgttctacataatgaacccaacaccaaaacacagacggtaacgaatgctacttaaaaataaaaaaaataaataaataaaaataaaaagaagcatgcaagtatttttatcttacaagaacaatttgattgaactcatacaaaccttcaaaagaaaccagtaaaacccatatgcttgcacagttagaaactactgagaaattactatttgaagataatccaaactgattgccattgacaccatacccagcctaaaaccaacccaaacatggcgaagatcgacattcgataaaagacactggccttggcaacttccttgagcaaacaagtggagctctttctttctgatgttacaaagattaacaactaagataacttggctttcaatggacccaatgggatcttactcaagaccttagcatcaaacacagcatactgctttttaatctcaataactgccttctctgcaagtggatcta

SEQ ID NO: 74582 - DNA, 575 bp, Glycine max
  Clone ID: jC-gmfl02220114b02d1
ccaatatcacaattgttggtcttcttctgcaggccaatggattatcacttgcctggtctgcgccagccaataggcaatgcatcacatccatggaatttcacatccccaatgggcaattctatttctaccttttggacaaaacaaattcagagttcaagcaattccttctacatgcctagttcgaactagagcctgcagcacaagaagcttttgtgttattgtctctcaaaagaccgtccccttcattgcctggtgttaaagtttgaccattatattcctgaactgaaccatcctctatattactgggggcagaattgctattgcttctattattgtcgctggtctccaggcgttccatcatgcgtgacacagttgcaatccctgcattaacttctcgcctaacttcagatccaaggtcagacatagtgttgttccgagagaaccatctctccttccaccctcttgtgctcttggaaattgactccttgtatcttgttgatacagcattcagtttagatttcagagattctgaaaatgaatgtaatctgatggccctgctctgtcttgactacttg

SEQ ID NO: 74583 - DNA, 566 bp, Glycine max
  Clone ID: jC-gmfl02220114b06d1
catgatataatatatttccaatcttcagaaaatcccatcacacttcaaactaaaaagtcaagagtctccatagtatctcaacatacatgttcagatagaattataatgcacgatgttttatatataactgcatgtttatctaaggagaagaataggtgccagatttttgctgcatgaatcgctttctccaatgagtttaactaatgaacataaaactacaaattgaagaggggtagaataatttggaacctaatttgcatatctacatcctcaaccgaatccaataaaatacaatgtactaccttatgatcttaaccattgcttctacaaattaagtcgacagattatgctgatgctattcttactcagaatgcatagtttccagctttcgaatagagtgtgcacacctactcaagaagcttattgcaggtgcctacaccaacagcagcagcaagatgccatgcagcatgaaggtaaggagttttaggaaataaatcatcagctacaaaaagcataccaccaagtaacgacgatgtcttatgcactgtgtgagccattctcaagtc

SEQ ID NO: 74584 - DNA, 456 bp, Glycine max
  Clone ID: jC-gmfl02220114b07d1
actcatggaaatatattcaatcaaaaatcaaacaaacaagatgtaagcaacacagcacgcacgcacaagagggtgcaagagttccaattatagctaaaagtattagctaatttaagcaatcatacaaacccaagttacacaaaagagaatacttctagcaagcattctgctattacaacattcgctagaaaagataagcatctttctccaagaaccgccagactcgcatgaaatcaccagacaagaccaaaatttttcaaatgtctcatgctttgctggcaatgttgttagaaagccagtccaaaccctcatagagaccctctccagaagttgcacaagtgctctggatataccagtggcgttgacggagtgaatgaagtccaagcttgtcagttatttctgcagcattcattgcattaggaagatcttgcttgttgcaaaaacaagcaaaacagc

SEQ ID NO: 74585 - DNA, 503 bp, Glycine max
  Clone ID: jC-gmfl02220114b08d1
caaggatattgaaagaaaactatattgaattaaaatcgttgttgagattcaaagcccctaaaatacaactgacatttgttcgcagaatacaaatgaattggcatttgttcgcataactagaacgttaaaagaaagacaagagggccagagataatagaggatagtttttcacatatacagcccttcaggcaccccttctttcttcttaaacatcactttatccttggccttcttaaagtcggcatgagtcaccttcattcgacgttctcgtagagcaagtaaaccagcttcagtacatattgcctttatatcagctccggagaattcgtctttagtcataacaaattcttccaagttgacatcatcagctaatgtcatccttgacgtgtgtatctggaagatgcgtctccttgttttgatatcaggaagaggaaattctatcttcctgtcaattcgaccaggtcgtagcaaagcttgataaagactttcaattctgttggttg

SEQ ID NO: 74586 - DNA, 515 bp, Glycine max
  Clone ID: jC-gmfl02220114b10d1
ggtaccaccatgcttttgtattatgacaaacatcagatattctctatactaatcatgctcaagacaagggaaaaaaaaaacttttcaacgggatccatcatccatcaccagacccaaatctacttcatttgatttagaaaattcctgttaggcacatttgcttctgcacatcggtgcatcgtaaatgacctaagggagggagcttacctgtttcatacctgaaatgacctggcaaaatgagttacaaataagggtgattcagctgcagcattcaattaaagctacagaccaaaagtgcgctaaaagaaaatacataccacacgtcaccgtatttcaattatccacgttaactcaaaatattgcttgatttccaaaatcccagggatcatcaaaatggcatatgttagcatttcattcttcctttttttattgaactgcctaaatacaatacaaaactaacatctaataaaagaaatccatgtccctcaagcctcctgttcattacagctagaatt

SEQ ID NO: 74587 - DNA, 391 bp, Glycine max
  Clone ID: jC-gmfl02220114b11d1
aaggaaaaagggcccaaaatttataaaaccccccaaagaaaaaccccccaagggaaacccctaaaaaaaattggggccccccaaaggaaaccacaaaaagggaaactggggccccaatttaaaccccttttaaacccaaaaaaaaaaaaggagccacccaaaatgtggaaaggggaaggaacccccgaaaggaaccccggggattaagaacctaaaagggcccgttttcccccttggggcccccaaagaaaaccccccatggggccccaaagacccccaaaagggggtaaccccgcctaaaaaaagttccccccccggggggtttggaaaaaacccgctttgggggggaaagaacttggggaaccccgaaaaataaattctcccctggggg

SEQ ID NO: 74588 - DNA, 285 bp, Glycine max
  Clone ID: jC-gmfl02220114b12a1
accgcggtgggctccagctttgtccctttagcgagggtttattgcgcgctagaaaaaacatgacataccggaaaaaacaaggaggtggttgcatagctttggaatttcccaatgaaacgctcaagtatggtcgtccttgtcatggggctttctggagaggatcatgtgccttggcgagaaaatgccagagtgaccccctttgggcaaataatccgggggcttgaagagcatttcatgaacatccacggtccccttgggcgcgattcccaaagcggggagaacagt

SEQ ID NO: 74589 - DNA, 544 bp, Glycine max
  Clone ID: jC-gmfl02220114b12d1
aaaatatatatattaatcacaacctttttcttttggcaaataaggtttccggaatggtgtgccaaattcgtatacaacaagcatttctctattaatatttgcgtgtttgtgcttgctgcatatcttctatccaacaccatttaccaatatcatccagggttatgttgtgaatgcaatgcatggaagagaggagcgaacactaccaactgcatattccacaattcatgttgtacaaaacctataccaacttggattacggttaggaatgatccttagccacgctattccattggggaaggtccttcttcaattctgatgtcactactatgctcgctgcctagcatgattgccattagcataagtttgcctgcaactggaaaatccttgtgctgcatcaatattgtttcaactgaactacccatatcccccaaaatagaagtctccatgttttcttgtctcaaggaaaatacttggccaaacccttcttcaaatgttcactttgaggtccataacacctacttgaagccttgaaagtatagtattt

SEQ ID NO: 74590 - DNA, 235 bp, Glycine max
  Clone ID: jC-gmfl02220114c01d1
gctcgctagaaaaaaaaatgagagtacctgaaagaaacaaggaggtggttgctatagctttggaatttcccaatgaaacgctcaagtatggtcgtccttgtcatggggctttctggagaggatcatgtgcctttgtgagaaaatgccacagtgaccccttttgggtaaataatcaggggtcttgaagagcatttaatgaacatccacggtccccttgggcgcgatttccaaagcg

SEQ ID NO: 74591 - DNA, 557 bp, Glycine max
  Clone ID: jC-gmfl02220114c04d1
gctgtgacgttttctatacaaaatctggaaaacaatgagaacccaaactcaagaggactacataaaaattgtatgcatgctagtatgctacttagtatgctactgaaacataaagaaaaatcatcgaaggattctaaggtttattttgttgtataaacattagcattaactccccaagaggactacataaaaattgtatgcatgctagtatgctactgaaacataaagaaaaatcatcgaaggattctaaggtttattttgttgtataaacattagcattaactccccatgtttccccctctcagcagaataaaaagtcagcaaactccggaattcagttctgcatctttctcaaaaatatcccacccatcatcaagaagagcattgtgatcagctttggatttttcctcgtcatgcccaatcttggaagaaaggctttcaattgaggttgtccagcttgtcttacgtattccagatgactcactatggtcagaacccgcatcagatgccaatgttttgtgggaagaacctgatgaagctaacttgcaactagtctg

SEQ ID NO: 74592 - DNA, 356 bp, Glycine max
  Clone ID: jC-gmfl02220114c06d1
gtcattacacttcaaactataaagtcaggagtgccccatagaatgttaacatacatggtcacgatagaagactaatgcaacgatgacaaaaatataacatgaagtttataaaaggagaagaatacgggccaagatgattgctgcatgaatcgacatcaccaaggaggacaactaatgaacataagactacaaactggagaggggtagaataataaggaacccaaacggcatatcaacgtactaaagcggaaccgaaaaaaacaaaggactaccttatgatcttaaccaaagctagtacaaatgaagtcgacagaacatactgaggctagacccccacctaagggggagctcccagc

SEQ ID NO: 74593 - DNA, 489 bp, Glycine max
  Clone ID: jC-gmfl02220114c07d1
atggttgatttacatggttagaccagagaacttttatgaattccatctgaagttgcaaatacaaatacatatcacaattacccccgcacaaaaatgatagtcctctaaacactctggggggagggatggggttacaaattgatcttcaaagttaaaatctgctttagccacgatgaagatagccttactccgatgactaatcttcaatgtattatcaccgtataaactgacaagagccaggaaacaattttgacaaccacaagtgcttgaacttcattatcaaagcaaagaagccatagcatggaatgtgcattacacccacaccaaagtaccataagggtgcatatggggatgacagatcaaggaaaggataaggccaccataatgaaacacaagcatgaatgatccactgaaaaatcacatatatagctgtccacaaaataaaatatgcaaatcgaaacactggaaatctcatgcaattcaatgatg

SEQ ID NO: 74594 - DNA, 489 bp, Glycine max
  Clone ID: jC-gmfl02220114c08d1
gttggcaattttgaatgaataactcgagtaatgtgcatgattttacaactaagaactttttttaatcttgaacatttgaggaataagaagatcggatatataataaatacactccatatatatataatggcatgcatgtaactgtacaaaatcgatcgcagagattatcggaagaaaggtctgagtgaatgaaattcaggggacacgctccaatactcgttgtaatgccctcctgataccttcctgatcaagggatgtagtgagatgtatctcctgcacctgcaccacgggacaaaacatttgagacattttttaaatgtgtatatctaggttaaagtggcccattccattgggttaattatttaaggaaatttgtcacctgtcttccagcccgggcaagtagagtaaacctttggttcgtgggaggtgcattagaaagccaaagctgcaagacttgcgagaccactcttttttcaaacccttgacggc

SEQ ID NO: 74595 - DNA, 498 bp, Glycine max
  Clone ID: jC-gmfl02220114c09d1
aaactgcataatataacttgacctagttccccatttttattcatatccatatatatcttaattactccagtcttaatatcaaatatagcgaggctaaaatgaacattcttgtctcataggctcataaccaacatccaactttcagagcaaaaaagtacaaatataattggaagttcaaaagtaaaaaaaaatcatatatatatatataaagaaacactttgcatttaatgaattcgtcgtgattttttttcaaaaagaagcacgtggagaaatttttagcaaaggaaaaagaggatcaaagttaacagtgaagcctatggattccttatgctctttaagatctaaatctccccaccttccatttatatattgatgggggggcagggcatataaaattaaatatatgctccaaacatataacatgtacgtaccttaaaagaaaaactctccaatttctcgcgtatggatagaatcacaagcaatcattttgacggatcg

SEQ ID NO: 74596 - DNA, 376 bp, Glycine max
  Clone ID: jC-gmfl02220114c10d1
gtaaaaagttcgttacattaagttggattcggatacacaagataattcacattatctgaagtacttcaccaaacacaaatctaaaaactctcaaaagtcattgcgatctttgacgctcactttccggggacgaagttggcggcctaggcccagtcgttgaagttgacagggtcagcaaggtgatcggcgaggttctgcaatggaccctttccggagacaatggcctgaacaaagaagccgaacatagagaacatggccaatcgtgcgcacttgagctccttcaccttaagctcagcaaaagcctgtgggtcatcagcaaggcccaatgggtctaagctgccacctgggaaattgggtcagtgacctcaccgagggg

SEQ ID NO: 74597 - DNA, 523 bp, Glycine max
  unsure (1)..(523): unsure at all n locations
  Clone ID: jC-gmfl02220114c11d1
acaacatattattttaacaaaaatttatttattttaatactaatcatttaacaaagggagaaaaagattaaccaatcgccaaagttcaaggcagatctggcttaacaaaacttagcatactaacgaattatttagcatttttacattcacttgctcaaaaaaaccaaacacgctagtaatattatgtttgagtcagcaacggagcaataaattcccgacacataatagtaatagtagctgcaaacgtggcagatgcttaacgaaaaacgacaatatttacatgcaacccacggtcatcttagctaaagacttcagcttcagcggtgcctgcttctggtctccccactgtacagccagtcatagacagtgggagtgttgggaagtggtttgtcaaacatctgagcaccgatggtctttgtggcggagttgctcccaggatggaagacgctcctcaaacgttgtcagctttacgggccgatcccggtgtcgttggaagtcgcggagtcatcggngttgttggtgt

SEQ ID NO: 74598 - DNA, 504 bp, Glycine max
  Clone ID: jC-gmfl02220114d01d1
gaaaatgtaagtacatttaatatcttgcagtataaaatacattcaattatttcttcatttagcaagtagaagaatttgtaggaagattattcacttctaaatgaacttgatgccactgcaaacactttataatgcacaagtagtgaacactgataaacctttttttattttgtttttcaagatgaagatgaacactcacaacaacatgtttggcttttcatacaacttcccatttgggcgtcctggatatgttaggcagggattgagacattgatgggatcatatttttcacccagtataccacccttctgtttttggaattggatgtacctcaatgtgctggtaaaaaaggcatccgaagctggaagagctgaagcagagtcactctgcatctcggtcgtgatcaattctataagcccttggatagtagaactagtgatctgagggtttcctttctcaaaatagaaatgtacttgttcagtatttcaacaaagagcgtcactg

SEQ ID NO: 74599 - DNA, 533 bp, Glycine max
  Clone ID: jC-gmfl02220114d02d1
gagagaaatatatggaagcgataaattataaagaaatattgcaagtaatgataatgtgccatgttacagccgaaccataaaatcaaaacttgagtatatattagcggagaatacatcaggcaagttgatctcaaaactgctgtatctaaccaacccaacattatgcaccaccaactttctgagccttatttcggcgatctctagacccattatctctagagcgtgcatgtttgccccctctcccatgccatcctccccttccttgcttattcttgaattctcggtgtttgccttgattaccacgaagcaggctccagtattctttttcggcctcaccagtcactggatctagaatagcaatataattctttacaaccaagccatccttttctgaaataactgcagcagcacgagctttctgagcagcttcagtttcttcaaagcggatgtatcctgactctgctccaatcttgaaatcaatgtacttcacggtaccaaatttctcaaagacactctttaaatccttacgtgag

SEQ ID NO: 74600 - DNA, 423 bp, Glycine max
  Clone ID: jC-gmfl02220114d03d1
ataagaaaagtatgccccggttttcataatttattatttatacaacatcccaggtcttttttctttataggctttaggaaaagaaaatttacccggtttacacgtgacactaaacggcaaaagcgggcttacagggttttgaaaattttgaaaccctccgaagtccgaaccaaatccatcaccaccttttttatgcattccctggttccggtcccattggccaatttttacaaccattacacaacctcgccacgggggtggtttaagacgagggtcttgcttgtcaaattctgggggtcccacatcggtgggacgagagaccttctttcattcggaccatgcgcattgggactcgccccgggtgccttatccacgggaacccgacccggattacccgggtgcgaccccttttcgaaaacacca

SEQ ID NO: 74601 - DNA, 435 bp, Glycine max
  Clone ID: jC-gmfl02220114d06d1
gccacgaagcaatgtagtccaagtaaaattgaagcctgaataaaatcatgacggccctaatcttcaaaatcatgccgggggacaataaatgcattacaagaaccttgataacaaattctatggggactcacattcaacaacgttaatcaatttagtttaacccacaacggttggaagaaacccaaagataaattacaaagtcgggcctttttcccctcagtttcccctttgcttgttggggaccgcatggcatcatgcattgcaattaccgaaaagcatttttctcaagtagcttcaggacttcattttgattggttagcttcgcaacatctattggagttttaccatccatattctggagagtaactgcagcaccattttcaaggggaagggccacacattcctttctgccataaccagctgcataatggagag

SEQ ID NO: 74602 - DNA, 555 bp, Glycine max
  Clone ID: jC-gmfl02220114d07d1
aaacacacatcatattactatgtgttgtcatacatgcattgtaatgagtggatattccaaagcaattggtccctttatccctccttaatccttatgccgtaaatggcaccatcccttgtaaattgtaattgcttcttcagaaatagaattatacaaaggtagttgcaatatctatttgccaaactataaatgtaaagacccttcttcccaatcctagtagtgtcccaattgtatttacaaaggtgggacaagatatgtatatacaagtacaaccatgtaacataatgtaacaataatcatactttggtctttactagtgcacattacagggagttattatgcactgaaacccctttgcagagaactccagggattggaaggaatactgacacaagcttgtgctgaagcctcagccatttgttcattctttatccctacattgcagatgtttgcaagggacctcatgtgtttcatcccgtattgagacaaggatccacaatgtgtctcaaaagtcctcaccatggttttcaggcaatgcccgtcatcaacaagtgc

SEQ ID NO: 74603 - DNA, 405 bp, Glycine max
  Clone ID: jC-gmfl02220114d10d1
ggaccattaaagattaaaactactttactgggctgataatatattttggtttggctcaattaacatctaaaccgacaactgccatgattttccaattatccatgcgtctcggaacaatataaacatcagtagatataaatacataaaattatgtatacataaagaataactaaaataacttaataaaaaactacgtatactgaatttctgaaatacataaaaactgtagatacagtataattataaaataaaaacacgatttttttaatgtgttccctgcccacgtttaaactttcttgtataacaaaaccgttcgtcatccatcaatagcagataacagaaacttatcaattgaattgcaaattgaactcgaaccacaagtgaaaccttgaaaataggaaaggt

SEQ ID NO: 74604 - DNA, 492 bp, Glycine max
  Clone ID: jC-gmfl02220114d11a1
agccaaaaaaaacattttaattgcaaaataccaccagtaaagcagtcagaattgagttatatcccaattccagtggaattacaaagttctatttagaatatatagaaacaagataccaataaaccatcaaaagaaaatgagaaacaaaactgtatcataatgacattgtcgacaaagttaacacttgctctagaaagagttcaaacaggcaaaataataaaagacaattaacatgacaactctaataaaatttgtgattaactataaccactcaaacctaaaagtcctccaaaaagatgtctcattgggttgttcaaattcaagcctttgaggcttgcttttcctttgccttctggatcttcaagaccttcttcacaatcttttgctcttcaactaagaaagctcggataatcctctccctgacagcacttccagacaaaactccgccatatgcacgggtgacagttctacggtttctgggtaaccttgatc

SEQ ID NO: 74605 - DNA, 365 bp, Glycine max
  Clone ID: jC-gmfl02220114d11d1
ggggcgaaaaaaaaaaaaaaaaaaaaatggaccttttaaaaaaaaaacgaggggaaaccttaatcccaaaaaaaaaaaggggcccccaaagaaaaaaaaccaaacccaaggggaagggggaaaaaacccccaaaaacggggggaaagggaaaatgggggggggaaaaaaaaaacgaaaaaggggggaaggggggccccaaaaaaaaacgtagggggacaaacaaggggcaaatccccggggagagtaccaaaagaaaaggggccgggccggggggccacaagagggggagggctcgccccagggggggggggggaaaactggcctagccaccccgggttccccccctgggggacaaaaatccccc

SEQ ID NO: 74606 - DNA, 387 bp, Glycine max
  Clone ID: jC-gmfl02220114d12a1
aaaaaaaaatttcttggtcttttttctccaggggggttattttcaccttttgcttcacacaacatgggatttccaaatcccccgcaaaacccccgggccgaccttttcaagccatcatgaaagaaccggaaaaaaaaaaaatttgagatataacaatttttccttgttaagcaggatcccgggcccggaatatattagggggcccaactaaaggcaggggccaagttgcccctgggcttaggggcttgaaaccgggcccttacctagagggggacagctttttttattttgaagggctttaaaggggtccaaaccttttccggggagggcttacacccccggggcctactgggaaatgggggagggccctttggggaaggaatcatt

SEQ ID NO: 74607 - DNA, 357 bp, Glycine max
  Clone ID: jC-gmfl02220114d12d1
ctcttcccccggggcaaaacatcccggccccccaacacactctcccccccccccccaactgggggccccccccacgggccccccagcgccccccccgggaccccccccccaccccaccccccccaaaacccttagcccggccccccgccaacgccacacccccatctggccccccccccccccccaatccggcgaaaaacgcccggaccacccccatgctaccgagcgccccctgcatcaccccccttaaagcccgaaccccccccccctacttccacccccccgggcacaaaacccgaaaaccccgtgccccctcctacccccccccccccagccgggggcgcccccccacccccc

SEQ ID NO: 74608 - DNA, 243 bp, Glycine max
  unsure (1)..(243): unsure at all n locations
  Clone ID: jC-gmfl02220114e04d1
aaaagancaaaatccaaatttcacccaggttgatgggataattattacttataacaataagttaaacccaagataataattattatgaaaaaaaaaaaaggagaggtccgggaaagaacaaagggggggggggttatattttgggattttccaatggaacccttaagtattgggggcccttgtaagggggtttttggcaaaggatattgggattggggggaaaaaggccaaggtacccccttt

SEQ ID NO: 74609 - DNA, 475 bp, Glycine max
  Clone ID: jC-gmfl02220114e05d1
gtaaaaatcaagtaacattaagttggattgggatacacaagataattcacattatctgaagtacattgcaataacatatacttcaccaaacacaaatctaaaaactctcaaaagtccacaagtcatccttttctttcatgctcacttgccggggacgaagttggtggcgtaggcccaggcattgttgttgactgggtccgcaaggtgatcagcaaggttctccaatggacccttaccggtgacaatggcctgaacaaagaacccaaacatagagaacatggccaatctcccgttcttgagttccttcaccttaagctcagcaaaagcctctgggtcatcagcaaggcccaatgggtcaaagctgccaccagggtagattgggtcagtgacctcaccgaggggcccaccagcaatacgataaccctcaacagcacccattaggataacttgggtggcccacatggcgaggatgctc

SEQ ID NO: 74610 - DNA, 529 bp, Glycine max
  Clone ID: jC-gmfl02220114e07d1
gatgcatgctttctttttcacagataaaagattgtcacggtcgaggaagatcaaggtttggaccatccaactacaactcattgaatgtgaataagtgtgggagttgaattagttcaagggcaacctcatgcaagagactcccattacgagagtagctatacatgtacaaaaaattctttagaattttaatttgtaataattacacgaaaacgatttttcttgagtgtaaactcatgacattctcaaataaaaattaaagacaaatctgtagaagtatcaaaaaaattcatttaagaaactgattttttctaataatttttttttatcagttcatataccatttaaaaatttaacctactgatcttatatttaaaagatgaagttatttatcacattttaataattactttgaatgattgaattagttgagttgatgaatgattgagttagttggaactgagaaaacaatgcaaacatgtgcaacatcaacaacaactaattaagtggagtgatgatgagagggactcac

SEQ ID NO: 74611 - DNA, 453 bp, Glycine max
  Clone ID: jC-gmfl02220114e08d1
aaaagggaaccaaattttctgcagtttttatcttcttttttggcaactctgcagtttttatcaaaaaaaaaaaactgcactgttaggaaataaaaccgaccttttaccaaggggtataaccataacaaattggaaagggccactcagtgagggtaactgacaaatctagtcaacaaaaaaaatgctgctgctatcagcaactaacctgaaaaacaaaaaatcccatagcaaccctgcaaaaaacaggcaatcgacatgagaaccactattatagatatgggggaatgcccacttggcaaaaatgtggctgctggcttgctgcttttttactaacattatccaaaactggtgctactggagacattatcaccgttagaccattttttgaaggcccccggtactaaatttctaccagccaaaaacccaaaccttgagcttaacattggcaatcgg

SEQ ID NO: 74612 - DNA, 298 bp, Glycine max
  Clone ID: jC-gmfl02220114e09d1
aactaattattgtctcaatcaaaatttaaatgatgcgctgcctgaggcaacacagttgaaattgattttcaagttacggctcacacaatttaacaactaaatacgctggaaaatacaagtcagatcatacccccccccctttaagcgctcctgagtctctttctatctctggtgggacaaaactgtgtaaccaagacacaacctattaacttaaaaacggaaaaatattgaaaaactgttacgactatcacaatggtcgaataaaactgctagcttttaattaagggtttaactttta

SEQ ID NO: 74613 - DNA, 300 bp, Glycine max
  Clone ID: jC-gmfl02220114e11d1
gattaacaatcatcattcaaaaaccacacatgataaaactttgtccaaaagaaaacgaaaaagtgcacatcatcaaacacgatataggagatatttgacacactctaatcatcaaacacgatataggagatatttgacacactctaataatcatcatctccttcaccatcatcatctccatcaccagactcggcaccaacctcctcataatccttctcaagagcagcaaggtcctcacgagcctccgagaactcaccctcttccataccttcacccacataccagtgcacgaatgccctt

SEQ ID NO: 74614 - DNA, 496 bp, Glycine max
  Clone ID: jC-gmfl02220114f03d1
aaacaatcaccaaatagctagcgaaaaagaagtgtaaaattaaggtaaagagttatagcattcctggcatgacatgagatgacaatatagcatataaacgaatggaagaagcatgggggaatgatgatagagttgctcacaaatcatagggttgcttgccagtgaacttgacctcaataggactaacattcttaccaatagacctgaagttctgaccaaccccttggcgtccggcgttgaccttctcagggtacacaccatccttggggtgcaaatactgaacctccccattggggaagaccctgtaaaactggtacttgatcttgtactttgacctgagcctagtcccaagagccaagcactgctccttcctcgccaacttgagaaggttgggaccctccctcatgatggcagcgccgccagtgggcatttaaagatctgttctttcggggagtcccatgtgatgacataaaactcctccacttgggccttgcgc

SEQ ID NO: 74615 - DNA, 285 bp, Glycine max; identical to SEQ ID NO: 74588
  Clone ID: jC-gmfl02220114f04d1

SEQ ID NO: 74616 - DNA, 557 bp, Glycine max
  unsure (1)..(557): unsure at all n locations
  Clone ID: jC-gmfl02220114f05d1
ggaagagaaccttcttgcatttccttcataggaagtacaaagagaaattgtcttgtagtctaatgtttatttgatcagagggcaaacacatgaactgtttggtaaatgatgaattaacaaaatattcgttacaaacagcaacaattcaatataacaacaagcaacctatctttaaatgcaatacaagatttataatgaaaatgaagcaacctctatattcacaacaataatgaaataactggtaacatggagtcctatgtttttatataaatactctccggctatatatgaatctacactccaacagcaacctcatatgatacaatctcaggtggggatgagttcaagaccagtgcaacattctgatcaagttcatttttggattctagctccatgtcattntggtattcagaattgttaactgatggatcatggcattcttcattgtttcctgtgcctgcttttgcatcttggttgactttagtgggcttcacagaatccttttcagtttttctgattgcacttttctgagactgcaccttggcttgaattttttg

SEQ ID NO: 74617 - DNA, 527 bp, Glycine max
  Clone ID: jC-gmfl02220114f06d1
aggaaataaacagtattggcagatgatcatacatgtttcacacagaaggatcagtgtttagttttaaatttttgtacaaaagtagttaaatcatgctgttcatcgagttaacaggttcacagtgtcatcccataaaaatttagtaaacaaaaccatttctaaattgcagcaagttcagaatcttcataactcctgactgtccatcatcggcatcgatgtcactcaactctggccatcaaggctccgctgggcaccggccccgccggtgccataggaagcgtcctcggcagcggactgccagacggactgccatgcctgggagggcggctggacataaaccccggtggcgggatcgacggcggggcggccaatcatcatcccggcaggctgtccaatgggcgggtagtagtaaggcaccccactggcggtggcccccacaagagcagcgtcgtccttgatctcgtcgcgggggacaatatcaacgaggaagtcgaaaatgtcggtgcgggtgatggcggcggcgatgt

SEQ ID NO: 74618 - DNA, 565 bp, Glycine max
  Clone ID: jC-gmfl02220114f07d1
gaaaacttagctccatggaatagagtttcttataacactacaagctctaaaaaccattagacaatgaagttattaatagtcattcctccctgtagaagtaggggcatcacaactactgattaatcttcattacaaaatgaagagaaggaaataaagttgtgtcaataaggaacaggtatacgaacagtggagggacctgatttcatgtcctcaacaattagatttaagagagcctgcgttatagggccttctttgccatcaccaataacctgctcatcccattgcactacagggcaaacaagaactccgctgccaagaagcatcatttcatctgcttgcttaccttcctcgacagtcacagttttcacccttatccctttaagcttaccctcccttaacaagctctcagcaagggttaaaactctcttagctgtgcagccacttagaattttgtcaaagtgtggcattataagttccttatctttagtgacaaaggccacattcatattaggcccttcagcaacaaaaccttcaccatcaagccaaatgcctacaaaagcaccag

SEQ ID NO: 74619 - DNA, 528 bp, Glycine max
  Clone ID: jC-gmfl02220114f08d1
gttaagttgtacacctcagccatatcataactaatcagctgaacttattaagaataatgcccccggtcaggtttcttagagatgacaaatgaaatccttactttaataacaaaaatgttcaatgcaagctcttccaatataaccaattcgcgtagttcacccctccatggaactggactttgatcagcagaaccagcaactcatagaactctggtggcagcgaaaatatactgcaaaaaattatatatagtctgatctgatccttaaaggggttcaagagaagtgtgtctgagtggaactgcggaattacattgtgcttcattcataggggtaacttgattttctcagaccacttgaagatatcagaatacactttatcacctcctagatcttctcctttggctccagcagccactcttataacatcctcaatcaatgcaaagtttcccatgatgtcaacatgagcaccactttgtgtgccccttcccttagaggttggctggaggagaatgatcatattctctaacg

SEQ ID NO: 74620 - DNA, 425 bp, Glycine max
  Clone ID: jC-gmfl02220114f09a1
aaaaaaaaattgtgggaaattttttttaaagtaaaaatttggggccccctttaaccttggccctaaaatttgaaaaaagggttttttcacattaccccaggcccttcccgggttcccccggccccaatgggcccggcccgggggccccccgaatcaccctttttggggaaaattcgggcttgcaccgaccccccttttgttaaaacaaaaaaaaagggggccggccaattaaaacccccttgggttctttttttgaaaaaccggccctttccggggttcttaaaaaaagaccccggggggaggggtaaaaaaacccgaaagggggggacatccgaagggttttttttcctaaaccgggccccgaaaacccaaggaagcgcgggccctaaaaggccccctccccgggggtgggcccaggggccccc

SEQ ID NO: 74621 - DNA, 414 bp, Glycine max
  Clone ID: jC-gmfl02220114f09d1
aaaaccaggaagggcccaaaccggaaaaaaaaaacctaaggcccccgaaattacaccatccccaaaaccccaatatcgggaaccggaaaagcgcgtccgaacgcccaaaccgcccgcagggaaaaaggcccccccgggcccagagtccttcccaagggccccgaaaacccctaaaggggggcccccccgaggggcaaaagacccctttcagggcccggcaaacacggtaattttccccgccctttaattgggccccccccttttaccggccggggggttcccccccccaaaaaaatggcccaaaccgggcacccctggaaaaccggttggcgcccatgagaacctgggagcggggcccccctccggaaaaaccccgggggttctaaggggggcccccctttgaaaaaaccccgg

SEQ ID NO: 74622 - DNA, 538 bp, Glycine max
  Clone ID: jC-gmfl02220114f10a1
agcagcagcaagttgtcccttcataagatacggaaagaagaatgagtcaaatttttcactaacaactagcaagtctcaaaaaaaaagttcatgagaccacaaaaacatttgaaaactaagctccatggaatagagtttcttataacactacaagctctaaaaaccattagacaatgaagttattaatagtcattcctccctgtagaagtaggggcatcacaactactgattaatcttcattacaaaatgaagagaaggaaataaagttgtgtcaataaggaacaggtatacgaacagtggagggacctgatttcatgtcctcaacaattagatttaagagagcctgcgttatagggccttctttgccatcaccaataacctgctcatcccattgcactacagggcaaacaagaactccgctgccaagaagcatcatttcatctgcttgcttaccttcctcgacagtcacagttttcacccttatccctttaagcttaccctcccttaacaagctctcagcaagggttaaaactctctt

SEQ ID NO: 74623 - DNA, 346 bp, Glycine max
  Clone ID: jC-gmfl02220114f11d1
aaaaaaaaaataggggacacataatttttttttttttttgggggggggggaaaaaaaaaaacaacgggcttaaaaattgatgtctaatttaaaacgcgctcaaaaaaaaaaaaaaagaggaaagggtccccaagagggggcccctttttagagaaattaaaaaaattttttaaaagggggcccattttattttaaaccctcccctgttttgggggaaaatatacaaaccccccggggaatttctcttagaaaaaaaattcaagaacgacttttttttttgtgcaaaaaaaaaatcccttcttttgagtttttttataaagaggtcaccccccccctatttttttaa

SEQ ID NO: 74624 - DNA, 373 bp, Glycine max
  Clone ID: jC-gmfl02220114f12a1
aaacaaaaaggcggggatattaaaattacctcatagtcaaacccggggaaaaataaaaacccccccagttttcgacggaataatttattggggccaaaattatacccaaaacggggcttattttaaccttccccacaaatcctttttaaagttttccctatatcccccgggaaacccccctaccctttttttgaaattgatttgctttataggcaaaaaacatgagggggcccccccggttttccattaaaaactttagggcccttggcaagtaaaacatcctttgactttgggttaaacaaattaagcccatattttttgcaaattaacccctttatacaggaaagcgtttttggcaaggattcgggggctc

SEQ ID NO: 74625 - DNA, 525 bp, Glycine max
  unsure (1)..(525): unsure at all n locations
  Clone ID: jC-gmfl02220114g03d1
ggattaaaagtgaatctttatgtataatatatagactagtgtttcatctaatgacattcacttacaaaagtcataataaaagatggtacttaattaattatacaagtcaagatcgagggatgatgatagtggaagcaagatgaatgtcaaacataacttcatttttagaagtggaaaaacggattattccacccaacgcaagtgactccaatgtaggttgcatattattgtgagttgaaccaaaaaaaaaaaagattaaatttgaacctctaaaatgaagttcaaatcctataaaaacctaactttttagggcttttaattaatgggtttttgcaagacaagtctgttcattttgtgacctctaattacttctactgactatatatcttgaagaaatgggtaatctgtgtatccaagcacagggtcatgggtggaaaaggtggtggcatcgggttcgtttaactgagcatcgagctggaatcttgtggngagatctggatttgccagaaaaaggcgcccataagc

SEQ ID NO: 74626 - DNA, 537 bp, Glycine max
  Clone ID: jC-gmfl02220114g04d1
gaacatgaaatttttctgaaagccaaaatcaactaatttcagaattcaatctatcaaatgcaatatcaaactataactcgtccacaccatctcaaacatagctatgctcccagattctaatcaaagttcttaccattgaaaacaactttgccagtacatataggaaaactaacgataaagaaaaaagaaaagtaatagttaccaacttggttttgcaaacaaaataaagaacatcacaaaacaggtcctgctatgattgatactactagggggctagcattatcctccattacaaccgatgaatctcaaaattgaaatccctgacatccttgataaaaattaaactagtagaagaagcccaataccttaccaccaacatttttcctcctagcctcttcatgatccatgatgccagcagaggtagtcaatacaatatacccaaactgtcttgaggggagaagcctagcagtccaaccttcaatctctttgacgcccacatcaaaacggggactaataaccccacacttgttcagtcta

SEQ ID NO: 74627 - DNA, 285 bp, Glycine max; identical to SEQ ID NO: 74588
  Clone ID: jC-gmfl02220114g05d1

SEQ ID NO: 74628 - DNA, 561 bp, Glycine max
  unsure (1)..(561): unsure at all n locations
  Clone ID: jC-gmfl02220114g06d1
agaaacgtgaaattaagatcgtaaaatccttaatccttctcagcctctaatggtaagtactagcgtgactcatttaaataggacaccaagtaacgttcctcagtggcagaacacaggcgggtacaaactgtaaaatgacaatacaacttacacactagcatccaatcatgaaaacccaaactaacaagataactgcagttctgagaaatctgaaaaagattcgaagtgaaagccataattgcttttaagttctaattgctagaacgcaactccggacgaacaaagtctgcatctggtggcacagaaatgtctactgtgggtctcagttcagcgcanactttaatggctccgtgcactgggtctgacaggaagttgctgattaagtccctgttacaggagttccattgtccacagccaccatggcctgctgggttaggatgtagtcaaatcgtggagcccatttcctcgaacccaacctagctgtggttgaacagttatcaaccatgaaagaaacaccacgagcatgcatgaaaggattcaaagagtcaactgcctcgatga

SEQ ID NO: 74629 - DNA, 541 bp, Glycine max
  Clone ID: jC-gmfl02220114g07d1
caaaaggaattatgattatattcacaggagcaatcactctattttaagatgcatcttcatcaaaccagctttcatgcttcttttttgtcttttaaatattaacagcttgttaggccacttccagcaatgcaagggaggagacaagattaaaaatggtaataaaagcaccaaaaggatttttagaaaattacaggcaaagcttgaccaagtgcaaagtataaacataagcctctaccaatatgtgttgggtattatagtaatacaagaccaaaatatcatcctttagactccaaggctaaaagtatcttctttcttggtcccattggtatacccatggccttgagatcctcatcagtcatatgattgagtgcagtcatatcaacttcttcagcctgaaaacctatgagatacttttcgagacccaatgactgcaaaaaatcatccagtgaagcgtcagcctttcgggacaactttttagtagctgatcttttgatatgtactgcaggctcaacatcaatacttttactgctagctctagcag

SEQ ID NO: 74630 - DNA, 466 bp, Glycine max
  Clone ID: jC-gmfl02220114g08d1
attagaattacagatataccctttattgataataaaaatgttatgtttacatggtagacaattatcatcctttatcaggttgcctacccttacactttggaaccttttaaatcatcaatcacagcttgttttttgttgatgcaacaatcgaacccatactttgatggtttgagatctcaaaccacaaagccatgagtgcaagtgacacatctcgttcaataaaaactagataactaataaagtatagtttgtagtaataaataaatgagcatactcttttaaatgaatctatacgtctggacgctcattctgatcaaaaatacgattatggcaagtagggttgcaagggtaggcacaatctatctcacggaagggccttcgatcataaaaccaatcacccactgcctttgcaattgatgtcttggccaccactggggagtcatttctcagccatgtctcttgtatt

SEQ ID NO: 74631 - DNA, 496 bp, Glycine max
  Clone ID: jC-gmfl02220114g09a1
ctgaacattacaattgaagcaatttaatgccataatttacattcactgatgacagcaacagacattgactcaccaatattagaatttttagagggtaataacaaagtgcacattatatgcatacaaagcaccaatgaataagccccttaaccaaaaaaggcaagtctttcaaaacatcaaaacccccaacattctttttccaacttgacatgaatattcacatatactaagcctaaatttgccatcttcccacttactaatttattaaagaaatctgtttaggtctttttttttctagcacaattaatgcctggtggtggtgtctctacaaattaagttacaattagctagtgtctcacatctgataacatgaaacttaccccagcccaaatagaccaactttcttcccacaaacaatttgaagcaacaagaaggatcagcatttgggtgctgctgacaaacaaacgcataaccacaggaaagaatgtcaaaagtt

SEQ ID NO: 74632 - DNA, 524 bp, Glycine max
  Clone ID: jC-gmfl02220114g09d1
aaaccaaaattaaatttcaaataataaaaagtacaggatcatcacaacgttcttccaccgaaatttcccacaataataatccaaatgtcccccaaaaaatacaagcggcaataataacaaatccgtgtcttttaaaaaacaaaaagcggttcgatctatttcggatcgatttttatcaacgaaccgcgcatccgtgacgcgtgaacccgatccgcgaccggtccaaatcgaactcaaacaagtacccctgctgcatcagattcccaatcaccgaaaaccccgaatccggtcgaaccggctgaaccgcaagacacttaactccctccgccggttcaataaaataattacccaccggcggcgacagaaccgctttcccggcgagccggaatctcagccgcggcagcttcggcctcgccacgccggaaacattaacacaaaggtcgaaccccagcgcggcagcgctctccaccgccggaagcctcacgcgccgtcggaacgccgcgaggatcttcccgtaagccggc

SEQ ID NO: 74633 - DNA, 560 bp, Glycine max
  Clone ID: jC-gmfl02220114g10a1
gaacatgaaatttttctgaaagccaaaatcaactaatttcagaattcaatctatcaaatgcaatatcaaactataactcgtccacaccatctcaaacatagctatgctcccagattctaatcaaagttcttaccattgaaaacaactttgccagtacatataggaaaactaacgataaagaaaaaagaaaagtaatagttaccaacttggttttgcaaacaaaataaagaacatcacaaaacaggtcctgctatgattgatactactagggggctagcattatcctccattacaaccgatgaatctcaaaattgaaatccctgacatccttgataaaaattaaactagtagaagaagcccaataccttaccaccaacatttttcctcctagcctcttcatgatccatgatgccagcagaggtagtcaatacaatatacccaaactgtcttgaggggagaagcctagcagtccaaccttcaatctctttgacgcccacatcaacacggggactaataaccccacacttgttcagtctaccgttcaattcaaccacgatttt

SEQ ID NO: 74634 - DNA, 486 bp, Glycine max
  Clone ID: jC-gmfl02220114g10d1
aatactatattgtaaaataaatatattactgaaaacttgtcaccgttagcattgagatgcttattaaatcatcaaatgaattattcgagaggaactaataattattcagtgaatagtatgattcttaattgaaccatacaactctgcacagtgcacaaaatgcagaatttttacaaactgcaaacatcaaggttcaagtggcttatcgttttcttgcttgtagaaggtttcataagtctgcactcttggctttgattctggtaactccaactcttgcctaaagccatcagtcatcttgacgaaatcattcatgtgaacttgtttccattcctcaaaattccactctgcatataagttaggatcattggggtggctccaaacataagcgcaaacttgtaacttttcagacttgtccttcaaggaaacctcaacatcagttctagtatattcaacatcctcaaattcatctaaaatatctagttctac

SEQ ID NO: 74635 - DNA, 444 bp, Glycine max
  Clone ID: jC-gmfl02220114g11d1
aacacgacgataaataattaatttattcgcatcaagctcaccattcaaggaattatgttacaacaaaataaattaaatgccatctttcgatacaataatatcattcagttaagggcttaacatgggaataagcaacacaaagaacgttaatatttttccaattagcacagtaaaagctgaaaaaagatcctgggcaccccttggatatacagttccagtcttggtatccttcagtttgatgctggaagagcaattgtaatcaggccatccaatgctcatattggcaagatcatatttgaataatttggttgtcagcaccaaatctccgagaagaattagggcctttccatccttaatttgggccgaactttttttgccagcccatacaccacatgtcttccttttttgggcctgtgatttgactgctgtcagcctttttacttt

SEQ ID NO: 74636 - DNA, 482 bp, Glycine max
  Clone ID: jC-gmfl02220114g12d1
caaatgaaaatcctggtatacatataatcttaacacaatctaactacaagtagtatatcaactccaaattacgggatttcgttaaaaacagttttatcctaagcccgttacttaagccagggaagacctcagtttacccacaaggggtaagtttcttatttccagcaccacgtggattatcatccttccagtcatcccaagcccttgctttctcctgtgcagcatcatcatcttcatcatcatcggcttctcctagctttgacttcctatcattgtgccaagatgaattgacttcttccatgagtttgacatttctctcttgccatttgttcattatttccatttcttttagcccggcctcctcaatgctcatagctggcatcctatgactaggttggaagacctgagctgccattctttctctctcagttgctatgtttccatttacaaggctagctggtccaaatattaggggttgatgc

SEQ ID NO: 74637 - DNA, 408 bp, Glycine max
  Clone ID: jC-gmfl02220114h01d1
gggaaaacaggggccaaaattttttaaaccccccaagaaaaaaccccccaaggggaacccctaaaaaacactgggcaccccccgcgaaaaaaccaaaaagggaaaccgggccccccttttaaaccccttttttaaccaaaaaaaagaaggggcccaccccaaatggggaaaggggaaagcccccccgaagggcaccccggggaattggaaacccaaagggccccttttcccccctggggccccccaggaaaacccccccttgggccccaaaaacccccaaaatgggggaccccccccctaaaaaaaacccttcccggggggattatgaaaaaaacccctttaggggggaaagaccctgggggcccccgagaaaaaaaatcccccccgggggggccccccccctcttta

SEQ ID NO: 74638 - DNA, 573 bp, Glycine max
  Clone ID: jC-gmfl02220114h02d1
aaaactctaaatttcaccaagcaatttcaaataaatgttttcaccacacttcacataaagctccaaaagtaccggaacaaggcaagttccacggaaagtacaacgatacacagagcacgagaagaaaaacaacacagaaagtaacataatagtgcaaacttctaatcataatcctctccttcatcaccatcttcagttgcctctgcaccaacttcctcataatccttctccagggcagcaagatcttcacgggcctcagagaactccccctcttccataccctcaccaacataccaatgaacgaacgccctcttggcatacatgaggtcaaatttgtggtcgatgcgagagaagacctcaacaacactggtggaattggagatcatgcacacggccctctgaaccttggcaagatcaccacctggaacaacagtcggaggctggtaattgattccacacttgaacccggtggggcaccagtcaacaaattgaatagtgcgcttggtcttgataattccaacagctgcattaacatctttaggcactacgtcacctctgtacatgagacagcac

SEQ ID NO: 74639 - DNA, 464 bp, Glycine max
  Clone ID: jC-gmfl02220114h03d1
aaaacagaagcggaagttttggtttttggataatcacatatgcctacacaggggagtttgtacacatacaaaacaagttcttgagtctcaaaggactatttaaaaaaaatcaaggggaaattaataccaattgtaaagacagaattcataaccccaaaaaattcaaattttgatttactttaaatcatccagtttaacctcatactgttcagcagtagagagaattttgacaccaaccacacccctttgccatttaaaattccccactaacacaagccggtcagcatttaatcgggctgcacgtttaaaaacccatttaagggggttggtttccaaaaccaactcaacaatttgccctttttttttgaaaatgttagcgaccatagcagcacattcttgaagatctttgtccaaggcacacacaatgtcatttatttgcaagttaagctccggtaacagaccct

SEQ ID NO: 74640 - DNA, 543 bp, Glycine max
  Clone ID: jC-gmfl02220114h04d1
acataacaaagcagaatttcatttgattgaatgcacaatttcttcacattacaaaactctctaatttgtacaaaaagtcaatgaatcctgatttctgacaaatttagaacattgcagcttttaatcttcttcccaactcctttctcatcaattgcctatcaaaacctgatgcagccaaaagccctctattttcttcagcccttctcagaaggtaaggcataaccatatctaccggcccaaatggcatatacttgctaacttgaaaccctgcattgctcaaaccaaaggaaagtgcctctgacattccatacagttgtgcaaattctagcttgtggtttacctttccaacccccaattcatatgcttttgctgcagccaatttccctgattcaatattgtgagttgcaagaacaactgaaattgaaccgggtccattagcaatcttttcaagaagaaatgatgagcagccattgaagcaattgtgtgtttcttgaatggtattgtgaattggggatgcatacccaaatgactcagcccatttac

SEQ ID NO: 74641 - DNA, 555 bp, Glycine max
  Clone ID: jC-gmfl02220114h06d1
ggttctaaaataattaataatatactgaataaagtgtcgaagaacaataattaaattaattcaaggaattaaattaaaacaataattatattgatcaactaaatctaccatatgaaaatttcattctttacttgtaaagagccgaaattatcttcaccttaataattgtagatgtagaagaataatcagaatcttcctaaatccacgtaatttcttcgaaaatgctttgcccaacacaatgatattgtcacaccagaagctatgcggcgtcttccatttgatattccatttatcgcctggagatttacaatgctaatgacctatttctgcattacaaacgttgttgcccgaaattggacttcttacaagtagataattgtgcacaaagccggcaatacaaatgatccatcttatttggagaaaagtagccgtgtttgccaaatcaaataaaaaaagaagggcacaatatagttgatacaatgataacagtacatcttcacaatttctttcaaaaagacttagtggccatattatgcaaaagatgtgacagacaca

SEQ ID NO: 74642 - DNA, 443 bp, Glycine max
  Clone ID: jC-gmfl02220114h09d1
gggccaatcagaaatacatatcacacagagaaagaataaagatttaaaagtacatggggatgcgatatgacagtccagggaatcaacaaatggaaataacagcctgttctgaaattgccattgaaccatgacatgttagaagcagaaccctattgggatctcctaaaagaggattgctttaagctgatctcttaaagagcttatattcttccacccaggcataaatactaagacagcacccgggcgttccttccgacatatatggcataaaacagcctcaatgagattaaacccaatgcagtcaggggcccaaaatgctagtgattcacgtgccttggagctatatttctcaaagcttgatttagaaagagcattcttaacgagagcagcgatctgggttttcctcttccgaggtgctaggtgcttttgtgtcttccacaatt

SEQ ID NO: 74643 - DNA, 452 bp, Glycine max
  Clone ID: jC-gmfl02220114h10d1
ggaaaaggaaggagactttcatatatatatttatgtgatattgatatagaaaatgaataggaaagggttgtacatcagtgaccacgcaagaaacatgagaaatgaactagagctaattaattaacccctcgtctcaatctcatgatggaacaattttggagctacgacgtggtggcactgatgatgatcgcagaagaaaaatctcttaactggagtaagggggtggcttaggcatatccttgacgattccgcagacaagctgggtctctgggaggttgtactcatccctaagggacctgttgggagacaagacactcacgtacaattgctgtcccaggtaacgattctttgccatctccgacctcaagttccacattccagcgttgtcaaaagtcaacatgattgcggcccaagactttgggaacacctggatggtgtgcctgctgacagca

SEQ ID NO: 74644 - DNA, 526 bp, Glycine max
  Clone ID: jC-gmfl02220114h12a1
gaggcacgagataaccactttttaccatatatatatagagagagagaatacgaagcacactgatcacaggatgatgctctctttaagtagggaagcagatcttatcagtacacataggtaggttgaaattctagctctagcaatctagctagagaaggtagtacttgcacaacacacagcacatgataatttattttatacacaatctcattctcatggtgctcaagatgcatggactaattaagcaacaatgttggtctgataggcagtgtccacagataaattgggtacccataaaatggccttgcttccaaggaaatggcaaacagggttagttccaggatcaactcccataagttgatgaagcatttgatgattcattccagaagtatttgagtggcaaatagcaagtgcctgagttttggttccatcaccagccaccaatggaaccatgaaagctgttgtttcacggacttcatggcaggaaaatactgcagttctgaaatttagcctatgacacatcact

SEQ ID NO: 74645 - DNA, 556 bp, Glycine max
  Clone ID: jC-gmfl02220114h12d1
gtaagaacgcaacatttcaattttgaaatcaatgaataaagaatcgtctaaatgtgtaatgtcctacaaagcatgtgccctcgccctatacaattgtccctcatgcttaataatgaatcatcttatatactcatttgaggttaattacgctatatgttcccaagagtaacaaccgagcagggaacaaaagcaacacaaacaaatgcatatgttgggatgtaacaaccctactgaaccttttcagggattctctccctgtttgtatcacgccggagaagggtgactggcgttgacccacattgattgatatcatggacctcccagcaacaatgctggtatcaactccacgaggtaataaaagaggccaccacaccttgcgccgttgctctctcttggctttacggatctggttaagttcttggcggatcacagttctcacagattttaagtaggaattcatgtcatgatctctttgtacactttctccagatccataagcagatcggtcacttaatatctcaagtggatgaagtgagttcaagaagaccatctgagc

SEQ ID NO: 74646 - DNA, 509 bp, Glycine max
  Clone ID: jC-gmfl02220115b09d1
gcaagcaataatctgaaagaatgcatttatgcataataatccggattgtgcaccagatattttgcaaacccaagttccaaagtcaacaacttagggttgaatatacagtaaacataaaaaatatggacaatatagacaaataaccaacacagaatttatatggtgtctgattgtgggaagagcttttccaacatgttattcgaaaggatcctattggggtccaattcctttcttgctttattgtatgcatccacaggaaaccgctttcttagcctttcttggagagctgcaagctccttcttgtcctttggaacctcaatcttagcccagtgttcatatgcggagtaacaatcccataattttgcctgagtcaaatgcctataatgaaagaattcttctgttatatctttcctctgccgagcatccatggtaggaaggtacatgattatacctacccaagaaaatatatcattctcagacggacttgaagcaggactcaaggaacttct

SEQ ID NO: 74647 - DNA, 517 bp, Glycine max
  unsure (1)..(517): unsure at all n locations
  Clone ID: jC-gmfl02220115c09d1
attatccatagaaggactcttgtccttgccagtccaaacgcattactaggtagtatacacatacaaacacaacacaaaatcaaagtgacaaccatcgattaataataaatatgtaggacaaaaaaaaaaaaagaacaaaaatatctttctcttgttggttttgaaggcacttttacactcctaaaggggcaagaggttgctgcgatctgatcctgctctttctcaaacgctcggggatgatgaaagcaagctcaagagattgggaagcattgagccttgggtcacagggtgtgtggtaacgtgagctcaagtcatcaaatgtgaccgtccttgacccaccaatgcactcggtcacattctgacccgtcatctttagatgaacccctcctgggtgggttacttcttgctcgtgcacatcaaagaatgctctcacttcagccctgatgaaatcgaaggggcgagttntaagaccacatggagccttaatggtgtttccatgcataggatcactgaccca

SEQ ID NO: 74648 - DNA, 445 bp, Glycine max
  Clone ID: jC-gmfl02220115c10d1
attgaagaacctttttctttttttagcattactaactcagtttagggaacaacatataggaaaatgaatttcctttttccaaccatgtttttttgcaaacacaaattgcaaatttcccctccttataagggcaaacccttcttaaccgaaagaaaccaacctgaacctaaaatcctttactacattgcccaaattacatcttcatatgaagaaacaaagaattgttttcagaatacacgagctccctggggaaaaaactcattggcctttttttcgcccacaaacaaattatgagtttttcttaacgcctccttcgccattttcaacaccgctcctgtgtgcccccccgacttgtttttctcgaccgccccggaaaaaagcgcaacctcaactgttataacctccataacaagtggccctacgctgcctctgattaatctttcca

SEQ ID NO: 74649 - DNA, 504 bp, Glycine max
  Clone ID: jC-gmfl02220115c12d1
gacgtggaaagttttggatattagacatattataagggcaacgctgaaaaaacttccagcatagagcagtggaatgaattacttaggccttctcccacttgaggggtttgaccacttcccatgtgaagtcagggtcttctcttccaaagtgtccataggcagcagtcttcaaaaacctgttatttccacccctcttgagatcaaggttgatggagatcataccaggcctgaaatcaaagttttccttcacaatgttgagaatctccttatcatggatcttcccagtgccataggtgtcaacaaacacagacaaaggctcaggcacaccaatggcataagacacttgcacaatgcaccttctggcaagtccacttgccacaatgctcttagcagcctgtctcacaatgtaagcaccactcctatcaaccttggtagggtccttcccggagaaagcaccaccaccatgagcaccccatcctccataagtatcgataatgatcttgc

SEQ ID NO: 74650 - DNA, 550 bp, Glycine max
  Clone ID: jC-gmfl02220115d09d1
aaagtagaaaaaaaaaattctttcaactatccatcctttgtataaacactgtacattcttttttttgtttatttcctacacttatccacgcattttgaatcaaagctcagggaaacaacactccacgttgttccctcttcctatctctcccaccaccatatattcaaattctatttagtagtaaccacaaaaatttcaacaagccccaccccatttcctaaaacaaaggaaagaaaaaacaaattccgaacttcatcccaatcttccatgtacaagttttcccatccttcagcacaccatcacaatggctgtgtttataaaattaagccataaaaaaccccaattccagggaacttcggtcagccatttgaccgtggcgaggcattttaaccagtcaactccaagacctttgacaagggtttcaaatttcacgcatttttttcctggatgttatgagcaatcaggcatcttcaccttcaggaagagaaatattccagcctcattgttaacccatctgctacctctcttcaatgaatattctccctacaaa

SEQ ID NO: 74651 - DNA, 282 bp, Glycine max
  Clone ID: jC-gmfl02220115e07a1
cttgggattcggctcgagctcgtacaacgtgctagcgattacgtatgatgatcttgttcggagatcagggctccggacaatggagcgatgacttattcttgctcacctatattgccaatcacggtgaaagggcttggcacgtttgggccaatggtagggtacgctatcgggccgtagagaggtgaccagctgctggtctattctaccttggtcctgatggtagatgagggaataatactcccgatgaacaggttttgttcatcggactccatgcatggtggg

SEQ ID NO: 74652 - DNA, 529 bp, Glycine max
  Clone ID: jC-gmfl02220115e10d1
aatgccattattttatcatatcatcacttttcccatcttcacagagaagacaataggtatcttgatttaaaaccataagagacaaaaatgttaaagctttaattaactatgggatttaaaaactagttgcaatgtaacatgaattgaaaagacagcaaactaaaatagcacctaaaatgaaagacaaacaacttcattaattctaacaaagcaaactcaacaaaagtattacttaatttagtcaaacagactgaaacccatgtcatcgtcagactcttcagctggttcttccttcttttcctcctccttggctgcagccgctggagcaccagatgcagcagtatgagcagcaacggcggcaacggcaaatttacttgggtccttcaaatactccttgaccttgtctgccttcgggaaagaataatctgtctcaaccgcaacagcaagaacatttttgtaggcattgacaaacatgtgtggtgctgcagcaagtgttggatatgaaatatcccatgaagtgaagtaacca

SEQ ID NO: 74653 - DNA, 457 bp, Glycine max
  Clone ID: jC-gmfl02220115e11d1
ggtgaaacaaaaaaaggaaactagaatttaaaccttcggggccaaatttacacattaaatgtcaccaaagttgcctaacaaagaactgggaccttccagtaaaatacaagaacctccccacataacggggccccccccctaaaagaagtgccctgaataaaatttaaaactcccttttccccagcccattggaagctttgggtgctccatactggatccagttttttgcacatacaagggcccccactgtttttggccgcagggaacttttatactgaaccatttttttgacttttgtttcaaaaacagattctgggggaaaacttgaaaccggaacagacagttttttcccagccattttggaaagagaaggggccttgagtttgtttagcttccaccaacccaatacattaaagtttggaacacgtggcaacaaggatttttccaaaaactgggc

SEQ ID NO: 74654 - DNA, 536 bp, Glycine max
  Clone ID: jC-gmfl02220115e12d1
aaacaccaatccatttctttctttgaagacataatacaaaaaccaattactgaagtttattaattcaatgaggtcttcctcaaagaattaatccagagtaaaagccatgcaaatcacatgacacttctcagtacttgttagctgctggagattaatccccattctgcaatcaacacatatctttacatttcctcaaactcgttaatataaaactaaaactccactaccaatgaaacatattcatgaaccctttattcactcacgctgctttggcaacattgaactactatctgacacagcaacattaccttggttctccacatatggcctaatgaaggttctcctccaccacacctcaaatgccctttgaagattgggacagctatcaccagttttcaagaaactccccaaccatgaaagcaaaatgctttgttgatcctcaagaggcaaggtgagaatagtcctcccaattccttcctccacaagtttcctatcaaatgacctgcatccatgctgcagccagttgtagtcattca

SEQ ID NO: 74655 - DNA, 462 bp, Glycine max
  Clone ID: jC-gmfl02220115f08d1
aataacagaacagacaaactgtttcttgtcatctttatttacgtcaaaagcataagattaatccaacattagtcacagatcttatttaatctacttcccacaagtcacactttcattccataaattaaataacaaaacagagaaaccaacattagtcacagatcttatttaatctacttcccacaagtcacactttcattccataaattaaataacaaaacagagaaaccatgagctataattatctcgtagtgcccacttcattcattgagggatcttattgagcttacaataagcataatccttgtatttcttggttttgtattttggtggattggcttggttaaccaactttgggtgaggaccaacttcttgttcctttttgggttctatgaacacgggccacgacattcttgtctcatctttgttcactggtgttctgtgaaaaactgccttatattt

SEQ ID NO: 74656 - DNA, 525 bp, Glycine max
  Clone ID: jC-gmfl02220115f10d1
gttgagggtctaccacaagtctttatttaagagaaagacaacaaagttaccatattattatttcacatttttttctaattcttagaaacaaggttaccattttttatctaaatcgggcaccagcagaaagaccctacactacagtggaacatggtacagaaatccaaaagttgcatcgaaacaaccatgaaggaaaataatgaagctattcccagattccgacctccatgaagccattttcagtggcacagcccctaaacatgccattgcaattgaaaccataagccacttccccagcgttggacacagcaatgagaccagccatcccttcatcgagacggtgcttgatcacaaaatccacggcttcttgaagcttcaagcctttgtattccatcaccgctgccacctcacgcgccagcgtgccacgtatgatggcctcgccttcacccgtgcacgatacgccgcacacgtcgcacgcgtaggtcccggcgcctatcagcggcgaatcaccgatgcgcccggtca

SEQ ID NO: 74657 - DNA, 260 bp, Glycine max
  Clone ID: jC-gmfl02220115g09d1
attctccccattattattaaaaataataccatcactaatctcaacaccaaactttcccgtggcttcttacccacccccaacgcaaccatcccataaaaaaaggggctctccacatatttccaatcccaaaaaaaaacccccctaaatatatcaaaatcccaactgttccccctctttcctctcgacaaaaccttcttacttattctctacacccaccaccacattccccaccttttttatgcccccccccttcaacaaaa

SEQ ID NO: 74658 - DNA, 441 bp, Glycine max
  Clone ID: jC-gmfl02220115g11d1
agaaataagatattgcaaatttctttatctctggaatttctggcattaattaatttacatggaaattacatcacttacgcgtggctctagcttaatgatcatatcacaagtggagtaaattgagggggttttgttctgtcattcgtttcaaatggatgaagcactagctcgcaagcctgttgccgaactccttactataaacttgaattaaaccactctcatttgccatatgaagcttctcatccaataatttcttgtattgatcatctcggacctctaaattacgcaccaactcaacctgttcttggaacatatggaattcgtcagaactgagggagccatcactatttgagtcaaggagctgcatcatttctcgggcattttctcctggtgcaccaagctcctccatcacttttgtaagttcctcaatgctaattttac

SEQ ID NO: 74659 - DNA, 452 bp, Glycine max
  Clone ID: jC-gmfl02220115h11d1
aagaaaaaaagtacctttcttattaaagatgttttaatacagactaaacccaaaaaactggctaataatgatagcaaatccgagggctattgcaataagggaggaaacccaagtgagtttctcagttatcctaggtactctatccttcagtgcctggctacacgaacctataaacacggtataacttcccattgcaattacagttccaattaagaacatgatgagaaacgcagcaccagccaaacgcgaaggcaaagcaagggcaggcaaaaccatcatcaatgcatctggttgcaggccatgaactatccctgttgcaaaagtagcaaaacctatcttctttttgcccactgttggattatcaagcgattcatacacgttgacatcacattcaccactttctaaagcaacaattggggcatgtacttctgatgcttctctaattcccatag

SEQ ID NO: 74660 - DNA, 340 bp, Glycine max
  Clone ID: jC-gmfl02220125a02d1
aaaaaggaacaagcattaatagaatttttatttctcacacaataaatacaagagattctgcaaactgaaaaagggatttcttactaaagcaaacttaaacaagaacaacttccactcatttggcatgtaccgtagtaaaacaggatcaaaagccattttttgatagaacacacgtatgtattatattgaacattttgcacagtggttcatttctcacagctattgcaacttaaaatacttgcaaagcttctgcaaattccaaactttcttttactcccttctttatggatcttacaaagtgatcagatcatgaaaccatgatcaatccattgaatttgaa

SEQ ID NO: 74661 - DNA, 407 bp, Glycine max
  Clone ID: jC-gmfl02220125a05d1
aaaggaaccttaactttacattcccccaattataaggccccaattttaaggctctgaactcaaggtgaaagctccaaaaaccactggtcagggccaaataagggccccaggaaaatgccacaccattgggagaacattttttattcaaaggttatttatggggaactccaaacattcaaaacttaaggcatccaaaaacttcaacaaggccttttaaatgctcaaaggaaaagttgggggggcatagggataaaaaaaattcccctttttataaacaaggaacttggggaaattccgtttgaagccctccccaagggggccccctttggtggaatttagaaatttgccccggggacacaccttgtgccctttcaaattaaccttggtaaaaacgggaaacccaccct

SEQ ID NO: 74662 - DNA, 330 bp, Glycine max
  Clone ID: jC-gmfl02220125a06d1
aaaaaaacccccccccggggccgggtaaaatttctaaaatccccatccccctgtggaaaaaaaatttcccgaaaaccctttttttgcaaaagggtttcatataaaagggaatcagggtcgccccaagctccaaaaatgggccctaaaaccggccctttaaaaaaaattggggacccaatagggtaatcagctaaaaccgcccagggagaaaccgccccaatggaaaacccaaagcccccacccaaaaggggacccttggcatcaacggccccctggggtgggcttaagggacccctttcaaagggggtgcagcaaaagcccccccaagct

SEQ ID NO: 74663 - DNA, 524 bp, Glycine max
  Clone ID: jC-gmfl02220125a08d1
aaattaaaataaaaatgttctttttttatatttccaggtataaccaactaaactgtgtatggcccatagttccttacaacttattgccaaggggcttattcaaagacattctaatttcctactagatcaatgaacataggacaagaagtacaaattttctatttgatccaattaccatccctttccttaattccatccaataactcaaaagggtgtcctctcctgtgtcctactcggctcgaacaggattgctgctacttcttgttgatctttcgaagatgcttccttggtcctggaacctctaacctaccaacagaacatccacacctcgcccggagcacgagcacagcccttccatttggtggtgccatcttcttgagctcagcctccagctccctatggggatcacgaggcaattcaaagagacccttcttcgttccaccaccaccatctatcgctacattcgacgacgcagaagccatattcttcacacaatgctcagtctgcaactgaatgtcaaactc

SEQ ID NO: 74664 - DNA, 456 bp, Glycine max
  Clone ID: jC-gmfl02220125a11d1
ataaaattaaaatttataaaacttgtatttgccacgagacctagtacaatatataggaacacaattaatacaacagattccgcaaactgaaaaagggattcttactaaagcaaactcaaacatgaacaacttgcactcattgggcatctaccgtagtaacacaagatcaaaagcagcttctctgatagaacacacgtacgtatgactcaacatggttcacagtagtggatcatttgtaacagctagctattgcaacttaaaataattgcactgcttctgcaaagagctaactttttttcccccccttgtttatggatacgacaatgggatcagaatgaaacaataaccaatccattgaatgtgaatctgattgcgggtttggatcgataccaccattcttgatctcacgaaaggacaagaaatcgggcaatgcctactaattaagcgcttaaaact

SEQ ID NO: 74665 - DNA, 550 bp, Glycine max
  Clone ID: jC-gmfl02220125b01d1
cgagaaaattttgtaaagcttccatattgaaataatgtatctgtcagttacaacagaacttcagaaggggaaccaaatcttgttcatccagcaccctactgccatgactgcgtagggaaccaacccataccctgaaacaaacttccttatgcccactagaacttctagtttaagcaaatgcaccagcacatgcagtggctggagcagcttccagctgtttctttgcagtactgtatttttttgttataaacctaaagaagtccctccatagcaactcaaacatcaaccaatttgttccagttctggacgagccattaccaccatcattccggttggacgaagcagaaatgactctgccggcagtcttcttcagttcttcatacattgtgccaagggaaaggcatcccattgccaaccacggagaaatcttgcaggagaagttggcaccatatatactctgagttccatccttaaaccccttgtgtggctgagctgcacactcagctgcaaattttttaagcttctgcagtgcctcagtctccccttctac

SEQ ID NO: 74666 - DNA, 567 bp, Glycine max
  Clone ID: jC-gmfl02220125b03d1
caacataaaagctaaatttcattaatatattatatacaagcaaaacatttctataattcatgttccaacaaatagaaaaaatactgcaaaattttgaaataccaaaggaaccaaggattctaagttctatatgtcttatgtacactatgaatatcaaaacttcctaagaaataccacttgtccaaggtgtccattgaaaagcttcagatattgcaaattttctttggccagtctctagaggcaaattgatgcttttgaagtccgttgattcatcccaaggatgatcaccattacggtcacatcatcatggtacttcctcctactcccatccggaacattcatcaactcttccatgctgaagcctgcagaatcagctgctcttgcaactagttgctcaataagaaattttgctggatcaccaaaagggtttctcaagatataagactctacaagctgtactgcttcatcattgctgaagaagtcaaataagccatcactcccaactataacaaatggatcagaatctgagattttgtgcacattcaatgatggatcagttgaaacata

SEQ ID NO: 74667 - DNA, 359 bp, Glycine max
  Clone ID: jC-gmfl02220125b05d1
ctaattgcatgattcaatcttttatttcttatatgatatctcaagagattgctcgacagagcctcacatctaacatgtcacatgtctaataaacccctacttgcctcctcgaggggagattaatggatctctgtaagcccaaatgttgcaggaataatactaactcctgcggtgacaacatatttcaaaactcggtcttactgactaaagactcaaacataacgaaaaggattgccatgctggaagaaggaaccacattcaagagcgaggaagccctctcttgtgacgatctatgcataatacatgatgaacatggatatatggggtgacaggggaaatcatttacaaacgtgcgaccc

SEQ ID NO: 74668 - DNA, 375 bp, Glycine max
  Clone ID: jC-gmfl02220125b06d1
atatatataatatacttttattatttcgagccgtgtttactaatgaaagggactcacccttgatatatcagcctataaggacgagcccatcgaaaacgatcttttcttaaactccaataatgaaatcaatatggtagttgatattgggaaacactaaaacgtcgtaatgtgcccggaataaatggcccacaccccatgaggaatccaaccaacacttaaatgcaaacatacttgatcatactttcaaaactcccatgattaatgacccaatggagcgttcaattacaccaccgaaatgatgctcgcccaaaaacatcccagtggggggggacccaccctagggcatcccatttgctagacccttgaacctgctaa

SEQ ID NO: 74669 - DNA, 426 bp, Glycine max
  Clone ID: jC-gmfl02220125b07d1
gcaagcagtaacagtggactgtaaagataagtatttaaataatcttagctgtctgctaccaatatgttttgagggtttaaaaaaaaaaaaaaaacaaaaatacccgaatcattttttatttgggcgggttcaatccaaaatttcaaacattttaattcaatcttaaaaacctggcttaccttaacccagcttcaaatttaaaaataatactacagtttaggggagagcaataaaatccatcctactttaacacacagttctgctaataagccccgttaggaagccccttgaattgcagcatcaggttgcatggctatatcctgattctaggtcacagcaaatccctggccaccataaccctgatgaccaccataatggcctccattggaatcagatctccaatgctaatttcctggactgcgaccc

SEQ ID NO: 74670 - DNA, 388 bp, Glycine max
  Clone ID: jC-gmfl02220125b08d1
caaagggccccaacccctaaggttttaagcgggggacccaaattaaaaacaggggccaaccctgggcccaaaacattcaattttaaaaatctggcaaaaaaaaaaaaaccttttacaaagccccaaaaccaagggcccctgggaattaaaccgggggggccaaaaacttattttttttccccagcctgggcaaattcggaagcccggggcttttttaccccacaaatttttttagccctattttttcccccctaaattggcctcctggacttttcaccccgggggaaaaggccctccctgaaaaacccgttttggggcccaaaccttgggggattctccccgggttcaaaaatcaacccaaatcccggggatttgccccccccaaaaa

SEQ ID NO: 74671 - DNA, 483 bp, Glycine max
  Clone ID: jC-gmfl02220125b12d1
caaaagctaactatatttttattcagtaacctcggaattcatattcaagaaacaaattatgttccctgatttatttggttgaaacttgaagaaatttgcagtcaagactcaggtaactgcaaagaacaaaatactgcattcacttgcatactcacatatgtagtatgttaaaagaaagaaaataaaagttaaaccttccagagcgtacaaatttcaagacttctgattgcagtacccccactggaatcactctctctctctcctaatgtctctaatgagtagacatcccaacccctatccctccaataggagatataaactgctggaacttgttgcactctccaataatcctcacctccatttggacgcagtgctgtaataaattcttcaggcatatcaaaaagctctattgattttagttttgttaggtgctcaatgcctaatggtacctgcttcaatgaatcacagcgctggatgatgagc

SEQ ID NO: 74672 - DNA, 427 bp, Glycine max
  Clone ID: jC-gmfl02220125c02d1
gattgatctatatgcaatttatttggattgctggggaaccacacaaaaatgttcccctactcaataaggggcacatgctaaggcacagtaacatgaccttatttatttttaaaatcatgtggaatatctccatctttaacctgcccccatacgcatcaatactttacgataaaagggcatattcatttttttttcagaagataaaaagaacaaattcccaaagctggatctgaaggcaaagaaggggggtcatcaccatgcacaatcttttgtaccacatatttacaggaaatctgtcaaattattagaatgtaaaaaattgacagcatatagtactttttgttttttatgctaacaatggtgtttcccctagcacaatgttactgagttacttacggtaacttactgaaaagtactttcaggcaaa

SEQ ID NO: 74673 - DNA, 485 bp, Glycine max
  Clone ID: jC-gmfl02220125c04d1
attgaaaatactactatcttatctttcaagcaaaattcccaaatagttcgaaccaacaccgatgcaaaatcctatggataaaaaatacaccgatgcaaggaccaaatcacagaagtacaacattcacggacaaaaccacaaacaaaactcgacaaaacttaaatctaaagtaacattggtcatatgagaaataaattcggctaagttcaaaagtaagttaaatagttcaaacaatttaaagcttgtcttcaaactcggagagaggagtcatctgctccttcaagcccttcctcttgcggatgtccgtgacaagctgtgcagcttgagatccagtctccaatgggtcagaagacatcatgtcccagtgatcaaagacacattgcgggaaagcctggcctgatgttgcagacctcaatgtgctcgagataccaaaggactcaatgacgggaggtctgctttgatgttgtaaagcggggtaccaggcc

SEQ ID NO: 74674 - DNA, 515 bp, Glycine max
  Clone ID: jC-gmfl02220125c07d1
aagaatcttcaaagcaagcccattttccttacttggcaggactaattatactgttggatttattcatcaaactatctcactatacattaaaaatttaaaataataacaaacttaggattaaatgaatttcatgagtacaacaatgaatctcccaatccctttggcgtccaaccagaaataagtgcgtttcaatttttgaacagcctaactgcgttttggctgcatttaaagacatcatagtacatagtacataacaataaattattgagctatgatgggggcctcagggacccatttatgagttggtgaacagtcccattcccacgtgtctttaccgtaggacaccctaaaattcttaggaaaccaagtttctcctttcatggctctgtctctcaacaccttcctgtgtctttcttccacatcttggtttgcttctcttgctctttcccaatctttgctcataatggcttggctcaactcactccatacaagggctgattcggttggccacacac

SEQ ID NO: 74675 - DNA, 520 bp, Glycine max
  Clone ID: jC-gmfl02220125c08d1
gcaaatgccaattatttgacatcactctttataaacattattcatttccaaatgtacatttggccctaccgtgtcgttaaaggctaacatggttgatgctgagtacaattgagtaccaagctatatatgtggcttagatgatacaaggactaacatgttggtacctctcatgctaatatgctccttctttaggtagcaaatatgagaggagaatttcgttccacatatcaggaacaccggctaagcaccaatggctacaatcaggcacagatggcttgtcactccaagtgcccacgtgtccatcacttctatatgcagtcattggtgtaacatgcagaactgttactggagcactcatgtttttgacaactttgttgatcatatttgaaattgggtttctatccttgccgttagttctcttccaaggcctttgagtcactatgcaagaattgtggttctgtccactccaatgagatgattcataggtgcggaagaatattcttgtcctgtttggattaat

SEQ ID NO: 74676 - DNA, 553 bp, Glycine max
  Clone ID: jC-gmfl02220125c09d1
gactataggtaatagccatccatcaactttgatatcaatcatcctatgaagagactgagaaattaaacaaggaggcaaccatatgcctaatgaggaattaaaagtatagaatttcaagccaggaataataaaatgagaaagaaacagaaagcagctgtaacattttaaagaccaacttagaactacccttattgatcctaaccatagctttcacatgacctcactgatagattcataatactagtgccttagaattttgcttcagttgccgagaggtgcatgatatctgttgatgcaatcaagccaagggttcctagaaggcttggcaactcggcgcatggcgcgccaaaccacgctgttgcacttgatgcctgtgccaaatgcgagttgccaaacgcggtctcctcttctgacactctcttttgcttccatgttagccaactcataccaaatgctgctgctagaggtgttgccaaagcggtgcactgtcatcctagatgcttcgatgttcttgtcactcagttctaagttcctttgaagctcatcaagaatg

SEQ ID NO: 74677 - DNA, 542 bp, Glycine max
  Clone ID: jC-gmfl02220125c10d1
cataaaatatccagaaagcatcagattgataattatgtgacgcatcatgtttaagtatcaaacatttcacaccaccacatcatgtgttctagtaagtttgaaccagattcagcacaaagcttatttataagcacaattttgtggctataaccatgcgcttaaaagagactctgaaaatatacattatgcttgccaaatccttaatcattcaagtgtgttcataatcccaattaaacatgtgtaagaagtaagaacggagggaaacacactctggtcactgatgaagataaaaacaaccgattgcaaaggccaaccaaattcagtagcttatcagatagtagaaggggcagagtctttcacaatcgttatagggcaactcgcatttgcggtgacataattagtcacactccccagtaataccctttgtatggcacccaagcctctgctacccatgaccaaagagtcaagcttcaaatccccaacggcttccacaattttctctcttgcatctccccagtatagctttgcaccacattcacctg

SEQ ID NO: 74678 - DNA, 566 bp, Glycine max
  Clone ID: jC-gmfl02220125c11d1
ccatattgcatcaattgcatctactgccaccttcattgaacatattgccaatacaatacaacacataacacatggtacaatgtcaaagattgcaacattaggatggccacttgcaaactttggacagactagtgactatcgctattagccaaataacactgactggtacgaacaaacagctaataataacacagcgtgatattttaatctatcaaaaaactctcacgatactaaatacacttattttcatatggaacaaaaagaattctctctgatcccacatcataaaaaaaactaataataacagtacatggaggcctaaatggaattaaaaacaaatggccctcctttattggaaaaatgagttttaactatcagataggacaagtcaccttgctgacggatactgagatatcacttgagcataaagttcatcaatcccaggaatgtcataccattctgaatcactgcctatttgatgttcctaaggatttcttgggcttcttgctcgtggaaaatctggtgtaaatattcttggttctgattgacatcagaatgtctaagaa

SEQ ID NO: 74679 - DNA, 227 bp, Glycine max
  Clone ID: jC-gmfl02220125c12d1
acacagggagccccataaaaaatagccacaaaaaagacccccactgggaaacccgggtcaaaccagagacaaacggggttaaacaaattactctgacggaaacgggcgaacacctacccataacaaaatgtgccccgccaggggaacacccccgggggaccattcttagtcggccagggttatatgggaacaaaaagaatgggctccgctccaaaacaaaaggcccc

SEQ ID NO: 74680 - DNA, 379 bp, Glycine max
  Clone ID: jC-gmfl02220125d01d1
gggtgccaaacctgaaggtaataatggggttccaaaccccaaccaaaaaaaactttgagggccacacaaactaacccacttaaaaacccaacctaaaaagcaggattacccgggcaaaaataaacggaagaaatcaaaaaccaaaggctttccaaaaaaaataaaattccgattgggccaaccaagtaaatggaaaattaaaaaaactttactgaatggcccccccaaaacccttgggtgaaagccaacccccgtaaacgaccaaaacccaatcatatcccggaggagctatggccttggatggaggcccccctaagcccaaatccgaagttaccaacgcggatctgaaaccttatagccttttaataggggcccccaa

SEQ ID NO: 74681 - DNA, 335 bp, Glycine max
  Clone ID: jC-gmfl02220125d02d1
ggggggccagtactcatggtattaaaggggttccaaacccggacaaataaaatgtctaaacaggctcccaataaaacctaagtgaaaacacctccctataagcaagcttgccccaccaaaaaaaagggatagaaactaaaacctaaagtgttttacaatgaactacaatttcgcacgggcataccaaatcaacgaacaattccaaaaccacaaatgaatgggcacccccatatccaggggcgcaagcaacccctcgaaaacgaccaaaacccggttgtgcccgaagagggctttcaccttgaagtgggggcccctgtaacccaagttccggctta

SEQ ID NO: 74682 - DNA, 476 bp, Glycine max
  Clone ID: jC-gmfl02220125d04d1
attatattaatagcattatttgataactttatgtgcatatacaataataacatttttattaattatcttccataacctacccttaacttcttccaattcttagagatgaatcaacacctttattgttgacacttgcaaagatcctagcaatctctaactgtgtattggcaattatttcagttctcttaaggtccatttcccctcttttggcctcagcttcaactctcatcctctctatctccttcattgcgtccattcttgcttgttcagaccttatcatagcttctgtaagccatcttaagctttctgctatctccacacactctttccttcttcgccctgtgtcgtcaattgatttcttctatctcttgttgcatcttaacccgtccttcttgctataaagtgctggcgtgctgctatctgagtccaatggattcttgctagatacttgatcagatgacttaggtcctaaccca

SEQ ID NO: 74683 - DNA, 402 bp, Glycine max
  Clone ID: jC-gmfl02220125d05d1
gtacactaaactaaaatcatcacaagacgacacttataaacatgattacatacaaaattggcttaaagcaaaaccatcaatcgtgatgcgtcatatatcactggatgactcaacccttatgccacgtatctcaaggttgtctagcttcctgggtctcctgtaatatttcaacaacagagaacagcaaacaacgctgacagaggaggcagccatagcagccccagcaatccagggtggcaatctgaaccttgtagaagggaaaagagctccagcagcaattgggatgccaagcaagttataacccaaagcccaaaagtaattcaggcgtatacgggaaaatgttcttctggaaaggtcaatggcagttatgacatcctccaagttgcttctcatgaggacatt

SEQ ID NO: 74684 - DNA, 492 bp, Glycine max
  Clone ID: jC-gmfl02220125d07d1
gcaaatgccaattatttgacatcactctttataaacattattgatttacaaatgtacatttggccctaccgtgtcgttaaaggctaacatggttgatgctgagtacaattgagtaccaagctatatatgtggcttagatgatacaaggactaacatgttggtacctctcatgctaatatgctccttctttaggtagcaaatatgagaggagaatttcgttccacatatcaggaacaccggctaagcaccaatggctacaatcaggcacagatggcttgtcactccaagtgcccacgtgtgcatcacttctatatgcagtcattggtgtaacatgcagaactgttactggagcactcatgtttttgacaactttgctgatcatatttgaaattgggtttctatccttgccgttagttctcttccaaggccttcgagtcactttgcaagaattgcggttactgccactccaatgagatgattcaaaggtgcgga

SEQ ID NO: 74685 - DNA, 490 bp, Glycine max
  Clone ID: jC-gmfl02220125d08d1
gcaaatgccaattatttgacatcactctttataaacattattgatttccaaatgtacatttggccctaccgtgtcgttaaaggctaacatggttgatgctgagtacaattgagtaccaagctatatatgtggcttagatgatacaaggactaacatgttggtacctctcatgctaatatgctccttctttaggtagcaaatatgagaggagaatttcgttccacatatcaggaacaccggctaagcaccaatggctacaatcaggcacagatggcttgtcactccaagtgcccacgtgtccatcacttctatatgcagtcattggtgtaacatgcagaactgttactggagcactcatgtttttgacaactttgttgatcatatttgaaattgggtttctatccttgccgttagttctcttccaggcctttgagtcactttgcaagaattgcggttctgtccactccaatgagatgattcaaaggtgcgg

SEQ ID NO: 74686 - DNA, 426 bp, Glycine max
  Clone ID: jC-gmfl02220125d10d1
taatctgcggacgccctttgagattttttttttgacgaaatttatttaagagatagacaacaaagttaccatagtatggtttcacatttttatctaatacctagaaacaaggtttccatatgttatctaaacagggccccagtagaaagaccctgcactactggggtacatggctcaaaaatcccaaagctgcgttgaaacaaccatgatggaaaataatgaagctattcccagattccaacctccatgaagccattttcagcggcacagacattaaacatgccattggaattgaaaccataagccacttcccgaacgttggacacagcattgagaccagccattcctgtatcgagacggggcttgatcacaaaatccacggtttgttgaagcttcaagcctttgcattccattaccggtgtcacc

SEQ ID NO: 74687 - DNA, 336 bp, Glycine max
  Clone ID: jC-gmfl02220125d11d1
gtgggaagggtgttattttatatttgtttgtttgttgttatatagggggccccccaaggaggccccacaaaaaagacccggtgggggcgcccgttttaaaacacaaaaaaagggggggaaaaaagtatgtgggcacaaaaggggggccaccagcccaagagaaaaatggcccccgcaggggggaaaccccagggggagaatttttttggggccgggggtttttgggaacaaaaaaaagggggaccccccaaaaaaatggggcccccaaggggaaaaccaggggggaaaattttccccccatgggcttggcaaggggagaaaccccggggggggggg

SEQ ID NO: 74688 - DNA, 289 bp, Glycine max
  Clone ID: jC-gmfl02220125d12d1
attatgttgagtttttttctttttttcggttgctgaatccgttttcattgttccaaaacaagaaaaaacaccatattgcccacagccgaaatgcggaagcggccaagggatcaaaataggacacgagcacgaaaccgagaaccggaagaaaggctcccgggggagaagcgaagacccggaacgattgacggcacacccaggaagctagcacggcggcaccatcaaaataaccgaggggggggaaaccaggggtcggaccccttgggggccgccccaaaactctgggggg

SEQ ID NO: 74689 - DNA, 457 bp, Glycine max
  Clone ID: jC-gmfl02220125e01d1
gacacaaataacatcttgttcatgcgttcgcatcatgataaaaacatcacagtggttgttgaacatagttatttttatcaaattaagacaccgcccttccctatcccctcataacaaacataatcttaccccagaaaaacaggaagagaaaagcaaacccacaaaagttttcatagatgccatccatttcaatatacattatctaaacacaaatcagcccatggcatacttctgggtccagctgcgtgcagtggcctcatacttggcccggtcagttttgtacatgtgagcgatttccggaacaagtggatcatcaggatttggatcagtcagcaatgagcagatagaaagcagtaccttagagatggtgagtgcagggctccactgctccttaaggatatcaagacaaatgctaccattgctgttgatgttcggatgaaacaccttagtcctaaag

SEQ ID NO: 74690 - DNA, 548 bp, Glycine max
  unsure (1)..(548): unsure at all n locations
  Clone ID: jC-gmfl02220125e02d1
gattgtaagatttagtacaatttcttgtttgaattggcaatatctacaaaggaacatcagaagggtagtctttgggatgcttctcgatggtttttctaattagtctctcttgctcctgaaggtttgatggtatttggtcatagacatcattaaataagtcctgaagtggaggtttttgtgctttctctgccacctgaatcgcatgcattaactgcttcctgacactgcttctaagctccaattcatccttgtcactccaccaaccattcctttctacccatcttttgaacctattcactggattccttgccatcttccaatattcaatctcatcagttccccggtacttagttgaatcatcagatgtagagtgatgtccaactctataagtgagagcctcaattaaaactggccttttttcttttatagcgatttctctagcagtgtgaactgcactataaacagcaagagcatcatttccatctactctgatgctccagatgccatangctntacccttaactacaataccatcacttcgaaattgg

SEQ ID NO: 74691 - DNA, 577 bp, Glycine max
  Clone ID: jC-gmfl02220125e05d1
cttaattcatcaaaatcttgtctttttacccactccattgatgaagatgagccatgatagcaaggccttcctaccattccaagccccttctttctaactatagcatgccagacatctgactcacttggtggaggatttccttgcgcaaatgcacttttggtcaattgttccaatgttcgtgcaaattcctcattgacatgttgtgatctcctatccacctatagctgagtatatgggtcagttcggtccattttggtcttcaattaaatgaactacaccaagctgacccacattaaatggaccacatttttacctagactgcatccagcccacttatctcacaggctaatggactgatttgctggcccaataataaaaaaaaattgaaaattgaaaacactagtcaactttttgaaaaatgataaaaaaatttgaaatatctctaattctttacatcaataaactataaatattgaaatactaagaaagaaatcaacgtatactaatcaaatccaagtaataattattcaaatcactaataaactatacaatataaatatattcaaaaaagtatctg

SEQ ID NO: 74692 - DNA, 534 bp, Glycine max
  unsure (1)..(534): unsure at all n locations
  Clone ID: jC-gmfl02220125e07d1
gataaaaaaatgttgttgattttgaagtattatgagtggcatgcatgacaaaatcacatgacaccaaggattaatttgtctggatggaaattaaatcattgaatgtgcacactccaacgagatcctagtccaattaagaggatctagatccatgagaaaacattcaagcataatgacttaaaagcattggaaacttggttgaatggcatagtagttgctgctccaccatggcatcaaagactttgtcataagcaacagacgaagcagacctgacatggttcccatgaacaagcggagcctgtctctggaaaatcaaaatagatgtttgagccgcagagttcaaatcggtcaaagcatcgccaagaggccccaacgcaggctcctccaacaccggatccagcgtctgcgccagcgacatcttcctcccatgccctctccccaccacatacaaatcaaaccctttattccctatcttatccaacaccttcaccgtctccttctcatccctcaccttcttctncaaatacctaaccc

SEQ ID NO: 74693 - DNA, 347 bp, Glycine max
  Clone ID: jC-gmfl02220125e11d1
cccataaaagaaaataaaggttatttttaaccgaagtcgggcaaagggttgggtaaaaccggcgtctccggtacatttttttttttttttaaaccccgtttccatacgggctaattcatctcctttttattcaggaccatgactttttggcccaatgggtggggggggctaaaacgggaacgggaacggggggaagccaaaggcattccctagactcatttaccaaaatcctcaagggaagggggatgttcccccgaaagaagtttaatcggggggttctcaacatccttatcaaacggacttttttccccctgaacgggaaccttttgggccctggggacaacccc

SEQ ID NO: 74694 - DNA, 547 bp, Glycine max
  Clone ID: jC-gmfl02220125e12d1
agaatgatcaaaactaacgatcacagtgtattccaatgtgcgagaaaaactacaaggatcaaataatcccgaccaaattatagagaaccacaatggctgacaatgcaatcaatcacccagtatcaaatacatcactattaccagcaattcatgaccgggaaaaatgttttccctctgttacagtataaagatgttcataccagcccaataaccaagagacaacaatcccactccatatgttggaggaagaataacctaagaaaactatctaggacacaatacaccaatcacttttgatgctcaattaattcaatagccctctataataataacagggtgctaactttaattttctgctgacagttttcccttcttgaacccaagaatctggtcattggggaagaactggaggcgcaactgcacgagtattatatgatctgcagtgaccacatttttggccaagaatgtggaagtaaacttctgttgcgtcattgcagtcattacatagtatccaaaccttcctgtttcgataatcttcaggcatgac

SEQ ID NO: 74695 - DNA, 474 bp, Glycine max
  Clone ID: jC-gmfl02220125f02d1
gcaggaacaatgagacaatttatcctttaaaaccaaaaggtacacaggagagaagaggcaaatagaccaattagtctaaaaactcacttttgattcttgtttctcttttctgtctgggttgataaactgtgtataacaactaagtagaactacaaacataacatccaagctaaaaatcttcactttgaactttaatccagctaagattaacaattatacactaccctcctcacttctggccttcaaactcaagttatccatcacgggggaatttgaaacagccttgtagttatacaactctgcaattacgattataccacttcatctgtgcatgctttctctgggtaatgctccagctgtacaatgacttcaaattatatctgtaacaataaaggactaagagtctacactactacatatcaagggtaggaaatgaaattacagtgcctgggagtgttcctactacacattaac

SEQ ID NO: 74696 - DNA, 548 bp, Glycine max
  Clone ID: jC-gmfl02220125f03d1
ataaaaatctaaagaaagatactttcatttctgtattcttaagagttctaggttcaacatattttttactacaagcacattacctttttcccatgcatattaaaatgaagcaaaacaagatagggaaaactctttgacatacgctaggcatcagatatctatataacaaataacaacgaaactgttaaattacaacctcaaatgtatcacaaccttcacgtgaaatgtacagtgcagttaaattaaactttgtcctcatgcaaaattggggttacaatctgcaacctttatcaaaatgctccgtgtggactttagccagccggaccagtaaaaagtccaaagtaagcttgctagctctgtgtaatcgaagttcacaacaagtgcagcatatgatattgtgattgactataagctctccttgcttacaaataggacaccaaatctctttcccatgggcctcatattcatttagctgcatatgctcacaaactgcacgagccaagtactgatccactgtatcttaccatgtttcaatatcacattctaaa

SEQ ID NO: 74697 - DNA, 474 bp, Glycine max
  Clone ID: jC-gmfl02220125f04d1
cagaaattcctaccctgcttgaaccaaaagaagactaatgaaccaattacaaaagtaagaaaacggtagactacagcaacaaattatttacgcattacatcctaggtgaaggtacattacatacaggaaaactctccaaacttgcatgacagggatgtttcattgtcttgatttatcaacatgacttatgattacccttccatagtcaggatctacgactcaccagttaatccggaacagactatggctatgctgatcttagttcttactctctctttaactatctacgtggaactgcagggaagttcttatgaagagaaaaattcaggaatgttgaaagggaaatccgtgtcaaaatcccctttatcaagcaagatatccaaatccaggattggggacttggtgactgaagttggcgctgaaactatctcagtgatatcagattctgaggtttgcatgtttggcataatagtc

SEQ ID NO: 74698 - DNA, 395 bp, Glycine max
  Clone ID: jC-gmfl02220125f06d1
gatgctactatatatagatggcttgaactcgttaagctaatattccacaaacttaaggctagttgatttaagtgcttgtgtttttcattaaattatcttaattattgaaataaatgtactattaaacactttccaaattttaaacatactgaaaggcttgtattttttataaagacatccattaatagaacgtttttgtatttattgttgggtgaggaatgagatctggagtttgtggctgaaggttcatatcacatctacgacctaatctttgtctgttaccatccgcatccaataatacgagaatttcatgtcaaaactgcatcttcagtgtaggcatattatggcttagctatatgcgatgcacttctttttgcaatcaacggtgcagtcac

SEQ ID NO: 74699 - DNA, 480 bp, Glycine max
  Clone ID: jC-gmfl02220125f07d1
caaaccaaaaccataaattttgcattaaatttcgaagaaattaacatgatatccatctcaatgcatattaatgaacatatcatgtgagagccttaaatgacacaaactaacagaaatcttaaatataaaatggtcttaactcaataaattggcacaccatactaattaactaattaagagtactactacttaatctgtatttcatcatggtctaggcttcattcttccttcgttggccatcttgaagagctgggcttgtgcttctgctgccttgttggagttgagtgaggccacaaacctgtccctgacttggttggctgcgtaagggaacttgttgttcaccatggagttgaggaaggaagctgtgccttctctgtagagtgctcctagcccatcagttcttgtgttggtacgtgctcgtggcaagctaaggccaggactgaaccctggaacagtagtacctgtcacaccaaatgcact

SEQ ID NO: 74700 - DNA, 586 bp, Glycine max
  Clone ID: jC-gmfl02220125f08d1
cagcacaacctaacaaacactgattcaaaaaaatctctgtaactgaaccgtaacaagcaatgtaatgaactgttaaaaaaagatttcaactcaataaggattatatgcactctaacttagaaagcgcttaatacaacaacttataacctaacaacatcctggaggcaatcatagaagtgagcgatactaatcttctctttgccagaaaagatggcttctgcagatccaccatgctccccttgcgctgccatctcgatcaacatgtatagtttcctgataggcatatcattcaacgcctctgcagcagaatcaatatcttcatcagtaaacacattcaactgttctaggaccttctttgcatccgttgtgttcaaggtaggaatatggtaagttacagagaaggtatcacaaaatccaattgattccaagaaatctagctcactcgctgtgccaataaccatgagctgtttcccctttggaggaagccgattgagcagaaccagcagtgtctgagaaatcaagtttgaaaatcgaggaccaatgggcacatactccaataatctctcaatgtcatcaaggatgatga

SEQ ID NO: 74701 - DNA, 371 bp, Glycine max
  Clone ID: jC-gmfl02220125f09d1
gttactgttgtgggttgacccaaatactctcacattgtcattgagggaccgacgtttttcactttccttctggggaccttgatacgggtcacctcggaaggatccccatacggagcctaaaggcggacccaacacccttattgctttgaaaaacccggtgtgggccgattcctaaacttgagcgtacataaaaaaattttgcccgcactaggttcgccgtgtctttggacatgacaggtgcccagggagggaagatagccgccacctggaaaccacaaagtctatcttcataggaagcccgccggggaaccccctgaaaggaagggcccccccaccggtcggaagaatcacccggtaggggacccgaaccg

SEQ ID NO: 74702 - DNA, 617 bp, Glycine max
  Clone ID: jC-gmfl02220125f11d1
ataatgatcaaaactaacgatcacagtttattgcaatgtgcgagaaaaactacaaggatcaaataatcccgaccaaattatagagaaccacaatggctgacaatgcaatcaatcacccagtatcaaatacatcactattaccagcaattcatgaccgggaaaaatgttttccctctgttacagtataaagatgttcataccagcccaataaccaagagacaacaatcccactccatatgttggaggaagaataacctaagaaaactatctaggacacaatacaccaatcacttttgatgctcaattaattcaatagccctctataataataacagggtgctaactttaattttctgctgacagttttcccttcttgaacccaagaatctggtcattggggaagaactggaggcgcaactgcacgagtattatatgatctgcagtgaccacatttttggccaagaatgtggaagtaaacttctgttgtgtcattgcagtcattacatagtatccaaaccttcctgtttcgataatcttcaggcatgacagttgcttcaatctcttcatcaattctcttcacgtcttagacatgtcaatcactgacttggagcatatgg

SEQ ID NO: 74703 - DNA, 462 bp, Glycine max
  Clone ID: jC-gmfl02220125f12d1
aacaaaattgatgcttcaacattaaagaaaaatgtaatcaagtacaactagaatgagactattacacaattatttaatttacaaagcatcctgtattcttttcccagataccttgtcactctaatctttttttaaaaaaagaaaaaaaaaagaaaagaaatgtgaaagagtacaaaataacaatggtacaaaggtcaaaatgctggtttccctttagctttatcaaggcattgctcctaccaatcatgatcaaaagtggaaacttagccaatgtccacatcaatggccattgatttctcctctgaaacaaagttactttctggagcggctgcaggctccgcaaactgcgccgaagtggactctgattctgtggctgcaaatggactcctcgtgtgaggagcaatactagtgtctacttccatagcagaagctctgggaggtgatagtggctgcacctccaca

SEQ ID NO: 74704 - DNA, 432 bp, Glycine max
  Clone ID: jC-gmfl02220125g03d1
acacggtaaaaagtgacccgttcaggttcctttccatgttagcttcagttcacaaaatatcaatgtgattacaaaatatatttatgcattaatacaaaacagaatgtctggatttcatgtctaaatatacatgacatcagagggacggctttaaggagtctaagcccaccatggagcatcacctgttctgaaatctgtttcaacccaaggaacaaacaccaccgtcccatcatctatatcacaatgtgctaatgccagagacaagggagcaggtcctctcacaactcttgcttggtcattgaactgagatccatggcaagggcagatgaactcgttctctgcttgattccatgggacgacgcatccaatgtgagtgcacacggtattaattgcgtatgttcgcagggttctggctttcttcacaacatgata

SEQ ID NO: 74705 - DNA, 337 bp, Glycine max
  Clone ID: jC-gmfl02220125g04d1
atcaaaaaaaacttcttctgcaaaaactaaaaatgccttttcccataccaggccctctgattttaaagtatacatttacctgggccccctggaccggatggaaggaatgaaaaacccccaaggagggggaaatgatccctaatgtcttggaaaacatggaacactcacgactttccaattgtagaaatttcggtgtccttatgccaaacacaagagggcttttcctaaaacttcccttccctggccaaagaactgggctccccgctaagggccccttatctctaaaggggcctcgctccggtagcctttcccggcccgctgattgctggcccaataa

SEQ ID NO: 74706 - DNA, 544 bp, Glycine max
  Clone ID: jC-gmfl02220125g05d1
aataaaacgacatggtattggcaagaaaacgcgaaaaccacgaccacaggatactaacgcacatgtacgtaacacttaaaaatacatacacaaattaacatgggcatgtctgttgagatggacgtcaccacaaatatagtaaacataaattaaataaacatagtgacgaggatatacagattattccaatccaccatgtataagcaaattaattaagaacacaattaaatgaagcatgtctctcgtagctcaaatagcttggccagaattacaggtttgaggagctcctgaaagaccctagagcctttgctgcttgggccctcaacacggactggtggtagaatgcagcaagagcagcaccgatgaagggtccaacccagaagatccactggtcatcccaagccttctcgttgctgaatatgacagcaggcccaaggcttctagctgggttgatgccagtgccggtgatagggatggtggccaagtgaaccatgaacaccgcatacccaaatggaagtgggtgcaacacgggaacatgggagtc

SEQ ID NO: 74707 - DNA, 500 bp, Glycine max
  Clone ID: jC-gmfl02220125g06d1
gtaaaaagcaagtaacattaagttggattcggatacacaagataattcacattatctgaagtacttcaccaaacacaaatctaaaaactctcaaaagtcatttcgttctttgacgctcactttccggggacgaagttggtggcataggcccaggcgttgctgttgacagggtcagcacggtgatcggcgaggttctccaatggaccctttccggtgacaatggcctgaacaaagaagccaaacatagagaacatggccaatcgtccgttcttgagttccttcaccttaagctcagcaaaagcctctgggtcatcagcaaggcccaatgggtcgaagctgccacctgggtagattgggtcagtgacctcaccgagggggccaccagcaatacggtaacctttaacggcacccattaggataacttgtgtggcccatatggcgaagatgctctgggcgtggatcacgcttgggttgcccagtagtcgagcccaccctcgctg

SEQ ID NO: 74708 - DNA, 348 bp, Glycine max
  Clone ID: jC-gmfl02220125g07d1
gttattatcaaaatcatactccataaaaggggtgggcttgtttacaaattaattttagtataaagaatgaccagttttacaaattcacgtttgggtttaacaaggggttcttatgccgaggttttccccaaaacaaaacagcttaagaatgaagaaccttttccaccattttctgggccattttgttccaatttttccaaactaattacctcaaaggggtaaaaacaattctgggggccttggaaaagccttcaaagaagggcttcacaatttcaaccggaatttcatcatgaaactgggcatttccattattggacagcccacgaggtggcttgcttcatttttatg

SEQ ID NO: 74709 - DNA, 468 bp, Glycine max
  Clone ID: jC-gmfl02220125g10d1
aagaagcgaaccaaacttagttgtctctgtatatatatttaacttcagaaaagtgaccctaaagtcactagtgatttacaaaatctgaaccacatatatattgcaggattccatttatgtttgacactcaatcaattctaggggcttcaaaaacccaccaaagtgtgccaaagtggttcattttattcaacaaaggaagacaataatggccagaaaacacaacaacatggaaccacatagcagtacactgcacactatatagtaactctgccacaagtacacacacacaaacacaaaggagtatgtcaagcatcatcatgtcctaaaagcgccacaagcattttctcatagtcaccggtggtgtccttaacaatagcacgttcaagagggacactgctcctcctttgatactcatctgctatggttttcaaatcaacctcagtccttgtggccaccactcttgtaagg

SEQ ID NO: 74710 - DNA, 402 bp, Glycine max
  Clone ID: jC-gmfl02220125g11d1
acttggaacgcacaagcattatattaggggtgctgggtatccctagcaattgacacctttaaacatgtgcagcacggcattctgacttttagtaacacaatgccatcaaattactgaacaggaacttgatacactagcaagagaacaatcgaccgaaaggaactttcctaccaacaactcacaaaatcggggactccatatttgtcatcccctgccctactgaactcattgtgatcccactgacagtgacaggagcaccgatgagggaaggatggtattccaacggaagacacactgaaccgtcgcaaggaagtctattggtacggagagactcggctgttactcaaggagtataaaaccacccggcgatgctaatattctgccacaacgtaaggctagtgg

SEQ ID NO: 74711 - DNA, 458 bp, Glycine max
  Clone ID: jC-gmfl02220125g12d1
gtgactgtagttatggtcaataatttgaaattagttttcctcagttttaaaacaatctgattctcagttaaactggcttacttgaacactgatgtcagttcgaactgtgaaattcaaaggcttttcttttctgaaaatgctaagaaagaatcttggctgacactatggagaattaatggcttcaagctgccttctaagatcttccagggcgtcattgtcaactacggcagcgttaatagttgccttatgaaactcgtcagcatgcgtaagtgcatgtgtgtgaccttccggcagaacatcttatcttatgggatccggaccaaccaggtgaacatgatcgacagcactgatattccattcattatcttcgagaagcggcacttcctcagttgatggcgcttcagctctcattgtcgctttggctgcagaatcccttgctggttttgaaacaggaactg

SEQ ID NO: 74712 - DNA, 410 bp, Glycine max
  Clone ID: jC-gmfl02220125h03d1
acactgtaataattgaccacgtcaagtgatgcttaaatacagggtactttcacacaatttcattaactgtacagaaactaccaatgctttgatccaaaacatactgactgggtttgaaggctaggtatccatgacactcccagggactgttttaaggagtctaaaccctccatggcgcctggaacgacctgaaaatcgtttgaccacacagaacgaagacggccttatcattatttataccacagagtgctaatgccaaccacatcggggcagggcctctcacgaccctgccttggtcattgaaccgagatccacaggatgggcaccttgactcgaagaacgctcggttttatggccccatgcatccctgctgagtgcacgcagtccttgtcgggtaggtcgcaagggat

SEQ ID NO: 74713 - DNA, 583 bp, Glycine max
  Clone ID: jC-gmfl02220125h04d1
ctgtaaaggccttatggcaaaattttctacaaagattgacatagaatattttttacaatgctaaatttgacatctatatagaatctaatagtacttgtaggaattcattctaagctatgcctcaagaactgtaatcatggatttatcacaggaaacctacacgactaatgtacaaagtaatgtgagctgaacattgcattccatgattgttttcacttacctaccatgttgatgcttgccctatatatctatcattccaccaaggccaagtcactagcagtctaacagtaaaacatgaccctcttcacattttctttcaagtctggcaatggcttgacactataatcaccagctgctcgtattgctttggcaccataaccattgccatcacctgcagagccattgtcttgcatatctggctccatatagaaacgtgctcgaaacgctgctaaatgtgcataatatgctggaggaacaactgatactgagcgcgtacacctggcatatgtataacaaagattgtttgtcagagactgaattccatctgctgtgaaagttgtttcatccacaggacatgataatg

SEQ ID NO: 74714 - DNA, 494 bp, Glycine max
  Clone ID: jC-gmfl02220125h05d1
gccaagaaaatataaaaatgtgaaattaaaagttacaacaattataattgtccaaaacacacgccttggattattttagcataaaagtttggtaccaaatacacactgtagtagactgagaagtaaaatcgaacagcattacctcagagcactgccctgaaagtagaacacctattaattactgacaaactaaaacagaaacactagcaatcgggaaagtgcatgttagacagcaagagtgaaacgcattggtttaattttgggagcttcacttccttggtcattaccctgtatttggcagctgcttttccttgagcagagatgccacaccatcagaaggattccgaatattggaaggcatagtgtagtgagtgattgagaagatctgacaagcagccaaataccccaaaataaaagaatggcactcaccaaacgagaaaatggtgcaccaataacaatcattgctgcaacagcccaaacaaacaccatgaaac

SEQ ID NO: 74715 - DNA, 435 bp, Glycine max
  Clone ID: jC-gmfl02220125h06d1
gatgaaaatttcatcataacagaaagaacgatgatatcatgaattttatgatacatgggaatttttcttataaattaggaacaatgtacaaagttgatgaagataccctgaacactacacctccataaaatgtcgaatgaagagactagtacattgtgctttagtgctgatattatgaatccctcttcaatctatagttagtcaagctacagctaccaagcttaagatacctcggtcatttgagttctagacaagcagccaaatgctcaacctatgctactcggcagaaagctagtagtgaagatcttttaaagctcaaatggaaaccctgtattgattggtgatatcttccattgaagcacaatttagcattcaacaaaacctagaacgctgagaatctgaagaaagaattacaagtctctgatattatgaaca

SEQ ID NO: 74716 - DNA, 497 bp, Glycine max
  Clone ID: jC-gmfl02220125h07d1
aaagtaaaatgccttaagtcttatatagtgagatgtattgtacatttaagagtggagaagagcataaagatgattgatttacagagttggagccctctcagcggagccagcaatcacagtgagcaagttgttaccaaaagggtcactgagatgttttgctaagttctcaactggaccttctccagtgacatatgcttggaagtagaaaccaagcattgcaaacatagctagtctaccattcttaatttccttcacctttagaagtgcagcttggtctggatcctttgctagtcccaatgggtcgaatggaccacccggatgaagcttgtcttccaagtccaggccattaataattctgtagtactcagcaccacccacaagaactatctcagcatcaacagcaagaataagattgatggggataggtttcccgaagtagttcaatgtacccccattaagagcaaagctccagtctgcattgattccatgaagagctc

SEQ ID NO: 74717 - DNA, 381 bp, Glycine max
  Clone ID: jC-gmfl02220125h10d1
aagaccaaatatctggatattataatcaataatccaagtgtggaaaatcataaatacaattatatgttcaatatgtgggagagaaaaacccaaatataatgacatggcatcctgccactccacccctaatattcttcaagcctttcttgtcgctacagcaattgcctcctctatagcttgagcaaaagttgcaatcttgtatgtgaaaaaacctactagcattggtatcaattctaagcgcattgatccaaattgtggaaccataatcgtatcccagcggatatagaccatgacccaaacatgtggatccaggaatcttggctgcccaatagctcccttgacaaatgcctttgcaccatcaggccttagccagttcacgct

SEQ ID NO: 74718 - DNA, 540 bp, Glycine max
  Clone ID: jC-gmfl02220125h11d1
cacacaaaccatatagttcttttattacatcataggcgcaaaccaatagagtaaataacacaaattccactttgtgagtggctaaacaggaatgcgaagacttattgctctgtcccagaactatattgcacatgaagtactccggggcaggaaatctaaacacacaaaagaagcatcatacatgagtaaaattttacaacattccaattcaaaccagccatgaaaagctaagattttatttccacacacgagttctattaacaaagacagaggtacaacactcggttcaatccgtagcaattcagaaatccagcttgcagtcaatagcttctccaatagtcaagaagacccttcctccaattcttgtgacaaagttggtcgcctttagcttataaatcacttgccaacgaggattggcaattgctagatgcttcccacttgagaccaaactcttgtgcagttcctcaagagaagcaattcctgaggtgtcaatgctcaccaaattagaggtgtcaaggattacgagctgaattatgcttc

SEQ ID NO: 74719 - DNA, 195 bp, Glycine max
  unsure (1)..(195): unsure at all n locations
  Clone ID: jC-gmfl02220126a10d1
gattaatgagagtaaatcagttatgaccattttggtgggatcaaagaatcacactcatttcttaaactacaaccaactcttctttgaattgatgctcaggttatagaagaccttataggactaaccgagacagncctcatacttgaaaacattgacaggatcaacaatacatgcacatacttaacctttattccc

SEQ ID NO: 74720 - DNA, 371 bp, Glycine max
  Clone ID: jC-gmfl02220126a11d1
gaagagaaaaacaaacacctttgctcaatttaaactcttcaggcttttgctcccaccaccttgaccttgggtacataatcagatgagcaggttcctgtgcagcaaaccaatcaaaatatgctccaagcttctaattctaaagcttgctggcaaaatactagggaaaatagctatgatacaaaatctacatccttctggtatccttcctaaacatatgcaagcagccccaaagagagagagacatatgcgccaaatgttaacatgaacggcgaaggatcccggctaagcaactcagcatctaatataaagaggaatttggatccaagcttgcagaaaggcccgccttaggaggactcccagcaaaatctctt

SEQ ID NO: 74721 - DNA, 312 bp, Glycine max
  Clone ID: jC-gmfl02220126b10d1
cttcaacatgccatttggcattatttatttgataaaaagatctcttgattacatccaacacaagtgatatacgatgaaatctaaggagataaacaagaaaaacactagacatggcaaaggaacactaaattcagatcacttgaaaaggaacttttgcaaccaaaaggcagagaacccggggtgtcttttcaagtttgacttgaattccacatatatgagcccgattcgaactgtgtaaccagcctcccattcaaaactgaacgaaaacgaccatgccttagagaccttaaaaataacaccttgcttgatcgg

SEQ ID NO: 74722 - DNA, 287 bp, Glycine max
  Clone ID: jC-gmfl02220126b11d1
ggcttaatattttttattttatatagaattgtgctagcttaatcaaaggcaaatactttgaggtccacttgctagagaaaatacatgcatccacccgcagagaaagggggggaattaattattcttttatacactaaaatttgataaaattctgcatcctgcttcgagcaaggtgtctccaaggcttccctgacctacaagtaggaactctccggtcaaacctctggattaacctgaactttgatgttgtggatatcatatctgatcctatgcctaactataatatt

SEQ ID NO: 74723 - DNA, 187 bp, Glycine max
  Clone ID: jC-gmfl02220126b12d1
gataaattggcttttttttttttatttttttaagaagtgtgctagcaagactcaagggcaaacaccctgaggtcccctctctatagagaatacgggcttgcacccccagagaaaaggggggactaaatgattctatcacccactaaaataaaataaaactcaacccccttctttgttcaaccgcccc

SEQ ID NO: 74724 - DNA, 319 bp, Glycine max
  Clone ID: jC-gmfl02220126c10d1
aaagattaactatgatcacgaacgaaacctttaatagaaacaaaaatgatatggggttagtatcaccattttgttcgtctctgaagacaacatatatagaacatatatagatgcccttaatgaatcgaatgaatcttccaaaatcgcaaattagatgtgcgggaattaattacatatgaaaaataatgaagctataatctcccattatttgtgaatcacagacccatatccaatctcaggtcagcctgaaagttaatctctgatcatcatgaatgacagcatttcaccacaaaatcccggggatgaaactcatgtgccc

SEQ ID NO: 74725 - DNA, 395 bp, Glycine max
  unsure (1)..(395): unsure at all n locations
  Clone ID: jC-gmfl02220126d09d1
ctccttaagtatgatattaacaaagcatgggtttattacagttatgcaacaaaccgtgttttaaaccgcagttgacttttacttcaaatacaggagccggaatggagtccctttctcatgtttacagcttattcttaaacaatttagaaaatgcaaagaccaaatggcagnaaaagaattatcatcctatccagacaatgcaaagctctcctgagtccagagggggggatccatcacagcacagggatctgatttctcaaagtcagcaaccttttcttgacatttaggacaggagggatttttatgccaaaggcaatcctttgaagggcaaagaaagcaaactccaagcatcatcgggacaaagcatccaacaaaagcttgtaaactgggctttg

SEQ ID NO: 74726 - DNA, 415 bp, Glycine max
  unsure (1)..(415): unsure at all n locations
  Clone ID: jC-gmfl02220126d11d1
aaaaactaaattgatattattcctttatttcaatagatttagaatagttttaaaatcattacactactacatgaacgaattcatgccattgagcattgtaataatccaaacacttctttgnagcaattgtggtcataagaacttgacgaaccacgttgtccatgttctcatacgaagacccatgtggactcgaagcagcctcgagtgccaatttcttgcactccaaagctcttgccttcatctccttacccttttccccttccatcaactccctcacaagtgcttcaactttctccctcttaacatcctctatctgcaacccaatcccccactccttgcaacaaaatcgacaataggttagtttgctccgaaagagaagagccaacacaacattggaaccccttcacacacactc

SEQ ID NO: 74727 - DNA, 412 bp, Glycine max
  Clone ID: jC-gmfl02220126d12d1
aaaatctaatttgatattatacctttatttcaatagatttagaataggtttaaaatcattacactactacatgaacgaattcatgccattgagcattgtaataatctaaacacttctttggagcaattgtggtcataagaacttgacgaaccacgttgtccatgttcacaaacgaagacccatgtggactcgaagcagcctcgtgtgccaatttgttgcactccaaagctcttgccttcatctccttacccttttccccttccatcaactccctcacaagtgcttcaactttctccctcttaacatcctatatctgcaacccaatcccccactccttgcaacaaaatcgacaataggtttgttgctccgcaaatgaagagccaacacaacataggaaccccttcacacacac

SEQ ID NO: 74728 - DNA, 229 bp, Glycine max
  Clone ID: jC-gmfl02220126e09d1
gttgccctcttggagattttgctaccctcaaatatggtagcagtagcagcccaaggagagcaaaaacaggcgaccccaagcataaccaaacacgggatgaaaaaccgccacaaaaaatgggaaaaaacgggccgggccacaaaaagaggaaaccccaccaagcccgaaccctcccccagggggggcccccccggggcgggcacccccagtaacaaacccccctggcccc

SEQ ID NO: 74729 - DNA, 395 bp, Glycine max
  Clone ID: jC-gmfl02220126e11d1
atattaatagcattatttgataactttatgtgcatatacaataataacatttttattaattatcttccataacctacccttaacttcttccaattcttagagatgaatcaacacctttattggtgacacttgcaaagatcctagcaatctctaactgtgtattggcaattatttcagttctcttaagggccatttcccctctttaggcctcagcttcaactctcatcctctctatctccttcattgagtccattcttgcttgttcagaccttatcatagcttctgtaagccatcttaagctttctgctatctccacacactctttccttcttcgccctgagttgacaataggtttcttcttcctctaggtgcatcttaacccgtccttcttgcta

SEQ ID NO: 74730 - DNA, 358 bp, Glycine max
  Clone ID: jC-gmfl02220126f09d1
atgctaaaaactgagaagagactttcatttttttgaaccgttttcagttatgaatgggtctacaactttgatatttctgcctttccggatgtgacaaacgttccagatctatacgtacacattgattatgataccaatatcataattgattttgagaaattttaaaagggcattatttgtgaggaattgatggtgcacccggcacaaagaactctcttaaaacttaaaggtgaccagtctgagatctccatgccaaactcgattgatgattgagggtcttatgtgtcccattacaccaccctaaagatgttcgcccagaaagatatgtttaaaacttgacaaatggtagatgatgctt

SEQ ID NO: 74731 - DNA, 350 bp, Glycine max
  Clone ID: jC-gmfl02220126f10d1
gaatgaacagagatgtttgcatgaattgacatatcaagtggacatatgcacgtgtctttctcaaaaatcatacatcaacaaaatcacttcaactatagtgtaacctatgcggagatagcatcaaccactttctaccagaaacggggggcattaaaaaataaaatatcacatgagctaagcctttcttgggcaaatgtacattagctcagagaaacaagcagtctctatacaggttgcaaacctaaattcaatgcggaaatctctatcatgcagaacttcaaatttagcaaaaaactcaacctagcttcccgcatttcttccaccttttctgataacagcctcacataatc

SEQ ID NO: 74732 - DNA, 150 bp, Glycine max
  Clone ID: jC-gmfl02220126g07a1
ctagttgagtgtggagtagtatatagtgagatgtaaagtagactggtatgatggaaggtgaaggttagatgtaagacgatagtttagatatttagttagtggaagaagtgaggtgggtgttgatcctgttacctatagacgagctatgac

SEQ ID NO: 74733 - DNA, 136 bp, Glycine max
  Clone ID: jC-gmfl02220126g08a1
aggtttcggttgatctagaggaaaaaagaatggggaatgtaggggaggcgagagtggattgagtaaaaatgatatggtatataagagagagggagatgaggagctgatccgttacggatagccagctatgacgtta

SEQ ID NO: 74734 - DNA, 246 bp, Glycine max
  Clone ID: jC-gmfl02220126h09d1
caaagagttcgacaaataattcatatttttaataatagactataacctccacatcgtcgtggatgtcatgtgaatcgattagggtgttaattaattttcaactactaaaactaagctgcccttgtgcaacttcgaggaccaaatccgaacctctcattctccaaatcatattcaatgtaaaaattctgctgctagaaataccccaagataatggccggaccggtagtcttgggcggaccggcacct

SEQ ID NO: 74735 - DNA, 353 bp, Glycine max
  Clone ID: jC-gmfl02220126h11d1
ggagggaaaaaaaccctggtttttccccccgttttgaattctgaaaatttcagacccccctttgggcctttatcgtttcccccctgcccaaaggggggccctttttttcgcaaaagaggggccgaaccccctgttaaaattcccttgaaataacatggcaccccccgaatttgggcatgcccccccccacatttgaattctggccttcccatttttgtcctgggactctgagcttaagcccctttctttcccccccagaaaaaaatcggggcctttttctttgaataatgagcccctcatgggtttcccttacctttcggggactttaacaaacccttggggggggccccccc

SEQ ID NO: 74736 - DNA, 378 bp, Glycine max
  Clone ID: jC-gmfl02220126h12d1
gggaggaaaaaaatcttgttttttccccagcttttgtaatctgtatttttctatgccccctttgggcctttttgttttaccacttgccccatggggggccccatttttttcaaaagaggggcattaccccctgttgaatttcctttcaaattacatgggaacccccgtgttttgggttgccccccccatcttctgaattctgggctttccattttgttcctgggactctgagattaagcccctttttttcccccccaaaaaataatggggccttttctttttgaataatggacccctcatgggtttcccttacctttcggggtctttcacaaactcttggggggggacccccccaaatgagtttccttccattggccc

SEQ ID NO: 74737 - DNA, 431 bp, Glycine max
  Clone ID: jC-gmfl02220127a03d1
attaaaaaacttaagtatccaatgacaatgcatttgtatacacatgaaattaattaaaaataaattccatgatctgggttgtctaacttgccccgatgatgatctttattcgagaacaacaattttgatcacactcatacttcacattactttaaacttcttaatcatatcgctctattttagtttaaattttatttatattttcaccccaggcttatcacatgccctattctttcaagggtttattagcaacaaatagacttcctcaatatacttgatcatacggaaagcccaaaaaagaagaccgaaaaaatgcatgcatattttgcagacccaacaagagtaatcatctacctctgcaatattaatatataaagcctaaggatgaaaggaaaaaggtggttctgggaaccatttggggtgatggaaaa

SEQ ID NO: 74738 - DNA, 557 bp, Glycine max
  Clone ID: jC-gmfl02220127a06d1
acatagaagtaattagatgcattgatatcccattttgagtagcataatcatatcaataatgaatggtaagattgatgatttcaacataatttttagctactaaacaaaacattttgtacagaaaagaaagaaacaagaaaacttggaagaatatttaaaagctgaatttgggccaaccatagaaattccgaaattccattactagtaaacaaaagtgacatttagattgaagtcaaggaaggaagactcctgtcaacaatcatccactcaatcccaaatgtcaaacaaaaacaatcaacaactcaacaccataactcaaccattcctgcctgactaaccacaacacaacaaaaacaagacacacaactgagcttagtaactcaaccttgactcacagatacgatgcttgtgaatcatgactatacattgtttattattattattattattattattattattatcaattattaatcaataagtctccattttagttgcattctaatatttatcctacaatacttcaatataactcctgaagtgtttttagtattata

SEQ ID NO: 74739 - DNA, 568 bp, Glycine max
  Clone ID: jC-gmfl02220127a07d1
gccaccgcacccaccacgaacgctggtaagttaccacctccaaatagagcatcccatggtccacttatcacagacaccaccatctgtggtatgacaattgcaagattgagcactcccagagacaaaccttggcctgcccctgaggtgctggagaatattgatgctagagcaaagggtatgctgtaagtaatcgcgagtgggattccgaggagagagaagagagccaacgcgccggctttgacggcggcgggaggaggcaggggttcctggtgggcgttggggagtagggtgtattgtcgagaatgttggaccatcttagtaaccaaaaccgtcatggccaaacaaaccgcgagcaagaagttaacaattccccacagcctcttgacgcccccaaccccacgcgccagcactttcactcccaacgacgtcgcaccaagcacaacagagttcaaaattagccccacgcacccgacggacacccttatccgacgccttcccttccctactgtccctccgtcacctgacgcccatccagtcggtgtcgaataagcaaaagggaaccggcgat

SEQ ID NO: 74740 - DNA, 579 bp, Glycine max
  Clone ID: jC-gmfl02220127a08d1
aaaacaactcaaactaatcaacttcattcttccaagcacaaaatactcaatggatcacaaacctcaaggaacttagtgcattatgaagcacaattaatcaactgtataatatgcaaagaaacaagatgtcaactatatttcaaaacgaaaattctaaccattttcaaaaggaaaaatatcacattctaaggctccactgttgtcacctgttgccattccccatcaactgcttccttccacaatgtcacattgttgttcccatcagccacagccaatatgtttcctgtcaatgaccatgagaccctccaaacaggggtgttgaaatcattcaaaaccttgccttcccactgatccccctctttcgccacggtccatataatcactttaccgtcctgtgatgcgctagcaatggtagatttagggagccctaaattgggtgcccaagcaacatctcgaacccaatccgtgtgcatctgaagagcagggaagcagtccatcttccagagtccattgtttagcttccataccttcacagtattatcacaaccaccagagcacagcttctgtacaggatcaagc

SEQ ID NO: 74741 - DNA, 495 bp, Glycine max
  Clone ID: jC-gmfl02220127a10d1
ggatctcaattcttatgtattggaacagcacaaacgtttatatcaaaggaattattgcatctcaattcttaattactattcacatgttcacagacataacgctgctagaatagatcaaatcggggatacaattgataaaggcaactaacaaatatttataaaaatcctactaacagctaagcagacaatgttggcaactgcataactttaaagaatggctttcacaatgaaagatctaactaagatgagcaaggtctacctcatctgggattttaaatgtatttgccgcaccaaacttccggtattcatctgctttagcttcttcatcatcactatcatcttcctcgacatcattatggggtggagatgacggatcattctcacttttggacttggaatcatgagtggcgagcatgttaacctggccatggtgagaaatttccaccaaaacagtattatcgtcaactgggaggggttgctttcaaggttccccat

SEQ ID NO: 74742 - DNA, 476 bp, Glycine max
  Clone ID: jC-gmfl02220127a11d1
gaaaaacagattctcttgtaagaatcattaaacatgatatgataaaattatgataaacattctcataaacataaatgagcaaaaaatgaaggaatgggctttgagcaagaacccataactttattgggggtttatgggaaggtaaacaatcgatgagttcaaattgccaccccaagatgttttccgatcctttgtgactacaagtcttttatatccaatttaattatttattttaattcttctgatcagggtggaatgggcgtataaatgcagaattcatttgccaaacattgagtgaggctgtcacagtggcctcagtagcattgttgaacaagaacaacctagcagctccatagattgcctttgttggataaacccgagatgtcacaaccggccttccaccttgagcaaagctttcaacaatagaatggtccaccagtatccgcaaggaaaacttttcattataagtactggaa

SEQ ID NO: 74743 - DNA, 558 bp, Glycine max
  Clone ID: jC-gmfl02220127b04d1
agcgtaactcatatcaaactgtgcagagcgtatgagtcagagactgaaggcagaaccttcttccctctgaaatcccatacagtatcactgttcaatctcaataaatatgggaggtgaaaaaactttgttccttcaccctgtaattctacatctcccaataaatttattagagatatttacgtatctactccataaacttcgaacctctgggaaaccaatttcaagccatggctttgcagggccactgaaatgaataacagctgcagcttctaatttctctttgctaatttctgctgattgatggcgataacctaaatcagtcacaagcattgatgaacttataggatgcacttgaccctcaaatgtcatcaaggcaggtggaagcactcctggattccacattgtcatcccggacttgaggttaagtttcaaccattgatggtaggtctccgtaatgtttgttctcctccaaagttcaagatcaataatattcatgccatagagccatgcacactgatcaccgtcaaagtttgatgcaacaagagatgtgaaaagttc

SEQ ID NO: 74744 - DNA, 554 bp, Glycine max
  Clone ID: jC-gmfl02220127b07d1
atcaagaagttccagtctatatcaggccaatggcttggattattgtataatgggaatgaaaatattggctatgtacaaatgaccaataaaaataagtgaggagcaactgtattttgtacaaaagtgatgaagaaaaaaatgaacagcaagaggggtacaaagaaatcagtctccctcgtctggcctaacattgcaattgatgggatcattaggatggtgatgaatttgactgtgccactgatgctttgcaaatagggcaccagttctttagctgtagccactgctgtatgcaagccacatgatacatgtgctcgcattgcaaactccccacttcttctgcagccacatattcctcctggcaaatgctgcattttgtatcatccttaggttcattgcaactctcagcttcattgtcagagggtgaggactggtagacacttttctttaagcattctgaaagtgttttctctgttagagctgtgctcacagtacccatcctctttttcaaagccagcaattgctcatatgacatgttatcaatgtccaatcgcatg

SEQ ID NO: 74745 - DNA, 494 bp, Glycine max
  unsure (1)..(494): unsure at all n locations
  Clone ID: jC-gmfl02220127b09d1
ataatgaatcacacttttttctgaacttaataatattctatcgatctctaattctatactactagtgctccctccatagttccactaacttattcaaagccatgattgaagatccacctttcgccattgcttccgtggcactgattttcattttaaaaatcctctgtctaatctccttccctttgtccgagtccatgagttccatcactcggtcccccaactcggtggaactcactaacccgtctttgttctgcttcaccgccaaacccaccttcatttcctccaccaagatcaccttattcagcttctgctctgcgtagagaggccacgccaccattggcacaccttcacacaccgncttcaacaccgagttccacccgcagtgagtcacgaacccacccaccgagtcatgactcagtatcgccgcctgtggggcccagtccctcaccactaaccccttntcctttgtcctctccaaaaacccctttggcaac

SEQ ID NO: 74746 - DNA, 521 bp, Glycine max
  Clone ID: jC-gmfl02220127c05d1
aaaaaaatacagtttccttgtcccataatagaatattctgttcacattcacacctcaaccttcacagctctagagagaggagcaaacaaaaacaacaaatatatataatatataatataaacagggaaaaccaatgaagaaacttgtttcttgtaactctaagaaagaaacccaccaccccttttctccaacaattttttggagacttcaaagagactaggagcttcattatacaccacaaagctaaggggtaccacaaagttactaaaataactacagtagatgaaaataacacctagttttttttggtggtttttttttctttttttgtttgattaacatgaatgatcaagggcaatttggatttctaccaggaccaccatagtagaagtagttaccccaatctccagcactaccagtttgaacattgtagcagctatcttgctcagtgtaagtgccaaggtcttttggagctctagcttgttgtcaccataacaatctgaatgttcttgaagtaacta

SEQ ID NO: 74747 - DNA, 549 bp, Glycine max
  Clone ID: jC-gmfl02220127c06d1
cgaataagcaccaagtaaaatatatttaagggaaggagtaaaccaaattacaaaacagtaaaaccagatttctttgtgctccttgtccacaattgcatgtccaaatatacactataagtaaaatatgtttaacagtaggagtaaaacaaattacaaaacacagaaaaacaagttttccttgttctccttgcccacatggccaagagtctgaacaagtaagaaatataagaaattatgaaggcaaaaatagcagaatgattcaatggcccgtttaatacttcaattattgaggacatttattccaaattccaatccaacacagaaattggtgaattttccccaagttccactctcggcagtatagttctgcaaaagtagcactttcacattctggccttagcaaccacaatactgcctctatcaatttctacagctcctggcctagtccatgattctttaaactgctcttcagttactccttttcccattgcagcagttgaagccacacctccctggacagtcttgagatacctatcatagtagttagca

SEQ ID NO: 74748 - DNA, 488 bp, Glycine max
  Clone ID: jC-gmfl02220127c09d1
aaagcagaaattttaggtcatccatttcaacaaagaagatacttatacatgactttcctcttttttttttttctttttacagatgaatacgagcattacatagctattgacacgaatgacaatgtcatatttaacatttaaactacaccttttaaacaaggagctataggggaaaaccaagatacttgtttgtcacctaggaccaaaaagctccatggcttcaactacgagtgaagattcctttattaaatctgaatatctttgaggctcacaagaccgaaaccttggggtttcaatcctttgggaggcctcccatttttcagctaagccatccccttctaacatcttcaatacttttgacatcttggggcggggcgaaggattgaattgtgtacacaagagtgcaacctgaaccatttcttctagttcaatcagatcgaagttgccctttagatctttgtctaccatttgactcaatcttccatcct

SEQ ID NO: 74749 - DNA, 459 bp, Glycine max
  Clone ID: jC-gmfl02220127c10d1
gactcagacaaaaatccaatgcaaatttaagtgaaagcagtctagttataatgggagcagactagtacttgttcaaagcaatttcactggaaatgctattcttaatttcgcctcatgggaaaaacccactacgtcattttaaattttagaagcatttcaaacattctcaatccaagacaggtttctccaacaacaatttcctgtaaagcattagtctttccttagggccatgtattcacgatgaataccactggcatttaggatgacgatttcaaccttatctccggggtatatatctctctcagttgcagatgcaaaaacagttttgaccagatcaactgcttttgcttcagacaatggagtaacagcatcctgggcaggtaacaggagtgggctaggagacttcagctggttatcaagaaatggcataataagtgtggatccagaaccctgagagct

SEQ ID NO: 74750 - DNA, 456 bp, Glycine max
  Clone ID: jC-gmfl02220127c11d1
aaaggaacataaaccctcatttttctaatcaatagtatcgagtttaacttgaaaaaaaaacccaaaaaggaacaaactctaccctccatcggctaaaccccaattcgcatggtatattaaaaagaaccccaaaattttgtcgaaacaaccaaaatcctcatctttttaacgcccatggttgatatattaaactgaggttttaaatttaagcaacaaatctggatgataattgattcagatcctcgaattcgcatccaaaaatgtcaacactacaacccccaacagcacatacagtagcatacaaataccagcgcactcagaaaaacagccctctactcaaaagattcatcatcatcgtcagggaggggctgactagcagctgcaagaagctcagcctcgtgctgttgctgtgcagctaaatcaatttgaacttctggtggagccaatgcaggagat

SEQ ID NO: 74751 - DNA, 463 bp, Glycine max
  Clone ID: jC-gmfl02220127d02d1
acagcgcatgagaattgatatttattgtcgaaaagttgcaaaacgtgagacgatgataaaatttgtactaaattacatttttaaacttgcaaattgtactatatttatttagatatacccccttccccccaaaaaaactgagagaaaaaggtcttcttcactattttattaattaatacgagagggaaaaatgcttccatatatgtagcttttagtaatgtacagcagcaatttcctctcacttccaactgcagtctttcaagtcttaagataggttggtataggtacaccagactgttctgtcaactttttataagcagcttgcaaccttctagtgactggtcctacttctccattgccaattatgcgaccatcaaccttcactacggggcttagttctcccattgttccagtcgtccatacctcatctgcagtatgcacttctgacaagctgattcggcgc

SEQ ID NO: 74752 - DNA, 475 bp, Glycine max
  Clone ID: jC-gmfl02220127d04d1
aagttgcatgagaagatccatatatctataaagacgcacatttataataattacatagagcacataaaagaagaaaagtaaagcattaagcaaccaagatcattgttcccaactagtgttgtgcagcatagtggttaataagcgagagagcattgctagtaacctgagcaacattgagcatcctagccctaatagagtccttgatcttcccattcagcgccttcccggagaatccatcgccgcaagtgctctcatcggtcaaagcagaactgacccatgtctccacgttgctaatgtgccacgtgaagtcctcacccttaaccttacatagcttgagctccttcagcgaccggctgaggcggtcaacgctgtcgctgatttcctcggcgcagtccttgagtgcagcgtgctctctgggtttcaggcctctgaatttgttgcagctagccacgaaggttttggtggcttgggtgcg

SEQ ID NO: 74753 - DNA, 522 bp, Glycine max
  unsure (1)..(522): unsure at all n locations
  Clone ID: jC-gmfl02220127d05d1
gaaatgaaactgcactacacttaataacagataaacaggatttattcacacatgtgtacatacaacaaagcctcaagcaacttcacttcaagaggctaaaaaacataaaggactactcgtgtatgaaatattttttttctttattaaaaaaaacatgtcatgtatcactccagttatcatcatcttcaccatcatcactcgcaacaacctgacggattgcatttgccttctccaaaattgctgtaactttgacgtttgctgtggaaccagtggtatcatttgactttcctgatactgggggccttaggttgaatgcctgaaccaataaataaatggcaagtcaatgcaaaagttgactacaattaacatgatttattttaatgttgctagaacatgttctggattgatttttgtcatcaatttgtaatttagaggactaattagatctaaaaaaataactaagtatttaatgaccattntgacgtatttataatttataatgaaatacaaagttgatgacac

SEQ ID NO: 74754 - DNA, 565 bp, Glycine max
  unsure (1)..(565): unsure at all n locations
  Clone ID: jC-gmfl02220127d06d1
ataaactcattgatccaaaatcaattcggtaaatgcatatccaaacacatgctgggcataatacttactcactcctcacaatagtcaccataagcattagcatgatcaaaagaacaaccagattcggctcttctattcctttagatggtttcagcaagtcctccatgatcccttattttgaactacacaaaagcacaaataaacgtagaagaacaatacatcaaacaagaacttctcatccgatcgttgccttggatctacctatggttcaccaccaagctccactcgcagattggcatatggatatactttgggtgcctgatacaaagaaaataacaaaactcaatcaacataagtactggacagctgcaaaatagcactgtataagaagcttcaaaagacgaaaatatcaaaaagaaggtggccattaatacaagcaagagtgcaatcaggatacatggactataacaatgacacaaaaaggacagaaacctccattagtccatagaccatgaccatgcccaactctagncaacaaactgcacttttctttcaaccaaacaga

SEQ ID NO: 74755 - DNA, 403 bp, Glycine max
  Clone ID: jC-gmfl02220127d07d1
gcaagggatcagtttttatacttaaaagtaatatatgttcaaagcactacacaagggtttaggatattataacactaatgcaaaaactggcatgagtccaaaacacaaaatatagcccaatgatttatgaataatgactattcccataaaatgtaacatgcaaatttttactggctgttgaaatgaaacctgaaagcattgctgagcatgggaccaacttgttcaacaactaattttgtattttgaaagaaattacaattcaaattcattttcaagcttcaaggcctttggggaagccttttccttttcggcatcgaagacaaaatacggattgggagcctttggcttgaacttgtacccagtaaaaaaatagaaagcaagggtggccaacttaacagcaacc

SEQ ID NO: 74756 - DNA, 551 bp, Glycine max
  Clone ID: jC-gmfl02220127d10d1
cgggaactattccttcttttattctccttgatcatcaagcaaataataagttcatttctcatatattagtcccatgtggagacttacaaaggtaacattctccaataatatgttccatacttaaaaagataacaaagaaatcacaaatagcaagctgaatttataacttgaagtgtgaattctaacatttaggtgctagaattctttcgacaaatacaaatcattcctttgaatcgagcattttgtttagtgcagtaatataagcctctacacttgaagtaacaatatccactccttctccggtaccactaaatgttggataaataacgtttccattcaaagcaggagtaggtgactgcttattctctctacgaattacaacacgtgtagtagcaattgcatcggtgcctcctgtaactgtacttggtgagtattcaagtacttttacggtttccttcactatgagattaatagccttgtaagctgaatctactggtcctacaccaacagaacaagcaacatgtgtgctaccatcactaagaacaagtttg

SEQ ID NO: 74757 - DNA, 422 bp, Glycine max
  Clone ID: jC-gmfl02220127d11d1
ggcaaagaaaaaaaacctttttacattagaaaacaaatttattgcataaaaagaaaccggcgcttgcaatatgggatggggggcccgctcaaaggccacctaatttgattatgaaacaaatggggggacaagcttattccaaaaaatgtttttcaagaaaaaacatgcgggattcaccttcatttccaaaaaaattggactccaggccccccttggttctcactaaaagggggaaccgagctgacactgtttcccttaactggccctttaaattccaaaagtttgggggccctatgtcccacatcggaacccgttaaagaaggggcccctggctggttataaaacatttggtccttttgggccgctggctttggccccctgattggttctgcagcccccgggataactttggggggggggtg

SEQ ID NO: 74758 - DNA, 414 bp, Glycine max
  Clone ID: jC-gmfl02220127d12d1
gatgacaaaaatatctgactaaccaaaaaagaggaggtcatatacacgattatatagaaaaccgattctcaaaaatgtgaacaatcaccagctcccattattctttctctgggagccttgtaaaaaatgcccatgctatatgagaagaaaaggtgaacgcaaggaaagaaagcagtggccaacattcaacaccattttagctagatagagtaatttcatgcagtccagctccgagaggcagaattctaaatcccggaagttgcagtgtaatcaaatgaataaaatgccttgagttaaactacttccaccaatgagctcattcgcccatagctcatgcatctaccatgggataaaaacctgacatgaatggccttccgcttccattggaatctgcattggcatgcaatggtgatt

SEQ ID NO: 74759 - DNA, 407 bp, Glycine max
  Clone ID: jC-gmfl02220127e03d1
ggaaaacaaaccccccggctaatatatttatgatcagcatatcaaactctaaaaaatttacaactaaataacgggggcccttagtgggggaagggaagcccacatagaataaaactggtaaacttttgtcattgtaaacaaaacaagcatcatttgtactttaacaaaaagcagttgcaacgggcttcttatttacttattgggacttgggggcccttatttgagtatcctcactccccatgaaaggttttaacactggaaaagtcaggcctgatcaaagagaaatgttttgctaccaaatttgctttaaaaaaaagcctacaagtccccaggattttttacttcccttccacctttcaaagcaatttaagaggggataatgaacaaaaaggaggggttttggtttt

SEQ ID NO: 74760 - DNA, 494 bp, Glycine max
  Clone ID: jC-gmfl02220127e04d1
caatccaaaaaataatccagtagttttaagttcagtccaaaaaatagtcatgtgagaactctcagatcaatgtttatgtacccagaaataatgagatgtgaaaatcactaatttattgactacaacaaggatagttaggaagtttaacttaattttacacctttcatccgtacaagacttgattgtttataaagaagactcaatatgatgggtggatgaaagcaatctcattaggcacggaatttgagactcactgattcatagcttggaacatagagaacatctccatatgatgccattgtgagaggagaacaaatgagctttcgcgaaattgaagtgatatccttcgaggttacttcatccactgccttcaagaaatcctccacaggtttccttttaccatatgtcaaaatttgtctttctatatcttctgaaacaaccatttttgattccaaattcaataaaattgcagatttgggagcctgtttggctcg

SEQ ID NO: 74761 - DNA, 505 bp, Glycine max
  unsure (1)..(505): unsure at all n locations
  Clone ID: jC-gmfl02220127e09d1
atcagacaaattagccactatacacaactttataaagctagcaagaaatctaacaaatatttaaagtagttgttctgcatgcggtgcgacatacacaattaattaacataacctactacttattcagtcatcggtgtagctgagacttgagagtcaactttgttgtagcataccaacaaagcacagatagattggattggatgtgttcatggttctgatcccaagaacatatccactttctcccaatccaaaaaagggtcatcgttgttgtcaacatccatttgagtagcttcctcaccgtgaagagggggttggtcatggtctccggaggaagagctctctgctggtgaacacgttgcacttctctccaccattttatgatgataatcatcatatgatgttgaacccttttgttgctcttctacattttgagcacccgaatagctttctgtgtccctccttggcggggggncgtctatcaaatgctgtcaaacactttgatttt

SEQ ID NO: 74762 - DNA, 548 bp, Glycine max
  Clone ID: jC-gmfl02220127e10d1
agagaattcatgcactaactggtcttattataactacagtagaatctggagaaaggagacacattggaagagactagactaagaaaatggattagtcttagtagactttattttacattaatattggaagagaatagaccaagaaaatgagcactgaccaaactagtcacacacattcacacacaaaacaactaatacacgatcgaacagttcaaattttaaatgatagcttatagtccaagaaatccgaatcctgaacactaagccatagacttcaactgggcaaccagatcagtgatgaatttgttctgaattcctttattcaataaaaactccttccatttcatgtggttttcttttatttgcttccctggctctttatcatcctccaccatgatagtttttactgccttcagtatatcctctttcttaaagtccccatcttcactcctattcacctctatccctgcctccaaagccttggctatgagcttagcattgaaaaactggtcagccttgaaaggcaacagcaccagttcacaatcact

SEQ ID NO: 74763 - DNA, 542 bp, Glycine max
  Clone ID: jC-gmfl02220127f02d1
caaaacaatgcccctccagcttcctttaaacttcaacacaagaaggacaagcacaaaatggtatcttcatgccattcatgcatcaaatataaataacaaaaccgcaattgcactggctgtcagctgaaggctttgtatactccaaaggccaaaccaacaaaattttgttaatcaaccatcgtcatccacagcaccaacatatgtgaggtccgtccgtctcacccttacagcccctttaagccagctggtggctcgaatattagcatggtcaccacttcctatgctagcagtattacctgccgaagagtaagatccagtaccatcttctaagagtgtccaaggatctatttccaaatcattgtcctgttgttttgatttccctgatgcattagaagcaacccttgatagaactgggttcctctgaggaatagttgaactactggagttagacccaggatttgtaatgctgggttgaaggcaaacaagagcggaattggaaatagatggtggctggcaggataaagagcaccgcataaagggga

SEQ ID NO: 74764 - DNA, 531 bp, Glycine max
  Clone ID: jC-gmfl02220127f03d1
cgcagtgcaattaataatgcattgaacttaactggaaatataaaaataacagagataaggaacaatcagattctaaaagggtgaaaataataaattagcaatagtcattaagtcattccgcaccgtctaaacaaactaggtttgtttgaaaatgttgatgactttggaaaagggtttatctgaaggcttgctggtcatcacaacgagtagctcgcaaattcactattgccatcacaatgtcaataattaagctaccaattaaacccaactgtgaaacaaacaacttcaggaacacaagagttcttcattgcagattattctacttcagccaaatagtcgtcaatttcagctggtgtcaataccctgaactttttatcagctccaattatgccaatttcaatgttttttcctgagatctgtccctcaaacccttccttcagagtcaatattgctgtgtggactgcatcatcaagctccatatcatctgtgtacctcttctcagaaacgtctttgcattagaacatttttccc

SEQ ID NO: 74765 - DNA, 525 bp, Glycine max
  Clone ID: jC-gmfl02220127f05d1
aatcaccataaattagaatttcaactagcaatacaatacacttattcaaaaccagttcctgatccattgattatgatttggtttttcaaagggattcaatccaaaaaatagtctgtgagaactatcagatcaatgtttatgtaccccgaaataacgagatgtgcaaatgtggctagtgcacaatcactaatttattgactacaacaaggatagttagggaagtttaacttaattttacacctttcagccgtacaagacttgattgtatacaaagaagactcaatatgatggatggaaacaatctcattaggaacggaacttgaggctcactgattcatagcttggaacatagagaacatctccatatgatgccattgtgagaggggaagaaatgagtttttgcgaaattgaagtgatatcctttgaggttacttcatccactgccttcaagaaatcctccacaggtttcctctcaccatatgtcaaaatttgtcttcctatatcttctgaaacaaccattcttga

SEQ ID NO: 74766 - DNA, 422 bp, Glycine max
  Clone ID: jC-gmfl02220127f06d1
caggttccacgtggcttattgaacctttgccattaataccaatttccataaccaaatgcttggtaggaaacaccaaaaggatacatagcccgcgaaaaataaagtgcctctcagctacaaatggaaaaaatttgtacaataatacactaggaaaccaaaagtgaacaactttttagtcaaatcaattacttccgtaaaattttgcttttcctcactgaattgcatttagaacccttatttgcttccatgtatgccacagatatgtatatatggggtagtaattcacaattttgaccttgcctgtttccctttccgcaccttttttacctgcgcttctcagctgacaaagaattggagtttcgtctgttaagttacttttgccttttcatgacacagccatctatctgaatcattgcatcatc

SEQ ID NO: 74767 - DNA, 405 bp, Glycine max
  Clone ID: jC-gmfl02220127f07d1
agggggggaattcaattacattctaaattctctattctcacatttttgaacatttcataatataacccggtacaattaaatgcaaatgacatgctataatcttgatttattggccacaattagaaaatgagtacataacgctacctagctctagggagatacatatctacagaaagtcttgaaataggacagcaaagaggagaaaattgacagactaaaacaacaatcattccaatgacttgagcagcctaaataacgcagctgcctttctaatacgtgaaaactcgatgcaaaacgcttgaacttcaatgaagagaactttaacattaataatattggtccgaatgagactttgcaaaaaaacacagacaagtcttacaagcctggtctgcatggatttatcct

SEQ ID NO: 74768 - DNA, 383 bp, Glycine max
  Clone ID: jC-gmfl02220127f08d1
ggggaaaagccaaaaaacaaaaatttccccaattttggggccccctataaccccggtccccgaaagaagggcccccgggcaaaatctttcaaaatatggggcccccccccttttttttaacccaaaacctaccaacccttaaaattttttttttttaaagggggaccaaattccgggggacaaaacctttattttcccccctttttttgaagggggggtgccccctattaaaaaaaaccgggccttttcccgaaatgagaggaaattccccccaaagggggcccaacttttggggggggcccttcccagtttgggggacctccaccccgggaacagttttttaaaaatggtggaaaaagacccccccccccaaaaaggttttt

SEQ ID NO: 74769 - DNA, 521 bp, Glycine max
  Clone ID: jC-gmfl02220127f09d1
agtaaaattgtatactctctataatttgagattattacatatttctagcataaatcttgagagaacatttttttttgtttcatcatataaaatatatatgttctgaaagaacacatacaagtacacaaaaaaaagggggaaattcataaaaaaatacagaaaaaaaaaaacagaattgagtaagagggaaggaaacatagagaaaattttagcaatcagataataagaagccagtagtagtgcaaaagtcccttgccaagagtgttggaaccccttttagttaagcaggtaccttctcccccttgagtggcttcaccacttcccatgtgaagtcagggtcatctctgccaaagtgtccatatgcagcagtcttcaagaacctgccatttccacccctcttgagatcaaggttgatggagatcatgccaggcctgaagtcaaaactctccttcacaatgctgaggatttccttgtcagggatcttcccagtgccataagtgtcaacaaacacagacaagggc

SEQ ID NO: 74770 - DNA, 406 bp, Glycine max
  Clone ID: jC-gmfl02220127f10d1
cgggaaagcccaacttttatttgggtctaaacttattattcaccctacaatatgtaaccacgttatttcgggattagatggggacaaacttattggcactgttcagcaatattctacatagggtaacaaaaacattattcacatttgtttaccaaaaacacgccaaccttatatttaaatcatatgcaaaaatttgcataagcttgctaaagtggagaagaccaagaatttgaatcaccccaattttttgcgatggggctcaaaaatgctttgggaataccaaaggaactgcccaaggcaagggcgtggggtcaaagttcaacacaaagttttggcacttttttcctcactggaaaagctttttttgttgacaagtttccatttggaagaaggggagaattttttt

SEQ ID NO: 74771 - DNA, 423 bp, Glycine max
  Clone ID: jC-gmfl02220127g02d1
gggaaaccccccttttattggaattaaacctaaaaaaaggccttttgcctgaatcatttagctacttggacttgggcccatcttgggcctgaaaattgaacccatgacatggggcccttactaaaaaaactaccccggccccaagaaaaagcttcccccctccccaatttcatgaaagctgaataagccccccattgggataatggggggggatcagggtccgggcacaaaccatcaagcatttgggcttccttagtcatgggagggcccaaactcaccttattttgtttgccccaaaaagcaactttaaaagcagccccaacccttttattcttttaaaaaaaaattatttttggaacaagaaccctttttaggttcccttcttccatcattttgaacacataaaaaggaaaaagcgccttt

SEQ ID NO: 74772 - DNA, 531 bp, Glycine max
  Clone ID: jC-gmfl02220127g04d1
gaattctagcaaatatcttatataatattttagaggtggatcaacaacaagattctgttccttactgccaaccagttacctaaccaccaatttacaagtcaacaaagtgaagttcacttcaataatttcctgtgtagctttcataataactaataagcttgatatcccagtcaatgattatccactaccattgacaatggaggcaggacactgaacaataaggggggaaagcagatgtaaaaagcagtcagcacaccaaagtatacaaattctactatatatacatcaaccactcccacgcttaaaatgttctctaataaacctttccgcatgagtagggtacttatctctaatgtattcccgaaggcacttctgataggagaaatcaatccagccaccatcagttcttacaacaaaaagacaccttgattgtcgatattggggatgacggtcaaccataatggattcaaggccacacccaatcttatcttcagaatgtggatggtatgcaaggagcttttcaactatagc

SEQ ID NO: 74773 - DNA, 400 bp, Glycine max
  Clone ID: jC-gmfl02220127g08d1
aaaagccgagaaagggttaaaatattttccttccggaaatcacccccgaacatatttcttacattcccaacactcctttggtggctgaccatccctcaaagggttaacccaaaaatcaatacactttaaacttcaatttttctataaacataggacttaaaaacatcccaacctcaggaacattaatcagggcatgaagggctctaattctgggattaaaaaaaaaaaagacagcccaaagggggaaactttaagaggggggggtgctgttaataccaaaaatggtcaccttttagggtccggcaaaaacaacgaacggggtcttttttttgctccgggctttttttatatgctacctttattattaattaaaggcccgcaataaaaagcttgttccccc

SEQ ID NO: 74774 - DNA, 482 bp, Glycine max
  Clone ID: jC-gmfl02220127g10d1
gaaccagtaaattcaactgtattaaacattccaaattattaacctcagtgtaaaaagaattcgttatgtttgtcaatgtacaaaaggaagccaagccatttcataagaaagagggatttagaattgatacaagcaaggacaatgcttgcaggattctaaagtctatagtttttcatctatctaactgtgacacaagatatttatctagcttgaaaccagacatctcagcttccttgcagagctctttgcactttgctatcctcccagaggccatgtagatatgaagcatgtccttgtacaagccaaaagagggagaaaatccaccctctttaagttttgaaaaatatctcgtggccctagatagatcattcaaagcaacaaacagttttattaccacgcaataagctggaaggtcaaaaagacaatttgaagactccatttcccaaactacagccaaggcctttttgttttttttttttggg

SEQ ID NO: 74775 - DNA, 526 bp, Glycine max
  Clone ID: jC-gmfl02220127g12d1
cgaacctatgaaatccgtgtctaatatttgaaggaaacacgcacccactctggattgacaaaaattattaagaatttggaacagaagaaaacatataatgggggaaaaaatactaacatatacctctctattggtaataactagttgcctgctcatttagagtcagtgaaatctgcatcaatgacatcaccgtcgggtcccttgcctgaggattctgaggggccagagtcggcaccgggtggtggtgttggccctcctgcgcctgcagctcctggttggttgtaaagggactgaccaagctgcatgacttcctgatttagtgcagccatggcatccttgatagcttgggttgaacccccagaaatggcgtctttaagctctcctagttttgcttcaaccttctctttcacagggccaggaaccttgtctccaagctctttcaattgcttttctgtctggtataccacagagtctgcctgtttctttgtgtcaatagcatccctcttctctttgtcttccttcgaaa

SEQ ID NO: 74776 - DNA, 430 bp, Glycine max
  Clone ID: jC-gmfl02220127h03d1
aatacataatcaattattttattaatcaagtattaaatgaatcagcatatgataggaaatacataatatctctttatgagttacacactttattggaaactagtaaccatatatgtattaccacacacacatatataagtggttgaagcatatagataattttcaatccgaaagaagctctattttgatgcctctgattttaacacgccctttcccatatttgggaaccagcgtcaccctaacactggcatcatcttccgcttccaattcttccaacaaatccgtaagtcccagcctcaaacaagtaatgatgcccttgtttttgtgcatatgtgaatgaggcacactcacaaagcttcctgcaaattctgtattatctggtcgaatctgcttatcatcttcatcattgataaacacatcaaatttcaca

SEQ ID NO: 74777 - DNA, 542 bp, Glycine max
  Clone ID: jC-gmfl02220127h05d1
atcagcaggagatatacatgtgtgtgtgtgtgtgaaaaaaaaatggaagaaattattagaaggggactcatgttgaataataaatatccctaataatttagttttttacggtgtttgatgtggtcgcgtgatccatataactaattgcacctagtgggataagtaagactattgttactatcatagtaatatatgctcaattaacatacctgatgtgtaagccagtagtgtctatctctcatctcaattaagaaatcaaatgttggaggtgctttcctctcaagaattgtcttctgagaatttctggctctggcttctgcatctcccagagtaacactttctattccgccaatctaataaagcaaatggaggtgaatcttgaatattactgttgattatattgcacaatgattcatggctccacaaatcaagtaaatctttaaatctttaacatcaaatattaatctactaaatgcttattgaactgaatgggtgatataatttttcaggatacttttgaaaattaaaacgtcaatgaaaac

SEQ ID NO: 74778 - DNA, 359 bp, Glycine max
  Clone ID: jC-gmfl02220127h06d1
acccattcaaaatttttatttttaattttaaaaaaagcaggggaatggaagtgcccccccttattccttgagagaaaagggatatattcactcatacctgttatatagggacattaccatagaacatacctgcgttgttcctataaaaatataaacaagctgcctggttcaaaaatccaactggaaaatggggggggcaaagtccaaagttggcaactcaaacgcaacccactgaaactgttttccaaagaggaccttttaatgctgagtttcttttttttgatttggacaaaaagagggtaaaccccccctgggaaacttagataagggccccttttcatgcctttattatagcaacc

SEQ ID NO: 74779 - DNA, 481 bp, Glycine max
  Clone ID: jC-gmfl02220127h09d1
caacacaaaccgaacttattttcaagggacattattacagacccattaaacatcaaagttcttcaaatgttttgggaacacatccaacattacacaacgagcttaaaaccccccacggagacggaggacaaggtgaagggttgattccttctggatgttgtagtcagcgagggtccttccatcctcgagctgcttgccagcaaaaatcaccctctgctggtccggggggatgccttccttgtcctgaatcttggccttcacattgacaatggggtcagagctctccacctcgagggtaatagtcttacccgtaagagtcttcacgaaaatctgcataccaccacgaagacgcaacaccaagtggagagttgactccttctggatgttgtagtcagcaagggtgcgtccgtcctcgagctgcttcccggcgaagatcagcctctgctggtctggggggattccctccttgtcctgaatctta

SEQ ID NO: 74780 - DNA, 490 bp, Glycine max
  Clone ID: jC-gmfl02220127h10d1
ggggtctaaacaaaacccagatatatattacgcaccaaaaatgtcttctcgttgtctaaacaaaactgtcactcagcttacacagaaacatttgacagaacagtaagtttgtaacttaaattttcaatggtaacataagaaacagaaaacctagaacaatttgaatatgcattatcactaaatcaagctccaacaatttcagggggttcctctgccactatttcatcagcagggctgtctacctttgcaccaacatcctcggagtaatctccatgaacctccatcagtttcccaagatcaaacttaggagctttcaggatcttgactttacgaacaaacacattctgcagagggtaaatactagatgttgccttctcgatctcttttccaataatctcaggaataaacttccggaccaactccttcaaatcacatgctgttgcctgggtggtcatgatctccctcatctttctacgaatctgtctaatct

SEQ ID NO: 74781 - DNA, 408 bp, Glycine max
  Clone ID: jC-gmfl02220127h12d1
caagggacaccctgtttgggctcatctttttatttttcttaccaaaccaaaaggggggcaaattataatcccaacattggcttggtttatttgggtattggaaaattcattctcaatggcactctgggttggtgcacttttttggagaccccccctagagttgtaaactccacttgggcccttagacaacaaacacaaatgggtccctttttttaccaccctccctttggtcaacacaacaattccatgacaattctttatagggctcaacctatgagccaccaccacacttgttctttctaccatgacttgttccaaagcatcttgaaccaccttttctgattgactattaagtgcccttgtggccccatccaaaagcaacacttttgggttttttagcacacccct

SEQ ID NO: 74782 - DNA, 279 bp, Glycine max
  Clone ID: jC-gmfl02220128a01d1
attatctaattttaacatgtattataaaattaaataattacttgacaatatatagttaaattctcataccagaacaaaactgtgaagtaactgactctactatttcttctcaactgattgtccatccattaagcacctaacagcccctcggcaggatggggattgctcaagacacaatttccatgaaaaatgattatggtgaacttaccatccaatgaaagaagggggctcaataattttttcaattactcgtactcactttgctgggtcttttttttt

SEQ ID NO: 74783 - DNA, 189 bp, Glycine max
  Clone ID: jC-gmfl02220128a03d1
aagatcaaaggagccttgcttccccattattacttctacacttttgccaacatcttaaaagaaggtacaactcacaacccttaaaccttgaaccccagaccacacaaaatttccccccaacactcattataccaattaccccccctggaccattccttttccattttttgatcctaaaaaacccaacca

SEQ ID NO: 74784 - DNA, 91 bp, Glycine max
  Clone ID: jC-gmfl02220128a07d1
ataaattgttaaacacagatacagggcattcatagtaaatagcatccacatgcatatgggtacacttgacatgaaagagggaaaaaagatc

SEQ ID NO: 74785 - DNA, 335 bp, Glycine max
  Clone ID: jC-gmfl02220128a09d1
agaacaacaaaaatatttagtaatctgaaactgaagtgactacatacattaaagaggatgcttatttatataaaagaactaactacaaaaaataaataagtgatgcaagcctttattagaaacaagaaatatttataaaaaaaaaaccatttattggtaagactctctactttgccttgctctatcagtcttttgcataaattcctggactaattggtctatatatcaataagccacgggaagaggaccgaagagaagccaccaaaacaatctcgtctcaactttgaagagatgcatgtatcggttaaaatgctcacttggcacttcaaccacat

SEQ ID NO: 74786 - DNA, 301 bp, Glycine max
  Clone ID: jC-gmfl02220128a10d1
aaacaaaacacagcttcttttttagagtgaacaacaaatacagctttagttctcaattaattaataacttttccagactcttcatgatggaaggatggatgttgcgtgtgtccggctagtagtatactttctttcttttactgatcgacaagtttgctgcctttgacatccacaacaaacctgtatctcacgtcattcttctccaacctttcaaaggctttgttaatgtaatccatgtttaccatttcaatcatcgaactcagacccttctttttccagaactccaacattttctttggct

SEQ ID NO: 74787 - DNA, 93 bp, Glycine max
  Clone ID: jC-gmfl02220128b04d1
accatattcactattgaacccatatcctcaccagcacagtgtactgacagcggcgacagtttttctacattggaacgcaatgagatactcatt

SEQ ID NO: 74788 - DNA, 201 bp, Glycine max
  Clone ID: jC-gmfl02220128b08d1
atatagatagataaacaaagataaaaggcaataatattaaagcacaagttcaaaaaaatcaaaaaaataaaaagaaacgagtgaaaaaaacccaaaagcacacagaaagagatgtaaactcacagaatccgatcctggtaaaaacgggtgaaggcaacgtataaagataacagagtaatccgttaagttgattgaagaatg

SEQ ID NO: 74789 - DNA, 163 bp, Glycine max
  Clone ID: jC-gmfl02220128b09d1
aacactcataatgatacctagataacaggcaattaattgaatgcattagactctggagcacttcatatgcatactgttgctgttacaattactggaattggaccctaacagtttcatactgcatgatttccaacctgcacaaaattgaccaatggaaagcctt

SEQ ID NO: 74790 - DNA, 160 bp, Glycine max
  Clone ID: jC-gmfl02220128c01d1
gtacatagatagtaaaaccaaaagaactggcaaacatggtaaaggacaacctcaacgaaaccagaaccataaagaggtacgagggaaaaagacccacaacgccaaagaaagagatctacactgacacgaatcccatcctggggaaaaaggattgaggcaa

SEQ ID NO: 74791 - DNA, 259 bp, Glycine max
  Clone ID: jC-gmfl02220128c10d1
gttgaaacatgcgtgattgcctttattgctttctcttcgatctgttataaaaacagaatacagcaaacacgagaacattcaaccaccccaaatgtaacttgaccatacgtaggtcgatgaaggaatcatattcctcctatttcacattattgaaaaacaggcagagtagtacagtcaaccctaatgagagagcccttagatagagatactgttgggaaatcctctgaaaggcaattccttctcactagaaagatagagc

SEQ ID NO: 74792 - DNA, 130 bp, Glycine max
  Clone ID: jC-gmfl02220128d09d1
attaatatacaaatataataggcaataattttaaaaaacaaacccataaaaaccaataccataaaaatatacataagaaaataaactaaaatttctaataaatagaattaaacatacttaattccattct

SEQ ID NO: 74793 - DNA, 358 bp, Glycine max
  Clone ID: jC-gmfl02220128d11d1
acgtccgtggccgccctttttttttttttttttttcaattttgaatgaagagtgatgtttgcatgaattgacatatcaagttgacatatgcacgtgtttttctcaaaaatcatacatcaacaaaaacacttcaactatagtgtaacctatgtggagatagcatcaaccactttctaccagaaaaggggggcaataaaaaataaaatatcacatgagctaagcctttcttggtcaaatgtacattagctcagagaaacaagcaatctctatacaggttgcaaacctaaattcaatgcgtcaatctctatcatgcagaactaccaatctagcaaaaaactcaacctagctttccgcattt

SEQ ID NO: 74794 - DNA, 90 bp, Glycine max
  Clone ID: jC-gmfl02220128e01d1
attatacaataataactatcaatcatggtaaatttctttctcataaaatccactaccttatatatatatctgttaacatattcctcaatt

SEQ ID NO: 74795 - DNA, 96 bp, Glycine max
  Clone ID: jC-gmfl02220128e09d1
atataaattattaaacaaaaataaatgggaaaaatattaaaaaacaaactcaaaaaatccattaaaataaaaataaacgtaagaaaaaaattaaaa

SEQ ID NO: 74796 - DNA, 170 bp, Glycine max
  Clone ID: jC-gmfl02220128e10d1
atataaataaatatacaaaaataaatggcaataatattaaaacacatcctcaaaaaaaacattaacaaaaaaagaaacctgagaaaaaaaaccaaaacacaaagaaacagatttagactctgacaaacccaccctgggaaaaacatatgaatgccacgcacaactataac

SEQ ID NO: 74797 - DNA, 267 bp, Glycine max
  Clone ID: jC-gmfl02220128f09d1
gcacattattaactgataaaccacacaaaaataatcaaatcaaaattttttcgcagggggaatcaaccaaaatatattggtatatcttacatctttacaaaaaaaaaaaaaagtagttcccaggggggaatctgacaaatactatactatctcacgcttaggcatttaagagttttctgattcctgctttttgctcttcagtgagcctagttgggaacttgatgttaaactttatcctcaaattccccttctttgatggatcttttg

SEQ ID NO: 74798 - DNA, 242 bp, Glycine max
  Clone ID: jC-gmfl02220128f10d1
ataaaaacaaaagttcaaattttttcttctatttttggtttttcaattcaaatattagggggatttgcaagaaggaagagatgaaagacgcagggaccgtgaaaattacattttctttcctatcatattgtcgtcctttgagacattctccttttaaaaggacgtttttcaagcctgatttttacataactatagtacacttagttacactctactcttccacactttttctataaaccggg

SEQ ID NO: 74799 - DNA, 99 bp, Glycine max
  Clone ID: jC-gmfl02220128g01d1
aaacaccaatagaaaaacacaaacacctggcaaaaaagggaaagcgcaagctcaaagaaaccattaccataaagagggacgtgggaaaaaggcccagaa

SEQ ID NO: 74800 - DNA, 154 bp, Glycine max
  Clone ID: jC-gmfl02220128g04d1
gtggcaatgataaacaatgaaatctaatgcaaactgaaaacggtaacaacgctgtcacattatagttgaggaggctgtgtataatttcctgattttcctcaaattacagacccaattagggaattaagcccaaacacactttagactagaataa

SEQ ID NO: 74801 - DNA, 154 bp, Glycine max
  Clone ID: jC-gmfl02220128g06d1
atataaaaataataataccggaacaattggcaaaaaagtaaatgcacatagtcaaagaacacaatgcaaaaaactgtgctcagtgaaaaaaacccaacatggtacagcaagggtttcaaactctctggaacccaccctgcggaaaacagatgaa

SEQ ID NO: 74802 - DNA, 125 bp, Glycine max
  Clone ID: jC-gmfl02220128g07d1
gaacacttataatgaaagcggggtaaccgagaaaacaatctatgccttacactctggagcctttcctatttattatggcgctacaaacagatacggattttggccccttccatttaagtaatggc

SEQ ID NO: 74803 - DNA, 332 bp, Glycine max
  Clone ID: jC-gmfl02220128g08d1
gaaaactgaaaaatgagaatattattattacagttaagaaactaatcatggaaagtaatgagcttcaaaccagcttttgatggcaatccacaatatttctcccttaaaactaaatcatcttggcaagaccaagtcagtcctcgaggagagctctttggccacatgaacctctcagagaaggggttcactaaactctgccgaaattgttgcactgtctcacatagcaacccctttgccatggattttattttcaatgagacatcactactaataaggacaagttgtacaacattatacttttttccatattgaagggcacagtcaacgatgtg

SEQ ID NO: 74804 - DNA, 245 bp, Glycine max
  Clone ID: jC-gmfl02220128g09d1
caaacaatattattaatcaataattatatacacataacgtaaatgaaaaaatggcacaagcaaagaaaatcaaggaggggagtataagtcctggtacaaaaccctttattagcaaaaaaattgcacccaaatttcttcaccatcagaacctagtacttacagcttttactgagtccttaaccatgcactcatagtctctctagtgcaatctatcagctcccttctattcttagaactcaaatgaa

SEQ ID NO: 74805 - DNA, 252 bp, Glycine max
  Clone ID: jC-gmfl02220128h01d1
gatcaatagacagatgaatatatatatagtttcatgttgacactatgcagaaattatattctagtttacccatggtccaatgataaaggctactccttcatgggaccttgcttttgagatttggaatcacattgcgtgacttgcgccctttcttatggaataagggaactatatacagcactgactagaattctagcccagaggagcatgaagggattgccttctaaggtcttacaaaaaaaattttggatt

SEQ ID NO: 74806 - DNA, 244 bp, Glycine max
  Clone ID: jC-gmfl02220128h03d1
gaatccttggcccatgttaggcaaccatcgatgatttaacacaaaggaccaaattaacttcacagaaaataattcctgatcattacaataactaagggagcattagtcctggaacaaaccgtaccattcccagtccccatcatgagcgaattggaacaacagaggactttatttcttacttttttcatggtgtccgataacaacgttgctatttatgcttttactccacttattatttggaagt

SEQ ID NO: 74807 - DNA, 213 bp, Glycine max
  Clone ID: jC-gmfl02220128h04d1
cttagtaaaattggttgctctctatgatctgagattattacctatttctagccttaaagttgaaagaacattctttgtgggttcatcatataagaaattctacgggtctgaaagaacacatactagctcccaaaataaagggggaacttttttaacaacttcctctaggggaatacctaattgcgtttcagggaagggaacctcgggaaaatt

SEQ ID NO: 74808 - DNA, 274 bp, Glycine max
  Clone ID: jC-gmfl02220128h05d1
gctgaatgaccattttttcatattacaatattacttgattctaacatgtttctcttgggacaggcacccttttttgaacaaaagattcttccaggatgcaaaatacatttttattaagaataccacgagaatgacctcctcatgaggacaagtgaaccgcctttacactgcttttccccggaagctcattacacctaaaatgccctatttaaaaggataaacgaactatttctatatttgacagtaataagcaactgactgacttcacaatgca

SEQ ID NO: 74809 - DNA, 258 bp, Glycine max
  Clone ID: jC-gmfl02220128h08d1
ctgataaagataataaatctaacccataagcatttattcagagtcatatgctcaaaacataaacatttattgaaccatataaccaaactcttaaaaggtttcaaaatcgttctacaagcttttctccacatgttcccagtctgacgcgaagccatcggagtagtaagtaggaggctgaaactcacaggttccgctaggctgagtttcttgattgtcctccgaatccagatgaaactcctttgggattgacttgtccac

SEQ ID NO: 74810 - DNA, 203 bp, Glycine max
  Clone ID: jC-gmfl02220128h10d1
gagggccaatttatatttctccttcattattgctttgttgaatcgatcccaagtcatggcatgacgacctcaagggggctggaaatattgcttccaacagaaaaattacgggcgtaagagtgaaccaaaaacgggctgccttcttttatgaaccttttaacaaaatagttctggtttgaataatttaattaaatggttattta

SEQ ID NO: 74811 - DNA, 572 bp, Glycine max
  unsure (1)..(572): unsure at all n locations
  Clone ID: jC-gmfl02220130a01d1
aaaataaccaaaagggtaaaatggtaattgtgtatatttttctattgaaatttaaaatccggtccgccaaagcaaacatgcaaggcaatgttattttcggggggtggtgtgttctaaaaagtagaaacccgccattactagggcaccatcccccaacaagccaaaggcaacactgctccctactttatccataaaaagtctagagaaaatatgcaatagatcaaacagcaataagcttcccactaatttgtaaaatgctaaatctggtacttgctctgttctatcattattaagatgagggatgcactcctgctttaatctttatcttcgtccatgtcatctgcaacagacctgctcgtttgtgcagttaaatcagagttctttgaactagccatgtcatcatcatgatccgaatcaaaatcttcaccactccatatacgacgttttggccttacatccatgtcctcctcttcctcttctggaacttcgatgaccgatggtgttgnttgaaaaggtgcactgggtgcatggngaaagcctgaaagttgttcccagtatgtattccgaatttt

SEQ ID NO: 74812 - DNA, 297 bp, Glycine max
  Clone ID: jC-gmfl02220130a03d1
aaaaggggagtcgctggcaccgtccattacattagtatgatcgagccacaaacggtcacgccgcaaacttctttgtacatatggcatgaactacatatcatacactacagtgcacgagaggagcccaaaattcatgtgcatacacgagcgacatgttcttataaggggatgataatatggaaccgagtggtgtgtagaatgagaaccagcttgatactataatggaggtgggattggctggctatttgacagtggagatagcattggcctcatggagggggtgtgatcaggctgctg

SEQ ID NO: 74813 - DNA, 415 bp, Glycine max
  Clone ID: jC-gmfl02220130a07d1
gggtaactagaaaacttataaatggggacccaaaaaaaaagaaacccttttacccaaattggtaagggaaaaaaaacccgaactttaacactggggggccctattccaactgggggggccccaacaaattaccctccccccctccaaattaacttttaagaaaaagaaccctttttttatccctttgaagggggctcatggggccctccaaattaaaattcccacgggcccattcccgttcccaaggggcacccatgctttttcacagcctttacgaatcacaacaactttaaaagaacctaagggagggcttttgacaaaaccaatgaataatcggggccccttgctcacccccatgtttggcggggattggaggatttgcaggtcggaccctcttgggccccaaaatgggact

SEQ ID NO: 74814 - DNA, 320 bp, Glycine max
  Clone ID: jC-gmfl02220130a08d1
ggggaagggtgttttccaaagaaaccaaccccaatgaaattaaaaccgcttttccaaatttacaaaggggaaaaaaaccccgaccttaaaggggggggggcctattcctccttgagtggaccaacaatttgcaatcccccactccaaattaccctttaaaaaaaaaaaggcgttgtcaaaccctttggggggggcccaccggggaccacaaaaataaatgtggggtggcacacccccggtaactatgagccccctttctttttcacccgcttttgcctccacacctccctaaaaggaactcaagggacggctcttgaaaa

SEQ ID NO: 74815 - DNA, 413 bp, Glycine max
  Clone ID: jC-gmfl02220130a09d1
ggaaacaaaaggaattgtttttcataaaaagcgggctcctaaaaaaaggggggggttttccccccttttttttatgggtaaaaaaaccccccggacaagaatggctccccccatttaaattcccgatcgtaagttttggcccacaaaccagtttttccactaattaaacaatgggccgtccaaaattttttcggggccccaaaagctttgggggtttgacccccaaggcaaaatttggggctttttttccctaagggtgacccccctgaccaagggctcgttttgtttccgcccaaagcccgaaagaccatttgttccctcctacatccccaacttgccttggggggggccagaccttttattcaaagaacccccccccttctgtaactttcccaaccccaccatggattttt

SEQ ID NO: 74816 - DNA, 381 bp, Glycine max
  Clone ID: jC-gmfl02220130a10d1
gaaacaaaaggaaccgtttttccccataagcgggccactaaaaaaaggggggggctccccccccttttttttatatggaacaaaacaccccgaacaaaaatagcctcccccatttaatttccccataggaagttttggcccacaaaacaggtttccccctaattaaaccatgggggtcccaaaatttttttcgggccccaaaagccttgggggtttgatgaccaaggcaaaatttgcggctttctttccctaagggtggcccccctgaccaagggtttgaatggttgccccccaaaacccgaaagaccctttggtccattccccatacccaaattgcccttgggggggcccatctgtgttttcaaaaaacccccccccctt

SEQ ID NO: 74817 - DNA, 500 bp, Glycine max
  Clone ID: jC-gmfl02220130a11d1
agaagctacatgttcagtcttcatttatgtcaacatagtctgttttcaacatcataaagcttctgtactactggattctactaatgtatgaaattggccactgctttgcttgaggatgacaattcctagaccataacaatgttaggggtggtaaaggacaactggcttttaaataaacctcttgtacatgcacaaacaatattatgttcacaggacacaagtgattgcataaatttaaaaataagactatttatcttcaatgtacctaaacaaaatgattgccatagacgtgatcgatacaaattatgcaatgcacagaaaaatctggtggtggtttgacttctaagaggaaagaacgccatactttgttgtcgggacaacgatacaaggattacattataccttgatacaatgacatattcaatctcggttatatccatcaacttatccacagtaaccttggataacccatcaacaagtagggacctgcttaattcctc

SEQ ID NO: 74818 - DNA, 447 bp, Glycine max
  Clone ID: jC-gmfl02220130b03d1
aaacaaatatacgcataaatgctaaaatccattaacaaaattgtatcgaaaaaatatcataatgtgagcagagaaagaaactaatcagcccataataataatatctctcgaaaccatcatgtaaattatccaaagcggtaaaataaccttacacaaaacgatcgatggttcccccaaattgatattaagaagaacacgaaacgatctgaagaaagacaaaagaaaaagagagaaagagagtcacaaagccttcctccttaatcgagagggacctcaacatcaccatcggtaatctcctgctgcaagtccttgggatcctttccatcaacggggcatacgacggagacgcacgtcccgagaatcttcttaatgctgccgctgaggtccttcgccattgacctcggacttataaccctagcgatctcgatgacgttgtctagcgagatg

SEQ ID NO: 74819 - DNA, 493 bp, Glycine max
  Clone ID: jC-gmfl02220130b04d1
ggaaaaagggaaaaagtaatgcatctataataaattagaaacggcaggtagtatcattgccaaatcaaaattttcgatctcaaaataagttcaaccccgcactacaaactacagtatcttaaagcaaaggtttacatctacttgctgtatagatgaactgcagtgaagatgaagaaacccaccatcattgaaaatgatgctccataatagggataggctgctggtataaatctttcatattcattgtgtctaaagggacgaacaggaatctgctttgataaagataagcttgtatatccaagtttttcgtactcaactttgaattggaaaaccccatagacatctggaaccttaaatgatgtgaaataacggcccttgccatcagttgataaagtcttcaagacataggggctcatcatgtacaaatgcacttgaacatcatcagctacgtaaggttcccatgctgtcccagaccactcataaacttcaacag

SEQ ID NO: 74820 - DNA, 248 bp, Glycine max
  Clone ID: jC-gmfl02220130b06d1
gggcagaaaaaaaggggctctctaaccttcctcttggtaaaaaaaagcacctgcccgaaatttttttttttttccaaaggctctcaaaataccccccccttacacaaatttttaaccctggtctaacaaaggagaaagcttacttacacggatggcgttgggcaaactccccaaattctattcccccccccgggggtgccaattaaataaaagaagctcccttctcacaaagagaggcaaacatgggt

SEQ ID NO: 74821 - DNA, 309 bp, Glycine max
  Clone ID: jC-gmfl02220130b08d1
ggggtgggttttttttcaaaggcacggaaccccaaaatttaaagacggtggctcgtaatttaaacagggggagaaaccgggcccccaaactatgcgggggctaatgtcccttggaggacaaatggatacataacgtccccaagccaagttgcgccttggacaaaaaaagggtttgttcaaaccttttcattgtgccccatccggggggaaaaaaaaaacatgggtcttgtttagcccccggagttgggaacgcccattgtttgtctccttttttggcatgctcggatttcttaccaatgagcaaggggc

SEQ ID NO: 74822 - DNA, 457 bp, Glycine max
  Clone ID: jC-gmfl02220130b10d1
gtgaagaagcgatttctattcaattgaggattccacttggtccacttgaaggaataaagtaataattaataaacgaacttgaactatatgaaaacatgcttacaagattgttagaacttagaactcattatctttcacaactgaggcaccaaatttataaactacttcaaaaaaaaaaaggcttgcaaccctgtatcaccaggtagtaccactttatccatttgagtcacctgcagatctttacaagttacttgatagaactttccaaggtgtcgaggtttctcactttgtatagtcacagttgtgacttgtgcagagaagaggctgaagaacagaacagaacaggctggtcaggggcgatgaccaagagggtgtccaataattcaaaacccatttacaatgccctagagatgtttcaactttggaattgattcaactccttgcatactcaggaatg

SEQ ID NO: 74823 - DNA, 390 bp, Glycine max
  Clone ID: jC-gmfl02220130b11d1
gtcttattaaattttctttttggacagccttcattaatgacaacctagtcgggtttcaacttcataaaacttaggggctactggattctactaatgtatgaaattggccactgctctggttgacgatgacatttcccagaccataacaatgttaggggcggtacaggacaactgtctttaaataaacctgctgtacatgcacacacaatattatgggcacaggacacaagagagtgcattacttctaaaatgaaactatttatctttaatgctccttaacaaaatgattgccatatacgtgatcgatcccaattatgcattgcacagaaaaatatgctggtggtttgacttttatcaggaaagaacgccatacttcgttgcctggacaac

SEQ ID NO: 74824 - DNA, 473 bp, Glycine max
  Clone ID: jC-gmfl02220130c01d1
gggtaaaactgggaaggcattagatgaaactgtcaaacaattacaagctgttcagtttttcatgtttaaagaatacaagatttgatttagatacatatatactatatgagtatcacaaaaatttaaagagacacactctcaagtaccactttatcaattcttaatgctaatcttgagtcgatcattggccccaggcagctatattcagtggccaagctccacttctccaagcttttttttcttcaaaattaccctgatcttcaagttgatacaaaacaacgaaggttaacggtgcactcatatcatctggggtacttgctagaaagaaataaccaatggcacgatgagcttatggtttccatggcgctggaggtggtggcggtgtaggaaacattgggggaacagcagagaaaatggtatttttgtcaatagatgtgcctttgtcgcctgacaatgccactagtgcagcaact

SEQ ID NO: 74825 - DNA, 523 bp, Glycine max
  Clone ID: jC-gmfl02220130c02d1
cagcaaacaacatactattattcactataattaaataagcaatcttgcaaaactttaccacaaattacacctgtacttgtgaacccatgaacatttagcatatatgaatatgtaagagaaagagagaaaacttaagactcttatgccttaaaaggagtagcacattcgaagaacattaaatatggttgtggcagagcttaatagccactacccactagaacatgttgattgttcagagatcatatctgagctaagcgttggatatcaacagggtaagcatctgatgcagattgagcactgtaagctctctgagccacaacaacattgccagcttcagtaggatgaaaagcatcccaaaacaagtactctctcctgttttggcatggtgtttgcattggaagacatgtaatttgaccattgttccttcctaccccacagcacccagcatttgtaacactgaaaccataggctgaagggttgcttataatatatgaaagatgccataagagttaacatagatgac

SEQ ID NO: 74826 - DNA, 549 bp, Glycine max
  Clone ID: jC-gmfl02220130c04d1
cttcaaatatgatccacgtttccttgtcatggaatggtcttttttgttccatctgccacaagtatataatattcttcaccatacaaggttatgatagaatgttccagtcctccagactaattaaacaaatatttatacatcgcctccttgcttctacaaaattctaaaccttaaagaaccatattaaaaactcgattctctattcctcctgatgcggcctacgctctatacatataaatactagtatacattcatatgtattttttagcaaaggttaagagtagtttaaaaatgctttaacctttctgaattcacttggatatatcagcacagaatctaaacagagaccccctttagtatgtgtgcaatcaatttgagtcatagagaatttaacttttgttgatgcattgccatcctcgacaacaaaatcgcctgcgtggtaatagatccatttacctggtccgttcagaaaacactgggatgcaacatactggccatctgaagtccatagctggaaacgtacaggctttttgtcccaaccatgaacat

SEQ ID NO: 74827 - DNA, 485 bp, Glycine max
  Clone ID: jC-gmfl02220130c05d1
caaaacgttaaaaagataaagtgagcaaaaacaactgaacatgcacaaagtgttgttctcaatgctgaacttaagctaaaatagctgagtgaacaaattgaattgggaaaagaacaagttagcataaaccaaagcctggactcattttttattcacaacactatcctaactatcctttttttccattattagacctcaactagaccccctccccaacaacaccaacagaaccaagacacctccagtccctgtcatgctatttttacatggaccccgaagctggtcacttacaaccaaaaacccctcaccaccacaaccatcaaaaagtccacattgttatctttctttcagccacaatattttgtataaagcttcaacaaatgcgtggccagtccttagtttcaacaaatgatgccatgcactgcattgaaactgctgaatgctgctgcatagcttaacctttttttttaatgttatttttagcg

SEQ ID NO: 74828 - DNA, 455 bp, Glycine max
  Clone ID: jC-gmfl02220130c08d1
caaacgtccaaattcactcgggaaaataacatggcattgttgacaaataaacatactaccaacacgagctatataggggcacctaagaaacaggactaacaaacggctaaaagtttaattatttggggccgatgtagaatgccatactcattcaatacccgatgccagagggctggaaagtgaaagtctctaatgacttacaagcatctaaaagtattgactcgggaccacctccaagtttggtcatcattttcgcaattacaggagctacctttggatttgataggcgcttggcaaaatcagcaaggtccttcataacatctggaagagcagccataatctgtggatcaccaaatgacgccatcagttcagggtcactcaagattgtgctaaaatgaatgtttccaggcatgccaccagcccctgggaatcccccaggcatgccaccagcccct

SEQ ID NO: 74829 - DNA, 404 bp, Glycine max
  Clone ID: jC-gmfl02220130c10a1
cctcggggaattccaattccacattttcaagaaataaggaggcaaaaatgttcatatatgaattggaattatttgttttcttattaggcctatcctgaagccaaaggaaatgagatcggaattcctcggggaatcccaattccacattatcaagagttaaggatgcagacacgatcatatatgaaatggaatcattgggagacttatgtaagcctatcccgaagccacacgacatgagatcggaactcctcggggcattccaatttcacgtctctgggacgtacggaggcatacatgctcatgtatgagttgcaactatttgatcaccttattaggcctatcttgaagtcagtggctatgaaagcccaattcatcgctgggaccgagcttgacaaccctatact

SEQ ID NO: 74830 - DNA, 501 bp, Glycine max
  Clone ID: jC-gmfl02220130c11d1
gaagccgagtttattttttaatcataattgcgaaaacaatagtaacaacagtaagatagggagcaagaagaaatgaggcagacgcctggtgcatattgtattacaagcagatatagcaatcaagggtgtagatggagactagatatcacccatccttcttgcacatttgatacaatcatccaatagcatcttggcgtcatatttgtatacaaagcctttgtcacacagctttgttgaggcccacttgatatccttcttcagcccatcttcatattcttgtttcacattgaattctggataatgaagagcgtaatgattagccatctcttctaatgaaatatatgaacttgcacacaagaatcttccactgatcgaggtgctttccatgcagaaaatatgagcttcacagacatcatcaacgtgtacaagaggaattttccccaacaattcctttaggaacttgagtgatatgtacgccctttcattctgcatgatctgagc

SEQ ID NO: 74831 - DNA, 585 bp, Glycine max
  Clone ID: jC-gmfl02220130c12d1
acgggcaggaccaaattacttggcatcactgccttacatatgattacatgtccatattacatatcttacaacataatgttacaatagcaactagaagctacacgtatgtccaatacacccatgaatggtaccttatagggctatgttctacaattgtatattgtttcaagaaacaatcagataaataacagtaagaaaaactaaagtcatcttcaaacacagatctaaaggggtcagaatgagaggagagatgccgagaacttattaatctattccctgctccaggcttttgacctcaccagttcagctcccatgatttccattcacagtcaactctgtttcagccttcttgtttatctcatcaagcttgtgatgttcttcaccaatcacttttgttccttccatttccccaacttcaaattcatgagtacttttgacgtgttcctctttatccactccttccacttcaaccgttttgtctgcagtagtgcatgtttccgatttctctggctccccagatccacgatattcttttgtctcttcctgtggttgctcaatctttacttcatgctttctcagaaaaac

SEQ ID NO: 74832 - DNA, 523 bp, Glycine max; identical to SEQ ID NO: 74825
  Clone ID: jC-gmfl02220130d01d1

SEQ ID NO: 74833 - DNA, 451 bp, Glycine max
  Clone ID: jC-gmfl02220130d03d1
aacaaaaaatttggaacaatattattggataaagtgaaccataaattataaccatttgccaaaaattatgtcctgactgcaggaaacatgtacatctcattacaaaagcaaatactctaaatacttgacgctcatataaatgatttctttcaccccattctttaaaggaatgtcgacacctgctaaaataacaaagtgaatgtcatgctgctcatgctgctttaaagccctctgacaaatgctgataatactgcttttgcctgtctgacacagacggagacactttactcagtgctacctcaaaatggtgcctcttgatggtcctcttgatggtcaatgtatcacaagttgtctcaatagaggtcaatctctcttcaagagcagccattgctgcttcattcatcaatgcagcaagatctgcgccacttaggttttcacacgcttccatttt

SEQ ID NO: 74834 - DNA, 570 bp, Glycine max
  unsure (1)..(570): unsure at all n locations
  Clone ID: jC-gmfl02220130d05d1
agatgcccacattagacatgttgcaaattacaattgagttcgggatgtccttacatttctttgccatgcgtgacatccgttttcaaacagaaaggggaagactggaaaaatattaccttacgaaatattaacaaataaaaataaaaattgggcagttctgcaggaaatgtctttcttgaatatacgggagcccattcaatgactactacatgcagatgcaataaaacagtctcttctaacagtgtactactcaactccgccatgcagaagatacttctgaatcaaaatcttcttcccaccacgtgcttgccttgtagcctcttcgaagaaattctagggaacttccctcttcttcttgaagtcccaagaccctcaacaattcctctttggcctcgccaaggctgaagcggtttgcactttctgctatgcaagcataagaaccatctgcttgtttaagcatcacctgccaaggacctgngtactggcggaatacagctccactgtaattgacaatataaggtgctattgcaactgtctttgaatactctcttgattcgatgtagaacactg

SEQ ID NO: 74835 - DNA, 466 bp, Glycine max
  Clone ID: jC-gmfl02220130d06d1
aaagtatagtcacctgtagtaaatgttatataatcattgattgatacaaagtaccctcctaaatgccggcaagcttaccctattatctttgcatatacatgaactaataacaccatctacctaatatttgctagatagaacagtgagcattttgtgccgaacatctgaagtgaaggtaaaccttccctacatattttgatgacagctactatcacagatgtatatacttagaactaaagactttcaaacccaaaaaacaaaagtgcaggcctactgcaaagaatacctgatatacaacattagattgacccatactccaatgattcccagctgaagggctggaatacataataaactttgggtgagcttttgaagagcaaagctacacagacacacacagctgcaatggccaccattgacagcattgctggcctgaaaaccagtgcccttctcatgccaccataca

SEQ ID NO: 74836 - DNA, 455 bp, Glycine max
  Clone ID: jC-gmfl02220130d07d1
caaacgttcaaattcactcgggaaaataacattgcattgttgacaaataaacatactaccaacacgagctatataggggcacctaagaaacaggactaacaaacggtaaaaagtttaataatttcggtaagattaaaaatgcaataaacattaaatacccgatgccagagggctggaaagttgaagtctcaaataacttacaagcatctaaaagtattcacttgggaccacctccaagtttggtcatcattttcgcaattacaggagctacctttggatttgattggtgcttggcaaaattagcaaggttcttcataacatcttgaagagcagccataatctctggatcaccaaatgacgccatcagttcagggtcactcaagattttgctaaaatcaatgtttccaggcatgccaccagcccctgggaatcccccaggcatgccaccagcccct

SEQ ID NO: 74837 - DNA, 185 bp, Glycine max
  Clone ID: jC-gmfl02220130d09a1
gatactttggctgaagcgcagttccacattgccatgaaataatgaggctactctgttcatatgtgaattggaattgtctgatttcttctttggcctgtcctgaatccaaaggaaatgagatcgggatatctccggggcgccgagctgcgattcgatatagtgaggtcgttcaaggacggaagagt

SEQ ID NO: 74838 - DNA, 368 bp, Glycine max
  Clone ID: jC-gmfl02220130d10d1
ggaacaagggcgcattttttattaaagccacgaaagagaaaacaacatagggaaggctcttacatgacttgttgacacacagctgaaacaacataaagtgaagcttgtgcccctatttgaacgcgtggtattacatttagatagataggagcaagctagattgttgagaggagaaggaactactgactgtagtccaggggattaggaagctcaaagggcctgctttggcctctgtggcctccgaagagatcgctccattggtctccaatgatcccaacaatgttgtatccctgccttatcaatttatctgtcgctgctgttaagcatgaaactgcattgggagagaaaggatcttgtggatccttgag

SEQ ID NO: 74839 - DNA, 409 bp, Glycine max
  Clone ID: jC-gmfl02220130d11d1
gaagcctagtttatatgctaatcataattgcgaaaacgagggcgacggcagaaagatggggagcaagaagaaatgaggcggacgcctggcgcatattgtgttacaagcagatgtagcataaaggtgtgatggagactgatatgacccatccttctagacatttgatacaatcatccaatagcatctgggggtgatatttggttacaaagcccttgtcacacatctttgttgaggcccactagatatgcttgttcagcccatcttcatatttttgtttcacatcgaattttggacaatgaagatcgtaatgatcaccccatcctcttctaatgaattatatgaacttgcacactagatatttccactgatcgaggtgctttccatgcataaaatatgagctccacagaca

SEQ ID NO: 74840 - DNA, 553 bp, Glycine max
  unsure (1)..(553): unsure at all n locations
  Clone ID: jC-gmfl02220130d12d1
gggtaaaatgaatgctatgaatcgttttattcctatatatcataaatacgaaagtaaagttgggatgaaaacaacttccaaaaataccgggtagatttgaactctatattgcctctagtcgtcagttttgtactgtttcccccactatacatttggaaaggttaggaactagagttgtttgttatttctgcacagccaactgttagccacccttgcttggattaaagactgatggactatttaccaggtcataggaaaactctatccaaaaattaccagctgaatagctggcttctgtacaaggaaaaaaaaaaactggcaccaaccatacgaatatcaacagattgttcgttcaaggaaatgacaattgcaattctgccatgttaagtcacagaatcctcggtggtctcaacacaatcagttgcagggccagtaagagaatccctggcagtctcaacacaatcagttgcagggccagcagatgatgaaggagaagattccaattacaattatccgngactgaattcttgtatttttctacaagcaacttacg

SEQ ID NO: 74841 - DNA, 445 bp, Glycine max
  Clone ID: jC-gmfl02220130e01d1
gctggaacaatgagaccatttatcctttagaaccagcaggcgcaccggggagaaaacgcaactggaccagttggactaaaaactcactattgattcaagacacccttttttgtttgggccgattaactgtgtttagccacccccttgaactccggacatgacatgcaagctcacaatgttttctatgaacgccattcctagtaagattcacaattttacactaccttcctcaatggtgtacttcagactccagttgtccacaacgggggaatactaaacacgcttgtagttatacaactgtgcaatttccagtatacgcagttcatttgtgcatgcgttctctgggcaatgctccagctgaacaatgactcttaatgatatcgtgtacaagggaggactgataatcaacgctactacatatccagcggtcggagatgaagataca

SEQ ID NO: 74842 - DNA, 523 bp, Glycine max
  Clone ID: jC-gmfl02220130e02d1
aaaaacaaaaaggttcataaggatttaaaacagcatgtcatcacaattggtgatgcttcactatagaccacattatcatacctactagaacactacttcattgcaaatgcaatggtaacaacactcaataaatctcaaaggaacactacaatgcatcctaaaaccttgatcatctttcgttcagggttaatcttgggatgttattttgccattttttttctcagttcagcaacaacttcaaaatttgtctgagtttgatgttcttctatagccaacatcttcttcaactccatgatttgttcctcataccaacaaattcttcatttgttgtaaccttcagctttagcttcttcatttgggtgacaacaaatgattcaaatccacattacttctacaacccacattacttcccacgccaccattattttcagagtcttggttcaatcatttcttcaaatcatcatcccaaacccaaaatctacagttcttaacttcattccactcagcacatcaccaaaataac

SEQ ID NO: 74843 - DNA, 366 bp, Glycine max
  Clone ID: jC-gmfl02220130e03d1
gggcaaattaagtaggttccattaaatagccaaaagcaaaattcccattgcttctcccatcatcagtctatgttatatgcatactgaaaacagagatgaagtggttgatacaaaaaggcataaatcataaatatgaaaagcttattgaatgattacaaatcagctcctcaaacaatggagtggctatgtgtgactgcattgaaattagggaatcgatttcctgtttataggtttattaatttagggaggctaaaaaagagattataacactcaagatgctgggttgtctcggatccttaagctttggtgaagctagcatcgaaaggaacgccagcagcaggcaaccaagtgctagcttggagccaa

SEQ ID NO: 74844 - DNA, 526 bp, Glycine max
  unsure (1)..(526): unsure at all n locations
  Clone ID: jC-gmfl02220130e05d1
aactaaattatctttcatcgtaatctcaaatttcattcatgatgattaatgtacagagtacagaaacgcatagataacgctggtaagtaataaacaagccaagaaatttatggatggcgtttatggaacaaatttttgaaacggaagccatccaggatgattcatacaaaaattggttgagcatctaacagtctgacaatgtttcaattaaggcaagctccaagacatgcaagcctcacattattgaaggcaaaaagtatacaacacttcagcaggaatccaggtcacggcagggaggaggcttgggctcacttaacaaagtagtgttccctccttcaggtccactcttaattcggcggngattttgggtgccgtgcggtggcttctcaccctttctcagcttttctactatctcaactactttctcttggggttatatcttcaaagtaantataagtatatccttccgatccatttgaaatatcggccactgtaatcataggagcattcacacagcatcccatgc

SEQ ID NO: 74845 - DNA, 405 bp, Glycine max
  Clone ID: jC-gmfl02220130e07d1
caaaaaagaattcattgaagaaaaaaaatcactcaatcataacagatgcaggctttgttttgtactgcccaagaaaaggtgaaccaaaacggggcttatcatcattcatcctccccaacattttaatataccatccactgacccatcggcgatgagtaatcactatatgtggcacctaattcgaacacatttttgaccaaataacaggcgttgggagacttttgcaagacacagaagatgtgcggtaataaacagatggacacagaccctggatttatctagatcttaggccaatgcaaagccatcatggtgctgagattcattgggtacatatgctctgaggcgcctgtcagaatctgttgaacgattgtcctattatccctttctgctggatggagaggatcc

SEQ ID NO: 74846 - DNA, 480 bp, Glycine max
  Clone ID: jC-gmfl02220130e08d1
cagcacaaccaaacaaacactgattcaaaaaaatctctgtaactgaaccggaacaagcaatgtaatgaactgttaaaaaaagatttcaactcaataaggattatatgcactctaacttagaaagcgcttaatacaacatcttataacctaacaacatcctggaggcaatcatagaagtgagcgatactaatcttctctttgccagaaaagatggcttctgcagatccaccatgctccccttgcgctgccatctcgatcaacatgtatagtttcctgataggcatatcattcaacgcctctgcagcagaatcaatatcttcatcagtaaacacattcaactgttctaggaccttctttgcatccgttgtgttcaaggtaggaatatggtaagtaacaaaagaggtttcacaaaatccaattgattccaagatatctagttcacttgttgtgccaataaccatgagttttttccctttggag

SEQ ID NO: 74847 - DNA, 515 bp, Glycine max
  unsure (1)..(515): unsure at all n locations
  Clone ID: jC-gmfl02220130e10d1
gaagaaaaacagatagataccacattacatttcacaaggaaaggaactggtgtgcgttgtgcaccattgcaaatgaggctcatattaacaagaggaaacaaatgccaacctacaaaccccaccatctaaaaaactcttatggaccctccgctacttccagccaaggctctagttttccccaaacagaagcattctgaggggagacctgcgtgaccatacatggtcaaataatactatgtcgttggagacgtgtacgatcaacaaggctatatatgcgtggcgaagtaaagatccaccagatggcacatgggaatcaaaaggcacatatactgacggatcatctgcagccatccggcatcgcgaatctcagtctcggctgagctagaaactacattcgccatgtcacagaacatgggattaagacaaagaataatggtgccactttttcttaacttatcagctagtatacactatgtcccctaagctatatagtcacgatcctnccagatgcataa

SEQ ID NO: 74848 - DNA, 231 bp, Glycine max
  Clone ID: jC-gmfl02220130e11d1
aagtaaaagcatggttttatatatatttttttccacgttgagtacaagagattaaattacctaaaagaaaatatcacacactgaaagaaaggaaagtgcttgaaaatactaaagggtatttaccaatggctcttgtctttgaaagaaccttcaatctacataataggatcaaagaaaaggttgcaataaaagcacaagcaattgccattattgacaatatttatattattc

SEQ ID NO: 74849 - DNA, 389 bp, Glycine max
  Clone ID: jC-gmfl02220130f02d1
ggcaggaacattgagtccatttattcgttagaaccggcaggttctccggagggacgaggcaagggtaccatttgggctgcaaactcactgttgattcaagtagctcttttcggtccgggaggataaacggtgtatagcaacagacatgatctactaacatctcatgcaggcgaaaaatgtgctctttgagctccaagccacctaagattaacatgtttacactacctgtttcacttctggccttcaaactcgagacttccatcacggtggatttctaccacatccttgaacctatacaactggtgcaatttgcattataccactttatatgtgcatgctttctctgggctatagctgcatctgtacaatgactagagatgatatctgta

SEQ ID NO: 74850 - DNA, 453 bp, Glycine max
  Clone ID: jC-gmfl02220130f03d1
aagtacatatgatttaagcttcactataaacaaagatacacactatggaattgcttgagataataaaaaatgcagttaacactagagttaattaatgaaatgaaaataattaaagaataaagaagcacaatcattactttttaattaatttatattgcttgattttgaaactcattacttttattgccaattaagtattgcctttttgtgcctatggtgtttcggcacgccaggaaagcaaggaattccggtaacctcaatccaatcagttccatgaaaaaacttagatggtgagaaccaacgtgctgcttttgaattgaggttccaaatcccagcccatttcacacgcttggatttgtctgaaccggggccaatgttgtggtactcggcatagaagcaagtgtccataccagaaggaccctctagtccttgccatggcaaatacccatcagc

SEQ ID NO: 74851 - DNA, 375 bp, Glycine max
  Clone ID: jC-gmfl02220130f04d1
gatgttacttgaagttggttgatgcctttcgattctgctcataaaccatcacattaacaaccaaccaacaattcgcaacacagcattaacaaactgttctacacatgtatcttcaaaatcattgtataaaattcagaccctttacttatttataaacataagcctgatattgaccaccaaagtaaactagtttgttttgtttatcttggcaaaagagagcttccttctttgataagaacaaacacactgccaccatcgccccttgagatacgcaattcttcgtcgaggtatgtggtgagtaaccaggactgagcattgctgttggaaattgggatcttcaagggaggcctacttgaaattgttttcactaccgat

SEQ ID NO: 74852 - DNA, 509 bp, Glycine max
  unsure (1)..(509): unsure at all n locations
  Clone ID: jC-gmfl02220130f05d1
atcaatgcaggcaatgaaaatctcatcatatcgtaccgaaaaaaaccttcccacatttgactcctcctttataacaaagtcataggacagcatagaaaaccagaaaaaatgtgatatagtttctgtgaccacatccataaacaccattgttaagactagtctgactagaatctataagccataagccaggtcttgaacaaaccaatataaaggcttacaaaaggatctttgcttaaatagaaacaacaggctgccagcaccaaaagctagttctttggcccaatatccttcagggcgcaaatctgttcctcacccatagcagacatgacagacacaacaagatccttgccctcagcaaatccatcctttatctgagtgagcagactctcatcagtgggaagcttgaggtcatccttggtgttcccattttcagtaagcagactcaaaatccatcctcagcaatatcaatgagctggtnatcagtacgattcacatgaggaacatcacag

SEQ ID NO: 74853 - DNA, 409 bp, Glycine max
  Clone ID: jC-gmfl02220130f06d1
cagcaaagcaccaaataatatatggctaagcgtgagaggaaacccgaaatcccatagttttccagattcacgaatcagttcaagagtacaaaatgaatatcagcaactacgatagacaggtgcacctgtgacaaacacaagtagcaggccaactataccccccacaaaattgagaagattacaatgccacaggtatcatcaacttgacaagcaataacacaagtgcattcgtcaaagtgggcaatggtttcaccaaggagcatgcaacagaagccccggaagaaatgccgctaatagggccatttgcaggagagaatcctcctggaagccccgctgaaggcaccagcgaggatttgggtgatgctggaccagctccatcgaacagtggtgctggggcttgtgcaaacac

SEQ ID NO: 74854 - DNA, 374 bp, Glycine max
  Clone ID: jC-gmfl02220130f07d1
catcacaacccaacttactctgtttcaaaaaaaattttgtaactgaaccggagcaggcaatgtaatggactgttaataaaagattgcaactcaatacggattttatgcactctaacttagatagcgcttattacatgatcttatcgccgaacatcgtcctggaggcaagcttagttgtgagcgatacttatcttctctttgacataaaagatgggttttggatagccaccatgctcgccttgcgctgacatctggagcaacatgtctagtgccctgataggcatatcagtgatcggccactgtagccggatcaatatcttcatgaggtgacacattccactgtgctcggaccttctttgcatacggtgtgttca

SEQ ID NO: 74855 - DNA, 434 bp, Glycine max
  Clone ID: jC-gmfl02220130f08d1
atcacaaccaaacttactctgtttcaaaaaaatctttgtaactgaaccggagcaggcaatgtaatgaactgttaataaaagattgcaactcaataaggattatatgcactctaacttagatagcgcttattacatgatcttatagcctaacaacgtcctggaggcattcatagaagtgagcgatactaatcttctctttgccagaaaagatggcttttgcagatccaccatgctcgccttgcgctgacatctggatcaacatgtatagcttcctgataggcatatcagtgaacgcctctgtagcagaatcaatattttcataaggtaacacattcaactgtgctaggaccttctttgcatacggtgtgttcaaggtgggtatatggtaagtcacagagaatgtatcacagagtccaattgactccaagaaatct

SEQ ID NO: 74856 - DNA, 338 bp, Glycine max
  Clone ID: jC-gmfl02220130f09d1
gtggcccataattcccctgctttataaccatcccccccgggaaaactgaacaaaagtggttcccttaaaaacccccccgggaaataaaaattggggccccttaaaaaaagaataaactttcacaaggggacacgggggggatttccctccacaaataccatgaagcttctttttcttacaagtttaacacctcgatggagggtttatatggatttatgtcccctcaagaaatttaaaaccggggggggaaaaaaagtatgcaccatgaattccttgaaaaaacccgcattttttggcccagacaaaaaatgtccttaaagccccattgggggatactt

SEQ ID NO: 74857 - DNA, 474 bp, Glycine max
  Clone ID: jC-gmfl02220130f11d1
ataaaaatccattttttgtatttgttacaaatataccagaaattgcatcatcctctgaaacattacaactaccaaaagaaaagtatcttttgccaaccaacaccagcatcctagaacaaccgaaaacattatttaaaatttgcatccctgattctttagttgagtcatcaacaactaaaaatgaaagtcttaccatttctcctttgcttgtagcttgcataatttctgatgatatatttgcagcaacttgattgagttttccagggagggtttggcagcatcttttcttccttctgctgagattcttcctttgcttctttttccttgattttttccttcattttgttcaattgccaaaaacttgtgcttctaagctgacaaatttccgctatgcatcatagctaagtttgatagttcaagatcctgtttatatacccaatgatacccgtatttcttcacctcaacatgaaaacc

SEQ ID NO: 74858 - DNA, 359 bp, Glycine max
  Clone ID: jC-gmfl02220130f12d1
ctacaaatattgatattgatttctttcttgatttcaataaaagacaaaggtatgctgatcatttttggtcgtaacattcagatattttacacttaataaagcaaatagcctgctttaatacttcggaatggtgatgagaatgataataatttacatgtcgcagaagtgatgcagcagttcaatttcaaataacacatccttcatcttgtccaagcagagagagagaaaacggggcaatggccacattgaatgatcgtgagcctactctttcaaaatggatcatctgataatcaccttccattctaccatttggtgtgttcagtgggcatgctgaagagtattcaaaactatttccagga

SEQ ID NO: 74859 - DNA, 525 bp, Glycine max
  Clone ID: jC-gmfl02220130g02d1
accaaatatttgactgatcaagatattaaaaaatttcaaaggattcaacagacagcatcattcaaaaaggaaaggaaccttccaaaatattcttatcctcttctaaaaacaacattttctacaaacattcttaattatacaacatgaaagatatacttccaccatacctttgtctttgatgataactttccccccttttgacagcaccaccatcacgctctctctaacaaaccatccttcctccagttcttacaaatggaacaccttcacaaacacattctctattaagcacatagagcttttttttatttttaaaatacgatattatccaagatggataaatacccaaaatttctacacccaaaacctcaatccactaatccagaggctgctgcatcgtcacaacaaggggacttgtgacagtatgcttcccatcagaccaaactatgaagccactcttcacactagaaccacccggagaaagcttaacagccctaatttgaaccctgacaagaaagttgagct

SEQ ID NO: 74860 - DNA, 468 bp, Glycine max
  Clone ID: jC-gmfl02220130g03d1
ctgtaaaggccttatggcaaaattttctacaaagattgacatagaatattttttacaatgctaaatttgacatctatatagaatctaatagtacttgtaggaattcattctaagctatgcctcaagaactgtaatcatggatttatcacaggaaacctacacgactaatgtacaaagtaatgtgagctgaacattgcattccatgattgttttcacttacctaccatgttgatgcttgccctatatatctatcattccaccaaggccaagtcactagcagtctaacagtaaaacatgaccctcttcacattttctttcaagtctggcaatggcttgacactataatcaccagctgctcgtattgctttggcaccataaccattgccatcacctgcagagccaatggcttgcatatctggctccatatagaaacgtgctcgaaacgctgctaaatgtgcataatatgct

SEQ ID NO: 74861 - DNA, 327 bp, Glycine max
  Clone ID: jC-gmfl02220130g04d1
ctggaaaggccttattgcaaaatttgatacaacgattgacatagagtaggggttacattgctaaatttgacatctatatagaatctaattgttctcgtcggaatccattctgagctatgcctcaagagctgtagtcatggattgatcacaggagacccacacgactcatgtacagagtcatgcgagccgaacattgctttccatgactgcactcacttacctaccatgttgacgctgggcctatatatctattattccaccaaggacgggtccctggccctctaacatggaagcatgaccctctttacattttttttcaagtcaggc

SEQ ID NO: 74862 - DNA, 258 bp, Glycine max
  Clone ID: jC-gmfl02220130g06d1
aggacaaatttacattatttcaacaagaaccataccatggtgggttttatcatacatggcaactttcattaaaaaatacgaacaatgcactgagatgactaagatacccaaaccactgcacctcaataaaatgtctaaagcaaagaccaggacactgcgctggaatgcctagatcacgaatcccgaagaaatctatatagagaaaaaccccacatcccacgcatctcagacctcacacttactacttgtatacatgca

SEQ ID NO: 74863 - DNA, 495 bp, Glycine max
  Clone ID: jC-gmfl02220130g09d1
atcaaataatcaattagttctccatttaaaggatatgcgggctaatcttaatgcatttctatccgtatatttcttttctagcttaacgaaactacaatgaacttcttagaaatgaggcctaatgaaaccaagagcaaccaattcatactgtatgggaacgatgcaaaggctgcatttacattctgcttaagtatatcacaaaaaatagggagagaacttcgtgatattcattcattgcttctggttattccttacagggaacctctaacatttcctgccattggtctacatacgctcatcatattggtgcgaactatggatacatcaagtctataactctaaaccccttcatcttgagacaaagactctgattcaaaaatcaatagaaatgctccattggtataactctttctcaggtactctcaaatcaatagtcaccaatccagattcttcctcatacttgaattctacctcttctgagtcaactgttatcaa

SEQ ID NO: 74864 - DNA, 439 bp, Glycine max
  Clone ID: jC-gmfl02220130g10d1
atcaaataaccaattagttccccatttaaaggatatgcgggctaatcttaatgcatttctatccgcatatttcttttctagcttaacgaaactacaatgaacttcttagaaatgaggcatattgaaaccaagagcaaccaattcatactgtatgggaacgatgcaaaggctgcatttacattctggttaagtatatcacaaaaaataggtcgagaacttcgtgatattcattcattgcttctggatattccttacagggaacctgtaacatttcctgccattggtctacatacgctcatcatattgttgcgaactatggatacatcaagtctattactgtaaaccccttgatcttgagacaaagtctctgattcaaaaatcaatagaaatgctccattggtataactctttctgaggttctctcaaatcaagaggcacc

SEQ ID NO: 74865 - DNA, 362 bp, Glycine max
  Clone ID: jC-gmfl02220130g11d1
cgggcaaatccaaataatgctgggttggcacatagtctacataacctgggaaactaacagcaatcaaatatgttcgccatttggaattggaatttgaatacaaataccgtgcatcaataatttaaccctatgtacacagccaatatctgactgaaatttgatacagaatagtttcaatttgtatcataataaaagggcacagagaaatttatgtgaaggtaaaggggaagtgtatcagctggggtttaaattcttcgtctttcatttacttcataatgggctccttcctgcacgttcacatttcctttatctgcttaagcactgctgaccttgttcttacgcccaaagggccaatggggttt

SEQ ID NO: 74866 - DNA, 396 bp, Glycine max
  Clone ID: jC-gmfl02220130g12d1
gggtgtggtttttcttttttatcttttttttttttctttttttttttgtggaaaaaacggggaaaagtggtaaaaaacccccccccccaaaaaaaaataaaactttaaggggcccggggagaaagataaaaacccggagttttaaacccccggggggcccccccccccccttgataaggaccaactacttgttcggccctttttacccccaccaccgggggttccttttaattggatccccccttgggggggaaaaaaaagttttttaaaacccccttttggggtgtccccccctgggagtgaagaaaagaccccaccagggtttgaaaaaaggggcccccccccaaattcgcgtgcgcacccatactaggtttgtgggggcccccccctttattt

SEQ ID NO: 74867 - DNA, 498 bp, Glycine max
  Clone ID: jC-gmfl02220130h01d1
ggacgtaaatatcatttattaaaataagaaatctagtcaatggcatcggggtcattcacaacatgattttagatcacagtagcacgaagatactagattgatacatttcacagattagtaatgagatttttcaataactcaagtatgaatttttagtaaagagcattttccctcaatctactcataactatggtacaaccaaaagccgccatgccaacattgccttgctccaattatatcacatgtcacgtaagcatcgtgtcaacattgtcattttcaacagaattcacaacgcagcaggtcttgggaagagaaaggaaggaggctttacttgggttgaagttgaagtgcttcaccacacgctaggccccaaatcccaggaaactagcttcatcttgttatcactgctcaacagatttatgaaacttttactttgtccttcgatgccaagtacttctttttttcttgcttgtaccttttccattctccgtaagcagc

SEQ ID NO: 74868 - DNA, 569 bp, Glycine max
  unsure (1)..(569): unsure at all n locations
  Clone ID: jC-gmfl02220130h02d1
ctaccgaattgcaattgtatatttattatgcttttatcaattcttacatatgtacatatctatcatatttttagaataatcataccactattaatttatagtacaggggataagagataagctgaaatcatccaatcttctgaagttcacttgtacaccttttcatccttcacattgtacccaacgaaaaacctcacaaataaaaatttagctattgagaaagtgtcaatttcacgtcaattaaatcaaaagttacattcagcactagttcaaatttgaacttagattcatgggtaggtacagttgctccgggccaatcaaccatatctgtatcgttacttcttcgaaacatatatacaaggtcaatttccacgttgcctttgataatttgttgattctctgttgatcatccttggtggctaaatccatctatcgtcaaccttaatgccagggatgtggcaaattttaggccaaatntgatggtgcttcatgcggcatagtttttccagcaaaggacaattctttatggttaattttattagagagtcaagaagcctttctccaccata

SEQ ID NO: 74869 - DNA, 339 bp, Glycine max
  Clone ID: jC-gmfl02220130h03d1
gaaagggctttatggtaaaaactgctacaaagattgacacagaatgtgttttacaatgcttattttgccatctatatagaatctaatggtgcttgaaggaattcatcctaagctatgctctaagacctgtattcatggattcatcacaggaaacctcctcgactaatgtacatagtgatgtgagctgaacattgcatgccatgaatgtttgcactgacctaccatgtcgaagcactgccctatatatctattatttcaccaaggccaagtcactaaccgtctcacgagcaaacatgaccctattcacattttatttgaagaatggctgtggcttgacac

SEQ ID NO: 74870 - DNA, 361 bp, Glycine max
  Clone ID: jC-gmfl02220130h04d1
cattgacatttaaaattcaaactgcattagacttttaaacaggagggtcattcacaactctatataacaatgattacagatacgtttgaagtttcaaaaccaaacacaggaacaatactattaagctgttatatgtactaactagattgatcaccacctaataaacgaaaactaaagagtggtgtcgatgcaaaatggccaaatcagattgggttgttgtactcaaccttaacactgaacacgtatgtcctctgttcctacttcattattggcacaacgaccttgagcacaccgtgcttcatctcagctatgatcagggcaattttgtagagcttggccggcaagtcaattctggtagtgt

SEQ ID NO: 74871 - DNA, 507 bp, Glycine max
  Clone ID: jC-gmfl02220130h06d1
caaagaatacagaaatatgatatttaatttctagttctgtccgagtatcaaatcagagtattgtacaatgaggaggttttatggtactaaacaaggtacactacttttgtaccttgtctaaaatgggtgactggggtagtgaacaaattaaatgaattgaaagcaagaatcgaggtgggaaagagatgatgttgggggacaaatatagatcatcattctagcaaagacgctgtagttgaaatagccaagccagaaaggtgatagaaaatatcagagaattcttctctgtactttggaccaaattatcagtactattcatttagcttacagtttcaaagatagggatgattgtacttgacatacttggcccagtaagaccgatattttgtcatggcaatttctaaccatggtttcatattaccattgtagtgtacaactgctgcattctcaatctctgatcgatccaaacttggattataacccaaaccaagtacatgccatgattta

SEQ ID NO: 74872 - DNA, 457 bp, Glycine max
  Clone ID: jC-gmfl02220130h07d1
caaaaattaaagctataattaccacaaaaatccaatacattgtttgcctacatcaactaacataatactttatggggcgagcagtaaaatcgaataaactcgcaaaattgacagtgctcaagaccctcaagttgtctatagcaagtgggtaaaactctgcgctttccaagatcttggccatgaccctttgcttggccatatcttcgaaggagtcgaaatcaaaacggaaaaggaaacacattggcaagactcggttttaatctggcattagatcttcccggctccagccatctccaaggatgtgaaccccaatgtagggatatttctcatatccgccgatacacaccaaaatgggatccgcaagggcttattcgcatgggtggaagaaaaaaattccacacattgtacaattgctgaagctgtataaatgcagagtgaaagccaagcagccacactc

SEQ ID NO: 74873 - DNA, 497 bp, Glycine max
  Clone ID: jC-gmfl02220130h08d1
aagactgtaaaataagactttcgttggtacttaaatctataatgggatttccaaccatgaagtggatcaagagcctccaaatcaatcgtcaaagtagaaaggtagcacattcaaccctggtcaatgggtattgaaacactggagaaacaaacttgtacaaaagcatacaattgctaaccaaccaaacgaccactttacaatgtatagtttgttcaacgaagatacttctcaattctaacacattcttcttgatttgacacatgccttgctgctgtgagcagtttctgaagtttgtagggaaatagacattgctctatactttcattaagcatctgtgtgctcatcggaagcatcatgatacacctcatgctcctcctccggcacaggcggaagctccaccggttccccaacctgcacaacaagaccaccagcaccggtaccgttaccgttaccgttatcgttctcctcggtgttgcgcacaaccacaacgggacaca

SEQ ID NO: 74874 - DNA, 497 bp, Glycine max
  Clone ID: jC-gmfl02220130h09d1
aaaaggattgattatgtacactcatcttccatttcctatataataatatacatctcaatttgatacaaaatgtattgagtgcttgtcatctcttcccccatttgggagaaatggaataaatatattctagcacaaaattttcttgctttcagcatttcatcatgtatactatataattactgccctatatatacatagaaataagctaattaagatcaaagttgaaaaaaatggatttgtacccaaagtcacatggacctcaattgtggttccaatagttgaaaaatttcaaggctaccgaggttgagagtagcgagggtatgaatggaatgtaacagccacataattgtgtttggctttcaagagtcttcagaaaatattttaaatatgaagtcacgaaaacgccttgaatattgtctgggatcaacggcagatattgacgttgggtcatattgaatggacttataggcatgctcaagcttcttgctgatgtcata

SEQ ID NO: 74875 - DNA, 476 bp, Glycine max
  Clone ID: jC-gmfl02220130h10d1
cggaggaagcaactttcaactgtttaaagaatcgatgaaaaaaaatgaagtctcactgttacctggggtttggtgtttgtacatattcttaacttaatcgtgcatcatgaatatgaggctagcatactaacactgattcttttttcacacccatttatctgaaccttatacattttcacctctgtgaatccgttcacacaattgcctcccttcacatccttccagaacaacaacatggtagatttccagagctacttttataacgagtagcattgactgggcttccatcagacgtgctaagtaacaaatgtgatgctggcactgttgacacagccttaacgcatgatgacactttcacatgcgcaaaacattaaagtgaatggaaggcttgctactactaaaattaatattcacatacaggggaaattctacccatgtgatggaacttgtctataagaaacggctaccctttgaac

SEQ ID NO: 74876 - DNA, 461 bp, Glycine max
  Clone ID: jC-gmfl02220130h12d1
agttaccgtgcgccggggtgtcagtactccgtttcaaaaacgctccgtattgtgcacccccacaaaggacaatctcagctttagaatagtctccttctaaagctaacatcgctgatgaccctgcggaagggtagtttctcgggccaccttgtaatttagggtattccttaacgatgacgtggcggttgaaatcgtacatgaccgatcttgtgttagcgaaaacaaaaaggtgaccgtttgggagaaggtggacgtaggggtaaaggttatccatttgcgtgtcttccgtttcggataagaaagggaacgaatcggcgacgttttgtttgggtgggaagaattcgacagtgttggagccgcgtccgccgattatgatgacagaaccgtcagggaggatctggttggtggcgtaccatcagccctcggccaatacgacgtcgttgagctcttaccaatcacac

SEQ ID NO: 74877 - DNA, 457 bp, Glycine max
  Clone ID: jC-gmfl02220131a01d1
gataaattggcatattaatttttatataaaaaagaatggtgctgcttactcaatggctaacactttgaggtccacttgctagagaaaatacatccattcacccgtagcgaaaacgggggaataaattacactattatacactaaaataaaataaagttcagcatccttcttcgttcaacgttcctccaagtcttccctgacctagaagtcggaactcttcgttcaaatctctggattaacctgaactttggtctctgccatatcatatctaatcctatccctaactataatattgtgtaacggtgcggatagtacaagcagcctcacccatgaataaataagttcattaatcaataaacaaactatgtcggaataaccaagaagcattgtcatggcagcagaccttgctgctcatgctaccattcgcttctgctctatatacagctgctccacccat

SEQ ID NO: 74878 - DNA, 295 bp, Glycine max
  Clone ID: jC-gmfl02220131a02d1
gggcaattacaagccggaaccccctaaaattcccctggaaaaaaaaggggcccattactaggctggaaaccaaagattttctaaacccaaaggaagggccctgccggaacccttggggccaaaaccctaattggcccacgttgggggaacccaagttcccatattttgggttcccccgcctaaaagggacccaaaaacccggggtttcccaaatgcctaatttaacccaaagggcccccctaagggaagggcccacccctttaaaaaaaaaaggggccctttaaccaccgttttt

SEQ ID NO: 74879 - DNA, 390 bp, Glycine max
  Clone ID: jC-gmfl02220131a03d1
agggggcctgaaaataaatcttttaaaaaacccctataaaaggagggggcccccccaaaaccccgacccgggaaaaccccaagaaagaatcctttgaatcgggcccaaacttgggaaacttaagccaaaagaaaccccatgcccctggaaatggaaaaacccccaagggggggccgccgcccattttcgcgggaaaataatgggccccccaaacctgaaaaaaaaaacccttccacaactttcccaaagacctggttttttcaggcccctttttcaacaccctggccccagccctttgaaaaaccccccgggtcacggggaccctccggtccctcaagggaaacattccacctttggggcaaacagcccttagttcaacccccgaggccc

SEQ ID NO: 74880 - DNA, 285 bp, Glycine max
  Clone ID: jC-gmfl02220131a07d1
aaaacatatgactatttctacattacttcatagagtaacaccacagccatgacacaaataacatcttgttcatgcgttcgcatcatgataaaaacatcacagtggctgttgaacatagctatttttatcaaattaagacaccgcccttccctatcccctcataacaaacataatcttaccccagaaaaacaggaagagaaaagctaacccaccaaagttttcatagatgccatccatttcaatatacattatctaaacacatatcagcccatggcatacttgtgg

SEQ ID NO: 74881 - DNA, 559 bp, Glycine max
  Clone ID: jC-gmfl02220131a08d1
atatgactctggtgttatttttgattttgcaaattaaattacacaatcacagccgtacatcacacatgagttgggcctcttccaacttaaaagcagaggataacattggcccatgacgcgacacatgcaccacctaataatcataattttacatctttacatacaaaatacaaagactttaaattttaaaaagaagaaaagagataaacagatcatcttaatgaaatgaaaccaaaacccacaaacattggcttgatttttgttgttgttgttgttcccaacttgattaagcatgaaccgtttgattgaatcacttggacttgaagggaatggccctgattacgacctggtggtagagtgctgcaagagctgcaccgatgaatggtcccacccagaagatccagtgttcatcccaaccaaggtccttgttgaagatgatagcagcaccaagactacgagcagggttgataccagttccggtgatggggatggttgccaagtgaaccaagaacacagcgaacccaattggcaagggtgccaaaatggggacgtgggagtc

SEQ ID NO: 74882 - DNA, 502 bp, Glycine max
  Clone ID: jC-gmfl02220131a10d1
ataacaagctagttcgttcgttctcataaatcatgccccaaagggttttctatgaatcatatcatatatcaatacaactgccgtaaaacctaaagcaagatgcggatacatgtgaaaacacttaataaaatgcgatcaatttgcacgagccaaaattttggaacgacagattgattcggaaaaactaaaaccttttattgggaccaaataactctaaacataacagctactactagagccataatcgtcaagaggctgatagatattccacccaaaagaaccttatgaacgaaggcccacttcctcatgattccttcttgctttttaacagatcccgaggcgagctcactctcatccgttttgtgcaaatgctcccgcttcctcagcatacatgcaatgaaatttcttttgctttggatgtgtggcactgcactgcctcctgaattatcattattttcgagagtaccctgaccacaacagatgtcatttccacaggcacaat

SEQ ID NO: 74883 - DNA, 401 bp, Glycine max
  Clone ID: jC-gmfl02220131a11d1
gagcattcagagactattattcttcaccttggtgtacctacctgatttcatgagttagaagcaaagaaatgcacaaaaagaaaaacagttttcatttgaacatgcccctgcgatgaaacatcagaagacatctatttatttatgttctcaggggaccaacaccttgcaactccaaagcatgtatattttgtggggtgtgaaaagcataactattgctgctgcataaaaacatttctgggaatatagagctatattatctcaatcacagatcgaccgacaatttttccttcattgagatcttggaatgcttttcccgcctcctcaaaagtgtatgttcttgaaacagcatggccaagactgaagatacctgtttctgccagtctaattaactttggaagatc

SEQ ID NO: 74884 - DNA, 583 bp, Glycine max
  Clone ID: jC-gmfl02220131b01d1
aaaaaaaaaaacaaaacatcgcatgacccattcaaatctgatagaaacagaaaatgtaatgccaggaataggcttggagaatccgagtcaaaaagcaaaattttacaaaatttgagttactgtttaaactcgattaatgcagttattgaacctagaaacggcaagaatcattctaattgggcatctgtggtttattattctctcagccatggtgattggactggggtccaatcgcatacttcgccttccttgaaccatagagctatttcacgcttgccattctcagggctgtcactgccatgaacaacattccttcctgtttgaacagcaaggtctcctcttattgtgcctggttcagcttgaagaggatctgtagcccctataagcttgcgtgccgatgccactactccaacaccctcccaagccatacacacaacaggacctgaagtaatatagtcaatcagcttatggaaaaatgactcttgttttaagtcctttgtatgcttctcggccaattcctttgagcactggaagagcttcaagccagttacttaaaccccttttctcaaacctagaaatattt

SEQ ID NO: 74885 - DNA, 389 bp, Glycine max
  Clone ID: jC-gmfl02220131b02d1
gcaagcacaagccattaatttccatggttacaaaagcaacacagttgggatatatacatttgcaacctaaattttctcctgttcgaatatgtttgcctgtgccaaatccccctcattcctttcctttcttttccatcgtacatccagcattatttaaacacaggcttttttagttaattatacatttttctttagagaacattaaattacacataagtatagtatatcagtatatggtatattctatgccataccaagcaaccaaatttcaaaattgactctccagctctgcttatcttgctctggaaagctgtatggcttcttgatcaagagtagactcatcattccaaacaaattggtgagtcatgagtgagaattcttgattccta

SEQ ID NO: 74886 - DNA, 395 bp, Glycine max
  Clone ID: jC-gmfl02220131b06d1
agattacttaatgtactcacggttgtcacataacgtgtggtagaaccaacattatcatcgttaaaatcaagctagtcatcggcaaggcactatgcatgcgagtcctaagcctacttttgcagtggccatttcggtgaatccttagtgtctactgttgctaactaacaatggcagctatgcctgacactagaaacagggtagctctagaaaatcataaatattaaatagtcactaatcaatagtagcaatccaatttcattgctgtaaattctctgcaatgaggtatggatttgaatttttaccaacttgtactggaaacacaagacaaaatgtcaccacggcatactatcagcttttgctctgccggtatgtctatctactcggctgttacgcat

SEQ ID NO: 74887 - DNA, 245 bp, Glycine max
  Clone ID: jC-gmfl02220131b07d1
ctgatataacgtagggtgccctatagtcaggaactacaaaatcaaacttgtaaacgtggacgccctatgcatgcaatctctaaggttactatagaggttaccatgagggtgaaacccgattattgactgtacccaagcaacagtggttaatctgcctgaatctgggaacaaggtccccgtatataattataaatgttggcctgatgctcctaaatggtgatactcatattgcactgcacgaattt

SEQ ID NO: 74888 - DNA, 481 bp, Glycine max
  Clone ID: jC-gmfl02220131b08d1
gtaataagcatatatatattgatggatacactggcattggatcggagatactaatagaaaacaccaaccaaagctaattagagtatgattttgtgggaagcattcaaacttcaaagttcatctttaggagatgatgaaggtcctgacggattattggaggagtttttgattgggtaggaagccaacatagctatgccacaaagaccctcctttttagatatgttcctttgcattctgatgtaaccctgttctccccattctggtccccaagagttcctcactatccagtaactagtcccatcaacagttgctacataccccacaatcgccacaccatgatttagctccgtgctacaatcaccagtaaatactgcctcggagtataactggaaatcagataccccggcatcaatggcttcagaaacaggttggttggcgacagctttgagcaatgcattttcatggttaccaggtacattct

SEQ ID NO: 74889 - DNA, 407 bp, Glycine max
  Clone ID: jC-gmfl02220131b09d1
gttattatcttttttttattgatggttacactgtcttttgtatcggagtatactaatattaaaacatcaatccaaagctaactagaggatgattttgtgggaagcatacaaacttcaaagttcatctttaggagatgatgaatgtcctgtcggattattggaggagtttttgattgggttggaagccaacatagctatgccacaaaggccctcctttttagatatgtgcctttgcatcctgatgtaaccctgttctcacgattctggtccccaagagttcctcactatccagtaactagtaccatcaacagctgctgcataccccataatcgccacaccatgatttatcttcgggctacaatcaccatgaaatactacctcggagtataactggaaatcagagaccc

SEQ ID NO: 74890 - DNA, 516 bp, Glycine max
  Clone ID: jC-gmfl02220131b12d1
caaacaaaataataattattattattatacacaaaataaatatcacaaaattaaaatataaaaaaatctaaccctgtagttcacgttttagttttgacctagtgtcaattacatacacatgatcgtggaattggggaacggagcctgaacccaaacccaaacccgtcaacttattttccatttacaagatccgacccgacccactggcatgggggcagtgatccagtggtaaacagaacacagtaacactagtttttgtcacggttgagactatcccaaagcgacgcgcattgcctcttatcaaaacccacgcgctggttttccaagtcatacacgacctcaaatccttgctgttgatagttcccaagtatggccccgggcccaccgctcagttcagtgtcatcaccaccgttcattagcatcagacagcccaccttcctcctagcctcatcctcaccgtccaagaactcgtaaaaataattcatcctaggcagcatcacattggaattattcccc

SEQ ID NO: 74891 - DNA, 521 bp, Glycine max
  Clone ID: jC-gmfl02220131c01d1
aaaaacaaaacatttgccctatagtaatttatatcagaacattgcacccgattactaacaaagcaggacagtcagttaatcaccatacatttaaccaaactatctataaccaatctacttcacaaaaaaagaagagaaactaaatattataagacacaaacttaagaaacactaaacaaggtcggtcctttatattccaaagtcctaatacttagcctagtttcttcccactcatcatcatcctcgtaaactcattcaagtcaataaaaccatctccattcccatccactcctttgaccatttttttacaggcactaaggctgcaactctctcctaaccttttgagaacttgggacaactcctcagcactaatcttcccatcaccgttcaaatcaaacacttgaaaagcattcttgatctcagtttcttttatcctaccctcttcattgaacatcttcatgaactctttgaagtcaatgaagccgtcttcatcagtgtccatgaccctaaacgctttcact

SEQ ID NO: 74892 - DNA, 332 bp, Glycine max
  Clone ID: jC-gmfl02220131c02d1
aagagtgatgaatatgattcaaaatacaaaacgacagccctatgtaactgataacgcatcattgcacacatgttctagccaatgatggcaacgggataagcgccatgggtctaaccactctatctatatccaactttcttcagcattatcgaagctaaactcaatttcattagacagatactgacgaacctccatacaaggtcggacctttatattccaaagttctaaagacaagccaaggtacttgcccattgtccacatcctggacaacgtattcaagtcaatcaagccatatggattcccatccactgattatgccagttgtcaacagg

SEQ ID NO: 74893 - DNA, 389 bp, Glycine max
  Clone ID: jC-gmfl02220131c03d1
atataacataaaacgggtggagattaataacagtacactaacatgattacttgaataggaaataaaggtatactatatacacaagaatttaaataagaatataaaatatctgagattgaatactttttatacacactatgaaagacaagacagatttctaaattaatatttattgcaacatgccatatgactcacccggagatagacgtttggctgccaaaatattactgaacttgtattgagatactatgaataaacttagcctgttccaaagtcacaaatctgaagcgagaagactgaccataacagacttttttccaccttatattgcaaaagctaattccgtgtgaatacaatggtgccatataatggctaaaatcttaaccaat

SEQ ID NO: 74894 - DNA, 137 bp, Glycine max
  Clone ID: jC-gmfl02220131c04d1
atacattgttaaataacagaatacaggtggggatcaataacaggaaaaggacctgaacaactcaacccgacataaaccaggccatgatacacaagcagcgaaataaaacagcaacatatacgagactgactacatgg

SEQ ID NO: 74895 - DNA, 88 bp, Glycine max
  Clone ID: jC-gmfl02220131c05d1
atactatattaacctacactaggggccattttacaatccacggccatccccacctttctcctcctatggtctctgttctgtattcttc

SEQ ID NO: 74896 - DNA, 97 bp, Glycine max
  Clone ID: jC-gmfl02220131c06d1
attaacaaacataggggacggctacataataatctccaattcccactgatcaactccaaccgtcaccaccttatgcttctcacacatgcggataaat

SEQ ID NO: 74897 - DNA, 257 bp, Glycine max
  Clone ID: jC-gmfl02220131c07d1
ggctggggaaaaaaatcaaccccattatgatcccaaagccaccacctgtcattgttaaaagtttctcccttttaaggatgccattttgggaaaattttcggaacccttttgcagaggggtctggatataggagcaaaaaatttttgtaatccccaaaatctaatccccattgcgggttactacccctaatgcctccaaaggatttccacccggaccctgacaaatgtccctggaactttacgcaaacccttattggt

SEQ ID NO: 74898 - DNA, 369 bp, Glycine max
  Clone ID: jC-gmfl02220131c08d1
aagcattactttttttagtttgttcaataaaattgggcgggaaaacataattaaatccaattggacctgataaccagaaccggtgaaaaccgtactaatagtagacatgaatattatatactaatacgttgaacatgaccacgtaaaaaggcggatcctacttagagagtatactatcacagcttggccatttgtccattctgcaatcgctcggacggcaggccaggccctgtgttattcgacacactttgctttggttgaacctcagagagcttgcgagaaactgtgatacttatgcggcctaagcttgaaaccattgcgatccacgggcatatcaggccagtcttccaatctaggaatgtgcgacac

SEQ ID NO: 74899 - DNA, 196 bp, Glycine max
  Clone ID: jC-gmfl02220131c10d1
ataaagggattttttttcggtgttaacacatagatctgacggggggggagatatcaaacctgctaaccctttcatctctcgaggacctaaaactgcctcccgcgatagctcactgactaagcatactgaagaacacacgctccaccaaatcacaaggcctaatgcaagcctacgcaaccatcgagcacgagatcgc

SEQ ID NO: 74900 - DNA, 472 bp, Glycine max
  Clone ID: jC-gmfl02220131c12d1
gaatgaagagtgatgtttgcatgaattgacatatcaagttgacatatgcacgtgtttttctcaaaaatcatacatcaacaaaaacacttcaactatagtgtaacctatgtggagatagcatcaaccactttctaccagaaaaggggggcaataaaaaataaaatatcacatgagctaagcctttcttggtcaaatgtacattagctcagagaaacaagcaatctctatacaggttgcaaacctaaattcaatgcgtcaatctctatcatgcagaactacaaatttagcaaaaaactcaacctagcttcccgcatttcttccaccttttctgctaacagcctcacataatcggcatggcaacgtgtcaaggctcacagctcgagtttttccatagttaccaagtacaccacaccttctccatgcatggtattctgcataggctactggatcattagctacagccttcacgtgc

SEQ ID NO: 74901 - DNA, 68 bp, Glycine max
  Clone ID: jC-gmfl02220131d05d1
ataataaataagggggcgtttatatcaatgacaaaacctttagaggagaaattcaactggacatcact

SEQ ID NO: 74902 - DNA, 96 bp, Glycine max
  Clone ID: jC-gmfl02220131d07d1
acattgataacaaacatagggggggggaacatcaataacaccaattggacctgatcaactcaacccgacaccaactgggccataaaacacaagcac

SEQ ID NO: 74903 - DNA, 227 bp, Glycine max
  Clone ID: jC-gmfl02220131d08d1
ttttatattgttaaataaaatagggaacgtgaatataaatatcaccaattggatctgatcaactgcacccgttatcaacttggccttaacacacatgcatagtaacaaatctgcacattacgatctcgtcacaaccgatggccccttccaagagtgactcagcctttattatcaccagaattcacagcaacaagccatatcacacctggcgaggtcactgcttcctt

SEQ ID NO: 74904 - DNA, 269 bp, Glycine max
  Clone ID: jC-gmfl02220131d09d1
aaacgtgtcacattcctctgtatcatccatcaaacaagacgggactacctattgcaaacccattggagcttcctagcttaaaagtttaagactttaccatgcacagcccagactttaattcactgaagccaaaaggcgtcagtccaaatcttgagatgcttattggatggaaacaaattccatcatcaccttgggacgatcctacaagcgagcttactggagcccagatcacgacattctggcaatacggtactcgagctaggtcaggc

SEQ ID NO: 74905 - DNA, 303 bp, Glycine max
  Clone ID: jC-gmfl02220131d12d1
gtatgaagagggatgttcgcatgaattgccatatcaagttgacatatgcacgtgtcttgatcaaaaatcattcctcaaccaaatctctgaaagtatagtgtaacctacgtggagatcgcacaccccactttctcccagaaaaggggggctaaaaaaatcactatatcacttgagctaagcctttcttggacagatggacattagctcagacaaacaagcaggtgtctatacaggtggctaacctaaatgcattgcgaccatctctatcatgcatatcttcaaacctaaggcaagacggaacgt

SEQ ID NO: 74906 - DNA, 465 bp, Glycine max
  Clone ID: jC-gmfl02220131e01d1
gagtattatgatccggtttattttgaatctactggaataatacatcaaattacagctccctatacaccacaacacacacatataacttcagatttatccagtatcatctcgattttcaaattaaccaacactattcagcatctgataagcacttgtgaatcacaacacacacattcatgagtcgggcttggtttttttcaagcaattccgtaagattcttcatacctgatgtacgttgtggtgtgtgtaggaaaacttggcttcaaaatttcacagaaaataattggatctcgcctacatactatttcaccaaacagttatcatgacaagcattgtcaaaacgaatgctgggaagtttaataggttcacaggggcagaattagggaggattgggtagctatcaggtggtggaagcatgcattcctcaccattaaagtagaccttgcgaggaaatgcccacccctg

SEQ ID NO: 74907 - DNA, 330 bp, Glycine max
  Clone ID: jC-gmfl02220131e03d1
aaaaaactgtactcaggtggggatcaataagaataatactatgtaagtaattcaacacgtaattaagctggacttattacacatgtagtaaaaaaaaagggcaacttaggagatactaaatatatggggtgcatagtatacgggacagtacacatctttgggggaacatattatatgaacatgctatgtcactggtgcgaagagttaacagatagttgcacccatagaatagaattagcccttaggagactttggtgacacaatagccaggtcttaaatccggattgttctagttcaagacctagactagaacacttaatgcccatggat

SEQ ID NO: 74908 - DNA, 124 bp, Glycine max
  Clone ID: jC-gmfl02220131e06d1
aaataacattggggaggtaaacattattgtcaggaattggatctgagaaactcaatccgacatcatcatggtcctaaaacacatgtattgcaataactctgtaaattcggtgattggatctatt

SEQ ID NO: 74909 - DNA, 100 bp, Glycine max
  Clone ID: jC-gmfl02220131e07d1
gttaaataacattgggggggaaaacatcattatctccaaatggaccttattaacaccacccgacatcaactgggcaatgatacacatgcaaagaatcaac

SEQ ID NO: 74910 - DNA, 498 bp, Glycine max
  Clone ID: jC-gmfl02220131f01d1
attgaaataatagtaagagtacttactagcactcccctaaaacataacacaaggacaaacagtttgcaccaaactacgaatgaatagatttataagttacaactcagtatatgccatcttaaaattaattgaaattcataaatattagctgtattagaggaattcagtgatgtgatacttttcagcagcctcattggccttcttcccccgatgttgatctagttgtatactcgattgttgccccggaattaaactctggtaattgtgcactatcatcataatatgcaggttctaaaggtactgggagagtttgagaatggctattaaacacggttacaacgaaagccatggtgggtctggcagctacattttcttgaacacagagtaacccaatgtggatgcatctcactatttcattctgtgaaccattgatcaaggtggcatctacaatatttgcagctgttccttccctccagtttcgccatgcaatacttagta

SEQ ID NO: 74911 - DNA, 469 bp, Glycine max
  Clone ID: jC-gmfl02220131f02d1
actcgaatgcaacgatcgataaactaatagtaatgtcatacaaaataactgccctcgaatacaaaacctcccctcaaatctcccaagaatgcaagcaatttatatagttcaaatacagtaataaactcccacgatcacatccacaaaataatatataaaggtaaggtatagggtaaatagcaaaataacatgaattggcagaaaaatctgcgagtccgaagacagagatcgatgtctagaacaacatggacagcaaagcacatccgaatactaagctcccaatcatcttctgaaaggaccacaagttttgagccccactgtcatcgccggagggagagatggtggagaggctgggaccgggagcaagggaaggagagagtgcaggagcaaacaccttggaaggagacggagctggagaagagacaggtggagaagaagaggtgtaactgttggggtcaatgagggtggt

SEQ ID NO: 74912 - DNA, 198 bp, Glycine max
  Clone ID: jC-gmfl02220131f04d1
attgttaactaacttttctcgggaggggatcaataacagcaatattcccttaacaactcaacccgtaatcatgcaaccattgttagacatgaagtttattaatagtgtaacttcgcagacactaaatacatggtgcccacagcatttgtgaacgcaccctactcttggggaacatttagatcaacatgccatctcact

SEQ ID NO: 74913 - DNA, 272 bp, Glycine max
  Clone ID: jC-gmfl02220131f05d1
atcaacaataccccttttatctaagtaactcaacccgtaaacatgcaggtctttctacacatgtaccttatttaatcgtcatcttttccaatattataaacataactagctttttttacgcgcaaacttattaaacatttaacaaagttagtacttcattttccataactttagaacttatcctagtttctttccactcaatatcatctatcaatacttagtgtactctattaaaacatatccatttccatacacccgtttgaccattctta

SEQ ID NO: 74914 - DNA, 196 bp, Glycine max
  Clone ID: jC-gmfl02220131f06d1
gttatctaacttatgggaggtatatatcaacattaccccttggacctaactaactcaacccgtcattaagtggccattgatacacatgcagtttatttaaacgatacctttcgcaatattcaaaacgtagctcacattctttaggcggatactcacgaatctccaaccaaggtcagtacttcattttccaaaactc

SEQ ID NO: 74915 - DNA, 300 bp, Glycine max
  Clone ID: jC-gmfl02220131f09d1
aaaaaaaatcttttttttgctttgcttactaaatgcgcgggggagaggaggataatatgcaagttgcgctgtaggaccccaccctagatgaagtcaccaatgccagaaacgtgccgaaccccacagatgctggtcgttaggaccaaaacaacttcctcagctatgggggaatcggacgatggtcctggatatgacacaaagcactgacttttctcacatctgggggcgccactggtgattgccatgacgtaagcagcggacgtggtgggggcctcggggggcctaccgatgagatctgaa

SEQ ID NO: 74916 - DNA, 380 bp, Glycine max
  Clone ID: jC-gmfl02220131f11d1
aaaaattaatttttttaagcatgctcaaagaaattacacaggtggggacaactcaaaataattaatccgcaccaaaaccaaaccttgaacatatacaaggctgaaccctaaccttatttttgatcaggcaacatgttctaccgcctaatggaaggaccaaactgacacgaacataagatagtgctaaacgattgcgctactgccgtaagatgcctcggagtcttaaggatacaaacttgttgggacttaagctcttgatgtagaaatccctggattaacagtccatgccaacttaggggccccgcaaggtaaaatccaataattcattccaacgtcttaataacccttgtcaggcgaccaaagattacaaaggcggggac

SEQ ID NO: 74917 - DNA, 552 bp, Glycine max
  Clone ID: jC-gmfl02220131g01d1
atctccaattacagactatctttaattaatacaaaatgattttcaataaccaaaacatctcacttacagagtgaaaataaagcataaatggcaaatcatgcttttcaaaaaacttttcactacaatgaagataaagcatagaccactgtgctaccagaaactaccaagaagcaaccccctaactttataatcaagaaggcagtgaaggtttatattccttcattgtttttttctagacgatgaacatcaaacacagatttgactttgcctgtgttatctcgatgtcagagagattttctttgcacactaaagaataatttggcaaactgaaatgtgaattacattcacctctgaactactgagctggggtagaactagaaccaacattacccaaacccatcttctgccccaacaatgttagctgctctacaaagtcaactccagttagcatttctgttgctccatatataatatgtttggcaggttgctgatgttgtgcaagctcttgcagactgcaatattcaacgtaattaccaccaccaatcatgaaca

SEQ ID NO: 74918 - DNA, 495 bp, Glycine max
  Clone ID: jC-gmfl02220131g02d1
acaatctggcaataccgatatttgacactataattacaaatttacatgaagtatttgtagacaatgttctctcgtttgggaatgtaatgactctatgaaagaagtaaaagcctagcaaggctggtattaatattattacacatgaaaaatgaaattttctgaagctagagcgggaagagcacctcgggtcgaattagaagcttactagacatgtatatagatttggataccctttgtacccaccacatattaaatatatatacttatctttgctgatttaaaaaaaaaaaaagcttactaaacactaattctgcaatggaaaattaaatccgaaaggaatgccttctcatgcctgtagtttaggacacacactagagcttggttttgccataagacatatatccgcatagcaagggtgttttgaaacagggtcctctttaaatgtaagtggggattggccatcaccatatcacaactcatattttaaaattagga

SEQ ID NO: 74919 - DNA, 267 bp, Glycine max
  Clone ID: jC-gmfl02220131g05d1
gaaaagattacttgttttcttaaaattaaacaaactttggggacgattagatcaaatatacgaccatgataaaagccacacaactaataagcatgcggctattgggagacaagtatcatactatatagcaccactttgcaggtacccaaagcatagcgcgcattcaattcggggatacaccccaaaattcagcaactattagaacaacacggaccacaagtcttcaaataatctagggtcacttgccatgatccacatgatgtacct

SEQ ID NO: 74920 - DNA, 411 bp, Glycine max
  Clone ID: jC-gmfl02220131g06d1
gggtagctgccgtaaatattcaacagggcggatcatccttaattattcccttaaaaagaaacaacttcaaccattggcaacagtaaaacattgacttgggttaacttagggaacttcaaaaaaatcttttaaaacaaacgcaggctaataaggggttttggtccattttaaaccaaactagcttgcttgatagggaactcaaaaatcaagtgaaatatccaggggaaaaattctgaaacggggccgttttggaagaaaaattgataacctcgacaggatttttctcctactattggatttcaaccccaagagagagagctttttcaactcttttgaaactttggagaaaaataatggatggccatttttatttaaaaaaggaagaacaaattgaatatccttcaggtaact

SEQ ID NO: 74921 - DNA, 495 bp, Glycine max
  Clone ID: jC-gmfl02220131g07d1
gcaatgtaaacaatgggatatataaacatgttcaagcaaatttccatccgcttctgaagcagtcactttcttatatctcacgtgcacacttatgcacatactcattgatacagatataaatatagacaaagattagtttggagtttcaccagcaggcccatgtcttgcattcaataaaggttgaagagctttgactacaatgctcatgtttggtctgaaatcagcttcatattgcacgcacagggcagcaacagcggccatcttagcaacagctttgggtgggtattctcctcctagtcttgcatctacacactgtctgactttatcctcactgagtcttggtgtagcccaagtaaccaggctctgctgcccacgtggtagtgtatgatcaacaggcttccttccagtcaaaagttccagaaggacaacaccaaagctgtatacatcactcttggcattcaattggccagtcattgcatattctggtgcatgata

SEQ ID NO: 74922 - DNA, 282 bp, Glycine max
  Clone ID: jC-gmfl02220131g10d1
gtaaacattggtttatataaacatgttaaagcaaattgggatgggattattaagcagtcacattcttaaatgccacctccactgttacacacacactcatcgaaactgtcattattattacacaaagaaaaatttgaaccctcaccattatgcccatgatttgcatacaacataggttgaccaactcctacggccatccttctgtatagccttaaatcagcaggaaacaccactcacagggcagactcagggggcatctgaacaaccgtttttggtggatat

SEQ ID NO: 74923 - DNA, 311 bp, Glycine max
  Clone ID: jC-gmfl02220131g11d1
ctacagaatctggcaatgtagacgaggctgggaacaacctacaatgctcaatccttattaaaagcattccttgtacatatacaccgcttaacccagacatgatctttgaccaatcaacatgtcctagggggcaaagggtattaagctctgccacaaccatagcaactgctcttcgaatgcgctactcccttaaaggcctcagagtcttaaggatcctctctctctggtacatatccatatatgctgaatgagcatgcgctcacctgtacttgtgtaataagaggccccggaatggaagaccgcttatttca

SEQ ID NO: 74924 - DNA, 532 bp, Glycine max
  Clone ID: jC-gmfl02220131h01d1
gatcaatagacagatgaatatatatatagtttcatgttgacactatgcagaaattatattctagtttacccatggtccaatgataaaggctcctcctttatgtgacgtgatagtaggaaaaagaatcacattgagtgacttgcgccctttcttatgttataaggaaactatatacagcactgactagaattctagcctagaggagcatgaggggattgccttctaagttctaacaaaaaaaattttgaattgtgatcatcccttgggacgagaaataaatattacatacactcgaaaaagtggaaggaattaagaaaagaattaccaatccttaatcctacaaaacttcaacaaccgcctagttgagcatatgattttgataataactcttgcaatgttttcaaccagaagcagatgcaactctctgtttatcaaaatctccttgctcttccttggcaaactctttaatcaattcccgctgtctctctgtcagattgtttggaatgctgacgttaaaatgaacatattgatc

SEQ ID NO: 74925 - DNA, 478 bp, Glycine max
  Clone ID: jC-gmfl02220131h03d1
aagttaccaagcattaccatgcaacaaacgtacatacaagttatacagtacaaattacagtaataggcgtttcttaaatatccagccaggttgaaaccagcacaaacagttgtattgaatattttatttaataatttgaacataaccacgtagagaggcagatcctcctcattttttatcctttcaaagcttggcaattagcccattctgaataggcttggctggcaggccattctctttgtcatccaaatcactttggtttggtggaacatcaacagcaggcgagcaattgaaaaacccatgcggcataagcatgaaaccaatgcgttccacgggcataacaggccagtcttccaatctaggaatgtgtgtcactccaaatacgtaccaaagaactatatcagcttcctccagtgatcgattttgcttaacccaagtagccaaaccctcttcaacacgtggattttgattagggaac

SEQ ID NO: 74926 - DNA, 552 bp, Glycine max
  Clone ID: jC-gmfl02220131h04d1
gaaacaggaccatttggttttccatatcttatgcaaacacaatccaccttaaaattttctcactcaggtactcatgtctcaacctcctatttacatcactattaccgtacctaaatgacgagacgattaaacattgaactaaaagatcatggaacgacatattcccaaaacataaatataagtcgatgatgttgataaagcataaactattctctagcaaagttccaaagtgaaaaacacaatcacttgactaatctccggtctattatatttgtagtagttcccaaaaaacatgaattgccaccatcaaaaaggcttcagaatgtcttaagcttgtgcaccaagctccaagagtaaagtgtgattaattgcatcagatcctgggccagtgaattgaattggacctggactaatgtagcaattttagggcccactcatccctcaaggaggcaaactttttgaagggtgccccttcaagctccaccattgccttcttgatcacaggcttgaatttaccatgtctcctcttcacgtccatcaatgaagtgagtg

SEQ ID NO: 74927 - DNA, 284 bp, Glycine max
  Clone ID: jC-gmfl02220131h05d1
ggataatggatgtctttcttttttacgaaatgaaaagaaataatcagagtaactggaaactgggacccccttcgttaacagaataccggggactcaaacttataacgtccaatcctttacagggctttacattttcaaaagcataattgctagaaacaattttgggggggatcatttaaacttggagagtttcggaaaatttttgaactaacaacacctggctgctacagatttcataattgtgcgcttggcttcccttaagaagaagctaattcaaacgagaa

SEQ ID NO: 74928 - DNA, 320 bp, Glycine max
  Clone ID: jC-gmfl02220131h06d1
gcaatgtaaactttgggatctataaacatgttaaagcaaggagggatccgattcagaagcagtccctttcttatatctaacgtgcacacttatgcacatactcaatgatacagatataaacacagacaaccataactacggagaaccaccaacaggcccatgaattgcattcaataaaggttgaaaagctcagactacaaagctcatgtttggtccgaaatcacctttaacttgcactcacagggcaacatcagagggcatctagcaacacatattggtggatattctactactagactggcatttacacactgtctgac

SEQ ID NO: 74929 - DNA, 399 bp, Glycine max
  Clone ID: jC-gmfl02220131h07d1
gtactacggttggaaatgatttatcgtacttttgaagatctactgctctctgaggagaaccatatagacacaagaaattctttgttataagatgcttataacaataggatcaatgacacttatcaacatagtagacacccgacattcattaactaatacattggttaaactattgaaagaaaattgggataagacagaccacctatgagcaaatgagttaatgaacttgatatagaaccatgtttaagccactgttcccagtccccatggttcatatgcattcttcaacgcaatcagtaaagcgtactgtgaatgagtgcgcaaaatcagtgattgcccttggatcatatgatccccctttacattattaaagcagcctatgccatggcgcaggcacca

SEQ ID NO: 74930 - DNA, 523 bp, Glycine max
  unsure (1)..(523): unsure at all n locations
  Clone ID: jC-gmfl02220131h08d1
acctcaaacaattagcaaattattattaatgggtactaaactccagtactttcggtcttttactctgtttgatcttttttacttttttgggcttaactgattacttctatcttaggaaaaataattaaattaattacgtgttcaagtgaacactaataagggatatggacattctacaacaatgtgtttcaaggaccattatgaaaatggcaaatgattacaacccctcaaccacagccaaaacaaaagcaaaaaatgaaaaataaattaaatagcaaactattctacatccgagacctcatcttcatcttcctccaaaatgtagactagagcacgctttgttgcagcaaatacacaagccacgcctcttgatgcactaactgccaagggagcaattacagaatgacgaatggtgcgagatttctcatccccaatattcaggtaagcgacagaatcctttagttctggtaacctncaaacatctatacaagcagatcttgacatagagacatatggcagatca

SEQ ID NO: 74931 - DNA, 361 bp, Glycine max
  Clone ID: jC-gmfl02220131h11d1
gggcacttaacttctttttattaactttcccaattccaagtcagcgtggacataaagaaaagccatttccccaatgctataaaatcttgtacagcccaagaggtcttcttgtcccgattacctggcatcagaccccatctcagctcacaaaaagtctaagtgcgccctttcagcctcgcttgggactcactttggcatgaactgaaaccccctttttttattagataagaccgcacagtgacacaaaatgggaagcatttgttgaggcagaacggcagtgaataaaactctccacttgttgagcccaccatgaaggatctgtgctttgaccaccaatgctttcctgtatctatccgaatat

SEQ ID NO: 74932 - DNA, 524 bp, Glycine max
  Clone ID: jC-gmfl02220132aa01d1
acagcatgtacatccatgcattttcttcaattcaaaatcaatttgtagacaaaagagtaaataacattccacaaagagtacaaatacagcacacaatatctaaatcaggaataatcatacagtgatatgctcttgtcatctgatacactggcaagtcgaccacctcgcacatcactccctccaggtggtctaaatgcgactccccatacctggtctgaatgattgctcattgtctgcacagatgccctcatgttaagatcccatagccttacagatctatcacttgaacctgtagcaatggctgccccatctgggctcacgtccacacacagtacccaactagcatgacctgacatggtcccaattaaagcttttccctcagcatcatacatgttggacgtttccatcatccgaagctgtaaacagcagccttggatcataaggagaataaacaagagatcgcccaggcatgaagtgaccttccaggtgatgcaaaaatttggcgcggggcacatcaaaaactg

SEQ ID NO: 74933 - DNA, 491 bp, Glycine max
  Clone ID: jC-gmfl02220132aa03d1
ataattaaggagagttgtatagaaaagagattgcttttgtaatccatcatcaattcagacaatagaatcttctttttctactctgatatctgtttcttaatacacagaatgaaatacatctgaaatgactgaggcctggcttgcactttggcttgagaaagtcatgtacatgccccaaagaacagagaggcttaacctactgattgtttgcaaattatggaacacataatactgtaatagcccttttgtgggaatgatacaaggccacgacccaatcaatcaggaacttcaaaatgtcccaaatgaaatggggatttacttgtagccagaaagatcaattttactcaaagacacaagtgaagacccccgcttgcaaaaattaatgttccatcaatcaatctagtgctcttgctcagagtgatcatcatcagcttgttcagcttcctttgctgctgttgtcgtgtctggctctgactctgagcgatcatcat

SEQ ID NO: 74934 - DNA, 501 bp, Glycine max
  Clone ID: jC-gmfl02220132aa05d1
gcccatcaccacttgacaatgccaattacgcactatccatcgggaactaaagatagtcaacaaaacaagagtttttcgaatatgggcctcccaataatttccccccccggaatttggatcttcacaatatgaaacgatttcagacagacattgggcactcccctttgcttgggtatctataacaggggcccaacatatttgaacataatatgactgggggtgagatgaataaatttggggcaatcagactaaaatttacaggcctttttttctcaagcctaaaatcttaaaacaaggcaatgaaccaagaggtcaatccaattgtatttcaatgaaataaagatcaaatcaccgggtaaaagctctggaatctctttttaggggctgggcccaaatggttgcctgactatatgcataagtgtcatgacccccacactaactggtataacccaggaagaagttgaatatgtcactcaatgctatgaagccttttacgcgctt

SEQ ID NO: 74935 - DNA, 577 bp, Glycine max
  unsure (1)..(577): unsure at all n locations
  Clone ID: jC-gmfl02220132aa06d1
agcaactacttatataattttattaatttaagaaatatttgagagagaatatactgataggatggtactatagtataataactatcaagcaatcccctgaatgtataacgtacaatagccaaacaaacaatgatgatattgataaataggagtctgaaactaattatctgatgtacttgtttcaggaacaagtccaccttataccacttactaatacgattacgggctatagttacctgctcatcccaattagttttgtaggtgattatagttaggactatagtttgaactagtgtcccaaacaacattccaatccaaatacccttgacttccaagtgaataatgttaccaagtactattccaactggaatacctatgaggtaataacaccctatgttcacatacgctacagtgctctgccaccctgctccaacagccacccctgttgaaatcatacaatttcatgactctcagactccccaattgacaaattaattntggctttatcatgcataaacaattgggttcaaatcttaaacatattcattaaaccaagacaccaaaagtatatagcata

SEQ ID NO: 74936 - DNA, 567 bp, Glycine max
  Clone ID: jC-gmfl02220132aa07d1
gtaataagcataaatatattgatggatacactggcattgaatctgagatactaatagaaaacaacaaccaaagctaattagagtatgattttgtgggaagcattcaaacttcaaagttcatctttaggagatgatgaaggtcctgttggattattggaggagtttttgattgcgtaggaagccaacatagctatgccacatagtccctgctttttagatatgttcctttgcattctgatgtaaccctgttctccccattctggtccccaagagttcctcactatccagtaactagtcccatcaacagttgctccataccccacaatcgccacaccatgatttagctccgtgctacaatcaccagtaaatactccctcggagtagaactggaaatcagatcccccggcatcaatggctacagaaacaggttggttggcaacagctttgagcaatgcattttcatcgttaccaggtacattctcatggccatcaattgatacagctaggtcatttgccttggatgcatcacatgttccatcttgagctgtgtcagggtaatagctttct

SEQ ID NO: 74937 - DNA, 594 bp, Glycine max
  Clone ID: jC-gmfl02220132aa08d1
atattacttattgaatattattcactttcaccaaaatgtgtcattaccaaccagtaatctgatttcatgtctaacagaaaccctataaaccaatagtacgtcactttacaacaatttgtccctgaatttttgtaaaccaaaaataatttggataatgtattcttattagtttacaaaccctaaaagcacactagtgctatgctataatcatatcgctatacagatgtcacgcttatttttatgaggtatcgaagatctaacatacaatttggttacaatgtctctagtggctagcaagtctcatcccatcatctcctttggaaattgaaggatttaattgcaaaggcaaatataattgcaaaaaatatgcagaagccagccaccataacagcagtaacgcacaagaaatcatgcctgtacccaaacacgtgtttgagtacctctcttatagtcatcgagtttccattagagagcttcactaaatgagtttcaccaccatactgtgaagttaggagaccatacagactccaggctacaggtttcgcccagtaataccatcttcaccaaatagggattctctgagaattaaagaag

SEQ ID NO: 74938 - DNA, 496 bp, Glycine max
  Clone ID: jC-gmfl02220132aa10d1
attcaaataacatgaaacatcatattaaataatttttttcctggaagttactccagtaaaaaagccttccctaaatcacgagcatgtgatgatgtgttgatgtaatagaataagttcatttcacatttaatttacaacaatagtgatgatgcaccaatcctatcgacgttgattcctgaccaactatctttctagcaatactgggatatattattcactcttcacaataacattatatgctaggaaacccttcccatataaccaaattatacgaaaacaaaacgcaacactaccagtcttatcagattacaacacttacaaatatcatcattggtccaaaataatactagcagagaagttcccttgctttggttctctgtcctgcaaaattgccaagcatgcaatataagcacgcaaagaatgaaatacttactgttatgatacattattatatctttatgctgcagcagatcgtttgtccttgtaatcatcaaga

SEQ ID NO: 74939 - DNA, 542 bp, Glycine max
  Clone ID: jC-gmfl02220132aa11d1
ggacaataatttattttatttcaagtccatatcgggtctacacatagacacaacataactcatgttgctagagtagttttctcacaaccatcgtgcacacaggccaaaacatctctgtagtctcttgaaatgggtaaaggagtcgtagacctctccatcactacttttcttgtactcaaacaagagatatgaatgattgaaagcagtcaatttgccaaacccatagtcaacgtccctataaagactccaaatagggggtgatggtgtgaagtctgacaggtgacttcccccttcaccaacaaccacatgaattgttccattcacagtgccagagtagtgatgcttttcttcattcacacattgattctgataaatggggcatactctttcatagttatggacatgaccataaaatccaatgtctactttgtacttttgccaaagcttctgcaaactttcccttcccatgggctcttcaaatgaaccctccatgccataccaaagattagaggagtagccaaggggacgatgagctgaaaaga

SEQ ID NO: 74940 - DNA, 389 bp, Glycine max
  Clone ID: jC-gmfl02220132ab01d1
aaattaatgttggtagcttgcgaatctcaacatcactctgccgacatggaaatttgtaaaccataaaataataaccctaagcccaaatacaattttgaaagatgttgctttggtgcttccacttaaatatgctaaggtctgtaaatcataaacagctgtagcatagaaagaaaataaaaaactcaggttttgctttaaacttttggtccaaaggaacatcacattgcaaaattttggccgacaaagcagtgttaaagaaaatcattctgagtgcgatctgatcacatatgatcggccacatctactccaataaacatgtgaccttttaagcttgaccatctatctgcttgtcttccacatcattagtagtagcggctgcttctcccccc

SEQ ID NO: 74941 - DNA, 561 bp, Glycine max
  Clone ID: jC-gmfl02220132ab04d1
gcatgtaataaaggtatcatagcatatagcatagcataggtatttcatacattgttcttttgaggagcacatgcagcaattcagtcttactacatgattctctttatttagaaaacaaagttttaccaattaaaccaacttaatcagctaggctttgcaccttagacaaactgattaaggtactcatccacagtgatgtatttcacatcaggatatagagctgaagcttccactccaaaagaagactcaatttcaaagttagtatgatccccctttacataagaagagtggttaattgacaggatcacattcacgggtggtgcggactcttcaatttgcttcaggagttgttcttctggaacatagattctttcaagagttttaccaatctttccctcccagagagtaacaagctcattaaacgacaaggtattagctggtggtctaatgtagagaattttgttcaaggttcttggatcatccacagaattgatcgataagttccaatatcctcttccttgtaaaaacagctttggggtttccatctcctaggataataac

SEQ ID NO: 74942 - DNA, 613 bp, Glycine max
  Clone ID: jC-gmfl02220132ab05d1
ccacaatacaaatcatctatttcatataaaattaaataaattaaaatacatttcccattttcatgaatttatagggacatatattgactacattatgtccttttaaaagcttgaagctagaacaataataaatttccaaaatatttttaacaaaggtgttatcatagtgcacatgaacaccaaaactcacttaatcaaaatttacaaggatctcacttaattttaaaatgccaagactaaagcaaataaattacaagacaccaaaactcaacaactcgagcaatctagtattgaattggaataccattttctaattcaccatccactaaaacatggggtgcattattcctcaagccagacaaaaatgtggtaattaattaaaccttgggagttggaggaggaagtagccatttggagccttcaatcatcgcaagtgttatgtaaggtttaacctccgtttcacttagttgcttagttatagtagcacgccctttggggtctgcaccaggtcccgagttctgatactctccaaaacgaacagttttgtcatgttcagggtgactggtgttactccaccctaatttatttacaatgtcactcatgctgctgtatg

SEQ ID NO: 74943 - DNA, 533 bp, Glycine max
  Clone ID: jC-gmfl02220132ab06d1
ggaaatgaaaagattttcaaatttatcatcgaacacaagcccggtttatatttacaggacagcacatagcaacttcctagtcatggaggactacatccaggaaacaaaaccactctcaaaaagtatgaaaaaggttggatttttacattagatacatgcctaacaaaataaaaacatttttttgattaaggacaaatctctatcgatcgatgtttacacgctttcatcatattatgctgtgaaggttgtagttgtggcaaatgacgaggcagtatcatggttgtctgaagaaaaggttgtatacatagatgaattcttcatatcaatactactttcttcgttccctctaactttgaggtccagtaaatcagaaattaaggcaggttttgttatcttactggcatcaacatccatttttccagtgagcatcttgaccacagaagacatggatggcctgtgctttgtggattcttgagtgcaaagaaggccaatccttagaaacttacaagcctgcttagcatcgaattccccca

SEQ ID NO: 74944 - DNA, 515 bp, Glycine max
  Clone ID: jC-gmfl02220132ab09d1
attcaaataacatgaaacatcatattaaataatttttttcctggaagttactccagtaaaaaagccttccctaaatcacgagcatgtgatgatgtgttgatgtaatagaattaggttatttcacatttaatttacaacaatagtgatgatgcaccaatcctatcgacgttgattcctgaccaactatctttctagcaatactgggatatattattcactcttcacaataacattatatgctaggaaacccttcccatataaccaaattatacgaaaacaaaacgcaacactaccagtcttatcagattacaacacttacaaatatcatcattggtccaaaataatactagcagagaagttcccttgctttggttctctgtcctgcaaaattgccaagcatgcaatataagcacgcaaagaatgaaatacttactgttatgatacattattatatctttatgctgcagcagatcgtttgtcctcgtaatcatcaagattaagagcatgtagcaact

SEQ ID NO: 74945 - DNA, 598 bp, Glycine max
  unsure (1)..(598): unsure at all n locations
  Clone ID: jC-gmfl02220132ab10d1
gagtaaataatttatgaccattttggtgttatcaaagaaacacactcatttcttaaactacaaccaactctacatttaaatgtagctcaagtaaaataagaaattatagaacaaattgagacagtcctcatacatgaaaacattgacaggattaacaatccatgcacatacttaacctttattccctaactcatgtctacctctagacaacatcaaggaatgttttcaacatttagtactcatatagcactaacatgacaagacacatatatatatatatacaaaagatagatcatcactcattagtcattacaattgactgcttaagactatcatccaattccaccttcacctcattgagtcacccattgacaccactactcatccctcaacattctgatgagcagattaatgcttgatcatccttggtctccacactttgaattggagaacaattatcctcttccgccaccttcatgcatggcttctcttcaagtggttcctgttgtgttcctcccagttccctgaccaaagactngatccacacaaacatggaacttcccagctaacccaagaaatagccttaccaacctataac

SEQ ID NO: 74946 - DNA, 575 bp, Glycine max
  Clone ID: jC-gmfl02220132ab11d1
acacgtaacatgtattgggttgttatttcttatgagcaataactccttcatatacaaattacatgacaaacgattatgattttggatgcttaaataatccttatataaattatcaagggcatggctataggtaacgtacgtgggactatcatgacagcaatggaactatatatatttgttaatttatacaacataacgacgaagataatccaaccgtgctggatgcttaagcttcatgagagccttgacttcatgcttccgaaccatttccctagaaatattcaagttcccagcgatttctcccaatgtcctgtcacccttgccatcaagtccatatctctgtctgatcactaggctctcctttggcttcaaggaatcaagcacatcatcaagagcaagtcttagaacagcaagttgcctcctattatcaccattaacaccatcaacatcagtaatcccattaatatactccttttgtgtggatatatgtcttgaatgaagggataaaatgggttttgatgccttcattacttcataatatctatcaggtgagatcccaatctttctactaactc

SEQ ID NO: 74947 - DNA, 379 bp, Glycine max
  Clone ID: jC-gmfl02220132ac01d1
aattccaattgtacatcatgttatttagataatagatttgggcgggcatattacccgaaccataaaaaaatacagctactcaaaatgctggggcttgtaaataaattacataaagttatgagacttgcatgcctcacctcgggctgcacaataattatcttaaatgttaagcgctagatcagataattgcatggactatccaaacaagagaacacatatgcttcactattttgtcagacaatcttatttctggtaccgacaatgtacgcgagactttccaatggaaaactgaggtagaggaccacaaaactcattggagagggactcgaccaccgcctttgaaataagctggaaccttgatggtcgtatgaccttaaac

SEQ ID NO: 74948 - DNA, 329 bp, Glycine max
  Clone ID: jC-gmfl02220132ac04d1
atgaaaaatcgtgtaataaatgttctcattggacaataattggatgcacactcttacaacttgaacacactagcagaagatcaaatcagctgggagtaatcttcctcttctaaattttgcacaccttcctaagattaaccatgaaaaccttaatttaaattcctaatgcaagaggttttaacttaggaaccaatggttgccactttgggcacatgaacaggaaactcgtgaatctcatccatccaaggatttttctcctttgctggattaatggtcctcaatgcacgccacacagcactggtggacttggacccttgacccaatggcat

SEQ ID NO: 74949 - DNA, 590 bp, Glycine max
  Clone ID: jC-gmfl02220132ac05d1
agaaaaacacaacgttttatttcacatttaagaagcatgagaagatccatgtatctataaagactcacatatataataattacatagagcacataaaagaagaaaagtaaagcattaagcaaccaagatcattggtccccaactagtgttgtgcagcatagtggttaataagcgagagagcattgctagtaacctgagcaacattgagcatcctagccctaatagagtccttgatcttcccattcagcgccttcccggagaatccatcgccgcaagtgctctcatcggtcaaagcagaactgacccatgtctccacgttgctaatgtgccacgtgaagtcctcacccttaaccttacatagcttgagctccttcagcgaccggctgaagcggtcaacgctgtcgctgatttcctcggcgcagtccttgagtgcagcgtgctctctgggtttcaggcctctgaatttgttgcagttagccacgaaggttttggtggcttgggtgcggttcagggagagggagagtgctgtctgaaccagatggtgaggctcctgttggatgctggaggcgtagacggagagggatgagacg

SEQ ID NO: 74950 - DNA, 588 bp, Glycine max
  Clone ID: jC-gmfl02220132ac07d1
acgttctgaaggactattcattcacaacaataatgcctgtaagaacaagtggggtgctactctactgctactctactgtgcacaaaacaaatcaatagctgtacaaggttatgtgaaatgaatattgacaccggaaattaacatgaaagaaccaaaatcccttttatcaacaaatggtgatcacaatgctaagaagcttaaaatgttggaaggaatttctggccaggagaagtagaggtccatgcaccacattcttgcatttgcgttttgcaaagttttacaatctttagttccctttggtcagttttcattttcaatcaagaatcaacttccattgtagaacatccatgcttgctgtaaaaatcatggaacaaatctgaccagtgcacaccgataaagactcttgtttgaaaagatacctaagtttccttgcttactgaagaagtgtgcccagttgaggaagacttgagcagagattgtgcagctaataatttgttccttagcatgacattatactcgtacaaattgtttagattcttctgaatatcggacaagtccattttaaagccacctttaatttctagtgaa

SEQ ID NO: 74951 - DNA, 489 bp, Glycine max
  Clone ID: jC-gmfl02220132ac08d1
attataggatgaacacatcatcctcaagtgctttcaaaaggccaattaacccatttggaagtattggaatgataaatgtcacacatggtcttcacccggctaatatactctcaaaattattgcatttcctacaggaactattcttcattagcgcttatttgaggcttccacagttcattagtattgccgttgacatataattgacctcaaaaactcactgagcagttgctatagaaaacccaaggcctgagggacagaatcaactgacaccataaacccactttcctgcattgctggcgaaactaaccaactcctctggcttaaaccacaagtcaatctcatcctcggcagtctcaggaccgttactcccatgaatgatatgactttcgacaacaacggcaagaacacccctaagggttctaggctctgaattctgaggatctgaggctccaattagcttttgggccattggaaataactccttgacct

SEQ ID NO: 74952 - DNA, 529 bp, Glycine max
  unsure (1)..(529): unsure at all n locations
  Clone ID: jC-gmfl02220132ac09d1
gaaacaatagtaaccatttattctgatattaaaaaaataaacaaaacaaataacaactcatgtgatgtgagttctggacaggattctccagccagccggccatcctctatctctattctctaaaacattattataatatcaaaattctaccatatcataaaatttctctatattaattttcaataacacggaatattgatatattatccacccctcattttttacacgcaggtcgatttttttttccagtttttttatttacaaattacaacgtgcgtgcatattccgtatcccgtattccgtccgtgtgtaagagtacaccgaaaacgaaaattaatcactgattatcacatgatggaacaagcattggggttctcatcgctgaacatctgtggcggaggtgcgtgcgggtgcatgtagtacggtagaggtggctgcagaggataaccctggttcacgtaccctggctccacgtaatgattattagcactagcaccatatcctgngtgaacctccatagcgtaatttg

SEQ ID NO: 74953 - DNA, 553 bp, Glycine max
  Clone ID: jC-gmfl02220132ac10d1
gtaaagattaactattatcacgaacgaaaccattaatagaaacaaaaatgaaatggtgttagtatcaccattttgttcgtctctgaagacaacatatatagaacatatatagatgcccttaatgaatcgaatgaatctttcaaaatcgcaaattagatgtttgtgaattaattacatatgaaaaataatgaagctataatctcccattatttctgaatcacagacccatatccaatctcagttcagcctgaaagttaatctctgatcatcatgaatgacagtatttcaccacaaaatcccggtgatgaaactcatgtgcccctagatttcagacaaatctaagcgatagtcccagtaattttacgcagatgacacagcttcaatggcgctgcctaggggccatgctgcctcaaccagggcatcgtcgtatttaactttcttcaccaatgtaatctcttgccatggatatataccaaacccatcaacgagtagtgtatactggtatataagatccatgcaaagatagggaaggttccccttatcaacacgagga

SEQ ID NO: 74954 - DNA, 570 bp, Glycine max
  Clone ID: jC-gmfl02220132ac11d1
cagcaccaacagagttacagtacgaaatattctgcaggtgagtgcacactttcattcatacaatgggttgacaatccacacgtaaagttacaattaacaccaaaaacaacggccaagtctttttctattatgtccttaaatatattaaatcaaacgaggccataatattttattatgaatgtctctctatacacaaacctccatgtccctcttaaacaatttacaataaccaaaatccagcagatactggtattataaactcttcaaccttctacatgaacaacgccctacataatcagagaacttcacctcttctctccacacaaacatctggcagcttgcagagcagaatatgtgaggatgatatcagcaccggcccttcggaggcacatcagtgactccatcataaccttttcttcgtctatcattttgagagcaccggcagcctttatcattgcatattcaccagaaacctggtatgctgcaattggcaaaggagaattatccctgagcagccttatgatatccaagtaaggaagaccaggcttcaccaagagaatgtcagctcct

SEQ ID NO: 74955 - DNA, 304 bp, Glycine max
  Clone ID: jC-gmfl02220132ad02d1
aggcaaagggcgtattgataaaaaaccatatattgaaaccagtgcttggtgaaattctcactcccagcctgaattcaatcccaggcttggatacaacttttattagaggtacacgggggaaacatacccaactctcggtgggaaacaaagtctgatacatgaatgaaaaaacgtttctttctccaccttacaaaaagggctcccaacaattgccagccttcccacatatccaaaactatgtcagtatcttattcctgctggggcttcttggaatcagtggtcaacacatctaggggggcgggag

SEQ ID NO: 74956 - DNA, 275 bp, Glycine max
  Clone ID: jC-gmfl02220132ad05d1
gacatggaacattttttataatcttatataactaaatactctcggatctattgatatggaatacgaacagaataggcctttaagatcctccaataattaggcactgggagtacactgaattctatggtcctaatagtaaaatataaaatatgaatccccaagtgtgaaagaacaatttcatagcatatacttgggtagatcctccaatcaagcttactccaccccttttcgtagcattcttgcaaacagggacaagatataactgacaaattcta

SEQ ID NO: 74957 - DNA, 520 bp, Glycine max
  Clone ID: jC-gmfl02220132ad06d1
ataattaaggagagttttttagaaaagagattgctattgtaatccatcatggattcagacaatagaatctcctttttctactctgatatctgattcttaatacacagaatgaaatacatctgaaatgactgaaggatgccatgcacttttggcttgagatagtcatgtccatgccccacagaacagagaggcttaaactactgattgctagcaaattatggaacacataatactgtaatagccctttcgtgggaatgatacaaggccacgacccaattaatcaggaacttcaaaatgtcccaaatgaaatggggatttacttgtagccagaaagatcaattgtactcaaagacacaagtgaagacccccgcttgcaaaaattaatgttccatcaatcaatctagagctctagctcagagtgatcatcatcagcttgttcagcttcctttgatgttgatgtcctgtctggctctgactctgagcgaccatcatcggttgcagtagctttctccacagactc

SEQ ID NO: 74958 - DNA, 319 bp, Glycine max
  Clone ID: jC-gmfl02220132ad09d1
aacatagaaggctaggggggattatgaaggcactaaaactcataaggaaggagagaaaagaaaaattaggcggaggagatttccccggagtatggactacaggaatgatgcatcgtggaccagatatgacatggaacaggacatggttgagggcgcagctgctaaccatgattggctgggaggtatattcgacaaggagtactcgttggacatgtacggtagtcgaccctaggccagaagcactgaatccacagccattagatgcacaggcgcgtatagcgctggcgaagctagccaaaagaacaggctgaatcctgag

SEQ ID NO: 74959 - DNA, 588 bp, Glycine max
  Clone ID: jC-gmfl02220132ad10d1
aaagattaactatgatcacgaacgaaaccattaatagaaacaaaaatgaaatggtgttagtatcaccattttgttcgtctctgaagacaacatatatagaacatatatagatgcccttaatgaatcgaatgaatctttccaaaatcgcaaattagatgtttgtgaattaattacatatgaaaaataatgaagctataatctcccattatttctgaatcacagacccatatccaatctcagttcagcctgaaagttaatctctgatcatcatgaatgacagtatttcaccacaaaatcccggtgatgaaactcatgtgcccctagatttcagacaaatctaagcgatagtcccagtaattttacgcagatgacacagcttcaatggcgctgcctaggggccatgctgcctcaaccagggcatcgtcgtatttaactttcttcaccaatgtaatctcttgccatggatatataccaaacccatcaacgagtagtgtatactggtatataagatccatgcaaagatagggaaagttcccctcatcaacacgaggaatagtggatttggcattctcaagttctgttggcatg

SEQ ID NO: 74960 - DNA, 489 bp, Glycine max
  Clone ID: jC-gmfl02220132ad11d1
attatctattttttttttttttttctttgtggatttggtttttttttacaccaaaaagaaaatctggtgatgacaacataaatagaacatatatagatgcccctaatgaatccccggaatttttcaaaaggtgaaaaaaaatgccagtggaccgctacgtacgaactgaaggaagctattatcttcaaaatggctgaatcacagacctatatccacagggagggaaaccggaacgaaaagctttgaccgggatgactgacagtggcccaccacccaagggcggtgatgaaaactacgtgccggtagacaaaaggcaaaactaagcgatagttcccaggcccaaccacgaaaggacacaggtcccctggcgctggctaagggccatgctggctaaccagggcatgggccgaaaaaactttgttcacccatgaaatcactggccatggataaataccaaacgggtgaacgagaaccgcacactggggggaa

SEQ ID NO: 74961 - DNA, 579 bp, Glycine max
  Clone ID: jC-gmfl02220132ae03d1
ggaaaacaaagagaaactctaatcccaaaagtgtggctcctgttgacctccaccctctaattcaagtacctctgtacaatctccataagagaaaatgcctcacacgaagcagatattcaatgaatgccaacccaccccaaggcttctggggagctggatttgcccatggaagatgccaaccatcactttatcttttacccccaccatcatcaataccaatttttttctcgttatttatgtctttatctgatggtttgcttattagaatattagtctctgacacaagtttaagtgtactgtggccagttcattggacaattgtagatatatccctgctagatctgttgtatttcatgtggctcttaacaagttgtccagctgcaatagcagacatgagcgatagctccccggcgaggactgaaccggctacaatggtggccagtagcctagaatttgcacccggagattctttgttggcacccttgacaccaagtaaattaagacatgctgactgagatgcgagttgtgtgccacctccacagtaccaaccttaatggagggcatggtcacggaaacatg

SEQ ID NO: 74962 - DNA, 101 bp, Glycine max
  Clone ID: jC-gmfl02220132ae04d1
gtattaaaaggcttaccatataatgctatgtagggatctgacaacattagagctcctatggaaggagcacaacgaacacatacgcgaatctgcatgcacag

SEQ ID NO: 74963 - DNA, 137 bp, Glycine max
  Clone ID: jC-gmfl02220132ae06d1
attaataggtttaacatagaaagctaaacgggggtttgacagcactttcactaatatgtaatcaacataattaaaaaagagaggaaggaggttcacccggataattgaatataggattcatggcatatttgaccaga

SEQ ID NO: 74964 - DNA, 95 bp, Glycine max
  Clone ID: jC-gmfl02220132ae07d1
ctatgattaccacagaaacctagggggcattataacaacactagaacacattaggacgcaacgaaattaaaaatgagaccaaggaggttcccccg

SEQ ID NO: 74965 - DNA, 83 bp, Glycine max
  Clone ID: jC-gmfl02220132ae09d1
aacatatggggaactattaacacaattaaactaataaagaaacagaataattaaaaaccatacaaaagaaataaccccgccaa

SEQ ID NO: 74966 - DNA, 368 bp, Glycine max
  Clone ID: jC-gmfl02220132af02d1
ggcaaactataggatcttacatatagcaatggctcaaggatttttcagtcaaaagttttatatcaccttcaacagaattaccaatttactagcctgaggtgttgtgcaatactggcattaaagaaggctgccttctgttttcttacatgggattgaggagttacttgatcaaagaaccatggttgccattaggtatactacaaacccagcctgaacatttgtaattttctgcattttcacgctttacgcggatgactctagcaaaatacgtgatttacaatccacctaatccaacaagctagcattctgactcatcattacaggcacttgatatacccccgacacagaaactacgccccttattattg

SEQ ID NO: 74967 - DNA, 514 bp, Glycine max
  Clone ID: jC-gmfl02220132af03d1
ggaaaacaattttaaactctaatcccaaaagtgtggctcctgttgggctccaccctctaattcaagtacctctgtacaatctccataagagaaaatgcctcacacgaagcagatattcaatgaatgcccaccaaaccccacgcttctggggagctggatttgcccatggaagatgccaaccatcactttatcttttacccccaccatcatcaataccaatttttttctcgttatttatgtctttatctgatggtttgcttattagaatattagtctctgacacaagtttaagtgtactgtggccagttcattggacaattgtagatatatccctgctagatctgctgtatttcatgtggctcttaaccaagtgtccagctgcaatagcagaccatgagcgatagctccccgcgaggactgaaccggctacaatggtggccagtagcctagaatttgcacccggagattctttgatggcacccttgacaccaagtaaattaaaacctgctgactg

SEQ ID NO: 74968 - DNA, 613 bp, Glycine max
  Clone ID: jC-gmfl02220132af04d1
gttcaaacttccccttccaatttaatttatttgtagtagcaagttttaagtacatcatggaactgatattgaaatgctcttgaatgagggagagggaccataatgatcaaatctaggagcacaggttcaacccaacacaaaatctttgcatcataaacgtgatcaagcttgtttcataaaatctttaatttaattcataatctataatctggcacttaggaaattgtttctggattaattatgcatgcaattttgctactgggtcatgccaaattcatgtctttgttgaatatggattcagagatatatgcttgaacttcttctagagttctcccttgtctctggtactagttttgccacgaatagaatggtgaagccacatatgatggagaatatgaagaaagttcccgctgaactccaactcatgaggaagttaaaagcgtatgatacaatccaagaacacaaccagctagccaaattcacaagacttccagccgagcccttcacattaatgggaaaaatctcagacattataaccaaggggattccccccatgccaagcaagaatgatcctgtatatgccaatacaccaacatgcgtgagaatggaactt

SEQ ID NO: 74969 - DNA, 613 bp, Glycine max
  Clone ID: jC-gmfl02220132af05d1
gctccaaatgacaatgtattcaaagacataatacaaatggttatataataatatagagacccttgggctcataatgaaactgccaaaggccaaagcaggataaaccgttcttacattctcaagcatgaagtgctgagcattactaaaccacatatgacaagtgccagtagtttctttcttacccatttccaaaaggagattagccaatcccctgccaagacaatgagtaaccgttgcaaatcaattattctctcttcaaaaccaaggacacctacgggacaaaacttatatgcagtttcttggatgcgtttggttttttcctccaatcagatttgaagttttatgctggtaatccacataataatgatagaaaaactccaattctgataggagaacaacaccaagagcacctatgcaactatatataactttcatccctacctaccaatgcacctccatcaaaccatcaatgacagcaaaaccacaggaagctccactcaaatccccttcatccatgagtgttaacagcctaccaaaccaagttcttgggaaccggcttggaaccatctcttgcctgcaaagcagcattccctagagtctgaatcgtcagcac

SEQ ID NO: 74970 - DNA, 95 bp, Glycine max
  Clone ID: jC-gmfl02220132af06d1
catattatgctaactgggggtcacaacacaattaaactcgtctgtactcatcataaacaaacatcctgcacaggagcttcaacatgaatattgac

SEQ ID NO: 74971 - DNA, 213 bp, Glycine max
  Clone ID: jC-gmfl02220132af07d1
caaatggggcatttcataatgaatattaccacttagtaagcattatactgaacataaacagtgacgatattcaacaagattattgtcttttgaactgtagccttttaaagccttaactactttgaatcacactatgaagtccggctctgcttttaaccatgacctactttgtaccatatttgtcattaaatggtcgctgtccatacgcgctaa

SEQ ID NO: 74972 - DNA, 97 bp, Glycine max
  Clone ID: jC-gmfl02220132af08d1
atcatattatcataggggggatttggtcagcactagaactcataagtacgcagtgtaattaaaaagtcgagcaaggaggttccacctgattatttaa

SEQ ID NO: 74973 - DNA, 528 bp, Glycine max
  Clone ID: jC-gmfl02220132af11d1
aaacagaatttacgttcacttgttccctgtaagttaaattcagatcttatcactcgttaccacagttccacatattgtacaagaccctaccaacatttttgctgcccattatgggctttggggtattatcctaaactaaccccatttcaatgggtgaacaaccctggttttcaacatagggggccttttctagtttctacccatccttggctaacaaactggactctttctattcggtattggtcttctcagccaaccaatctgctatcccttcagctaatgtttatggaaataaagaacatgcgcattcaaggaaccacatggaagattgacaacagattgcagctaatgaagcatgattaaactcattcaggtcgcaatgcaaaaactctgtttgaaccccataacacccttatgactcctaacttagtttcagcctctgcaaatgtgttgccagtggcttctgatggatagggtagccgcatgcctttatcagctttgagctcactaatatccacaacatgggca

SEQ ID NO: 74974 - DNA, 636 bp, Glycine max
  unsure (1)..(636): unsure at all n locations
  Clone ID: jC-gmfl02220132ag03d1
agcttgtataaaacttgactattccaaatttcattaatgaaggtgtgatacaaaatgtcaaaagaatagaaacaagagatattcttacaagttacaaacctccggcattgatacaaacttacatctgccttgaatacaaaagcaaaaaactggcaaaaaaacattatcaaggtttaggagagtttactttcaagggaaaatcactttcaatcctccaataaagagggaaatgtatgcaggctggagtcatagacaatgctgataatcgtcaccagtcaatatcccaggacaggtcacttttatttgttcaatcattgccactgtccacaggctcttacagtggaagacaaattcatttggtcttatacttcaaaattcaaactatattgaaattgggtatgcaaactttttcaacttttcctagtgtgtcttgatcatccaccaaaacttgttgagagcatcataactgtcctttcctcaactgttacatctactccataccaggtaccagctgctaagtctcatcataactcgatgttcttacagccacatanaatggtgcctaaaattcagaagtggtatatctgagcatgaacagctaaacttatacctacaagaaaacgagaagtatcaata

SEQ ID NO: 74975 - DNA, 375 bp, Glycine max
  Clone ID: jC-gmfl02220132ag04d1
ccccaaaaccaaaaaaaagattaaagggggttaaaaaaaaaaaaaaaaaaccatccccctcccaaaaatcccaaaaaagtcccccgaaaaagtttttaatttccccccaaccaatttttaccgaaaaaaaaccccccggggatagtttcaccccggaattttccccgggaagggtcccccaaaaaccaaaaccctaaaacggtgaaggcaccccccctttaaaaaaaggggggaagcccccccaaattttccccccgggctaaaacccccccaaccccagaaccccaattaaaaggacaacccttggggagaaaccccccccgcctttggaaaacccggctttcccatgccccccccgaaaggtccccggcccaa

SEQ ID NO: 74976 - DNA, 554 bp, Glycine max
  unsure (1)..(554): unsure at all n locations
  Clone ID: jC-gmfl02220132ag06d1
actatgtaacaagcataagcgcttatatactttgtgcaatgtcaagtatatcatatacaaattacatgagtatgattatgatagacggtatttaaatgaccagtaatacaaatcatcagtatactatataactgggtaaggtgtttatatacattagtcgtttatacaacataacggcgaagataatccaatctagctgaatgcttgagcttcataagagccttgacttcgtgctttctaaccatttccctagatatattcaagttcccagcaatttctcccaatgttctgtcacccttgccatcaagtccaaatctctgtctgatcaccaagctctccttcggcttcagggaatcaagcacatcatcaagagcaagccttagtagagcaggttgtttcctattatcaccattaacaccatcatcatcaacgatcccattaatgaactcctcttgcgtggttgtatgtctcgagttcagagaaagaatggattttgatgccttaattacgtcatggtatctttcaggggatatatgaactctntctattatttc

SEQ ID NO: 74977 - DNA, 607 bp, Glycine max
  Clone ID: jC-gmfl02220132ag07d1
accataaaaagattcttcagacattatattcagacaatttaaaagaggtttatgacaacataatttcaactaaaatttgaattctctcgccaaattttttgactttcacttagaaccgatgatagattattaaataatggatcaaattataataacacctattgagatttaatctaattacacatacacccccgttgtctgaagacattactttgacccttgtgtgatggtgttaaacaaacgttaactttcaaagttcatttacgaaaatgtcctcctcagatatccggaaatccaaaattgccattctcagtgatgactaaatttcggacaacttgctccactaacatcctatttaccactaacatattcgagaaggtgccgatcaagctcaaaatgtcgagaaagaagcccctttgtaattttagggtgaaaatatgcagcttcaaaatccaactcaggaaagcgggcaacttcagctgcattctcaaataagataaatgttggaagctggcccatgcttccacttagagatattccaaatctttcagcagcattgtgaaagagaccaagatctacttttccaatgataaatctttgcttgata

SEQ ID NO: 74978 - DNA, 485 bp, Glycine max
  unsure (1)..(485): unsure at all n locations
  Clone ID: jC-gmfl02220132ag08d1
aatcaaagcaattttaaaaattttcattaaaaatatttccggtagacctccaaagataaatacaaagaataacaaattgtctacggactatgaccctcatcatcacactctctaacagtactcaattgatgatgcatggatatgtgtttgtgtaaattcaattaagccttcatgaagctaagtgcgtgaggaacacggagagctttcaaccagtcgcttccaccgttggctccagcctgtaggaactgggcaggggtgaattgggtagcttcttcgcggctaataagaccacggtaacccttccacttgatccttccgttaacgttagcaccaggtccatcgttgttgtattcagcatagtacaaggtgtcttcgaagtgttcaccggcccatgggcaccattctttcggggtgaaggagtcacccactgtggattccatcacacccgtcttgagaatngcttccatggccttccaagtatgact

SEQ ID NO: 74979 - DNA, 414 bp, Glycine max
  Clone ID: jC-gmfl02220132ag10d1
aagacaaaaacagcaattccttgggaacaaagggaaagggcctttcggaattagggaaacccaaatacgggggggctctgcttgatctaaccacactggcaaatgaaacggttgaaacctacactatacgacgaaccctcaagaatcactagggacactgggccaaaaccaatcttagctcgtgattcacccgatcacaatatccgcaactgatgacaacagctccctatatggtcaaccaatttaattccaggacgaatcaagcttccgggccaagaagacttacattggtgcgaaaatatatgcattcactgcgtaaacgaggccagctgcaggctattataggaaagacttgaacccttagactaccctttggagccaggccaacatacttcagaacctggaccatgtttt

SEQ ID NO: 74980 - DNA, 615 bp, Glycine max
  unsure (1)..(615): unsure at all n locations
  Clone ID: jC-gmfl02220132ah05d1
actatgtaacaagcataagcgcttatatactttgtgcaatgtcaagtatatcatatacaaattacatgagtatgattatgatagacggtatttaaatgaccagtaatacaaatcatcagtatactatataactgggtaaggtgtttatatacattagtcgtttatacaacataacggcgaagataatccaatctagctgaatgcttgagcttcataagagccttgacttcgtgctttctaaccatttccctagatatattcaagttcccagcaatttctcccaatgttctgtcacccttgccatcaagtccaaatctctgtctgatcaccaagctctccttcggcttcagggaatcaagcacatcatcaagagcaagccttagtagagcaggttgtttcctattatcaccattaacaccatcatcatcaacgatcccattaatgaactcctcttgtgtggctgtatgtctcgagttcagagaaagaatggattttgatgccttaattacgtcatggtatctctcaggggatatatgaactctttctattatttcttgctctgttggtgacctctngagctcaaatgttaactcagttttagctttctgaatttct

SEQ ID NO: 74981 - DNA, 575 bp, Glycine max
  Clone ID: jC-gmfl02220132ah06d1
gacaaataaatcttatttttccattgataataccatggaaaatttcatcagtaatgcatatcataaaaaaaatatccgataaattctatgttagctatataaatgacaaacataggcagagtaactaaaagactaaaaccaacagaaagagacgtgacaaaaattacttgagcacggtaactgaagatgcccacatagataaagagccgccatccaccaaatctctgatcacacactcacttcttggatttcttcagtgcttgagctggctgggatgctgctgcaggtgtagtagtttgtgctgctgatggcctctctcctggaccttgggccaagcgctcctccctccgagcatttttcctctccctgctagccttgttcttggcacgcttcgcctcaaactggtcagacaatgtcttttctcttgccttctcagccttggacttgtgtatgctctccatcaagactctcttgttcttgaaaacattacctttcaccttcatgtacatgtcatggtacatgtgcttgtcaatcttctttgattccctgtacttgcgaagcaagcgcctgaggac

SEQ ID NO: 74982 - DNA, 491 bp, Glycine max
  Clone ID: jC-gmfl02220132ah07d1
aatcaaagcaattttaaaaattttcattaaaaatatttccggtagacctccaaagataaatacaaagaataacaaattgtctacggactatgaccctcatcatcacactctctaacagtactcaattgatgatgcatggatatgtgtttgtgtaatttcaattaagccttcatgaagctaagtgcgtgaggaacacggagagctttcaaccagtcgcttccaccgttggctccagcctgtaggaactgggcaggggtgaattgggtagcttcttcgcggctaataagaccacggtaacccttccacttgatccttccgttaacgttagcaccaggtccatcgttgttgtattcagcatagtacaaggtgtcttcgaagtgttcaccggcccatgggcaccatccttcggggtgaaggaagtcacccacggtggattccatcacaaccgtccttgagaattgcttccatgggctttcaaggtatgacttcac

SEQ ID NO: 74983 - DNA, 407 bp, Glycine max
  Clone ID: jC-gmfl02220132ah08d1
gaaaaaaaagaatttttaaaaattattattaaacatatttgcggaaggccttgacagatgaatacaaagtataacagaattgtgtacaggctatgaccttgaacatcacactcaatcgcagtactgaaatgatgatgccttggatttgtgattgtgtattttcgaccaagcctttatgaacctaagcacgtgcggcacacggagagcttgcaagcagactcttacaccggtgtctccagcctgtaagatctgaacagggatgtattgcagaagctcttatgaggctaacatgacctcaagtgtcccttccgatagagcgttacgttcacgatatcaccagttacattgacgcagtatgaagcattgaactatgcgtctttgaacggttcacctgcccatgggcacca

SEQ ID NO: 74984 - DNA, 630 bp, Glycine max
  Clone ID: jC-gmfl02220132ah09d1
catcattacaaagtttccatctaaaattagatattctttgtttcttcacggttttggacatgcggaaatttttaaacacaaaaacaagtgggattagaatgaactcacaacaatggttaaggaaacttttcatacttactatacatgacagacacttaatatgtagtattcacaatgtctataagcttatattcttccatgcctcagttgctgacttcatccacaacacagaccttgtaatcaagtgaaagtcgtttcatcgaataccatcacctttccacagacaggacagttgtcacttctctccatccactcataaatgcaaccaaggtgaaaatgatgagagcattttgtcattatctttggattctctttagagtattcttcaagacaagttggacagacatcctcctcctctgatgatgcatagacaagaccaactccagttgaatattttgttgattgaagtcttagtgaggacttaaaacggtattcctttgatccagcttcacaggcactttccttccattggtctcctgaatttaaggattctggatccacatctgcattacttttaaaggttctgttcctcatttgaatgacttgaacccttttaacgccttgaaacta

SEQ ID NO: 74985 - DNA, 379 bp, Glycine max
  Clone ID: jC-gmfl02220133a04d1
ccagaaaattatcatgaatttcagaaaacgccagggatgcgactaaaaaaaaaaagctacaaccaacaactcgcaaatagaaccacgaaattatagctaattagctaattatccattaaacactgtcagagcaatccgaaaggaaaaaaagagaaaaaacatagccaactccgttccgcatgatataaaagtttaatcaacctcctccattttgctgccctgaggatcagtttcagcctcctcctccagtgggggcatataagcatcagcttcagctgcatcctcggcgatgctcagtccaagcttcaacattgtggggatcctgtttccaaaagtgttgggttcgtcaaggctgaaaccacaagtgagaagagcagtc

SEQ ID NO: 74986 - DNA, 106 bp, Glycine max
  Clone ID: jC-gmfl02220133a08d1
agccctttgagttttttcttttcttattttcttattctttctctttagttctcttaccttttttattctgaacagcgtttcgatcgggaaacccatcttcaaacaa

SEQ ID NO: 74987 - DNA, 306 bp, Glycine max
  Clone ID: jC-gmfl02220133a11d1
atgcccttttttttttttttttttttttttttttaatccaaacaataggaaatgacttccattacaagctaaatcaacataagcataacacaatatgagacaatatcgaaaaggacctggttacagcgtgtctcggtactgtacaagacatggctatcgagagcagactcacaagcaagttcaaggtgaaacttagtttagctacagtacatacatgatacaaaatgagctatctataaacatactagaattatgactgcagctcttttgaacaggactagcagaattatgctgatttgcaaaccc

SEQ ID NO: 74988 - DNA, 390 bp, Glycine max
  Clone ID: jC-gmfl02220133b06d1
tgcccttgtttttttttttttatagttttctaatatccatatttagtgatttccccctatgggttacatttatcgatatgaacaattctaattgttcgaattattgggaaacatttctacttatcaatactcaaccttacccttcctttaccgaacattcaaattacaactcccgaattatccgcaaactgatctattaacaacagcctatctagactacccggtgcaaattccccgcaacaaaactgcaacgcgtgagcaagcaccgtgcgcaccttcaaaacatacactgttggggactgtctacatactactaaagccttaacttacagaacagaccactcggcacgaattgtcccatttgtcgcagtgttaactgcaacacgaccc

SEQ ID NO: 74989 - DNA, 418 bp, Glycine max
  Clone ID: jC-gmfl02220133b09d1
gctgcccttttaccttgttctctttttgtggttcattcatctatctctgatgccacttgccgtccttaaccctaccgtttctggaatgccctacccatctgaccagttccagaccataatcgctaactctcgcgacatgaaccctaatctgtctcatcggagtccccgaatccggatgatgacgaaccggcccatgtccactaagcgctgtcagcgcatcccgccgctcttcatacgcctatcccttagtcctaatcatgcggctgccacagctctgaatgggtcaggtccaaagactaatccgcgggctaccttggacgcacgggacgccggatccagcgccgaacactgagagcctcgctctggagacaagtccgtagacgggaaccgacgagagaaaagactgcacttcaatggc

SEQ ID NO: 74990 - DNA, 257 bp, Glycine max
  Clone ID: jC-gmfl02220133c07d1
aggccatgccctgtgatcttcgctttttttttttttttttttttctttcttctttagattaatttgtcaacttgggctattgcaaggagaataccccgaaattaataatttctatgttgaggagtgctagtgatctgtctatgcagaaccctaatttaggctataacgtcttttcctctcatcagctacaggtgatgggggtgttcggaagagaaggccaaaaccatgggggcatgcatcaaattgcagataagcat

SEQ ID NO: 74991 - DNA, 229 bp, Glycine max
  Clone ID: jC-gmfl02220133c08d1
tgccctttggtttttttctttgttttttttttttcttttctttgttttttggtttgtcatttgttattgggaaaaacttatgttccctaactgtgcgttgccgagggattccagcatgttgtttgttattggatgggttttgaatttgcaccgactggaaccctgaggccggggagtagccaacgatagctcctcaactggtcacttgttccttcctttgatgcaattc

SEQ ID NO: 74992 - DNA, 428 bp, Glycine max
  Clone ID: jC-gmfl02220133d01d1
cttccccgtgaaagagcaagccaagtttacattccagggacaggtttttttcttcgttcaattttaacaacaaatggcaccacaaaataaaacttaaggcattaatgatgtttatggataaaccttctttttagtgcctccagaggtcagcataaaacgcaaagcaaccagtctggcacgtgcattggcatttacatgtttgaagcgttcaaggccattaccttacattgttcattcaatgcaagaagttgagcctctttcttgtcaagcagtgcattcaacctgacattctcttccataagtttgtgaacttcagcctctttctgcattttctcaccctctaattgagtagtctttgcaactagcttttcaaacagcctctcaatagtttgaaattgcttatctgaataaagcaaggtttctcttac

SEQ ID NO: 74993 - DNA, 195 bp, Glycine max
  Clone ID: jC-gmfl02220133d07d1
aaaaagttacaagttagggtttcatcaattcaaattttcgtttaacaacgatcttcaacttttttccggcgggcacaatcaaaaggattgccgctactgtttgatatgccgaaggggaaacaaacttgagtactgcctggaaaactgaccttcacaattgtacgggaaaaccttcgagaatcaatatgcctcact

SEQ ID NO: 74994 - DNA, 259 bp, Glycine max
  Clone ID: jC-gmfl02220133d08d1
caccaattcaaattttcgtttgaaaacgatcttcaaccgttttccggggggcactatcaaaaggatcgcctctagtgttcgatatgccccaggggaaccaaccttgagttctgcctttaaatctgcccttgtcacttattcaggaaaaccttccaggagcaatatgcctcactgaaaggatctgctaccttgagggcccccaaagtcttagccgttcatgcgtcaaccttacatcccttcacgctcccaaacatcgccc

SEQ ID NO: 74995 - DNA, 390 bp, Glycine max
  Clone ID: jC-gmfl02220133e02d1
aaggggaaattatggtctcctttattcattatgcgcgagaatgggtgtcgttaattgtataagaatcaagatgaccaatactacatttgtgtagcttaacataaaccacttgatcaatgaaagaaagattagattggcttcattatgtaacaagttgcacaaaaatgtgattagtgtctgattcttaattatctatggctaaaaaggcaagtgtctggatcaacactagtcggttttgaattaagaagtgggtgaagagctttgacaacaatacgcatgtttggcctaaagacagcttgatatggtacacaaagtgctgcaactgctgctaacttagcaatagccttgagtgggtatccattgtatacttggagatccacacattggttc

SEQ ID NO: 74996 - DNA, 256 bp, Glycine max
  Clone ID: jC-gmfl02220133e11d1
acaaaccatgatttgctgccttgctgagtatagcgccattgcgatagagacacgcatgtgcatctcaaaaccagctggctggtccgctgcatctcatcaacaatacgggcttacacgttccacagcacaactcacatctctatacagcagatagcaaccctgaaccgcagtatgtattgaactcttgctagaggtccaaacatgaaatatgaccttggaaggatcgatggaaaaaagccactggcatgagtcttga

SEQ ID NO: 74997 - DNA, 310 bp, Glycine max
  unsure (1)..(310): unsure at all n locations
  Clone ID: jC-gmfl02220133e12d1
attaaacttgattaattagagttttttttgcttataatatgtctttgctcgatacaaatcgccgacttatgttaggatcttgtcggggaactaattcacaaacaaaacaataggcataaagttaactacaaacacaactaacgcgagtatctattcatgggatccatcattttaatagctttgatataaaataacccatgcatacaaagtagcgctattgagttctagatatgacttgcaccagagtgaggaaacctagtgttgcttgcccttcaggcctacctgcatcttccacagncttcttgaccct

SEQ ID NO: 74998 - DNA, 412 bp, Glycine max
  unsure (1)..(412): unsure at all n locations
  Clone ID: jC-gmfl02220133f08d1
gacatgccatttggcattatttatttgataatacgatctcttgatgacattcatcacaggtgatatacaatgaaatctagggaaacaaacaagaaaaacactagacatgtcaatggaacactaaagtcagatcacttgagatggaacttttgcaaccaaacagctgagaacttggggtatctcttcaagctggtcttgttatccacatatatgagcccgaatcaaactgggtaaccagcatgccattcaaaactgtgcgaaaaagaccatgcataatagcccttcaaatttacaccttgcttgatcgcttgaagatagaatttaagatggccatcatggtatctaatccttatactatccttgcgggcttcatagactggnattgagtcattacttgattgagccatgccat

SEQ ID NO: 74999 - DNA, 248 bp, Glycine max
  Clone ID: jC-gmfl02220133f12d1
atgcccttttttttctttttttgtttggatttttgtttttattttcatcttttgttttttttacttttttgttcactaaaaccagcgttattccatgcccaaaggctttcattgataaacaagaggagactatgtaagcccaagctgaagccgcccataaaaaaaagctagattcctatgggccatagccccacgatgttttgaaccaactcaacaaacatgttcttatggcaccggtaaactggcca

SEQ ID NO: 75000 - DNA, 329 bp, Glycine max
  Clone ID: jC-gmfl02220133g06d1
aaaccggcaactgccatgatttgccaattatccatgcgtgtcggaacattatagacctgagctgatttaaatacataaaattatgcatacataaagaataactaagacagcttaataaaaaactagcggtactgaagttctgaaatacagaacaactgtggacacagtatgaatgtaaaattaaaacacgatgttttgaatgaggtcgctgaaccacgtataaacttcgggtattacaaaaccgttagtcatcctcaatagcagataacagagacttatccacagaatcggacattgaactcgagccacaagcgaaaccttgaaaattg

SEQ ID NO: 75001 - DNA, 421 bp, Glycine max
  Clone ID: jC-gmfl02220133g07d1
aaacaaagacatttatgtaattttattataatgtatatgtacgaaacaagtactctaatatgtgtcttcatcatccatgaacactcatttcagtatttatcttctatccgttacgaaattctgtccggaaatatccaagagtgtaaggattttggtcatctgaaaccaaaatcgcacgtctgcagatttaaaaagggcacacaaaacattattcccatgtcaggcaactggcaaggtccatgcttagcaaaagacggcaacattgacagacagtataaagttgaaattaccaccacacttctatttggcatccatggaaaagcgctctagacaagagcctagggaactctgtatgccaattccttcatagcatgaccaagcctattttcagactgaacactctgaacccaattggcattga

SEQ ID NO: 75002 - DNA, 313 bp, Glycine max
  Clone ID: jC-gmfl02220133g11d1
atgccctttttttttttttttttttgctgttagacatatcccttacgattattgtatgtttgggttcgagttaattattcttttcgatattaatcaacccaaattattgatgcaacatccacatgattggaatggtatgaaatccaaacttacagtatacaactgggtataaattgtaatatatttccccaagggaaataaaggatacacattctgggtatggagtgagaagagcctcttatgagcctactctgctcaactgctccttggatgtgctttgaaatatcctgtcaacactcgctacctcaaaacc

SEQ ID NO: 75003 - DNA, 387 bp, Glycine max
  Clone ID: jC-gmfl02220133g12d1
aagtaatagtaatataatatcacttgctttatatgccacaagtaacagacgtagcaatccactatagccatcattgattgtacagaattcattgtaaactttctttcattggcttacctatgtttttccttatacaacttgcacagcaagagcctactagattcaggttcatatacttgtctaaacaccagttgccttctatcaagtccaatgaagctagacatataagagcatactagttccctcttaaaattgggcagaaaaatttattatataagagagttaatcatctttgaacttctgctcacataattagcggaggatattttaaatactttatcagctaattgatgttcatcttcttatgctctgaagaattcattcaag

SEQ ID NO: 75004 - DNA, 214 bp, Glycine max
  Clone ID: jC-gmfl02220133h02d1
acttgactcgtataaaattcggctatgggccaggggtctggaagatattgcgcactcatctgtggttgattgaacatcaatcatccatcgtggattcgagttgctaaaattccgacctgaacctatttctgtgtttccaggctatccgaatacggtgtcctcattatccacggccgaaaagcccacctttgcgccctacccatgccttccataa

SEQ ID NO: 75005 - DNA, 352 bp, Glycine max
  Clone ID: jC-gmfl02220133h06d1
atgccctttttttttttttttccttatcgtatacccataaaaaggccgtggaatctttttggaaacatatcctataatcaaaatccaatttgcattaattatataagggaacttgaaacttaccccggggaaatgattcttgggtaagtcattcattcagtaattaaatcttcgagaatccccccttttgttaattccagttaaatcccttatcacattcacaaatatacattaagggggaagttctatgagaaacttgcgtattctcttgctttgtttttttaccaaaatgggaccgaagttgcccatatattgagggggtaaaaaatgaccccatatataacataaacct

SEQ ID NO: 75006 - DNA, 350 bp, Glycine max
  Clone ID: jC-gmfl02220133h07d1
tgcccttcttgctaatgtttttttttccccatacgccatgctacactatgtccaagcttgagattaatagcagggacacatgtccgctgttgtttaccactgatcaatactgctagccgagcccaacgaggggtgccctgctaacctggggcacatcaacactgtagactgcggccaacatggaatatctatcttctaaaaatcaggtccctgctttaatcgctccattagcatgagcgccctggctactattcatggcgacgacaagctattcagaattcacatgacagggagcgagattagatggggactgccagatgtcggatgctacatcctctaaactcatgcct

SEQ ID NO: 75007 - DNA, 301 bp, Glycine max
  Clone ID: jC-gmfl02220133h09d1
tgccctcttgttttttttttaagagaaagacagagtcgttaaacatttaatattggtggactataactcacagcatcttcaatatgatccgaatttgtccacacactatatagcaagttgggtgacagacagagcgagagacaacagagcttgttggacctaccatgtgcgacctatgtcagcctaacggatctatgggaatatgccacatattaggtgccaaaagttctcatgcagactttaaggcgacaccttatcaattcctctagctagcagggcctactggagcataccgaagcca

SEQ ID NO: 75008 - DNA, 202 bp, Glycine max
  Clone ID: jC-gmfl02220137c07d1
aaaaaaaacaccctaatagttaacatttggaaaaaaaaaacccacaccaagagaaaaataagaaagaaaaaaacgcgagacccccccaaaaaaaaaacaaaaacaccaaaaagccggaggaaggcacaaaaacgccaataccaaacaaaccccgcccaaaaaaaacggaaaaagtacaaacaaacgccaagaacaccaaacc

SEQ ID NO: 75009 - DNA, 221 bp, Glycine max
  unsure (1)..(221): unsure at all n locations
  Clone ID: jC-gmfl02220137f10d1
atataaaacacactataatttttttttagggaaaaaaaaagccacaccgggggaagggtgggaatgaaaaaaccgacacccccccacaaaaccaaaccagaaaaaccaaaaaggnagagcaaggggccacaacgccaaagcccacaaaccaggcacaaaaagaagcggaaaagcacaaacacacgggaaggggacgaaacccaatgaaacaacacccaccc

SEQ ID NO: 75010 - DNA, 370 bp, Glycine max
  Clone ID: jC-gmfl02220137f12d1
aaaatgtattttgagacgagaggccccaaagagagcgaggggggaaaataaacaacacaaaaagccaacctccgcgcggagactccaagcagaagaccacccccagggccagagggcaacacgcgccgaaaacaggcacgacacggagaaaggggcccgacaccaacggcaagggaacaacacgagaacaggaggcccaaacaacaacaacacacggaccgcagagccaaccacgaaaacaccacaaccaacccgcggaaatagcagaccgcaccccaacgtcccccgccccagagaggaaaacatcaagcaaacagggggaaagttccaattaccaagaaacctggctcaagggatgaaaaaatagttg

SEQ ID NO: 75011 - DNA, 451 bp, Glycine max
  Clone ID: jC-gmfl02220137g09d1
aactccacagtctaatttttttttgggagccagaaaacaaacaaaggggagcaagtacaaactaaaagacgccacgaccacgacccaacagagaaagaaccagcactaaaaaaaaaaaagacccagaaaggagagacgacccacaaactgcagacggagctattatgaataacaatcaccgtgacagatccacacaatgtttttgtgggaaggttctactcgctaactacagaacttaacttatttcaacaggtctttggcagacttagtaaactctcgccccgcctcctgcggtgccacctagaaaaccttgaccgtcatcgagcgcttctcctgaatgccctcctcccgaccctgcattctgaaaacaaactttttgttgccggtcaccctaaagtgcaaaataaattgccaccgcctgtaactttgccaacaccgccgctaccgaaag

SEQ ID NO: 75012 - DNA, 532 bp, Glycine max
  Clone ID: jC-gmfl02220137h07d1
gtcagagaacttgttaattaagaaaagcccatgaggataccttacccactcattggatgtactttacagtttacacgttgttccgcagatttctgtcttccaagagaagtaacctattccaaataaaattttggcaaaattctttgagaaaaatgttaaatgtccctaatttgatatctattccaaaacctttttcctcaactttgcagtttaacaatttgttgtgactcctccaataaccattctaaattccctctaacaccccatccccacccaaattttctctcactcctttcccttctcatttcttccttaaattagtcgaataaaccgagggtcaagtgagaaattgagtggaagataaggacattgatactgccaccaagaatgatatcatcaaacagtcaatccatcgaacccacactgcttgtaagtcagagattgctttcttggactgatcactatagcacaatccaccgaaacctgaacagcaggagaatcgaagttgatgacgcggatcttggcagcaacg

SEQ ID NO: 75013 - DNA, 521 bp, Glycine max
  Clone ID: jC-gmfl02220138a06d1
aaaaatcaatttttttagttattatcactccaaagtgcaaatcatcctcaatggaacaacattaaggctgttgcagttgagaagggtcacaactctgggtggatatatatagcataggggggtgagattaggggtttaagattgatgcaatacccctaagtatgggaccatacaaaggccttatttggaaagaagttccctcttattctgacattcttgagccttgaagcaacttggggaaatctgtaaccgtggctgtcctagacatcaggttcaggatcattattgaccagtctctaacttgagacggttaaaaatgagtacataaaataaatcttgggtcatgtacagtgatagtttggaaacacagaaaatggaaaaagacccagatactaagaaactaaaactacaattttgatatggaaagaaaggatgtacactgcaactatctggacagattaattcagtcattgtactaataaggaaagtgaaaaaaggatgagaaaaaatggtaatgctca

SEQ ID NO: 75014 - DNA, 79 bp, Glycine max
  unsure (1)..(79): unsure at all n locations
  Clone ID: jC-gmfl02220138c02d1
agccttggtttcttntnaggggnnnnncgggnnnccccgcatagatacaaatnagtaanncncatnnnggggtagangc

SEQ ID NO: 75015 - DNA, 96 bp, Glycine max
  unsure (1)..(96): unsure at all n locations
  Clone ID: jC-gmfl02220138c06d1
ggtcacagttctttnttnnaggggnnnnnnnnncgggggnnnccgggcatagaaagctaanaagaannncnccctnnnnaatncccgcgaagaccc

SEQ ID NO: 75016 - DNA, 448 bp, Glycine max
  Clone ID: jC-gmfl02220138c07d1
gaaataacacacacacatatatggataagggggcactagcagaagtaattgaaagcaacgaatacaaccagcattacagcatgcttaaatttcattccaaacaagaaaagagcagagaggctctgcttacgaatagcagataaagtacacacagagaactacttacttattcacggatccaaaaaaacagtagactagctcttctatttgtcaaaagcataacgggcttggaaactgcacacccttaactagtgcaatcatgcaaaaaatgcatgatgcctcatcatgattgagagcactcacggattaactggaactggacctggaactccaccaccactcccagggtttggaacctcaaaaccagggtttgggacaaacgtgtcatcaccacctggaacgtaaccacgaccagctggtcctgaccctagtcccctaccaccagtgt

SEQ ID NO: 75017 - DNA, 286 bp, Glycine max
  Clone ID: jC-gmfl02220138c08d1
ggaacaagagctcataatttatgaaagccctgaaaagggaaaacaacattgttcagggcccccccctgactaagtaataatacccaggaccttattttataaaaattaaggggccccttaaaggcttgatttgagagcttaatctttatccaagggattaggccgcttaaaaggcctagcccctttgttgcttcccaggagggccctcccttgggccccaacggttccaaagatttcggatccctccttttccagctttttttttttaggtggtttggattcaaaa

SEQ ID NO: 75018 - DNA, 500 bp, Glycine max
  Clone ID: jC-gmfl02220138c09d1
gtgtcatatctaggctattaagagacgctggaatttatgctaatcttgaagacatgcactcactacactgatttgaatagtgtaatttccgtgtccatgtacatttctataatatatttagaagaaaacaaaaattggaagaaggataaaacataatattaataagaagcaaggagctgggggaacttcatgagactaagattccctcacatctttgttctcattattatggggttgccacattttcctttgcctgtggagcaatttcttctccatcacttccaggttcactgccaggaactcccaggcttagcagcacttcctcccacttcttagcaggccccttccaggaaagatcttgagccatgcagttctttattatttctgtaaaagctggagttccatagactgcaagggcccttttgacagtctttgctatagcatccacatcagctggatccacagcatcacattcaacactgaaggcacccatctgaaat

SEQ ID NO: 75019 - DNA, 419 bp, Glycine max
  Clone ID: jC-gmfl02220138d01d1
aaaaaagggggagagtgggagagaggaatgaacattatcccatggcgggaggcacacaaaacatcatttacacccatctttatgggacaaatagtccattcatggggaaggaataagaaaaagtaaagaaagctaggaagcacatccatcattggatggagtatggaagggccaagacgtagagggggaagggggcccaaataacacccgaaatgcccccgaaaaaaaagcccccggggaactgggcccacccatcaacagtttggagctgatcgggctcctttttgcggcccgtcaagggcagcgacggagcaggggagggggctccttcgttgagggaggaaaccccataaattgggaggcaaaggctgaggatcaccacaagcccaccggcggccaaagagcccgcttgcccggcg

SEQ ID NO: 75020 - DNA, 463 bp, Glycine max
  Clone ID: jC-gmfl02220138d03d1
gaacttatattatcagtatcattaatattaattatgattgttgcatattccacatgaactttttaaacgtgatcagcacaaactttttcaaagctcctatttaacatttatgcaactaaagaactaaaatgcttggaactgccatttgacatcgtgcagctatttgcatcctccaaagcctggccatgtgctccaaaagaaaaatatcgattcatcagtttcttattgaaagagccctgcttatagctcaattgtagtgtgccatcaccatccattggtcgattggagcaagagggtcccattatatcaacacgtttttgcttattattcgaagaatgagaagagatagatagttcttgaaaaagattagatgttgaatgaacaggtagaggcatttgtggctttaccttaatcacaccttgtactagacctgcatgaaaatgttttttggctgaaggactag

SEQ ID NO: 75021 - DNA, 494 bp, Glycine max
  Clone ID: jC-gmfl02220138d07d1
gccttacaacttttaacatatatatttcagaattcagaactgagataataatggaattatgaatattcttggtacaagcgaagaagtctttagtgcgattttcaaaccgaaattctataataccatagtaagaactaagaagcaacatgcaagttcagaggtaggaaaagtaaagaatgactgctttcttctcaaataagagtagcgaaatccaaacacaaataagttcatgtaaagagaatttcattggtacatgaactttataatattaaacggggtaagaactcattgtgaccttgaatgaaataaagaaaatgaccttatgcatatttttgcaaataagaagctatcgtcctatcactttccaatgctttttgtctgtcagaagggtagtacaaatgcctatacttcagggtttcatcaccagctccctgatataatcaagaacttcctcgagattcactgtccaagcaactgcaacaggagaataaccc

SEQ ID NO: 75022 - DNA, 508 bp, Glycine max
  Clone ID: jC-gmfl02220138e02d1
caacttaaatagcaatccccgcggaaaggaccaggaacatagtcacttctctagcgattaccagtgttatgaagagaacgaaaggaaaaagatacaggctttctacaaaaatttcaatctataaagcgatgtggaaataggagttcctctatgaataatgagctaaaaatgcaatttcagttatctacgtcctccattttggtgtacttggcttttgcagctttcaccatagatttaatgctcatctacttcgacagtatctgaaaaacgaaacatcccctaatgactccattgattgatcataaatggctatagcccaagtttagataggagctgacgccatcttggagtttcttcatcaaaaatataggtcaagggtgatataagaactccactgcctccaatcgctctcagttgttgtatagacttgtatagtgccttctgaggcacacatatgactatggcataatagtctgctgttaccttcccatcacgcttgcagaaaaca

SEQ ID NO: 75023 - DNA, 470 bp, Glycine max
  Clone ID: jC-gmfl02220138e03d1
ctatgtaattcatgaagcttttgacttcaattggtttcttggttcaacagattcatgttttagcagtacaaacagtagtctctttgattgcataccaagtctgtacttttacttaatcatacaaaggtattaaatgttcatgcaaatgctacaaagcacctttaaggggatagataccacaaccatttttattcaccaacaaagggtctctcactctcaacacgctccctttacttccccaagaagatgatgatccactttccaagcttacgcttcacggaaaatctgccaaaaccacacagctggcacaccaaaacctactacctattttgcacattcattccttgtgcgaatcttgcttatgctgctgaaccagcttgttcacataggtccaacagatccagagtctctggaactgacagctcaagacgaaactttggcccatcataatgatgcaatactggcctgaa

SEQ ID NO: 75024 - DNA, 341 bp, Glycine max
  Clone ID: jC-gmfl02220138e07d1
ccccccaaaaaagggggggggggcccttgaaacaaaaaaaataaaccctccggccccggaaaatgatggaatacccccgatttttgaaaaaaaaaaacccccccctttgggttccccccccaaccttggcgggggcccgatccccctttgggccttttttgggaacccagcaccccagctttttcccccggggggggatccaaaaaaaggggtttaggggctgggaccaaaaaaaaaaggggggccaaccccgggaaacgggaccccttttcctcccaacaaccccaaaattttgcgggggggggccgaagtttccctttggggctttctttttcttggaa

SEQ ID NO: 75025 - DNA, 478 bp, Glycine max
  Clone ID: jC-gmfl02220138e09d1
acccaagaaaaaaatttttttttaaaaaaaaccccgcgaggccccccctgggcccacccctctttgggccccccccccccggaaaaacccccccggcccgggggaaaaaaaaccccaaaacccccccccaggggggggggaaaaaaccccccccccccccttggggaaccccctattttttttttttggggggaaaaacccccccccccctattggaaaaacccctggtttctccccaaaaggccccgggggggccccaaaaggggggaccccggggggggcccccctgggccaaaaaccccctttggggccccatccttttaaaaaaggcagcgaaccccctttcttaaacaaaactcccattggtggaaaaggggggggcccccgcggggcttttccatcccctcccaaaccccggattttgtgttgggggccccccgggggggggaaaaaaaaaaaacctccccccccccccggg

SEQ ID NO: 75026 - DNA, 78 bp, Glycine max
  unsure (1)..(78): unsure at all n locations
  Clone ID: jC-gmfl02220138f02d1
ggatgagctanctnnnaggggnnnnngggggnnncacggctccactctagattctatnctcaatnnngggttaacggc

SEQ ID NO: 75027 - DNA, 504 bp, Glycine max
  Clone ID: jC-gmfl02220138f03d1
ggaaaagcaactaatcatttatttacctaattatgttgacactgataacatgattacagaaagaagtgtccagttgcaaaatctttcaaatcattggatcacactactctaatttaaccaaaaacatacaaacacttagaattcttttatttcataagtagtacaattactaggtaacaatactattatatttcacactatttttgaatgaggcatgtcacttatttagaatcacagtgctatgtcctgaattgattgcaattatccccaagagttggcctaacttttgtggttggccttctgcagtttgagtgacttcaactcctggatcagttctttcaaattgttgtgagaagaccctccaacctgaatagctttcttagcagcatcactaagtgcttttgctcttctcctcatttctatagactcttcaccacccatcaaaacaccaattgcatttcctatctcttccctttttaccacctcatcttcaaactcattcca

SEQ ID NO: 75028 - DNA, 281 bp, Glycine max
  unsure (1)..(281): unsure at all n locations
  Clone ID: jC-gmfl02220138f05d1
ggggcccggggcccctttttttttttccccccggggggccccccccggggggcccggggggggttttggggcccccccccccctcccttggggggcctttcccccccccggtggggcccccttttgggtggggggtttccccccccccttttccctttggggggggccccccccctccctttttgctggggggggggggggcccccccccttggtccccccggggtgtgggggcttnngggcccccctttcccctctgggggcccccccccggcccccccc

SEQ ID NO: 75029 - DNA, 455 bp, Glycine max
  Clone ID: jC-gmfl02220138f07d1
aaacattaattttcttatcaagaatttacttgacattctaaaacaagttgctctcacttttagaaccttccagaagaactactaacggggattcattggttcaaatatatgtacacatcgaattaaggggaataagcaacttcaaacaaacatcacctcactgcacatggaacggttttctcggggtagtagatgctcgattttccattgattgcaatctctgtttgagatgaaaaacttcatactgtagttggaatgctcttgctctttctcctgcaataactcctcttgttgagtgcaactccttctgtgtatcatctaaaacagccttgaggaaggccacattatgctcaagccgtacattgtcagagtgcacaatgtttgataggttgttggcctcttcctgggccaactctagactggtcagcttctctctcatcaattccatctcctta

SEQ ID NO: 75030 - DNA, 394 bp, Glycine max
  unsure (1)..(394): unsure at all n locations
  Clone ID: jC-gmfl02220138g05d1
tnccgggaaaggcttttattgctctacgggaacaccttaaccggaaaatgggaaaattttttttggcacagtcattccttaccccccgccggcccccaaaaaaaatataaaaaaaaaaactcttttttgcacctaaaaatcttttggaagcgaacaaaatgaatgggagggggctatgaggcaaaagtctatctcattggggtccccaaatcatgcaagcaaacttgacttcaccaacttaacaaagaataacgaacgaggtggaacatgcagcgcctaagaccctttagaggggctccatcatcaacttggtggggggggcaccactttcaaacttggcatccattcacagaaactaggatcatcgaagggaacaaaactggctttcagcttt

SEQ ID NO: 75031 - DNA, 353 bp, Glycine max
  Clone ID: jC-gmfl02220138g07d1
ccattcggaaggcccccccttttttttaaaaacccccgggggaagagccccccccctaaatattttattttattttttccaccaggggtcccccccttgggattttacaaaaaaccccgggccccaacccccaaagggatctttttttgcgggggaacccccggcacccccttaggaacaaaggcctcccttttaaaccccgggggccatcccccgccaaaggaaaaaaaaaaatttccaggtttaaaaacccatgccccaaatgccctttttatcccggggcccaatttcccccccgccccgaagggaaaaaacccaaaaacttggccaaaaaaaccatggcccaaataaaa

SEQ ID NO: 75032 - DNA, 357 bp, Glycine max
  Clone ID: jC-gmfl02220138g08d1
cccaaggcccccacttttttttaaaaatcccccggggaaaagccccccccctaatgttttgtttttttttttttccaccacgggtcccccctttgggatttaaaaaaaaccaccgggccccaacacacaaaggatttcttttttgcgggggaacccccggcacccccaaaaaaaaaaaggcctcccttttaattcctgggggccatcccccccccaaggaaaaaaaaaaattcccaggtttaaaaccccatgcccaaaaagccttttttaacccaggggcaaatttccccccccccccgaggggaaaaaacccaaaattttgtccaaaaaaacctattgcccaaaataaaacccccc

SEQ ID NO: 75033 - DNA, 423 bp, Glycine max
  Clone ID: jC-gmfl02220138h04d1
ccctaatcaatttttcattatttcttgtgatacataggaatgcaacctctttttttttttcttcttccattttcactccttatatatcattggcattctttattcaactttgggcagcctcaggcttgcgatcatcatcagcatgtggaacaatctttgaccaaaaccaatgtgatctccagactgtatgcatttcttcaatggggatgttctttgtctgaggcaacaacatggcaatgaagatggtcatgatgagtacaaatgccgcaaagaagaagaaaaggccaaacttcaagtcgcaaagcatgactaggaaaacttgagcaatcgcaaaagtgaacagcatgtttacggcaacattgatggctggacctgctgaacgaacctcaagagggcatatttcactaggcaccaaccacccta

SEQ ID NO: 75034 - DNA, 383 bp, Glycine max
  Clone ID: jC-gmfl02220138h06d1
cccccccccccctttggggggccccccccccccccgggggttttcctctctcctcgtccccccgttttccccccccccggggggggggggccccccccccccttggggccccccccttcccccccccccggggggggggggggggggtttttggggggcccttttccccccccccccccccttttaaaaagccggggggggcccccccagaaaatttcttctctgggcggggtttttcacccccccccctttacaaagaaaaaaaacaaggtgggcggcccccccccggattgtaaaacccctctttccccccatacccgggggcaaaaagaaaaatagggggggggcgaggccccgcccccatcttaaaaaaaggggggggg

SEQ ID NO: 75035 - DNA, 511 bp, Glycine max
  Clone ID: jC-gmfl02220139a02d1
gcacttagaaaacaaccattttaattatggaatactgaatcaaatcattacatcacctttctccagattagaaatgcatttgcaaatgacatcgtattgatgtaaaataaatgctgcaatatgtgtgctcccccaatcacgtcccgcatcaaatgggcaaaagacttaaccaagaactcaaaatgtgttaggctaacgtcaattcccttattgatgtctctccaaaaacttctctattacgactgagaatgccgcaaagccagcacaaccagcacacgctgcttttgggccacctagaaccatgtgacaacaggggaaacatcgatggacatcatggagaaaaaacaaaggcggagaaagattcataaaaaggagtaacattgtggatttcaattcattatcattctattatacctcctcaacctcttcccatgtatcattttttttttcatgtcccgcccaaggtactactatcaaaaaccccatgaaaactggtgcttactcaacttta

SEQ ID NO: 75036 - DNA, 87 bp, Glycine max
  Clone ID: jC-gmfl02220139a03d1
gaaacaaaaattttggcattttaaaaaccaccaaaagaacaggggaaaaggggaaaatataaagccgcaaacgcccgcacgcccaaa

SEQ ID NO: 75037 - DNA, 214 bp, Glycine max
  unsure (1)..(214): unsure at all n locations
  Clone ID: jC-gmfl02220139a05d1
gnnannanaaaaaaaaaaacagggaaaaggggnannnnnnnanncggggaggcccaaaggccccaagaccccaccacacccaaacaggggaaaaagacagaaagaccgccccaataaccacaccctaaggaaaaaaaagacaaagacgcatcatccaacaagccccaccatggacaaacacttctaaacccccattacaaacaatcctgacaca

SEQ ID NO: 75038 - DNA, 297 bp, Glycine max
  Clone ID: jC-gmfl02220139a06d1
aacaaaaaactaaaccaaaaggggaaatgggaaaacaaaaaacagcaaaaacccaaaaaccaaaaaaaaaaaaaacaacacaaaatccaaacaaaggaaaaagaaggaaaaactctcccaataaccacaacctttggcaaaaaaagaaaaagatgcttcaacaaaaaacccccatcaaggacaaactgtagcaaactcccattatagaaaaaccagtcagaaaataaggagtccaccaaaagaagggcagccacttggggctgaagcaaagaaaaaaagactcccagcagaacaaga

SEQ ID NO: 75039 - DNA, 209 bp, Glycine max
  Clone ID: jC-gmfl02220139a07d1
aacaaaaaattattctaaaaaaggaaatgtgtaaacattaaatattaaaacccccaaaatccaaatacaattatataattaattatcaaaacatatgtaaattatttaataattttccatattatcattattttttttttgacataaaaataattttttttgttacaactcatattataaaaaaaaattattaaatccccatttataat

SEQ ID NO: 75040 - DNA, 247 bp, Glycine max
  Clone ID: jC-gmfl02220139a08d1
atatcaatacattttttaatttagggtccttgtgaaattctaatgttcgaaaacccacaccccaatatacttttttttcattactattaggaccatggatagtataccagataacactcattctgtttactacttttattatattccaagccttatgattactatgactctgctattaacaagcaatcttatgagtattctggttgtggctattaaggtggctacaacaaaacttcttatactagtg

SEQ ID NO: 75041 - DNA, 133 bp, Glycine max
  Clone ID: jC-gmfl02220139a09d1
ggggagcaaactcatccaacaggggcaccgggagaacaaaaaaaagaaaaaaccccaacacccaaaaacccaaaaaccctaccccacccaaccagagcaaaaataaggaaggacttttctaatcaccacaacc

SEQ ID NO: 75042 - DNA, 365 bp, Glycine max
  Clone ID: jC-gmfl02220139a10d1
caatatattgttcatgtttatgggataacggtacaatggattcaagatgaaaatcttgaaacataatcctttgtttcacttcattttcatttcggtcccattatcctcaatattattccaaaacatacaaattataatacacaatagttaataatatattgcccatcatggaatacaagatgcttgttttagcaacactttgcttatgtcatccatgttacaaatatacacatgaaacatatggagaaaagcttattcttgctcatttccatccatgcttaaattctaagctatcttgaaaggaggggatctgagagatggattagcgaaagggccctcaactagtcccttagctattagcctat

SEQ ID NO: 75043 - DNA, 601 bp, Glycine max
  unsure (1)..(601): unsure at all n locations
  Clone ID: jC-gmfl02220139b02d1
aaacatggacttgtaattttaacttgcaaatttccagttcaagaaaattggatcacgtttactaggcaacatgaatcattaaaacaaatcacaatatcactatcaaaactaaatatgctagtcaactgcgactaggacacttgcttaaccgctgttgggctaatagtcatcagattccacagctaataagacagattgatttaaaaccatctattttcaaattatatctcaagagtagcacggttggaagcagccaaccgcaaaatactgaagcatccaagccttgtaaggccgtatacaagtacatcatgggcaccagcggcaacaaataactcttcactgaataccaccccaagtaaaagcaaaataaataccgaaatgaatatatggtaaacttgatgctgtcaattatgcctcaaagctgccactccattaatttgggcaggaattcccgtcctcaagtcaaaattggtacaaattcacagaccagtgacttttcccacagcaacagtttttccttcagtgcgaagagtgaacnnctccagtggggaaaatcagagacttctcatgcaaaagagttattacctgacacggacataca

SEQ ID NO: 75044 - DNA, 285 bp, Glycine max
  unsure (1)..(285): unsure at all n locations
  Clone ID: jC-gmfl02220139b04d1
gggggaaaaattttgagattttattaaacaaaaaaangcccgggggaaaggggaaacatcaaagccgcaaacgcccaaacaccaaaagacaacaccacccccaaacagggggaccagatggcaggaaccttccccatgaggacaaccttagggaggacgagacaaagatgcatcaccctacaacacccatcaatagcaaacaagaccaaacccccccgacagacacacccgacacacccaatccgacccaccaagagaagggcaaccacccggggccgctgcaaa

SEQ ID NO: 75045 - DNA, 234 bp, Glycine max
  Clone ID: jC-gmfl02220139b09d1
aacaacaaatcaaaccaacaggggccccggggaaacacaaaacagcaaaacccccaacacccaaaaaccccaaaaccccaccacccccaaccaaaccaaaccgaaggaatgaccctccccaagaccacacccttagggaacacaagacaaagacgcaacaaccaacaacccccaacaaggccaaactcgccgaaaccccccggggagtcactcccgccacagcatagcgactcc

SEQ ID NO: 75046 - DNA, 202 bp, Glycine max
  unsure (1)..(202): unsure at all n locations
  Clone ID: jC-gmfl02220139b10d1
aacaacaaatccatccaacaggggcccgggggcaacacaaacccgcggaccccccaacacccccataccctaaaaccctccctcacccaacccggcccagaacacggaatgacngtcccaatcagcaccccctttgacaacacacgccaaagacgcaacacccaaccagccccaccaagggcaaacacccgcacaaccccct

SEQ ID NO: 75047 - DNA, 409 bp, Glycine max
  Clone ID: jC-gmfl02220139b12d1
atcaataactttaaaattacattatttgcattagggaacaaggttaactaacttaacaaaattaccagactcccacagaagcacaagaccaaacccaagaaagaaagaaaaatctagcacattgactgaggagatgatcagtgatcaagcgcattaggtccagtacagtaattgagaacgtgactccacagccactgaacaaggaatttccgtctgatcccattcatgttataggtggcgccatctcgagcgtcgaaaacctgaccggtgtaggatccaccgccaccggtgccgtaaatcccctcacagagatcggcaatctcgacggggaaagaggggtcctgacccgcataccaagcattcgccaacgggttcgttgccagttcagccatctcgtgtccaatcacac

SEQ ID NO: 75048 - DNA, 255 bp, Glycine max
  Clone ID: jC-gmfl02220139c04d1
atcaaacaaaaaaagggacggggacaaggggaaactgcaaacacgaagacggccaaaaacccaaaaacaccaccacacccaaacaggggcaaaataaggaagaacccctccatatcaccacacccttaggggggacgggaaaaaaaagcaacaaccaaagaggcaaaccaaggacaaacaggagcaaaaccccatgaaaaacaaaccggacacaacatagcgagtccccaaagagtagggcagcaacgtggggcc

SEQ ID NO: 75049 - DNA, 117 bp, Glycine max
  unsure (1)..(117): unsure at all n locations
  Clone ID: jC-gmfl02220139c05d1
aaaattggagtgaattcagagtcnatgtgtgctgctttgcatgaatgcgtacggtacgactcaggattactagttcgaggaccgcccttttttttttttttttttatatttattttt

SEQ ID NO: 75050 - DNA, 217 bp, Glycine max
  Clone ID: jC-gmfl02220139c06d1
ctattataatttttaaccaaacctaaaccaaaaaggggtccttgggaaatactaaagcccaaaaccccccaccacaaacaccgtctcttccatcaccacactgacaaggataataaatcaaaaaaaaccgatactgactactacaacacatcatattccaagcctactgattactataactctcatattaacaagcacatcatatgattcttcctcc

SEQ ID NO: 75051 - DNA, 269 bp, Glycine max
  unsure (1)..(269): unsure at all n locations
  Clone ID: jC-gmfl02220139c08d1
ataacaaaaaattattcaaaaagggggaagggggaaacaataaaaaggaaaaaccccaagacccaaaaaccccaaaatcaaaccttcaaccactaaaaagcacataattaaataaccctctcccactaaaaacccttttaatatacatgataaaaaatttattccctaactccctcacacacgaacaaacttncttacaatctctcagtaataaaatggaatcccaaaaactgtatctcacaaagcttgacggacctaactgtgatggg

SEQ ID NO: 75052 - DNA, 238 bp, Glycine max
  Clone ID: jC-gmfl02220139c10d1
aacaaaatattattcaaaaaggggccccgggtaaacactaaaaagcaaaaacacaaacacccaaataccataacatcctacctaatccaaccatattaaaattatttaataaccttccttattttaaccccctttgacatgaaaaataattaattctattaactctacaacccccatcaataacaaactctttcaaatcccccttaaagacattcctctctcaatatatctatttctc

SEQ ID NO: 75053 - DNA, 474 bp, Glycine max
  Clone ID: jC-gmfl02220139c12d1
gctatcttataactgatattgggagcgggagcatcaatacaatacaatatgtaactatgaactatcaatatatgatcgttattatgtctgtgatacacacaattaaggccataatatacttatgtgatttacaacaacttctagcttattttatacatcatgccaacccaactaggagcaattttcatcatacaattacacttatctttaatcatcattcatcaatactggcatcagcaatacgctctaaactctgaagcatgacaaggtggtagtcaccagggaccatattgttatgcaatttatgccacaattggataagatgcacaagttgcaacaccacacatgttcttccccaattccatcttgaagtagccattttcaccccagctttctccccatgaaatttttatgagccaatatgggacaccattttcaactccatatccaacagcaagaacgggatggttcaca

SEQ ID NO: 75054 - DNA, 519 bp, Glycine max
  Clone ID: jC-gmfl02220139d02d1
aagcccttccagcacaaccaaagggataaatgaatgaaattctaacccatcgataattaaatttgatgggaattatgatgtagcacaaaatgtctcaccattaaaatcaaaataacaagtcgaagttttaagtaacttaggacagaacttaaaaaaaaaaaactaggtaaaatgagagtagataacttggtacattatgtcacttagcacttaacctcctttaaggcatatgcaaagtataagaatgttggatcagcagcaccatccttgtagtatgcaaagaccaagcaagcatcatcattcatgctctccccaacaaaaaactggaaatccttaatcttagagagcaggtatttagttgctccctcaatgtgcttcttaaacaactcttgtttctctgcatcgagcttgggagtcaaattcttgataaacctcttcatgaaggtaacaaactgtttcttatcaaaagcgggttgctcctgaagtctgaatgtatcaacaatgtcaacaaccttaaca

SEQ ID NO: 75055 - DNA, 200 bp, Glycine max
  unsure (1)..(200): unsure at all n locations
  Clone ID: jC-gmfl02220139d04d1
annaaacaaaaaaannaaaggggaaaagggaaaaatttaaaaacacaaacacccaaaccccccaaaaccccaccacacccaaccaaannnaacagaaagaaaagacggcccacatcagcacccccatagggaggacaccccaaagatgctacaacaaacaacccccaacaagaccaaaccccagaaaacccccctgacag

SEQ ID NO: 75056 - DNA, 155 bp, Glycine max
  Clone ID: jC-gmfl02220139d07d1
aacaaaaaatttttcaaaatggggcactgttaaaacaataaaacgttaaacccccaataacaaaatacaaaaaaatacttaataatccataaatataaaaaatataaaataactttctatataaaaaaaatctttgatatgaaaaaataaaaatt

SEQ ID NO: 75057 - DNA, 200 bp, Glycine max
  Clone ID: jC-gmfl02220139d08d1
aaaatgaggcccttttaaacaaaaaaatttaaaccccaacaaaataaacaaaaaaattataatattccaacaaacatatatatgtataactttcaaataataaattctttattttaaaattataaattcattttttaaaacccccatcttggacaaacaaaataaatccccttataaacattctttttcaatttatttat

SEQ ID NO: 75058 - DNA, 215 bp, Glycine max
  Clone ID: jC-gmfl02220139d09d1
aacaaaaaattaatcaaaaaggggcacagggaaaacacaaaacaggggaaccgcaaacacccaaaaaccaaaaaaccccaccacccccaaccaaacgcagaggaaacaataacccccccaataagcacaccctgagagaggaaaacacaaaaacgctacggccgaacacccccatcatggccaaacccccccaaacccccctgacagacacaccc

SEQ ID NO: 75059 - DNA, 177 bp, Glycine max
  Clone ID: jC-gmfl02220139d10d1
accggggggaagtgtgaaactttaaaaaccaaaaccccgaaaacccccacacaagtcatactatagtaaataatttcatacagaagaaattactaaattaaaaaaaactttggtttaacaacaaaaaaaatcattaacatacaacccacaacaagaacaaaacaaaccaaaaagcca

SEQ ID NO: 75060 - DNA, 289 bp, Glycine max
  unsure (1)..(289): unsure at all n locations
  Clone ID: jC-gmfl02220139d11d1
aacaaaaaatnagacaaaaaggggcccggggaaaacaaaagaccggggaaccccaaacacccaaaaaccaaaagaccccaccacacccaacccgggcaagaagaaggaataagggtcccaatcaccacccccttagacaagacgggaaagagaaggtacagccaacaacccccaccatgggcaaaccggaggaaaccccccagagagacacacccgccagaccagggggactccccccagggcgccgcagccccggggggcccctgcaaccaaaccacgnctcccacat

SEQ ID NO: 75061 - DNA, 347 bp, Glycine max
  Clone ID: jC-gmfl02220139d12d1
gattagaaacttttgacacatattcatatccatggggcaggagggacgatcgagtagcaagacaagacataaagctgagcataaattattattatagataacataacattatgggagcaggaagaagacgagggtgcatgtgcatgtgcatgatgagaaaagcaattcaggcgatcttgctgtatccagagtcgtttagtctagtgagcgccttttggagctggctccacttctgctccaagggtccaatgtacccaatcgacatcctcacgagccccggcgagattccggcgagctccttctcctcagagctgagttcactgctggtgctgctgccggagcaggac

SEQ ID NO: 75062 - DNA, 496 bp, Glycine max
  Clone ID: jC-gmfl02220139e01d1
aaattaatagttcattggaaattcacggtatatgtgctaatcgaaagcaaatattcttttcactggagggaaacacacaagtagagatactgaacttcacagaattcattatactgtatagtacaaactaaacactggtaactacaaagaacacgaccaatatcacacccagatattgtaagagaaaaatgaggatagacaaaaagaatatgctgagccacattgtgaagtgacagacattatagaagcccggagcaaaatcctgaggagaaagtctcacttatgcccccggaaatacatgtatattttctgaagcacccaaaagcttagaagagcctccaagcaaaacatgccaaatccaatcaaatagaatatctgcatgaatagaaaacattgtatggatccaaacaagtcagaacagggaaaagggtatgaaacttgagatttcctagtgctttaaactaaaattccaaaataacaaagggttaggaaattt

SEQ ID NO: 75063 - DNA, 207 bp, Glycine max
  Clone ID: jC-gmfl02220139e06d1
aacaaaaaagaattcaaaaatgggtactggtaaaacattaaaacttaaaaaccccaaaatcaaaaaataaataaataattcctccaacaaacaaaaagaacttacaaaattacccttctaaattaaaaaccattttaatctaaataataatcaacattaaccctaactccttctcataccacaaacttacttactatctcatactaa

SEQ ID NO: 75064 - DNA, 202 bp, Glycine max
  Clone ID: jC-gmfl02220139e10d1
agaccacaagaaaaacgaaagggggaagggggacaacctaacacagcaagcccacaaataaccaaagacaacaatacccgcactaacccaaccaagcataacatatatggtaactctccgtaacaccagaaccttcattaagaacagtggcacattcaaagcccgagccaccaaaccttgagcagggggctagaaacccgcc

SEQ ID NO: 75065 - DNA, 314 bp, Glycine max
  Clone ID: jC-gmfl02220139f04d1
ataatggaaaatttgacataagggaaacaggtaatgttcaatgaaatgggactagtaaaattttcccatcacacactcaactacatcgttgaactccttgatggttctctcatctgtgccatcatgcatcaacggtggaaagaagagccacgcggcggtgactatcacaaacgccaccgtaatgggcccacacaaggcccaatgcagtctccatttagcgcccaaccactttaccgcaccaaacttcgcaacggcacacaccccatggagcaaaaagaagcacgtgacctcccacgtgggactaacacgtgtga

SEQ ID NO: 75066 - DNA, 140 bp, Glycine max
  Clone ID: jC-gmfl02220139f05d1
aaaaccaaaaaaggcaaaaaggggaacgggggaacttacaaacactcaagccacaaaaatccactaagaacaaaaaaaacccacacacgaacctggtgaactgcacccaaaacacaccccgatcccaatccctgtagtaa

SEQ ID NO: 75067 - DNA, 200 bp, Glycine max
  unsure (1)..(200): unsure at all n locations
  Clone ID: jC-gmfl02220139f09d1
aacaccaaannaaacccaaaggggaacgggggaaacacaaaaccgcaaacccgccaacaaccaaaaacaaccaaaccccaccaaaaccgaacaagcgaagaagagagagaaagagcccccagcagcacaacctgcgtctagaagcgaaaaggatgcattgcccgaccacccccaccatggccaaacagacgcaaaacccc

SEQ ID NO: 75068 - DNA, 360 bp, Glycine max
  Clone ID: jC-gmfl02220139f11d1
aaaaaaaaccccccctttcaaagaaaagaataacaaattagagccgaccatcgaactccagatcgccccgaaaaactacgatccacagaaggacaagcgtctcagtggctctgacaagctgccccacatccctcgccccaagatcccaatttgcatgcttggcgaagctcagcatgtcccaagaggcaagagaagataggactggactggatggaaaaggaagccctgaagaagctaaacaaaaatcaaaaaccggagaaaaaactaactttaaagccccatgccatggtaacaactgaaacagtttttaaacacaatggtggaattcccgggactgatgggaacaaagaaaaagcccat

SEQ ID NO: 75069 - DNA, 338 bp, Glycine max
  Clone ID: jC-gmfl02220139f12d1
ccccaaaggcccaaaaccacaaaaccctaaattagcccaaaaatttttaaaaatttggaagggcccccataaccccgtaaaaaactcaacaaaacccaaaaataacccaccccattttaataataaaaccggcccaaactataaacaaacccccaggggtaaaacccaaagccccaactggaaaaggcctaaaaacaaaaggggactaaaacagggggaaaaaaaataaaaaaaaaaggaaattaaaaccccaacaaaatttccaaaaacaaattttaaaaacacctttggaaaaaaaaattcgcaggggaccataaaacccaaaaagccaatgccaa

SEQ ID NO: 75070 - DNA, 436 bp, Glycine max
  Clone ID: jC-gmfl02220139g03d1
atcatgataaaaattcacagcggatttggatcaattttaaatgcttttgttctatttctcattggaatcaatatagtgattaaccatctaaattacaatttcaacaattcttccttcatgtaatgaaaatttcatttcaaatgcagcgtgaggagctcgggattatcaattaattgcttccactcgttgcaaaatcttgcaacggttgctccgtccaagactctgtgatctgcaccaatattaacattcacgagggatgcaggatacacatttccattatcagcaaaccgtggaactttctgaattctaccaacggcaataatggagacttcaggcagattgataaggggggaaccaaactttccacctattgctccaatgttgcttaaagtgatagtaccaccacacatatcctcagaagttaacttgctatttg

SEQ ID NO: 75071 - DNA, 373 bp, Glycine max
  Clone ID: jC-gmfl02220139g05d1
aaagcatgtaacaccaagcaggatacggacgcacaaggggattcacattatcagaagtactccaccaaacacaaatctaaaaactctcaaaagtcatttcgttctttgacgcacacttaccggggacgaagatggtggcataggcccaggcgttgcagctgacaggggcagcaaggtgatcggcgaggttctccaatggaccctatccggtgacaatggcctgaacaaagacgccaaacatagagaacatggccaatcgaccgttcttgagttccttcaccttaagctaaacaaaagcctgtgggtcatcagcaaggcccaacgggtcgaaactgccacctgggaagagaggggcagtgacctcaccgagggg

SEQ ID NO: 75072 - DNA, 278 bp, Glycine max
  unsure (1)..(278): unsure at all n locations
  Clone ID: jC-gmfl02220139g06d1
aaccccaagnnggaaaaaaaaggaaaaggggacaacataaatttcagattctatctaaagggcaaaaacaccaatctatccccctctttcttccgaataccattctccttcggagcgagcgagttatggcccacgggacataaaccataattattgcctaaaaacattgattaaaaataaaaaagaacagggaaaaaaacagatccttgttatttttttcccattaggaggagcaaaagaacaatcttttttccgatgatgctttttaccaataaacc

SEQ ID NO: 75073 - DNA, 314 bp, Glycine max
  Clone ID: jC-gmfl02220139g09d1
aaggcattagatgaaactgtcgggcaatggggagctgttcagtttttcatgtgtaaagaatacacgatttgatttaaatacatatatactatatgtgaatgacaaaaatttaaagagacacactctcaagtaccacttaatcaattctgaatgctaaatcttgagtcgaacattggccccaggcagctatattcaggggggcaagctccattgcttctatttctcaaagctttgtttctgcaaaattaccttgatctttcagttgagacaaaacaacgaaggttaccggtgcactcaaatcatatgggatactt

SEQ ID NO: 75074 - DNA, 77 bp, Glycine max
  Clone ID: jC-gmfl02220139h01d1
aaaaccccggaaaacaaaaaaatattttataaaaaatccccggccaccccaaaaaaagaaaaaacccggttttggct

SEQ ID NO: 75075 - DNA, 133 bp, Glycine max
  Clone ID: jC-gmfl02220139h04d1
agccaattaaattaaaactggggggaatggggatccatacagagacataccaccgtctatcaaaaccaaaagtaaagcacagaaccaacaaaggtaaataacaatgtctctaaaacatccataaaaccaaaac

SEQ ID NO: 75076 - DNA, 364 bp, Glycine max
  Clone ID: jC-gmfl02220139h06d1
atgcaagtatataataattaattaaaacccatgatctggggaacaagagctaaccaaaacaattacagatatttttgtcgttttctttttgtcagaaaaaaaagaagaaactcgttattataacacatttaaacaaataatgcaaaccaaagttaaaaaaaaaaaaccataatacgtacccttttgacggtgtggcaagaagcagcacacaccttattgggtaatgaaccctagaggcccgggttcaataataataatatataagtgtatagcttacagaaaaatttaatgcacaattacatcgatgcacctggtaagagagatctaaagaatcagaggggcccttcccttttaattttttttt

SEQ ID NO: 75077 - DNA, 104 bp, Glycine max
  unsure (1)..(104): unsure at all n locations
  Clone ID: jC-gmfl02220139h07d1
catggcgnataataatttcatggactcaggggtgaacccttccactaatgtactacctagagttacagagaatggcacgtgagagaaattatgcacaaactcaa

SEQ ID NO: 75078 - DNA, 340 bp, Glycine max
  Clone ID: jC-gmfl02220139h08d1
atggcgtattattatttcattggcttaggggtgaacccttccactaatgtactcatctagagttccagtgaatggcacgttagagaaattatgcacatactcaagatgccggaaaattgtaatgatcaagtaagagatatgtaacatgttagccacataatggcacatataacttttattctcctcctctaccataactcggcaatgaagttagtattaattgtatattagttggctgcatcatcatgttcaggaacctgatcatgaacagaaaaagttgatcctctacccacagggagataggaccacgcaatggctgcagtaccaactgcaatggcag

SEQ ID NO: 75079 - DNA, 492 bp, Glycine max
  Clone ID: jC-gmfl02220139h12d1
ggtaagaggtttcttttttttgcaaaatgatggcattccatgccataagaatctacatccacacaatttataatgaacaagaatgtaatacttctttctttaaaccatgataacacagattgtcaggagagattatagtcttctagatgttggcaatggacacgggctctcggaggatcctctccatctgttgtgccctggtcttaattgacatgtcaaagaccttctggctaaattcaagcacaagcccaccaagtatgcttggatcaatcttctgttcaagatgaaccttcgctccagaacctattatttcctgaagagtctccttcaatgccttttgctcttcaaggggaagaggaacaacagtggtcacagtcgcttgcacttctaccttatatgccattgacaactgtgcaaatctttttgcaatggggtctatgcttttaagccttccattctcagcaacaattacaagggaagttctttggaaca

SEQ ID NO: 75080 - DNA, 239 bp, Glycine max
  Clone ID: jC-gmfl02220140a03d1
cttgggcaccatggaataaaacaaaaaacaaaaaccaaaaaaaaacaaaaaaacaaaaaaaaaaataaaccagcaacaacaaccagagcaaaaaaccacaacacaaaagaccaaaaccacggaacccaagaaaggacaggtacgccgcctcaaaacaccgaatggacacccaaagaatggcccccaaactgccaccaccaaacgagcacaaccgactggatccaaaccacgtgcaaaac

SEQ ID NO: 75081 - DNA, 399 bp, Glycine max
  Clone ID: jC-gmfl02220140a07d1
attcataatttaaacgttttacttaattgcatggataatgcgggcataaagggcaccaagtgtacattataaggagtatcaattaccatgttatgattcaatgacttccaatatcatgatacacataactgggcctaaaccaaaagaatgcactctgatcgagcttcgtttccctccacctgcaatacaggggaggacattacaaccgacaagtgcaaactgccaacccgatatgaattccaaaccatagggactatgtctctgacatctgcaattcacattcttaactcttgtgatcaggatggaatgtgctgacacgtgcagtgattcatgagtcaaactgttacggaggctgtgacagtgaactgggtagcacagtcgaacatgatcatcctaaca

SEQ ID NO: 75082 - DNA, 303 bp, Glycine max
  Clone ID: jC-gmfl02220140a08d1
agtcattgcatgtataccgcgggcataaagggctccgagcggacattattgggagcatcatttcccatgttctgatttaatcactgccaatatgatgatccacataactgggcaaaaaccaaagaatgccactctgacagacacctcgtacctcaacacatgcaatccaggggaggacattacaactgacaagtgcatacagcctacccgagatgaatttcaaatctttgtgactatagctctgccgtctgcaattcagatttttaactcttcggatcagggtggactgggcatataagtgca

SEQ ID NO: 75083 - DNA, 417 bp, Glycine max
  Clone ID: jC-gmfl02220140a11d1
gaaaggaagataacttgaatttccctactagcatttatccatgcaaagggaactgatgaactaacatagctactattaattaatcaaatactacagtgataaaacaacccaaaaacaaaaccaaatttcaagcattccaatcaagattacattacaaacttaataacaaaatgatatttaaaaaaaatagaaagaattccacaaggatgctcactattcagcatccaaattatcatattgccaagggttgaattctggtctgatgtcaggcacttcaatgcactcagaactatcaacggcagcacaatgttgggtatatttaccgttgtattggtaaacttccaagtcaccccaaggggtaggagttacttcatctggtaaatcaaaccatctaggagtgaacttatggcccttggc

SEQ ID NO: 75084 - DNA, 303 bp, Glycine max
  Clone ID: jC-gmfl02220140a12d1
aggtgatctaaaaacatccattaatttagctcggataccagctacaacttttccagcactaaactctaatccgccaaataaaagctcccgtttttattaaggaaaaccatacataaagaaaaccaaacagatcaaaagatcaaaggaagatagatgcacctatggttcactaaattctgataacgagatacaaaagggtgtgcaacccacatgtaactttgtgcctatatatcccatgagacgaaaagcttctttaaagctcattttttccttgggcttgctcatcttttccttgttcttgct

SEQ ID NO: 75085 - DNA, 566 bp, Glycine max
  Clone ID: jC-gmfl02220140b01d1
cgccacacatttagtatttaatttcgtcaagatttccacgttctttgcaatagggaaagaaaaattatctccatacacattgaataatccatcataattccaaatgtccacaaataataataaataacagaccctcgaaattagctgaatttccatgatgtttatgccttgctgtcgatattcatcggttgggcatccttcgacgctggtttattactgtcaagagaatctagcttgtgcagtttgttgaacatatttccataaaattttgcctcttttttgttgtactccttcatcttttccttcaaagtcttgtactcaagcttgacatccctgttgttagggtcaatctcaagcgctttcttaatatcaaattcggccaagtctaaatcagccaactggatatatgcctgggcccttctatagagagccttcacattagtactctcaaggtccagtacctttgtgcacaatttctctgcttgtttataatcttttaatttcaacttgcatgctgcattgtctagattacaggcaaccctcaaggctttggagctcttcttctc

SEQ ID NO: 75086 - DNA, 496 bp, Glycine max
  Clone ID: jC-gmfl02220140b03d1
gtaaaaagcaagtaacattaagttggattgggatacacaagataattcacattatctgaagtacattgcaataacatatacttcaccaaacacaaatctaaaaactctcaaaagtccacaagtcatccttttctttcatgctcacttgccggggacgaagttggtggcgtaggcccaggcattgttgttgactgggtccgcaaggtgatcagcaaggttctccaatggacccttaccggtgacaatggcctgaacaaagaacccaaacatagagaacatggccaatctcccgttcttgagttccttcaccttaagctcagcaaaagcctctgggtcatcagcaaggcccaatgggtcaaagctgccaccagggtagattgggtcagtgacctcaccgaggggcccaccagcaatacgataaccctcaacagcacccattaggataacttgggtggcccagatggcgaggatgctctgggcgtggacaaagcttggg

SEQ ID NO: 75087 - DNA, 228 bp, Glycine max
  Clone ID: jC-gmfl02220140b07d1
cttaattgtatgaataatgcgggcatcagggccaccttgtgtacattataaggtcaaattataaccatatacgatattatacaatgacaatttcataacccatcattcatcggattatcctaaagatcacaccctaaaggacctttggttagcaccactttcaataccaaccaactatttacattctactgctgattgcagatcagctgctctaacttagaaatgtat

SEQ ID NO: 75088 - DNA, 194 bp, Glycine max
  Clone ID: jC-gmfl02220140b09d1
cttaattgcatgaaaaatacgagcataagggcaacctagtgtacattatcaggactagttattatcatatacaatattaatccatgacaagtagactgcccatcataatcggtttatacattagaactctgacaaaaagatctttgattagcaccactttcaactcgtaccaactattcagattctacacctga

SEQ ID NO: 75089 - DNA, 151 bp, Glycine max
  Clone ID: jC-gmfl02220140b10d1
attgcataaaaaacacgggcattagggccacattttgtacattatccggactatttcttatcatatacgatattaaacaatgacaatttgattgcccataatatctgacttatccataagccctctcacaaaaagatctatgaccacctcc

SEQ ID NO: 75090 - DNA, 496 bp, Glycine max
  Clone ID: jC-gmfl02220140b11d1
gttcaggagaaatgcatcatccttgctctctttgtaatccattatcttcttaattaatttcatcttttatcagataataataataatcaaaataataacaaaaaatatctaaattgtagccagatgacaacagatagttggccacaacattttacacaatacttaacatacagtgatttacaactttatttataaagagtgtaattactaattacaagatactaaaaatatttaaacaaaatccaggaagaagagattatggcatatatacggaagaagccaaatctgtcattcacagctcttgatcatttctaaacagctagacaagtccatccataatcaatttgtatttgacagaaaatgcaccataacaggtttccatgcataatcgtgtgatctcatgatttgtatcacatggaaacacttgagatcattaaagcaaaaactgtgaggaaactgatacatacaaatatgttataaagataatttcaggaaa

SEQ ID NO: 75091 - DNA, 534 bp, Glycine max
  Clone ID: jC-gmfl02220140b12d1
aaattaattatatattgtatatactgttattagcaattagcaaacaaggacaaactcaacgcttaattagttcagatacgagacctgtctttcagcaacttaactatatatagcaaagctttcacttaagaaagcctagccttgtgaccaaattataaacttacaacacacaataaacattaacgtctgcagagtagggaaaaccacaaaacatagaggcatatataagccctcaaatatgttgtcaaatgccataccaaagctatataatatcatccacctcaaagaaagtattcaaaagcatccaaggtgacaggaatataatggttccagagtcaggtcaagttcattcctccctacttctgatgcttcctcacggtaattgccatataacgaagatgtaacataattataatatcttgttattgaaaggtcaccccatgttcaaaagtggctgcggtagcaagaaagatgcattaactccgtggtttggatgctcccattgtgcttgctgcgctgcaaccttttctttct

SEQ ID NO: 75092 - DNA, 397 bp, Glycine max
  Clone ID: jC-gmfl02220140c01d1
aaggagaaactgacatgataggatataattatataaaattgtacataggaagtggaaatgtgaatgtgtggcagggtgataaaaatgaaaagagaagcaacaataataaagtgaatgagaaatttaaatatcacggactaaaatatctattcactcgaaatttaaatgtcacggtctcttttgcactcaggaggagagatatgaggatagcgtttagtgtcagtgcagtagttgtagatggtgtatttctggcgcacccatctgagcctacgccactgggcggcgtcaaggtcacggaactcaggctggtcccaccacctcttgccctgcgtgtcgcagaacttggcgttcaccgaagcctcgcacccgtcgatgtgaaaccccttgtacgctgcta

SEQ ID NO: 75093 - DNA, 399 bp, Glycine max
  Clone ID: jC-gmfl02220140c02d1
cattgttaatttacattgaggatatataaaagctagttttaatatgcagtagtcacaatttccatcttctgttacaaccaatcacagcacaaagtctaatctcaattaacagaagatctttattctgaagtaaatgtgacagccatcaccaaatgtttcagtttctcattctgagctcatgagacaggcaaaggatgatatggaaaaggaaccaagaatagattatcttttcttatagctgtgactccaaaatcctcactcatgtccagttctccacttctcattccacttggaagcttccaatcaaagtgatacaacaacattgcaagggctagttccgcagctctcaaagcaaatgtgcttcctgcgcatatccttcttccagcaccaaagggattg

SEQ ID NO: 75094 - DNA, 247 bp, Glycine max
  Clone ID: jC-gmfl02220140c06d1
aacgcttgactttatcgcagggatcatgcgagcataaagtccaccaagtgtacattatcaggactaactattaccatacacgataccaaacaatcacaacttcatttcccaccatcgacgatttacacataagatctcagcctaaaagatcttagtctatcaccacattcaacatgaaccacctattgacactctacatctgattgcacctcaactgctatcaactaaaaattatactccttgcaat

SEQ ID NO: 75095 - DNA, 200 bp, Glycine max
  Clone ID: jC-gmfl02220140c08d1
cattattgaatgaatcatgcgggcatcaaggccaccatgtgtacatcataaggtctagctattaccatacacgctattatacaattacaatctgacagaccaccgtattcgatttacccatcagaacacagtctaaaggcacactgtttacctccacattcaacacctgccaactaaggacagtccactgctgattgcag

SEQ ID NO: 75096 - DNA, 229 bp, Glycine max
  Clone ID: jC-gmfl02220140c09d1
aaacatatatttaacacttttcataatcgaataaataatacgggcataagggccaacttgtgtacattatcaggtctatctattatcatatacaatattaaacaatgacaattacataacccaccattaaacgacttatacataagaactcaccctaaaagatcattgtttataaccacattcaacaccttccaactatttacactctacacctgattgcagctcaact

SEQ ID NO: 75097 - DNA, 185 bp, Glycine max
  Clone ID: jC-gmfl02220140c11d1
attgcatgaggattatgggcataaattcagacatgattacaggatctgaaaaaaataataccatataagatattgatggaccccatttagataacactggagttaccctattgtacgcagatttttagatttatggatctctcattaaaaccactttccttcttacccaactaattacaccttaa

SEQ ID NO: 75098 - DNA, 345 bp, Glycine max
  Clone ID: jC-gmfl02220140d01d1
caaagttaattttcattgaagtaatacaatggctattcatatcggcataagtaacaatttacagattaagttgcaaccgatctgggctcagagtctagatgcatttaacagagggatctgtatacagaagaaaatgtgacaggcatcaccgatatggagacatggtcattctaagcgaaccaaacaggcatagggggaccagtccaaggacccgggaagcgaaaggcctggaagatagtcgtgaccaaagggccttcactgaggtgcagcactagagttttcattggagtcggaaactaccaatggagggatacaacaacctggcaagggcctaccccggatttc

SEQ ID NO: 75099 - DNA, 333 bp, Glycine max
  Clone ID: jC-gmfl02220140d03d1
agaaatagtgttataagcccaggatgaccagcttcatgatgtcctataagggaacaataccagtccaccatgtcaccactgcaagaattagccaactgccaactcattgaacccaggcaatgtggtatccaaaagcactcggggaatagaacgataggctaccccgacttattgtcctatcctactattgagctctcaatgctgatatgaacactggtaacatacgcctggtacaaaaggatcgctatccctgcccaatggcctctgcaatctataaagtgtcttagatcaccttgctggatccaacgacggtaaccattgtatgcaaatgac

SEQ ID NO: 75100 - DNA, 213 bp, Glycine max
  Clone ID: jC-gmfl02220140d05d1
agctgaaatagggcatatgggaacttttagtccaatgggtgtacattataaggcctaattattaccatacacgatattaatcaatgacaattacaatgcccatcatcaacgacttacacttaagatcccagcctaaaggatctttggttatctccactttcaaccccttcgcgctatttagattctacatctgattgcagctcatgggctatc

SEQ ID NO: 75101 - DNA, 327 bp, Glycine max
  Clone ID: jC-gmfl02220140d06d1
gatccttgaatcgcttgacacttattgaagggatattgtgtgcttgaaggccaatgtgtgctcataacccggccgaacaatcagcaaacacgatactaggcaatgtcattctgaatgaccaatataatcgttgtaccctaaagttccatttcttaaagatctgagtgtaataactccttcctcgtagtagccatctagttccttggattattgattccacagctgaagatcataggatttacttgtagcttgccactctatatcattgggaccaaacttaatagtgatcggcagtgacagctatctattctacctggaaacttggtt

SEQ ID NO: 75102 - DNA, 231 bp, Glycine max
  Clone ID: jC-gmfl02220140d07d1
aaacatatatttaacgctttttttaatcgcatataaaacacgggcataaggggcaacttgtgtacataataaggactatttattatcatatacaatattatacaaccacaatttgaaaacccataagttcacgtttaatccattcgaacactgactaaaagatctttggttaacaccactttcaacatcaacaaactatgtatactcaactcatgattgcagcacaactgc

SEQ ID NO: 75103 - DNA, 240 bp, Glycine max
  Clone ID: jC-gmfl02220140d09d1
attcatatatttaacgatttactatatcgacaaagacgatcgtgcgaccgggaaagaaaggctctactgtacagggatcccgaacccatactcgacctctgtccatgacgccatgctagcagatgttgtgtctcctgcacagaatgtctctgcccgaacgatctatggaattgatcactcacaaatactgcaggctatctagaaccccaaggtgcgtaccaacaatgagttctcactgga

SEQ ID NO: 75104 - DNA, 233 bp, Glycine max
  Clone ID: jC-gmfl02220140d10d1
atacatatatttaacgatttattctattgaataaaaaatacgggcatcagggacaccttgtgtacattatcagcactaactcataccatatacaatatgaaacaatgacaataagattgcacacgatcatcgatgtacacatatgattacgctctgaaagatctttggctatcaccactttcaaccccttccagctatgtagaatctacagctgattgcagatcatgcgttct

SEQ ID NO: 75105 - DNA, 171 bp, Glycine max
  Clone ID: jC-gmfl02220140d11d1
aacgaatgattttattgaatgagaaatacgggaaaaaatgccaccatgggtacatgataagaacagaataaaaccatatacaatattaatcaaggacaataacatagcacatcgtcaaacggtttagtcaaaggaactcggactgaaggatcttagactataaccacgttc

SEQ ID NO: 75106 - DNA, 395 bp, Glycine max
  Clone ID: jC-gmfl02220140e01d1
ggggtgaacgaattttttgcaaaaaattttaagtttttcaaacagccgcgttcggacttcaaactccaaaagggctacaaatttaagagccttccagaaaaaatggctttcaaccttagataccaaataagtaaccttggattcttccaattatgggatgattaataagaaacaaatgcttcaaaaccaagcctaaatggctaatttcttgacttcctaatactcgggctcgggagcctgtttaccaccctgagaacctccggctgaggaaccgccacttgaaccacctgtaatgggccctccaatcttggagacaggtttgtttgccgcattaagctttgccttaatttcggcagccttggctcccggcattggtgttctcaaatcccataccg

SEQ ID NO: 75107 - DNA, 480 bp, Glycine max
  Clone ID: jC-gmfl02220140e02d1
actccaattactgattatcattgcactaaaggaactataaacaaccagatatattggtcaaaaacaagaaccacggtaacacgaaaccataaagaaactcgaactcaaaccacaacaactaaaaatacggggcataatcataaaccctaattgacgacatcaagccttagtttctccagccttcatcaccaccattaccaccacgagagtaaccacggtctgtgccaccggcataaccaccaccaccaccagcaccatagccaccggcataaccaccgtcacggctacggtatccaccaccgacaccgtcaccgtcactacgaccaccatattcaccgccaccacgattggatcctgctgctccttcggcgacgtcgacgacgacaccgcgggactgagcttcattgacagtgatattacggccgtccaagttctgtccattcatcgctccgatcgcatctttcatggactgctccgagg

SEQ ID NO: 75108 - DNA, 219 bp, Glycine max
  Clone ID: jC-gmfl02220140e04d1
aaacgagtgacttaatcgcatgtataatgcgtgcataaagtccaacaagtgtacatcataaggactatttattaccatacacaatattaatcaatgacaataacattgcccctcatcgacggcatatgctttagaacacagcctgaaagatctttggctatctccactttcaataccttccaactatttagattctacaactgaatgcagctcaactgt

SEQ ID NO: 75109 - DNA, 233 bp, Glycine max
  Clone ID: jC-gmfl02220140e05d1
aaacgcttgacttcatcgcaggtatcatgcgtgcataaagtccaacaagtgtacatcatccggtctatctattaccatacacgatatcaaacaatgacaataacaacgccccccatcaacgacatatacttcagagctcagcctgaaagatctttgattatcaccactttcaacacctaccaactatgcagattccactgctgaatgcagctcaagtgctatcagtcaaacat

SEQ ID NO: 75110 - DNA, 237 bp, Glycine max
  Clone ID: jC-gmfl02220140e06d1
aagcatatatttaacgcttgactttatcgcatgaaacatacgggcataaaggccaacatgtgtacattataaggcctaactataaccatatacgatattaaacaatgacaatttcatagccccccatcgacggcttatccataagaacacagtctaaaagatctttggttaacaccacattcaacaccttccaactatgtagattctacaactgaatgcagctcaactgttatcact

SEQ ID NO: 75111 - DNA, 216 bp, Glycine max
  Clone ID: jC-gmfl02220140e10d1
acttaatcgtatgaataatgcgggcatcagggccaccatgtgtacatcatcaggactatttattaccatatacgatattaaacaatgacaataagatagcccatcatcgctcggtttacccttaagaacacactcttaaggatctttgtttatcaccacattcaacaccaaccaactatttacattctacagctgattgcagctcaactgctatca

SEQ ID NO: 75112 - DNA, 213 bp, Glycine max
  Clone ID: jC-gmfl02220140e11d1
accgaatgactttattgaatgagtaatacgggcaaaaattcctccatgtgtacatgatcaggcctaattataaccaaatacaatattattcaatgacaataacacagcacaacagtcaccgatttgtccttaggaccacggactaaaggaactctgactatcaccacgttcagcaccagccaactatggacactctacacctgattgcagctc

SEQ ID NO: 75113 - DNA, 496 bp, Glycine max
  Clone ID: jC-gmfl02220140f03d1
gagctgtgtttaaatcttttaacggctttgtattttagttagttcaagattaaaatcttgacctgctatttcaaacaatcaaataattttgttccaacggcctcatcactgagaatgttgagtaccgaagaaaaaaaatattaaaccagatacactagcgggagctgcccaattcacagaacaatgtacattgtgctgaacaagagcaaatgcaattctcttacaacagacctaataaactcccatccattgagtaccttaggctctgagaagccaaacttttcgtcaatagccactgcattaggattgaatagaagcactttctacttctgggcattgctcttctggtcttcaccatcaaaataataggcatccacaaattttcctggctaactaatttgtctgcattgatttcagacagatcccacagggatcatctttagagctgctgcaattggcatgccaaggactccaaagagaacactaccaaaccact

SEQ ID NO: 75114 - DNA, 228 bp, Glycine max
  Clone ID: jC-gmfl02220140f04d1
aacgcttgactttatcgcatgtatcatgcgtgcatcaagtccaacaagtgtacatcatcaggcctcactattaccatacccgatattataccatgacaattacatagccccccatagcagtgttacacttcagttcacagcctaaaggatcactggttaactacacattcatccccttcatcctattcacactctacatctgattgcacctcaactgctatcactcag

SEQ ID NO: 75115 - DNA, 284 bp, Glycine max
  Clone ID: jC-gmfl02220140f05d1
tctgccctttttttattttcttttttttattgcatatatttataacgacatgcacataactcgcatggaagtcatagcggtgcatacaagtcactacaatgtgtacatttatacaggccataactatataccattactacgactatcaaatcacatgacaatatacaaagcaccaccagtcgcacgacttactacttaagaacacatgcctaaaagatctatgtttatcaccactttcaacaccaaccaactattgagactctactactgattgcagctcaact

SEQ ID NO: 75116 - DNA, 546 bp, Glycine max
  Clone ID: jC-gmfl02220140f12d1
gacatagagaaatttgatttgacattcatagatcagaatatcagacttacatacgggtgaacatgatacgggtgaacatgataggagcacaatactatacataaaaactgacacaacaccctattagatatgaaaaactagatagcatccaattacaaaacttaagcatacataagaaaattatgcacacataagtttgcacgtttatttgtcaatgagaggtacgttggaaggaaagaaaaccacacaccacacaccacacactctcattagatagagatgctgttgggaattcctctgaaagtaaggccttccccactggtaggaagaagcacagtgtagggcatctgcgccggtccattacggttcctaaggcttgaattcttgttcctccctgagattttgtcctcaatttccttcagcttgtttccaaacttcttaaaggcttgaattgcctttgtgtcatcagtccaatttggattgtccctctgtccaaggtagacctcatcagaagcatgccttgacaatatctctatcactgttagg

SEQ ID NO: 75117 - DNA, 565 bp, Glycine max
  Clone ID: jC-gmfl02220140g01d1
gaattccaacactgccccttaacaagagttattcttaagacattctagagcggggacttaagtcattgcatccaactaaactacatcaaaactaggaaacggaaagatcccttcatgaatatagcagacgcgatataagctctatagtgcacctaagagacaaccttcaacggataaaatctgaaaagacaaattaaagtacaaaccataaacactgtacacaaactaccatgcactcaaagtctatccatatgctaaagatttaagccgcagttgcttgttgggcggcaatacttttcctagcttcctcaatgattgctagcttaatacctttacccttgggaagagatatccacggctgagctcccttgccaatggtgaacacattgcccattcgagttgcaaattcatgcccagaagcattctgaacatggatagactcaaagcttcccttatgcatatatatgttcttgatcactccaacacgaccgctattccttgcagccgtcaccatgactacattcccaacatcaaatctgttgaaatcaacaatcttgttgctctc

SEQ ID NO: 75118 - DNA, 529 bp, Glycine max
  Clone ID: jC-gmfl02220140g03d1
ggttacatatttattattattattgtgagacattaatatttgtagcatttaacctaaagttcctatagctaacaacagctacactaactagctaactacagcttcttcagaagacagaggaaccagacaagggatcattcaccaaattgaatatgttattccagcaatgcttattattctcatcgaggctgttcacgttgcagaggcttccgcccccgttgattattgccaggttgtctgcttcctccgtgcccaagtcatcgttcgagtcatacacaaccaaagcagccttactatgatcatcattgtcgttattgagtccttcaaggatgacactggtggagagtgagggaggaacaacaacattgggattattatatttgttcgtactgctgatgttgtctgacgctctaaatgcttgcactgccggcataatatcgtcatcttgcatttgcaaattcaacattgaggtggtgtcgtcttttatgaacacaccatcgtcgatgagttgcgctagaggatacatgtt

SEQ ID NO: 75119 - DNA, 186 bp, Glycine max
  Clone ID: jC-gmfl02220140g05d1
aaacgaatgactttatcgcaggcaacacgcgagcatcaagtccaacaagtgtacattaccaggactaagtataaccaaacacgaaatgaagcaatcccaataggatatcccccgatcaacgaccaaccctatagaacacagccaaaaggaccacagttcaacaccacttccaacaccagcaaccaa

SEQ ID NO: 75120 - DNA, 227 bp, Glycine max
  Clone ID: jC-gmfl02220140g06d1
aagcatatatttaacgattgacttaattgcatgaataacacgggcatcaagtccaacatgtgtacattataaggcctaattataaccatatacgatattaaacaatgacaataacaaagcccatcattgaaaggcttatcttaaagaacacagactaaaggatcactgtttaacaccactttcaacaccaaccaactatttagattctactactgattgcagctcaa

SEQ ID NO: 75121 - DNA, 219 bp, Glycine max
  Clone ID: jC-gmfl02220140g07d1
acatcattgcatgaatcacacgggcatcaaggccaacaagtgtacattataaggcctatatataaccatatacgatatcatacaatgacaataacaaagcccatcattcatcggtttacccttaagaacacagcctgaaggatcattggttatcaccaaattcaacacctaccaactatttacattctacaactgaatgcagctcaactgatatcactc

SEQ ID NO: 75122 - DNA, 224 bp, Glycine max
  Clone ID: jC-gmfl02220140g09d1
aatcacatgaataatcagagttacatgggaactacgatgacaaggaaggatatcattataaccatataaactattaaacaatcacagttagaaagctcaaagtcctcggatgacacatgggatcacacacttaaagagcactggttagcatcacattcaacatcaacgaactaattacaatcacacatctgatagcagttcagctgttctaacttgaaattaat

SEQ ID NO: 75123 - DNA, 573 bp, Glycine max
  Clone ID: jC-gmfl02220140h01d1
atcaccaaacttttcatttttttgctgttctaaacagaattccaagacaatggagtaaagatccacaccaagacatcctctcaacaaaaagacttcttattttctttacctatcaaacatgggagtagtaaaaacactagaccatatagatagataagatacggtctgatacaattcattctttagttaaagtcatctgtcttcctcacaggtcctctgggccattaatttccttgtctacaatggcaacaccgtcgggaacttccagctttacaccgggctttgatacaatgctgactttccccttgaggataacaccagctccaaaccatacatcaccagccacttttagactgtcaagctcaacgatactaggaattgacttgaagcggcccaagaagttgctaaccttcttaaattctggtcccagttcaatagaagggttttcaggattttccctagctttgttccgaatgacatatccgtcttccaagtgtagaggtcagactggacaagaagcaaatctgaagttgccttcacaggaaggaatcgtgatcgaggaacattaatccc

SEQ ID NO: 75124 - DNA, 394 bp, Glycine max
  Clone ID: jC-gmfl02220140h02d1
aattattaagaagtaataggattgttcctaccattaagtgtactcaaatattgctcaaagttgatcattcatcattctgtccaacagtgaattctccaaaactgagatattaaatgccgaaactgacctgagatagacagtaaccaatatagaagccgccaacttcgcactgacagtaactaacatagaagaagcctactttgcacgtaaaagtgacttaatgatagcatcactcataccatcagcatgagcaaacatgtgaccagaaccttggagttcatgatagtgaatccatggaagcttttgcgctatgtatcgttgcaatgtaactggaaccatgagatcctgatcttcatgccaaagatggacagagccttcattatttggaaatggg

SEQ ID NO: 75125 - DNA, 555 bp, Glycine max
  Clone ID: jC-gmfl02220140h03d1
aattattaagaagtaataggattcttcctaccattaagtgtactcaaatattgctcaaagtcgaccattcatcattctggccaacagtgaattctccaaaactgagatattaaatgccgaaactgacctgcgatagacagtaaccaatatagaagccgccaacttcgcactgacagtaactaacatagaagaagcctactttgcacgtaaaagtgacttaatgatagtatcactcataccatcagcatgagcaaacatgtgaccagaaccttggagttcatgatagtgaatccatggaagcttttgcgctatgtatcgttgcaatgtaactggaaccatgagatcctgatctccatgccaaagatggacagagccttcattatttggaaatgggtctccaagatcaaggggactatattcccagttaccgaaaccaatatttaagtcgcggtggagggtttcataatcaccttgctgccttacctgtgccacataactctttctattagacatcttatgcacaagttctttgtcttgatgagaaaggttttccgg

SEQ ID NO: 75126 - DNA, 236 bp, Glycine max
  Clone ID: jC-gmfl02220140h06d1
aacgcttgacttaattgcaagaatcatgcgggcataaagtccaacaagtgtacattaaaaggcctaattataaccatatacgatattaaacaatcacaataagatagaccctcattatcggcttatccttaagaacacagcctgaaggatctttggttatcaccacattcaacacctaccaactatttacattctacaactgaatgcagctcaactgttatcacttaatatgtaaa

SEQ ID NO: 75127 - DNA, 207 bp, Glycine max
  Clone ID: jC-gmfl02220140h07d1
aagcatatatttaacgattgacttaattgaaaaaataatacgggcataaaggccaacaagtgtacattaaaaggcctaactattaccatatacaatattaaacaatcacaataacatagaccaccatcgtcgacatatccttaagaacacacactaaaggatctttgtttatcaccactttcaataccttcaaactattcacattct

SEQ ID NO: 75128 - DNA, 237 bp, Glycine max
  Clone ID: jC-gmfl02220140h08d1
aacgcttgacttgattgaataaattatgcgggcataaaggccaacaagtgtacatgatcagggctatatattgccaaagacgatattaaacaatcacagttgcacatcaccctgtatacgacttatactaaagctctcactctcaacgaggattcactagatgcaatgtcaatacctgccgacaaattagactccacatctgagtgcagcacaactggtacatgtcaataggataat

SEQ ID NO: 75129 - DNA, 251 bp, Glycine max
  Clone ID: jC-gmfl02220140h10d1
aacgcttgacttaattgaatgagtgacacgggcataaagtccaacaagagtacatgacaaggcctcggtattaccaaacacactatgaaacaatcacaataagaaagccccggctcaccgatctaccctaaggctcacgccctgaaggatcactggtgatcaccaccttcaataccaaccgactacggagatgccaatgctgattgcagctcagccgatatcactcgaaatgaaaggcccgcaatgtgtgc

SEQ ID NO: 75130 - DNA, 416 bp, Glycine max
  Clone ID: jC-gmfl02220140h12d1
acgcttgacttaatagaatgaaaaacacgggcataaagtacaacaagagtacattacaaggcctcagtataaccaaacacacaatgaaacaaacacaataagaaagcccagtctcatcggactacccataggctcacaccctaaactaacaaagcgtataaccaacttcaaaacccaccgacaattgagactccaacgatgatagcagcacagacgatgtaactagaaatgaaacgtccgcaatgctgggcttcgggcatcagcagacatcgagtcagaaagtgcaatgctcgcggatcagagaagcctagcttcggacccaggacggaacgggggctcagagctataacgttgtactatcatggtggatatctgctctgaacaatgaatggctagtaacaggtccatgagccgaa

SEQ ID NO: 75131 - DNA, 337 bp, Glycine max
  Clone ID: jC-gmfl02220141a01d1
ctgtagtaaagcccttttgcccgatactcacaaggccatactctagaaaggggttattagggatcgaaaaacgtaaccaaagttaataatccatttggcccccaaaacaggtgtaacatgtcatgattaaatactacatttctcaatggcacagcttaatgctaaacctggccaaaacttgaggaggagcaaaatcaaagttttcccttgtctctctacttcatcttcttctgccaccttctgttcttgtaatccagcaacatctggggcatcttctgcatcaacttggcagtgtttgcacgcttctcagcggatatcctatcacatttgtgtcctt

SEQ ID NO: 75132 - DNA, 464 bp, Glycine max
  Clone ID: jC-gmfl02220141a02d1
aagccaggaaattgcaaacaattttatttgattggaactacacaactaacttatgggtgaaacgaaacctttggtacaaaaatgcttggatgaaaagaaatgaatcacctcctgggggttcagtggggaataaaatgctgggaaacatcctgatacaacgacggattatgactttaacgggaacgggctttttattgcataacgggctggttttcataaactggtgaccacaacgaaggcttttaatttccctaaggggaaaaccacctttctgcaagggcactcaagctttcgaaattggttcgaccaaatcgttactggaatcccagagttcctttgcaagctgattgcttttggcgtgtgaacttggtttgcattgtttgcaatccacaatggacttcccagttgcacctttcacgcttgggaggagagcaacataacatggcgtggctgctccctggggg

SEQ ID NO: 75133 - DNA, 499 bp, Glycine max
  Clone ID: jC-gmfl02220141a05d1
gtgcacagggaggcacgctttatacaataaatttgataaatgtatcaaattttacaggatgtttgacacaagatggtggcacgttaaccctcagaaacatcaattggggagcaaaataattagacaatcaagacatgaataatgaattatcaacatatctcgtttgaagctcctgaatgaactatgcttaaccaatgaacaaatgcaaccttgacagtaacttatctacttttggcatccccctttgattgaggaggaggaaccgttccaaaaactttatcccacagtggtgatgtgatcccaaagccatagttctggagccgataatgatgattcaagtgatatttcttgagacttttgggcacatcagactttggttgaccatggtgtaagtagtaatgggtgcaatcatacatcacatagcccaacaaaatacctacaaacaccgcaggagcaactgaaggggtgcatatcagcttgaccaagttccagatcggga

SEQ ID NO: 75134 - DNA, 461 bp, Glycine max
  Clone ID: jC-gmfl02220141a06d1
aaattaaattactaagcctattaaacaaagtttaagagcggaagttcatccaatgaaacgaaaggggggggagactggttagagtgagaaacattacataacagtttccaaacgcatactaatttcatctactacgacggaggacaaaatctgatcaaaggagctcatgatcatttgaaggctgctcctcaacttgcacgttgtaaaacttctggatgtcaaacagcattttctcgtcatcctttgggacaaaattgatcgcaacacctttccttccgtacctcccactacgaccaatacggtggagatagttctcaggctgtgtagggagatcaaagcttataactagagacacttgttgcacatcaataccacgagccaaaagatcagtggttatcaagacacgggaagacccataacggaattcacgcataataatgtccctggtattctggtccatg

SEQ ID NO: 75135 - DNA, 367 bp, Glycine max
  Clone ID: jC-gmfl02220141a07d1
ggagatatggtaacggttataaagcacagcatctaaactgagataacccgtcggggcatgttcaacagggagtgaatgatcttgggcaatcgaccgggtgtcttgaaactctatatcgactctactattgaactggtgaaagactcaaagtaaggaaagcttgtgcttgacgatggtggaaaaatctctgatgggacatgggaattttgccccaatgatgtttatagacctcctatggatgagggtttatgtccacagattctatcacctaaagatttgcctgtgacaagtcgtatgtgcaaaaatagcgacatgtgacatgatgcaatgcttagcagttaaagataaaacctttgatgactatatt

SEQ ID NO: 75136 - DNA, 443 bp, Glycine max
  Clone ID: jC-gmfl02220141a08d1
cctctatatggggatccatagtggatatgatttacaaacgaatccaatgaacgcctcacacagttatatatcaactgcatcaactgggagggaaactggcctgtgcacagagtgtcgatacactgagcccgcgtaatacctctttgctggtaccataccttctccaggggatgaaatcgccacacaatggtgggcccttcggttgtccgaattggggctgctttcacggacatgatggtgcctcctgtaatgacaattccacttggccgcaaagggtttcacctgatgcccattgttgcctccctataatgttcctgtcagtgaaggtgacacatggccattttctgttctgtgctcactgatacatctatgcgaacattgcccatactgtcgatccttgtgaccgcttacctacatttggtactaagctgtgagccatctga

SEQ ID NO: 75137 - DNA, 365 bp, Glycine max
  Clone ID: jC-gmfl02220141a11d1
agttattccgatattcggacgcatcaacttgttctgaaatcacattgatagcctttactcgtgtcctagctcgtgtaagagctagatttgcctcaattgttcgtattgtgccttacggcttattcaaattaggttgtgctatttcaagagtttgctgcgcttcttggggatcaatgatactacccttttgcgtctaatttactaaaccagcgatctcagtagtgagtatcctagcaaaaccgctcatcaacaagatcgttaaccactgggcgttatgaagacctgtggcaaaaatccctattgccagcggtgctgcggcagacgcaccatctgtggttgatgagattactgcgttcgacgtggag

SEQ ID NO: 75138 - DNA, 392 bp, Glycine max
  Clone ID: jC-gmfl02220141b05d1
attacaatctcttgcgtattaccgtttcagatcatgtcaggttctatggatcgaaatctaactgcataatcttaattcttaggaggtaataaccctcattgaatcatatatgctagttgacgacacaccaaaggcaaacaaatacactgtacatactaagcttgacagatcatgaatcatcaaaaatgtcccccaagatgatgatcgatgtcaatctttaagtgggtccattccctgcctcagatcagctagttcggcccttctcactctcgttttgacaagcacctctatatactttatgtcaggtgaatacactggtaattgtgattcaatgccaacccctgcgatttacctcctaactccgaatgtcacattgagtccaacttctcggc

SEQ ID NO: 75139 - DNA, 479 bp, Glycine max
  Clone ID: jC-gmfl02220141c01d1
aaaaaataatatttttttgaaaaaaaaaattctcaaaagttcttctcttggattccaacctccagcatggagaacttttaagcaagaatagcgatagatatgataaacaaagattcttgagttcaaaaaccccattaaagaagctctaacatcattccacttctttagtttagctcttccttgcctactttgttatacgtaaaaatgcaagatttataaccaattcggccaaaacgattctacacttggacactgctcttctcattgcacagaaaaatatgttgagagacggattggtctcatgtttctccttgccccccgaaagagacgagctgcagcacagggatacgaaattgattcatatttcgcattttctgcgaaaaaagaacaaaatgcacatatagtccacaacatcagccgataatacaatgtagcaactctacccaaagctgtctatgtacaaaagatattgcttcagc

SEQ ID NO: 75140 - DNA, 504 bp, Glycine max
  Clone ID: jC-gmfl02220141c02d1
caaacttaaaatccaactatatttttcagtatttcccaccttgcttctacccctgttgaaagtaacaaagtaaagctgctctgcatcaaagtagatctaaatttacaagacaggaaacgaccaacaaagtaaaataaaagaaagaaaaaagaaaaagggcaaagagaaggataaacccgaacaaaaaccaaaagatataagcatcttaggcagaaaccctaaaacccaaaaaaccctaggagtaaagcctgttaggagctaaccactgtaaacaaaacccaatgagaagggattggtgctagcattctatgaagtaactgcggccagccaatctcaatatacagatctttatcttcactaggcaaccaatctctatcttcagactgcaagagaagaggcaagaaagataaaatcaggcggtcccaagtttctgataaaatacttgtaagaaccaatatatgccactgaaatggattggaccgcctccttcaaacacagtagagc

SEQ ID NO: 75141 - DNA, 451 bp, Glycine max
  Clone ID: jC-gmfl02220141c06d1
gtcaacataacataaatcacagaaattcattgactacaataaaattttggaggcctgatggccttatatatggcactcaaattaaattattgcctcaataaaaaggagtgaaaactataaagtacagtaaatcataaatttatcttagacaccaaaataatacttaggaaagggaatatggcccaactagatcaggtacaatgcaagaaaaaaaataatatgtgaaatttaaatgttctctcccaaattgatcatctttacttgctgctgctagattccttgctagtttccttgacgatagtcacagggcaagaggcatgggtcatcacaaagttgcttacacttcccaatataatcctttggattgtgctgaggcccctgcttcccataaccagcgaatccagcttcaaatcttcaatagcatccaaaagtttctctcttgcatcccccc

SEQ ID NO: 75142 - DNA, 503 bp, Glycine max
  Clone ID: jC-gmfl02220141c07d1
cttgaatctcctcacctcagtccatcttctattttagaacaagatctattcttacaataaacagttcggcatggggtcttccaacatccaacagttgtggggtatctcaagtctaaggtgtcgattttaagtacatgctataatcatttggctgaaatttggttatgacaaagttacagatgttacaaagtcttctaagatttgctataagtctcctgtaaactaacacctaggatgctattcctgctggggattactggtttgttgattgattctcttgcatgtgagggcaaggtatttttggttcccctcttgtccataaaaccttgagttcacctcttttctttcccaatgacaaaaaggttccaagtgtaaatgggactatataaagcaaagctggttgaccatgtccatccattaagttcaaagccacgtctgtgataaggagacctagaccatatgcagtcattgcccacatgatgtacccatctcgaaggttcttc

SEQ ID NO: 75143 - DNA, 562 bp, Glycine max
  Clone ID: jC-gmfl02220141c09d1
cacatacgcaagatggatttattgaactaatgcctgaccaaatggacattgatgtcaaagatataactgggaagctcaatagaaaaattcgctacttcataaatacgaattgtagaaaatgcaagctatggcatgaacaatagacattcgcacaatacatctctacacaagtgacaacttttctgcaggaattgatctcttgataagtttattccaggactcattggtctctgcgataaccttaagcgcataatccttatttgctgccttgatgccaagtccaaatttattatcaggttttccatcaaggatcttgtagtctctaaaccagtccctaattgcaggtagagttcctggaaaatgctgtctcatcatcatcaacatcatttacaaatggcgccttcggatcatctaatgaaattgcaactattttccaatcaagttctccttcatcaatcatgggtaatgcacccaagggtttgaccttgagaaccttacctattttcctgtgagcttcaccaatctcaaccacatcaactggatcactatgtcccaatgctcc

SEQ ID NO: 75144 - DNA, 541 bp, Glycine max
  Clone ID: jC-gmfl02220141c10d1
aacagcaatcaaatatgttcgtcatttggaattggaatttgaatacaaatacagtgcatgaataatataaccctatgtacacagccaatatctgactgaaattcgatacagaatagtatcaatttgtatcataataaaatggcacagagaaattcatgtgaaggtaacggggaagtgtatcagctggtgttttaattcttcgtctttcattgacttaatcattggctccttactgcacgttcacatttactttatctgcttaagcactgctgaccttgttcttactcccaaaggtccaatggggtttagccggagtactcctcaatgccttgactccgaatgggttgatcttgctcttgagacaagttccagcataagtgttgcagatgggatagtcgttagggcagcaactgtcctggtcatcacagcaggtagcacccttatgaggacatcaaccgcactcaaagcaagcattttcgaactcgaaaatacagccacaagtagcactatcagcacatctgcagtagttgtcacagacatt

SEQ ID NO: 75145 - DNA, 588 bp, Glycine max
  Clone ID: jC-gmfl02220141d03d1
gaaataaaaacatatttaggcttgtcaatacattaagtcctgctttattctcgttggctacattccgcaaaaggtgtctagtcactcaagatgaagtttatatctttgatattattccttaacgaaggagaaacaaacactgaaaccaaaataatgaatgcccccccagtcaccagctgcaaggcaccattgcttcaatgtgttgatctaccacctatgcaaaaaatgaaactagtattacacgtctttcccttgtttggcaataaaatttaagactcctccactcccaaatattgggagtgagaagctgccaggagggctgcaccaatgccagagccatcattagcatgctcaatgacaatggtctcagcagcctcatctcccagcaattccttcagtgcactctccaagcattctctaaatttggtgtactgttcaaacaaccccccatccaacgctatcactgacttttgcttctccccaaccttaactgcgtctcttcctaatttcttaaggatgcccaaaataccagcagcagcaagccgagctccgcgagtagcaacaatgtcacacagttcatcaacgatc

SEQ ID NO: 75146 - DNA, 431 bp, Glycine max
  Clone ID: jC-gmfl02220141d04d1
attcattaaataaattaatgacaataatttagaacacatggcttaaggtcaaacagaatgatagaatgatacaacttacagctgacctggaaagacaacaaagcaatgaatcgagagatccttaaaaacacagaaaaaagtcttccctaggtaatatataaagtgtctcaacatgtttagcagcgcatggtctctacattaaaattacatagagcacagattgcccttgtataaattcctacttctccatgtgggggctatattgcctacaggctaacgaaaccaataggaggaaaatttacgattttatataaaatcaaccagtataatatggcagaacacttgggcaagacaagaacacccttctcaaaggtagcacatcaccatcactgtaaaaagcttaacttgcaacgggttttgcaatgactttt

SEQ ID NO: 75147 - DNA, 334 bp, Glycine max
  Clone ID: jC-gmfl02220141d06d1
aaattacttatatcattttgatcagattatcaccatgttatgatttttgaaccacaaataaccacgcaccgagtatatcaacaatgcatccaatcacttttttgagatttacaatcatttcattcccaacaaaaataaattcaagaactgacgatcaaatgatttgaccttcaagaaaacgtacaagtcaaagaattgcagatttcagctcgagtttgctacatttaaactatacacattgaagtctcaatcttctagaacgctgaatgaagtatttcttgatcatatgatcatataagggacgtttacatcattcagttacataattgacccc

SEQ ID NO: 75148 - DNA, 458 bp, Glycine max
  Clone ID: jC-gmfl02220141d10d1
aacagcaatcaaatttgtttgtcatttggaattggaatatgaatacagatacagtgcatcaataatataaccctatgtacacagccaatatgtgactgaaattcgatacagaatagtatcaatttgtatcataataaaatggctcagagaaattcatgtgaaggtaaaggggaagtgtatcagctgatgttctaattcttcatgtttcattgacttcatcattggctccgtcctgcacgttcacatttcctttatctgcttaagcactgctgaccttgtacttacacccaaaggtccaatggggtttagccggagtactcctcaacgccttcactctgaacgggatgatcttgctcttgagacacgttacagcataagtgttgcagatgggatagccgtttgggcatcaactgtagtggacctcacaggtcgtagcaccctgctaagacagcaacccc

SEQ ID NO: 75149 - DNA, 547 bp, Glycine max
  Clone ID: jC-gmfl02220141d11d1
gtcaaagtcaaagggttgaatttgacttagtcaacacagacggattgctggggtgcatatatgaaggaggggatgtaaccatcaacatttattatatttcaggattcacaaaaacaatgggctaggcccaacatgaaaaaggtgcatgtgttaataaggtgtaaataaatgttttattttatttcagacttcataaaaaatgggctagaaccaaaataagaaaagagtgcatatttgaaaaatagggcgtaaatagcaattttttctggttaggttgtaaccgggtcagggtgacccggcttaacccgtaattagacaacatggttggaaaatcctacatgtcctaaccttgaaacggtgcaacaaaagggggaaccaccacagagggtggtgtgccccctcagtggtgtacggcgctactacgcgaggccgacacgtgggggacagcggctacagtggcatgcgatacttcacttgcaaatggaaaatgaaggaagaaatagaacattagaacataatgattatggaatgcataaaagatcatgaa

SEQ ID NO: 75150 - DNA, 499 bp, Glycine max
  Clone ID: jC-gmfl02220141d12d1
gtcaaagtcaaagggttgaatttgacttagtcaacacagacggattgctggggtgcatatatgaaggaggggatgtaaccatcaacatttattttatttcaggattcacaaaatcaatgggctaggcccaacatgaaaaaggcgcatgtgttaataatgcgtcaataaatgttttattttatttcagacttcataaaaaatgggctataaccaaaatatgaaaagagtgcctatttgaaaaatagggcgtatatagcaattttttctggttaggttgcaaccgggtcatggtgacccgtcttaacccgtaattagacaacatggttggaaaatcctacatgtcctagccttgaaacggtgcaacaaaagggggaaccaccacggagggtggtgtgccccctcagtggtgtacggcgctacgactcgaggtcgacacgtgggggacagcggcaacagtggcatgcgatacttgacttgaaaatggaaactgaaggaagaa

SEQ ID NO: 75151 - DNA, 383 bp, Glycine max
  Clone ID: jC-gmfl02220141e01d1
cacaccaaaggatctgatccattaaaagcaattaattcttgaaaaccacacaccattcactcggcatttttggaacacttccctaatccatattgcattacttagtgggggggcattgattactcatatttaaggcacaaacataacaagggcaggatggaaaaccccaaaattataaacgagcatcatatagctgttaataataacaacaacacatgcaacataaaaaccacatgcaaccggggtactggcatctttttcagatgggaaacgcctaaatgatggaaggaaaagccttgatcttgatgatagtgcaacgcgcgaaaccggtttccttgaacagccacttccagttctcttcggccctttttttgccaccgggc

SEQ ID NO: 75152 - DNA, 162 bp, Glycine max
  Clone ID: jC-gmfl02220141e04d1
aacactcttgatcattgatcgcaagaatagttagagtgcttactagcactgccctaaaacatatcacaaggacaaacagtttgcaccaaactaccaatgaacagattgataagctacaactcagtatatgccatcttaaaattaattgaaattcataaatat

SEQ ID NO: 75153 - DNA, 531 bp, Glycine max
  Clone ID: jC-gmfl02220141e06d1
cacaaaaaatcatagcattgaaaaatcttaacaattttaaattaaaatgtgaaggagaattatccaaagctagtctatctagttataactcatctacataaatgttgatgccatacaacatggttgtcccttatcacataaaagccgaagagggaaaaagaacaaaagaaccggaatatccaaattttaggtagaagtaccacaacagaaaaatcttggataacaaataactcaacatctgtgtgaaagaccacacaggtgtatatacaggtgaaacagaccaaatgtcatgcgtctcaacagcacctatctacctgatagtgacaaacttgttggcgccgtgtctggcccaatgagtcttcagatcaatagggttagcaaagttataaccttcagcagcaagtttctctaaaaccttgttaaaagcaccttggctcattttccgcccagctatccttgcaccacgccttttcatgctcattgggcaaggatatattgacacatttgtggtgcaacaagccgattgccaac

SEQ ID NO: 75154 - DNA, 366 bp, Glycine max
  Clone ID: jC-gmfl02220141e07d1
cggaagggacactcttgcattaataccaacaacaaactacacacctgaaattatcatcccaaaataaaaaccgccaggagacaaaggaactacaccagcaagccctagacgatacggaccaggcccaaaggctaaccacgtatatcattcaccagttcacttgcgccttccttttgggcacttcctttcgcgcggcccatgattgccaggggaaccccattggaataccaagcttctgattcgcattgggccattgaaaacctgccatgatggtcgtcctaaaaagcattctacggtccaaaagcgatcccatataagccgctctcgacaccgtgaccatgaaacacaaggtgtttggatcttcca

SEQ ID NO: 75155 - DNA, 458 bp, Glycine max
  Clone ID: jC-gmfl02220141e09d1
cgtccggactaaggaacattactttactgaatcaaaggtagagagaagagcaacaaagaaaatcatacaaaaacagaactcatatttcacatttgatcagaagcaacacaagatccatatctctataaaaactcacaattacatacaccacacaaaacacaaaattaaccattaaccaaccacatagaactgtttgttctttttttttttcccctcaaaggaaaaaacgaaaacaaaaaacaaaaactttcttcccaactccccctagtgttgtgcagcatactgattaataagcgagagagcattgctagtaacctgagcaacattgaccattctagccctaatcgcctccttaatcttcccattcagcgccttcccggcgaacccatcgccgcatgtgctctcatcggtcaaagccgaactcacccacgtatcaacggtgctgatgtgccacgtga

SEQ ID NO: 75156 - DNA, 483 bp, Glycine max
  Clone ID: jC-gmfl02220141e10d1
cacaaaaagagcaaattatattaattattatacccattcaacttactgttttaaagtaaatatatatagtatatattgaaagttaaaattacaatttacttattaaattacataattattggaaaacttagcagtaaaaggaaagtaagcacttgaaatcatcaacaactaagcttactacacttatgctttgttgcaaggtggcataggagaaccacagagacaattatttgcaacaaaagcacttgccggaaacttattcttgggaagctgaccactaagatggttatagctaacattgaacttctcaagcccaacaacactgtttggaaccttcctaaacacccaattacgagacagatccaataacttaatcctctgcgcaaaccttaacttgcccaaatcaaactcaaacttgttgcccgaagcccaaaaccttaccagatactcagtactatttaccaacccaattgcactccctga

SEQ ID NO: 75157 - DNA, 532 bp, Glycine max
  Clone ID: jC-gmfl02220141e12d1
aataaagacagcgccacttattttcatttataatagaggcaaatataaggcatacatagatgagccagctagctaataagacataggcaactgaacacaacacatgatatccccacaaaggataaaccataagacgtacaaaagcacaaaggtcaggactattattaattcatggcccttaaaaaatactaaaaacaccaagggggcatgcaaatgatacatatgtaattattattaattaagcaagaatctccttcaaaggcttggcctcaagttttgcctatcgatcaagttcttgcaaatgctttgcattctcaaggtcctgcaaatgcttgtccttagccagcttattgatccttgcaatctcaatgtccttgctcatcttcctcctgtacatttcagcaaaagtgattggttcctacatcacaggcttctctgcttgtcttatcatcagagggtaaacagttgcattaggtgctgggttttgcaaagtggctatggacaaaccgctatggtttgagttcaccaccgc

SEQ ID NO: 75158 - DNA, 569 bp, Glycine max
  Clone ID: jC-gmfl02220141f01d1
atgattaacgatttaattttgatatgtagattaaataaacacacgaagtacaaataaacattggtctctctaatcacaaaggagattaagtccattgtggtgtgccttcatgactgaattataccaaagtactacccttaacatactcagtaaaagccagagcaatcaaacccaacatagcaaatctcccattccacaggtctgcatctgaggacatgaaccctttggacttagactccacgctgacaccttggaagagtggaatcaaggaagcaagggtaaggaccacacttgtccccaagaaccatgggatgccaccattggatatttgctctaacacaccttgccctttggctacttccactgccattgcagccactaacccaatcatggccaaccttccattgatcctctcaggtgctggcccactgaatgccaacacatcagaaaacttagtgctcacctttggtgaaggagcacagactggctgtggcttgagttctactgatggcggccggtgtactggggttgcaagctcacttggtagctcttcttagccatggacctac

SEQ ID NO: 75159 - DNA, 458 bp, Glycine max
  Clone ID: jC-gmfl02220141f06d1
agacggagtaaaacacctattattatataatttttgtgacaaacattattagtagcaccagcctctagcaagctagggcgttattacatttttcttttgtcacatttaactacgatgtttgaagctagatggcctcattgagcacaaagcttggaagatccaaagcatcattgctgctaccatctgacaacttggaagcaaaagaccaagaaatcacatcatgggtttcaacggagccttcatgcaacccggtggtggcagagaacccaacgctcacccattcgggaagattactcttcaagttcactgtgtcagagaggatgtaacttgttttctttgaagggtggatcagagaagctacctagaggctcgtggcggcattataggtaacgagaatctacgcacttgccattggacacccccacgatgccgtttgacggactcgatcgagttcacgt

SEQ ID NO: 75160 - DNA, 582 bp, Glycine max
  unsure (1)..(582): unsure at all n locations
  Clone ID: jC-gmfl02220141f07d1
acgctgaataacttaattatactgaataatcgcagcagaaatatcaaaataattgcagcacaagggaattaaaacaaacaaacatacatactgaataacttgataccaagaaaaaatatcattctatgcttgtgtaaagagccgaagttatcttcaccttaaagaattgtagaagcctaaccagattctttgtaaatccacaatatttcttcaaaaataccttgacaaccacaatgatattgtcatagcagaagccatatagcgccttcacattgatattccaatcatcgccagaagatttacaatgttaatgacctaattctgcattacaaatgttgtcgcccgaatctgaacttcttacaagtagataattgtacaattatacaaagcccccgcaatacaaatggcccatcttatttggatacaagtaaccggagtttaccaaatcaagtaagatgaacaagggaacaatttacatgacatttacaacagtatagcttcacaatntctataaacagtaaaattatgcataaggaagtcgcagcaggcagctaatatgaaatgaagacaattattaataaa

SEQ ID NO: 75161 - DNA, 417 bp, Glycine max
  Clone ID: jC-gmfl02220141f09d1
cacaaaaagaccaatttacattacttatcttacccaatcaacttactggttaatagtaaacataatccagcatatatctgaaagttaaaattacaatctactaattaaatcacatacttcttgaaaaccttaacagttacaggtagttaaacacttgaaaccagtatcatcaacgttgactacacttatagctctctgaaaggtgccaaaggataaccacagtgacactcatttccaacaaaagcacttgacggaaactaactctcgacaagctgtccacaaatactgttataggtaacattgaacttcgtaaggccatcaacactgtttggaacactgcgaaacacccagttacgagtctgatacactgactaaaatctctgcccaaaccttatcttacccagataagactttacc

SEQ ID NO: 75162 - DNA, 54 bp, Glycine max
  Clone ID: jC-gmfl02220141f11a1
gtgcttcagcgtggctcttattgatgctggctacgaagaccatctatgacgttt

SEQ ID NO: 75163 - DNA, 514 bp, Glycine max
  Clone ID: jC-gmfl02220141g02d1
atcctaaaggtaaaccaatctaaatccaagtatagccacagaaaatactctcccttggtgattttaatgtcatcaaggtgaagaagcatcaaataaaattccagaagtcaaaattttggttattgtttaacataaatatgtaattctaacagaaaaatctgccaaaaaaacaatactccattaaaccaagcagcagcatctcaggcttctgagattggatactcaaatactacatcttttccagtaagcttcctgtaaactccagaaaaggtctccagcttgtactcagtgttgttgcgctccttggggtccaagaaaaccttcattatttttgagccatcaattctatatctggcccgtttgccaacaatctctgcaggatacacaacatcctccagcatggcatcatggacagcggtcaaagtgcgggttcggtgtcgctgaacagcagagcctttctttggcggtcgcacgatcctccttgtggcaatcaagacaacattcttcccactaa

SEQ ID NO: 75164 - DNA, 489 bp, Glycine max
  Clone ID: jC-gmfl02220141g03d1
aaaatggttgtttattcctttatacaaaccaattgcttaaattgacagaaaattttctataaaaaacatattgtcgctttctataaattgggaaccttctggtaatatgatttacatctccttacataaaagaccttcacctcgatctacttcttctgcgatcattcgaaacttgccttgaagtcgaaacacgagtgcttcctctgggagatgaacaccacgaagggtccaatggactagtctcagtctgcatgttactacctgctgtctgaatctctaagccaatatcatcagtggtgtcaacattcctactgaaacgcgatggagaaactgcaggtgcggaatcagttgcagcaacattcccatcatgagttgaatttgtattgacaccattgggtgggtgatcatgaatctatgactcaaggtcctcaactaatctttcagcagaatccatcgcagaatttaatgctgatgaaagggatgaaaacg

SEQ ID NO: 75165 - DNA, 411 bp, Glycine max
  Clone ID: jC-gmfl02220141g04d1
aaaatccaatcgaaatgcatttaggatttccattttttttagggaaaatgcattaacttttactaaggtctaagcactagcataatactgatgtttcattttggtatgtttcctactcactatcgaaaaaaaaaacatgactgagatgtatgaaatgttgccacaggcagactgatattctacctagatactgggaaattgcctttggttcggcccccccatttgtgtataccatcccattcttaagctcctacgttggcattctcatatgctaaacatgggtcttttgctcttcctctattgcgttctgcaactcatgcaccacatgttacagctgcgcaaattgcttcttcctgagctacaacaacctctaaccatccgtgttctcggcatccaacgcggcaatttcct

SEQ ID NO: 75166 - DNA, 475 bp, Glycine max
  Clone ID: jC-gmfl02220141g05d1
aaatatataagttggaacatcaacacaatggataatcagttgttcacatagtctcatacaagcatgactgaaccaaagacgcttctttggaaaacctgacttagaatcctcaatttactggaaattcttttaaaacatgaatacatgctaagatggctctctgaaaaatcgtcatggaaggtctactcttctaagatgatctttaactaaaatccatgttagaaagatattcctctaaaacggttcttagcatagaatcgtcgcagaaaaggaccttttttctaagacagtcgcttatgaaactatcatataaagtacagactttctacgacgttgcctacgatgatggcggttgataaccggcatcaactggggctttgtaccgacataagcttgcgggtggtgcattagtgtcttaaggagtgttaacagtgagtcctgaagaatgaccgaacactggatctagtcctacaga

SEQ ID NO: 75167 - DNA, 414 bp, Glycine max
  Clone ID: jC-gmfl02220141g06d1
aatgatgagcgtatattaataagattttatcaacaaaaaaaattacacttttcattgcataatcattaattgctccgaaaatacaagtcacattcgaagtttctttcctaataaaatttgtattctcacttaggacttacactctcttcatgctcatccaccaaggctagaacattacgagctctttccaatcagtgggctgccatcgtgcagcttcagatctggaaggtttgaccacactgattacgataatatattcagaccttcatgtgcctgagcaccagaggcttgacactgatgcatctgttgcatccttacttgctgcatgctaacaccggatgatcccaagggccttcatggccagataccaaccgacctatcactcatcttggatgcatgtctcagatggacttt

SEQ ID NO: 75168 - DNA, 415 bp, Glycine max
  Clone ID: jC-gmfl02220141g11d1
aatggtcactttaaacagggtcatcctgtactaaaggctgtcaatcaaaggctcaaattgctgttctgatcagcaaaatgggctttttacataatatgagatggagcttacaattgcacatacttgactacttacactgtgcacacaccaacatgtgctcataagctaaaaggatgttcataatgaggatgctcgatggaagaatcaagcccacagttggcggatacatattaaccagagacttgacaatataatcacactgagaactgcactggctgccaatctccaagtatgcttgtacatttacctcagtcgcatcaatatgttcaatatgctcgcccttgtgattgaagtcacacaaaccatttacatgagtcttatcaccatagatgggtgccttaaatgtgtgatgctt

SEQ ID NO: 75169 - DNA, 428 bp, Glycine max
  Clone ID: jC-gmfl02220141g12d1
gagcacaatggtattaactggcctcaaattgaaaacataacccttttttatctgcccatttttgtcaattaatttgctatgtaaattcatcctgggagggatattctgagctactttctcaacaagaagatctttgccattttcatttgaaccaaattttaccttggcaagcaaaaaaattatactattaaagccggcgataaacctccattgggaaccaaccacttgagtgccatttcttgtttgggctattatgaaccaacccttttctaccgcatgtgtctaagttgaaacagaacaacttgatagtaaaagggaaagacctgctttttatgctatcgagaaaattcagttaggccacatccaaatggtttggactttcttcggaattccgaattttcctgaaccctgggggggagaggtataat

SEQ ID NO: 75170 - DNA, 589 bp, Glycine max
  Clone ID: jC-gmfl02220141h03a1
tcgagctgatgctaaagtaataagccttggaattggtgatacaactgaacctattcctgaagtcataactgatgcaatgtcaaagagatcacatgcattgtcaactatagaaggatacagtgggtatggagctgaacaaggtgaaaagccattaagaagggcacttgcttcaacattttacagcgatcttggcatagaagaggatgatatatttgtctcagatggagcaaagtgtgatatatctcgtctccagattgtctttgggtcaaatgtaaaaatggctgtgcaagacccttcatacccggcatatgtagattcaagtgtaattatgggccagactggcctctaccagaaggatgttgagaagtttgcaaacattgaatacatgaggtgtaatccggaaaatggtttctttcctgatttatcttcaatttctcgaccagacataattgttatctgttctgcgaacaatcctactggtgttgcggcaacaagggaacaactgacccaactcgttcagtttgctaaggacaatggttctatagtaatccatgaatcagctcatgcaatgtatatttctggtgacaac

SEQ ID NO: 75171 - DNA, 487 bp, Glycine max
  Clone ID: jC-gmfl02220141h07d1
gttaagcataatttccgtcttgaaacataacacatcaatggcatgcctcatttgcgtggtagctgactctttcagcgcagaaaggtggtgtagcataataacaaaacaaaacaaaacaaagtgcatctgagaacaaaactagagcactaactttcagcgctgcaaccatattcatgctatcttgatagtaataaaaaaaaggaaaatacaagtaataaatgactcaaacaaacttaaccagtgttctgcatgccaacagcaatacccttcatagtgagaatgagggtgtcttctaaaccaggagcatattcactagtcgggttcagatttataagttcatcagctgatttgcttgcctctgcagattcctttgatatgcgggggcgcaccttcacatcgtagttaggatcacggatacgtctcaatgtgtaagctcggacaatattgagggcggtaatgggagcatgacgaatcctgagtctttgct

SEQ ID NO: 75172 - DNA, 433 bp, Glycine max
  Clone ID: jC-gmfl02220141h09d1
aactgtccaatgactcttatagccaaaaaatggtatcaattggaacacaatcttgtgaatacctaaaaataaaataatggccaaattttgccaatcatggaggtcttgcataacgaaatccttcaaatttgcaggacactagttgcatgcttaatcaattgaggtcatatgagtgttagatccttcaaaattacatggcaaaacattaatttcctgcccattgctactgaagaatcaatttcatatacaattcggggaaagctcaacaaattggcagagatgatcttctgaaccttttattcttcattattttgatcggttcaaaactaatgctaagaaattcataggaaaagctttacatcagggcaaaatatctctaacttctttcctatgagcgccacatgcctatagaccaaagccttttacatataca

SEQ ID NO: 75173 - DNA, 387 bp, Glycine max
  Clone ID: jC-gmfl02220141h10d1
acatatcgaagagctcttaatcaacaatctaagaagtcatcttcatcgacaaatacgaacatgtgtaacttacacaggagttaggacccataaccatttaactacctgagatataaataaatgattcgtacaccatattatcgaaactacagtaactattatttgatttccaaaattggttgaccctctaaaaaatgaatcaattcaagcctatatcctatattattgtcacaactttgttgtcttttagtaagtgattgtcataaaatttctttatcatgtacttggacaaaagctgattattcaccttgcttattacccttgtacgtgtttatcagttgcgtctgtacatcatgagaaactggtaaatgttgcttggattccatg

SEQ ID NO: 75174 - DNA, 373 bp, Glycine max
  Clone ID: jC-gmfl02220141h11d1
gcccaaagacaaattaaactctaatttcttaattttaaactacctttttaactgcaacgagctgacaccaccaaattcatgtttaaagaccggatagatgacccctgaatcggaacaacaaacgaaggggtgatcccgttcccaaaactgggggggttttttctttcttccctgtaaggggaaacaagttccaaggcacaacccgatatttaaacgccagactgataacgatcttaagaaaaacaatacgtgcaaaaaggctttatccgggctaaattttaaaagaaccccttgagcttctcttgaaaggttttcaatggaaaggggcccgatggggggctccttgcccacgttgcaagagaccccgtggagg

SEQ ID NO: 75175 - DNA, 459 bp, Glycine max
  Clone ID: jC-gmfl02220142a03d1
gaaaataattagatgcatatatttgactttggtgttattttgggatttttgtaattaaataacacaaacactgacgttcatcacacatgtgtagggcctgtttcaacttaaaattaaaggaataacattggcccatgacgcgacaggtgcaccacctagtaatcataattttacatctttacatacaaaaaacaaagactttaaattttaaaaagaagaaaagagataaacagatcatcttaatgaaatgaaaccaaaacccacaaacattggctagatttttgtagttgttgttgaggccaacatgattaatcatgaaccgagagaacgaatcactttgactttaagggaatggccctgattaccaactgccgtttgagtgctgcaagagctgaacttgtgaatggtgccacccaaaacatccacagtttatgcgaaacaggggacttgttgaagatg

SEQ ID NO: 75176 - DNA, 368 bp, Glycine max
  Clone ID: jC-gmfl02220142a04d1
gttggttggggaaaaacatatgaagagggttaaaaaaaaatctggcctttaccattaccgcaaacacaaagttaacttacctcacagggggcccacatgttttaaaccgctgattgttgtttttccacaaactaaattactggagaaaaacccgggctcgaggcgggcggtcagcctactaaaacccccttttcttctttttctcacttccctcagaggaatttttcaccatttttattagaattcttccaaagattgccgcccaattagggaacaaaggcaatgggtgtttcacaaaattccgggcaccaaagggggcccttccaagatattcttgggggggtactttaacgtgggccacaaacccc

SEQ ID NO: 75177 - DNA, 383 bp, Glycine max
  unsure (1)..(383): unsure at all n locations
  Clone ID: jC-gmfl02220142a09d1
ctcaaatctctactgagctacacganatatatgggggacttcaggaaggcctaataagaaaacaaataattccaattcatatatgaacatttttgcctccttatttcttgaaaaagtggaatggggatttttcgaggaaatcccccctcatttcctttggcttcaggataggcctaataagaaaacaaattattccaattcatatatgaacatattagccttcttatttcttgaaaatgtggaattggaattccccgaggaattccgatctcatttcctttggcttcaggataggcctaataagaaaacaaataattccaattcatatatgaacatttttgcctacttatttcttgaaaatgtggaattggaattccccgagg

SEQ ID NO: 75178 - DNA, 421 bp, Glycine max
  Clone ID: jC-gmfl02220142b03d1
gaaaataaatagatgcatatatatgactctggtgttatttgggattttgcaaattaaattacacaatcacagccgtacatcacacatgagttgggcctcttccaacttaaaagcagaggataacattggcccatgacgcgacacatgcaccacctaataatcataattttacatttttacatacaaaatacaaagactttaaattttaaaaagaagaaaagagataaacagatcatcttaatgaaatgaaaccaaaacccacaaacattggcttgatttttgttgctgttgttgttcccaacttgattaagcatgaaccggttgattgaatcacttggacttgaagggaatggccctgattacgaccttgtggtagagtgcttgaagagctgcaccgattaatggtcccccccagaagatc

SEQ ID NO: 75179 - DNA, 131 bp, Glycine max
  Clone ID: jC-gmfl02220142b07a1
gtctggctcttgaattgatttcggcatgctatacacttgaacaccacacgacaaccggaccatgactatctggcatggtcattgggagagccttgagaaggcccgacgccactcacgatatgtagcaccca

SEQ ID NO: 75180 - DNA, 532 bp, Glycine max
  Clone ID: jC-gmfl02220142b08d1
agaacaagtgtgcaaaatgccaatgcaattatagtaaaaatcagaagaacaaaatccaactagtttccaagcagtgatgtcaaaaatgccaaaacagcaataataattatgatatttagaaaatagtttgactgtagaggcttatctgggcttccaccaatcgcctcatattcagcccgtatcttctgcttcataccgtcagacagttctctctttccagtggagtacttggctgctacaaacttctctgcccctgcatttggagaatcatctatcacaatgccctctggaggatcaaatttggctccaaggttgctaagttttgcatgggcttcagcataatctttaaagaatgcttcctgatcttcagcatatttctcagcatataccttgaaggatgggtcttcaaaaagagcagcatcagttggcaataccaatagatcttcatcctttttttctttgatgtccttgaagtaagagttgtcaaatttcaaccattgcactgtccaggattgtccttcgggtgctcctg

SEQ ID NO: 75181 - DNA, 449 bp, Glycine max
  Clone ID: jC-gmfl02220142b10d1
accagaaattataaactttaatttagaagtcctaaacattgcccatttgaagggggggagaaaaaaaaaagttctgttgaagattcacaagtccattctattttgccctgaaaactggttttgtgtcaggggatggttgggtccttcgagggtatttgagtagcaacccttttgaaaaaagacctggtcccttcaaatttttgatataggggtgcaaaattttccattcccattttggcctttttttgaaaaaaatggaaaaaccctcggttggagggggagggaaaaaccccaccttgaaggccccaacccctgtttaaactccaagtttttttgttaaaacctcttctttcacaaaaaaaaagggggaagccttccgtgtggaaatttttgtttccattcatccatgaaactttttaactttttcttacccccttttaggaattttt

SEQ ID NO: 75182 - DNA, 443 bp, Glycine max
  unsure (1)..(443): unsure at all n locations
  Clone ID: jC-gmfl02220142c01d1
ttttctgggttttctctgttgcttcatctttttgttcttttgggttgcttaaattttgaaactttttgcactttcgatttccatatgcatctggggcatcactattcactacatatttatgtttttcttctttctagatggtaatggtatcgaggggatttattcttgacaggcattgtttttgttgaattgatagcaggatgatcagagactgtgcataagaattatagctaattgtttatgcaatgaaatgcttttactattcactaaattgttgcgcttttcttctttctaggtggcaaggatattatgggttttattcttgacagacattttttatttgtgatttgttgaattgataacaggctgatcagagactgtgcacaagaatcatagctgatntgttatgcaatgaactgcttttactatttcagagacaaatc

SEQ ID NO: 75183 - DNA, 120 bp, Glycine max
  Clone ID: jC-gmfl02220142c02d1
gttacaacaaggatttctttaacttataataagagttttaactttccatggcgcaataatggaaaattgtggggatctggtgacagaaacggagaaccatgcctatatggccgcatgcga

SEQ ID NO: 75184 - DNA, 383 bp, Glycine max
  Clone ID: jC-gmfl02220142c05d1
gtgcagaagagaggaagtataaatttttaaaggaaagaaaagagcccttggaagttgttacacctttgttcactaggctaaaatcatgacgagacgacacttataaacatgattacatacaaaagtggctttaagccaaaccatcaatcgtgatgcgttatatatcactgggtgacgcaacccttgtgccacgtatcttgaggttgtatagcttcctgggtctcctgggataatacaacatcggagaacagtagaccatgctgacagaggaggcacccatagaagacccagctgtccggggtggcaatcagaaccgtgcatgggggggaagagctccatacacatttgggatgccaagcaggttataacccaaagcccgaaag

SEQ ID NO: 75185 - DNA, 543 bp, Glycine max
  Clone ID: jC-gmfl02220142c07d1
gaacactaacaacaatcctttttccatcaacaggtaaattgttggaatacaagtgaaaaataaagtttcatattaaataaaaataagaaaattgaacaccatataaataaagataaaattcataaatatgagtcttcaagtttttgattaaggtatgatgttaatcaaaagtttcaagaagtgttatttaactaggtagtagtacttttcttttcattattgttatcatcactgtcaactttttctcctttaccaccatcatcaatttcctttctctgctggtcctctttggcctcttgttccttctttttagcctccaatttctgagtttctttcttctttctcatgaaatctataagctgttcgaggctagtttcgatgtggctgctcttcagaagctgttctgctacctcagcaggagtcacctgggttttctgcatctcttcctcgatcttttcgaagagagaatgctctttgattccgaggtaattggaagctagctgcctgaaaccacagggagtgcaataggacatgtgaatgtga

SEQ ID NO: 75186 - DNA, 510 bp, Glycine max
  Clone ID: jC-gmfl02220142c10d1
gagcaatcaaacctagtcttaattatttcaaccggggggggttctcaaacttcaggattataagctgatggcatgaaatgaaacaaccaaaatgaaaattcttgtttccaaaactatgatttctacgtatcaaggtcctaaatttgggaaaatatcaataccaatatttctcatccaaaattattcaaatgacaagggaatcggcatgattatcccaggaaattgtcgtcatcatcttagccacctccaccagatccgtatttctttccgaacaagacaagctgcagcttgtcataaccagcaagcacaccagcacctgcaacagcacgcaatatgtttgcaccagcacctttgaagagtgacttggcaccctcatttgcgacgattgtttggaatgcatgcaaagagctcttgtacttcacagcctctccagaagtcatcatcatccttctacgaacagtgtcaatggggtaagaagccaaccagcaccaattgtgattccccatccca

SEQ ID NO: 75187 - DNA, 423 bp, Glycine max
  Clone ID: jC-gmfl02220142d03d1
aaaggagaggaaattctgattatattgcttgcttccatttgagtacattgtttgctatatacaagcttttctgctaacacttcgctaatggtgctttggcatattgccttggaggaaaaaacaaaaagcaaaattacaaaaagtgaaaagcaatcccaacggaattgtactgctcagccgacagagggatccttggcgcactacctcctgccaggacagcccttgcttgctccactacttgctaacaaaatccttaagggaataaggtttgttaattttctgagaagggtcgttgatggaaaacaacgttgatcatttgatgtaacgaggagggagttgtccttttctgagaaaggagagagagttctctgcaggatcaatgagatccgcaatgttgtgcaacgagcgtttattagaacccac

SEQ ID NO: 75188 - DNA, 495 bp, Glycine max
  Clone ID: jC-gmfl02220142d04d1
aaaggagaggaaattctgattatattgcttgcttccatttgagtacattgtttgctatatacaagcttttctgctaacacttcgctaatggtgctttggcatattgccttggaggaaaaaacaaaaagcaaaattacaaaaagtgaaaagcaatcccaacggaattgtactgctcagccgacagagggatccttggcgcactacctcctgccaggacagcccttgcttgctccactacttgctaacaaaatccttaaggtaataaggtttgttaattttctgagaagggtcgttgatggaaaacaacgttgatcagttgatgtaacgaggagggagttgtccttttctgagaaaggagagagagtactctgcagcatcaatgagatccgcaatgttgtgcaacgagcgttcatcagaacccacccagaacattgcccgcgcctccgtcttattcgccagccttgccgtgaagcccagccgcaactccggcgagtt

SEQ ID NO: 75189 - DNA, 478 bp, Glycine max
  Clone ID: jC-gmfl02220142d06d1
gaacactacaaatagaaagttgacatttaataaaccaaagcaacacaacgcagcaaagtcctgaaactcgctgcgcttaacaaaaatgtaatcaggggttccgacaaacacaacacattaaaacacagataaataaaagcaattttgccaccgtcgatcaagaacccagttctgggaacaacagttgcgagatgatggtggagacttcaaactttgtccgaaaaacaagctacctagaaaagaagacacaagagtacagaaaagaaaccaacatttattgtaaccaacatcccctgatgaaccagcccgcacgattcacttcttcttctgggcagccttggtgaccttggctccggtaggaaccttcttctcaacgttcttgatgactcccacagcaacagtttgacgcatgtccctaacagcaaacctaccaagtggaggatactcggggaaagtttcaacaccatgggtttggttg

SEQ ID NO: 75190 - DNA, 408 bp, Glycine max
  Clone ID: jC-gmfl02220142d07d1
acaatggaggtcccacacttgccacacaagttaaaagtgtattgcactccaaacattggaagagcccctattaacttaaacttataaagggattgcaccctcacatttatatgcccataaatcaaataaatttaaaaatttaaattctgtttgcaaaatgggttgaaaggcccctggttactaagttgatgatccaaaggggcccatcttgttttatgccaaaaccaacaaggttaagataaaacatgttatgggaaaccattttgtgaatttactccacatcaccttgcccacaaacaccgtgcccatatagaatgtgtctttgcgggacaaatacggggacccgcctgtacgaagtggcatttttggtggggttccaactaacaaaaaatgcttgttaagaacagg

SEQ ID NO: 75191 - DNA, 316 bp, Glycine max
  Clone ID: jC-gmfl02220142e02d1
gtaaaacatgatagttcaggaatgatctttagtctaaaacttgcgattacaaagcatgaaattcaatgcaccaggaataagttttagtatacattatctataaatgttaatgatagcattcaccaatctaaacatctggcaacaaaagggctagtcccaatatttttctccatgaaatccatccaacatctgatacaagcattccatgataactttcaatacttccaagtagacccgccaagtctaataacctcttcacctccactatcctttctaggaattctttccatgttggcatctcctttattatccccta

SEQ ID NO: 75192 - DNA, 184 bp, Glycine max
  Clone ID: jC-gmfl02220142e03d1
aataagttgtgcacttcttttttaaaaatggcctctctcacacgttctaaagataggatctttgttcatcataaacataaggccgaggtgtacacaaaaggtaacgttttttattttctgggttttataaggccttcatgaggagggaacttatgtacacctgcaaaaagtttcatctcacctt

SEQ ID NO: 75193 - DNA, 544 bp, Glycine max
  Clone ID: jC-gmfl02220142e07d1
aaacaaaatttttatttcattatatgaatgatacatgaccaaagtaaaactaaaaatcagacaaaacctggtggcacattgaattagtatctccattacagttatgggcgttgcatccaaacccaatagaaagctcagagtattacacatcccaaaaagtaaaatcctactacagtttagcaccgagatgtcctaaaccacattacatgaacacaaattcgagttgtcttggaagaggaccaagaaataaaagctagataatgttcaaccctgcatccagaaataccaatccgcaagactcccgtctcccaaaggcattaagccttattggcaatgttgttggaaagccagtccagaccttcgtaaaggccctccccagaggttgcacaggtgctctgaatgtaccagtgacgctgtctcagagagtggagacccaacttgttagtaatttagcagaatcattgcattaggaagatcttgtttgtttgaaaacacagcaatacggcatttcttagttcatcctcattcacattctatgtaacta

SEQ ID NO: 75194 - DNA, 502 bp, Glycine max
  Clone ID: jC-gmfl02220142e08d1
gcgaaagggtgttgaaacttcaaacacagaacactcaagtggacaaggttataaaagaaacaaacaaaaagttgcagtaaacatcacatttcattttcacaagctactaatcattattgtaccaaaaaacgttgctgtcactcgccatcaaggtgtaataatataataataagccatgagaaaacaaatacaaaataataataataatctaagttggtttaagatcctcaaacaatgtaggccacattgcataatcatcatcataatcagcagcatcagctctgaccttattgtagggactataacccattgggctctcagtcctatcatctaaaggcctagttaaccttgggcttctactattaaccatgggtggtcttgcatcaagtggcccagaaagcctagggctttttactgagcccatgaacctaccatcaagaggcctagtaggggtattagcactcatcaatggacttctatttgcacttgcatacatattcac

SEQ ID NO: 75195 - DNA, 362 bp, Glycine max
  Clone ID: jC-gmfl02220142e09d1
aaaaaataaaaaatgggtttttaacggataaaaacgggttttattattgtctacacccaaatatggtaaggtgaccctacccagacccgaaatgttatataaatggccaaggggttttgattcttaaaaaaaatattcaacccgtcttggaattggtctgtaaaaggttacattacaaggggaaagccaaggtcctacttgagaaaattacactaggcactgatcttacttttctttttctcatttcacaagaaggccaacctgtttaacaaaacccaagccaggtgattacatagggtaacctctcccttctttatatatctctccccctcccactatttaaaaacaggtctttctttttt

SEQ ID NO: 75196 - DNA, 393 bp, Glycine max; identical to SEQ ID NO: 74040
  Clone ID: jC-gmfl02220142f03a1

SEQ ID NO: 75197 - DNA, 387 bp, Glycine max
  unsure (1)..(387): unsure at all n locations
  Clone ID: jC-gmfl02220142f03d1
ctaaatgtagtcgtanntgaatcttccaacaaatttccttggctccggataggcctaataagaaaacaaataattccaattcatatatgaacatttttgcctccttatttcttgaaaatgtggaattgggattccccgaggaattccgatctcatttcctttggcttcaggataggcctaataagaaaacaaataattccaattcatatatgaacatttttgcctccttatttcttgaaaatgtggaattggaattccccgaggaattccgatctcatttcctttggcttcaggataggcctaataagaaaacaaataattccaattcatatatgaacatttttgcctccttatttcttgaaaatgtggaattggaatttcccgagg

SEQ ID NO: 75198 - DNA, 393 bp, Glycine max
  Clone ID: jC-gmfl02220142f04a1
cctcggggaattccaattccacattttcaagaaataaggatgcaaaaatgttcatatatgaattggaattatttgttttcttattaggcctatcctgaagccaaaggaaatgagatcggaattcctcggggaattccaattccacattttcaagaaataaggaggcaaaaatgttcatatatgaattggaattatttgttttcttattaggcctatcctgaagccaaaggaaatgagatcggaattcctcggggaattccaattccacattttcaagaaataaggaggcaaaaatgttcatatatgaattggaattatttgttttcttattaggcctatcctgaagccaaaggaaatgagatcggaattcctcgggggtaccgagctcgaatt

SEQ ID NO: 75199 - DNA, 333 bp, Glycine max
  Clone ID: jC-gmfl02220142f06d1
ggcaaaataagtagtttccattaaatagccaaaagcaaaattcccattgcttctcccatcatcagtctatgttatatgcatactgaagacagagatgaagtggttgatacaaaaaggcataaatcataaatatgaaaagcttattgaatgattacaaatcagctcctcagacaatggagtggctatgtgtgactgcattgaaattaggtaatcgatttcctgtttatagttttattaatttaggtaggctaaaaaagagattataacactcaagatgctggtttgtctcggatccttaagctttggtgaagctagcattgaaaggaacgccag

SEQ ID NO: 75200 - DNA, 462 bp, Glycine max
  Clone ID: jC-gmfl02220142f09d1
cccagctgccttaatcttctcttgtgtattcagatcccacgggggctttttctttacaaaggaaagcagctcaactttttagtacacagtggaattaggaggaacattacccaattcctgagaggacccatgatggaccaaaagcatattcaggctgtatgatcagcaatgcaatttcccctttcttcatgttcttcacaggttggtcaagtccatcaattacttgctcttcatcaattttgaactcaaatggctgttcatcaacgtagccctttttaacgaaaacagtttcatcttgcgacttgccaatcagtattacttgaactacaggtccatcattggggcgttcatatccctcccgttccttcaaagtcttcttgagaaccattctatccttggtaatgtcagacacggtcttccacgagacctacttaagatccagatgaagattagcatttggag

SEQ ID NO: 75201 - DNA, 395 bp, Glycine max
  Clone ID: jC-gmfl02220142f10d1
cccagctgtttttttcttctcttgtgtattcagatcccacgggggctttttcttaacaaaggaaatcaactcaacttagtagtacacattggaatttggaggaacattagtcaatttctgagaggacccaaatggaccaaatgcttattcaggctgtttgatcagcaatgcaatctccccttttttcatgttcttcacagtttggtcaagtccatcaattacttgctctttattaattttgaacttaaatggctgttcatcaacgtagcccttcttaacgaaaacagttcctttttgcaacttgccaatcaggttcacttgaactacagctccatcatttggtcgttcatatccctccccttccttcaaagttttttagagaacctttctatcct

SEQ ID NO: 75202 - DNA, 479 bp, Glycine max
  Clone ID: jC-gmfl02220142g02d1
ggcctgccaagactgtcattcggttttcatgttcaaaaaaaagtattgtattatacagaggggagaaaaaaaagttgctataaataaggagacatgcacgatagtatccgttattacaaatttggaaagaatcttttaagcacaatgtcaatggagattgcgattaatcaatccctcaaatatagtgtacagatccttgttttcaggcccaaaaattttatcagctttccgtagcgtttcctcttttgtttgtttatgggaattcaattctttaacattagccaagaatgcaccaaattgctcataagacaaacggttcctgacttggcgaaagaactctttcccatccacccgtgttcgtccagattgtgatcctgttcctgcatcagagcttgatattgaaccatgagttaaggacattgaggaaaacattgaagacctgtcatcatacatgccttttgtggttgcaaaggaaattg

SEQ ID NO: 75203 - DNA, 148 bp, Glycine max
  Clone ID: jC-gmfl02220142g06d1
acaagaaatttttaactttaatttaaaagtcctaaaccttgccaattttaagggggggaaaaaaaaataagtcctgttgaagaaacccaagttcattctattttgccctgaaaactggttctttgtcacggggatgggtgggcccttc

SEQ ID NO: 75204 - DNA, 350 bp, Glycine max
  Clone ID: jC-gmfl02220142g07d1
actaaatcaaatatctccctctagcccacatggtttttaataaataaaaaataacataaccacgtgggaatcacgttgtacaaagtcaaaagaatagcctaggaaaagcccaaacttatcttgattcaaaaacccaatttttgccatcccaacttctataacaagtggaataaaacgagctactatgatttacaattttacaaatcataccgaccctttcaaagttgacatactttaacttagaccccatgggcagaagcaatattaaaattataattgtagctgccctggacctctctttgatgatgatcttgaaggaggaacattaacttaaataaactgaggttttt

SEQ ID NO: 75205 - DNA, 413 bp, Glycine max
  Clone ID: jC-gmfl02220142g08d1
aaagggatccggaaaaaaaaagggtaaccgcaaaaaagtcccatggggaaagactaaaaaaattgggcaaaaaaataattttggtggtaaaaaaaataatatttttcggggtaaagggggggaaaacaatattttaattatttcaggggattaaatccaacccatattttttttggtccactaaaatccccctgggaaaatttcttttttttcttgtaaagggcccgaattttttcccccttaaaaatgggggagggggaagaaaaaataaaattttcctaaatccccgtaatttttttaaaaatgctttgcccaacacaatggatttggcaccccaaaagctgtgcgggggttcccatttgatatttcatttatcggctggaggataaaaaggtaatgacctatttttgtat

SEQ ID NO: 75206 - DNA, 481 bp, Glycine max
  Clone ID: jC-gmfl02220142h02d1
caattatacgtttccatatatacatcaggcacacaagtaatccattcatatgttaaattgttacacaagcatacaacagtgtcatgatttcctcaggtccacaaatattggaagtttgaatgccaatagcctcgaatatgcaacttgaatcttagcccaaaacttttacttagttattggctttgccatagcttcttgggaaagggataacgtccctaacattgccaaggccagttgcgaagaggaccatcaggtcaaaccttagagtgaacccagagttcttcactgttccgtttcgacgaagatctaggtaccattcatacttctctcgcggcaagcctaactcatcaatcctggagcttatcatgttaagacgttcctcgttttggctaccagatattattgttccaagctttgggacaaccaagtcaaacgcagctacagttccatcatgattctggcgagcataaaatggcttagc

SEQ ID NO: 75207 - DNA, 501 bp, Glycine max
  Clone ID: jC-gmfl02220142h03d1
gatatagtccagatttatattcattaaaaattaacaggaagtacttggttattttcagttatagtaactacaaacataaaagtggccaataaacaataaacaaaaacatgacaggacctttccatggtctgtacaaggaacaaaaggatcaaattggtctcatgacttattaccttgccttcagaaggatctaattcatcatcttttcctttaacatgttttatatttctcccgccaaaaagagaaagtagattagtgataaacatctttgtgaatccaaagtagctatagataatgggccaaagatatatgtttatctttttcaagcagcacttatgatgctatcttgattgttgaagtatggcattgcatgtaaagctgcatgtattgatgatgatgtttgtcttggactggatgacaaagataaccccagagacagtgttggtgtgatcaaaggaacttaaacttgcagtgatataagacactgtggagcctctatga

SEQ ID NO: 75208 - DNA, 373 bp, Glycine max
  Clone ID: jC-gmfl02220142h06d1
gagcaattaattttttttttaattattttaaccgggggtggggtggtaaactttatgaatttaatctgatggcatgaaatgaaacaaccaaaatgaaaacttttgtttccaaaactatgatctcgaaaaaacaaggtcccaaattggggaaaaaatcaataccaatttcttggatccaaaatatcaaaaggacaagggaatcggcatgatcatcccaggaaattggagaaactcagcaagccaccttcaccagatccgcctttctttccaaacaagacaagctgcatcttggcataaccttccagcacaccggaatcagcaacagatgcaaatgtttgcaccaacacctttgaagaaagactttggaccctca

SEQ ID NO: 75209 - DNA, 349 bp, Glycine max
  Clone ID: jC-gmfl02220142h07a1
aagacaattaaatctattacatataataggaatataaacaatccaagacaccagagtgataagttgtggcaaactgatgaaggaaacggaaaacaaggtatatctaaccacatacgagaaacaacagattgaaagaaatcgagaaatgtcacccataaactgaatagaggtgaaagaagcacaatccaagacataaaacaagaataaaatacagcctgaaacaaaatctgatgaaaacagagctgagcaggcgcactgatgcctaacatcaactgcccgagggactccagttctagtgacaccctaccattgtgccttgggcacttgcaaccttatatatggctgaaat

SEQ ID NO: 75210 - DNA, 517 bp, Glycine max
  Clone ID: jC-gmfl02220142h08d1
gacaaaataaaactgaatgatgatatacagagaacaagttgtgatggatcaaatacttttgaaaagaaaaagaaagagaatttacaagctatataccatagaatcactttctagtttctatattaacaatgaaaaggccactaaaatatttttctctcattcaaatcaaacaaaatatatggccactcaaaagatcattagcaatgtattgcagttagtgttccccattctatacatcaaccatagagaactttgcctgctttgtcaatcatcattggctgagaatgagagaaattattacatgatctagagctatgcgatcccgatgaatatataggtgacatatagccacattcttcaatttatgaaaaagagttaatagcatatcaggtaaagattggccgagaccacatagacccatataacaatttctcctaggatggaccctgttcccagttagttacactgaagccagaacgaaattttgttagggatgaaactatgaagacacattggc

SEQ ID NO: 75211 - DNA, 537 bp, Glycine max
  Clone ID: jC-gmfl02220143a06d1
gaataaagaatcgtctaaatggggaatgtcctacaaagcatgtgccctcgccctatacaattgtgtcccccatgcttaataatgaatcatcttataaattcatttgaggttaattacgctatatgttcccaagagcaacaaccgagcagggaacaaaagcaacacaaacaaatgcatatgttgggatgtaacaatcctactgaaccttttcagggactctctccctgtttgtatcacgctggagaagggtgactggcgttgacccacattgattgatatcatggacctcccagcaacaatgctggtatcagctccacgagataacagaagaggccaccacaccttacgccgttgctccctcttagctttacggatctggttaagttctttgcgaatcacagttctcaaagactttaagtaagagttcatgtcatgatctcgttgtatactttctccagatccataagcagatcggtcacttaataatctaagtggatgaggtgagtttaagaagaccatctgagcagcttcgagccg

SEQ ID NO: 75212 - DNA, 562 bp, Glycine max
  Clone ID: jC-gmfl02220143a10d1
aagacaacttcttggtcttgaccaaaatgagtaggaatacaataacttcaagttacaaaagcaatttttagcttttttaaggtgaatctcctaactgcattaattgatcgggagaaaggagacacagaataaaacctacaacgggaaagcaaaatcacaagaacaacgagactgaccacgcatatctcaattgatatatgataatatgatcattttgaactatagtttatactttctagtcttggtagactttattttccattggaagagacaagactaagccatagactttaactgggcaaccagatctgtgatgaatttgttctgaatttccttatttgataaaaacttgctccattgcatgtggttttctcttatttgcttcccttgctctttgttatcctccaacatgacagttttcaatgcctccagtatatcctctttgtgaaagaacccatcttcatcactcctattcacctgtacccctgcctttaaatcattggcaatgagtttagaattgaaaaactggtcacccttgtaaagcaacagcaccagttgacac

SEQ ID NO: 75213 - DNA, 435 bp, Glycine max
  Clone ID: jC-gmfl02220143a11d1
gggggagcaatacggcaaaaatattttatcagggagggaccaagtccatttttttttaaaattaccccaaaagacattcaaggctaaacatcattggcagaacataaaattgtgacaaattccaaggccctttaaactggaaatttacatttcccaaagattccctttacccacgcccaatccactatgggggaacccctatatctaattcaaccccaatggggaccctaccaaaagacgttattcacgagccgttggggccaaaacctacaaggcccaacaaccttgggccttccaaacgagggttaaactaaaaggtattcaagggaatatgcccgaaaggcccggaggttggaaatgtcccccataaaccattaatgggaacatccccttctttaagggttgaaacggcaaccaggtccttggggaacgggc

SEQ ID NO: 75214 - DNA, 427 bp, Glycine max
  Clone ID: jC-gmfl02220143a12d1
gggaaacaaaacggcacaaatattttatcagggagggacccagtccatttttttttaagattacctcaatagatatccaagtctaaacaacattggcagatcataaaagtggtacaaaatccaatgccctttaacatggaaatttacatatcccaaagattccctttacccacgcccattacactatgagggaacccatatatctaattcaaccccaattgggaccctaccacatgacgttattcacgaaccgtttggggcaaaacttacaagtcccaacaactttggaccttccaaacgaggattaatctcaaaggtcttcaagggaaaatgctcgaaaggcccggaggtaggaattgtcccacataaatcattattggggacatccactactttaaggcttgaaacagcaaccagttccttgggg

SEQ ID NO: 75215 - DNA, 557 bp, Glycine max
  Clone ID: jC-gmfl02220143b06d1
ggaatagtataacttttgcataaagcagcttattaggcggtacaggccacaaatcaatgtatcaatatctagtgcaccaaacttaatcaaaagagaggggataaactgtgctaacagaaaaacatgacaaatacgaaataacaaagtaaatagatgcatatactgaaagaaaggcggtgaacaaatcaatttggtatggaacagcctcttacagaactccaaaatttccctcactgcgactcttgcgcatggagagctctgaaaccaagttcaatgctttgtcgggagcatcaaaatgatagcgactttgggttgatactttggttctagttggtggcaggagaggctgcttacccttggacagttttggtgaatccacacttctgcgagcatgagtagacgtgattgatggcctccgtgtggctgcaacaccttggctgcccttccttgtggtcttgcgatccgctctaaagccgcgatcaaactgatgggaattcattcctaaccgaactgaacgttctgctccatccttcaaagagctcactttcataggctgc

SEQ ID NO: 75216 - DNA, 552 bp, Glycine max
  Clone ID: jC-gmfl02220143b08d1
agtactatgggatcaacattagggatacagcttctccccatgcagagcaggaagtgggacagtagttataattaacacacacaactgctaccgttaaacggttagtgattacaaacaacattgcgaaagtaaattggatcaaggtcgtcatatcagtggttaccatcttcaagggttgtcatttctatcggtagtaagcctgctgataagtgggagccaaaacatttccatagccaccatatgcaggaggatagttcatgggagctgccgggtaagaccctgcaatagccggtgccggctcaggtgaataagcagcataaggatttgtcgggggacttctgctgccatacatgtggggtgcggaagggtaatgctggaagagcagctgggtattggccgtgtgatggagacctgacaaatgtaggagcagcagggaaagatgatacatatgcattaggcaaacgcccagctttggctggaggcattggacctccattgctgttgcttgctcgagttcttttaatggcaggaacagcaatccgtttccttttc

SEQ ID NO: 75217 - DNA, 523 bp, Glycine max
  Clone ID: jC-gmfl02220143b10d1
ccatagtcatgttcaatattgaaggatgaatatgtacacaacaatggaaccaaacgagaaaagcagatatccaaacgggctaaaagcaaagagtcacacactcatcatattaggttacacttttaaccacttagaaagaaaaatgctggactaagaatcagctaagcttgttagccccaagttgcccaattagcttcacttccaacacgtggcatcacctggatctttgactgagagtcaacattgaagttggccccgcacataaccccctcgctgtcaatccgaggcattgctttcatcttctgtgttggatgctcaaagttcatgagaccgtgttcactatgaaacatacacccagctggaaatggtgcaaatgatttagcacaacttgcttttataagctccagattttcagaaattataacagaaccatcacctgcaataccccagtagagctcaatatggccattagaaccagatgcaacaaaaactgttccatccttggtgtcatagatcacaaatg

SEQ ID NO: 75218 - DNA, 506 bp, Glycine max
  Clone ID: jC-gmfl02220143b12d1
ataattaggctaagcttatcatgtataaagtgtatgtaacatttgaaatttattacatgctttattttgtggcaaattaaccatccctcagaaattgcctaagtctgaagtttaattcaaaaaaatagaaaatccgacaacacatgatttttaagaatataaacacaagaatttgatgagtgcagctagctcacaagaatttatccaaatattttccaagaagagaagctatgagccttctataaacgctttcagtaggatgaaaactgtcccaaaacacatactctaaatcgttgggacacaagggagtgaaacggttgcataataacacaacctctattgttcccgtgccacagcaacccttgtctccgactttatagccatattttttgtagtttataatgatgtcaaagagagggttgtaaacatcaatgtaaactatcctgctatcttgaaagttgtgattgagagaatccagctcctttgacaatttgctgttaaataac

SEQ ID NO: 75219 - DNA, 467 bp, Glycine max
  Clone ID: jC-gmfl02220143c09d1
ctcaacgggaactgggtccctgtataacttatctgctcgctcgtcgggtgcatacaaatatgctcgggtttcaggaatggaaatcgctcccctgatatccaaagctttaattctccgggtgtgtcacagttatgaacaaatgtggcgctttacatgacaaaccctaaccaccatccaccatgcagggacccaagttcaaagaaacagtcagaattcatttcattgcaaaaagaaattacccaagtatcataatccattcatttcagggggaaaaaaggattacttcaggatcaacctactgcgggtaaagctaatctaagttctcaaaggtgaggtgagttcaccaaccaccggcagaatttccagacccccatccgttcccagatgctgctttctttgtggcagatccccaaccagagcttccttgttcaccatcacttggaccagaaccaccacttgcttgttcc

SEQ ID NO: 75220 - DNA, 519 bp, Glycine max
  Clone ID: jC-gmfl02220143c10d1
ctcaacgggaactgggtccctgtataacttatctgttcgctcgtcgggtgcatacaaatatgctcgggtttcaggaatggaaattgctcccctgatatccaaagcattaattctccgggtgtgtcacagttatgaacaaatggggggctttacatgacaaaccctaaccaccatccaccatgcagggacccaagttcaaagaaacagtcagaattcatttcattgcaaaaagaaattacccaagtatcataatccattcatttcagggggaaaaaaggattacttcaggatcaacctactgggggtaaagctaatctaagttctcagaggtgaggtgagttcaccaaccaccgccagaatttccagacccccatccgttcccagatgctgctttctttgtggcagatccccagccagagcttccttgttcaccatcacttggaccagcaccaccacttgcttgttcccagccaccattgccacttgtactagcttcacctccaccggttccaccaccac

SEQ ID NO: 75221 - DNA, 524 bp, Glycine max
  Clone ID: jC-gmfl02220143c11d1
ctaacttctgattttcacattagttgcaggtaaagaacgtaactgatacaacaatacatatgtttttgtgtgactgctacaaccaaaaccaaaatagagaacatgcaatgctgaaatgttcaatcttctagcttctttgcagttgaaactttgtcagctgatatacctgtatgtgctcaactacttgttttggcatcagttactgaagcccctgagccagcattttgctttacttctggttgaggacccttgtgagcaagcttctccagcttcttttgccatcatcgagcacgaacctctactgatgtagataaacagtaccaacaaaagctagcatctctctctacagtaattgagagaattggcaaaaaaatatggatgtatactgtcttttatagtttcatcaacagtacaagaagatatcgaagttaaacaacaatctatttactaagtaagtgaggtagactaaaattgaagattaacagagctcaacagtgaaaaataattgtatccttatgttagca

SEQ ID NO: 75222 - DNA, 301 bp, Glycine max
  Clone ID: jC-gmfl02220143c12d1
gggacttaaactgagattttagtgcactttttaacacatgccaactttagggcttaggacaaacatgaatcacaaaacattgggcggggggtatagatatcaggggccccaatgaatgataccgatgacactggggttaattctcacatatcaaccaaggccaaatggtggtgcctaaaaaagcttgaccccctgcgcccagatgggataaaccaacagaagcattatgccaatggaatttgatatgccgggagccttagtgaaggagtttctgaaaccaccagaagcccgaatgggttct

SEQ ID NO: 75223 - DNA, 527 bp, Glycine max
  Clone ID: jC-gmfl02220143d09d1
ctcaacgggaactgggtcccggtataacttatctgttcgctcgtcgggtgcatacaaatatgctcgggtttcaggaatggaaattgctcccctgatatccaaagcattaattctccgggtgggtcacagttatgaacaaatgtggcgctttacatgacaaaccctaaccaccatccaccatgcagggacccaagttcaaagaaacagtcagaattcatttcattgcaaaaagaaattacccaagtatcataatccattcatttcagggggaaaaaaggattacttcaggatcaacctactgcgggtaaagctaatctaagttctcagaggtgaggtgagttcaccaaccaccgccagaatttccagacccccatccgttcccagatgctgctttctttgtggcagatccccagccagagcttccttgttcaccatcacttggaccagcaccaccacttgcttgttcccagccaccattggcactggaactagctccaccttcaccggttcaccaacaccccaacccc

SEQ ID NO: 75224 - DNA, 519 bp, Glycine max
  Clone ID: jC-gmfl02220143d10a1
gaggccattatagaacacgcattcatgagtaaaaacaaagggggcaccaaaaacagcgcatatcattatcaaatgtttgaacatgaacacgaacacgaaacactaacataaaaatccagccaacaaaactggaacaagatgatagtttgtatctagctattaagataatcaatgtatcaagcgcgatcacaaattcaccggattaaaaaaaaaattcctcaaaagacacggtaagatttccccattgtactcttcagatacaagcacctgacattttgccagttctttttcaacaaagagacaaggaaattaacactcagttgaacattttggaagatttgcttttcctccatactaacattccccacagctactcccatgcagagcaccttcttaagttgaaatttaaccatggccttggactcgttaacctttgactcaagagtttcctggtgaggaacaagtgtagggaactttcctgccttgttgagaccaggacccaaaagacgaggaatctgc

SEQ ID NO: 75225 - DNA, 533 bp, Glycine max
  Clone ID: jC-gmfl02220143d12d1
aggcaactagtgtttagaaattttatatttctactatatccagggaacaagaaattaaaatccattgaagaataattaaaatataaaaaaaatcataaacttcgtactactatcactaaacaaatatctaatcatccaaagcaagctcatccgcagacttatgatgattcaccttggcccacccaaccccgcgcggcacgtgcaacgcctcaaccaccgtggccgacgccatctccatctggcaaaccctaatcgcaccgatcaaccgctccggcaactcatcctccgcctgtgcctccaccacaaaccccatatcgatcgtcaccgtcgtcacgcaccccaacgcgaggtgcagaatcgcgttcgcgatcgcgctgcttccgatatcgacgtcaatttcgaggtaattcgaacctttgtagtaagcgcaattcaacgctttccctaacaagcacgcgctgtggctccccacggccttcttcacgatccacgggcccttcgcgatccggttcaccagcttgaaccgctggttc

SEQ ID NO: 75226 - DNA, 572 bp, Glycine max
  Clone ID: jC-gmfl02220143f09d1
tcattgcttatggactcgacatgtttgccttttgctctggggagaagaatgttctgatcttggacctcggtggtgggacttttgatgtctcccttctcaccattgaggagggtattttcgaagtgaaagccactgctggtgatactcacttgggaggtgaagattttgataacagaatggtgaaccattttgttcaggaattcaagaggaagaacaagaaggatattagtggaaatgccagagcattgaggaggttgagaacagcatgtgagagggccaagaggactctctcttccactgctcaaaccaccattgagattgattccttgtatgagggtattgacttctacacaaccatcacccgtgcccgtttcgaagagcttaacatggacctattcaggaagtgcatggagcccgtggagaagtgtttgcgggatgctaagatggacaagagcaccgtccatgatgttgctcttgtcggtggttctactaggattcccaaggttcaacagttgttgcaggacttcttcaacgaaaggagctttgcagagcattacccagatgaactgttg

SEQ ID NO: 75227 - DNA, 414 bp, Glycine max
  Clone ID: jC-gmfl02220143f11d1
atgatcacattaaaaaatctggagagacgggtcaattacaatacccaacaatcaccgataactttagcagagggctagttttacatgtcctattgataacggatgtcagagccatggctatcctacgccttcaactaagaactcattaacacgaatactttgggcacctaattaaagcggaagggaagaaatgacagcgtgcgtgtattaataattacatttggtcgtagcatcactttgcttacgagaacgtatagaccacatggggacgaagaatctgcctgaagccataacgcgaagaagagactcacgtgcaatacaatcttacgtaatttgctaggactagaccgatgcttatctgattcagcaacttcccccatatcttctagagaagaagaaccgacattgtaaagg

SEQ ID NO: 75228 - DNA, 578 bp, Glycine max
  Clone ID: jC-gmfl02220143f12d1
ggttaccgatatctctttatattctatttatttatacatatgtggggatagagggtgtcacagcaccaatgtagaaagcactgctttctacatcgttgctggcgtaagcacgacttcatttgtcacgtgttctacgacggtccttttacgaccgatgtagaaagctttgttaactgcagcagcactagatgatatccccacccaattgctccctcgtggtatagtcgtgcttgttcttcctgactcccttcatcaattgaccaccaacctaataatctagaaccatgatgcaagaacccaaagcaatcatgagctcttgaagaaaatataaaatatattcctccaccaactccacttcgtagcagtaaaagtgaaagagaatcaccttgattaatgcctaacatgcaatctgcaaatccttcaattagctgattacttaattcaattgactattgtatgtataatgagactagatacctaacagtaaaagtgtaacaatatactagtgacaagcattttcaaaacaatgcataaacaaacattatatgaagtgaatatttggtagataatttcctacc

SEQ ID NO: 75229 - DNA, 597 bp, Glycine max
  Clone ID: jC-gmfl02220143g05d1
aaacacgtcaattttcagctttacataacattgtgacaaaatgcgatcctgtttacactttcaaccagcttgacataacttaaggacaaaaaagttacaactaaacttgttgcagaccatgtgacagtgactgcattcctccatgactcgtgcatgttcatgaccaagagaggcttatagtcttcattttacatatggttgatactagtaagcaacacctccatcagttgtagagctgagtctaccattcattttcattggattagcgtctcataatcctaagagcttcaaaagttgcatatacagacagcaggtataaaactctaaagcctagctacagatagattcagagccccctgagaactatatagggctatcttcacaacttgatccattgtcgctcatacgttggaaatcagggggactgattcctgtctgagttttgatgggcttctgtccaaccaggttcatatgcttctagaaaacccagctttgccttgttaggtaagtcatgaagatggacaaatggaacgcccagtggccaccctatctccattcgtatatttgcacatgggctatctacgctgtgaatgtgac

SEQ ID NO: 75230 - DNA, 558 bp, Glycine max
  Clone ID: jC-gmfl02220143g08d1
gaacaggcaaataaacaatggctatggggtaaactttgtttttcttctgttcttttctcatgttcttttcccatttgggtttttactaatccccaacctccattttaccaagaaaacctttctttctagcttcaatttattcaaactcatttgctagaagttgaaaaaaaataaaatacagcacatctaagtccccttcgaattcactgctaagaaggaatgataaataactaaaagaaaacaactgaaagccaaagactccaaaagttttagtaggtatagcccttgacaaacattcccttcttggcctcttcactctcaccctcagcagagtatcttccaagttgagccaaggagtttgctttagcacgcaccaaaagggacttttgagcagcttccacattctcagggtgtccttgccatgtcttaagcacagtgttctgaagagcccgtgcttatgagaaagaaacatgccatgggttgggactttggttcatggcatttagatttagtggtgcttccacttgggattgccaccagacaaaaacatgattccgg

SEQ ID NO: 75231 - DNA, 222 bp, Glycine max
  Clone ID: jC-gmfl02220143g09a1
agttcaaaaggtttccaacccacaaaaaaacaagggggcccaggggggaaaaaacaggaaaaaagaccggcacaccaccaaaaaaaaaaaacaaaaaggacaccagaagccacacaaacggaaacacaggcccacacaaccgcccacaagacgcggaccaagcaaaggaaaggggacgggggcggaaccaaaaaacccagcacgcccgccccagaggaaccc

SEQ ID NO: 75232 - DNA, 581 bp, Glycine max
  Clone ID: jC-gmfl02220143g11d1
attaatattagtatttattattgatatacagcacgtgagactcccaatctctaagcatggacactaaaagggtaagaaactctaaatctaaaccacttaatccctacaacaccacacttaaaccgtggtagagagctcaatttggttcccttctgaattgctatcccctttgtcatggacctgaattggcttgtaggtgtacaatttggcacaaaccaagtagtaaataagattgagaaactgcaatatggtgataagccagtaaaagtactccaacttccctttgttgaggttgttgtcagggagccaatttgacccattagacccagcactgaacttgtggaccaaagtaaccataatggtactcacatagttcccagcagcgatagcagtccaaaataatgccatggcagtgctcctcatactctcaggggcctggtcatagaaaaactccaagtgtccaattgacataaaggcctcagccattccatgaaggctgttttgagggacaagccagaacactgagaatgggattatggcatgtgggtggtcaaaagcccatgggccacagctgccttttt

SEQ ID NO: 75233 - DNA, 569 bp, Glycine max
  Clone ID: jC-gmfl02220143h04d1
cgaataaatatgtatagatattcattgctacaagaagtccatctatgaaatacaggattcaagataatccacttccaccaaaaattccacctatatgaatccagaatccgcttgctgtaggcacttcatgtcctaagataattttattctcctaaatacatattgaaagagcaagtctcgtttcttattctcaataaacaaactgaggatgactgaaacacatgattatagctacacatgagactagatcaaaagccaaaccagcaccaagaaaggaaataaatgtgatatgaatgaatcgaacagtcaaatatgagaacactcgggacgttgcaaccctgcgatgctagactgcgtcttacaattggaaataacacaatatttgagcaaactaccaaatcttcaatcatcaatcatcgggtttcgtcctcaaggttgcggaaaccattagtcaggtcctcatgtaacttctgaaatttcgcaaccaaagcagcttccccttctgctggatcctcaaatttctgagacactaatcggtagaacagatcttccatacgatgcttgatagg

SEQ ID NO: 75234 - DNA, 555 bp, Glycine max
  Clone ID: jC-gmfl02220143h07d1
aagggcaccgaaaccattaaattgactagggtcatacattgatcttttgatcaactaaaaagagtggttatatatatatataacggtttcactcaaggcatatatttatatggtcccattctcatctagtgatgaatcagaggcagagtcatctagtgttgagtttgatgtagtctccaattgacccccactctcgttatcggaagttcccactgtcctttcttcatgagggtgttttaggcaccaagacattatactagctgttagtgtaaggatcatttttggattcacctcagtgatgtcttcaggaagcaggaatatagaacatccaagctttcttgcaatactgataatgtaggtggcgttcatctttttctcttggtaggttactccctttgttacaagaccccaatttacagctctgggtgtcactgaacttagaagctcaaggaaaaatattccatctgataaacttttatccttaaaactgtccatgcggctttggcttctggagctgctaaccttgcttgtgcccactctaaaatatcagcatca

SEQ ID NO: 75235 - DNA, 499 bp, Glycine max
  Clone ID: jC-gmfl02220143h08d1
ggaaaaaggccaccacaaagtattacttatctccaatctccggagtcaggaattacaacttaactttcatctggacattaaattaataacaacgaaatacttaaatctaatctgaaattggccccccaaaaaaggattttcctttaaacaaaaattgacactataggatatcctcagcttttaaaaaaatgccagaaaactccagcagctgacatggggaactacatatgctaacgctcaaaaggagccacgccttggcctgtcctcagcaacactcaccttaattgcccttccgtccaaacttttgccatcaaaagcagcaccggcatcattcatttctggctcatcagacattgggacaaagccaaagccacgtgatcgacctgactccctgtcataaactacccgagcatttacaacattaccgtgtttactgaaaatttgcttcagccgggtattggcaacatcccatggcaaattacccacattgattgataag

SEQ ID NO: 75236 - DNA, 393 bp, Glycine max
  unsure (1)..(393): unsure at all n locations
  Clone ID: jC-gmfl02220143h09a1
cccccnntccttatctggggccccggggggcggtgtttgcccttgtctttgcccctgcgacaccgtcacgcaaaaaaacgcccctggccggccacggacaacgccgggagggggccaaccctggccaaccccaacccaagggccgggcgcggcatccccccaaaggcggggggcaaaaccaagaaggggcccgtgacgatcgccccccccaccggaggcgcaaccggaaaggggaccggcacgcgcccggccccggcccctcacccccggcgggaggggcgggaacgcccaccgtgggcggcccccccgccacagccccaacgccggcgcctagcgggggtgccccccgccccgggccccgggcacaggccgcccccctcaagcccgaccccg

SEQ ID NO: 75237 - DNA, 489 bp, Glycine max
  Clone ID: jC-gmfl02220143h10a1
ataaaacttcgttataaatgaaatgcggcttaaaacatccctcagcagcaaaggaaatggactaaaaccctatagctgcttgtgaaattcgaaatatctcagactcttcttaccatcaaaacaaaaaacagtactcatcaaaaacaaacagcaatgaaaattgaccaccgccgatcaagaacctagttttgaaagttacggctacatgaaatcggcagaaacttaaaaatataacttaaacaaaacacctaagactctgcaaggataaaactactataaaggagtaaccacgatgatgatcacatgtgctagcaaaattgcccaaatgcaatcacttcttcttggcagcggccttggtgaccttggctccggtggggtctttcttctcaacactcttgatgactccgacagccacagtttgacgcatgtccctcacagcaaaacgaccaaggggaggatactcaaagaaagtttcaaccaccatgggct

SEQ ID NO: 75238 - DNA, 355 bp, Glycine max
  Clone ID: jC-gmfl02220143h11d1
attaatgaaataggacccgtgtgactactaacggaaacgcatggcccctacatgggcaaaaggctttgaaggaaaaccacttaatgcctacaacgccacactaaaaccgaggcagacagctcaatacggatccctgctgaagtgcaatccactttgcgaaggacctgaattggcttgcaagcgcacaaccaggggccccccatttaggaaatcagattgacacactgctgcacggcgctaggccattgggagaaccccaactggcctgagcagagggtgaaggcagggggccaacaagacccataacacccacacctgttgttgcggaccactgaaaccctatggggactcacat

SEQ ID NO: 75239 - DNA, 376 bp, Glycine max
  Clone ID: jC-gmfl02220144c10d1
aaaaaataattttttttttaaaaaaggattattaggcccccccaaaagggagtgtttggatctctctttctgggcgatctctcccaaaaattttcccatgacctagtatgaatatcattccccggtattgaattaagtttttccaccctacccaacccccatgctgttcaacacgcgagttgctaatgacatctttcttgcatacccacaccgttacgtttcagaacagacactgaaatggctcacttgcactcaaaatgatcctattgtattaccgttcataaacatcttggctgaacagactgcttttgcgaaccgagcatcgtgatctactggaacgggccgcaactgggcccctgattggagccacgcccat

SEQ ID NO: 75240 - DNA, 434 bp, Glycine max
  Clone ID: jC-gmfl02220144d10d1
ggggcggaaaaaaaaaaaaaaaatttcccctggggggcagggggggattttggccccccaactgaaggggcacaaaaaaaacggggggcatcttccgacaccgaggcaaacaaaacccccccgggggggggcgctcctttcttcttcccccccggtaagggggcgcctcccttttttcccccggggggaaacaaaggggagaccccccccccccccaaagaagggggcccgctttttgtttctgaaatccccggggtgattcttctttttttctctaaagaggggggggccccccctgataccgcgccccccaaaaccgttccggggccctagtttgttttttttttttggggggggccctctcccgcaccccggggggggcccccggggcgggcctccacaccaaagagggggggggggggggtgcctttttt

SEQ ID NO: 75241 - DNA, 551 bp, Glycine max
  Clone ID: jC-gmfl02220146a01d1
agtcttcgaaggaactggtgccttggctctctgtgctggcacaggtgactttgcaaccggtgtcggaatgggtgccttggcaccttgtaatgatgacataggagctttggcaccctgtgcagcaacgggagcattggctccttgtgaggattgtgcaccacatgatgaggctggggtttgtgaatcaacacctgggactaggatgggtttggcgacttggagaatggagatgttgtagggctcgctggtgacggtcctcatgagctcggtggcgtcgactggggcgccactcacggccgagccgaaggcgatctcgccttcgccgacgagtgcaaccttgaggaagccttgttggttcactgcaatgcctgaggcctggaatagggttgtcaactgttggctattagcttgagccttcatgagcttcttctcatcaaagaagtcatggatgacatgggtgctaatgatggccttaatggcttctggtgactcgggcagcatggaattcatggctgagtcttcaacggcgaggacagtgatggtgttgcggc

SEQ ID NO: 75242 - DNA, 471 bp, Glycine max
  Clone ID: jC-gmfl02220146a04d1
gacttaagttaaaatgttcagatccatatgagcatatacttcgaaataagatgaatattacaacaaaaaggcgattgaaaaatacgaattacaataagcagtaacctaattttaattctagatcacacaatgaaacctaattttaagctctctcgcctctgattctgcgagcaagttgaatatccttgggcataatggtgactctcttggcgtgaatagcgcaaaggttggtgtcctcgaagagtccaacgagataagcctctgcggcttcctgaagcgcagaaacagcgctgctctggaaacgaagatctgttttgaaatcctgagcgatttctctgacgagcctctggaatgggagttttcggatcagaagttcagtgctcttctggtactttctgatctccctcagagccaccgttccgggcctgaagcggtggggcttcttcactccgccgggggccggagctgact

SEQ ID NO: 75243 - DNA, 561 bp, Glycine max
  Clone ID: jC-gmfl02220146a06d1
agaagtcattatacaataagatgaacagaaaatacatagaagtcatataatcatcaatcatcaattttacacacaggaaattgaagatcatttctcaataacgaaatgaacataaaagatgccacaaccaatatggctaaacctacaaacaaaatctaaaactctcctttaacactatgaaaaggcctttgtgacatacctgcaattactctaaatatgtgctaagactgaattctactgtcaggaataaaattggagtaaaattgtgttacctgatttacaagctctaaataaagtttccattttcaacaatctacgatgaagccaagctgttgaaagacagacattgaaacatttttggtaaagatatctatcaacgcgttgcataagctttactttctcaaagcttgttgatcaattgtcttttctctttaaactcttttctgaatatcaaattcagatgaatgagttcttaattcctcatttcaagatccatatgcatgacctgctttggttcatgacttggccaagaccagaagttttaagaattatcacgtaacg

SEQ ID NO: 75244 - DNA, 519 bp, Glycine max
  Clone ID: jC-gmfl02220146a11d1
aacaaacatttattataacaatatcatagtatccctcaaagatgaaagggatctattaagttccaaggcaaataactacaacacactaattaagaaacaacaaatgacaaatagagtatccccggagaaacaaaccctagcagtagcacacacataatttagatttattcatcgtctacctcaggataaacacgctttatccttacgtccttaattgtaacaggcttgtctccatatatgggagccagtgtgacagaaatactatcatcgtcttttgttactcccaagtctttcaactgatacgttaatggcaatttgaaagaagctctggtgatgttgatatggttgacatgcggcgagtgaggcaaagtcacaaagcttcccgcaaactctgaatcctgtggtccaatctcattatcgccttggtcgttgatgaacacatcaaacctcacaccatcagtgctatcgtactcaacatctatcactaacacctcttctacgccttcttcttcttcattc

SEQ ID NO: 75245 - DNA, 521 bp, Glycine max
  Clone ID: jC-gmfl02220146b02d1
ggctggtctcaaatcataatcaaattgccataacaatgaaaacaaccaagttaaaaactgtaagtcaagactgtttcccagaccatatataacataattgataatccttatggacatcaaacagaaaatcccctgaaaacgaagtctcttgagtttcacacaaaggataccctataaaaacctatatatagtcctatactgcattagctacaagataaataaactccacatatgctttaagcaggttggttttcttgctgtggattccatcaccaacatcacgatcacaattcttgtagctgtatttacataaaaagggatatgaaggtgttcagaagactcctgccatggaaggcaggtcgtcgaagctccaaaggttcatagggtttccagcagcatcctgagatgcatcttcactgagcaaagacgccaatgcagcatcagcccaggcttcatcaagaaaagaaggggtctcaaagaacttcagctgggattcaatgtctgcaagctcctcaaaagag

SEQ ID NO: 75246 - DNA, 493 bp, Glycine max
  Clone ID: jC-gmfl02220146b04d1
attaaatactacggtacaggcttctgcggactggaaaaataacacactggtgcgtgcatcatttccatgatgattagtggtacactgctagaacgtacgtttatggcctcatgagcccttaagtgataagggctatgccttgtacaatcaaagcatcggctaaaacttggttagcagcttgtgaaggatggacactgtcccaaaacacatattgggttgcattagagcaagttcctagtgattttggattgcacaataaagatgttgtctccactatcccagtaccacagcaacctttccttgcctccgcaaaaccaaattttgaaggggactgaacaaggtcatagagaggtttgaaaatatcaaagactacaatcttaagaccaggaagttgcttttggagatttgctgccactgacttgatttcttgttaaatgcttgggtgtcattgatgatcctcgagacacaaccttttttatggaaactaaataaa

SEQ ID NO: 75247 - DNA, 525 bp, Glycine max
  Clone ID: jC-gmfl02220146b08d1
gactgaatctgatctttatcatcttgagaagtttcttacaggaagaaagaaactaaatcactatgaatgcagcttacaagggaaaactaatattgcaggaagcaagaggcttccacacctaagtctaaaacactagcacatggactcaattcagtatcgtctcatagtgcaccaagcaaatcatcacctttcacctctgtataacatgcagaacacaagtatatacacatatccacaatcatctcagcaatctttacaggctttcaaccatatggcgtgttgtgttttctgcaacttcaccttggtaaagccaaaataataatgctcgtgttgatcagattcagaagtgcagactttggttgacccaaaagaactgtattgaaatgaatagtggtgggaaaaatcaatctggagagtttaatctatttattttctgaggttaaaatgatcaggaacatatagctcccactgagagtttcttcaagacatttggacatggatctcctccaaaattttcaggtgaca

SEQ ID NO: 75248 - DNA, 506 bp, Glycine max
  Clone ID: jC-gmfl02220146b10d1
agctgaaagctcattgatagggaaaagaaaataccaaaacatgctaacattttccggagatatatcagtacgtacccactgaatgacatatatcaaaatcctcagagaagatcactcatcactagactggttttttaacttggaacatggaaaaacagaatagtgatcacaataatcatgagaaacaagttgcctgtaacgtaaaaatcggtggttgaaactttaatttggtataaattccttataaattgatcatagctcatccttgcttgaagcatcttcccccattagttcttcaagagaaaattcatcctcctcaattatttctccatcttttccatcccatggttctgtctttacaatggttggagtgccttgcaggggcaaattccctttgcctgcacgtccagcttctttcacaaattctataatctggtcaagttcaaaagcactcttgagaggagcataaacagctttcttaggttaagggccactaagctggataa

SEQ ID NO: 75249 - DNA, 342 bp, Glycine max
  Clone ID: jC-gmfl02220146b11d1
ggaaaccaaaaagaaaacaacattccccaaagcggccaaaaccccgccccaatatgtaaaacaggaataactgacccgggataagctccgggcatctgaacccccggcaaggcgaccccccctcaaaataccccctccgggggggccaaatgggaccccccaaacccggcgcgaacaaaggcacaatggctgcacaaaagccccaaggttaaaaacccctagcctaacaaaactatgccttgaacccggatcaaggggtgccccaatcgggcgcaaggccacacaacactcccaaatggcaagacccgacaagggcccaaataaagatttccccccgacata

SEQ ID NO: 75250 - DNA, 582 bp, Glycine max
  Clone ID: jC-gmfl02220146c06d1
aaatataacactttttttttattatatatttactcactttacatgagataaatctatttacctcattattcacttgattcctattaccaccatcaacaaggtgcccacgtggccacctactataaaaattctggagcaagcatgaaaagtgcaatattcacactttctaaataaacttactggttaaatataaccccaaaattatcttgattaacctgtcgtcgcatttggtggaaacaccttctgaataaattccaggaagcgatgcgaatagaacgtagggtccacagctgagatagacaatgaatcaaactgaagagatttataagcatgttcaatcctcttagccatgttgaagtcctgcaatatgtcaatgataccaaggtacagcaccacatcgtacacttcatgaaacatttgcttttcttgtatctgttttcctgaaatctgatctgcccttgatggcatgttcacaccaagctgtatttggagtcttgctgtaccaggtagaagtagatccaccttctcatacccgcagatgaagcttgaacccgctacccttatggtgagccaacaacacac

SEQ ID NO: 75251 - DNA, 427 bp, Glycine max
  Clone ID: jC-gmfl02220146c08d1
ccgttggggttgtttgtttttttgttttttttttcttgcttttttttttttgtttaaaaattggggccccaaaattgttcctagggcgctcgcaccccggggggcccccaaaaaaagccctttataaattctgcattaccgcccccataaaagaaactgggggtaaaaggaagactcaccgggatggggaaaattagacaggaaaaaaaaaaaagacagggaaaaaaagtttaaagttttagggtccgctataggaccggtagcccctaggatgggaaattcgggggtcccagggctccccaaaaaagcggggcccaaaaagggggggggggcccaaaaaaaaagggcccccctggggggcacaaaccaatttcccccaaaaaagccggggccccctttaaggggccccgggggacacttaggcccc

SEQ ID NO: 75252 - DNA, 465 bp, Glycine max
  Clone ID: jC-gmfl02220146c09d1
gtctaatccccgctgaattatataaacagaaggtaatgaaattacattaaagatgacttacaaactagatataccatatacacccccctacaccctacagatcagaaagacactactaaactactaatcggatattggaaatttctaaacagatcctttcccttgtagcttgccaaacaagagcctcaagcaatctaaatggttagccaaagcttcttctagttgttaaaattaaaatacaagtctaatggctcttgaaatcccatattatcaccatatgacactcctagtggagtactgggacccactcgtaccgttcaggcagaggtacttcattgacaatgtcgaaattgtacttgtccatcaatattgttagttgctgcttctcggcataagcaaagaactcctccatctcataagccgatggaatgcccctttggatgtgctcatggattatttggcgag

SEQ ID NO: 75253 - DNA, 330 bp, Glycine max
  Clone ID: jC-gmfl02220146c11d1
gatgttgatttgtatcctttcagctaaatttctaacgggacaagaaacacacaaagatctagaaaagacagttgaacatttgagaactccaccattcacgcaacctgttttaatgaaaggaatttctgtcatgaaaaatctagatgaagagaaaatgaccagatgatgcgggggcacagggtaatcccattacccacggggagctggcaaatctcgatcctggaatcttgagccagatactggttgagctccatcacatggccgctaagaggcttaatggaatccatcaatggggcatcgggtggggcagccacagatccagcccatagg

SEQ ID NO: 75254 - DNA, 452 bp, Glycine max
  Clone ID: jC-gmfl02220146d01d1
aaaaagaacaggacggactaatttaactaaacatttgggggggcttaatagccaaaaaaacacccttttttcataacagatggtccaaaaataaaatcttttttccacttcgcccaattcaatcaacagatggaaaataaacatgagccttctttaaaacgaaaaactcaaacttaaaacccaactttttttttgagtttttcccaccttgcttttacccctgttaaaagtaacaaaataaagctgctctgcaacaaatggaatttaaatttccaagacagggaacgtcccgcgctgtatttttaaggaaagaaatgagaaaaacggcccagggaaggattaacccgaccaaaaaccaaaagatataagcttcttaggcagaaaccctaaaacccaaaaaacccttggagtaaagcctgttaggagctaaccactgtaaacaaaacccaatg

SEQ ID NO: 75255 - DNA, 510 bp, Glycine max
  Clone ID: jC-gmfl02220146d02d1
ctcaaactctattttatagaaggcgtccaaattgtacgcatatgcgtatattccctctcatgcatgtctcccacaattaattccaccttgaaccagctatgcacagaagacaaacgcacatgagacgagaatcacagcgcaggaatatctaattttacaaagcaatgcttcttcttctatacacaaataataactctcgtgcacaaatatatataacatcaaatcaaaagaaatcattcaaatccatctacataactggctacatccaataccatatacatcatatatataccccctccccaacttttatgaaccctataagtaaggaagctaactgaaatctctgcaggtataaccctatactactatccaatctttacagggagctagcaacccctcccattccaggaattgcagtgtaccaaaatcacggtacatttcataattagtgactgcatatgcatgtgcatgttatatatgtgaaaacaacaagaccctctccttttcttt

SEQ ID NO: 75256 - DNA, 554 bp, Glycine max
  Clone ID: jC-gmfl02220146d03d1
actataagaaaaaagattatatatactatattttacaataaatttattaatttttacaataattacataaaaaaatcataccaataattatttgtaacaacccaacttcattacaagtttattatactaatacaaccccgatactttaaagtcctatgaaaatacgtaagatatgcaagcattcgatcgcataatatccattaccataacataaaagagttaagccttgtgtctttacaaaactaaaaagagccataagatgaaaaacaatgtcttaacgtttgttgacatggctttgcctttttatgggcacaacttttcaaattaaacttcagtggatggcaagggaaccaacctacgatattcagctagagcccacattggataaatattcctgtacattgggtaatgcagcatgcacgtactattgaatactccagcgagttcctgttgaggccaatcaccctctttcaactgataaatgatgagcaattttgcagcacggtgaagagaagtagtatctctctctgcctgtccagcaagaatttgaccca

SEQ ID NO: 75257 - DNA, 450 bp, Glycine max
  Clone ID: jC-gmfl02220146d04d1
gatatgattcaagaaacaacttttaaacttaaattggtgatcacaatcattccacatacaacaaaagattacaaaggttcaacccattataataaccatccataattgaaattctaagggccctaacaaagataagcttgttctacaaatggagaccaatatgatctaaaagagtagtttaatggccgcaattgacataaactacattctattgggaagaaacttgctgggaaaaatattgaagatcttcaaaaggtttatcaaaatcatcaaaccttttgccagccctttgaaaccccttacgtacaatatttgttacccggctgaatccatcttgtaaaccttgcgtgctagagaaaattcaaattaacctatcactatcaggagttacttgaggtgcccaaggttgactaccttgaggcttttcagcactttctgagtcaccaccct

SEQ ID NO: 75258 - DNA, 272 bp, Glycine max
  Clone ID: jC-gmfl02220146d05d1
cttgatatattttttttttctttattattcattttgcaaaaaaaaacaccccagaacccggtgatcacgtggacgccttctaaaaaaaatctggtgcaagcaggggaagccccaagggggggctttcccttttaacccacaagacaaaaaaggggcctaaacccaccctgttccacacgggggtgggataaggcggacccaccttccgaaaaaaagccctgaaactacgccaattgaacctagggggggcaaatgggagcccccctgaacgg

SEQ ID NO: 75259 - DNA, 415 bp, Glycine max
  Clone ID: jC-gmfl02220146d06d1
aaaagacctattattatttatttatatttttaaacaaccggatcggacttttttggtaccaaatcacttaattaccaatttggaacttacatttcttttaacctaccaattagaattattattattattattaccttaggccattttcctggggcttccgggattggaacccagcccgggattaaccgggccaacctttattggaccaaccggcacttgatggaaaccgggaaaacccggcccctggtcctggtgccttaagaattcacccggaaccaccagcttacctggacctttggaaggcccggtgggagccttggtaggaagaaggcccttcctggcacgcgccggcaatggcttcttttccttcaattcttggaagcccctgaaggaacccttggaaaggttgacctaa

SEQ ID NO: 75260 - DNA, 143 bp, Glycine max
  Clone ID: jC-gmfl02220146d07d1
tgcaacagaacactactcgcactccatccgtattatatcctcgaacgaccagctcactatgactactcgccggccgccctttttttttttttttatcttttattttttttcatttcttctttttttccctggggttttttttt

SEQ ID NO: 75261 - DNA, 479 bp, Glycine max
  Clone ID: jC-gmfl02220146d08d1
aaaaaagagttcactacatgcattaaaagaggcaaagactttaaacattttttgggggcagtttcctccaaacctttagctgatacaatgaactagcataaagaagaaaaacttataagtttctagtttacaatataattatggacaaactgactcttttttatagaaaaaaataaaataaaatatggacaaactgactcttttttatataaaaaataaaataaaatatggacaatttaacataaaataaatccacataacatacgacaatattcatcatgtttgagtgtaaaaccatttgccatcattttaaattcacctttgcctaaagaatacattgcgcttttgcttccctactcaatcttcatgttcatattcatcttctgaatcagatcgaacatgttcactaacttatcctcttgcttggatttgtttaacaagcattcgaaatatagcacccaccaataaatatgcataac

SEQ ID NO: 75262 - DNA, 347 bp, Glycine max
  Clone ID: jC-gmfl02220146e02d1
gcacaaaactggtaaaattccagatcaataaggattgcggcgaagccgaaaagatacaccattcattagggaaaacaggaggggggaaaaataaggggggagggcttgaggaacatataatcgctcaccgatgatgctagaacacctaatgatcccacacacgcatattgtaaccacccatgataaacaaaatgcctcatgggcgttttatagtataaagcccctccgaatgactagggggactccactttcttataccatccactggaggagatcacagaggacgaatcttgctggtgcgaccaagtgagagacgggtgtgttcaacttaacgtgcttactgcggt

SEQ ID NO: 75263 - DNA, 500 bp, Glycine max
  Clone ID: jC-gmfl02220146e03d1
gaattcaacatcattctgtgattcaataaaattagtttacgaacccttgtaaacaaagtactcatcttagtatgcaacaattttgatctctaaggaacttattttgttttgtaaattattcttcctagaatcctatatataattttacaattgagtttcacccctctgtagtatctatatatcccccaaataataaagaaattctaaaaacactagctgaatatataaccaagggatgaagaaaaggatcaatttgtatggggccttcaccttcatttggtgagagctgcatataggagctggttccaagtgtccggtaatcctggtaggcaccagtggctgcagtcattgcctgcatggtccccactataagcagaagggtgagcatcctttcttaattgtgagaggagtgttatattaagtagataaactggagtaatcattttccttacacattgttcaattggtagttgctggaggtagacctgctgatatgttga

SEQ ID NO: 75264 - DNA, 502 bp, Glycine max
  Clone ID: jC-gmfl02220146e04d1
atcttcaagttttgaaataatgaattattgtgggtcattccttatacattccatacagatgaaaataatttcttaggagttggataccattctatgaaactaatgaaatttgcagatagctatggaagaatggatctattctattaaggtaactttcaactgaattatgaaataacaatcctgatgaataataaaaaaagactatctaaaatatagggcaatgatatcaccaaataaccactcaacatgtctaagcagaacggatatgatatatgaaactgctaaatcctgcaggatctggcagaaaggctggctcctgaatggaggccagagcaaatgattatgattaaagttgataacctaacaacctaatcccactgaatctctgtgtaaaaaggccactcagaaggattcagcgtagttttcccatcagcagctacaagatcatatggtgagtcttctgcaaattcagtaggcatggatttccagtggaggcatggct

SEQ ID NO: 75265 - DNA, 498 bp, Glycine max
  Clone ID: jC-gmfl02220146e05d1
gacccgaataatgatactacattcaattcaattgttgtggaccaagtgagagagagagagcatgcacaaaatgataataatttaactttaaagagaacttcatgatcatcaaccatccaaggatttaagactaaaggaacaagtacaaccctcgaaagtgaattaggaagaaaacacatggaaggaaaaccatacacagaagaagattccagagaaattcaataatacacaatttttttttttttattttcatttccccccctctagtagtcagtggtgggaagctgctcgtgggtgtggctgataaagacaacctcgtaaacaaggccagcgattccaccaccgatgagaggcccggcccagtagatccagtggttggtccaggtccagctcacgacagcaggcccaaatgtcacagcggggttcatggccgctccagaaaagccccacccaacataatgttagcgcccgacatgaaaccaatggcgattggaagca

SEQ ID NO: 75266 - DNA, 531 bp, Glycine max
  Clone ID: jC-gmfl02220146e06d1
gacccgaataatgatactacattcaattcaattgttgtggaccaagtgagagagagagagcatgcacaaaatgataataatttaactttaaagagaacttcatgatcatcaaccatccaaggatttaagacgaaaggaacaagtacaaccctcgaaagtgaattaggaagaaaacacaaggaaggaaaaccatacacagaagaagattccagagaaattcaataatacacaatttttttttttttattttcatttccccccctctagtagtcagtggtgggaagctgctcgtgggtgtggctgataaagacaacctcgtaaacaaggccagcgattccaccaccgatgagaggcccggcccagtagatccagtggttggtccaagtccagctcacgacagcaggcccaaatgtcacagcggggttcatggccgctccagagaaggccccacccaacaaaatgttagcgccgacaatgaaaccaatggcgatgggagcaataattcccaaattaccctttcttggggtcaat

SEQ ID NO: 75267 - DNA, 606 bp, Glycine max
  Clone ID: jC-gmfl02220146e10d1
aagtacacaattcacagcaaaaaggtttataagctgtaaaggtacatgtaaccataaacaaaaatagtctccaagactataaaaacattacattttagacaaattagtcttcttccacttgatcctccgtcaacacctactacaactgctggtgttgctgctgcctaacatgtatcatattcactacaaacatcttagtaggagtagcctttgacgaacaactccttcttggcttcctcagattcaccctcaccggtgtacttcccaagctgggcgagcgagttggacttggcacggaaaagaagtgcatcttgtgccgccttcacattctctgggcggcctccccatgtcttcaaggcagtgttttggagggctctggcatacgagaacgacacgtgccacgggtttggagattggttcatggcattcaagttgaaggtagcttcaacctcagactgtccaccagacaaaaacataattccagggacagcagggggaattctcctgtgaaggagcttgacggtgtaatcagcaactgtctgaggactggccttgtccttgactcagctcaggtgtaccatgctggcttaagaagataccctcaaa

SEQ ID NO: 75268 - DNA, 383 bp, Glycine max
  Clone ID: jC-gmfl02220146f02d1
aacagccagtgatccagattacacatcacatattgaaacatgtacggaaaagactgaaacgaaattcattcccatcagcagagcatacacaacttgtcagaagctaaatattaactttatgagcgtatataatttatcaacgtccttcatggtcaggcacagtcattcttcacacataaaagacataagtcaattatgacctcagaaccttaaatcatcagtcccccataagaaaaacacggttctgcgtcctatatgtgatgatttctaaagcagagtgcctattaagcacttcttaaagctctggagcgggagcaaagtttaggccattcattgcagtggatggctgcataggaacgccctgagcttggttccagaaatgt

SEQ ID NO: 75269 - DNA, 435 bp, Glycine max
  Clone ID: jC-gmfl02220146f04d1
aaaggaaaaaaccaggaattttttttcccccccccaaaaaaaaatctggggcccgccctttttcatagggaacccccccccgaaaaaaacggcttggggtcggggcaggggccccaaacccttcccaaaccaaataaaccccctttaatagccttagccccccctaggggaaaatggggcccccggaaaaactaaaaaaaggaaattgtcccccccaaaaaattgggaacccaaagcctttttaacggggggggggctggactccccccataaacgggccccgggcccttaacattattcggaaaaaaccctgaacaatttcgaccctggcgggccaaaattcgggttcattcggaaccccggaaaaaataagggttggaaaacgcacccgggttttcttaggaattcccccacttaggggggggcccccccttt

SEQ ID NO: 75270 - DNA, 312 bp, Glycine max
  Clone ID: jC-gmfl02220146f06d1
ggattgttggtgtgtgtttcatatttttttttctgttatagattttctgttcgggcttacatagaaaaaagcaaccaaagggcgcatgggggcgaggcaaaaaaacccgggaaaagggggagagaaaggaccaaaaccgggaggccccccgggaaaaaggaaaaaaaggggaaaaggggcccgccaacgaagaggtttggggcaacactgcacacaccggaagcatttcaacccccgtcgaggaaggggggaaaaggaaaccccccacattgggaggccagaaacagagaaccctggaggaccccccggggg

SEQ ID NO: 75271 - DNA, 539 bp, Glycine max
  Clone ID: jC-gmfl02220146f08d1
cgaattgttcttaacaatcaaatcgagggaaaataaggtggtaggtaaccaatacacatctaagaaatccacaaaatgtgaattcattgctcacacggttaaaatatcttcaacagaagatgtatgacgaaagctacaagttcaaagacattaaaatcctaatatcctaacccaaccatctaataggtagattaaacttgaggtttcgtatcttcttcatcctcttctatcttgggagccaaatagaaccgcacataacccatctcagcaatcttgtactcaacaacaactggcaactcatttgaaagactaatggtaactgtgttagacaatggcgttgcctttgtaaaagagttcatatatcgcaaagcaaatgtcaaggacacgggctcattcatctcaatgacagttgcttcttcaggcttgtccacagaagtattctgcctacaaactatattggcagttccaatatctcctttggtggaaaacttcacaccctccttagtaaccgaaatgacaacagtgtcaccaatactact

SEQ ID NO: 75272 - DNA, 405 bp, Glycine max
  Clone ID: jC-gmfl02220146f09d1
aaccaaaaacaaaacccagaccaaacaataagggaacaaaaaatcttccaacccagaagttaaaaattaacatgacatttcacctgattacaaaatttttaaagactaccttaaggaggggcaccctaacccagctaaagggctaaaacttaacaccaaatacaaaacaaggggatatgtagcttcttagccattaatcaacccacatcgggccaaaccaggggaaaattgcacctgggtcccgaaccccctatccaaagaaattgccaagattagggaagaagtcataaattgcaaaacccttgaaaggggggcctcgattgcccattggggccgggaacatgtatagggcggccaaacacgctttggggatccccgcgataaaccttaacctaacaagttttg

SEQ ID NO: 75273 - DNA, 489 bp, Glycine max
  Clone ID: jC-gmfl02220146f10d1
aaagatcctcaaaactttttcaagatgatcaacaactttcaaatggatcaactcaagaaagccaaccctttggtttgggacttacatgtaaatgtcacaaatcaatgtcacaaacaaatcaagaaagccaacactaccacaaatcaccatcccattaaaggccaattgattcatatttctacaacctcaaacaagtgtggaagggaatatgactctttttccactgtttgaaccttggctttgggcattggtagttgatcgatgccggttgcagaatttgtcaacctgtaactttaatggagtgatcctaataaaaaaaagtcttttagactctagcatagtataaccatcaattaccaactactgaacatgttttcttgaccaaaatatggtttgagcttcggttcagcttgaacgaatcctaaaataaagttcttttgagatactaggtggtctcttttgcaaattctgagtttgtgtggctcaatt

SEQ ID NO: 75274 - DNA, 531 bp, Glycine max
  Clone ID: jC-gmfl02220146g01d1
ccatatgtaaatatttttagcatagaattggataacattaacatcatatttctttgaacagattctcttgtaagcatcatttcacatgatatgataaaattacaacaaaaattctgatgaacataactgggcaaaaatgaaggaatgcgctttgagcaagaaccataaccttatgtcggttattcaggggaggacattacaactgataagtacaaattgccaacccaagatgtattccaatcctttgtgactatagctcttctatctccaattcaaatttttaactcttctgatcagggtggaatgggcgtataaatgcagaattcatttgccaaacttttagtgaggctgtcacagtggcctcggtagcattgttgaacaagaacaacctatcagctccatagattgcctttgttggataaacccgagatgtcacaaccgtccttccaccttgagcaaagctttcaacaatagaatggtccaccagtatccgcaaggaaaacttttcgcctttaagaactggaacagcgc

SEQ ID NO: 75275 - DNA, 546 bp, Glycine max
  Clone ID: jC-gmfl02220146g04d1
caaagaaaaacacttttatcattgtgagcagtagaatcatctgctccatgtaagtagggtacttcaaaataacagcattaatatcctcaacataagattttacatgcctctcccatcttaagaaaaatacatatgaatgtcaattttgtatcaaaaaggggggaagggggggacacaataattgatataaatagagtacagaacaccccaactcgaaagagataaacttaatgataatttaatgaagcgtaagttgtattttgctaattccttccccatcctctgattctctaatcatctgtatgcgaagcctttttatctcattgactagtgcagatccaatagtaccgcaatcttatagtgaactaggtgtaataacacttaaaaaaaaattaagatgaggccaatgggagtaatttaaataactttcaccaaaactttttatgtcttcaggtcatcagacatcgcagaaggtatacaatgcgtggtgaggatgtctaaagttgcggtcttagcagtgctagtcttcaacactaccttctgttg

SEQ ID NO: 75276 - DNA, 443 bp, Glycine max
  Clone ID: jC-gmfl02220146g05d1
ctataataatactatgtgtaacattaaagtggcatgaaatgagaaatccatgatgcataaggtagttcatgtgactggtatgctccggtacagcgtagcatgcagtgcagattgaagctgaggagttattaaacagctagttggaggaaggaaaccaaggacacacctgataggctgacacagtgtttatttaatgtagtattataatatgatgtcctccaatggttgttaaagaagggcgtgaggcttctcgaaatcctcgagactggtggggcgaaaccaggccttatcctacagcgcatcacagtgaatgggctaagccatttggtcacctacttcggggggcccaaataccccattctgtggatgtggggcccagtatttgccggattgtgttgccgcctgaatcacattgtctgggacctgcccagactggatctcat

SEQ ID NO: 75277 - DNA, 586 bp, Glycine max
  unsure (1)..(586): unsure at all n locations
  Clone ID: jC-gmfl02220146g07d1
aaaaaatgacactaactggtcattcagtcagataaaacttgtccttccaaaatattcaaattaaatactataaccttcatgccacatcctatgtctatggctaaagttttaatagttttaagtcagtcactgctgtttttatgccaaaacaaattaacagaagaacaagcagcatttacacatttccaacagcaagaggcattttgactttggccttaggtgtttgctaattttatttatgtagccatctaaaatactgagatcttaggtcaaagcatccatccaggaataaatccattgacttgttgagcttgagttgtggcagctagctgctgctctgaggcttcagggatgtacctgtagtcagaacctatctgcaatgtggggttgcactccaaaggctggaagaagccttgagagtgagcattttgggttccatatggcatactttgctcaccagcttcccatgtttgcctatactggtttcttgaattgatttcttccagcttcatggtcaaagatctgtttgctttcaccaacatatgnctccttatctgaagatcagctaactggntcagcatgaact

SEQ ID NO: 75278 - DNA, 592 bp, Glycine max
  Clone ID: jC-gmfl02220146g08d1
ataagttcaagaaagctcaattcatgtggtaaaaaatggcgcatggaattagctcttcacaaaaaggccaaatcaatgtacaaaccataatcaatcaatagacagaactaaaagttcccttcccacactctccaactgagatttggagtatttctttgccagcttggctttgtcggcaacagagacgtcgtggaacctgatgccaattcttgctcaaaggttgcactgctacccggatctctcccacattgcgcagaggggggaggagaggaaagcataaaattctctttttgaaatcatctttatctctaccccgaacatatgaaccccaagaagcattaccctctcttccagtatctttcaagaagaatcgagtgggccctttacaaacagatttgtatggttccctggcatcgaaatcaaattcatttgtttgactaataccattccaagcagagtaagttctttcagagcgctccagttctcgaggaaaaacaatgttaggcaggacttgtacgacataacccagtgacaccgaatatgttagatgccgtgcatggtcgtaacatattgaacgctgcaaaaagctttg

SEQ ID NO: 75279 - DNA, 436 bp, Glycine max
  Clone ID: jC-gmfl02220146g09d1
ccaccaaataattatgtaatatataacaatttctaatctgatgggaattcatgcatgttcagtataccattagttgaggctccacactaacattttaaaaatcactgacgggggcttataaaaaacccatgtagttaatgaggggcataaaacacaaccttcaaaaatggcttctaggacataacccatgttatttgagggaataataataatcctactcagataaagtggactttggctccccattatttcgcaggtcccttacaatatcatgaccaccaatcagctcacttttgaaggaaagttgaggataggttggccaattgggggatcccttaaatcccggtgtcactttctaataggccaatttatcaatggacccaaaattcaagcccttttgtcgaagggcatcagcaactttggaactaaaaccaca

SEQ ID NO: 75280 - DNA, 327 bp, Glycine max
  Clone ID: jC-gmfl02220146h01d1
aaaaaaaggccttcccatttttgctttataataaattaaggggaggggcccaggggggggggggtgttttgtaaaacctttccattaaaaaaaaacctaaattcaacccaaaaccggggtttctccgctctgattttaaaaaaaaccccctcctttttttccaaacaaaaagccaaccccttttaaagctttgggggaggaccaacccaaatggaaaagaaaaacccccgggaaaaaaaaatcctttttgacaattggcaccccgttttttattcccccttttgattagatttattgtcaacccaaccccaccaccttggggctaaa

SEQ ID NO: 75281 - DNA, 507 bp, Glycine max
  Clone ID: jC-gmfl02220146h02d1
gaatgaaaaatttcattcttcaaagtatataaataaatttagtgcaggacttacagattctaaatttctagtggtaaataaaaaatcatccaacctagagatctttaacaacggaccgagtggaagagatatgcacacctagcacagcacctaccataaacttaggcagaaaatctttgagcattattttgaatgcaagtggcgtttacagcttacaacaaacacttgccacactttttatgctaaaattagagagaagtgtagggtcaatctccccatttccagcatgaatagcatcaatgaacttgcatgagtcagcacattggaaatttcttacaaaccacaaattgctgcaactatggaaccaaactatcctcagtgtgtaattcaaggcacacaagcaatcaatgagaagaccatcaaccaacctctttgcattagaaaccaaaaggttgcattgtggcttatgtgaatgattcctgcaacagttccttaaatggatatgtt

SEQ ID NO: 75282 - DNA, 526 bp, Glycine max
  Clone ID: jC-gmfl02220146h04d1
attagacttaatcttgtttttactatcactcaaaccacatcgatttggtgatgttatcacatagttttaaaacaaacatagtcatcgatagattatgctaatcttctgtgtcaaaggattttagaacaagcatcattatagatagatcatgccacttgccatatagttttgaaacaaggataattgtatagagattatgcccctcacctataactcagttctacaattaacattatgtatcaatacacatgtcgatagatacattacttctctaatgaacaggaccctctcaaagcatgtgtaaacacagaagaccttgcacagcatatataggtaaagacatacctgggtgtcacatctctaattttgcaccacctgaatgtcgacacgtcagagcgacagaacatatatacaaacatactgccttcgattatggatcggaactggacatttggcaatgacatttgcagatacctactaccaatgcatgtagtaaaacgtggcacagggatgaatatgactgctt

SEQ ID NO: 75283 - DNA, 507 bp, Glycine max
  Clone ID: jC-gmfl02220146h07d1
aggcacgagataaccactttttaccatatatatatagagagagagaatacgaagcacactgatcacaggatgatgctctctttaagtagggaagcagatcttatcagtacacataggtaggttgaaattctagctctagcaatctagctagagaaggtagtacttgcacaacacacagcacatgataatttattttatacacaatctcattctcatggtgctcaagatgcatggactaattaagcaacaatgttggtctgataggcagtgtccacagataaattgggtacccataaaatggccttgcttccaaggaaatggcaaacagggttagttccaggatcaactcccataagatgatgaagcatttgatgattcattccagacgtatttgagtggcaaatagcaagtgcctgagttttggttccatcaccagccaccaatggaaccatgaaagctgttgtttcacggacttcatggcagtaaatactgcagttctgaatttag

SEQ ID NO: 75284 - DNA, 559 bp, Glycine max
  Clone ID: jC-gmfl02220146h08d1
ataatagttgactatctcagagaaccatagtttcaagagacaaatacatcaaatgtttgaaatcttgtttgagaatcacatcattcacactaatgatcacaacgaaactggtaaactggaccttacaggcaactaatttagcaacaaatattaaaatagcaaaaattaagtgcagcattgttagaattactcttccatggcatgattctcctctgattgctgttgggaaaccttgactttgatctttggtaaagtgagagatggatcctgttgaagcacagaaggagctttgaccaaactgatgccctgctccaactccttcactgcctccttcagcaatttttcctttttgcctttcatcctgttcttatggtgtctctcctccctcgagactctgatcttatcaatcttaggaatggccttgaggacattctccgcaagattcctgtcatatctttcaggcctgtttctctttctctcaaactcaaaagttgagtcctgtgtcatatcctttccatgcactcgacgatatgccttggtccattttaccttacgagga

SEQ ID NO: 75285 - DNA, 291 bp, Glycine max
  Clone ID: jC-gmfl02220148a01d1
aacccaaatcatgggccctcaaaacaaaaacttgggtaccaattaggaaccgattttaaacaatattacgcacaagtacactaacgagctaaacattctgaaattcccagggccctagtaaaagatattaccacagatctcttaagcccaagggatggttttccaaaaggcctaacctgagacccacgtttcttgggaaacttcttctatcaaagaccctgatgctaaacattgctaaattctgattaggaaacggtacctaaaatgggcttgcttaggacctattaaaag

SEQ ID NO: 75286 - DNA, 412 bp, Glycine max
  Clone ID: jC-gmfl02220148c01d1
gaagagagaaagagacacctgttattaatcagaagagttatgtttacatggatacagatttcaacagaggtctcttagaaatcaaattctcaccattcatgttactttcttttccctaaacatcgaaggttctccctccctctctgttgtctctacccaaagaatttgtactagtggcttttctgtacctagaatgactctagagtgtatgattgctttcgaacccattcatcataatcttgcatcgtctgctgaagtaggaatggctccagcttgtccaccaaagcttgcatcattatatttccaggaccctcaacagctgaagtaggcatcatggtaaatggttgtgtgtagatctgcaggcagagatctttctttacagatgagagaggcaaatgcaaaaatccataat

SEQ ID NO: 75287 - DNA, 275 bp, Glycine max
  Clone ID: jC-gmfl02220148d01d1
gtattataattgggggacaggcaacaaaattagaacgaagaggggcttagaattaaacaggattccccaaaaacgacaagtaaaaaaagaaaaaatacccaaaaaagatggagagcaacaaaaaaaaaaaaaaaatgaaaaaagaaagcaaaagagaaccattactcaaggaaatgagaaccacaacagcaatcggatagcggacaaaactgaaataaccccaatgattgtggaaaaaggtagaatgaggccacaggtaacaaaaccctaaaaga

SEQ ID NO: 75288 - DNA, 434 bp, Glycine max
  Clone ID: jC-gmfl02220148e01d1
atactgtgaatgtgaatcatgtgtatctttatataccttacagttaattacatgtatgtatgcgtatatatatatacatatcagcctgtaaaattgaaagctcctaatatatacttatacctatgtatatttcctattatggacaaaagtcctgaaatcgtcaacacggactgataccatgctgatgaagccagacgtcactgcatccaagagctaggaacaatttgcagagccttagaaccacctacatgttgttgcagtttacttgttgactcaactgtgtgcattagaactgtaaccactggagtcaatgcactaattattggtaatccatatctgatagggccatgttgattatcatatgaatcatgatcactttcattagccaagatctgtcctgaggacgtaactgaaggcttcccaagtgctgtaag

SEQ ID NO: 75289 - DNA, 1044 bp, Glycine max
  Clone ID: fC-gmfl700905635
agagaaaagcgcgctatatacaagaacttgagcgcaaggttcagactcttcagacggaagccacaactctttctgcccaattgacattataccagagggacacatctggccttagtactgaaaatacagagcttaagctccgtctgcaagccatggagcaacaagcacagcttcgcgatgctcttaatgaagcattgaagaaggaagttgagagacttaaggttgctaccggtgaggggatgagccacactgaatcctttaatctgggaatgcaccagatgccattttccggatcaaatttcattccaatcccgccacaatcaggtccttctggtcaccagaacatgcagatgccaccatttggtcactccccatccacaatgccaactcatcaactgcatcaaacaagttctcatccatattcagaaatattgcaaaatgaacagcttggtcgtttccaagggcttgacattagtagcaaaggatcaactctcgtgaagtctgaaggcccctcgctctctgcaagtgagagtagcagtacattttgaatttgacagaaaatgcttgacctgctgacttatccatgctattcattgctcatagggttgacatttagtcaactagtgaaggtacctcatttcatgattcagatttgaggattaattcttaactatttattctaagggttgctcgccaaaaaggggaagcacccttggggttttgttgcaaagttcacagtaatcatgtttcagcatggcatttggtgtttctgggcgctggaatattgggaatgaaaggtcattcccattgtatctttgtatttgtatcatcgtttacgtgatagcatgtaaactgtgtgatttattgttgtgttttacttcattcatagtccaagatggactcttttttttttttctttgtataattagttttagatttattcatagtcgttgtacaatccaagagttttgggtacttgttgtattaaacttcttctgagataagaccttttttttgaaaaaaaaaaaaaaaaaaaaaaaaaaa

SEQ ID NO: 75290 - DNA, 137 bp, Glycine max
  unsure (1)..(137): unsure at all n locations
  Clone ID: 700764507H1
ntgngcacgcgtacgtnagctcggaattcggctcgagntaaaaattagntaatttatntcgatngtattagacngagaccngncaaanntgaangtgagnananannnaaacngntanngcngcncntcgnnannnc

SEQ ID NO: 75291 - DNA, 137 bp, Glycine max
  unsure (1)..(137): unsure at all n locations
  Clone ID: 700764512H1
acagtnggcgtangcgtncncnagnctnngattcggctcganccnagagcgggnccgtggancataccntaancngctcnaaatnntagnnacancagcantnnnaacncatanngcnnncgcnacnanaacagacc

SEQ ID NO: 75292 - DNA, 136 bp, Glycine max
  unsure (1)..(136): unsure at all n locations
  Clone ID: 700764545H1
caatctcacacacncnnacgtnagctacnnaattcnnctcaaannagngacacaacantngcgancantnaccnacacntngcnnntgctnccgagaantgcgnagctanagatgtacaacatngcaanannacgc

SEQ ID NO: 75293 - DNA, 143 bp, Glycine max
  unsure (1)..(143): unsure at all n locations
  Clone ID: 700764575H1
cngtctanacgacagacgnanntnagcncntgaatgtctganntacaggnagaanagaagcgatgcgtanccncnggnattaagacggntgancgntctaannagngngtggtcagnagtgcctagggnaaatangctnctnc

SEQ ID NO: 75294 - DNA, 313 bp, Glycine max
  unsure (1)..(313): unsure at all n locations
  Clone ID: 700902948H1
ngtntattaatctcaagaantnnattcgnnntgtgnnnaacacaactatgannnaantnnannnacannnnnnnnnnccgtnanaannttnacgnttnatnntgtatcnnatngcanattaccnnttttnncgtanntnnnnnntcncnnatnatcttnctatnagggtcttgagagtggncantttnnngtcancntgantnngttgacttcatcaancanggnnaangacgnncnangnnctgatacatnatannnnnnnggtatgncngtgantatncnnntnggncngttnnnctgnaattggngtgtc

SEQ ID NO: 75295 - DNA, 292 bp, Glycine max
  unsure (1)..(292): unsure at all n locations
  Clone ID: 700903055H1
ttnnngcgtnncangcacncttacntantctcgnnaattcggatcgagaanctcctacgcatcncaaaagnctnacccggtgncacnnttcatncgntccaangctttcgcgagnaganancgcgcngctnnctcnngccancatgatncgctcgnagantcaancggngcnannagtnagcgttntggnngtnnagngncgtgtcntagncagcacactggccnggncggncgtgnannnccggtccnncanagnganccntttcaacnnngnantngtatcnnccaagnt

SEQ ID NO: 75296 - DNA, 339 bp, Glycine max
  unsure (1)..(339): unsure at all n locations
  Clone ID: 700903063H1
ncgnnnganaaanatnanaatgnnnagagagaagaacgnataanggcgagagaganagtgtccgctgcncacgaatcgtgnacagtattctnanggnnaagacncangcagaacatagttgngngacaggnncntnaagaatggagnatnagtngnngtnngannnncagaagnntagcancaaagcngaagagtnancnnantnagggcaaggangannntgntaanagagcgntnngnatngtagtaganancncgtnggagcngtcnggnatannagtntagnaagnngnngtnanannngaagngancnnaggnaggangggngaaagnnagncc

SEQ ID NO: 75297 - DNA, 342 bp, Glycine max
  unsure (1)..(342): unsure at all n locations
  Clone ID: 700903075H1
aacgcgnancganagangaggnagcgnccananagngtagcgnatgnannannnnagggcgcatgcngagntacannggacacggtagcagggtngtgaaacanggngganactgccagctangctntgnangcgngagncgntncgcancannncgatcntganaagagngncnggnnntgcggnggcacncggncnnagtctnnagtncgagaganncccggnnngnagatnccggggagnatcgagancnagagnnnnatnaancaggagagaaggcatnncagcnnccagcngagctangcngnncgnnccaggngnagagnaganngtggggggcgc

SEQ ID NO: 75298 - DNA, 332 bp, Glycine max
  unsure (1)..(332): unsure at all n locations
  Clone ID: 700903081H1
nnatcgcanacacgcgtacgtangctcggaantcngntcgnggtgagaagnnataagccntgnanngaagnaccgagnngatngntncatagccgntgtgnnnncncnnncgtnttnaanntcnngntctntcncacnnntnctnnaaacacaaannnctncttnggnccncannacatnantatnggcnantgttnnnnggnntncanganatnaangannnanncagnnngagacnnncgaatgaacnggtntaggnanagggtggatgcgancnangatgnnanggttngnnnccgannanananancannagcncagnggatngaaat

SEQ ID NO: 75299 - DNA, 456 bp, Glycine max
  unsure (1)..(456): unsure at all n locations
  Clone ID: 700903090H1
ancncanngcagnaaccntccancantcatnnatncngaanngtgcncagcctaagtnatgagtgccccccagcagnacaaacncggactacatagaganaganacctaacagnnagagnacgcgcatnaatnacagnannnnggtacacngantacagcggcgacaaagtnagcaaancgatananngngnagngatanatccacangtacagancnatgntagcgttntcnntnanagnagananncgagaanacaacaggagtgatnnactnnnagagtnncgnnnanncatagnggtcnnnnagagnacngcanagntnnganntngtnnnaactnngcannnggnnnacggnnnnnantngnnagggcccnanctgtcantgnnagaannnnnncganacagcnacnnnggnaaggannngnnnnaagnncgacatccannnnggaggatc

SEQ ID NO: 75300 - DNA, 311 bp, Glycine max
  unsure (1)..(311): unsure at all n locations
  Clone ID: 700903129H1
aatnatatnnangcntangtaagctcngaattcngctcgagtgaaatattaccagttttgtgcaaaaaaaaaaaaaaaaangnngnccncaaattattaanctcttaaaccngnaantnanttcnnaacgnnnacttnaaggntnaaaatttttccntanattaattnntatnaaantttggagnaataatggnaananntttttcntntntaaaattttnatccgttaaaanttcaaaaaaaaaaaaatnnntaaaaaaaaaaaanannnnnnannnnannnnnnnnnannnnnnnnnnnannnnnnnnt

SEQ ID NO: 75301 - DNA, 288 bp, Glycine max
  unsure (1)..(288): unsure at all n locations
  Clone ID: 700903133H1
aancnaanacananaacacaaaacnaaacacagancaanncagaanncngaacgcnaaantattanaaatccncacaacanncaaatnatccacacttaaacaaaaccanaacananaanancnancanaannnnannacanaaanngannctcnnaanaannnnaacacaagcaaaancngacnaaanaacaaaaaaancnacaanancccaacacaannaaaanganannaacatannaaaaacncatgnaagcnacnacannnacaacangnnncnaaaacaann

SEQ ID NO: 75302 - DNA, 407 bp, Glycine max
  unsure (1)..(407): unsure at all n locations
  Clone ID: 700903136H1
agcaaccagnaagtaagnaacnancaagtggtacngaacacangaganncagccacangnacgcaannnccancanacgntncacgganngcgnngncagancaagatanaannnggtnggntngaaggncaanancagaagaggaaanaggcacancacgacgaacaaanangncacanagaggaacanngncgagaacgcagaagcacacnnagcacaagaaacanacnaccaagnacgagnanancnagcagagaagcagnacanaccaccgancnnangangaganacnangaagagccaacnagncagncanagcgagaacgacgcanagancagagcanacgaagcacngagnnggancanaganggnacgacatcanaangacagagnanacaanananc

SEQ ID NO: 75303 - DNA, 374 bp, Glycine max
  unsure (1)..(374): unsure at all n locations
  Clone ID: 700903137H1
nnnnnnnnnnaanccaanaaaaannaaaccanaaaaaanncctaccanccannnnnnnnnnnncnncannaaacnccannnnacacncnncnnnnanaanacnnncnnccannntcacnacacnnnnncnanancacacnacntcnnnnnnnancccnnnccanancnccncncnccaacaaacnaaacaancacacnacacnacnacaacnacacnaancnnnnancncannnnnncanncncnnnacnancacacncccccacnnnnanncacncccanccacnccacacnannnnccacaaccacaaccanaacccaacacncaccnacannnacaacccnancanaacnnaacaancacannaccacnnc

SEQ ID NO: 75304 - DNA, 315 bp, Glycine max
  unsure (1)..(315): unsure at all n locations
  Clone ID: 700903138H1
aagttanagangngaaagaaaantanaanaatnaagatagannaagaaananagntnnnatatnnaaangagntagaangntannanatgnagatatgaatagangaaaannanacaanaaanataaanaananttaanngaannaaatanntaagtnaaaaatgananaagaanaanncaaancananntannnnaantnnnaaaaggaganaacanaagtgnnnaananaaaananaataaaaaanaaaaaaaaaganaagagnnnaaaatagaaaaaananagngaaagaatananaaaaaananaatanan

SEQ ID NO: 75305 - DNA, 326 bp, Glycine max
  unsure (1)..(326): unsure at all n locations
  Clone ID: 700903139H1
ncggtactatgncatttnatgntnngaanaannannannnannngtantttngncgcgngnncnngtnntcnaagnananncnngangtntgnngnnnngtanannttnngtttacacngnnnanananngnttgnagcanctagttnnntngngtnnntnaanngnantagnnatanatntatnacnggctnantttnnnnagnacnatcngnatnnngnacanngnnnngttttgnngnngnaaatgtntnttgacncnagcaggtttntnnggtnttncgnnnngaagggnnnnntttggngnnngncnnnngtctnntnnng

SEQ ID NO: 75306 - DNA, 321 bp, Glycine max
  unsure (1)..(321): unsure at all n locations
  Clone ID: 700903140H1
cgagnangaaagananncnnatncgnagcngcnncaccngcggnannanctcacgganaacantanngnnncacaacgngagacanancgcngncgnacacangacncacangacancnnngnngcangnncgcannnggagnngnncagcacaganacagatnanancannngnncannacggcnaagganaaaganangnncagcagtnganagcnaaancannagnnanacnacgngnagnngcaannacngacacacaagganagannnagancacaganannncnaagnnacgagancacantnanagancanggc

SEQ ID NO: 75307 - DNA, 273 bp, Glycine max
  unsure (1)..(273): unsure at all n locations
  Clone ID: 700903143H1
annccaaannananncnaaacanccaaacaaanaanaccaccaanccngancnanaacnacaancagaacacncnnaccaagcacacaaaaaacaancnanccacagncgacnaancancngcaccnccnaaacaaccaaaacacnngaanacnacacacgannnccaaganaangaaacccaccacacnacaacacaanaccacancagnngngcaaancnanaacacnaaganangnnaacganaacangcancaanancannnnnacacn

SEQ ID NO: 75308 - DNA, 387 bp, Glycine max
  unsure (1)..(387): unsure at all n locations
  Clone ID: 700903144H1
ttttctcctcnanannnagcnncccatcagacactatcnannagcnanaactacanctncnacngacaanacatctcctacatcancaaccncnctanntncngcacagcaagnnnaacanaannnncnccncagtatnngngnnanttanacancnntcngancnagacnagcnatnnanncactnacagcacanacccaanncacananagcnntgnnannnacnacancnactcnnngngcancacgnncnnncacaannngnnngnacaancccaacnctnacnnnanngcncaccncgtnncnaanatnaaacgtccgctnnagnannnananacancanactcctnnnaacnancnancattnnnacnancaaaagaacct

SEQ ID NO: 75309 - DNA, 285 bp, Glycine max
  unsure (1)..(285): unsure at all n locations
  Clone ID: 700903146H1
anctanannccccanactnncnaannacagacaccagaatacacancacatatacacncatacanaaacaacacacacaaacacaccannancatccanaanantaacacanaancaaccacananaaaaaanccacacanacanntncanaccnacnannanaataannaaaacnanannacacacnnaanancnncaacnaataacnngnntnaaccacnagaancaccananaanagacaatcacncanacaaannacnnnnnananncacncgncacaaan

SEQ ID NO: 75310 - DNA, 434 bp, Glycine max
  unsure (1)..(434): unsure at all n locations
  Clone ID: 700903147H1
aaaaaaaaagnccnncaaaacttaaacgnannnncnccccnnannnaaaacngaaccangganngnaccnnnnccnggaanaacnaacntcacngnngnncacanattccacgacgggcntaacccccaccgacagcgggctcacgancgncagacgcagcacanncacacnnannacnagtnncacannacacctccnacacncactcaagcacagngcnaaganaantagatnnagctacaaacacncanactcaatgctannnttcaagacgacccaagagcaagtnaaccgantnncncnannaanntnngcgcnccnacanacnggnnnnnaagagcctnagtcnagccnacacancnagaccaaacnanacgcgnnnccnataccnanacnacnnaanganncagacgacangacangncnacacngc

SEQ ID NO: 75311 - DNA, 482 bp, Glycine max
  unsure (1)..(482): unsure at all n locations
  Clone ID: 700903148H1
ngnanatagannancnccttcaacntccccctgnccagctgnaangccnnnntgaganacnnnanctnaaggngtgngtgaangaaatntacangngnanncgtaacagcctccacaacnccnncganacananncacagncganctcnncnatnncaggtnnannnccngacngtacacgngctcangtccacantntanantgtgagacnagccangccaangaagcgcgatncanngcagnnnanaanaggancannnagtgnanacagagncacgncngcagntcgcgacngnantcatntcncatgtntgtcngatanangctcnananggcnaacggcangcnnaggnnnancnnnaacnatggntagnncnncgaacaacnaagtgacanttnagtagantgcnngnnngngncggcatgtgagacntgangncnanannacnntngnggangngaatcngagnnanagngnact

SEQ ID NO: 75312 - DNA, 360 bp, Glycine max
  unsure (1)..(360): unsure at all n locations
  Clone ID: 700903151H1
naccggaatcannncncncccannncngggccancaanaaacngcnggaaaccaccatccncgcagaaacancannccnnaggactacacgacaccnaccgcacaccnganccncacancanaacgncacangcccncgcacncagccgncnanncncgngnngacagcattcaacccaangacaangcaggnccangncaacncaacgacagggacaacaacaannacnagnngacnccaccgagacncnnanngnngccncnnnanagannacnncanaagacncagangananccaacnancaggaancacnngagcncaaagccancngcanannnaaancanannaagnngaaac

SEQ ID NO: 75313 - DNA, 335 bp, Glycine max
  unsure (1)..(335): unsure at all n locations
  Clone ID: 700903152H1
anagtatanngannacgtangnanancncgnaattcanatcgcagnnagnncantctntatgggatanggnnanagagtnanagcaccaatnggnaataggatanaannnctagngnnagnncgnnatctagncagaggcnnacaannnntannnacgatacttnaatgnaacnncaancagncagtagnaggaaanaaanntntggcncganganaanagaaagtannagnnccaangtatggggannannncnaanccngannaagcaaganaacnaaccntncaagantatngacagnagannaangnnatgtnangtnatcgntaccagnc

SEQ ID NO: 75314 - DNA, 410 bp, Glycine max
  unsure (1)..(410): unsure at all n locations
  Clone ID: 700903153H1
aaaaaacnatcacgccgngagggancannncagacaganaganaccacgaacatanacacacangcagananagntcacgncnncnacancacnacngnnncngacgnatgcnganaacannnntgtgncgannacanagacnnccgngngcnantancncacncaacnnagccaacaancancccntcacgacaancgatcnnngcnacnnnnaccgaagcncagcngngaannganannagancantnnagcaacannagananngngaangcantcancacngnacaanacanaagnncnggacngagannnatanacnacnacgnagagnannagtcnaaanccgncgtgntgacaaananaanntgnnngnagnanaanggnncagacagagnangnaannncgn

SEQ ID NO: 75315 - DNA, 265 bp, Glycine max
  unsure (1)..(265): unsure at all n locations
  Clone ID: 700903154H1
caaaaaaantncntttgannncnccnctnaacngccnnctnaccngctnnaactcatncagcgncaagtncncgactacgccggcgaagcacacagcaangaagngnnngccnncncacagagcaaggaaanncananacgnncanccnangcnanngtacncnaancancaacntaccaancaagagtgncntncnnnanangngnacncaananccanntnagnangncgnacagccacgnaaanncnanggnaagganncan

SEQ ID NO: 75316 - DNA, 474 bp, Glycine max
  unsure (1)..(474): unsure at all n locations
  Clone ID: 700903155H1
aaacnanatnnnnatcatnaacnacagcacacgaaaaganactcaagancagtttncnagcanancancnacngtacacactgncnnacacacacaccccncgcngagagcagtgacngacacnancnnannacacgtngaacnacncagccaatcnanncgananncacatgcnncaagtngtnntcncacanancnactacnacnnaannnngctacgaaacnccntnaagatagancnnacgatcacnnanancanannacacgacngacgcnnancaagnnananccatnannnaacacannaancannacgacanacnagcnacaanatnacanaaacannacnaancangcaccatcnagncacgnnaanacgcaagacnataaancaagcnatgngcaatnnngacagccnagcagnnnagcngacagncgcannnanccganntgacagancagncagcananntc

SEQ ID NO: 75317 - DNA, 472 bp, Glycine max
  unsure (1)..(472): unsure at all n locations
  Clone ID: 700903156H1
nntgggagnntgagnagngntgnatagcannnnnanggagagagatgcgccacctctagatatgtgnanannacactctcntaggttnacagangnagagngacanacatgttatgtgganagcagantgtgnntcntggtgttagtcntggangtggtaaggagtacganntgnagactgngcaagnggagnagnggagngnntanggtgnngntnggnagnagngngagntgntcagcngtnantnnngcngngcnagtaaggancnggantgngganaatagnnnnatgtanntanaaacnnaaanagataagaantngtgagaggtcaatcaannngnnggnngnnganatgaggnngattnngangggaannnagtttgnanntggaggaancngtagngtaggcagnagannngnangnnagtgttgtaaggctnannntatannggtnagnagagnagagcnann

SEQ ID NO: 75318 - DNA, 124 bp, Glycine max
  unsure (1)..(124): unsure at all n locations
  Clone ID: 700903188H1
gacgnagcangcncgcgtacgtaagcncggaantcggctcgagctcgagccgattcggctcgaggnnagctccccntncanccangtngacttcngcanaanntnggannagcgaganangcnc

SEQ ID NO: 75319 - DNA, 337 bp, Glycine max
  unsure (1)..(337): unsure at all n locations
  Clone ID: 700903219H1
acncanctacncctacntaanctcgcaattcnnctcnnncnctanctannntaccgncacaccacacnacnnncnnntacagcnanncgcncntannnnnannttgcactnncnacggncccntacgncncagccncatncgagncaatccnggnccnacnccntaancactngtatcncancaatccnncnncnntngntaangccaatnancagnctacngcnantgcatcnnnnccncgcngccatangtnnngcannnatngnccccannnaanncacannncacnnnggcccactccncttagagaatatnnantncccnaacgnnnannan

SEQ ID NO: 75320 - DNA, 311 bp, Glycine max
  unsure (1)..(311): unsure at all n locations
  Clone ID: 700903223H1
nttttgatangcnnatgtnatctcggaattctgnnnnatnattattatgtantattgtgtnangnnnagnacgtgtgtggtngtgtgtggtanttgtgnngtagtgnntgtttgggtantngtanggtgtttngttgngnnnggtntgtgtgtgttggnggntgtgntgtagngtggtgtntnnatangaggngttgtnatgttgantgtnnagngnngntnnngtgntgngtggagnaattgggtnttgtctnatgnttgaanggnttttgtttgntgtgggtgattggttatgggtgtgntnngngtgg

SEQ ID NO: 75321 - DNA, 500 bp, Glycine max
  unsure (1)..(500): unsure at all n locations
  Clone ID: 700903235H1
aannagtnccgcgacntctnacnntaatctcggtnatgcnagcttcggaggtntngtggnnatgantgtgnctttaccgacgngctcnngactcngtctgngagttatntgnagagtgttcacggtggngngatngtggtcgtttanttgtgngtgatcagnntcncgtgagtgcggctgntgctgtcgcattgtcanactntgctgtctngacgtatgggtgctnntcncgcagtntgntgtngagtgtgccantctgtgttnntttgtnctgtgnncncgttgtnncncntntgnctnnctngtgnanagatgntgagtgagngtntcagtcncacttngatgtganggngngnttgagtccgnntggcngtcngagtcgggngacgtngtngttcggncnaggttctctagagannnngcgctatcgtcgnngggtgcgnngttgcgantgtggnggnanngannctgncggtctttnccgagatcagngtntntgn

SEQ ID NO: 75322 - DNA, 300 bp, Glycine max
  unsure (1)..(300): unsure at all n locations
  Clone ID: 700903238H1
anngcgcgnacgcgtacgtaanctcttaatgcngctcgaggaagggtacaggccgtggagnngaatncntgcaangacaggagcanctnctnangagtncangaacangtntgttggggctancgcncnatgtagaagncacgnggcctggttngaaggggatcacncccantngaagcnacngagtnctanncagngtnangctgggagancgcgangtcgactnagcntacntcnggatcntgnagggctgggggtgcccgacncccttgtgcccnatnatggcgctnccggtgccan

SEQ ID NO: 75323 - DNA, 310 bp, Glycine max
  unsure (1)..(310): unsure at all n locations
  Clone ID: 700903251H1
antttgntaacncgtanataatctcntaattcnnctcgagntccaatanctgtccangtcnnnctgtnnancnttccnngcgngcccttntagatggagatnngncggtcaaganngntncanngtgcnagancatgatccttgaggnnnaaanngcngagangnagnnacaacgtcaatgnnaaganncagganaaggaaggantcnccccggancagnancgtcnnagtnggcnncggaaagcaacnggaggatggtccntanccttggtgngtacaagatgtcagnaggagtgtattnggcntnttn

SEQ ID NO: 75324 - DNA, 146 bp, Glycine max
  unsure (1)..(146): unsure at all n locations
  Clone ID: 700903254H1
nnattnnnncatgctctacnaaagcncggaattcnncncgancgngtnaggnnntggngtcntgtncgtggngatgnnnagtngnctggcttntgagnnnggcnggtttatgangnttgncncncgtcnnggtcnagatgtctntn

SEQ ID NO: 75325 - DNA, 456 bp, Glycine max
  unsure (1)..(456): unsure at all n locations
  Clone ID: 700903255H1
aaaagtnttntgcagngagtgcggtgaacgntgagaggctgcgtgtaaatgtccgagccntngnaggttaananggatgntatnttggttgaggcngtggggtnanagntatnaagtgtncngtgggagaggtncntgntcgcgttgtgtgtntgtnggttgtgtgntttgctgtgtgcgttanttncgctctnntttgngngnngtgtnttgtnangtgancangacttgttggtgtgnngtgnggtggtatgtgtgtggtgtgtgtagtgtgtgttgtgnagtggtgggtgngtgtgtnggtggntgtgtggtgtgttgngtggtggnngtgtgtggntngtgtgtngagtgtgggtttnanaattttggtttgtgtgtgtgtggtgtgggtgtgtttttggttgtgttgtgtgtgtggtgnggtggtgtangntnggtgtttggtgtgttgtt

SEQ ID NO: 75326 - DNA, 305 bp, Glycine max
  unsure (1)..(305): unsure at all n locations
  Clone ID: 700903270H1
acttcgcgcncgnntncgtnagctcggaatncngctcgagctatngctcnntngnctcgctagcttatgcacngagggangttgatnccntnctcngatgnntntcgtncggtatcgnccgctggngctcgtnctcncgtattgggccgtaggcgnctgttnanngccngcnagtnncggggngtcgcancccgcnggngttggggngncngncgttnacccccgcntcgtgnngagtgtggttngnnngtcccgcggtgnttgagcgctnccngctncnncgnnntnntgtgtngcnccnnntt

SEQ ID NO: 75327 - DNA, 292 bp, Glycine max
  unsure (1)..(292): unsure at all n locations
  Clone ID: 700903275H1
acgtcgcangcacgcgtacgtaagctcggaattcngctcgagncctcatttcttcttttccccacacaacatangancncngnnnngnncnngnaatgcngngggctaaaattncagcntccaanattgaaaaaaaangncaaacaagttctctncnngnncngctcntcntggccncnggattggccctcncagtctcagagtctgagtctgntncncngctgcctcacgccgcngantccttcaatgttagctatatccagatgaagaacgctgggacttgctcntactn

SEQ ID NO: 75328 - DNA, 330 bp, Glycine max
  unsure (1)..(330): unsure at all n locations
  Clone ID: 700903279H1
ttntgcgttngtctgtacgntcatctttgngtttcggnntcgtaggngggttgtcgtgnncgngtgtgntgngggntnntgtgtttggtggtggnggttgngtttgtntntntgtggtttgnngtggntgttttgtnggaaggtgtagngttggttgggggtnnntggttngtgtggnnggtttncctgggtgngtnttgtgnngttgggtttnngtgncntnggagtagtgttttgtgggnggtgtgttgnttggtggngtggtgtgtcgtnnccgttgngtntgtgcgtgtnntgngnnttnngnttgntggtttngtnnctttttgt

SEQ ID NO: 75329 - DNA, 217 bp, Glycine max
  unsure (1)..(217): unsure at all n locations
  Clone ID: 700903669H1
agtcgatgcagcgtacgtnagctcggaattccgagcttggatcctctagagcggccgccgactagtgagctcgtcgaanccgggaattaattccggaccggtacctgcaggcgtaccagctttccctatagtgagtcgtattagagcttggcgtaatcatggtcatagctgtttcctgtgtgaaattgttatnccgctcacaattccacacaacata

SEQ ID NO: 75330 - DNA, 280 bp, Glycine max
  unsure (1)..(280): unsure at all n locations
  Clone ID: 700904079H1
gatngnatngtnnnnagtcnganttcggctcgagggtagcagaanngntataatnactnnnnncganntcganggataangctnncagtntgngngntgtccanttggaaannctgtanaancgtnaagantgcannnctnncannnggnnntagagggggtcgcacngtnggggcancgactcaanggatggnnggatngtangaggagtnannagcangncgcaaagaataangtnctatagatncggggaattnagaantaagggagtcatagggtt

SEQ ID NO: 75331 - DNA, 89 bp, Glycine max
  unsure (1)..(89): unsure at all n locations
  Clone ID: 700904258H1
cgtcgcacgcacgcgtacgtaagctcgggaattcggctcgagnttttattagaaataaaaaatgacgttcggttacttgggttctcaag

SEQ ID NO: 75332 - DNA, 233 bp, Glycine max
  unsure (1)..(233): unsure at all n locations
  Clone ID: 700904512H1
gtcgcangcacgcgtacgtnagctcggaattccgagcttgcgatcctctagagcggccgccgactagtgagctcgtcgaacccgggaattaattccggaccggtacctggcaggcgtaccagctttccctatagtgagtcgtattagagcttggcgtaatcatggtcatagctgtttcctgtgtgaaattgttatccgctcacaattccacacaacatanananntaaaaaaa

SEQ ID NO: 75333 - DNA, 295 bp, Glycine max
  unsure (1)..(295): unsure at all n locations
  Clone ID: 700904603H1
nccaagtacgtaaactcggaattccgagcttnaatcctctagagcggncgcngactantgagctcgtcgaaccgggaattaattncggaccggtacctgcangcgtaccagctttccctatagtgantcgtattagagcttggcgtaatcatggtcatagctgtttcctgtgtnaaattgttatccgctcacaattccacacaacatacnaantaaaaaanannnnnannnaannnnnnnnnnnnnnnnnnnnnnnannnnaannnnnnannnnnnnnnnnaannannnnnnnnt

SEQ ID NO: 75334 - DNA, 349 bp, Glycine max
  unsure (1)..(349): unsure at all n locations
  Clone ID: 700904608H1
cggntaangnancnggacgtangctcgganttcggctcgcatggcctaggcgcnttngtgncgtgggnncntnggtnngccnagtggcgggcntgttgcgtnntgnggttgggatgggntgncgcnanctccnggtggtcnggtggggacncgnncttncgtgtggtgtgnngtggtggttccagntngcngtggntgcgtggcncggttgcggnnncgnagnngcanntnnggcgcgcnntctngntgtagngngnttnccnttgcncancgngggncnntngngnnnnnggtcggaangggngtgcatgncttgcgnngtccgtggaggntgttggntctnccgnnn

SEQ ID NO: 75335 - DNA, 144 bp, Glycine max
  unsure (1)..(144): unsure at all n locations
  Clone ID: 700904644H1
cnnnttaaacgtacncntagncaaactnggaattcaactcgagagaaataaacntntgnnagngngaagtgagnganaaaacntaggnagngnaaannaatggaggnatagtgaaacatggagntgaaaggngngcggaaatnt

SEQ ID NO: 75336 - DNA, 308 bp, Glycine max
  unsure (1)..(308): unsure at all n locations
  Clone ID: 700904745H1
ntncgntcncgngcncgcggncctcncntnttangctcgcagtgtngnancgcncnngagnancnttnacnccaccccacgncccnaggnacnntctnctcnnctgtntagtnnngggtgtnnngttgcttatgtgntgcggagtgtganatgtggtcntggtggngctngnntnnggncannttgtnctcangnnggcncnncctggttggtctnnngttttngnngnnntgtncttannggncatggtgggtgtnnntgtaggtttnnttngggtnnggntntngnccgctccncnnactgnnngn

SEQ ID NO: 75337 - DNA, 212 bp, Glycine max
  unsure (1)..(212): unsure at all n locations
  Clone ID: 700905010H1
gtcgcnngcntagtacgtaagctcggaattccgagcttgggatcctctagagcggccgccgactagtgagctcgtcgaacccgggaattaattccggaccggtacctgcaggcgtaccagctttccctatagtgagtcgtattagagcttggcgtaatcatggtcatagctgtttcctgtgtgaaattgttatccgctcacaattccacaca

SEQ ID NO: 75338 - DNA, 254 bp, Glycine max
  unsure (1)..(254): unsure at all n locations
  Clone ID: 700905487H1
gtcgcangcacgcgtacgtaagctcggaattcggctcgagngctaattcctcaaggatgttttatctagcttttaaaaaaaaaaaaaaagggcggccgccgactantgagctcgncgacccgggaattaattccggaccggtacctgcaggngtaccagctttccctanagngagtcgtattagagcttggcgtaatcatggncanagctgtttcctgngtgaaattgttatcngntcacaattccacacaaca

SEQ ID NO: 75339 - DNA, 72 bp, Glycine max
  Clone ID: 700905847H1
gcatgcacgcgtacgtaagctcggaattcggctcgagctagtttctagatcgcgagctgccgcccttttttt

SEQ ID NO: 75340 - DNA, 157 bp, Glycine max
  unsure (1)..(157): unsure at all n locations
  Clone ID: 700905980H1
ngttgcacgcncgcgtncgtnagctcgganttcggctgcggagnntngntagnnngncngatcggcacggatnntactcggncggactntgnngacncggtgaccgnnggtgangacagtgnngaacgcttacttccacaacaancancancgnnan

SEQ ID NO: 75341 - DNA, 91 bp, Glycine max
  unsure (1)..(91): unsure at all n locations
  Clone ID: 700906169H1
cgtcgcangcacgcgtacgtaagctcggaattcggctcgagngattcaaaactagttgtcaatcatgtcaataatcaaaaaaaaaaaaaaa

SEQ ID NO: 75342 - DNA, 217 bp, Glycine max
  unsure (1)..(217): unsure at all n locations
  Clone ID: 700906256H1
tcgcangcacgcgnacgtnnagctcnnggttcgnngncngncctnntctagagcggccgccgactagtgagctcgtcgacncgggaattaattccggnccggtacctgcaggcgtaccagctttccctatagtgaggtcgtattagagcttggcgtaatcatggtcatagctgtttcctgtgtgaaattgttatccgctcacaattccacacaacat

SEQ ID NO: 75343 - DNA, 64 bp, Glycine max
  unsure (1)..(64): unsure at all n locations
  Clone ID: 700906738H1
gcnngcacgcgtacgtaagctcggaattcggctcgagnncaaaaaaaaaaaaaaaaaaaaaaat

SEQ ID NO: 75344 - DNA, 63 bp, Glycine max
  unsure (1)..(63): unsure at all n locations
  Clone ID: 700906848H1
atgcacgcntacgtnngntcggaattcggctcgagcncccttttttttttttttttttttttt

SEQ ID NO: 75345 - DNA, 159 bp, Glycine max
  Clone ID: 700906856H1
cgcatgcacgcgtacgtaagctcggaattaattccggaccggtacctgcaggcgtaccagctttccctatagtgagtcgtattagagcttgggcgtaatcatggtcatagctgtttcctgtgtgaaattgttatccgctcacaattccacacaacatac

SEQ ID NO: 75346 - DNA, 66 bp, Glycine max
  unsure (1)..(66): unsure at all n locations
  Clone ID: 700906872H1
gtcgcatgcacgcgtacgtaagctcggnnattncngctcgagctcgagccgaataanaaaaaaaaa

SEQ ID NO: 75347 - DNA, 297 bp, Glycine max
  unsure (1)..(297): unsure at all n locations
  Clone ID: 700907445H1
aatcgcacgnacgagtagntcgctntacntgtngctagagaagactnngacannanaattattgaagnagnananttncgnncaagggnatatcntgantcaagcnatgantccaggtcttgnanttntnggttnaatctncaggtcangngtaaccaggaatcggnaatcgaanntgccanggagtgnnttaanntgnnanngnngatgggtcctncagcngccaaggagntgngaanttntcatnacatnatcanagtttgtgcctnataggaccgtcnnanntggtanaaagcn

SEQ ID NO: 75348 - DNA, 216 bp, Glycine max
  unsure (1)..(216): unsure at all n locations
  Clone ID: 700907650H1
gtcgcangcacgcgtacgtaagctcggaattccgagcttggntcctctagagcggccgccgactagtgagctcgtcgaaccgggaattaattccggaccggtacctgcaggcgtaccagctttccctatagtgagtcgtattagagcttggcgtaatcatggtcatagctgtttcctgtgtgaaattgttatccgctcacaattccacacaacata

SEQ ID NO: 75349 - DNA, 207 bp, Glycine max
  unsure (1)..(207): unsure at all n locations
  Clone ID: 700907812H1
atgcacgcgtacgtnagctcggaattccgagcttggatcctctagagcggccgccgactagtgagctcgtcgacccgggaattaattccggaccggtacctgcaggcgtaccagctttccctatagtgagtcgtattagagcttggcgtaatcatggtcatagctgtttcctgtgtgaaattgttatccgctcacaattccacacaa

SEQ ID NO: 75350 - DNA, 368 bp, Glycine max
  unsure (1)..(368): unsure at all n locations
  Clone ID: 700908052H1
aagntntgtgcganangacnanngnganngttngagntncgganacattgnagaanncggganggtgagcaggtnagtgagagcannngtaagganatgngacanngcgtgnagtnatcgtaagngtaggagngtnangngngagataaacnnnnanagtnattacnagntgtgaggangnggaggaagangtgagnatatgttgntggnangganntanccagggnngctngttgcnnatgntcntgcagganganagnntaagnnntgtgncgacnnttnanttaagcgtgangngnggnnctggatctgnngtgcggtangtcngcgnaacanggacngtgngtnagagtgggcngnnacacanc

SEQ ID NO: 75351 - DNA, 171 bp, Glycine max
  unsure (1)..(171): unsure at all n locations
  Clone ID: 700908362H1
agtcgcangcacgcgtacgtaagctcggaattccgagcttggatcctctagagcggccgccgactagtgagctcgtcgacncgggaattaattccggaccggtacctgcaggcgtaccagctttccctatagtgagtcgtattagagcttggcgtaatcatggtcatagct

SEQ ID NO: 75352 - DNA, 274 bp, Glycine max
  unsure (1)..(274): unsure at all n locations
  Clone ID: 700908753H1
gtcgcatgcacgcgtacgtaagctcgggccgactagtgagntcgtcgacccgggaattaattccggaccggtacctgcaggcgtaccagctttccctatagtgagtcgtattagagcttggcgtaatcatggtcatagctgtttcctgtgtgaaattgttatccgctcacaattccacacaacatacgatnncanaannnnnnnnnnnnnncagnganancacangnngnnngagnncntncannnnnnncnnnnanannnnnnnaannnnnnn

SEQ ID NO: 75353 - DNA, 349 bp, Glycine max
  unsure (1)..(349): unsure at all n locations
  Clone ID: 700908770H1
gcnngtctncacagcacgcgagacgcgnggctgcgggactccngncacaagcctcaangncnactagnntcannctcatttcccatccccggttctatacnacaaggtgtctggccngnnggnnantagtgcaatgagtagnatnactngttnttgcgntacaaccgagcntgngtgttcggcgttgcttggcatgagnagccctggcctcattantgcgnngaccaaganancagctttngccatgcatggttnacgngtnntagggantttggcgtnatggananttgcncanaagcnganngtgggtcgcagccattccgnttgttctcgncnngatctcgggagt

SEQ ID NO: 75354 - DNA, 223 bp, Glycine max
  unsure (1)..(223): unsure at all n locations
  Clone ID: 700908958H1
cnagatttntcgtgtatggagcttaggggaancaagttgccagtaatncaccagntncagttaacaatantgagcaaaanagagganttggatggtcatcaaccantactgctggtgcnttggctggtccaagactngaaganaggcgcctgannccagncaatgctcttnnactananaatgtcaatganaggtcctatgtacacgcgtagccccaattctn

SEQ ID NO: 75355 - DNA, 156 bp, Glycine max
  unsure (1)..(156): unsure at all n locations
  Clone ID: 700909339H1
tcgcatgcacgcntacgtaagctcggaattccggaccggtacctgcaggcgtaccagctttccctatagtgagtcgtattagagcttggcgtaatcatggtcatagctgtttcctgtgtgaaattgttatccgctcacaattccacacaacatacg

SEQ ID NO: 75356 - DNA, 75 bp, Glycine max
  unsure (1)..(75): unsure at all n locations
  Clone ID: 700909352H1
gtcgcangcacgcgtacgtaagctcgggaattcgggctcgagcggctcgaganaaaaaaaaaaaaaaaaaaannt

SEQ ID NO: 75357 - DNA, 70 bp, Glycine max
  unsure (1)..(70): unsure at all n locations
  Clone ID: 700909372H1
tcgcangcacgcgtacgtaagctcggaattcggctcgagttcaaataaaaaaaaaaaaaaaaaaaaaaan

SEQ ID NO: 75358 - DNA, 429 bp, Glycine max
  unsure (1)..(429): unsure at all n locations
  Clone ID: 700909524H1
nttnncgaccnttnnntnnntctganttcnncgnnagancntgtgatnangtgngnagnggaaactnngcncaggtgngnnnagtagngtgcgcntnncangnggntgtgnagctatagatttagntcgtgttnnntgntgcggntagttncatngacnangttggttantcncagtgganngnnacntgcnnngtncccnngtgngcnnagctaagnngtgttcagtnagcatacctncannagtatncagagttanctcgangttanngatnttagagtgtganngnngtnaccatgtcgtngnnntgcncgctantctgagatcgtagancgtnntagtcagatntatgngagtagagntcggnnncgaanngncangagatntntgagnnngcttgtctgtccancnngtgtcngatgtgngttt

SEQ ID NO: 75359 - DNA, 212 bp, Glycine max
  unsure (1)..(212): unsure at all n locations
  Clone ID: 700909711H1
gtcgcangcacgcgtacgtaagctcggaattccgagcttgggatcctctagagcggccgccgactagtgagctcgtcgnncccgggaattaattccggaccggtacctgcaggcgtaccagctttccctatagtgagtcgtattagagcttggcgtaatcatggtcatagctgtttcctgtgtgaaattgttatccgctcacaattccacac

SEQ ID NO: 75360 - DNA, 152 bp, Glycine max
  unsure (1)..(152): unsure at all n locations
  Clone ID: 700909862H1
gtcgcangcacgcgtacgtaagctcgggccgactagtgagctcgtcgacccgggaattaattccggaccggtacctgcaggcgtaccagctttccctatagtgagtcgtattagagcttggcgtaatcatggtcatagctgtttcctgtgtg

SEQ ID NO: 75361 - DNA, 258 bp, Glycine max
  unsure (1)..(258): unsure at all n locations
  Clone ID: 700910004H1
bgaatgangnccgncgactcngacgngnaaccatcancgcngcngagannagcnagntnaaaanaggcaagcnnacnncnctcangcntntgcangaantccntncaagcgtcacancngcggnaaaganaccncgctnaccangngantcancangtctagtccgcgcncacatcatgcnctnaattncggnnncacanangcncngncctggccatcnnngnnnaccnnganagcngnnagcngccnntcgctncg

SEQ ID NO: 75362 - DNA, 239 bp, Glycine max
  Clone ID: 700863024H1
ttacccttaatagagagattaaacagactcactatacagctccaaaagatttgtattttgtttaataaacttagtaaaggtaactatcaaatagttgcaatatataatatataatgttgacagatatataatataataaaaactgaatgccgaatggctgcattttatgctggttttcccgaaactgtgcctgttaggaccgttaataggcaatgttcatctgggctccaggctgtcgc

SEQ ID NO: 75363 - DNA, 241 bp, Glycine max
  Clone ID: 700863028H1
aaaagacaacccagagagcgcgtcttaataaacgctcttctctgaaaacccccatttcttttcttctttcttcttctctttcgcttcttcgatcttcgatcttcgtcgctgaaaatgagagagtgcatttcaatccacatcgccaggccgggattcaggttggaaacgcctgctgggagctttactgcctcgaacacggcattcagcctgatgggcagatgccaagtgacaagaccgttgg

SEQ ID NO: 75364 - DNA, 138 bp, Glycine max
  unsure (1)..(138): unsure at all n locations
  Clone ID: 700863037H1
ctcggaattaattccggaccggtacctgcaggcgtaccagctttccctatagtgagtcgtattagagcttggcgtgaatcatggtacatagctgtttacctgtgtgaaattgttatcccgctncacaatttccaccan

SEQ ID NO: 75365 - DNA, 40 bp, Glycine max
  Clone ID: 700863092H1
agctcggaattcggctcgagcacaattctttttttttttt

SEQ ID NO: 75366 - DNA, 214 bp, Glycine max
  unsure (1)..(214): unsure at all n locations
  Clone ID: 700952936H1
gtcgcatgcacgcgtacgtnagctcggaattccgagcttgggatcctctagagcggccgccgactagtgagctcgtcgacccggganttaattccggaccggtacctgccaggcgtaccagctttccctatagtgagtcgtattagagcttggngtaatcntggtcatagctgtttcctgtgtgaaattgttatccgctcannattccacacaa

SEQ ID NO: 75367 - DNA, 186 bp, Glycine max
  unsure (1)..(186): unsure at all n locations
  Clone ID: 700953062H1
ncnacanngtaacgntananccnncaggganantccgagactncgaagactcgtatccgngccnaactctggcctggtncgaaaagggnnttgncgtcacgncntctcngggcagaccactngcnttcaagacngcccgtcanaatatgncnncaatanngacaccatnatnnnccncacnctcat

SEQ ID NO: 75368 - DNA, 153 bp, Glycine max
  unsure (1)..(153): unsure at all n locations
  Clone ID: 700953310H1
acgtcgcangcncgcgtacgtaagctcggaattccggaaccggttacctgcaggcgtaccagctttccctatagtgagtcgtattagagcttggcgtaatcatggtcatagctgtttcctgtgtgaaattgttatccgctcacaattccacac

SEQ ID NO: 75369 - DNA, 250 bp, Glycine max
  Clone ID: 700953696H1
gatacttaatcctacgttagttgtgcttcaacctattaccgcattcaattttccagaaaaataaaaaaaaaagaaagatagaaatggcgcatattcctcagacccccaccaatgacgcggcggcttctggtgcaaatccgtcgatgacgaccatctcgttgtacgtcggggatcttgaccacgacgtcaacgatccgcagctctatgatctcttcaaccaggttgcccaagtcgtttccgttcgaatttg

SEQ ID NO: 75370 - DNA, 134 bp, Glycine max
  unsure (1)..(134): unsure at all n locations
  Clone ID: 700954431H1
ncgcangcacgcgtacgtaagctcggnattcggctcgagnttcacattttgnntgagattttntnatgtaacccantantcattggntggaaaannaaaaaaaaaaaaaaaaaaaaanaaaaanaaagcaaanc

SEQ ID NO: 75371 - DNA, 241 bp, Glycine max
  unsure (1)..(241): unsure at all n locations
  Clone ID: 700954518H1
aangcacgcgtacgtaagctcggaattccgagcttgggntcctctagagcggccgccgactagtgagctcgtcgacccgggaattaattccggaccggtacctgcaggcgtaccagcttccctatagtgagtcgtattagagcttggcgtaatcatggtcatagctgtttcctgtgtgaaattgttatccgctcacaattccacacaacatacgncnnccananagagangnnannngnac

SEQ ID NO: 75372 - DNA, 224 bp, Glycine max
  unsure (1)..(224): unsure at all n locations
  Clone ID: 700954818H1
acgtcgcatgcacgcgtacgtaagctcggaattccgagcttggatcctctagagcggccgccgactagtgagctcgtcgacncgggaattaattccggaccggtacctgcaggcgtaccagctttccctatagtgagtcgtattagagcttggcgtaatcatggtcatagctgtttcctgtgtgaaattgttatccgctcacaattccacacaacatacgcgnn

SEQ ID NO: 75373 - DNA, 210 bp, Glycine max
  unsure (1)..(210): unsure at all n locations
  Clone ID: 700954829H1
gtngcangcacgcgtacgtaagctcggaattccgagcttggatcctctagagcggccgccgactagtgagctcgtcgacccgggaattaattccggaccggtacctgcaggcgtaccagctttccctatagtgagtcgtattagagcttggcgtaatcatggtcatagctgtttcctgtgtgaaattgttatccgctcacaattccacac

SEQ ID NO: 75374 - DNA, 370 bp, Glycine max
  unsure (1)..(370): unsure at all n locations
  Clone ID: 700954870H1
ngncncngcacgcgtacgtaagctcggaattcgntcangttncaaccctagtcactactcactcacaagcatgcacgtnnttnnncnatgcnnncattgatggaccttccnagcancntaccatgacnanatcnngttgttntggcctcngtcctgtgaccnccntcanagaagnnagaantccctntgtattacaaggctaatgggtngtttgtggccgcntgtaggtcnaaaggactngactngaagtngaattcgnanccccccccaaattttctgacaaacnntgacttcatantggggcatacccttgttcacgggnttnttntgagacccttncctttttagcgtnggnnaattttncnccagg

SEQ ID NO: 75375 - DNA, 161 bp, Glycine max
  unsure (1)..(161): unsure at all n locations
  Clone ID: 700954935H1
ngncangncgcgtacgtgagcncggngttnnttccggnccggtacctgcnngcgtaccagcnttncctatagtgagtcgcattagagcttggcgtaatcatggncatagcngtttcctgngtganatngtnatccgctcacnattncacanaacatacgan

SEQ ID NO: 75376 - DNA, 173 bp, Glycine max
  unsure (1)..(173): unsure at all n locations
  Clone ID: 700954992H1
acgtcgcangcacgcgtacgtaagctcggaattccggaccggtacctgcaggcgtaccagctttccctatagtgagtcgtattagagcttggcgtaatcatggtcatagctgtttcctgtgtgaaattgttatccgctcacaattccacacaacatacgaggtngnananana

SEQ ID NO: 75377 - DNA, 311 bp, Glycine max
  unsure (1)..(311): unsure at all n locations
  Clone ID: 700955349H1
gtcgcatgcacgcgtacgtaagctcggaattccgagcttgggatcctctagagcggccgccgactagtgagctcgtcgacncgggaattaattccggaccggtacctgcaggcgtaccagctttccctatagtgagtcgtattagagcttggcgtaatcatggtcatagctgtttcctgtgtgaaattgttatccgctcacaattccacacaacatacgagtcncgaaagggggatgtgctgcnaggngattaagttgggtaacgccaggttttcccagtcacgacttgtaaaacgacggccagtgattnc

SEQ ID NO: 75378 - DNA, 159 bp, Glycine max
  unsure (1)..(159): unsure at all n locations
  Clone ID: 700955559H1
gtcgcangcacgcgtacgtaagctcggaattccgagcttggatcctctagagcggccgccgactagtgagctcgtcgacncgggaattaattccggaccggtacctgcaggcgtaccagctttccctatagtgagtcgtattagagcttggcgtaatca

SEQ ID NO: 75379 - DNA, 174 bp, Glycine max
  unsure (1)..(174): unsure at all n locations
  Clone ID: 700955874H1
acgtcgcangcacgcgtacgtaagctcggctaacagcgcgatttgctggtgacccaatgcgaccagatgctccacgcccagtacgcgtaccgtcttcatgggagaaaataatactgttgatgggtgtctggtcagagacatcaagaaataacgccggaacattagtgcaggcag

SEQ ID NO: 75380 - DNA, 81 bp, Glycine max
  unsure (1)..(81): unsure at all n locations
  Clone ID: 700956158H1
gtcgcangcacgcgtacgtaagctcggaattcggctcgagactagttctagatcgcgagcggcggcccttttttttttttn

SEQ ID NO: 75381 - DNA, 403 bp, Glycine max
  unsure (1)..(403): unsure at all n locations
  Clone ID: 700956290H1
tcctgaccgagtngtcgaatcggctcgagnnttntnttccnnanctcatggnaggntntntccntggncgtcttnnttntnggnnnatnggatncnggtggcaancnttntagnngangatgcncnattacnatgcancnatntttntcnntgcantcnatcatcttttcggctcggcacattggttcatcnnaccgnacnngacataccgtaggactatantcnggcaantctaganctcgctctttntaggctatctcgcgcacaaccntggaaanttcacactattttcggnccacgagatgtaaaccgctttntaccaaacnctaatcgnttttcngtccncnatggtcaaatccacggtantnttngctatgggaacttagcnaagcttannccctan

SEQ ID NO: 75382 - DNA, 266 bp, Glycine max
  unsure (1)..(266): unsure at all n locations
  Clone ID: 700956318H1
nacgngtacgtaagctcgggccgactagtgaantcgtcgacccgggaattaattccggaccggtacctgcaggcgtaccagctttccctatagtgagtcgtattagagcttggcgtaatcatggtcatagctgtntcctgtgtgaaattgttatccgctcacaattccacacaacatacgnttgggnaaanacngnnnannnnnnnnnnnnnnnnnnnnnnnnnnnnnnnnnnnnnnnnnnnnnnnntannntnaagnnnnnnnnn

SEQ ID NO: 75383 - DNA, 292 bp, Glycine max
  unsure (1)..(292): unsure at all n locations
  Clone ID: 700956456H1
gtngcatgcacgcgtacgtaagctcggaattcggctcgaggttctagatcgcgagcggccgccnnttagtganctcgtcganncgggaattaattncggaccggtatctnnanncgtaananntttccctatagtaantcntattaaaanntggcgtaatcatggncatanatgtttccnntnnccaattgntatccggtcnaaattgccacanaaaatacgantnaacanaaaaaangggaaaaaaggaaacnagaatgggnggcgnaaaaattntnggtgcntcnangng

SEQ ID NO: 75384 - DNA, 120 bp, Glycine max
  unsure (1)..(120): unsure at all n locations
  Clone ID: 700956507H1
nncgcgtacgtnagcncggaattcggctcgagcnggtatnnccatgatnnnnacatatgatcannangcttgggcctgatgganntgcgggancaccttccngnaatcagnncaatnngn

SEQ ID NO: 75385 - DNA, 121 bp, Glycine max
  unsure (1)..(121): unsure at all n locations
  Clone ID: 700956537H1
cgcangcacgcgtacgtaagctcggnattcgggctcgagcancggacacccgnatcaaaagtcacncnattcncatcagagcncncnnnncnagcattncccttagngtaggtnntggaag

SEQ ID NO: 75386 - DNA, 306 bp, Glycine max
  unsure (1)..(306): unsure at all n locations
  Clone ID: 700956555H1
natacgcnacncgaacgnangcacncancncgagnngatcganatannatanaaccngannagatcannnaagnagaancagncgnaaannannantgtccaaagaacanacgannaananncanaggcangcngannacnnancnggncatgaactnnactncnacnngaacggacntnganggccaagncnaaggnccnanccanctntnnctncgcatcccanacangaancaacnaacacnnnaacanccaancancacagcgacatgcancatanananctncaacncngangnntncaat

SEQ ID NO: 75387 - DNA, 125 bp, Glycine max
  unsure (1)..(125): unsure at all n locations
  Clone ID: 700956576H1
ntgcgcacntncgnncgtgaattcggctcgagcnncgtntgcaacntgccagggtaagaactcactngagnagantcactggcnaccaaacaagattncggtnangnngcagcatcangcnttgn

SEQ ID NO: 75388 - DNA, 291 bp, Glycine max
  unsure (1)..(291): unsure at all n locations
  Clone ID: 700957036H1
ttcncgcanacnnagcnngctcngantncngctcnacgccanncnccacntnaacnncacaagctnnntncccanccaactangnnncaacncnnacnncnnnaaannatngnctnacnccannncnnnncgnctgcaagtgcagccccncnagnnncccccccncggnnnaagggnnccgnnagcnggccaatnnngnntgngntgggggngnnccgnngnnggngnctgntgtgggnggttctggtngggngngggngggnanccgnagcangtcnctgnngagntnnn

SEQ ID NO: 75389 - DNA, 194 bp, Glycine max
  unsure (1)..(194): unsure at all n locations
  Clone ID: 700957254H1
acgtcgcatgcacgcgtacgtaagcttggatcctctagagcggccgccgactagtgagctcgtcgacccgggaantccggaccggtacctgcaggcgtaccagctttccctatagtgagtcgtattagagcttggcgtaatcatggtcatagctgtttcctgtgtgaattgttatccgctcacaattccacaca

SEQ ID NO: 75390 - DNA, 67 bp, Glycine max
  Clone ID: 700957427H1
gcacgcgtacgtaagctcggaattcggctcgaggttctagatcgcgagcgccgcccttttttttttt

SEQ ID NO: 75391 - DNA, 65 bp, Glycine max
  unsure (1)..(65): unsure at all n locations
  Clone ID: 700957457H1
gtcgcntgcacgcgtacgtaagctcggaattcggctcgagnnaaaaaaaaaaaaaaaaaaaaaan

SEQ ID NO: 75392 - DNA, 178 bp, Glycine max
  unsure (1)..(178): unsure at all n locations
  Clone ID: 700957794H1
acgtcgcangcacgcgtacgtaagctcgggccgactagtgagctcgtcgacccgggaattaattccggaccggtacctgcaggcgtaccagctttccctatagtgagtcgtattagagcttggcgtaatcatggtcatagctgtttcctgtgtgaaattgttatccgctcacaattcc

SEQ ID NO: 75393 - DNA, 134 bp, Glycine max
  unsure (1)..(134): unsure at all n locations
  Clone ID: 700957855H1
ncntctgcgcgcacgcgtacgtaagctcggaatncggcncgagaaaggactaacccttcctgggatcngctttgcnagncnctttngcnncgcncacngncggnaangnggaacncgagaggnngagagaggcg

SEQ ID NO: 75394 - DNA, 124 bp, Glycine max
  unsure (1)..(124): unsure at all n locations
  Clone ID: 700957886H1
ngtctgcacgcacgcgtacgtaagctcgggccgnntagngagntcgtcgacccgngaattaantccggaccggtacctgcaggncgtaccagctttgccctaangngtgagtncgnattagagg

SEQ ID NO: 75395 - DNA, 246 bp, Glycine max
  Clone ID: 700957916H1
agtggaaactgagattctgagaggaatcagcccttttccgtatactttacttgaacaagccgtttgagttcggcgtgtttaataaataaaatcacaagacaacgttgtcttgcgcctgaaagtgttgtggagacaaaaccacaatacagttttagaatggagaagacagcagttaaagttcgatgccagaggattgggtgcgacgccatgttctccgaggccgacaaccccgacggttcctgtcga

SEQ ID NO: 75396 - DNA, 160 bp, Glycine max
  unsure (1)..(160): unsure at all n locations
  Clone ID: 700957955H1
gtcgcangcacgcgtacgtaagctcggaattaattccggaccggtacctgcaggcgtaccagctttccctatagtgagtcgtattagagcttggcgtaatcatggtcatagctgtttcctgtgtgaaattgttatccgctcacaattccacacaacatan

SEQ ID NO: 75397 - DNA, 188 bp, Glycine max
  unsure (1)..(188): unsure at all n locations
  Clone ID: 700958174H1
gtcgcnngcacgcgtacgtaagctcgggccgactagtgagntcgtcgacccgggaattaattccggaccggtacctgcaggcgtaccagctttccncatagtgagtcgtattagagcttggcgtaatcatggtcatagctgtttcctgtgtgaaattgttatccgctcacaattccacacaacatacg

SEQ ID NO: 75398 - DNA, 216 bp, Glycine max
  unsure (1)..(216): unsure at all n locations
  Clone ID: 700958570H1
gtcgcangcacgcgtacgtnagctcggaattccgagcttggatcctctagagcggccgccgactagtgagctcgtcgacccgggaattaattccggaccggtacctgcaggcgtaccagctttccctatagtgagtcgtattagagctggcgtaatcatggtcatagctgtttcctgtgtgaaattgttatccgctcacaattccacacaacatag

SEQ ID NO: 75399 - DNA, 211 bp, Glycine max
  unsure (1)..(211): unsure at all n locations
  Clone ID: 700958760H1
angtcgcangcacgcgtacgtnagctcggaattccgagcttgggatcctctagagcggccgccgactagtgagctcgtcgacccgggaattaattccggaccggtacctgcaggcgtaccagctttccctatagtgagtcgtattagagcttggcgtaatcatggtcatagctgttcctgtgtgaaattgttatccgctcacaattccaca

SEQ ID NO: 75400 - DNA, 274 bp, Glycine max
  unsure (1)..(274): unsure at all n locations
  Clone ID: 700958926H1
ctgcacgcgtacgtaagctcgggccgactagtganctcgtcgacccgggaattaattccggaccggtacctgcaggcgtaccagctttccctatagtgagtcgtattagagcttggcgtaatcatggtcatagctgtttcctgtgtgaaattgttatccgctcacaattccacacaacatannangnnaaaaaagangnnngnntnnncncngncnnnnnnnnnnggnnnnnnnnnnncnnnnnnncnnttnnnnnnnnnnnnnnnnnnnnnnn

SEQ ID NO: 75401 - DNA, 145 bp, Glycine max
  unsure (1)..(145): unsure at all n locations
  Clone ID: 700959261H1
tntttcnccctntacgtncgcaaanctcnganatgnnngctngcaanngtgaaganannnncaaanatgtntngntcngagnganntatngnancgtctntntgtacannncgcnangnnncagtngncnncttcagagnacacc

SEQ ID NO: 75402 - DNA, 160 bp, Glycine max
  unsure (1)..(160): unsure at all n locations
  Clone ID: 700959933H1
aaaaangaaaagtcgcangcacgcgtacgtaagctcggaattcggctcgagagttaaccaacaagcttacttttatggnntnnnatcnatantgnncngcnanggatnnattcctgtgtngcntcaanggaatcgtacagnactggtattcaaagacaan

SEQ ID NO: 75403 - DNA, 60 bp, Glycine max
  unsure (1)..(60): unsure at all n locations
  Clone ID: 700960060H1
tcgcatgcacgcgtacgtaagctcggaattcggctcgangncngcccttttttttttttn

SEQ ID NO: 75404 - DNA, 54 bp, Glycine max
  unsure (1)..(54): unsure at all n locations
  Clone ID: 700960138H1
agcgcangcacgcgtacgtaagctcggaattcggctcgagnttttttttttttt

SEQ ID NO: 75405 - DNA, 202 bp, Glycine max
  unsure (1)..(202): unsure at all n locations
  Clone ID: 700960405H1
cangcncgcgtacgtnagctcggaattcggctcgagnctagttctagatcgcgagcggccgccgnctagtgagctcgtcgacccgggaattaattccggaccggtacctgcaggcgtaccagctttccctatagtgagtcgtattagagcttggcgtaatcatggtcatagctgtttcctgtgtgaaattgttatcngctca

SEQ ID NO: 75406 - DNA, 216 bp, Glycine max
  unsure (1)..(216): unsure at all n locations
  Clone ID: 700960521H1
cgcngcatgcacgcgtacgnaagctcggaattccganttngatcctctagagcggccgnngactagtgagtcgtngacgcgggaattaattccgnaccggnacctgcaggcgtaccagctttgcctatagtnagtcgtantanagcttggagtaatcanggtcanagctgtttcctgtgtgaaantgntancgcgctcacaattncacanaacata

SEQ ID NO: 75407 - DNA, 316 bp, Glycine max
  unsure (1)..(316): unsure at all n locations
  Clone ID: 700960527H1
actacgacccanccgcacgcnaccctcgcaattccnctcncgnccccaancanacncaccacnaantcccctccccacccagccccccaccnncccacccccacaccccantcnccnnccaanccacncctcccacccccccnccccaccccccnccnaccccccccgccccgacccacnnccccctccnnccnccnnccccaccccnccncccacacccncccccacgcccaccncncgcncaccccccnccnaccnccntcncccacccntnncccgccnnacacccnccccncccngccccccccccnncccc

SEQ ID NO: 75408 - DNA, 87 bp, Glycine max
  unsure (1)..(87): unsure at all n locations
  Clone ID: 700960625H1
gcnncangcacgcgtacgtaagctcggaattcggctcgaggnncnanancncnancngncgngctntncttttttttttttggnnnn

SEQ ID NO: 75409 - DNA, 64 bp, Glycine max
  unsure (1)..(64): unsure at all n locations
  Clone ID: 700960659H1
acgtcgcangcacgcgtacgtaagctcggaattcggctcgagccgagaaacaaaaaaaaaaaaa

SEQ ID NO: 75410 - DNA, 179 bp, Glycine max
  unsure (1)..(179): unsure at all n locations
  Clone ID: 700960768H1
gtcgcangcacgcgtacgtaagctcgggccgactagtgacatcgtcgacccgggaattaattccggaccggtacctgcaggcgtaccagcttccacnanagtgagtcgtattagagcttggcgtaatcatggtcatagctgtttcctgtgtgaaattgttatccgctcacaattccaca

SEQ ID NO: 75411 - DNA, 286 bp, Glycine max
  unsure (1)..(286): unsure at all n locations
  Clone ID: 700961062H1
gtcgtangcncgcgtacgtgagctcggaattcggctcgagctgaatttgagactttccacacaacanangagtntncgngngncgnangcgngngnggnnggnnncctcnagccnccgncngccncncggngngccgncnncnngnngnncctncncacgtcgnnnncgngnnngnntgnnncntggcgngncncggngngccnggnggcnncgggnncggtnggtgggnnggnnnngnncgngtgagcagntannggnngnngnccnggggnnnnnngnggncng

SEQ ID NO: 75412 - DNA, 130 bp, Glycine max
  unsure (1)..(130): unsure at all n locations
  Clone ID: 700961351H1
cncntttnacncacgcgtacgtaagcncggaattcggctcganaganactncccgttnccaactncacgntgcnataccntgntgaagntcgagtgggcctnggtncgtttcactaagtgancganagan

SEQ ID NO: 75413 - DNA, 60 bp, Glycine max
  unsure (1)..(60): unsure at all n locations
  Clone ID: 700961361H1
gtcgcangcacgcgtacgtaagctcggaattcggctcgagnaaaaaaaaaaaaaaaaaan

SEQ ID NO: 75414 - DNA, 370 bp, Glycine max
  unsure (1)..(370): unsure at all n locations
  Clone ID: 700961968H1
tgtcggagagtgatcgtnacatcagcagtgtcctctcntgatacttggtagangttatgnnccatcttctggcagaactaatgtcaccacctgcaattgcnggtggtgacatttagttctgccagaaggatggctcattanacttaaatggtaganccaacctngncacatttngccaaancanttctctanctcggggttttncccctnctttttcgggttnggccnggtttttgnccattgggggctttaaaaggggaaaanccatttgaaattanaanttaagggggaanggaacccggatttggnccntcccccaanntttnnncnnggccccctttnccnantnnccccnaaangggnnnctttc

SEQ ID NO: 75415 - DNA, 165 bp, Glycine max
  unsure (1)..(165): unsure at all n locations
  Clone ID: 700962377H1
gncgtcgcangcacgcgtacgtaagctcggaattccggnaccggttacctgncaggcgtaccagctttccctatagtgagtncgtcattagagcttggcgtaatacatggtacatagctgtttncctgtgtgaaattgttataccgnctcacaattccaccanca

SEQ ID NO: 75416 - DNA, 201 bp, Glycine max
  unsure (1)..(201): unsure at all n locations
  Clone ID: 700962464H1
tcgcangcacgcgtacgtaagctcggaattcggctcgagtctagatcgcgagcggccgccgactagtgagctcgtcgacccgggaattaattccggaccggtacctgcaggcgtaccagctttccctatagtgagtcgtattagagcttggcgtaatcatggtcatagctgtttctgtgtgaaattgttatccgctcacaa

SEQ ID NO: 75417 - DNA, 86 bp, Glycine max
  unsure (1)..(86): unsure at all n locations
  Clone ID: 700962735H1
acgtcgnatgcacgcgtacgtaagctcggaattcggctcgagctagttctagatcgcgagcggccgcccttttntttttttnttna

SEQ ID NO: 75418 - DNA, 65 bp, Glycine max
  unsure (1)..(65): unsure at all n locations
  Clone ID: 700962758H1
gtcgcangcacgcgtacgtaagctcggaattcggctcgagnaaaaaaaaaaaaaaaaaaaaaaaa

SEQ ID NO: 75419 - DNA, 57 bp, Glycine max
  unsure (1)..(57): unsure at all n locations
  Clone ID: 700962816H1
gcngcacgcgtacgtaagctcggaattcggctcgagnnaaaaaaaaaaaaaaaaaan

SEQ ID NO: 75420 - DNA, 301 bp, Glycine max
  unsure (1)..(301): unsure at all n locations
  Clone ID: 700962846H1
nntacganngtacgcgtncgtnagntcggnattcggctcgaanggatagnngattgaggntnaatcggtgnnntgntgtgngnnaagntnaggaanatangngctagatngnagnangcgattttnttatatganattnnaaagagtngantggatnatctcaatcccatgaattagcnattgagtttnagctgaatcggacatcgttgacgatntcnctcantcacacactactgnntcggncagnttacaagtnaacncgngctgctcagnnnaccctanntattaggggntngntgtg

SEQ ID NO: 75421 - DNA, 218 bp, Glycine max
  unsure (1)..(218): unsure at all n locations
  Clone ID: 700963052H1
gtcgcatgcacgcgtacgtnagctcggaattccgagcttgggatcctctagagcggccgccgactagtgagctcgtcgacancgggaattaattccggaccggtacctgcaggcgtaccagctttccctatagtgagtcgtattagagcttggcgtaatcatggtcatagctgtttcctgtgtgaaattgttatccgctcacaattccacacaacata

SEQ ID NO: 75422 - DNA, 298 bp, Glycine max
  unsure (1)..(298): unsure at all n locations
  Clone ID: 700963237H1
gtcgcangcacgcgtacgtaagctcggaattcggctcgagnnnctnnanannttgaganatcnnncnnnnntnnnnncngtngncanncganaccntnagctctcggnnncttgntantttcggnncgcnnncgatactntnaccgtnattnnnnnnnntnnncngggaanntggtnnncgnggangnangnngnggcgctcaagntcctntgtgacncggcngntcananggnacggtaccgtnatnncgtncntgtgtntccccnaantngannaangggtctagnattgcgcatg

SEQ ID NO: 75423 - DNA, 455 bp, Glycine max
  unsure (1)..(455): unsure at all n locations
  Clone ID: 700963294H1
tccangacggtactaagtcggaatcggctcgaggnggannctnncncaccancnctgtacnctctngntnnccnttcncnccactnnnacggncnntnagnnnntnagttcnanagntacannacagcgtgtgtncggntanangacnccgtcnntnacnncgagnanantgaganaatgnctgaaaaaacggttataacccacagatgacncggggttgaaangtgattcgatggccaatacngccngttgnattccccanttcccgantggaggccaagacccctatatagattntctaccggctgtgggattggaggacgtcttacccagtaaacttttgtaccccgaccaaaactttggancccatggcaattttttcgnggnttagctnaaacttnttgagaatnggggtttggngccattttaccntcttggcggatcgngacnaaaag

SEQ ID NO: 75424 - DNA, 78 bp, Glycine max
  unsure (1)..(78): unsure at all n locations
  Clone ID: 700963429H1
tngcangcacgcgtacgtaagctcgggaattcggctcgagcnccatttgtgctatatttatggtatgtttttatttgn

SEQ ID NO: 75425 - DNA, 162 bp, Glycine max
  unsure (1)..(162): unsure at all n locations
  Clone ID: 700963554H1
aacntcgcangcacgcgtacgtaanctcggaantcggctcgagatngnttnaaaatnaatgnnnggactgtgtncatggnacttgcanaanancanatgtgcagttatngncaccacannnanactttnactataatgatgccnatttnacgtgctgnggtt

SEQ ID NO: 75426 - DNA, 310 bp, Glycine max
  unsure (1)..(310): unsure at all n locations
  Clone ID: 700963645H1
acgtcgcangcacgcgtacgtaagctcggaattccggaccggnacctgcaggcgtaccagctttccctatagtgagtcgtattagagcttggcgtaatcatggtcatagctgtttcctgtgtgaaatngtatccgctcacaattccacacaacatacgncccgcncnnnnngangnnnncncnnnnnnnnnannannngnnnnnngnnnnnnnnnnnnnnnnnngnnnnnnnnnnnnnnnnnnnnnnnnnnnnnnnnnnncnnnnnnnancnncttnnnncnnnnnnnnnnnacccccnnnnnnnnnnnn

SEQ ID NO: 75427 - DNA, 162 bp, Glycine max
  unsure (1)..(162): unsure at all n locations
  Clone ID: 700963845H1
gtcgcangcacgcgtacgtaagctcggaattcggctcgaggactagttctagatcgcgagcggccgccgnctagtgagctacgtcgacccgggaattaattccggaccggtacctgcaggcgtaccagctttccctatagtgagtcgtattagagcttggcg

SEQ ID NO: 75428 - DNA, 75 bp, Glycine max
  unsure (1)..(75): unsure at all n locations
  Clone ID: 700964251H1
agtcgcangcacgcgtacgtaaagctcggaattcggctcgagcttctctgcttggaggcttttnnttttttttnn

SEQ ID NO: 75429 - DNA, 447 bp, Glycine max
  unsure (1)..(447): unsure at all n locations
  Clone ID: 700964519H1
ctgaggagagtcgatcgtcaaaaatcaacctggcccctcaacttctctattgttctctccgtctccctagccttctttttggtggctacttaaccaagggcacaactccganccgataacncgttttccttctacaacctttgcanancaaagtttgcaaagcncccaagnttcccaaaacnccaaaaancnatnttaattgggcttccncaaaaanacaagnaattggccttaaggttaattttgtncccattgccccttcccttggggggggggttnggtnttaaanccaaaaacnttgcccaacccccaaaaaaaaggtttttggggggcccaagggcccaaaaaaccgggggnccnggtttgggnccnccccaaaaccccctttnncgggggggggaaaattncccttgccctttcccgggggnttttncccggttttggnnc

SEQ ID NO: 75430 - DNA, 216 bp, Glycine max
  unsure (1)..(216): unsure at all n locations
  Clone ID: 700964805H1
gtcgcngcnancgnacgtaagctcggaattccgagcttgncatcctctagagcggccgcngactagtgagctcgtcgaancgggaantaattccggaccggtacctgccaggcgtaccagctttccctanagtgagtcgtatnanagcttggcgtaatcatggtcatagctgtttcctgtgtgaaattgtnatcngctcacnantccacacaacat

SEQ ID NO: 75431 - DNA, 235 bp, Glycine max
  Clone ID: 700962086H1
ctctttctctagtcctgttatttctcagcgcgtaaagcatggctttgttggtggagaaaaccacgagtggtcgcgagtacaaggtcaaggacctttcccaggccgacttcggccgcctcgagatcgagctggccgaggttgagatgcccggcctcatggcctgtcggaccgagttcggcccctcccagcccttcaagggggcccgcatcaccggctccctccacatgaccatcca

SEQ ID NO: 75432 - DNA, 260 bp, Glycine max
  Clone ID: 700903523H1
tccaggagtactggtggtgcaccgagcgcgccctcgactggggccccggtggtggacccgacctcatcgtcgacgacggtggtgacgctacccttctcatccacgaaggcgtcaaggccgaggagctctatgagaaaccggcgaactccccgaccccaactccaccgacaacgccgagattcagatcgtgcttaccatcatcagagatgggttgaagaccgatcccaccaggtaccgcaagatgaaggagcgtctcgttg

SEQ ID NO: 75433 - DNA, 240 bp, Glycine max
  Clone ID: 700863078H1
cgtaagtacactgaggtgaagccagccctcacaaacatggttgccgcagcaaaactcatccgcaacgaacttgccaagtgaatggtataagaaagtagaatcttccaagtcatttggttctgctttatattataatacacaaagaaaaattttctctatattgggttgtttcaataactgtgtgtggaatatttaggtgtcttagcatgctctgtgagcaattgattcttcctcaacccc

SEQ ID NO: 75434 - DNA, 229 bp, Glycine max
  Clone ID: 700953594H1
ttattgctgaccttaaggcagctggtgcttcatggattcaatttgatgagcctacccttgtcttggaccttgaatctcacaagttgcaagctttcactgacgcatatgcagaacttgcacctgctttgtctgatctgaatgttcttgttgagacctactttgctgacatccctgctgaggcgtacaagaccctcacatctctgaatggcgtcactgcatatgggtttga

SEQ ID NO: 75435 - DNA, 259 bp, Glycine max
  Clone ID: 700905233H1
cttgttgctctccaagcctgccaagggagtcgagaaatccttttctctcctctctctccttcccaaggttcttgctgtctacaaggaagttattgctgaccttaaggcagctggtgcttcatggattcaatttgatgagcctacccttgtcttggaccttgaatctcacaagttgcaagctttcactgacgcatatgcagaacttgcacctgctttgtctgatctgaatgttcttgttgagactactttgctgacatcc

SEQ ID NO: 75436 - DNA, 255 bp, Glycine max
  Clone ID: 700959515H1
gattgcacccacccattaacggtgatgtgagccgcccaaagccaatgaccgtcttctggtcatctctggctcagagctttaccaagcgcccaatgaagggaatgcttaccggtcctgttaccattctcaactggtcctttgttagaaatgaccaacctagatctgagaccacctaccagattgctttgtctatcaaggacgaagtggaagaccttgaaaaggctggcatcactgttatccaaattgatgaagctg

SEQ ID NO: 75437 - DNA, 273 bp, Glycine max
  Clone ID: 700952331H1
gaccttgctgcttctctcactacattgcagggtcttgagggcattgtgggcaaagataagcttgttgtgtccacctcctcctcccttcttcacactgctgttgatcttgttaacgagaccaagttggatgacgagatcaagtcatggctagcatttgctgcacaaaaaattgttgaagttaacgcattggctaaggcattgtctggcaacaaggatgtggccttcttctctgctaatgctgcagctcaggcttcaaggaagtcctctccaaga

SEQ ID NO: 75438 - DNA, 247 bp, Glycine max
  Clone ID: 700964425H1
cttgctccctcagaagcgaagaagaagccacagagaaccagtctcctactctctctcacccacaagaaaaatggcatctcacatcgttggatacccccgcatgggtcccaagagagagctcaagttcgctctcgagtctttctgggatggcaagagcagcgccgaggatttgcagaaggtggctgctgatctcaggtcatccatctggaagcagatggctggtgctgggatcaagtacatccccagc

SEQ ID NO: 75439 - DNA, 258 bp, Glycine max
  Clone ID: 700908840H1
aagaagttcaaccttccaatcctcccaaccaccacaattggatccttccctcagactgttgaactgaggagggtgcgtcgtgaatacaaggctaacaagatctcagaggaggagtatgttagttcaattaaagaggaaatccgcaaagttgttgaactccaagagaatcttgatatcgatgtcctggtacacggggagcctgagaggaatgacatggtggagtactttggtgagcagttgtcaggctttgcctttacc

SEQ ID NO: 75440 - DNA, 251 bp, Glycine max
  Clone ID: 700958865H1
ctttgttttcaattaggtttttttgttgctctccttcaaactccatctttccaaatcctctctttgcgattgtgttttgatctgcttcctactgcgatagtttctctactgttacatggccatggcggtttccgcaattggttttgaaggtttcgagaaaaggttggaaatatcctttttccagccgggactttttgctgaccctgaaggaaggggtctaagggctcttacaaaatcccagttgggtgaga

SEQ ID NO: 75441 - DNA, 233 bp, Glycine max
  Clone ID: 700962044H1
aatgacaccacctacccccttctccctataaatggcaactcaatgccccccttagaactcgcagcgcttgatttgaggccaggcaagccccactcaaccaccacacctctcctcgttcacgctacccctttctgctcttcttctacctttcaagttttaaaagtataaagatggcagagacattcctatttacctcagagtcggtgaacgagggacaccctgacaagctctgc

SEQ ID NO: 75442 - DNA, 258 bp, Glycine max
  Clone ID: 700964366H1
caggcaagccccactcaaccaccacacctctcctcgttcacgctacccctttctgctcttcttctacctttcaagttttaaaagtataaagatggcagagacattcctatttacctcagagtcggtgaacgagggacaccctgacaagctctgcgaccaaatctccgatgctgtcctcgacgcttgcctcgagcaggacccagacagcaaagttgcctgcgaaacatgcagcaaaaccaacttggtcatggtcttcgg

SEQ ID NO: 75443 - DNA, 239 bp, Glycine max
  Clone ID: 700906176H1
cacactcgttcatatatctctctgctcttctcttctcttctacctctcaagtttttgaagtataaagatggcagagacattcctattcacctcggagtcagtgaacgagggacaccctgataagctctgcgaccaaatctccgatgctgtcctcgacgcttgcctcgaacaggacccagacagcaaggttgcctgcgaaacatgcaccaagaccaacttggtcatggtcttcggagaga

SEQ ID NO: 75444 - DNA, 201 bp, Glycine max
  unsure (1)..(201): unsure at all n locations
  Clone ID: 700960522H1
gcgacacncggcctccacttctnaagtaccngaanaacaatnnaagaatgtaagaggggatggaactgntgacngcaaggaatgggntagnatctatgattatgatgtntacaatgacttgggngatccacataanggtgaaaagtatgctacgcngcnncnntggaggttgnnccttacctnanctcgcagangngacaa

SEQ ID NO: 75445 - DNA, 281 bp, Glycine max
  Clone ID: 700956601H1
gtgagaagccgagcgattttgtttaccttccaagagatgaagcatttggtcacttgaagtcatcagattttctcgcttttggaatcaaatctgtatcccaagatgtcttgcctgtcttgactgatgcattcgatggaaatattttgagccttgagtttgataattttgctgaagtgcgcaaactctatgaaggtggagttacactacctacaaactttcttagcaagatcgcccctataccagtgatcaaggaaatttttcgaactgatggcgaacagttc

SEQ ID NO: 75446 - DNA, 268 bp, Glycine max
  Clone ID: 700906062H1
gcgattttgtttaccttccaagagatgaagcatttggtcacttgaagtcatcagattttctcgcttatggaatcaaatctgtatcccaagatgtcttgcctgtcttgactgatgcattcgatggaaatattttgagccttgagtttgataattttgctgaagtgcacaaactctatgaaggtggagttacactacctacaaactttcttagcaagatcgcccctataccagtgatcaaggaaatttttcgaactgatggcgaacagtt

SEQ ID NO: 75447 - DNA, 269 bp, Glycine max
  Clone ID: 700952395H1
atttttcttgaaaaatgatggaactttgacgccattggccattgagttaagtaagccacatcctcagggtgaagcatatggtcctgttagtgaagtctacgtgccttcgagtgaaggagttgaagcttacatttggttactggcaaaggcttacgttgttgtgaatgatgcttgctaccatcaaatcattagccattggctaaacactcatgcggttgtggagccattcgtcatagcgacaaacaggcatctgagcgtggttcacccta

SEQ ID NO: 75448 - DNA, 253 bp, Glycine max
  Clone ID: 700952820H1
cttgggtgggctcactgttgagcaggctatccagagcaagaagctgttcatcttagatcaccatgactatctcattccatatttgaggaaaataaatgcaactaccacaaagacttatgctaccagaaccatatttttcttgaaaagtgatggaactttgacgccattggccattgagttaagtaagccgcatcctcaaggtgaagaatatggtcctgttagcgaagtctacgtgccttcgagcgaaggagtt

SEQ ID NO: 75449 - DNA, 240 bp, Glycine max
  Clone ID: 700958786H1
gtgatgcaggtcgacaagtctgcatggatgactgatgaagaatttgcaagagaaacaattgctggtttgaatccaaatgtcatcaagattattgaggagttcccactaagtagcaagctagatactcaagcctatggtgatcatacctgtataataacaaaagagcatttggagcctaacttaggtggtctcactgttgagcaggctatccaaaacaagaagttgttcatcttagatcac

SEQ ID NO: 75450 - DNA, 245 bp, Glycine max
  Clone ID: 700953684H1
gaagaatgtaagaggggatggaactggtgagcgcaaggaatgggataggatctatgattatgatgtctacaatgacttgggcgatccagataagggtgaaaagtatgcacgccccgttcttggaggttctgccttaccttaccctcgcagaggaagaaccggaagaggaaaaactagaaaagatcccaacagtgagaagcccagtgattttgtttaccttccgagagatgaagcatttggtcact

SEQ ID NO: 75451 - DNA, 258 bp, Glycine max
  Clone ID: 700908450H1
cttcaagagattgaacaaaagcttatacagaagaacaaggacgagacgttgagaaaccgcagtgggccggctaaaatgccttacactttgctctatccttctagtgaggagggattgactttcagaggaattcccaacagtatctccatctaggggctctatggttgttgcagtactttccctggttttcaataaaagtgaatagaaggaatatgattccttcatctacctatgtatggttaagttatgtatttgggg

SEQ ID NO: 75452 - DNA, 268 bp, Glycine max
  Clone ID: 700909337H1
ggcttccctccctcctttgaagaaacaaattagaagagtgtgttgtgttgtgttgaagtagcaagctagcaaagatgtttggcatcttaggaggcaataaggggcacaagatcaagggtactgtggtgttgatgagcaaaatgtgttggacttcaacgaaatagtgtccactactcagggtggtttggttggtgctgccaccggcatcttcggtgctgccaccggtattgttggtggagttgtcgatggtgctactgccatcttcagt

SEQ ID NO: 75453 - DNA, 249 bp, Glycine max
  Clone ID: 700955588H1
gttttgtttatttgaaattaacaagtagcaaagatgtttggaatcatcggaggaaacaagggtcacaagataaaggggaacttggtgattatgcgaaagaatgtgttggatatcaacagcattaccagtgttaagggtgtcatcggaaccggcattaacatcattggaggagtcgtcgacaccgttactgctttggcgtcccacatctccatccagctcattagtgccaccaaggctgatggacatggg

SEQ ID NO: 75454 - DNA, 248 bp, Glycine max
  Clone ID: 700963486H1
tttgtttatttgaaattaacaagtagcaaagatgtttggaatcatcggaggaaacaagggtcacaagataaaggggaacttggtgattatgcgaaagaatgtgttggatatcaacagcattaccagtgttaagggtgtcatcggaaccggcattaacatcattggaggagtcgtcgacaccgttactgctttggcgtcccacatctccatccagctcattagtgccaccaaggctgatggacatggga

SEQ ID NO: 75455 - DNA, 247 bp, Glycine max
  Clone ID: 700962562H1
atttgctgtggagatgtcttcggcagtttacaaggggtgggttttcactgatcaagcccttcctgcggatcttatcaagagaggaatggcagtggaggatccatcctctccctatggccttcgccttgtgatagatgactacccttatgctgttgatggactagagatatggagtgctatccagacatgggttaaggactacgtctccttgtactatgccacggatgatgcagttaagaaagactca

SEQ ID NO: 75456 - DNA, 265 bp, Glycine max
  Clone ID: 700962101H1
agcaaagatgacaggtgggatgtttggaaggaaggggcaaaagataaaggggacagtggtgttgatgccaaagaatgtgttggacttcaacgccataacctccgtcggaaaaggcagtgctaaggacaccgccaccgatttcttgggcaaaggcttggacgcattaggtcatgcagttgatgctctcactgccttcgctggccatagcatctccttgcagcttatcagtgctactcagactgatggtagtggaaaaggaaaagtt

SEQ ID NO: 75457 - DNA, 259 bp, Glycine max
  Clone ID: 700954911H1
gcaaagatgacaggtgggatgtttggaaggaaggggcaaaagataaaggggacagtggtgttgatgccaaagaatgtgttggacttcaacgccataacctccgtcggaaaaggcagtgctaaggacaccgccaccgatttcttgggcaaaggcttggacgcattaggtcatgcagttgatgctctcactgccttcgctggccatagcatctccttgcagcttatcagtgctactcagactgatggtagtggaaaaggaa

SEQ ID NO: 75458 - DNA, 253 bp, Glycine max
  Clone ID: 700954746H1
gcaaagatgacaggtgggatgtttggaaggaaggggcaaaagataaaggggacagtggtgttgatgccaaagaatgtgttggacttcaacgccataacctccgtcggaaaaggcagtgctaaggacaccgccaccgatttcttgggcaaaggcttggacgcattaggtcatgcagttgatgctctcactgccttcgctggccatagcatctccttgcagcttatcagtgctactcagactgatggtagtggaa

SEQ ID NO: 75459 - DNA, 254 bp, Glycine max
  Clone ID: 700953716H1
tccaactccactagtgaagtacagaaaagaagaattggaaaatctaagaggagatggaaaaggagagcgcaaggaatatgataggatctatgattatgatgtctataatgatttgggtaacccagacaagagcaatgatctagctcgtcctgttcttggagggtctagtgcctatccatatcctcgcaggggaagaactggtagaaaaccaacaacaaaagactctaagagtgagtcaccatccagcagcacct

SEQ ID NO: 75460 - DNA, 115 bp, Glycine max
  Clone ID: 700957539H1
attatgatgtctataatgatttgggtaacccagacaagagcaatgatctagctcgtcctgttcttggagggtctagtgcctatccatatcctcgcaggggaagaactggtagaaa

SEQ ID NO: 75461 - DNA, 262 bp, Glycine max
  Clone ID: 700955952H1
cagaaatctcatctcagtgattcaccggtgattggtgatggctcagccgcttgtgaagaaagacgatgaccgcgacgacgaagctgagtattccccctttctgggacttgaaaaggggtctgttcttcaggaggccagggtttttaatgaccctcaactagatgctaggagatgttcacaggttattacaaaactcctatacctacttaatcagggagagacgtttacaaaggttgaagccacagaagttttctttgctgtg

SEQ ID NO: 75462 - DNA, 251 bp, Glycine max
  Clone ID: 700909030H1
gttttgaatcacaatggcagaggatgatggttacacaaaagatggaacagtagattactgtggaaatccagctaataaaaaggaaactggaacctggaaagcctgcccctttatcttaggaaatgaatgttgtgaaagattggcttattatgggatgagcacaaacctggtgctttattttaagaagcggctacatcagcatagtgctattgcttccaagaatgtctctaattggagtggaacttgctata

SEQ ID NO: 75463 - DNA, 248 bp, Glycine max
  Clone ID: 700954644H1
caattgttacctatatttcttcattcctcctgtctgattgctacagaactcctgatcctgtcactgggaaaagaaactactcttacatggatgctgttagagtttatcttggttataaaaggacatgtgtagctggcttccttcaatttttgactttgtatggtactagtattgcttatgtactaaccacagcaactagtctgagtgcaattctgagatcaaattgttatcacaagaaagggcatgaa

SEQ ID NO: 75464 - DNA, 252 bp, Glycine max
  Clone ID: 700954213H1
gttgaagtcccagataccgctcatcagataagcactgattcatggtttcaagtggcttttatcctcacaaccggaatcaacagtgcctttgttcttggatatccagggaccgtcatggttcccctgggttggatcgggggtgtgattggtctaattcttgctaccatggtgtcactctatgcaaatgctctaattgcttatctccatgaattaggaggccaaaggcacattaggtatagagatcttgctgga

SEQ ID NO: 75465 - DNA, 250 bp, Glycine max
  Clone ID: 700958295H1
tctcgttcttcatggccgtcggcaacgtgcttgggtatgctgcagggtcctacagcggtctccacaagatcttccccttcacggagaccaaggcctgtgacgtcttctgcgcaaacttaaaaagctgtttctttttctcgatcctactgcttctctttttagcaactgttgctctgctctacgttaaggacaagcaagttgaagcaattcctctggatgatgccactcaaccctcttgtttctttcagct

SEQ ID NO: 75466 - DNA, 243 bp, Glycine max
  Clone ID: 700959873H1
aacattcactccctctctcttgtcttttcctctacgttcctgcattgctcgtctcaaacgctaaccatggccggcggaggtttcaccagcggcggcggcgccggagatttcgaggccaaaatcactcccatcgtcatcatttcatgtatcatggctgccaccggaggtctcatgttcggctacgacgtcggcgtttcaggtggtgtgacgtctatgcccccgttcttgaagaagttttttccg

SEQ ID NO: 75467 - DNA, 251 bp, Glycine max
  Clone ID: 700956705H1
ccggaggtgtaaatgtggttgccactcttgtttccatcttgactgtggacaaggttggaagaaaagttttattccttgaaggtggtgttcaaatgttgatttgccagattgctactggagtcatgattgctatgaagttcggggtgagtggcgaaggctcgttttcctccggagaagccaaccttattttgttctttatatgtgcatttgttgctgcatttgcatggtcttggggtccactagggtggttg

SEQ ID NO: 75468 - DNA, 242 bp, Glycine max
  Clone ID: 700952292H1
ggattcttcttcttcacgtggtacttcttgaacgtgattttcaacatccttaacaagaagatctacaattacttcccctatccatacttcgtatcggttatccatttattcgtgggtgtggcgtactgtttggtgagctgggccgtgggacttcctaaacgtgctcctatagactccaacctactgaagttgctcattccggtggctgtgtgccatgcattaggccacgtgaccagcaatgt

SEQ ID NO: 75469 - DNA, 261 bp, Glycine max
  Clone ID: 700964094H1
gttggcagtcgcagctacagcagtactctcaaatgggttggatctatctttcttgcccagcgatttcctctttggcattgcttcttcctcttaccagtatgaaggagcttacaagagtgacggcaaaggactgagcaactgggataactacactcacggaccaggtagaagtgtaataatggatggaagcaatggggatatcgcgattgatcattatcatcgctacctggaggatatagatttaatggaaactttgggagt

SEQ ID NO: 75470 - DNA, 253 bp, Glycine max
  Clone ID: 700956022H1
gcacacaaagtaatggacaaaaaaccatgcaactcatcatctcatgatcctgaagtgagaaagggaccatggaccatggaagaagacttgatcttgataaactatattgcaaatcacggtgaaggtgtttggaactccttagccaaagcttctggtctcaaacgaacgggaaagagttgtcgactccgttggctaaactaccttcgtcctgatgttagaagaggaaacattacacccgaggaacagcttttga

SEQ ID NO: 75471 - DNA, 261 bp, Glycine max
  Clone ID: 700955479H1
ctttattctctcacacaaaataatggacaagaagcttggcaacacgtctcatgatcctgaagtgagaaaggggccatggacaatggaagaagacttaatcttgatcacctatattgccaatcacggggaagggtttggaactctttggccaaggctgctggacttaaacgtaccggaaagagttgccggctccggtggctaaactacctccgtcctgatgttagaagagggaatattacacccgaggaacagcttttgatc

SEQ ID NO: 75472 - DNA, 254 bp, Glycine max
  Clone ID: 700952210H1
gttctttcccttggtgacaaaccaagactaacacacacagaacatagcttgtgttggtgaggtgagaagataaagaaagaatggcatttgcaggaacaacacagaagtgtatggcctgtgacaaaaccgtttatctggttgataagttgaccgcggataaccgagttttccacaaagcttgcttcagatgccatcactgcaaaggaaccctcaagctgagcaactacaactcttttgagggagttctttattgt

SEQ ID NO: 75473 - DNA, 260 bp, Glycine max
  Clone ID: 700959049H1
actcactctccttctctctcctattgcggctagggtttgggtttttcactttcagcctctccattccttcaaccttcttcttctctttgatctctgatggagacgttccgtgtttagtagcaagggttagttgaggccttgtgtttggaaacgtacggtgtcgttttggagttgggaaaacaaataattctgagagatggcaaccacgaacccttttgatttgttgggtgacgacgctgaggacccttctcagctcatcg

SEQ ID NO: 75474 - DNA, 247 bp, Glycine max
  Clone ID: 700905665H1
ctttgaagccaccctcttctaacttctccatttcacaaggaagaagatcagagaacatttagaacaaaaaagagagtttgagaaatggggaggggtaagattgagatcaagaggatagagaactcaagcaacaggcaagttacatactcaaagagaaagaatgggatcctaaagaaggccaaggaaatcactgttctatgtgatgctcaagtttcgcttatcatctttgctgcatctggaaagatgc

SEQ ID NO: 75475 - DNA, 251 bp, Glycine max
  Clone ID: 700956070H1
gaagcattgaaggacgtagctgctatggctcgaggaaagatccagatcaagaggatagagaacaccaccaaccgccaggtcacttattctaaacgacggaatggccttttcaagaaggccaacgagctcaccgttctatgcgatgccaaggtttctattattatgttctccagcactgggaaactccacgagtacatcagcccctccacctcaacaaagcagttcttcgatcagtaccagatgactctagg

SEQ ID NO: 75476 - DNA, 257 bp, Glycine max
  Clone ID: 700954715H1
gtgtgcattcttgtttaactcctctttgttcctcagacatcccagaagggaaccaaaaataaaaaataaaaaaataaacacaatcaataaaggggagaaaacaaacatgtcattcacaggaactcttgataaatgcacagcatgtgacaagactgtctatgtggttgacttgttaactcttgaaggaattccttaccataaaaactgcttcaagtgcagtcactgcaagggatgtcttacgatgtgcacatactcct

SEQ ID NO: 75477 - DNA, 247 bp, Glycine max
  Clone ID: 700955837H1
cgaactcatcatttctaattgttctgatccatatatatcatactttctttgtaataacttaaagaaccccacaaaaacaccaaccatgtccacaattgcaaagagagatttgagttctaatgaagaagagagtgagctgagaagaggtccttggactcttgaagaagacagcttactcatacactatattgctcgtcatggtgaaggccgttggaatatgttagccaaaagtgcaggattgaagagg

SEQ ID NO: 75478 - DNA, 260 bp, Glycine max
  Clone ID: 700958205H1
ggctgctttaagctagggtttcatgtgtttaagtgattggttgatataaatactagtgtagtgtgtctttgtgtaaagggagaaaaacaaaagaaggtaaagcttgatgatatgaagctttcaacatcagggttggggcagcagggacatgaaggaggggagaagaagtgtctgaattctgagctatggcatgcatgtgcggggcccctggtgtccctaccaactgcagggactcgtgtggtttacttccctcagggtca

SEQ ID NO: 75479 - DNA, 281 bp, Glycine max
  Clone ID: 700963673H1
ggaagacttaggcccactgaatatcaaagaacttgagcatcttgaacggcaattggattcatctctaaagcaagtgaggtccacaaaggtaataatggataatttatacataaaaaatgtgttaagtttttggcaaattaatatatacttaagcttattaatgtagttcttgatcagtagttgcagcagcctagcgtaatttctctatttgatttaagcatctttccgtttttccgtacaatttgtttttgccaatactatggccgatgcaacattagaat

SEQ ID NO: 75480 - DNA, 262 bp, Glycine max
  Clone ID: 700954358H1
aaacacactgctgaaaaccctagctataaatttctacacccaccgacggcagaaaccctagtagtagttttgaaagggaaggaaagatgcagatattcgtgaaaaccctaaccgggaagacaatcacccttgaggtggagtcaagcgacaccattgacaatgtcaaagccaagattcaggacaaagaagggattcctccggatcagcagaggttgatcttcgccgggaaacagctggaggatggccgtaccctcgccgatta

SEQ ID NO: 75481 - DNA, 257 bp, Glycine max
  Clone ID: 700962820H1
gggaaggaaagatgcagatattcgtgaaaaccctaaccgggaagacaatcacccttgaggtggagtcaagcgacaccattgacaatgtcaaagccaagattcaggacaaagaagggattcctccggatcagcagaggttgatcttcgccgggaaacagctggaggatggccgtaccctcgccgattacaacatccaaaaagagtcaacattgcatcttgttttgaggcttcgtggtggtattattgagccatctttg

SEQ ID NO: 75482 - DNA, 252 bp, Glycine max
  Clone ID: 700905635H1
agagaaaagcgcgctatatacaagaacttgagcgcaaggttcagactcttcagacggaagccacaactctttctgcccaattgacattataccagagggacacatctggccttagtactgaaaatacagagcttaagctccgtctgcaagccatggagcaacaagcacagcttcgcgatgctcttaatgaagcattgaagaaggaagttgagagacttaaggttgctaccggtgaggggatgagccacactg

SEQ ID NO: 75483 - DNA, 260 bp, Glycine max
  unsure (1)..(260): unsure at all n locations
  Clone ID: 700960533H1
aaagtattgtgcagcaaagtacagagattgaagggaagggagctgatggaaaagatcgngacttgtncaaaaaattgnaaggaacttctgcaaatacaggttccaaagcangagaaagnngaaaggcaggctcaggttcaggcaatgatggcatatccgcaaagtgcnngaaagtggttcanagggttcatcaaatgctagtgatganaatactaaccaacaggaatnagctgcaaaaaagaanggaantttganctgat

SEQ ID NO: 75484 - DNA, 274 bp, Glycine max
  Clone ID: 700907319H1
atgaagagacttaacagctcagattcttccactgccctcatgacaatttttccatcatcatcaacagaggaacatagtccgaggaacagccaccacatgtatggcagggagttccgatcgatgttggacggactcgacgaggaagggtgtgttgaagaaccggggcatcaatctgagaagaagcgtcgactaagtgtggaacaagtgaaggctttggagaagaactttgaggttgaaaacaagcttgaacctgagaggaaggtcaagcttgccc

SEQ ID NO: 75485 - DNA, 259 bp, Glycine max
  Clone ID: 700957315H1
gttccaaaacagaagggcaaggtggaaatcaagcgcatagagcaagagtacagaaaactcaaagatgaatatgacaatttagcatcaaggtttgagtccctaaagaaagagaaggactctttgcaattagagttgcagaagctaagtgatttggtggtgacatctcaagatggtggaagggaagacaaggatggcaaagaaaacagcatagaagatggtggctcaggcagtggatacagcagttggaagcctgaagcaa

SEQ ID NO: 75486 - DNA, 248 bp, Glycine max
  Clone ID: 700907558H1
gaaaaagttggtgtgctgcttctcaatctaggaggaccagagacattgaatgacgttcaaccttttctgtttaatctttttgcagatcctgatatcattcgtcttccaaggttgtttcggtttctccagcgaccattggcaaaattgatttctgtacttcggtctcctaaatccaaggaagggtatgctgctattggtggtggctctcctttacgcaaaattacagatgaccaggcactcgcaattaa

SEQ ID NO: 75487 - DNA, 249 bp, Glycine max
  Clone ID: 700964466H1
ctcccttattattaaattaaaaagctgacaaattggggggtcaactgatgaattagatccattccttggggttgatgcatgcgtccaagagtttccattcttcgcttccttcttccggtttatgatcgtattcccaccgagcagtcagtgggagagaaacaagtatactctctattctccctccagttttcagtccaaatgttgtacccctatcatataccaaattgaattcaacatatcgtccccttc

SEQ ID NO: 75488 - DNA, 263 bp, Glycine max
  Clone ID: 700960290H1
cgagctcttagggagctgcttttcactgctcctggtgttcttcaatatctcagtggtgtcatcctctttgaggaaaccctctaccagagcacagctgcaggcaagccctttgtgaatgtcttgaaggaagctggtgtgcttcctggcatcaaggttgacaagggcacagtcgagcttgctggaactaatggagaaaccaccactcagggtctagatggccttggtcagcgttgtgccaagtactacgaagctggtgcacgttt

SEQ ID NO: 75489 - DNA, 258 bp, Glycine max
  Clone ID: 700906271H1
aacagggacaattggcaagcgtttggccagcatcagtgtagagaatgttgaatccaacaggtgtgctcttagggagctgcttttcaccgctcccggtgctcttaaatatctcagtggtgtcatcctctttgaggaaactctctaccagagcacagctgcaggcaagccctttgtggaagtcttgaaggaggctggtgtgcttcctggcatcaaggttgacaagggcacagttgagcttgctggcactaatggagaaac

SEQ ID NO: 75490 - DNA, 259 bp, Glycine max
  Clone ID: 700958213H1
ctctttttcttctctctcaacaacttcaccttcttcctcctcgatcatgtctcacttcaagggcaagtaccatgatgagcttatcgccaatgctgcgtacattggcactcctggaaagggtattcttgctgctgatgagtcaacagggacaattggcaagcgtttggccagcatcagtgtagagaacattgaatccaacaggcgagctcttagggagctgcttttcactgctcctggtgttcttcaatatctcagtggt

SEQ ID NO: 75491 - DNA, 244 bp, Glycine max
  Clone ID: 700965253H1
tcaagtattaacccttttctctctgaatactctctactcaatacattggcactcctggaaagggtattcttgctgctgatgagtcaacagggacaattggcaagcgtttggccagcatcagtgtagagaacattgaatccaacaggcgagctcttagggagctgcttttcactgctcctggtgttcttcaatatctcagtggtgtcatcctctttgaggaaaccctctaccagagcacagctgc

SEQ ID NO: 75492 - DNA, 261 bp, Glycine max
  Clone ID: 700953343H1
tacaaaggttgctgtaggagataagattgcagtagtgctaagtgctaacacctgcagtgaacaatggcctctgcatcagcatctctgctcaagtcttcacttgttcttgacaagtctgagtgggtgaagggacaaacccttcgccaaccttctgcatcagttgtgagatgcaaccccaccaccccatcaggcctcaccatcagagctggttcctatgctgagagctcgttaagaccgcgaaaacagtggcttcaccaggga

SEQ ID NO: 75493 - DNA, 234 bp, Glycine max
  Clone ID: 700956353H1
acaaaggttgctgtaggagataagattgcagtagtgctaagtgctaacacctgcagtgaacaatggcctctgcatcagcatctctgctcaagtcttcacttgttcttgacaagtctgagtgggtgaagggacaaacccttcgccaaccttctgcatcagttgtgagatgcaaccccaccaccccatcaggcctcaccatcagagctggttcctatgctgatgagctcgttaaga

SEQ ID NO: 75494 - DNA, 242 bp, Glycine max
  Clone ID: 700953987H1
ccagtcaccacctctgaactctctctctcatctataagtcaacatggctcatcatgaagattcaagtgcatggaattcgagtaaacctcaccctaagctcaatgaaagaattctgtcttctctgtcacggagaactgttgctgctcacccctggcacgacttagagattgggccaggagctccagcagttttcaactgtgtggttgaaattggcaaaggaagtaaggttaagtatgagctgg

SEQ ID NO: 75495 - DNA, 248 bp, Glycine max
  Clone ID: 700904972H1
caagtaccctgagtctgacatttactggaaaaaatttgaagagaaatatcatttctcatgccaatttactgctgatctttttgcaatgaaccacacagactttatcatcaccagcaccttccaagagattgctggaagcaaggacactgttggacagtatgagagtcacactgccttcacccttccaggactttaccgtgttgttcacggtattgatccatttgatccaaagttcaacattgtctctc

SEQ ID NO: 75496 - DNA, 146 bp, Glycine max
  Clone ID: 700764612H1
caactctctatggatcttgagaggcagaatagggatggctacactttcatggggaaccaaacaaacttcattagtggttttggacaataccctatggaggaaattggtaggtttgatgctgagcaattcacaccaaggttttcagg

SEQ ID NO: 75497 - DNA, 149 bp, Glycine max
  Clone ID: 700764634H1
gataactagaaacagtgtgatgaaaatgaaggtccttgttttcttcgttgctacaattttggtagcatggcaatgccatgcgtacgatatgttccctctccgaatgaacactggctatggtgcccgtactccggaggtgaaatgcgcaa

SEQ ID NO: 75498 - DNA, 142 bp, Glycine max
  Clone ID: 700764639H1
cgcagagtcacttttgttctcactactctcaatctcaaacctgttttaccaaaaaatctaactgatgctcaataaaaagaactagaggcatggattgaaaatgactttgatcatgtgtaagaactttatttaaaatggttta

SEQ ID NO: 75499 - DNA, 247 bp, Glycine max
  Clone ID: 700902915H1
gagcttgattatctagttggggctgtgtcaaaccccaagagaccatttgctgctattgtcggtggatcgaaggtgtcttccaagattggagttattgaatccttgttggagaaagttaatgttctcttgcttggtggaggaatgatctttaccttttacaaggctcagggttattcagttgggtcatctcttgtggaggaagacaagcttagccttgcaactacacttcttgaaaaggccaaggcta

SEQ ID NO: 75500 - DNA, 51 bp, Glycine max
  unsure (1)..(51): unsure at all n locations
  Clone ID: 700902970H1
aacgcatcanaatgagtcngtnccagcgtccnccacacngcancacgaggg

SEQ ID NO: 75501 - DNA, 238 bp, Glycine max
  Clone ID: 700902978H1
gcggcggtggcggcggaattgtgatggagtttccggccggtgatgaggaatcgttctcgtcgccaacgaggttgccgaagaggctccggcgacggcttcgtgacgcggagtgcaagtctccgagcacggtggaggaaatcgaagcgaaactccacaacgctgatcttcgcagacagaaatactatgagaaactctcaaacaaggcacgtgctaagccaagaagcccctcaaggtgttc

SEQ ID NO: 75502 - DNA, 242 bp, Glycine max
  Clone ID: 700902980H1
caccattccagaacaagatgaatgggtatacagtgatggaaagtcgacaacttgtgttgcctttatcctttctatgtataaagaggctgaagtttttggtcccattgctaattccattcaagtaaccgagttcaccattcgcgatgcatacatgctcagaattttcgaggacaaccaaacacgcctaccaagttggtgcaacaatgagaatgaccggattccattctgtcagattcttggtg

SEQ ID NO: 75503 - DNA, 84 bp, Glycine max
  unsure (1)..(84): unsure at all n locations
  Clone ID: 700903020H1
ttcttcagttagctcccccaacctatacactncaccaccacacaacatatcgagnanagngtnagnaggctngnggcggggngc

SEQ ID NO: 75504 - DNA, 226 bp, Glycine max
  unsure (1)..(226): unsure at all n locations
  Clone ID: 700903078H1
ggtgnaagcgccatgganctctcangattnagcatctacaatgacctgctgattgaactaangnagacgantnngcatnnantgcctnctaatagagccaataagggatggngcnnnncctanactgacagtgnnaacgacattatggtggtgtgggatgatccgtggcatgagngctgtgatgtggtanccaagcattcagatacatncncangaatattngaga

SEQ ID NO: 75505 - DNA, 99 bp, Glycine max
  unsure (1)..(99): unsure at all n locations
  Clone ID: 700903101H1
ccaattgaacggttggnattaatagcaaaactattcctatgtcaccaaaaccnaatncattnttcccattncttactttgtccancanannntaggagc

SEQ ID NO: 75506 - DNA, 61 bp, Glycine max
  unsure (1)..(61): unsure at all n locations
  Clone ID: 700903132H1
acttcttctttcatcattcatcgcctttcaccacacaacatacaattncaaaagnnnnnng

SEQ ID NO: 75507 - DNA, 266 bp, Glycine max
  Clone ID: 700903166H1
tgaggacaaaaatgaagatgactggattacaagatacttctttactggaggaactatgccttcggcaaatctacttctttatttccaagatgatgttactgtcaccaaccattggctagtaaatgggaaacactacgcacagaccagtgaagaatggctcaaaagaatggaccagagaatgactttcatcaagccaattatgcaatcaacatacggcaaggactcagctaccaagtggactgcttattggagaacattcttcatag

SEQ ID NO: 75508 - DNA, 257 bp, Glycine max
  Clone ID: 700903186H1
ggcttccagctgtattcatggacttggcggagaagcttttctttgcagcatttctcattctttccgtggccattgatggaatgcaggcagacactatggtcactggcactgtcttctgtgaccaatgcaaagacggacagagatccctttttgattatcctgttaatggtgcaaaagtaattctgtcctgtgctgacagtaatgggcaaattacaatgtcaagagaagaaacaacaaactggtttggaagctataca

SEQ ID NO: 75509 - DNA, 61 bp, Glycine max
  unsure (1)..(61): unsure at all n locations
  Clone ID: 700903204H1
ctgnaggagaantcagcatcgntganaagtcntgaaccgttgcagaanaagctgancatgt

SEQ ID NO: 75510 - DNA, 260 bp, Glycine max
  Clone ID: 700903220H1
atgggcatcagcagcaggagcaggaaccgcaatcacctcaggagggacaatgatctgtttatgttgtaatggttcatggcttgctctttgaggatgttttaacggatctttcagctggcaagtaatcgtgtttgtaggagaagccttggctggtttatttgctgcatttgtgcaggctctgaggaagatggcttcatttttataattttatttagttttctttttcctggcatattaggattttttagtgtgtaaacctt

SEQ ID NO: 75511 - DNA, 258 bp, Glycine max
  Clone ID: 700903222H1
ctgatgttgtcatagcagacaagtttgctgctgatgctaacagcaagactgtgccggcatcaagcatcccagatgggtggatggggttggatattggtcctgattccatcaagacatttggtgaagcattggatacgactcagaccattatttggaatggaccaatgggtgtttttgagtttgataattttgccacaggaacagaggctatagccaagaaactggcagagctgagtgggaagggagtgacaaccatca

SEQ ID NO: 75512 - DNA, 193 bp, Glycine max
  Clone ID: 700903224H1
cattcccatgcttttatgttgtagcaatgcttctaaagattatattaattcacgagtaaatctacatcttagtccttgatattaaagtgtcatttattttagaagctaagattttagaaatcgtgtattagttcctgaatttttaaaacaccaagtgaatgttaaacattgtatgagtgactttcgttctttt

SEQ ID NO: 75513 - DNA, 85 bp, Glycine max
  Clone ID: 700903247H1
tgcttgtgtaatgcagctgctgttttgatgctgacttgctccaacacgaaaacttttttttaccaaccatcacattgcttacttt

SEQ ID NO: 75514 - DNA, 252 bp, Glycine max
  Clone ID: 700903274H1
cagaactaaatgaaattcttgcccatgatactgtggatgagggtgggttatggaagaagaaactcactgatcaatcattgaagctttttgactttttacctcaagcaattcaagaacaattgatgcttgaaagagatccacatggaaatgttcaggttgccaagatagaaacagagaaaatgcttattcaaatggttgaaactgagttggagaagagaaagcaagaaggcaaatacaaaggcgaatttaaag

SEQ ID NO: 75515 - DNA, 202 bp, Glycine max
  unsure (1)..(202): unsure at all n locations
  Clone ID: 700903289H1
cgtcacgccttgtcncttanccctcctcctcgtcgcctcngnnacnaccgccgctatggcgtggcngctttccgtangcctattnnatnctgatccgnnagntggtggccagangttggntanncgtangagtaggacaangctgcggaacgccgagcaccactggcgacgagcgtcaagtnnaagttcggncaagtaccna

SEQ ID NO: 75516 - DNA, 186 bp, Glycine max
  Clone ID: 700903312H1
tgaacacctacagtctgattcacactgtccagtttgtaaggaacgatttgaactgggatccgaggccaggaagatgccatgtaaccacgtttaccactcagattgtatcgttccatggttagttctgcataactcgtgtcctgtgtgccgtgttgagctgccaccgaaagaacatactagttctcg

SEQ ID NO: 75517 - DNA, 182 bp, Glycine max
  Clone ID: 700903337H1
gcgactataatgggtccccctgatagcccttatgctgggggtgtttttctagttactattcattttcctccggattatccattcaagccacccaaggttgcatttaggactaaagttttccacccaaatatcaacagcaatggtagtatttgtcttgatatcttaaaggagcagtggagccc

SEQ ID NO: 75518 - DNA, 177 bp, Glycine max
  Clone ID: 700903371H1
taattaattgtctaacatgttttagagtttgtgtttaggtgggaattgttttggttgagggggcttggttgttgtgcaagagagaatctaagttctcctgctgacaacagggcgtcctttgaatcatcgtgttagatttttaaagaatagttagatgtagtactttgttgttgtaag

SEQ ID NO: 75519 - DNA, 261 bp, Glycine max
  Clone ID: 700903406H1
gtagatcgctgtgagaaacacaacaaacgctgccgcaacgcaaccgtttcgaaagcactcactgactcagtttgtttctcgtttcgtcgaacccttggaaggcacaatgggagggaggaagaagaagttcatcgacaagaagaactctgctactttccaactcatcgctcgcgacacctccgacccttccttctcccaatccgaccgtgtcttcgtccgcgtcgacaacaaccccgtttccttccccgtcgccgacgactc

SEQ ID NO: 75520 - DNA, 260 bp, Glycine max
  Clone ID: 700903407H1
tccggtgcttcaggatacgatcctttgacacccaaaataacgtcagttatatcattatctactcaactagacatgttcagggaatacataggaaagctgaaaggaattgttggagagagcagaacaaactacatcctagccaacagtctttatcttgtggtggcaggcagtgacgacattgccaacacctattttgttgctcacgccagaatattacagtatgacattccttcttacaccgaccttatggtcaactcggc

SEQ ID NO: 75521 - DNA, 196 bp, Glycine max
  Clone ID: 700903409H1
gtgatgcttaatcttctgtgatcactttcaagtttgagttagcatgcacagactaactacccgacaaaactgcgtcaactgcctgggatgtgttgaatgtaagattcctttgccaaactaaacataaaattccaactcatggttacaatgaccaagaagaagctaattggattttttttagggtacaatgctaatt

SEQ ID NO: 75522 - DNA, 260 bp, Glycine max
  Clone ID: 700903413H1
atcataagtggttggaggaagagttcactgaaaaggttcaaaagagaggtggtgcgcttattcaaaaatggggaagatcatcagctgcatcaacttctgtgtcaattgttgatgccataagatctttagtaactcctactcccgagggtgattggttttcttctggtgtatatagcaatggaaatccttatggaatagctgaaggtattgttttcagtatgccatgccgatcaaagggtgatggtgattatgaacttgtc

SEQ ID NO: 75523 - DNA, 258 bp, Glycine max
  Clone ID: 700903423H1
gcttgagatgctcttggaggcttactttgtgcagattgatggcaccttgaacaagctctctacgctgagggagtacgttgatgacacagaggattacatcaacatcatgctggatgacaaacagaaccatctcctccaaatgggagtcatgttgaccacagcaactctggtagtgagtgcctttgttgttgtggccggtatttttggcatgaatattcacattgagctatttgatgaccagaaagctgggatgacaca

SEQ ID NO: 75524 - DNA, 258 bp, Glycine max
  Clone ID: 700903424H1
caaaacttgctatagcagtaagctataactcatttgaggctctgtgagaattgagaaatggctaaagatgttgaggttcaagagcaaggaggagagtactctgccaaagactaccatgaccctcctccagcacctttgttcgacccagaggagctcacacagtggtccttctatagagccctcatcgctgagttcatagcaacccttctcttcctttatgtcactgtgctcaccattattggctacaaaaggcagact

SEQ ID NO: 75525 - DNA, 255 bp, Glycine max
  Clone ID: 700903438H1
gtccgacttacagctgtggatatgattacatactcaggtgcagacagtggggagaagccatttttattgcggtcagccgaagagcttgaaccttttcttgacaagattactgacgaaatgttgaaagttactttacgggaaggagttggatacttgcatgagggattgaacagtcttgatcatgacattgtgactcagctatttgaagctggctggatacaagtctgtgttttaaacagttccatgtgttgggga

SEQ ID NO: 75526 - DNA, 254 bp, Glycine max
  Clone ID: 700903442H1
cttcagagaagaaactatcgaacccaatgagggaaataaaggtgcagaaactcgtcctcaatatctccgttggtgagagtggagatcgtctcaccagagccgccaaggtgttggaacagcttagtggccaaaccccagtgttttccaaagcaaggtacactgttcggtcctttgggattagaagaaatgagaagattgcatgttatgtcactgttagaggtgataaggctatgcaacttttggagagtggttta

SEQ ID NO: 75527 - DNA, 260 bp, Glycine max
  unsure (1)..(260): unsure at all n locations
  Clone ID: 700903463H1
aagaaacacaaaagatagannganaataaagagaaggagaaggggagaagagaganaggttgtattgagagatatgnnggaggggtaagattgagatcaaaaggnttgagaactcaagcaacaggcaagttacctactcaaagaggaagaatgggatccttaagaaggcaaaggaaattagtgttctatgtgatgctcaagtttcccttatcatctttggtgtctctgggaagatgcatgagtacntcagcccctccact

SEQ ID NO: 75528 - DNA, 249 bp, Glycine max
  Clone ID: 700903486H1
cttcagcagttattatcagttgcagagaagtttaaaaggagtccatacagttacgtctgggtagctgcagggaagcagccagatcttgagaagaatgtgggtgttggagggtatggttatccagctttagtggcccttaaccttaagaaagctgtttatgctcctctcaagagtgcttttgaacttgaccaaattatagaatttgtgaaagaagctggacgtggaggcaaagggaatttgcccattgaa

SEQ ID NO: 75529 - DNA, 261 bp, Glycine max
  Clone ID: 700903509H1
agaaactccattcaattccaaatggagaaatgctcaatcagaaagctttcacaagtgagatccaagctttgacagaaatccgacatcgtaacattgtaaagttacatgggttttgttcacattcacaatactcattttggtgtgtgagtttctggagatgggcgacgtcaagaagattttgaaggatgatgaacaagcaattgcgtttgattggaataaaagggtggatgttgttaagggtgtagcaaatgctttatgcta

SEQ ID NO: 75530 - DNA, 261 bp, Glycine max
  Clone ID: 700903515H1
gatgaatgccagaggaagtatgggaatgctaatgcttggcgatattgtacagatgtttttgactatcttactctttctgcaattatagatggaactgtgctttgtgttcatggtggcctttctccagacattcgatcatagatcagataagggtcattgagaggaactgtgaaattcctcatgagggaccattttgtgatctgatgtggagtgatcctgaagatatcgaaacatgggcagtcagtcctcgtggagctggtt

SEQ ID NO: 75531 - DNA, 260 bp, Glycine max
  Clone ID: 700903519H1
taaaaatgaaagggttaaaagggagacaagacaagtttggggggaaaaagaagtcgtaaatttttgtataacacatcaggatcaggtttgcatttaattcgatttaatttatttcttatttagtgcagagaccaaatgaattaatcttgtaaattatttagtgctagagtgaagttgagacttttgaatgacacatgttgagtactttgtttttgtctctagtatctttcactcgagttgagctcatacacagaagaact

SEQ ID NO: 75532 - DNA, 262 bp, Glycine max
  Clone ID: 700903533H1
caacacacagacccactggacgcttctctaatggcctaaacatccctgacttaattagtttggagcttggcttagagcctacactaccctatttgagcccgctactagttggagagaagctcttaattggtgccaatttgcctccgctggaattggcattctcaatgatactggaattcaatttttgaacattatccacattcagaagcaactgaagctattccacgagtatcaggaaaggttaagtttacacattggtgcg

SEQ ID NO: 75533 - DNA, 260 bp, Glycine max
  Clone ID: 700903534H1
aagaattgatgctcaaaatggaactcatcttccaactttgaaaggcaatggtagagtcctcagctttggattagatgcacatgcacctatttgtgattccatggcatctctcatgaatcttggagagaaaaaggccttaatggcacaagaaatgggtttcatcatggctttgaggatcaaagactccccgttccttgcaaaagtggggaaaatggtgatgactcttcaactacatcctccattacaatttcaagtcccaa

SEQ ID NO: 75534 - DNA, 254 bp, Glycine max
  Clone ID: 700903557H1
aaaaaacccaaaaaaccaaaaataccataaaatttttcagcttctccgccgccgtacagccaccacctccgttcggatctccggcggacctactatccctactactctatttacacggaagaacaaaaaaatatcccacaaaaaaaattccaaaagcggttcggttagggtttagtttttttttatattatttcgtgtatctaatttttcatcagtaatattatttttgaggcggcgagatggcgcagattcag

SEQ ID NO: 75535 - DNA, 251 bp, Glycine max
  unsure (1)..(251): unsure at all n locations
  Clone ID: 700903571H1
cttttctctctctgaactctgaagcnaaacaacattaccagagtggttctagtaattcagtgctgctagaagatggaaactagtgaatggcatatcgagcgaagatctagcttcggctctgaatccccctagcaagagaggcaggaaatgtgcctgaaactgggtcactctctattgtggtgcttggtgcttctggtgatcttgctaagaagaagacatttcctgcacttttccacctatacctgngntac

SEQ ID NO: 75536 - DNA, 250 bp, Glycine max
  Clone ID: 700903584H1
catcaagcaaacgataagaaatgttatcagaaacattggccatccctgcagtactccttgtaatactcattttgattctatcctctgtcttgttccatcttcaagatgaaagaacaaatccaccaggcctaaacccctcccaattattggtaaccttcacatgctggggaaactcccacatcgttcccttcaagcccttgccaaaaattatggacccataatgttcataaagttgggacaagtcccaacc

SEQ ID NO: 75537 - DNA, 215 bp, Glycine max
  Clone ID: 700903607H1
attgaaggtccaagcaccatgtttggctctgtcttgagttatattactctgagattgctaggtgaggggcctaatgatggacaaggggaaatggagaaggcacgtgactggattctagggcatggtggtgctacttatataacgtcatgggggaagatgtggctttcagtacttggagtgtatgaatggtctggaaataatcccctgccccctga

SEQ ID NO: 75538 - DNA, 223 bp, Glycine max
  Clone ID: 700903609H1
cgctattctcttcattccatggctttgcccaaccagcaaaccgtggattaccctagtttcaaactcgttatcgtcggcgatggtggcacaggaaagacaacctttgtgaaaaggcatctcaccggagaattcgagaagaaatatgagccaaccatcggtgtggaggttcacccattggattttttcacaaactgtggaaagattcgattttactgctgggata

SEQ ID NO: 75539 - DNA, 230 bp, Glycine max
  Clone ID: 700903617H1
caaacacaaacttccttattttcttccaaatctcaccacccagaaagcacaaaagctacacacatatccaatcttttctttttcttcatttcgtccaccagattcatacacaattcacgtatacgtacaattattaaaaggaagagatggcaggagaatcatacgaggaagccatcacgagtctgaccaagcttctcagtgagaaagctgagctcggtggcgttgccgcc

SEQ ID NO: 75540 - DNA, 238 bp, Glycine max
  Clone ID: 700903679H1
gtggagatctagtgctgccaaacctcgctgaaaattagggtttcgtttcggaggtagacgaagatgttcggaagggcaccgaagaaaagcgacagcaccaggtactacgaaatcctcggcgtttcgaagaacgcttcgccggatgatttaaagaaggcttacaagaaagccgccattaagaaccaccctgacaaaggcggtgatcctgagaagttcaaagagcttgctcaagcctatg

SEQ ID NO: 75541 - DNA, 249 bp, Glycine max
  Clone ID: 700903706H1
cattgatattgctgaggatggatttttgagtctgcttactgaaaatggtaacactaaggatgacctcaagcttcccactgatgagagtctgctcactcagataaaggatggatttgctgagggcaaggatcttgttgtgtctgtcatgtctgctatgggtgaggaacagatttgtgccctcaaggatattgggccaaagaactagcttttggtgcttgttgcttgttatttctattttctatttaagca

SEQ ID NO: 75542 - DNA, 247 bp, Glycine max
  Clone ID: 700903723H1
aagaagttgccaatgactctactaatgatgatatggagaatatgctctcggaaacttttgatctaggcatggaagaagacttcaatgttctagaaaacgagtttgagcagttggtgatgttctctgaagctctagatcattctgttcaggatgatcctaatactggaaaagggtctcctcagagtcttaacaaggatgttaaagcttttcttattaacttgacaccaaaatcaccgagggaaagggg

SEQ ID NO: 75543 - DNA, 244 bp, Glycine max
  Clone ID: 700903752H1
gcagaaggtgaattaactgaagaatcaaatctcaagccagattttaatcctgcaacaagcacttcttgttccgagacaacgatgatggacacggagtctgataacgataactcttcacctagggttactgatcacgtttctagtgggagctcggaacagctaaagcagagcaacgtttccattcttcatttcttcaaagttaaggataccggacaggccggtgtgtcttcttccgaagaggcaa

SEQ ID NO: 75544 - DNA, 242 bp, Glycine max
  Clone ID: 700903768H1
ttccaatatattccattctctctgtgtatttccctacctctcccttcaagatgcagatcttcgtcaagaccctcaccggcaagaccatcacccttgaggtggaaagctctgacaccatcgacaacgtcaaggccaagatccaggacaaggaaggaatccccccggaccagcaacgtctcattttcgccggaaagcaacttgaggacggccgtacccttgctgactacaacattcagaaggag

SEQ ID NO: 75545 - DNA, 86 bp, Glycine max
  unsure (1)..(86): unsure at all n locations
  Clone ID: 700903770H1
cccaattatgtttctccntngtctctctgccacacaacanacnagtananagntcgnggtggctgcgtgcangacggtggnagtgg

SEQ ID NO: 75546 - DNA, 239 bp, Glycine max
  Clone ID: 700903774H1
ggaagggaagctatagcacactcagaaaatcgatgagtcccatgaccatgatcacgaccacgaccacgatgtttctttagacatgtcaaggttcgatacctgctaaggttgcctagatttctgtgaagattctcgcatatacgtgcttacccttcatattatgttaacaattggtcagtgattccctgtggctaccagtgtgagatttgtcttgtgagttgagtttcgaccactgattt

SEQ ID NO: 75547 - DNA, 253 bp, Glycine max
  Clone ID: 700903855H1
gtgccgcaaccgcgcctccgttgtgttactgttaccactccacgaacgtagcttttgataagtgggaatagtaatactccctttttgtttgtttcgccttcaattgtgaatcacaaacatagggatattgtatttgtggcaaaatgcgttaatttcgtcttcaattaaactaaacgcgagggtggattttttctgtgctcttggaactttttatttattttgtgcctctagacttaatattgtatatttattt

SEQ ID NO: 75548 - DNA, 250 bp, Glycine max
  Clone ID: 700903875H1
gagagataaagctgtggaatcactatgtaggattggattgcaaatgagggagagtgatttggttgagtatttcatccctttagtgaagagattggcatcaggtgaatggttcactgctcgagtcgtcttcatgtggactatttcatattgcttaccctagcgcacctgaaatgtcaaagatagaattgagatcaatgtacagtctgttatgtcaagatgacatgccaatggttagaagatctgctgcttc

SEQ ID NO: 75549 - DNA, 252 bp, Glycine max
  Clone ID: 700903915H1
cttgatccttctttttctccttgaactcaaacatggcagatgaggtggttctgctagatttctggccaagtccatttgggatgagggtcaggattgcacttgctgaaaagggtatcaaatatgagtacaaagaagaggacttgaggaacaagagtcctcttctcctccaaatgaacccggttcacaagaagattccggttctcatccacaatggcaaacccatttgtgaatccctcattgctgttcagtaca

SEQ ID NO: 75550 - DNA, 252 bp, Glycine max
  Clone ID: 700903931H1
tcccaaactgctctatcatcgtagaaagtgattttcatagtcatagatcattttctgcacatttctgcaggatgaagttgatcctgcaagcttattagacatacctaggctttgctaagttaatgctgttatggcttttgaaaatggttccaaaaaggagcttcagaaagttggtctaaaaatctccaagagctttcctcttactaggactactctggcatctatggagtctttgtccctgccagtggttca

SEQ ID NO: 75551 - DNA, 244 bp, Glycine max
  Clone ID: 700903946H1
ctttagcaaagtatgttaaagctgtatatcatactcgagtttcagttggtatgcgcttcaggatgctgtttgaaacagaggaatctagtgtgcgtcgatacatgggcacaataactggcattagtgacttggattctattcggtggccaaattcccattggcgctcagtcaaggttggctgggatgaatccacagcaggagagaggcaacctcgagtgtctttatgggaaattgagccattaac

SEQ ID NO: 75552 - DNA, 236 bp, Glycine max
  Clone ID: 700903985H1
cacacatagcagggtatgttcagctaagtgggaaccaaatgagtggtgaaatcccttcagaaattgggaacatggtgaacttcagcatgttgcattttggggataacaagttcactgggaaattccctccagagatggtaggtttgccacttgtagtcttgaacatgaccagaaacaatttttctggtgaacttccaagtgatattggcaacatgaagtgtctacaggatctggat

SEQ ID NO: 75553 - DNA, 254 bp, Glycine max
  Clone ID: 700904019H1
gataaagcattccatagcctcccataaaaatgaagaatactatcttctctgctctctttctactttgtgccttcaccacctcatacctaccttcaaccaccgcggtggtcgataccgacggtgatattcttcagaatcctggcacatactttatcttgtccgtttttcgacccggcggcggagtagaattcgccgccactggaaacgaaacttgccctctcactgtcgtgcagactctcttcgggaggggcttt

SEQ ID NO: 75554 - DNA, 248 bp, Glycine max
  Clone ID: 700904159H1
gctgtggaaacactcattgtatgggaaaatttggatattaataggtatgtgctgaaaaatggtactactagtgagattatcataaaacacttgaacaaggaacaagatgctgatcaaagcaacttccgtgattcagccacctctgcagagttggaagttcaggagaagatgcccttgcttgagtggtttgccaatgagtacaaaaaatttggatgctccttggaatttgtgaccaacaaatctcaaga

SEQ ID NO: 75555 - DNA, 250 bp, Glycine max
  Clone ID: 700904162H1
gtcgtgagagcgcatcaaccagtacagtgtttctccctccaactttgacattaatttttggagctgatgtgactcatccacatcctggagaggattcaagtccatcaattgcagcagttgtggcttcgcaagactatcctgaaattacaaagtatgctggtttagtttgtgcccaagctcataggcaggaactcatccaggatcttttcaaacaatggcaagatccagtcagaggaacagtgactggtgg

SEQ ID NO: 75556 - DNA, 146 bp, Glycine max
  unsure (1)..(146): unsure at all n locations
  Clone ID: 700904183H1
gagatagcgtctcttnatctagaccggttcgtantctaangtagtccgtagaattgngcgcgcngttgcaccttanaattgcgttgaggcggaaattgacagtntccgctaatcncntcttgtctcnacgttgtnntcactncagg

SEQ ID NO: 75557 - DNA, 245 bp, Glycine max
  Clone ID: 700904190H1
tttcattccaactgcaaaacaacaactcaattaagaaattcttctccggagccatggcagatctcaagtctacattcttgaacgtctattccgttctcaaatctgaactcctccacgaccccgccttcgagttctccgatgatgctcgccattgggtcgaccggatgctagactacaatgtgcctggaggaaagttgaaccggggactgtcagtcattgacagctacagattgttgaaagaagga

SEQ ID NO: 75558 - DNA, 272 bp, Glycine max
  Clone ID: 700904208H1
ttcctcttggctcccttaaactctctttctctctttgtgtgtctctttctctatttctgagtctcagtgttaggggggttattcattattcataataacttggctttatagcattttcccttttgatataaaatgggaaggcaaccttgttgtgacaaagttgggttgaagaaggggccatggactgcagaggaggataagaagctcataagcttcatcctcactaatggccaatgttgctggagagctgtccctaagctagcagggctttt

SEQ ID NO: 75559 - DNA, 277 bp, Glycine max
  Clone ID: 700904217H1
gccaaatatatgcaatctccaaggatcttgctacttatatatccatcaattggcccatattacacagatacgcaaatgaagacgtatctttaggttcatggttattgggcctagaagttgaacatgtcgatgaacgctctatgtgttgcgggacccctccagattgtgattggaaggcaaggacaggaaatgtgtgcgtggcatcttttgattggtcgtgcagtggtatctgtaagtcggtggagagaatgagagatatacacaaaacttgtgggga

SEQ ID NO: 75560 - DNA, 272 bp, Glycine max
  Clone ID: 700904219H1
gaagcgtgagatatatgatcagtatggtgaagatgcgcttaaggaaggaatgggtggtggcggtggccatgatccatttgatatcttttcatctttctttggcggtgggagtccctttggatcaggtggaagtagtcgaggtaggaggcagaggcgcggagaagacgtggttcaccctctcaaggtctctttggaggacctttatcttggaacttccaagaagctctccctctccagaaatgttatatgctccaagtgcagtggcaagggtt

SEQ ID NO: 75561 - DNA, 270 bp, Glycine max
  Clone ID: 700904223H1
gacgctccaagggtgacacatggttactgttcgtgggtcctgatagaattggcaagaagaaaatggcagcagctctttctgagctggtatctgggtccaccaacccaataataatacctctggcgcaacgccgtgcggatggagactctgatgcccctcatctgcgtggaaaaacagcacttgatcgaatagcagaggccatcagaaggaacccactttctgtcatcgtgcttgaggacattgatgaagccaacattcttcttcgtggga

SEQ ID NO: 75562 - DNA, 274 bp, Glycine max
  Clone ID: 700904230H1
ggtccaatctcaattactgttccagattctgactttcatgactttgacaaagataggtcagaggaatgcttcaggccaaagcaaatatgggccttgtatgatgaggaagatggaatgccacggttgtattgtatgatccgtgaggttgtgtctgtcaatccatttaagattcacatcagttacttgagttccaaaactgatagtgagtttggctcagtaaactggcttgattcaggttttaccaaatcttgtggaaatttcagggcttttaatt

SEQ ID NO: 75563 - DNA, 268 bp, Glycine max
  Clone ID: 700904236H1
gtgagttcttcaaggatgcactgaataaagttctgccatatatggactacgtttttggtaatgagactgaagcaagaacattttctaaagctcaaggctgggagactgataatgttgaggaaatagctttgaagatttctcagttgccaaaggcatcggaaacacataaaaggattacggttatcacccaaggtgcagatcctgtttgcgttgccgaggatggaaaagtgaaaatttaccccgtgataccgttacctaaagagaaatt

SEQ ID NO: 75564 - DNA, 267 bp, Glycine max
  Clone ID: 700904238H1
gacgccgatggcgccttcagcggctccgtcgtcgtcggtttcggagtacacacagaagaagatctacgtgagcaacgtcggtgcggacctggatccgcagaagcttctcgcgtttttttcacggttcggggagattgaggaagggccgttggggcttgacaaggccaccggaaaacctaaggggttctgtttgtttgtttacaggaatccggagagtgcgaggagagcgttggaagagcctcataaggatttcgaagggcacatttt

SEQ ID NO: 75565 - DNA, 266 bp, Glycine max
  Clone ID: 700904252H1
gaatccgtgactcgtcaaccctctagtcctctggggtcggcaataagagataaatgtggcaaagcttcacactataaatcacaagattcaatgtccacacctgagaagtctccaattcaatctgtatctcaagaagcaaggagtgagaccagcagtgaaggtcgaagtcctcatgagagccctatgaaacaaagaagagataagttgtccaatgaaataaacacgaatcctctgaagaaacaaagaacccaaagacctagccgtga

SEQ ID NO: 75566 - DNA, 265 bp, Glycine max
  Clone ID: 700904254H1
gcgacgctctctacacgctgaaacggagcctctcggaccctgacaacgtcctccagagctgggatcccactctcgttagtccctgtacttggttccacgtcacctgcaaccaggacaaccgagtcactcgagtggatcttggtaactctaacctatctggacatttggtacctgaacttgggaagctggagcatctacagtatcttgagttgtacaaaaacaacattcaaggaactattcctccggaacttggaagcctgaagag

SEQ ID NO: 75567 - DNA, 270 bp, Glycine max
  Clone ID: 700904262H1
gtcggacgaagagcaccatttcgagtccaaggcagacgccggtgcctccaaaacctaccctcagcaagccggtaccattcgcaagaacggctacatcgtcatcaaaggacgcccctgcaaggttgtggaagtttcgacttccaaaactggaaagcacggtcacgccaagtgccactttgttggaattgatattttcactgccaagaaacttgaggatattgtgccctcttctcacaactgtgatgttcctcatgtgaatcgtactgatta

SEQ ID NO: 75568 - DNA, 269 bp, Glycine max
  Clone ID: 700904264H1
tgaaacttgaaacttgaaaagcggcgtttgctccgaccgagtgcttcagaggagaagtaatgactgcgatcgcgggaacgcacgtttttggtgttgtgagttttcagctcaaacaagctgaaatgccttttgcatgttcttgcttaatccgcaagcgtattggagattctcctcagcgcaatgtggctctaagacgcagagtaaatggaacaattcttccccaaatcagagcccagaatcttccagattatgttccaaaatccgagttt

SEQ ID NO: 75569 - DNA, 264 bp, Glycine max
  Clone ID: 700904269H1
gtcatcctcaaaatttatgattatattttctttctctacttcgtcactacctctttctcatgagagagtatgttactgcgcaaagaacaacaaactaattaggtactgaccatttccgtctatatataaggccaataacccaacacgttctataaacatatagtgactaacctcccactgaagagtaattggtggattccagcaatggccgtggttcatggcagttgggtcaagcttgatcaaagaggagaagggcaaggagcg

SEQ ID NO: 75570 - DNA, 266 bp, Glycine max
  unsure (1)..(266): unsure at all n locations
  Clone ID: 700904279H1
ctcccatcagaggacaaagcttccgactttgcgggattcgttcgtatttgtttcagtgctgtgatggggaaggtcgcggtgggagctgccgttgtctgcgccgccgccgtatgcgctgcggcggcgctggtggtgcgccaccgcatgattagttcccggaagtggagtcgcgccatggcgatactgaaggagtttgaggagaagtgtggcaccccaattgtgaagctaagacaagcggctgangccatggatgtnagatncacgcg

SEQ ID NO: 75571 - DNA, 258 bp, Glycine max
  Clone ID: 700904304H1
ttttgcttaccatgcctcctactgcatgcatgttccagatgcatgtttttgtcatgtaatgcagattttcacgaggcggttttcttgtgtcttgaaaaactgtgtctgtgactgagtttttctttggtaggtttcttcacttcaccgttcccacttgcattattattattcaaagaccccagtagcagcatttgcatttccctcacgctgcacccaatgggcagagccataaggtggttgaaggggttgtttgggata

SEQ ID NO: 75572 - DNA, 254 bp, Glycine max
  Clone ID: 700904320H1
gttacaccctccccctggcagacaaagggaactgggttttacattctcatttccagtgaagcaaacatccatagcatctgggactctaataaagtggactaaaggtttcaatattgaggatgcggttggagaagatgtggtgggtggactaaccaagtccttagaaaaaattggtctggatatgcgtgttgcagctctagttaatgacacagttggaactgtggctagagctagattcagcaatcaggatgtca

SEQ ID NO: 75573 - DNA, 255 bp, Glycine max
  Clone ID: 700904321H1
cacattttgataattatttttctagttgataagccatggctactcgaggaaagcttgaggttgacgttgatctcaagtctaacgcagacaagtactggcaaacccttaggaactccactgaaatattccccaaggccttccccaatgattacaaaagcattgaggttcttgagggtgatggcaaatcacctggttctatccgccacataagttatggtgaaggttcaccacttgtgaagtcatcctttgagaaca

SEQ ID NO: 75574 - DNA, 251 bp, Glycine max
  Clone ID: 700904337H1
gttccttccattcctttcttccggatcacagggaaaataaaaaacaatggagttggacttgacaccaaagacagcagaagtgttgtttgagggagatggtggaggttactacacttggtggagttctaaagtgccactgctggccaagaccaatgttggtgctggtcggttagtgcttcagcctcagggctttgctattcctcattattcagatatatccaaagtaggttatgtgcttcaagggaacgatg

SEQ ID NO: 75575 - DNA, 250 bp, Glycine max
  Clone ID: 700904355H1
ggcgccaaaaagggtggattcattgtctccagccatctccaaggggaatcggtgcaggactggagagaaatagtgacatacttttcgtacccaaaaagagagagggactattcaaggtggccagacacgccagaagggtggagatcggtgactgaggaatacagcgacaaagtaatgggtctagcttgcaagctcatggaggtgttgtccgaagcaatggggttagagaaagagggtttaagcaaagcat

SEQ ID NO: 75576 - DNA, 242 bp, Glycine max
  Clone ID: 700904365H1
tggagactctctgctctgcattggtgttcccatctttcagaatcacaacttcagctttctccaaatgtggcatcagggcttccattgccgttgagcaacaaacttcgcagactaaggttgctctcctcaaaattggtaccagaggaagttccactagctctggctcaggcatatgagaccagagacaagctcatggcatcacatccagagctagcggaagaaggggctattcagattgtgat

SEQ ID NO: 75577 - DNA, 247 bp, Glycine max
  Clone ID: 700904367H1
aacggagccaaacagagtattgctcaggcagtgcttgcagtttcctcccctggagatgaggttattattccagctccattctgggttagttacccagaaatggcaaggttggctgatgcaacacctgtgattcttccaaccttaatatctgataatttccttttggatcccaaactcctcgaatccaaaattactgaaagatcaagactgcttattctttgttctccatctaacccaacgggatctg

SEQ ID NO: 75578 - DNA, 245 bp, Glycine max
  Clone ID: 700904369H1
cgcaactgaaaaggaaaaccctaagagatgaagagaactcctatcttgttccctctcttctttcttctttgtgccttcacctcatatctaccttcagccaccgctgatgatgatcatgtgtacgacactgacggcgataagcttcaatacggtgtcaattatttcgtgttgccagtgataagaggaaatggcggtggaatacaagtagcaaaagcaggaaacgaaacttgccctctgactgtggt

SEQ ID NO: 75579 - DNA, 249 bp, Glycine max
  Clone ID: 700904376H1
gaatggtggcatcgatccaaaccaaaaatcagattcaaattcaatggattgattattgtttcatgatctgatcactttgtcatatccataaagaagggagaaaaagaaagtttggaatttgcagaagctttgcaagtattttaagttgcaatagctgtgagaaatgaaccactgtgcaagatgttcaatataatacatacgtgtgttctatcagagagctgcttttgatcctgttctactacggtagat

SEQ ID NO: 75580 - DNA, 248 bp, Glycine max
  Clone ID: 700904377H1
cctaaaatggccactcttccctcctacgaccacctcatcttcactgccttagctttcttcttatctggccttattttcttcctcaaacacaaatccaaatccaaatccaaaaaattcaacctccctccaggaccccctggatggcctattgttggaaacctcttccaagttgctcgttccgggaaacctttctttgaatacgtgaacgatgtgagactcaaatatggctcaatcttcaccctcaagat

SEQ ID NO: 75581 - DNA, 249 bp, Glycine max
  Clone ID: 700904378H1
gttggaaatcaacaaaacttatcaatctctctttctctctgcggcacctcttgttaaaaatttgttcttttcaccgaaacccgtaaagggtcgtgagctagcttcttctcgatccatggtcctggtttttcttcctcttgttttcagcttctatatgcaaaaggggggagaccgaatgatgcaaaatatttataatgtagttacctcactaaccacctaagccatgaaaacaaccttcttctcgtttgg

SEQ ID NO: 75582 - DNA, 243 bp, Glycine max
  Clone ID: 700904383H1
ctctctcctactatcttttaaatccttttgtaccctcaactccataagccactagtacctcacaatgcccattgtagcaacctctcttctcttctttcttcttaatttatgcctcagaggcacttatgctgactatggaggtggttggcaaggtggtcatgccacattttatggtggaggtgatgcatctggcacaatgggaggggcttgtggatatggaaatttgtacagccaagggtatgg

SEQ ID NO: 75583 - DNA, 244 bp, Glycine max
  Clone ID: 700904384H1
actacactggccttttgttctcgtgtcaatttctaaatccaccaccacaccctctcttctattctctattattattatctccacacccttcactctctctcactcttctctcgaatcttccaccgcaatggccaccgctgccgagaaactctccgctctcaaatccgccgtcgccggattgaacgaaatcagtgagaatgagaagaacggattcatcagcctcgtcggccgctatctcagtggg

SEQ ID NO: 75584 - DNA, 243 bp, Glycine max
  Clone ID: 700904385H1
agagtttgaaaggaagggatgaaccggttgacatggcgggaggaaattcaccacatgttccgtatgcctcagagtcatatgtagatgcccctgaaagatacccaattcctcaagctgaactacatgatattgatgatccagcagctttctcttctaattaccaacacatatcagttgaagagaggaaagagcatcttgtggttgctcgaaacagtctcgaattgctctctagcatattgaatt

SEQ ID NO: 75585 - DNA, 245 bp, Glycine max
  Clone ID: 700904387H1
ctcgacctcagcaccgtttgtgtccgaaccaagacgcacacaggacggtgcgttcacccaacctacctcggtgggccccactttcccccccgaaccgtagcttcggagtgatcctttcgcccccctctatataatagcgccctcgcgactcacctcaacgcgtgagactctcgctggtggataacgaaatttcttagacaaaaaacaaggatcagaaccgttgaatcaagttgaggaagatggca

SEQ ID NO: 75586 - DNA, 248 bp, Glycine max
  Clone ID: 700904394H1
ctttccttttttctcatttgttctcttacttttgtctctccaaaaaccattctctttctccgatctctccgccatttcctacgaacctcagatggaggactctgaaaaatttgatgcaggtagtgaccaagggaatgcattggtgactccatattataccccatatccgaagcacttgttaccgaaatctggccttcaacctgtcaatatagagttttctcctagctcaggcggtgataactctgtgg

SEQ ID NO: 75587 - DNA, 256 bp, Glycine max
  Clone ID: 700904421H1
gtgagtttgttgatcgagataactagaaacagtgtgatgaaaatgaaggtccttgttttcttcgttgctacaattttggtagcatggcaatgccatgcgtacgatatgttccctctccgaatgaacactggctatggtgcccgtactccggaggtgaaatgcgcaagttggaggcttgctgtggaagcacacaacatctttggctttgagaccattcctgaagagtgcgttgaagcaacaaaggaatacatccatg

SEQ ID NO: 75588 - DNA, 255 bp, Glycine max
  Clone ID: 700904437H1
ctggattcagcatatgtgttatcttcaaccacgttgcaggagatgggagaacccttcatcatttcatgaagttttgggcctcagtttgcaaggccaaaggggatttgaatttccctggctctgtgcctctacccttatatgatagggacatagtgaaagaccccaaagggctcatgcacgtttacgtgcaagagatgagaaattcagcgttgcaaaataagcatttcggagggtttttacgtggtgtttacgctg

SEQ ID NO: 75589 - DNA, 254 bp, Glycine max
  Clone ID: 700904453H1
ccttcattcttctcctaaatcctaatccttcttcactttcagttctcagcatgggaagttctggaacaaccgactatggagcatacacataccaaaaccttgagagggaaccttactggccctctgaaaagctcagaatttccatcactggggctggtggtttcattgcctcacacattgctcgccgcctcaagaccgagggacattacatcattgcttctgattggaagaagaatgagcacatgactgaggac

SEQ ID NO: 75590 - DNA, 253 bp, Glycine max
  Clone ID: 700904458H1
ggtggatgaagctgctcacaaattcgatgagcatgcaccttctttggccaagcaggttgcaagccaagtcacttgtttggttcaggaagtgacacacaaagctgagaaagtagtgagtgaagctcaatctggaggggcacgagcagcagcaaattatgtagccactgagtccaagcaaattgtgctctttggttcagtgaaattgtggactggtctcaaccactatccaccattccatgcagtggctgagatg

SEQ ID NO: 75591 - DNA, 259 bp, Glycine max
  Clone ID: 700904478H1
gatctatatatgcatgaacactaataatagaagtctaactataatttttattatttggccaaatgaacatgaccaaagaattagctaaaacaatgccccagctagattagattggttatatcctgtattatataattcaattaaacagatttattattcaagagaaaatcagcatttcttctacagtactgagatttcctccaagagtattttatatataaatcaacattttgaagaagcagctgcagcagaaagaaat

SEQ ID NO: 75592 - DNA, 261 bp, Glycine max
  Clone ID: 700904480H1
ccgaaatggaaaaagatggaaagagagtggtgatcctaggaggtggcgttgcgggatccgtcgtggctaaatctcttcaattccatgcccatgtcacactcgttgatccgaaggaatattttgagattacatgggcaagtttgaggtgtatggttgagccatcttttgcagagagatcactgatcaatcacagagattacttaaccaatggcgacatcattacgtccaatgccgtcaatgttacagaaactgaagttttga

SEQ ID NO: 75593 - DNA, 262 bp, Glycine max
  Clone ID: 700904531H1
ccggaagaggaagatttctagtgacttcaacatgatgatggatcagaaaatatacacatgtgagcatccccaatgcccttatagcgaagttcgccttggtttccatgataggtctgctagggacaatcatcaattgaattgtgcatacagaaacagttctgcagattatggtggtggtcccaatttccatgctactgaggataagccagtcatattcccccagtcctttgttcaacccaacactacaacacagtctgcaagt

SEQ ID NO: 75594 - DNA, 167 bp, Glycine max
  Clone ID: 700904537H1
caagaacacagatccttcttttcttcttatgtattattgcttttttagtttgaaaaatgtattctttctcttttgctttctcacattcttcttttttgtataccagtaaacactaaacgagaacacatcttattattaatgcaattaagcttatacacaattgatct

SEQ ID NO: 75595 - DNA, 259 bp, Glycine max
  Clone ID: 700904547H1
caagcaatgcttacagccctgtacaagatgttgctgattcctgccggactggagctgcaaccaatgtcatctttggccttgctctgggatacaagtctgtcattattcctatttttgccatcgcaatcagcatttttgtgagttttacttttgctgcaatgtatggcattgctgtggctgcccttgggatgctgagcaccattgcgacagggttggctattgatgcctatgggccaatcagtgacaatgcaggaggtat

SEQ ID NO: 75596 - DNA, 262 bp, Glycine max
  unsure (1)..(262): unsure at all n locations
  Clone ID: 700904551H1
tccggatttcgttttgctttgttcaggtagccagccagtcatggtgctcttcaatgtttcacgcgtagagnccacnnccttacgatggncngaagcctggaacctctggtctccgcaagaaggtganagtgttcgtgcaacctcattacctccataactttgttcagtcaacattcnnngcattnactgtggataaagttngaggtgctncgctagttgtntctggtgatggtcgtnattttcaaaggaagctattcagatt

SEQ ID NO: 75597 - DNA, 258 bp, Glycine max
  Clone ID: 700904554H1
gcaatggacgcccacatcaaagaaggggacgtgttcttcattccaaggtactttgccttctgccaaatagcatcaaggggtgaaccacttgagttctttggcttcaccacctcggctcaaaagaacaggccacaatttctggttggtgccacgtcactcatgaggaccatggtggggcccgagcttgcggctgcatttggtgtgagcgaggagaccatgaatcgcgtggctagggcacaacatgaagctgtgattcta

SEQ ID NO: 75598 - DNA, 257 bp, Glycine max
  unsure (1)..(257): unsure at all n locations
  Clone ID: 700904560H1
aagaaagatccgtaaattaacattctctccctcccttcgctataatagcaagcttttcaagcatatttctggggtttggtcccttttccttgtttggggttttcttgggaaaaaagaagtaattaggtataataatagtataactaaagcaaaaaaaaagacagtaatatggnaaggggtagggttcagctgaagaggatagagaacaagatcaatcggcagtaactttctccaaaaggagagctgggttactccaa

SEQ ID NO: 75599 - DNA, 261 bp, Glycine max
  Clone ID: 700904566H1
gtgctcgtgacattccaccagaagacttgaacatgatgtctgatcttgatggccagcagcagcaccatctgaatgacttgagctgttacatacagcctcgccccggtgccagttctgtgagtagatctggtcggtccaagaccctaactccatcaaatctggaagagctcttttctgctgagatttctttgtctccccggtattctgatccagcagccggttctgtgttttcccctatcacaaatcagctgttctcaatca

SEQ ID NO: 75600 - DNA, 257 bp, Glycine max
  Clone ID: 700904572H1
cgcgctctcccgagggctttgtcggaggattcttacgcctgaacgagtcctctccttgcgtagttggtgctcaattaaaaagaatggggggagatgcacagaagaagagaattgccataattggcgtgtctaccttcttgctggtggccatggtggtggcagtgacagttagcatcaacctcaataacaagggatcaagctatgattcaaaggaagaaagcaaatccagtgtagcttcctcgatcaaggccgtgaaa

SEQ ID NO: 75601 - DNA, 255 bp, Glycine max
  Clone ID: 700904580H1
cgattatggcctgggaagaacattggaagtgataagtgataaaacagagtttcgttgaatctgcactaaaaccctacgcacacatcttggtgtaagtccaatcgatatagcagcaatgtctacgcttgaaattgaagctcgagatgtcatcaaaattgtgcttcagttttgcaaagagaattcgttgcatcagacttttcagatgctgcagaacgaatgccaggtttctctgaacactgttgacagcattgaaac

SEQ ID NO: 75602 - DNA, 261 bp, Glycine max
  Clone ID: 700904615H1
aaaagagattagtggagaaatacgacaacacgaatccgtcgtttgttcaaaccgaaacgacaaggcagttcgctttccctttctttctctgagaaggcgtcgtaacagaacacgacgattccccaaggaagtgggcaaaaattgaagatagggatcagtgacagagagagataacaaacgagttataattggttaagtagctcaaaggatacattttgatcttctgctgacatctgctgggtacaaaatgaaagcagacaa

SEQ ID NO: 75603 - DNA, 260 bp, Glycine max
  Clone ID: 700904632H1
cagagaaggagaaactagacacaatttatgagactgaaggtgttagccttgaacatgtgaaggcagctgcaaaggagaaaagcaacattattgagcatttgaaaagaactgagagcaatagggaagcactggctgctgcagttcaggatctgaggaaaacgaatgaactcgcatcgcaaatggaagcaagagaaaagagaaagttaggagcttcttttaaggacgatgacaaagtagactcttccaagagtttttccctt

SEQ ID NO: 75604 - DNA, 260 bp, Glycine max
  unsure (1)..(260): unsure at all n locations
  Clone ID: 700904667H1
ctttattctctcacacaaaataatgncnacagaagcttggcaacangtctcatgatcctnaagtgagaaagaagccatngacaatggaagaagacttaatcttgatcacctatattgccaatcacggggaaggggtttggaactctttggccaaggctgctggacttaaacgtaccggaaagagttgccggctccggtggctaaactacctccgtcctgatgttagaagagggaatattacacccgagaacagcttttga

SEQ ID NO: 75605 - DNA, 251 bp, Glycine max
  unsure (1)..(251): unsure at all n locations
  Clone ID: 700904677H1
ctttattctctcacacaaaataatggnnaagaagcttggcaacangtctcatgatcctgaagtgagaaaggggccatggacaatggaagaagacttaatcttgatcacctatattgccaatcacggggaaggggtttggaactctttggccaaggctgctggacttaaacgtaccggaaagagttgccggctccggtggctaaactacctccgtcctgatgttagaagagggaatattacacccgaggaac

SEQ ID NO: 75606 - DNA, 278 bp, Glycine max
  Clone ID: 700904813H1
gaaagggcacttcaacagagcacccttaaggcatggagtggaaaagaggagaatgtgaagaaggctcaggaagcccttttggtaagagccaaggccaactcagaggcaactctgggaacctacaagggtaactcaaagcttgctgatggtgcctcagagagcctccatgttgaggactacaagtactgatcaatctaagtgcgggtaggaatcggtattttatgggtacaaccgaattttcttgttaatgagtattgtgcttcgatcttcccagaata

SEQ ID NO: 75607 - DNA, 274 bp, Glycine max
  Clone ID: 700904831H1
catgctcatgttcaaatctggctcttctattccatctagaggttctgttgactttgcttcagcagtcagaaaattggcttctcaggattctggtatatggaagtatgataaaaatggttctggtgatgcttccactggctctagtaggggtttaaatgctctggctagtgcctacaatggtggacaggggagagtcaacattggtgatagattacagagtcgtggttctgctcgggcagctcctgtttggcttgaaactggtgacgcattgcaa

SEQ ID NO: 75608 - DNA, 272 bp, Glycine max
  Clone ID: 700904850H1
gtagctaaattaattggctgtagcattgaagatctcaagttgacactatcaactcgcaaaatgaaagttggtaatgataatattgtccaaaagttgatgctatcacaggtaaaatgaccactctgttactagaaatgttggcctgaaattatggatggaaaaaatgcaactttctagttacttgaaatattgggaaaatgaaggtgtactgcattcctcagtgcatatggcaatttgtttagtttgttatttgaagaaaaaggaaatgaaaa

SEQ ID NO: 75609 - DNA, 266 bp, Glycine max
  Clone ID: 700904859H1
gagaaggctctctttagggcactaaagactaagcatgctactcccaagtatggtcttatataccatgcttccttgattggtcaggcagctccaaagttcaaggggaaaatttcccggtcacttgcagcaaagacggcattggctattaggtgtgatgctcttggagatagccaagataacaccatgggattggagaacagagccaagcttgaagcacgattgaggaaccttgaaggcaaagagttaggtcgttttgctggttctgc

SEQ ID NO: 75610 - DNA, 69 bp, Glycine max
  Clone ID: 700904896H1
gtcttctcgtgttgactggaaaatgtcgtacccttgattcccataaagagctattgaaactattatatt

SEQ ID NO: 75611 - DNA, 252 bp, Glycine max
  Clone ID: 700904908H1
ctgatttgcgaaagatatcatgttgcagtgcttagaaggacttaagcctttatttgcgtccatattgcgatgttgtgacctggatatatataaccagccaagaggccttgaagatcctgaacttcttgctagagagacagtgttcagtgtaagtgaaatagaagcactctacgagctcttcaaaaagattagcagtgctgtaattgacgatgggttgattaacaaggaagagtttcagttggctttgttcaa

SEQ ID NO: 75612 - DNA, 253 bp, Glycine max
  unsure (1)..(253): unsure at all n locations
  Clone ID: 700904909H1
gtgttgtgtgagatataagagcgtagaagatggtgagactgagataattgancatcaatgagtggaagctgatcgatgngagtcgccacacggaggcatgccacgtgtgctgccagaagctgctcgtacagcggatgagtcgctatctccgccttcagcttccacacaacatacgantccncttctggcatcacacgtggcatgcntngcgtntgggantnccnntngtaatttannccgnanngtgcncatt

SEQ ID NO: 75613 - DNA, 252 bp, Glycine max
  Clone ID: 700904912H1
tagattatcattatctggtgctcctggtgggagagagtgagtcgctatctatccactaccataaaatcctatctttaccatgaatggctagagtaggagttgacccacttttgatgtaaccgtttaacaaccattttgatgggatggatacagtcttttgttttattcccatgtacaaatagaccctcatggctctgggcattgggcaataaccaaatttcagtgattgtttagcggactcgtcgaatagat

SEQ ID NO: 75614 - DNA, 257 bp, Glycine max
  Clone ID: 700904914H1
ggcaagaatatcaaattggtctcttgtcttcctcctcatctctacactactccacatagagcccagcctctcaagcccaagcccaagcccaagcccaagcccgttcataaaatcctcctgcagcagcacccagtacccagccctctgcgtctcatccctctccgtctacgcctccagcatccaacaggaccctcaccaactggttcagacagcactctccctctccctgaaccgcacccaagccaccaaaaccttcg

SEQ ID NO: 75615 - DNA, 257 bp, Glycine max
  Clone ID: 700904915H1
ctcaactcaagtaagggttttctctttgagaaaatcgtatcttacaccttttggtgaccactttgagtgagagaagagaaattaagagagatactcaaattagattcaagagagatggccatcaaccatgaaacttgggctttcattttcggtcttctaggcaacgtgatctcctttatggtgttcctcgctccattaccaactttttaccaaatctacaagaaaaaatctacggatgggtttcaatcactacctta

SEQ ID NO: 75616 - DNA, 252 bp, Glycine max
  Clone ID: 700904920H1
ctatgcctaactcttcctttgtttttgttgtccttcttcaaataccgtaaaaccttcaagaatccaccacttccaccaggtcctagaggccttcccataatagggaatcttcatcaactagatagtccttctcttcatgagcagctatggcatctctcaaagaaatatggtcctttattttcccttcaatttggattaaggccagccatagttgtttcctctccaaaattggccaaagaggtaatgaaagac

SEQ ID NO: 75617 - DNA, 252 bp, Glycine max
  Clone ID: 700904921H1
agaagatggagatgtatcagatctggagcaggagaatagcgttgggagcgttcgcgtttgttctgcttttcctatcggcctcagcagacgacgtcgttgtgctctctgaagataacttcgagaaggaagttggtcaggacagaggagctctcgttgagttctatgctccttggtgtggacactgcaaaaagcttgctccagaatatgaaaagcttggtagcagcttcaagaaagccaaatctgttttaatcg

SEQ ID NO: 75618 - DNA, 253 bp, Glycine max
  Clone ID: 700904926H1
ctttcaatctgttgatagatccagtcatcattcttcaaccacagtttcatctatggccaagtctctgctccctacgaagaggaggctccatcttgatccttccaacaagctctactttccatatgaacctggtaagcaagttaggagtgcaatcgcaattaaaaacacttgcaagtctcatgtagctttcaagtttcaaacaactgcacccaagagttgttatatgcgccctccagctggtattcttgcccct

SEQ ID NO: 75619 - DNA, 255 bp, Glycine max
  Clone ID: 700904929H1
aagagcaagaattctcctaagccaattctctattggttttcttctgattggttcaccattcaacgagggtccttggaaaatgtcaccttcacatctgatccagaaacttttgaacttggatttgattaccatgtggccaattcttcatctggtggcaatagaatccttggcaggccagtgaacaatagcaccataacatatctcaggcttggaattgatggcaacattaggttctacacttacttccttgatgtg

SEQ ID NO: 75620 - DNA, 255 bp, Glycine max
  Clone ID: 700904930H1
ggattggtgaggtaaacttgaattgaagtgaagaaggagatggctgcaacctcttccttgtgctcatcgaccctccaatcccagatcaatggattcttccttcacaaaacctctctttcccatactccttccctcactttctccaggaggaaaatttcaaccacagtgaaggctacatctcgagtcgacaagttttcaaaaagcgatatcattgtctctccgtccattctttctgcaaacttttcaaaattggga

SEQ ID NO: 75621 - DNA, 251 bp, Glycine max
  Clone ID: 700904937H1
cgaacgatccacgaaagatgttggctgttttcgacaaatcggtggcaaaaagcccagagggtctgcagagccctcactcagattccgtctcagccctaaaagacggttttatcgcagaacacttctcttccgttcaccctggttccgtcaccgtcaaccttggctcttccggtctcttggcctattcccttcacagacagaacccccttctcccaaggctgtttgcagttgtggacgacattttctgtttg

SEQ ID NO: 75622 - DNA, 250 bp, Glycine max
  Clone ID: 700904938H1
ataatggggtctatgggtaactcaaatccaaatctaaatccaaatccaaatccaaatccatggactccaaaggattgttctgaaggaatttgcagcatctattgtcctcagtggtgttacaaagtgtactctcctccccctccaattctactaggtgatggcgatgatgacccttcaggctttgaattctctcctctcatagttgctgtgattggaatcttggctagcactttcatcttggtcacttact

SEQ ID NO: 75623 - DNA, 250 bp, Glycine max
  Clone ID: 700904940H1
tgtgaatcagcaccacattcacctgagctttttgtgaggattccaaagcatggcttcccttgcagcatccactgctgctgcttcccttggcatgtcagaaatgcttggaaaccccatcaacctcagtggtgccacaaggccagctccatctgcctctagccctgcctccttcaagactgtggctcttttctccaaaaagaaggctgcacctccaaaaaaagctgcagctgctgctcctgccaatgatgag

SEQ ID NO: 75624 - DNA, 252 bp, Glycine max
  Clone ID: 700904941H1
gtttctcttcctccctggaagaaaaagaagagtcaccgctacgacgccgttcgtgcttttttgaggtgccacagtcatgtttgggcgtggtggaccaaggaggagtgacaactccaaatattatgatattctcggggtttccaaaaatgccagtgaagatgaaatcaagaaggcctatagaaaggctgctatgaagaaccatccagataagggaggagatcctgaaaagttcaaggagttaggtcaagcata

SEQ ID NO: 75625 - DNA, 250 bp, Glycine max
  Clone ID: 700904944H1
gcttggaataattcctggatttggaggaacacagcgacttcctcgtcttgttggtttgacaaagggacttgagatgatactggcttcaaaaccagttaaagggaaggaagcttttagtttggggcttgttgatggtttggtgtcacctaatgatttggtgaacactgcacgccaatgggcactggatatgttgggccaccgacgaccatggattgctagtctttataagaccgaaaaattagaacccctt

SEQ ID NO: 75626 - DNA, 253 bp, Glycine max
  Clone ID: 700904946H1
gtacttttgatagagaaacttacaaaacattacttcaagctggagaatcaccaccatgccatcacacaccttcaaccagaggagttatcatcctcactgcttgcatttaaatcccatatgtccaaatcaattgaccaactagcatcggatttgaaacccggatcagagacccccctgtccttaacatggtttggaaagtgtttcggcctcttgcccttcatcaacaaggcttttggaaagcttgttgtggata

SEQ ID NO: 75627 - DNA, 256 bp, Glycine max
  Clone ID: 700904948H1
tcaacttccctaagcactagcaccacacaatggtcattgcagcaacccctcttctcttctttcttcttaatttatgcctaagaggcacttatgctgactatggaggtggatggcaaggtggtcatgctacattttatggtgggggtgatgcatctggcacaatgggaggggcttgtggttatggaaatttgtacagccaaggctatggaaccaacactgcagcactcagcactgctctattcaacaatggcatgag

SEQ ID NO: 75628 - DNA, 251 bp, Glycine max
  Clone ID: 700904954H1
cgaaactcttgattaccataaccatgtcaatggcaacaacatcccctcacaccgccctcttccaaaaccgcaccaaccctttcactctctcctccttcaaacccacatccatcaaatgcgccacccaactccatacccaagccccgcccctcacccactcccaagatcgcgtcttcaacttcgccgccggtcccgccaccctcccggaaaacgtcctcctccgtgcccaatccgagctctacaactggcgc

SEQ ID NO: 75629 - DNA, 250 bp, Glycine max
  Clone ID: 700904959H1
ctattgtgttggtatgtagctggggctcttggagcatacccagatgaatggctgccaaaaaatggaaatcactttgtttttgctcttatgttttcaatatctgttgtggtgattgcatgtccatgtgcacttggtttggcaacaccaactgctgtcatggtggcaacaggggttggggccaacaatggtgtgttaattaaaggaggagactccttggaaagggctcagatggtgaagtacgtcatatttg

SEQ ID NO: 75630 - DNA, 252 bp, Glycine max
  Clone ID: 700904960H1
gtcaaagcaaccatcgagaggtacaaaaaagcaagttcagattcgtctggcgctggatctgcttctgaggctaatgctcagttttaccagcaagaagcagataaacttcgtcaacaaattagtaacctgcagaataacaacaggcaaatgatgggtgattctttgggctctctgactgccaaggatctcaaaaatctggagactaaattagaaaaaggaattagtaggattcgttcaaaaaagaacgagctg

SEQ ID NO: 75631 - DNA, 254 bp, Glycine max
  Clone ID: 700904980H1
ctccatactatatgtcttcccagctccagtttggaggtggaaaattatcatattaaaagtaatcaaaaatgatcttgtaaaacttagaatacagcaatataaataactacttctccgaagcagggacctggaatacttgaatgtgaagaacagaacaaggggcttcttccaagagttgtagaaggactttttgattccataaattctttggatgaagagaagacatattcaattaaattgtcaatggtacacag

SEQ ID NO: 75632 - DNA, 250 bp, Glycine max
  Clone ID: 700904982H1
ctcttacgttatattaaaagctatttaaagtgttcccctcactcaatattatttatgtgttaggagaggtcaattgcctttgcatattctatctcatatcgatcaatttgtaataatggccagtgagagaattctcaagccatctaaatggttctcaaacaaatcactaaagcttagtcttcatcgtggaagatcaagatcctcctccaataactcattatcgagtaactctcccagtccaagatcaccc

SEQ ID NO: 75633 - DNA, 247 bp, Glycine max
  Clone ID: 700904986H1
cgtttcgttcaactttcaacgccagttcacactctctgcttcgcgtgtaccaacaagtgcaagttcgaatcaatggccagcgctcagctcacagcaatagcgtcatcgatctctacggcgtcgtttgaagggcttcgaccttccgctgttcagtttgcttccacgggcagaattagaattggcaatctctcccaaaggtccttccggggcttggttgtcaaagccgccaccgttgttgcccccaaat

SEQ ID NO: 75634 - DNA, 249 bp, Glycine max
  Clone ID: 700904987H1
cagcagcctcaggaggagaataaggatgtctcacaggaagttcgagcacccaaggcacgggtcactgggatttctccccaggaagcgtgctgctcgtcacaggggaaaagtgaaggcattccccaaggatgacccatccaaggcacccaagctcactgcattcttgggttacaaggctggtatgactcacattgttagagaggtcgagaagccaggatcaaagcttcacaagaaggaaacatgtgagcc

SEQ ID NO: 75635 - DNA, 248 bp, Glycine max
  Clone ID: 700904988H1
caaatgtttgcagaatgctggtctgagggatattgcacacatagcggataccttttcaacaaaagggctagatccacaacaaattgaatcaatatcaaggataagatatattgcgcatgaatgtctgagagaccaatttggtggtttggtcatggcgtcagggagcccccaagttgaactaggaaaaagggtcagaggaaaggagagggttagaagaaaaggaggagcgggtaaacgactgcgaaagg

SEQ ID NO: 75636 - DNA, 253 bp, Glycine max
  Clone ID: 700904995H1
caaagccttctccttaaccactgagagccttggttgtgttcaaagctctatatttaggagcatccatggaaatatgatttgttttccacgtgggattttggacccacgagttcatgttcatgaagaacatctatctttcagtgaatgacaacttcagatgccattgctccatgatcatatggtatggagcatggcagaggcggtcgagtaaggaaaaagaggagctgacctcaacccttgtaagttggacaat

SEQ ID NO: 75637 - DNA, 273 bp, Glycine max
  Clone ID: 700905001H1
ctcgaaccctctctttccggcaactaggttaaagttcatcaatggcaggtcgtggcaaaaccctaggatccagcgccgccaagaaggccacctcaaggagcagcaaagccggcctccaattccccgtcggccgtatcgcccgtttcctcaaggccggaaaatacgccgagcgcgtcggcgccggtgctcccgtttacctcgccgctgtcctcgaatatctcgcagccgaggttttggagttggctggaaacgctgcgagagacaataagaaga

SEQ ID NO: 75638 - DNA, 182 bp, Glycine max
  Clone ID: 700905080H1
aactcttgttcttctttaccgattcaacaacagctcagcagtggtagtacccatgagcctgcagaatctgcactttttttgccttggcttctattctctcctcactttgaatcggaagatatcctttccattcaaggcagcaagcagaagtttcaacgaaagtctcctctcccacacagcta

SEQ ID NO: 75639 - DNA, 160 bp, Glycine max
  Clone ID: 700905088H1
ccgccatgacggttgcaagcgccgcctcttcacgcaccaagaggctcgtcaagctaacgctctcgctcctccgcctcggcttcaactcctccaaatggtacttcactgcaccttgaactctctctctttcgcactaaacgacgcacgaataaacaaaacg

SEQ ID NO: 75640 - DNA, 275 bp, Glycine max
  Clone ID: 700905102H1
caactccactcaattgtatgcattgatccatggctagatacattaatattgtacttttgggaatagtgttggtagtggtgagattgaaaggtgcagaggcacagcgggcgttctttgtgtttggggattctcttgtggataatgggaacaacaactttttggcaactacagctcgagcagatgctcctccttatggcattgattacccaaccggaagacccactggccggttctctaatggctacaacattcctgacttcattagtcaatcactt

SEQ ID NO: 75641 - DNA, 276 bp, Glycine max
  Clone ID: 700905103H1
gtctacacgcactcttatgagaaagagcagaaataccagacattcaaagaaaacgtgcaacgtatagaagcctttaaccatgcgggaaacaaaccttacaagctaggcatcaaccattttgctgatctcacaaacgaggaattcaaagccataaatagattcaagggtcatgtgtgctccaaaataacacggacacccacatttaggtatgaaaatatgacagcagtgccagctacattggattggagacaggaaggagctgtcacacccatcaag

SEQ ID NO: 75642 - DNA, 272 bp, Glycine max
  Clone ID: 700905104H1
gagagttttgctgcaaggacttgacacaaattgtgtaaatgtctgtggcttttaccaacctctcttggtggttgtggagtggaaagcatcaagagccaagaatcccaaatgggccttctataaattcttcggccgattcaaatttgtgggaatcggatgttttgaggtttcctttggttcaggcgaatgtggggtcctcatctagaaaggtgaagcgcaaatggcatagtaggggggagaggaaggtggatagggaatatgatgttgttctg

SEQ ID NO: 75643 - DNA, 269 bp, Glycine max
  Clone ID: 700905106H1
caaagttcggtggttcaatatgtatatagacgtgttgtttcaacctgatttttgcgatacagactcaagtaccaatcacttctgctaaggagttatctttgcttactgaagaatattgcattcctgccatgtaccaattctcggtctcttccagtgttagagcgtcggtaggatcgaagatggttggcatgtagccatttgttttggctgggtgataatatcttaatagaatatggaaatgttgtgacgaactctgcagtagcagttct

SEQ ID NO: 75644 - DNA, 267 bp, Glycine max
  Clone ID: 700905112H1
gccattctcttcagtttaaagttacatagtttttcattgttttacttaatctacaatggctgcttcaacaatggctctctcttcatcatcattggctggccaagctatcaagcttgccccctccacccctgagcttggtgttggaagggttagcatgaggaaaacagcctccaaaactgtttcctcaggaagcccatggtacggcccagaccgtgtcaagtacttgggcccattctcaggtgagcccccatcctatctcactggtga

SEQ ID NO: 75645 - DNA, 268 bp, Glycine max
  Clone ID: 700905113H1
gcttaccaaccagggaataagagtgatacaattacagtgggcctaaaaaaacttgaacctagtttattctgtgaaggaagggaaacttattcaatatatcaacagcagaagcaaggtcaatgaatctctagagcaggcatataaattttacgctgggtatggaaatgatggaacagaaactgctcaggcttctggagcatatattttccgccctgatggttcaccctctcccatcaaatccaacgggaagtctcctctcacagttttt

SEQ ID NO: 75646 - DNA, 273 bp, Glycine max
  Clone ID: 700905115H1
cacaatcataatctcaatcacctcaatttcacttctctgctccaaagtttcaatcttttctctgaaatcccaaatgggcatcgccacaatcaaaatgggaggcaactccgactccaactgttccatcactccacgccattacaacacccacaaggtgttccttttctgcaactacattctcttgggtgcagcctccagctgcatcttcctcaccctctccctgcgcctcattccctctctatgcggcttcttcttcatccttcttcaggtctt

SEQ ID NO: 75647 - DNA, 272 bp, Glycine max
  Clone ID: 700905118H1
gttattctcctttgaaacacttgccccgtagctgcaaaagctaaaacacttagtgaatgagagcaataatgggctctggaaatatacgaccttcttcttccggctgctctcacttgtctatctccgagctccgcgagaagcaccattgggagctagaaaatctgacactaacctcacaacctttcaaaacattgaaattcttcacattagctgttattcaatacatcaagaaaacatcattatatctattggcaaaaggtggatgggttatg

SEQ ID NO: 75648 - DNA, 265 bp, Glycine max
  Clone ID: 700905125H1
gcagccactatagtaaacaatcttctctatctaaaatggagtttgttctaaactacctaaatgccactgccattggagttctttctctaaccctcttctttttgtttttgtataatcccttcaaatttgcattaggtaaaaaagaggctcccgaagttgcaggtgcatggccaatacttggtcacctaccactattgagtggttcagagacacctgatagggttttgggtgctttggctgataagtatggacccatattcaccat

SEQ ID NO: 75649 - DNA, 268 bp, Glycine max
  Clone ID: 700905129H1
cagaaaccccacacccaaccctaacgcccctcccccaactcccaacctcaccatccccgacctctccctcgccttttccgctatctccgccgcccacccaatctccccctccgtcgcccaccgcgtcatcgagaaatgcggcggcgtccgccacggcatccccttcctccaatcccttgccttcttcaactggtcctcctctctcgacggcttccccgcctcgccggagccctacaacgagatgctcgacctcgccggaaagttgaga

SEQ ID NO: 75650 - DNA, 263 bp, Glycine max
  Clone ID: 700905139H1
gacaattcaacttaagagatcaatatggccaccaccactacccagcctccctctaatatctgttttttccttctgttgttgcttctagcacactttcatttgggcataagccaacttgagctgaattactactctaaaagctgcccaaaagctgaagagatcatcaaggaacaagtcacacaactatataacaagcatggaaacactgccgtttcgtgggtcagaaatctcttccacgattgcgtggttaagtcatgcgatgc

SEQ ID NO: 75651 - DNA, 263 bp, Glycine max
  Clone ID: 700905143H1
gcaaagcaaaagatgttgttgaatactctgttactattatgggtcaaggccaagttagaccagtccattctggaggttctccaaccagactagtcctctccaacttggtttctttttatacaaccttcccactctcattcttcaatcaatccaacccaaaagaccctttctttcaatattcatagcatcatcatgggtgactcttccgcggctaatgaccatttgggtgaatccccggccgttgagttaaccggaaagataat

SEQ ID NO: 75652 - DNA, 259 bp, Glycine max
  Clone ID: 700905157H1
cgccggtgcactacaaatacaaccccgtcaagaccatcaagacgaatgtgatgggcacgcttaacatgcttggccttgcgaacgaattggggctaggtttctgcttactagtactagtgaggtttacggtgatccgctggagcatcctcagaaggagacttactggggaaatgtcaatccaattggtgagaggagctgttacgatgaagggaagcggactgcggagacattggccatggattatcatcgaggagctggt

SEQ ID NO: 75653 - DNA, 260 bp, Glycine max
  Clone ID: 700905158H1
ttaagatggaggggaaggagcaggatgtgtcgctgggagcgaacaagttcccggagagacagccgattgggacggcggcgcagagccaagacgacggcaaggactaccaggagccggcgccggcgccactggttgacccgacggagtttacgtcatggtccttttacagagcagggatagcagagtttgtggccacttttctgtttctatacatcactgtcttaaccgtcatgggagtcgccggggctaagtctaagtgc

SEQ ID NO: 75654 - DNA, 259 bp, Glycine max
  Clone ID: 700905160H1
tccacacgctttctccagagaccttcttcctagatacttcaagcacaacaatttctcaagcttcgtcaggcaactaaacacttacgttgcagctgttgcttggacaagaatctatggtagtgatagcaatcgttatttactcaagattattcagaagccgtagaatggatacgaattcgaagtagctggtctccaagaatcataactgattgttgcttttgaaccaagatccggttggtggttaaccttgtcggtttga

SEQ ID NO: 75655 - DNA, 262 bp, Glycine max
  Clone ID: 700905161H1
gaagaagcgaaacaacttctcacgcgctgtctcaatcttggaatctctgctctaaattctaatcttcccgccatagatgtcgtcgaacttgtggtgagggaattggaaacggatccgctgttcaattcgggccgtggatctgccctgacagaaaaaggaacggtggagatggaggctagcatcatggatggtccaaaacgacgatgcggcgccgtttcgggtcttaccaccgttaagaacccgatctcgcttgctcgtttgg

SEQ ID NO: 75656 - DNA, 258 bp, Glycine max
  Clone ID: 700905183H1
caagaacagattcacattgccgccatttttgacattgaagaactttgaaggattggaccttggaaagatggacaaagctgatgactctggacttgcttcatatgtttctggtcaaattgatcgtactttaagctggaaggatgtgaagtggcttcaaacaatcaccaaactgccaattctggtgaagggtgtgctgactgctgaggacacaaggatagctatacaaagtggtgcagctggaattatagtgtccaatca

SEQ ID NO: 75657 - DNA, 254 bp, Glycine max
  Clone ID: 700905186H1
ctatgctgtgtcaatcaccattcgtatagtgtttggtttcatgtttattgcattgatttggaaatttgattttgcacccttcatggtgttgattattgccatactaaacgatggtaccatcatgacaatatccaaggatcgagtgaaaccatctccaatgccagacagctggaagctgagggagatatttgccactggtgttgtgctaggagcttacatggcactaatgacagtagtatttttctggctcatga

SEQ ID NO: 75658 - DNA, 260 bp, Glycine max
  Clone ID: 700905203H1
tgaagagcgaagagaatggctcccaagggtttaatctttttggctgtgttatgcttctcagcactgtcactgagtcgttgtcttgcggaggataatggacttgttatgaacttctacaaggaatcatgccctcaggctgaagacatcatcaaagaacaagtcaagcttctctacaagcgccacaagaacactgctttctcctggctcagaaacatcttccatgactgtgctgttcagagttgtgatgcttcactgttgct

SEQ ID NO: 75659 - DNA, 252 bp, Glycine max
  Clone ID: 700905213H1
tgcttggaaaggtaattttagctattcttcttgattgaattacttggaaaggtagtgtttgatattgaatttattctgctttcttcgtcgtttctcctcgattttattggtgttttgaatatatttaatgattgatattttgtcatcaaactcatttttgtacaaatcagatgaaggatttgctcaagaggaaaccatccattgttgagctgagtggcattagcaagtcacgacttgactgctttgcaactc

SEQ ID NO: 75660 - DNA, 253 bp, Glycine max
  Clone ID: 700905214H1
tgcatccctcttgatttgtagtttgttttgtgctttagataaaagttctgccaaatcaagaggggttttaagatcatagtgtgtgttttgcaacaatggctaagttctttgctgctatgatcttggcactctttgccatttccatacttcaaacagtggtaatggctgctaatgaacaaggaggccacttgtatgacaacaaggtatatatatccttacctattcttcactctcttgtctctctttctttgtg

SEQ ID NO: 75661 - DNA, 246 bp, Glycine max
  Clone ID: 700905285H1
cacccaggaaatctcccaaggacttatacgctaacccatagtgatataaccgctaagctcaccttggcaatctctcaaaccataaataattctcagctgcaggggtggtacaacagatttcaaagggacgaagtggtggcacagtggaaaaaggtgaagggaaggatgtctctgcacgttcactgccacattagtggaggtcattttctcttggatatattagcaaggttaagatacttcatcttc

SEQ ID NO: 75662 - DNA, 240 bp, Glycine max
  unsure (1)..(240): unsure at all n locations
  Clone ID: 700905319H1
atttcaagggctgaaacatctatctttaactgtattctccctttgtttcctcaccagttgattcangttgcaaacatggcttttccagacccatccatgtcagtttctccacagaggaagatgggaagggggaagattgagatcaagaggattgagaacactaccaatcgccaagtcacattctgcaagcgcaggaacggcttgctcaagaaagcatatgaattatctgtgctttgtgat

SEQ ID NO: 75663 - DNA, 270 bp, Glycine max
  unsure (1)..(270): unsure at all n locations
  Clone ID: 700905349H1
ttcagccctgcctgttttgcntncattctgttttcanagtgacgaacttctgnagaaatngcaaatcatcctttgacacactctcactctttccgcgagaggtttgntgngactctcactggtcacaggaacganattntggcccttctgtcaaggcttgaagccaagggcaagggnatcctgcaacatnaccaagtggttgcagagtttgaagaaatccctgaggagagcngaaagagactccaagaggtgncnttggagnagtttgat

SEQ ID NO: 75664 - DNA, 240 bp, Glycine max
  Clone ID: 700905403H1
cgacattcattcatctatggctacccttattgctcccagcaaccactctccccaagaagacgctgaggctctcagaaaggcttttgaaggatgggggactgatgagaaaactgtcatagtaatattgggtcatagaactgtttatcagaggcagcaaatcagaagagtctatgaggaaattttccaggaggatcttgtgaaacgcctagagtctgagatcaaaggagactttgagaaagc

SEQ ID NO: 75665 - DNA, 116 bp, Glycine max
  Clone ID: 700905409H1
gaactcatcacttactggaagccttgttgtgagtaagagaaaaggcttcctgcaccgagcacaccaacttgatacctctgattctttctttgcttagaattccacacaacatacga

SEQ ID NO: 75666 - DNA, 153 bp, Glycine max
  unsure (1)..(153): unsure at all n locations
  Clone ID: 700905434H1
aggttttgcatttcatttgacgaagagtgagagagtcttanctgtcgtctctgatctctgatcgcatcttcattccgaaaatggctgtttcggctatcactggagcgaggctaactctagggatgtctctttcctcttccacacnacanangg

SEQ ID NO: 75667 - DNA, 232 bp, Glycine max
  Clone ID: 700905445H1
caacgaatgcagtgtcttgccgctttcacaagtttggtgatgaccaaaagaatctggtcttccaaggtgatgccacgtcttcttccaggggcatagaactcacaaagttagacggtggaggaaaaccagtgggtggcagtgtggggagagtgttatactcttctccagtgcacctttgggaaagctctacagtggtcgcaagctttgaaaccgacttcaccttttccatctc

SEQ ID NO: 75668 - DNA, 230 bp, Glycine max
  Clone ID: 700905457H1
cgccatttgggagttaggttctgcacgctctgcttccagcgagtgttctttcttcgtttcaacaccttaatttgcacacgctgcttcttcagcttgagaaatggcacaagaaacctttctattcacatctgaatctgtaaacgagggtcaccccgacaagctgtgcgaccagatctctgatgcagtgctcgatgcgtgccttgaacaggaccctgacagcaaggttgcct

SEQ ID NO: 75669 - DNA, 228 bp, Glycine max
  Clone ID: 700905478H1
ctcaggtggttgaacgttctttaggtggtcgtaatgaaatggatcatggagctagcagttcagtttctgtagatgcaccccagaggaattttgctgagactgttagcatcagtaatcacaatattgatgaagttaattcttggcatgatcgcggttcacgcatgactgccagcattggtagtgcaaagtttttgagtgatggtgatgaattggtcaaagaactccagt

SEQ ID NO: 75670 - DNA, 223 bp, Glycine max
  Clone ID: 700905485H1
cgacacagcagaaatgatatgatgggttgtggcggtgcattctcagtgtggctgccagtgtttgtgtcttgttttacagcaatagcattggctgggactgggtgcgataaggcaccggtggtgttcgtgttcggcgattcgaactcggacacgggtggactcgcttccggtctgggtttccctatcaatcttcccaatggccgcaatttctttcacagatcca

SEQ ID NO: 75671 - DNA, 227 bp, Glycine max
  unsure (1)..(227): unsure at all n locations
  Clone ID: 700905493H1
ggggcactngtttcgaaccctcgttgtggttaggtcttcttcacctttcgaattttggaatccatgggtcagggaactccgggcggcatgaaccggcagggcgaccgnaagccggacggcggcgacaagaaggagaagaagttcgagccgtcggctccgccggcgcgcgtggggcggaaacagcggaagcagaaaggtccggaggcggcggcgcggttgccgacagt

SEQ ID NO: 75672 - DNA, 267 bp, Glycine max
  unsure (1)..(267): unsure at all n locations
  Clone ID: 700905514H1
cngtgtttacccctctagtcctagcaatgctggaacaggcaccacagcaactccaacaaccactacaccaacaacaggcacaccacccaccaccttaactccaaccacccccactactaccactccaggcacaaccaccggtaccagcccaaccactggcactggtaccggcaccggcaccggcaccaccataggtaaccctaatgtgtttggaatgagtccaacatcttcaatggaacaggaggaggcttcaatgacccaaacaaa

SEQ ID NO: 75673 - DNA, 266 bp, Glycine max
  Clone ID: 700905548H1
agatactcgaatactgtgtcaaatgattctgacacgcatgatgacttcaagccaggtaataagcttgagggttctggcatttgtttgtctaatgttattgagcaggatgtcaaggataatcctgttatggtttacatgaaaggtgtgcctgattttccacaatgtggatttagttcgcttgctgtaagagttttaaaacactatgatgttcctattagtgctagaaacattttggaggatcctgaacttaaaaatgctgtaaaagc

SEQ ID NO: 75674 - DNA, 260 bp, Glycine max
  Clone ID: 700905591H1
gcttacaaaaagtatatattggtttctctcattcgtcatggacagttctcaaccagtcttcctaagtattcttcttcgactgctcaaaggaacctgaagaacttttgtcagccttacgtcgaattggctaatagttatggcactggacaaattgaagaactagaggcatatgccagggcaaatgcagagaagtttgaatctgacaacaaccttggactggttaatcaggttgtatcatccatgtataagcggaatattca

SEQ ID NO: 75675 - DNA, 256 bp, Glycine max
  Clone ID: 700905601H1
cacagttagtacaaaaaagggttacttcagcttccacatatcttgaagaattgatcaatgggcaagtctgtagttgagaagctactttggatggcaattgtgtgcttggtgctgggtgtaatttccattactcccaaggcccaagcagcagtgacatgcaaccaggtggtgagcaacctcaccccatgcatttcttatgtgctcaatggtggcaaaaccgtgcctggcccttgctgcaatgggatcaagaccctct

SEQ ID NO: 75676 - DNA, 256 bp, Glycine max
  Clone ID: 700905603H1
gaaaatgtggaagagaacgggttttgaagaagaagcagttcaattgatcaactcagatttcagggacctaagtctagctgctaatagactcgcccatcatgccatcaaacttggtggcattggctttggagcctcttttttcggattgtttgctgccattgctgctatttatctgttgattttggatcgtacaaactggaaaacaaatattctcacagcactactcattccatacattttcttcagcttgccttca

SEQ ID NO: 75677 - DNA, 255 bp, Glycine max
  Clone ID: 700905608H1
gccgcgcacggcggtgaaaagacggtgtccaacgctgaaccttccggtagcgatcctcagaagtctctggagttggcgaacgagctgatggaaaaaggaaacaaggcaattaaggagaacgattttggagaagcagctgataacttcagccgtgctctcgaaatcagagtggcacattatggtgaacttgctcctgagtgtgtgcacacatattacaaatatgggtgtgcacttttatacaaggctcaggaggaa

SEQ ID NO: 75678 - DNA, 250 bp, Glycine max
  Clone ID: 700905611H1
ggaacaaacaacaatagaggggttgtggtgctctgtgtgctgcaatttccttttgagcttgtgtttgattcatcaaatcatcaaagatgactgtaggggcaggaatatctgttgcagatgggaacttgatggtgttggggaacaaagtgctgagccatgtccatgacaaggttcttgttacccctgcatgtggtggtgctttgctcaatggggcattcattggggttcaatcccatcacaagggtagccg

SEQ ID NO: 75679 - DNA, 254 bp, Glycine max
  Clone ID: 700905619H1
ggaaccaacaacaaagagcagagagaaagagaggaccattccaaccctaatttctctgctaaaccctagttgtttggcatttcctctcttctccctcgtaaatcttctcccattccctccggtagctttccagatccaaataaatcatggttttctgggtttttggctacggttcactggtgtggaaccctggattcgattacgacgagaagattattggtttcatcaaggactacagacgcgtgtttgattta

SEQ ID NO: 75680 - DNA, 251 bp, Glycine max
  Clone ID: 700905632H1
caaaaaaaccatggacgtgggtcagatgcagagacagtggatcgactacaccaaatccctcttccttgagggcttcctggatggtcagtttctgcaacttcagcagcttcaagatgagaacaaccctgactttgtggtcgaagttgtctctctcttctttgaagattctgaaaggcttctcaaagatctcacctttgccctagatcagaatggtgttgacttcaaaaaagttgatgctcatgtgcaccagt

SEQ ID NO: 75681 - DNA, 251 bp, Glycine max
  Clone ID: 700905634H1
ggaattaggaatattcgacaggtagagtttcttcaatggctcctaaagttgataagaagaatgatccaaaggcccaggccttgaagactgctaaggcagttaagtcaggtgctacctttaagaagaaggtaaagaagatccgaacttctgtcactttccacaggccgaagaccttgaagaaggacaggaaccccaagtaccctcgcattagcgccccgccgaggaacaagcttgatcattatcagatcctg

SEQ ID NO: 75682 - DNA, 253 bp, Glycine max
  Clone ID: 700905636H1
gtagcagtataaaccaattggagttggagagaaaagaagaagaatctagaaagctgaaatgaataggattcacagcagatatagcaaagctcacactaacatcaatttatgataacaacctcaaaatcaagttatcagtgtgtcaccctgacttttcaaaaacaattatttgttgcttcatatttcactgtgatttcataatagattttcactcatcttacttgactccaagcattctatatatctagtgcct

SEQ ID NO: 75683 - DNA, 250 bp, Glycine max
  unsure (1)..(250): unsure at all n locations
  Clone ID: 700905639H1
agggtttgggtttttcactttcagcctctccattccttcaaccttcttcttntctttgatctctgatggagacgttccgtgtttagtagcaagggttagttgaggccttgtgtttggaaacgtacggtgtcgttttggagttgggaaaacaaataattctgagagatggcaaccacgaacccttttgatttgttgggtgacgacgctgaggacccttctcagctcatcgccgccgagcaactcaaggcgg

SEQ ID NO: 75684 - DNA, 247 bp, Glycine max
  Clone ID: 700905643H1
cagaaatagaatcatctctctgtctagggtttcattctttttcagctttatttgttctgtagatccatctagcttcggtgctgcaaatggacgtcgcagtcactgccgttcggtcaccgctgatcgtcctgggaagtccggtcaacgggtccgcctcagctcggttgggttccacttttgggttttccagaaagctatgcttgaattcagtatttatcccgaagcaagttcgtagaagagggtttgt

SEQ ID NO: 75685 - DNA, 151 bp, Glycine max
  Clone ID: 700905660H1
catctttatgttagtaaagctaggaggctcctcttgcttgcaggttcagttttatgaggattgctgcattagcttttttgactatatattatgtataaaatgttgacatgaacgtgtatgattatatgataatataattctactttttttt

SEQ ID NO: 75686 - DNA, 243 bp, Glycine max
  Clone ID: 700905683H1
ctttcagctgtggagtgattctggtgaagcatgcccagaaggaactgttccaatcagaagaactacagaggaggatattctcagagcaagctctatccaaagatttggaagaaaaccaagacctgtacggagagactctactggcagtggtcatgagcatgcagttgtttttgtaaatggggatcaatactatggagcaaaagctagcataaacgtgtgggcaccccgtgtaactgatgaatt

SEQ ID NO: 75687 - DNA, 258 bp, Glycine max
  unsure (1)..(258): unsure at all n locations
  Clone ID: 700905716H1
gccatgcagatcagcacacctgaaggcaatggaagttgccagggaagcaggatgcttgctctcttatgacccaaacctgcggctacccttgtggccctccgccgaggaagcacgtcagcaaatactcagcatatgggacaaggctgatgnaatcaaggtcagtgatgtggaactggaattccnaaccggaagtgacaaaattgatgatgcatctgctctntccctgtggcaccccaatttgaagttgctccttgtcac

SEQ ID NO: 75688 - DNA, 130 bp, Glycine max
  unsure (1)..(130): unsure at all n locations
  Clone ID: 700905744H1
acctgccaggccgtacccagntttgccntatagtgagtncgtcattagagcttggccgtcaatncatggtccatcagctgtttgcntgtgtgaaatngtnatgccgcctccaccaattgccaccaccaac

SEQ ID NO: 75689 - DNA, 252 bp, Glycine max
  unsure (1)..(252): unsure at all n locations
  Clone ID: 700905747H1
acaggcanggacgggtggtaccctcntggccacggagacgtnttcccatncattagtgaatagtggaaagcttgatgtgctatnatcacagggnaaggagtatgtgtttgttgccaattcagacaacctgggtgctgnagttgacttgaaaatctnaaatcatttgattgagcacaagaatgaatactgtatggaggtcatcccaagacattggctgacgtgaaaggtggcatctgatttcttatgaaggaa

SEQ ID NO: 75690 - DNA, 63 bp, Glycine max
  unsure (1)..(63): unsure at all n locations
  Clone ID: 700905780H1
aaganaatgatgaagcagggcagaatgnacccttgactgnggangaaactccagnagntantt

SEQ ID NO: 75691 - DNA, 261 bp, Glycine max
  Clone ID: 700905805H1
catcctgatgtattcaacatgatgcttcagatcctggaagatggaagattaacagacagcaaaggaagaactgtggacttcaagaacacgcttcttataatgacatcaaatgttggaagcagtgtgattgagaaggaggccgtaaaataggatttgaccttgattatgatgagaaggatagcagttacaaccgaatcaagagcttggtgactgaggaactgaagcaatacttcaggccagagttcttgaataggttggatg

SEQ ID NO: 75692 - DNA, 258 bp, Glycine max
  Clone ID: 700905820H1
gatttcgattggcgagacaaaggagccgtcactaacgtcaaggaccaaggggcgtgtggttcgtgttggtctttcagtacgacgggagcgttggaaggagctcattatctggccactggtgagctcgtgagcttagcgagcaacagcttgtggattgcgatcacgtgtgtgatccagaagaatatggagcgtgtgactcaggctgtaatggtgggttgatgaacaacgcatttgagtacatacttcagtctgggggag

SEQ ID NO: 75693 - DNA, 258 bp, Glycine max
  Clone ID: 700905826H1
aacactcataacacaaagcacaaagcaaagctcatccttgagttaaaaaatggcagcagcttcttccatggctctctcatccccatccttggctggcaaggccgtgaagctgggcccatcagccccagaagtggaagggtgagcatgaggaagaccgtcaccaagcaggtctcctcaggaagcccatggtacggcccagaccgagtcaagtacttgggcccattctctggcgagcccccgtcctacctaaccggtgag

SEQ ID NO: 75694 - DNA, 258 bp, Glycine max
  Clone ID: 700905827H1
cttcttcttctcttcttcttcaagattgcgacgacgatccaagtgatagacactcgttgcgatggaacttgtagctgaatccgagcgaactctgtacccatacgtgactggatcctctgtagtcgctatcaatacaaagatgggattctaatggccgctgacatgggaggttcgtatggatctaccctgcggtataagagtgttgagcgtatcaagcctattggaaagcattctcttcttggtgctagcggggagata

SEQ ID NO: 75695 - DNA, 258 bp, Glycine max
  Clone ID: 700905846H1
ctcagattggtgaatctcaacccagtattttcttcacagataggtcaggacagcattataaagaatgcctgtccatggcagttgataatcttcctgttcttgatgggaagactccagtccaagtgtaccaggtttctgtgagagcttcaagtcttcattctctccattcatgggctctacaatcacgagcatttccatgggtttaggaccagatggtgagctacgttatccatctcaccactggctgccgagtaatgg

SEQ ID NO: 75696 - DNA, 252 bp, Glycine max
  Clone ID: 700905866H1
gtggaaagaaggattccatgttacctcaatgactactgctggcagtcgctggggtgttgttatgtccaggaatgctgggtattctgatcaggttgtggagcttgactttttgtatcccagtgaaggatccatcgtcgatgggagaatggttaccggattacttctatggctgctactagtgatcaggcagccttcatactgagcataccaaaacgcaaattacttgatgaaactcaggagacactgcgtaca

SEQ ID NO: 75697 - DNA, 253 bp, Glycine max
  Clone ID: 700905880H1
gcgaagagaagagaaaaattaagatggaggggaaggagcaggatgtgtcgctgggagcgaacaagttcccggagagacagccgattgggacggcggcgcagagccaagacgacggcaaggactaccagagccggcgccggcgccactggttgacccgacggagtttacgtcatggtccttttacagagcagggatagcagagtttgtggccacttttctgtttctatacatcactgtcttaaccgtcatggga

SEQ ID NO: 75698 - DNA, 81 bp, Glycine max
  unsure (1)..(81): unsure at all n locations
  Clone ID: 700905894H1
ggcttcccaaaccctattattaccataatttccaacacaacatcaacgagtnntgcganngggggntgtggctgnaaggng

SEQ ID NO: 75699 - DNA, 252 bp, Glycine max
  Clone ID: 700905903H1
atcttattgctgggtaacttttaacggttactgtattactggtttctaaatttacttcaatagtgagtgctagtattacatgttctcagaaaagatttgatgtaatctttttgacaagtgttcattttatggtatggtgtgtagatcaaactttttatatctgacaatgagttcaacctgactatcattgctaggcgctcacggcattatgctgggaccagatatttgaaacgaggagtgaataaaagggta

SEQ ID NO: 75700 - DNA, 224 bp, Glycine max
  unsure (1)..(224): unsure at all n locations
  Clone ID: 700905921H1
tctttcttccgccactgccgcagagcgtagaaggaaatcaaacagcagagagagggtaaagcatacgtgggttaaatccatgcgcatgagtcggaagaatttgtgttagcggtgaggagatatattgagaattaatatttgatagtgtatatatggggaggggaagagtggagttgaagaggatcgagaacnagatcaataggcaagtgacgttccaaagagaa

SEQ ID NO: 75701 - DNA, 249 bp, Glycine max
  Clone ID: 700905939H1
caagctctcaacgccatctccagctgcttccttatcagaagcgcttcgccccagagattctcgcttcctctccttcaatccttcttccaacgctattaattacaaaattaacctctccgcttccctccgatccattcactccctccctcttaaaacctccttgcggatcaaatgctcccaaacagatgggaatggaagtcctgcaaagaggacagtgcttcatgatctttatgagaaagagggcagagt

SEQ ID NO: 75702 - DNA, 248 bp, Glycine max
  Clone ID: 700905942H1
ctaggtttgaatttgggtgtttccgtttcaatggatgacggcgagcttgatttctccaaccatgaagtgttttcgagtcccaacatgggtgagcttcccagcagcggttcaatggacagtttcttcgacgagcttctcaaggacacgcacgcctgcacccacacccacacctgtaaccctcccggccccgatttctcccacactcacacgtgctaccatgtccacaccaaaatcgtcccgcccctgag

SEQ ID NO: 75703 - DNA, 242 bp, Glycine max
  Clone ID: 700905985H1
ggcgaggatggcaaacacaaacagcgacaccaaagaagaaagcaaaaaaatggatgaaagagagacaatacctctcctcacctcatacaagatgggaaattttaatctatcccacaggattgtgttggcaccgttaacacgatcaaggtcttacaacttcgttcctcagccgcatgctgctctgtattattctcaaagaactactaagggtggcttcttgatcggggaagctatggtgtatc

SEQ ID NO: 75704 - DNA, 272 bp, Glycine max
  Clone ID: 700906010H1
caccagatccatcctcagagtgtaatagcagtactgcaactggtggggcattcaagaaagctagggttcaaccgcccacaactcagtcgaccttcaaggttaggaaggagaaattaggtgacagaattaccgcccttcatcaactcgtttccccattcggaaagactgacacggcttctgtcttattagaagctattgggtatatcagattccttcagagtcaaattgaggcccttagcttaccatacttgggcagtggatcaggaaacatg

SEQ ID NO: 75705 - DNA, 269 bp, Glycine max
  Clone ID: 700906022H1
tccatcttcttctcttttcacgtcattatcctaaacttgcagattttcacatcccaagcaacatgaaggggaggttcatgtttctgtcggtgctcctttgtgccacctttcatgtctccttctccattactgacggcttagtagcaaacggcaacttcgagctgggtccgaagccctccgccctgaaaggaactgtggtgattggtggcagccactcgatcccagaatgggagatctctggcttcgtggagtacataaagtccggccag

SEQ ID NO: 75706 - DNA, 269 bp, Glycine max
  Clone ID: 700906036H1
gatttctctgctgaagagcttggtgccaagattaaggactatgggattgtttctcctgagactaagaactctctctctgatccctaccctttcaatttgatgtttcagacttccattggtccctccggcttcagccctggctttatgagacccgagactgcccagggcattttcgtcaattttaaggatttgtattattacaatggcaacaagcttcctttcgctgctgcgcagattggccaagcgtttaggaatgagatatctccacg

SEQ ID NO: 75707 - DNA, 271 bp, Glycine max
  Clone ID: 700906049H1
gtgagagagagatggcaggtatcgctggtacatgtcctttaggagcattgctcagaaacagtgtctcagaaaacaatgggaagatatctgtggttcattatgaggggcttagattgcagcagagaatgcaaatgccttcaccaagccagtacatttcagcttcttcatcagctccaagatgcagaacaatcaaggccatggcttccccaactgttggagcaccaaagagagaaaaggatccaaaaaagcgggtagtaataacaggaatggg

SEQ ID NO: 75708 - DNA, 262 bp, Glycine max
  Clone ID: 700906058H1
gggacacattgacctattaagtactgatcattcaccaactgtgcctgaactcaagcttatggaggagggtgacttcttaaaagcttgggggggcatatcatctttgcagtttaatcttccagtgacgtggtcatatgggaagaaatatggacttactctggaacaattgtctttattgtggagcaagaaacctgcaacactggcggggttagaatcaaaggggaccattgcagttggaaaccatgcagatattgtagtttgg

SEQ ID NO: 75709 - DNA, 267 bp, Glycine max
  Clone ID: 700906096H1
gaagatgggaaggggtaaggtacagctgaagaggatagagaacaagatcaatcgccaggtaactttctccaaaaggagaagtgggttgctcaagaaagctcatgagatctctgtactctgtgatgctgaggtagctttgattgtcttctctcacaaaggaaagctctttgagtatgctactgattcatgcatggagaagatactggaacgccacgaaaggtatgcctatgcagagaggcagctagtagcaaatgattctgaaacaca

SEQ ID NO: 75710 - DNA, 246 bp, Glycine max
  Clone ID: 700906119H1
gtgagataggaaagattctcagaatctagaatatcagcatggtttttttgcagggacaacaaggtttgaattaggaacaattaaacaagatattaaggcacttgtggggctgtgtgtaaggtttctagagcattggattacagggtaacatttgcatggtgacagaaggatttggaaagccaatgcacaaagttttgaaactttgtaaatgtgggggttgattagatcaaattgtgggaaagaaaa

SEQ ID NO: 75711 - DNA, 245 bp, Glycine max
  Clone ID: 700906120H1
ggaaaccctcttaggatatttgtgattgtgagagattttctggggatgttagataatgtgtgtaaagaacttagaaggtctaaagctccacgtagcccgaaccctcttgctatgctccctttagatagatcatagactagaattaaacactgccttgtgtgttcataggaattgaaattttttaaaccaaccgagtgtaactttattttgatttttgtggagttttggagcatttggattttgta

SEQ ID NO: 75712 - DNA, 247 bp, Glycine max
  Clone ID: 700906129H1
catttccgttaccgttatcctcacttctctctctctcaacctcttatttatttattaaccctttattccacccctttcctctcccttcatcaagcacccaactttctgccacccccacaaaagggtgcttgcgtttctttctgtgatctcaaccatgaagcgtccactcacaccttcagccagcggcatgaagactaacaagaaagccaaggcgatggaaaatgacgaagacgtggaggggctgggg

SEQ ID NO: 75713 - DNA, 250 bp, Glycine max
  Clone ID: 700906131H1
gatgggtgcagaagcaaatggcggcgagaagcaattgaaatttctgatctacggtcgcagcggttggattggtggtctactgggtaagctctgcgaagagcgcgggatccaatatgagtacggcaccggcagattggagaaccgctcgtcgttggaggcggacatagcggctgtgaagcccagccacgtgttcaacgccgcgggtgtcacgggtagacccaatgtggactggtgcgaatctcacaaagtt

SEQ ID NO: 75714 - DNA, 251 bp, Glycine max
  Clone ID: 700906132H1
ctatctctcaccaacttccgctacttcctactccaaccactttcttttttcccgcagtcatgggcaaggtcaagatcggaatcaacggatttggaagaattggccgtttggtggccagggtggctctgcagagagacgatgttgaactcgttgccgttaacgatcctttcattaccaccgattacatgacatacatgtttaaatacgacagtgttcacgggcactggaagcatcacgatgtcaccgttaag

SEQ ID NO: 75715 - DNA, 241 bp, Glycine max
  Clone ID: 700906160H1
gagaaattgagtttctgagataaccacttttctctttgattcatcaatggcaaccgcgaggaccgtgaaggatgtttcgcctcacgatttcgtgaaggcttacgcctcccatctcaagcgttccggcaagatggagcttcctgagtggactgatattgtaaaaacagcaaaatttaaggaattggctccatatgatcctgactggtattatgttagggctgcctcaatggcaagaaagatt

SEQ ID NO: 75716 - DNA, 239 bp, Glycine max
  Clone ID: 700906171H1
cgggaatcaaggtcatcagacttcaagggtgtttcagctgttgtcactgacagaattcgagaagctcatcagaatgagtctgctccattaatgatgttatttccagaaggtacaaccacaaatggagagttcctccttccattcaagactggtggttttttggcaaaggcaccggtacttcctgtgatattacgatatcattaccagagatttagccctgcctgggattccatatctgg

SEQ ID NO: 75717 - DNA, 239 bp, Glycine max
  Clone ID: 700906174H1
caacaacatcaccagacaatacaaacgcagatagatcactttgacgccaccctgaatcttgatacctttgaccgcaacaaaattcttaattgatcactgggtatgtttttgatcgtgcaccttgtgggccagtaatcgttcaaaacgtgaacaagtcttacttttgattccgaattcctcttatcacttgatgcttaagtttgctgctttcaccaattgttctaggattaccaagttga

SEQ ID NO: 75718 - DNA, 240 bp, Glycine max
  Clone ID: 700906177H1
ggagagttttgatcaggcgatacagagagatgatgtcaaggcaattgttgttacaggtgcaaagggaaaattttctggaggttttgatatttctgcatttggtggtattcaagaggcaaaagagcgtccaaaacctggttggatatcagtagaaatcatcactgatactattgaagcggctaggaaaccatcagtcgctgccattgatggccttgccttgggtggaggattagaagttgc

SEQ ID NO: 75719 - DNA, 234 bp, Glycine max
  Clone ID: 700906185H1
ctcaaacacaactcaccaacacagttgttgcattatttcttttttccagatccaacttcaaaattgcaatgggagtggaagatacagatatttgtatcatcaaggagccagatcatgttgtagtctattcagatggcatttctcatgattcgggtcatgaagctggaagtggtcatcacaatattacagagtcgtatgaacaaatcaatgagactactgaacatcatagttcag

SEQ ID NO: 75720 - DNA, 235 bp, Glycine max
  Clone ID: 700906186H1
cacgggcgttggggtgattcctgtaatccatcatatggtgcattatctgattatcagttcatgcggccacgtgcacgggacaagaagcttgttgaagaatgggcagttcccttgaaaagcattgaagatatatatgagaggtttagactgtattgtcttggaaagttgagaagcaatccttggtcagaactagatggtcttcagccagagacaaagataataaatgagctgctgg

SEQ ID NO: 75721 - DNA, 268 bp, Glycine max
  unsure (1)..(268): unsure at all n locations
  Clone ID: 700906204H1
gcctcatagctcctttctcatttcacacacacnaagantnntgagacatcatgaagattccaagttccaagcaactggttgtgggatttgcacttggaaatgaaggataggcaacgttggagagctgaagaggatgctttactacgcgcatatgtcaaacagtatggtcctagggaatggaatctggtgtctcagcgcatgaacacacctcttaacagggatgccaagtcatgcttagaaaggtggaagaactacctcaagcccggca

SEQ ID NO: 75722 - DNA, 180 bp, Glycine max
  unsure (1)..(180): unsure at all n locations
  Clone ID: 700906205H1
ctttctgttgtttctccctcaacncnacncancgtgttcctcttngnctggntcngnggcttctnncttccctnggtctctggcaganagangccanngttctctnccttggtctcgatggtgcnggcaaaacctccctccttcacatgctcaaagacgagngnttagttcagcaccagc

SEQ ID NO: 75723 - DNA, 169 bp, Glycine max
  Clone ID: 700906235H1
ggtaaacaacccatatcataaccgtactcactttcctccggttcgggctttttcagcccgtaaccttgcactgaatatcagtgttggcttggcatcctgccatgggaacaaacacaacgctcctttcccttgctgccccaccctcattcctttctctttccacccttta

SEQ ID NO: 75724 - DNA, 134 bp, Glycine max
  Clone ID: 700906250H1
gattttcaaagtttatatttatttgcagccaataataagttttggcgtgactgaatgaatatcacccatatattgattgatattgaatttctgaattcttgtaactgatttgcaattcttcgaatcttttaatc

SEQ ID NO: 75725 - DNA, 263 bp, Glycine max
  Clone ID: 700906253H1
ggcttgctgtggaagcacacaacatctttggctttgagaccattcctgaagagtgcgttgaagcaacaaaggaatacatccatggcgaacaatatagatcagactccaaaacagttaaccaacaagcttacttttatgccagagacctcgaagtccatcccaaggacacatttgtgttcagtatagatggcaccgtactctctaatattccatactacaaaaaacatggatatggggtggagaaatttaactcgaccttgtat

SEQ ID NO: 75726 - DNA, 126 bp, Glycine max
  unsure (1)..(126): unsure at all n locations
  Clone ID: 700906273H1
ccgaatttcattttcagaagcctctttgggaatcaaatccgaagcatgatgcattangcgagcattgtctcggctccgtcctacgcgttcccttttctctctggctccgcttccacacaacatacg

SEQ ID NO: 75727 - DNA, 262 bp, Glycine max
  unsure (1)..(262): unsure at all n locations
  Clone ID: 700906279H1
ctcacagatggaaccggaaganaccnccgcngccgccgacggaagcttcgacgaggggctgctcgggctannnnnnnnnnnnnnnnnnnnnnnnnnnnnagtaaagggtccgtggtcgccggaggaggacgccattctaagccgtctggtgggcaagttcggcgcganaaattggagcctcattgcgcgcggaatcagcggaagatccggcaagtcatgccggctccggtggtgcaaccagcttgaccccgccgtcaagcgc

SEQ ID NO: 75728 - DNA, 157 bp, Glycine max
  Clone ID: 700906290H1
cagagaggaagagagacaaatgggtttgggaatgagaagagagtagaaacaaccgagagaaacacatagaaaaaggaggcatagccaacctattcaaaccatgatgcaaggctgtgaggttgatgccattggcataaactacacgatccacacaaca

SEQ ID NO: 75729 - DNA, 274 bp, Glycine max
  Clone ID: 700906306H1
gttaaatgtggagtaaggggtaacactggtccagcctgcaatgtggttggaatgattgatcgaatgatattgggtatacaacacctgtacaagagaccaatatatgcgcggatgcctgaatgcagtattaattctcccaactatggaccattacctcctgatgctcctgcttggtgtcaggccccttttgatcctgaaggactcctaagttcagtgatggctattgtcacctgcttgattgggttgcactatggacatattattgtccatttta

SEQ ID NO: 75730 - DNA, 271 bp, Glycine max
  Clone ID: 700906312H1
gttaataatcgatgttgtattaatcaaataaccgatgtacaataacgtttatgcagtagtggttgtgtttgaagattgagggctatatatcttttgggtcgaattataattcgatcctcataacttagcattgatgcatgttgtgcttgaggttcaaggactatttatccttccgatcggatcacaatttgatctcacaatttagcctcaccttatgcttgagacttgaaggttatgtatccttcggattgaattatgcgaccatgcattt

SEQ ID NO: 75731 - DNA, 271 bp, Glycine max
  Clone ID: 700906338H1
cactaactaaagccgagcagcgagagagagaaaccctagcaaaaatgccggctggtcacggtttgagatcccgcaccagagattccttctctcgtcccttcaggaagaagggtaccatcgccctcaccacatacctcagaacctaccacgtcggcgattatgtcgacgtcaaggttaacggcgccgtccacaagggaatgcctcacaagttctaccatggccgcaccggtcgcgtctggaatgtcaccaaacgtgctgttggggtcgaagt

SEQ ID NO: 75732 - DNA, 272 bp, Glycine max
  Clone ID: 700906352H1
caaagaaaaaaaaaaacccttagccaacacaaccatcatggccacctctgctattcagcaatcagcattcactggtcaaactgctctgaagcagctcaatgagttcgtccgcaagaccggtggcgccggcaaaggtcgcactaacatgcgccgcaccgtcaagagtgctcctcagagcatttggtatggccctgaccgtcccaagtacttgggtccattctcggagcagattccatcatacctgaccggagaattccctggtgactacggat

SEQ ID NO: 75733 - DNA, 106 bp, Glycine max
  Clone ID: 700906391H1
caagttttctggtgtaatgaacattttgccagtgaggccctagcagcctaatctgctttttgtggttatatggtcctgtataaaatttaattacagcagctcttct

SEQ ID NO: 75734 - DNA, 260 bp, Glycine max
  Clone ID: 700906396H1
ttacaaattgtcatacttgttgttggaactagaggcgacgtacaaccttttctggccattgcaaagagacttcaggagtatggtcatcatgttaggctggcaactcatgataattttaaaacatttgtgaagtcagctaatgtagatttctatcctctgggtggtgatcctcgtattttggctggatacatggcaaggaataaaggtttaatcccttctggaccggctgaaatatctgtccaaagaaagcagctgaaggc

SEQ ID NO: 75735 - DNA, 265 bp, Glycine max
  Clone ID: 700906442H1
cgaaatctttaatccacagcatgtgctttacgctacctgtatatatgtaagatggtcaaaattcttcaaatactttttttattgtataggagcagaaccagaagagaaggctcaaccacaaagggatccaatttcatttttcatcttcctcttcttcactctcttttatggctccaagcaagctcaattcctcgggaaatactagtatgccatgttcacaggctgagaatggttttgtcaattccttttctctcttccccgagaa

SEQ ID NO: 75736 - DNA, 269 bp, Glycine max
  Clone ID: 700906468H1
ccgggcaatgggttttctccccagaaatcccaaccgatgttattgttgcagttggagaatccactttttctctccataagtttattctggcggctaagagtaactacatcagaaaagtgataatggaatcagaggagagtgacctaacaagaatagagatttccaacatacctggaggacaagaagcttttgagaaagccgcgaaattctgttacggcgttaacttcgagatcaccgttcacaacgtggcggcgctgcactgcgccgcc

SEQ ID NO: 75737 - DNA, 259 bp, Glycine max
  Clone ID: 700906470H1
ccggagtttgattcaccggtcggagagtttctgcggcggtggagggttgcggagggatcagtttccgaaggggtttcggtcggagagggagcgatcgcggagggaggggagcgtgtcgtcgaccgcccgccgtttcgtccatgcagccgctgccttctcctaaccccgtcgacacctccgctgtttctcagagactccaaaaggaattaatgactctcatgatgagtggaggagatcttggggtatcggcttttcctga

SEQ ID NO: 75738 - DNA, 266 bp, Glycine max
  Clone ID: 700906495H1
ctctggcaaagcacctgttagaccaaaagttcatttatcatgtagcccgggacagaaaatctcatcaatcaaatttgctagctttggtactccagcaggttcttgtggaaacttccatgaaggaagctgtcatgctcacaagtcttatgatgcctttgaaaggaattgtgttggacagaactggtgcacagtaacagtgtcacctgaaaattttggaggagatccatgtccaaatgtcttgaagaaactctcagtggaagctattt

SEQ ID NO: 75739 - DNA, 79 bp, Glycine max
  Clone ID: 700906502H1
agcgatatctgaaacaggctattgtagacaagaatccagttgttgcaagtgcagccctagttagcggcattcatatact

SEQ ID NO: 75740 - DNA, 258 bp, Glycine max
  Clone ID: 700906522H1
caagcaccgcgcgcaggagtatgtcagccacgacaacgcagcagcgcttctggctgctggccttgctcgcacctttgacagaatgccttatctgctgtctctgtcttcctttgtggctgacgatgttgccgctgctgttcctgctgctcaagatctgggggagcagtggtcttattaatggatgtgcttcaattcaaatagtctcgcactagtcatcattccctttgtttctgttgcttgcttggttgttcttcttct

SEQ ID NO: 75741 - DNA, 254 bp, Glycine max
  Clone ID: 700906527H1
gagctattgggagctaggaaggcataccattccctctttgaccactccattgaagaagatgttgcctctcacatccatggcattgaaagaaagctattggttgccctactaagtgcctatagatacgaaggaacaaaggttaaagatgacactgcaaaatcagaagccaaaatcctttccaatgcaattaagaatgctcataagaagcctattaatgaggatgatgaagtgataaggatattggcaacaagaag

SEQ ID NO: 75742 - DNA, 256 bp, Glycine max
  Clone ID: 700906541H1
ctctattttgcgttcattctgttttccagttgaagtctttccctagccaatggccactgatcgtttgacccgggttcacagtctccgtgagaggcttgatgaaaccctcactgccaacaggaacgaaattttggcccttctgtcaaggatcgaagctaagggcaaggggatcctgcaacaccaccaggtcattgctgagtttgaggaaatccctgaggagaacaggcagaagcttactgatggtgcctttggagaa

SEQ ID NO: 75743 - DNA, 109 bp, Glycine max
  Clone ID: 700906544H1
tgagattttgccacactgtagaaggggtgttcttgtaatttcatcgcttggaatcatccagaagcaaacccccactttagcctctttgtttttgttctgttcctactcc

SEQ ID NO: 75744 - DNA, 90 bp, Glycine max
  unsure (1)..(90): unsure at all n locations
  Clone ID: 700906560H1
cttcgatcaaaccgttcgagaaataaagagagaggtgaatctgaaggtgctcacaattccacacaacatcacgagtcgcgcganaggggg

SEQ ID NO: 75745 - DNA, 59 bp, Glycine max
  unsure (1)..(59): unsure at all n locations
  Clone ID: 700906665H1
tttcccttctgagcttngattagtgnggcctagttgttgttttctccgacccncnangc

SEQ ID NO: 75746 - DNA, 266 bp, Glycine max
  Clone ID: 700906723H1
gtttctgaacgtgttgttcatttggctttcctcccaagtgctgggattggccatcttaacccatgtcttagaatagcagcactgttcctccgctatggttgcaaagtcactctcatcactcccaaacccacagtctctctcgctgaatcaaacctcatctctcgcttctgttcttccttccctcaccaagttacccgaacagacttaaatctcatccctttggatccaaccacagttaacaccagtgaccctttttggcttcagtt

SEQ ID NO: 75747 - DNA, 271 bp, Glycine max
  unsure (1)..(271): unsure at all n locations
  Clone ID: 700906733H1
agtttccctaccggtcaggccctgggtggccacaagcgctgccactacgacggcgggaacaaccacagtaacagcaacgccaacggaaacaacagcagcggcgccactacctccgacggcggcgctgcctcctcctcccacacgctccgtgggtttgacctgaaccttccggcgccgctgacggagttctggangccgatggggtttgatttcgggaagaagaaggtaggcggtgaacaagaggtggaaagcccgttgccggtaaccgcca

SEQ ID NO: 75748 - DNA, 265 bp, Glycine max
  Clone ID: 700906740H1
ctgaatcatccttctcatgctgcaattggacttagactcagactcaaaccctacccaaccaatttcacctgcaaggcagttttctccgacgatgccccctttgccgccgcaatcggtgcttgcatgttcacttctttgcttttaccagtctctacttcctccgaagacgacgatgccgactccgccgtcaccacaaccgacgcaaggctcgccgtcatggggattctcagtttcatcccttatttcaattggctcacttgggttt

SEQ ID NO: 75749 - DNA, 262 bp, Glycine max
  Clone ID: 700906801H1
cagtaattggtgtggattcgaaaaagatgaaggtttggagatgggtggtgagtttgatgttagtggggttactgcccgtgtcaacaatgggtcgattcgtggtggagaagaacagcctgagagtgacatcgccggaaaaataagagggacacacgacagtgccattggcaacttcggaatacctcaatacggtggtagcatggccgggaacgtaatttaccctaaggataacaaaaagggttgcaaagagttcgatgagttc

SEQ ID NO: 75750 - DNA, 259 bp, Glycine max
  Clone ID: 700906813H1
gtcagtttcgggggaagagatccagcagcaatggtgtacgtcaaggctcagaaatcaaaagcctacttcaagagatatcaagtcaagttcaagagaagaagagagggaaaaaccgattaccgtgccaggattcggtgattaatcaggacaagaacaaatataacactccgaaataccgatttgtggttcgctttagcaacaaggacattgttgcacaaataatatctgctagcattgccggcgatttagttcttgctac

SEQ ID NO: 75751 - DNA, 246 bp, Glycine max
  Clone ID: 700906858H1
cccaaattgaaagttcctttcatacttaggacgcctgacatgtcagccatgcaccatgacacaagttctgatctgaaagtggttggaaacaagttaaaggatatattagagatctcaaacacatccttaaaatgaggaagatcgttgttgaactgtgtgacattgttgctactcgcggagtcggcttgctgctgctggtattttgggcatccttaagaaaataggaagagacacagttaaggttgg

SEQ ID NO: 75752 - DNA, 270 bp, Glycine max
  unsure (1)..(270): unsure at all n locations
  Clone ID: 700906912H1
caaaaactcccgttttctctctctgtttttccatggccatctgatcaaacttttcttgattctctctctcagtttttgctattctgagtgatgggtatgccctgccgctgttcccacacctcccacatcantgaaatcatcatcaccagcttcttccgccacaagtcttaaattacaacaatttccctcaattattcatcaaccaaccaccttaatagccttttccaatggttccttaaagatccaacttggtcggagtaaacatggcgg

SEQ ID NO: 75753 - DNA, 265 bp, Glycine max
  Clone ID: 700906929H1
aaaatttagaaacaaaaacatgttggtgaaggtgtacggtccaacctatggagcccccaagagggtgctggtgtgtctgattgagaaggaaattgagtttgaaacagtacatattgatctcttcaagggagagaataaggaacctgagttcctaaagctgcagccatttggatcacttcctgttattcaagatggtgattatactctctatgaatctcgtgcaataatcagatactttgcagagaagtataaagaccaagggaca

SEQ ID NO: 75754 - DNA, 261 bp, Glycine max
  Clone ID: 700906939H1
ggaaatatcaatatgctgcttgacaatgtaacgagcactagcactagcactaacactagcaaatatcctctattgagaagaaggcgtaggttgattgttatagcacttgatttgtatgacaataatggagctccggagaagaaaatgattgagatggtgcaaaagataattaaagctgtgcaactagaccctcaaactgctagagttacagggtttgctttatcaactgctatgccagtgatagaaacagtagagttccta

SEQ ID NO: 75755 - DNA, 256 bp, Glycine max
  Clone ID: 700906968H1
agtaactgccctctttggcggtttcattctttggaggcatgacgcagaagccttatggtttacagcagggtctgttctgaatgctatgctttctgttttgctcaaacgtatactgaatcaggaacggccttcaaccctgaaatctgaccctgggatgccatcatcacatgcacaatccatattctttactgtcttctttgttattttgtcaggcgtagaatggcttgggctaaatggattcaccattgccatcagt

SEQ ID NO: 75756 - DNA, 266 bp, Glycine max
  Clone ID: 700907037H1
gattacccatagatagagagcgcggcataacctaaacttacccttcttctctctgtgtgtgtgcgcatcaaacgcaaccagaagcagccatggccactgcaagaactgtgaaggacgtttctcctcatgagttcgtcaaagcttactcttctcacctcaagcgatctggcaagatggagctgccagagtggctgatattgtgaaaactgcaagatttaaggagttggctccttatgatcctgactggtactatgtcagagctgctt

SEQ ID NO: 75757 - DNA, 56 bp, Glycine max
  unsure (1)..(56): unsure at all n locations
  Clone ID: 700907048H1
ccactctncagttagannggaaccaccaatgccaacgtgctgnccatacnaccntg

SEQ ID NO: 75758 - DNA, 262 bp, Glycine max
  Clone ID: 700907076H1
attttgataggacgaccctttggtgtttggatcttcaagaaagagagacccttgggatttcgtcaccatgagtctcttcggtcttggaaacagaaaccaaaaaacatttcgtccaaaaaagagtgctccatctggaagtaagggtgctcaacttcaaaaacacatcgatgccacgttgggtagtgggaacttgagggaggctgttaaactgcctcccggtgaagatattaatgaatggctagctgtaaacaccgtggacttc

SEQ ID NO: 75759 - DNA, 262 bp, Glycine max
  Clone ID: 700907080H1
ccaagtgaaaaagcaactaagcatagtgtgtaagaaagggagaaaaacaagtgctgtgtagagagaaaaatggctaggtggtgcatgatcttggtggttcttgctcttgccgtggttgcaagtgccagaaacatgcccaatgacgctggtttggaggaccagaagaacttccttgggtatgggttttcggagttggcaacaatggccttccctttggtggagtgggttctgggtttgatggtaatatgggtgggccttctgg

SEQ ID NO: 75760 - DNA, 250 bp, Glycine max
  Clone ID: 700907118H1
ttccgtttcctagtctcacacccaaacctcatggaaggctctgtcaacgaacgtcttgattttgggaagatgggatatgggtgcaatcattaccggagaagatgcaggattcgtgctccctgctgcaacgagatctactcatgccgtcactgtcataacgacgctgcgagcttgttgaagaatccctttgatcgccacgagctcgttcgccaagatgttaaacaagttgtttgttcagtttgtgacactg

SEQ ID NO: 75761 - DNA, 248 bp, Glycine max
  Clone ID: 700907135H1
gtatattattaaactgtgcaagatcatatagtcgctttgaatgtggtccacatagcttattttgcattaacttttctactctagcaaagttcattgtgcaggctagctaccataaaaccctggtaaaatgctcaaagaaaatattgttagtaattgaatgacttgatgaaaaggactataaatctgtaaggcatagaatgtgtcctgccattgcagaatgtgagagatttggcactgtaatggtcaag

SEQ ID NO: 75762 - DNA, 248 bp, Glycine max
  Clone ID: 700907138H1
aatactagtacagataaagaatgctcatcaagcaaaaaagttaatcatccttgtaatctttgcaaggtctagtttcaaaaccaccaccttccctctcctccaacgtgtatggcatgtaggtacccaagattttgtcccacataacgaagaatggctgcgagaagttgtacttgttgccatagagctggtgatgtacatcatggtaggctgagttgtttttgaaaaagatgtggaaaaggttcccgggg

SEQ ID NO: 75763 - DNA, 246 bp, Glycine max
  Clone ID: 700907155H1
agaaggcaagatgtcgaagagaggacgcggtggttcggcggggaacaagttccggatgtcgctgggtctgccggtggcggcgacggtgaactgcgccgacaatacgggggcgaagaacctctacatcatatcggtgaaagggatcaaagggcgtttgaaccgtctcccctcggcttgcgttggcgacatggtgatggccaccgtgaagaaggggaaacccgatctgaggaagaaggttttgccagc

SEQ ID NO: 75764 - DNA, 242 bp, Glycine max
  Clone ID: 700907157H1
ccaacatcttgcttgatgagaatttcacagccaaggtttctgattttggtctttcaaaggatgcaccaatggggcagggtcatgttagcactgctgtgaagggtagctttggttatcttgaccctgagtacttcaggaggcagcaactgactgaaaagtctgatgtgtactcatttggggtggttctgcttgaggcactctgtgcaagaccagccatcaaccctcagttgccccgcgaacaa

SEQ ID NO: 75765 - DNA, 248 bp, Glycine max
  unsure (1)..(248): unsure at all n locations
  Clone ID: 700907167H1
ttcacagctgatctatttgccatgaaccacacagatttcattntcnaccagtaccttccaggagattgctggaagcaaggacactgttggacagtatgagtctcacacagcctttacccttcctggactctaccgtgttgtgcacggcattgatgtctttgatccaaaattcaacattgtctcccctggagctgatcaaaccatttacttcccccccaccgaaactagccgtaggttgacctccttcc

SEQ ID NO: 75766 - DNA, 258 bp, Glycine max
  Clone ID: 700907214H1
ccaacttggtcccatatcccagaatccatttcatgctttcctcctatgctccagttatctctgctgagaaggcctaccatgaacagctttcagtggctgaaattaccaacagtgctttcgagccatcgtccatgatggccaagtgtgaccctcgccacggaaagtacatggcatgttgcctgatgtaccgtggtgacgttgtgcccaaagatgtgaatgctgctgttgccaccatcaagaccaagaggacaattcagt

SEQ ID NO: 75767 - DNA, 254 bp, Glycine max
  Clone ID: 700907219H1
ctaagatagatctcgagatgggtcgtggcaagattgagataaagttgattgagaaccccaccaacaggcaagtcacctactccaagcgaaggaatggtatcttcaagaaagctcatgaactcagtgttctctgtgatgccaaggtttcactcatcatgttctctaaaaacaacaagatgcatgaatacattagccctggcctcacgacaaaaaagatcattgatcagtatcagaagactttgggggatattgat

SEQ ID NO: 75768 - DNA, 254 bp, Glycine max
  Clone ID: 700907227H1
gtcagccgaaaagataattctagtgaagagatggatagactaagacgtttgtggatgtctcttcttccatttggatttctgttgttctttagttcagctttcatcggagtacctggtgcccttgcctggagcaaagagggtcatgttatgacatgccaaattgcacaggcacttttagagcctgaggcatcggaagccgtgtaccaattgttacctgaccatgtcaaaggtaacctatcagccctctgcacatg

SEQ ID NO: 75769 - DNA, 255 bp, Glycine max
  Clone ID: 700907234H1
gggtttgccgtgtttgcgttctttgttccatcggagaagacccttttcccttttagcttcactcttttctctctctttatctgtcaacgatccaagtctacttctgaagcatctttttactgtcacttgacatggcatcaagacaccgtgttcacagagaacccttgaatgctcgaaggggttacccaccggaagggccatatgctcgggtggctcccatgcctcgaccactgcctcctattcctcctcatccgt

SEQ ID NO: 75770 - DNA, 107 bp, Glycine max
  Clone ID: 700907235H1
gagggatccttgcttctgtggactcaagagtgctagttttggcaggatcaacagtgggtggtggctctgctgttaattggtcagcctgcattaagaccccacacaac

SEQ ID NO: 75771 - DNA, 276 bp, Glycine max
  Clone ID: 700907301H1
ctaccatccagcgatctgaaagtgtaaattccttctttgacaaatatgttcataagaagacctctgtccaagattttgtcaaacagtatgaagcaatcttgcaagacaggtatgaagaggaagcaaaagcagattctgatacatggaataaagtggcaaccttaaaaactccttctcctttggagaagagtgttgcagggattttcacacatgctgtattcaagaagattcaagctgaggttattggtgcagttgcttgtcatcctaaagctgaca

SEQ ID NO: 75772 - DNA, 270 bp, Glycine max
  unsure (1)..(270): unsure at all n locations
  Clone ID: 700907314H1
gtgaaccttctagaactataatagacttatattccatggctccgccgctcgaacacaacggcgtttccaccagcggtgactctctgagatctattccgacgccgtttctcaccaaaaccttccaactcgtcgacgatcacaccatcgaccatgtgatttcgtggaacgattctggatcgtccttcatcgtctggaacaccacggtttcgccaaggntttgttccnaaatatttcaagngcnncaactnctccagcttcgttngcnaatca

SEQ ID NO: 75773 - DNA, 273 bp, Glycine max
  Clone ID: 700907315H1
gcagagagtaacctctcaatcctagcttcaattatattgattttttcacatttctaaatccacctctaccatatatatctccctctaattaaacctctctatccatatctaaaatttcaaaaagatctcaattaattagatttccctctctctttctctctctaactatattgcaaacctttccctctgctttcaaaatcagcaaattcatgggtcttagagacattggtgcttcactgcccccagggtttcggttttacccgagtgatgagg

SEQ ID NO: 75774 - DNA, 273 bp, Glycine max
  Clone ID: 700907328H1
cactccctcctcttcacacattttcttagctctctccaacaatccctctcgttcacactttcagattgtgtgaagatgggggctggtggccgaactgctgttcctcctgccaacaggaagtcagaggctgaccctttgaagcgggtaccatttgaaaaacctcagtttagtctcagccagattaagaaggccattccacctcactgtttccagcgctctgttctccgctcattctcctatgttgtttatgacctcaccatagccttctgcctc

SEQ ID NO: 75775 - DNA, 270 bp, Glycine max
  Clone ID: 700907347H1
ctctaccactccgattgcatcacgccgtggatagaactcaactcgtcgtgtccgctatgcaggtttcggttggaggaagaagaggaggaaggtggtgacgccgacgctgacgccgacgccgttatgacggagatcaggagggagatcattgcgaggctgacggagctgacggaggaggatttctacgggctcaggaccacgctcagccacattgcctcgcgccacgcgctcatcgaagagaaccagaatcatcgcgcgcagattggcgag

SEQ ID NO: 75776 - DNA, 269 bp, Glycine max
  Clone ID: 700907370H1
ctgcaattcactctgtacaattcttcgttcgttctctgcagttatatcctttttgagcttcaatggcggacgctgaaaccttcgctttccaggctgagatcaaccagcttctaagtctcatcatcaacacattctacagcaacaaggagattttcttgcgtgaactcatcagcaatgcttctgatgctttggataagattcgattcgagagcttaaccgacaagagcaagctcgatgctcagccagagctcttcattcgtcttgtgcct

SEQ ID NO: 75777 - DNA, 268 bp, Glycine max
  Clone ID: 700907378H1
cccaagagttgaagaagaatcagagttcagaatccatggcaggtgctatagtaaagtacggaatcataggagtaggaatgatgggtagagagcatcttgtgaatttgtaccatcttcgcacccaaggcgtggcagttgttgctattgctgaccctcatcttccctctcaacaactcgctcttgacttagcacactcctttacttggcctctcaaggttttctcaggtcaccaggagctgttggacagtggactatgtgatgttttggt

SEQ ID NO: 75778 - DNA, 266 bp, Glycine max
  Clone ID: 700907395H1
aaattaacacccctgaatttcacactccctctcccaaactcatcatcctataatacaaagggtttggaatatatatcaaatatcaaaatacatcacaacatcaaaatggcctcaattgttactatggccaccattgtcacattagtcctcgcactagcatgttgtggcatgtctgccccgacctcagtgccgaaaaccactgcagcggccccggccccggagagcaatggctgcttgatggcactagcaaacatgtcagattgtct

SEQ ID NO: 75779 - DNA, 261 bp, Glycine max
  Clone ID: 700907401H1
gcaaccctttggatgccacttgttccaatgcttcggaatatgtcttttgggatagttatcatccaacagaaggagtttacagaaagctcgtaaattatgttcttgaaaagtacatagatcgattgttttgagctcgattaagtttgcctacgggaagtaatatcaattattagttatgttgatgtcaacgaagacaatgagtattttgatttgtcgagttttggtgtgattgttcggtactttttgtagatttcaatgttc

SEQ ID NO: 75780 - DNA, 257 bp, Glycine max
  Clone ID: 700907407H1
agcagtggcactccgcgtgcaaggtgatcgttcagtgttctttgattgcgctatgcgtggttaccaagacacattgtatgcccacgcccatcgtcagttctaccgcaactgcgaaatctctggaacaattgacttcatcttcggctactccaccaccttgatccagaactcaaagatcttggtgaggaaacccatgccaaatcaacagaatatagtggtggctgatggcacaggccagaagaacatgcccactggag

SEQ ID NO: 75781 - DNA, 161 bp, Glycine max
  unsure (1)..(161): unsure at all n locations
  Clone ID: 700907410H1
caggattgtctgaggatttgatttccaagtatttgacagaaacantatactgttcatctgagcaaagttcaagaagaagaagcttgttgtatatgtcctcctcatggaagggtgtcatcatcagatgcaaatgcttttaatcacgaggcaagtcatttcct

SEQ ID NO: 75782 - DNA, 259 bp, Glycine max
  Clone ID: 700907460H1
gtgatggtcttggtgctgagattgttggcactttcatccttgtttacaccgttttctccgccaccgatgccaaacgtagcgccagagactcccacgtccccattttggcacccttgccaattgggttcgctgtgttcttggttcacttggcaaccatccccatcaccggaactggtatcaaccctgctcgtagtcttggtgctgctatcatcttcaacaaggaccttggttgggatgaacactggatcttctgggtggg

SEQ ID NO: 75783 - DNA, 254 bp, Glycine max
  Clone ID: 700907475H1
gcgtgacaaaagcaaaaggaaagaatatcaacaaggtaaagtagattccttactagacatggcgttgaaggacacattctacatatctcatggatcaccaactttgtccatagatgaatccattcaggccaggaagttccttcagtcatggaagaaggacgtgtttcctcaaagaccctcttcaattcttgtcatctctggtcattgggaaaccgcagttcccacggtcaacgtcgttgactccatcaacgaca

SEQ ID NO: 75784 - DNA, 263 bp, Glycine max
  Clone ID: 700907502H1
gtttttcaggtgtcaagcatgcaacaggacttcagaattgttgggttgggttaaagatgtcttccagcactgtgcaccgtcatgggatggagaagccttaatgagggaacttgattatgttagtaggatctttcatgggagtaaagacccccgaggaaggaagctattttggaagtgtgatgatctcaaggaaaaatttttaagtaaaaaaatggattcaaaagctgtttgccgggcaatactgatgtttttccaagagcttg

SEQ ID NO: 75785 - DNA, 257 bp, Glycine max
  Clone ID: 700907508H1
aagcgaggtgtgggggcaacacgtccccgtgaataactccattgaggcattgacagcaacacgtcatcgtttcgtgtgctgctaccgtctgggcgcacgttagactacacctgtcctatgtcatttgctccatcctcgtgcccccctctcgtcgtttttaaaccaaatactattagttatttaatatcattaagatattagtatatctatttctctttctctgtcatacataaccttttacaagagttattaaaata

SEQ ID NO: 75786 - DNA, 254 bp, Glycine max
  Clone ID: 700907511H1
acggttcagcttggaggcagccagagaaggaggagatggcgcataaagttagctcgtaagatcagaattcccaaaatctcttctccaaagaaattggtgctgtgggtcagagacgcctacgtcaggatgatgctgggtatggctaactccatgggtgcctccgccgtcggctacggcggagacgccgcgttcaccgccaagggtggattcgagagggccccaccgcccaaggagtacgaccagaagatgatcat

SEQ ID NO: 75787 - DNA, 256 bp, Glycine max
  Clone ID: 700907519H1
ggttgataagtactactataatagtataactaaggaaggagtaagggtgatggtggttctgatctgacttttggcggtgtgggagtcacgagagcagcaaggggaagtcacaagagtcacaagaatggagagaggttcgggcaagctgagcaggaagaaaagtggtggtggaaacggacaggttctagacggttctaatattatggagttggttggaaaccagcaagttttcaccaccttcgtggaccataagttt

SEQ ID NO: 75788 - DNA, 254 bp, Glycine max
  Clone ID: 700907525H1
aactcaatttttctctcaaccggcccaatttagcataagcccagcatggccaccgcaacagcagcagccacctcgtccttcatggggacgcgcctcctggaggcccactccggggcggggcgggtgcaggcccggttcgggtttggcaagaagaaagccgccgccccgaagaaagtttccagggggtcgggctctagctccgataggcccctgtggtatccgggcgccaaggcgcccgagtacctggatgggag

SEQ ID NO: 75789 - DNA, 252 bp, Glycine max
  Clone ID: 700907528H1
tggcgtccatggccactttcttcacccaaacctccttcccctcccactctctctccaaaaccttcgatacccatttcgccccatccccgaaagtcaacgtatttgcgaacttcccggcgaggaggcacgtgggggttcgagtttcgaacgcgctgatcgaaccagacggagggaagctggtggagcttgtggtgagggataattcagaaagagacttgaagaagggtgaggctctttcgttgccgaggatca

SEQ ID NO: 75790 - DNA, 258 bp, Glycine max
  Clone ID: 700907534H1
cttctctggttgattcggatctagagtcttcagtttctcctcgttgttcttcgctttcctgttttcaatttcgattctttcgttaatttaataagatgtttgggagggcaccgaagaagagcgataatacgaggtactacgaaatcctcggcgtctccaagaacgcttcgcaggatgatctgaagaaggcttacaagaaagccgccattaagaatcaccccgacaagggcggtgatcccgagaagtttaaagagctgg

SEQ ID NO: 75791 - DNA, 253 bp, Glycine max
  Clone ID: 700907535H1
aggtggtctcagtgtggtttatcatcaacttgacgtagtagactattcatccatcaaccagtttgttgagtggttgcgggaaaattgtggtggtttagatattctggtaaataatgctggtgttaattttaatcttgggtctgataactcagtcgaaaatgctcgtaaagttattgaaacaaattattatggcaccaagcgtatgactgaagctattatttcattgatgaagccatcccttgttggtgcgcgt

SEQ ID NO: 75792 - DNA, 251 bp, Glycine max
  Clone ID: 700907539H1
gaatggtataatactaatgtggggcctttagatcaaagaaagagcaccgtggacccagcattggtgactgctgaagaaggcgctaaggttgtaaaggtgatgcaagatggcagtggggaattcaagaccatcactgatgccattaaaagtatacctagtgggaacactaagcgtgtaattatttacattggagctggaaattataatgagaaaatcaaaattgagaagacaaagccttttgtcaccttgta

SEQ ID NO: 75793 - DNA, 251 bp, Glycine max
  Clone ID: 700907542H1
tccaaatggccctttacattacactaataattggcctcctagtaaacaccctagtactctataaatagcatttgcatgcaccttagtcttcaccaaaatactcctcttggcatcttgtgttgtgtccctcttttaagctatttccttctcttaacacaattggttgtgccaattgccatagtcaccaaccaattaacaaaggtatatatatcatcatatcatcaccaaatgaaaaatattgggttgttttt

SEQ ID NO: 75794 - DNA, 257 bp, Glycine max
  Clone ID: 700907549H1
ctggttttctgctatgactatgaagagtgtgggaagtgctgctctgaagatggttgaagaagtacgcaggcaattcaacaccattccagggttgatggagggaactgctaagcctgactatgccacatgtgttaagatctccactgatgcttccattaaagaaatgattccacctggtgctcttgtcatgcttacaccgcttgttgttggaatcctttttggtgttgaaacactttctggtgtcctagctggatctt

SEQ ID NO: 75795 - DNA, 253 bp, Glycine max
  Clone ID: 700907551H1
atagcccaagccctatacaaccaaaccctaacacacacccatttgattcagtttccatggctagcctcaaggttgcatttttggctgcagtgctctgcatggttgtggtgagtgcacccatggcacatgcagctatcacgtgcgggcaggtgacgaatagcctgatcaattgcatcggttacctccagaacggaggaacgccgccgtcgggatgctgcaacggagtgaagagcctcaatgccgccgccaagac

SEQ ID NO: 75796 - DNA, 249 bp, Glycine max
  Clone ID: 700907554H1
agttgctcttcttctttttttcttttctttcaccctcaaaatttctcactctctttatcttcaccttttcagtttaaagcttcagatcacaacagatccaccattcacctcaccactttctcttcacaaggcaaatctaacaagaaaaagtagtctctgaagccgatccagtgtcttgtgaatttggaattggtagtgaatttagatctaaaaagccatagcaatgtcttttatcggtacccagcaaaa

SEQ ID NO: 75797 - DNA, 250 bp, Glycine max
  Clone ID: 700907555H1
gctgattgttgtgttcttgtatatgatgttaattcaatgaaatcatttgacaaccttaataactggagggaggaatttctgattcaagcaagtccttccgatccagagaattttccttttgttgtcataggaaacaaaatagatattgatggtggaaacagcagagtggtgtcagaaaagaaggctcgggcttggtgtgcatcaaaaggaaatattccatattttgagacatctgccaaagaaggtatta

SEQ ID NO: 75798 - DNA, 254 bp, Glycine max
  Clone ID: 700907566H1
aacacaaagcacaaagcaaagctcatccttgagttaaaaaatggcagcagcttcttccatggctctctcatccccatccttggctggcaaggccgtgaagctgggcccatcagccccagaagtgggaagggtgagcatgaggaagaccgtcaccaagcaggtctcctcaggaagcccatggtacggcccagaccgagtcaagtacttgggcccattctctggcgagcccccgtcctacctaaccggtgagttcc

SEQ ID NO: 75799 - DNA, 250 bp, Glycine max
  Clone ID: 700907571H1
gaactagaaagcatccctagcaaaagtcaaggttggccccttgcgtcaatcgccggcttcgaaatcgctgtcaattatggcatcacactgtgtaatggccgtgacgccctcaacccctcttctctccttcctcgaacgcctccaagaaacagccttcgaaaccttcgcccattccaacttcgatcccaaaacctacgtggacatgcctctcaagtccgccctcacggttaccgaggacgcgttccagaag

SEQ ID NO: 75800 - DNA, 248 bp, Glycine max
  Clone ID: 700907573H1
ccaaaggccaatgaccaatatttgcctccttttgttattgttgacgagagtgggaaacctgttggtccgatagttgatggtgatgctgttgttacattcaacttccgagctgatcgtatgacaatgattgctaaagctcttgagtatgaaaattttgacaaatttgatagagttcgttacccaaaaatccgctatgctggaatgcttgaatatgatggtgaattgaaacttccaagtcattaccttgt

SEQ ID NO: 75801 - DNA, 245 bp, Glycine max
  Clone ID: 700907575H1
cttagccaccaagtagagaccgaataacaatgagtattctcttcccaagaagttcctcagcagcaaagaggaaaagggtcattagagaacttgttcagggtcgagactatgctactcagttgaagtttctgcttcagaagcctattggccctgatgggtctgtttctgctaaggaacttgtggccaatgtgctgagatctttcgctgaaactctctctgtgttgacttcttcttccgaggattca

SEQ ID NO: 75802 - DNA, 245 bp, Glycine max
  Clone ID: 700907576H1
ataaagtccgtgaaacaacagctttcatggttccattggtggctggtgatggaaccaaaactcaggcacttgctgtttgccactcagatacttctggaatgaatcatcacatgcttcatgaactcatgggagttgatcctggaactaaccctgtttgccatttccttggaagcaaggccattttatgggtacccaatttatctatggacactgcctatcagactaacgttgttgtttaattagtc

SEQ ID NO: 75803 - DNA, 248 bp, Glycine max
  Clone ID: 700907584H1
caacgatcagcgcggttcaggtggagttcctggagtttccagcggtggttacttcaccagcctccggcaagacctatttcctcggcggcgcaggggagagaggattgacgattgaggggaagttcataaagttcacaggcataggagtatacttggaggataaggcggtgccatcactcgccgctaagtggaagggtaaaacttcagaggagttagttcacaccctccacttctacagggatatcatt

SEQ ID NO: 75804 - DNA, 245 bp, Glycine max
  Clone ID: 700907585H1
ggagtgctgggggtgagattgcgcccaccactaggcactataggagtgtctccatggatagtttcattgggaagttgaatttcgatgaggagtcgcccaagctgcctccttcccccgggcagagaagtgctctgatgtcgcctgctggtggaattgatgggaattcggcggccttcagcttggagtttggaaatggggagttcagtgggcctgaactgaagaaaattatggccaatgaaaagctt

SEQ ID NO: 75805 - DNA, 246 bp, Glycine max
  Clone ID: 700907589H1
catcaatcctcgttgctttatttgaggccacattatacgcatctctccatctctctctccttacctcctcaaaatgcgtcttcctcgccagctcatttgctctatgagatagaatctgcgcgagaaagcgacaccaatccttgcaatagagatggtggttaccagaaatattgtgttgttactgctttctattacttttgttgctccaattgtgctctacactgatcgttttggcaccttcaagta

SEQ ID NO: 75806 - DNA, 254 bp, Glycine max
  Clone ID: 700907612H1
catagccgcgcacctgcccaagagaactgacaacgacatcaagaactactggaacaccaacatcaagaaaggactcatcggaaagggcttagatccccttacctacaaaccaataaaatccaacacttttcaagcctatggtggtaatttccttgacccttccattgacaccaccaatatgaaccatgtggctcaatcggagagtgctcaaatcgaagccgaagcaagagaatctatgttgcatttggatctct

SEQ ID NO: 75807 - DNA, 252 bp, Glycine max
  unsure (1)..(252): unsure at all n locations
  Clone ID: 700907613H1
tgaaccttcnagaactataatagacttatattccatggctcngncgctcncaacacaacgncgtttccaccagcggtgantctctgagatctattccgacgccgtttcncaccaaaaccttccaactcgtcgacgatcacaccatcgaccatgtgattncgtggaagattctggatcncccttcatcgtctggancaccacngctttngccaaggattgnntcctananaattnaaggggaacaacntctcc

SEQ ID NO: 75808 - DNA, 258 bp, Glycine max
  Clone ID: 700907621H1
ataaaggtgaaaaggagttgcactcactgaatgcggatagagttactcaaggtctaagtactgtatggagtttgattcttctaaggcctcccattcgagatacttgcttacaaattgctctacagagtgcagtgcatcacctggaagaagtgcgtatgaaggcgatacgtctggtggcaaataagctttatcctctgtcatccatttctaagcaaatagaagatttttcaaaggaaatgcttttctccgtgatgagtg

SEQ ID NO: 75809 - DNA, 253 bp, Glycine max
  Clone ID: 700907625H1
gaccgacacgcttttattattaattgcgtccctttcttctctaataccctcctccgatggaaggaatgttacgcgactctctcttgtcgcttattatgaattactacaagtactcacaagagaacgtacgacaaggttttgttctttattttatcgtcaagagaaacagaggaggttgaagcaaagccagggtaagaggagaaagatagtctccctccatattgatttcaattgttatgaataaataaaaagg

SEQ ID NO: 75810 - DNA, 250 bp, Glycine max
  Clone ID: 700907647H1
ctgaattcctcttattcaggaatttggagagtattgatatatcaaggtaggataaaccagtagccaaggaagatatggagttttctatgattttcattgttagcaacattatgctgcttttcagttcagcatttgccaaaactgctagtcctccctctctgagcccaactccagcaccagccccggcaccagacttcgtgaacctcactgagttactcagtgttgctggtccgtttcacaccttccttgg

SEQ ID NO: 75811 - DNA, 253 bp, Glycine max
  Clone ID: 700907653H1
ccttggtgttggagatcgtgatgaccttcggtctggtgtacacggtctacgcaactgccattgaccccaagaagggtaatttgggaattattgctcccatcgccattggtttcattgtcggcgctaacattttgttgggtggggccttctctggagcggccatgaaccccgctgtgacatttgggcctgctgtcgtgagctggacctggaccaaccactggatctactgggccgggcctctcatcggtggtgg

SEQ ID NO: 75812 - DNA, 248 bp, Glycine max
  Clone ID: 700907663H1
gagaaatagtgacatacttttcgtacccaaaaagagagagggactattcaaggtggccagacacgccagaagggtggagatcggtgactgaggaatacagcgacaaagtaatgggtctagcttgcaagctcatggaggtgttgtccgaagcaatggggttagagaaagagggtttaagcaaagcatgtgttgacatggaccagaaggtggtggttaattactaccccaaatgccctcaacctgacctc

SEQ ID NO: 75813 - DNA, 263 bp, Glycine max
  Clone ID: 700907665H1
tttttcttccgattaaaaaaaaatcagtcaaataaagtgttgttcgcattttaatgcatgatcaaatgatcaaattttcatacacacttttatcgccccttgctcttgagacccaaaacacgtgacataaacgtgaatataaatacgaactcagtttctcaacactctacaatggtgacgacgcttctaaaattctaaaaccctaaccctaaccctaaggaaaaaaaatcccaatcttcgcaagactcgatgaacgtggatca

SEQ ID NO: 75814 - DNA, 253 bp, Glycine max
  Clone ID: 700907716H1
gtttgttccagcgttggaaacgtgcgctcggattaaaataaccgacccgaacccgaaatgggatatggaaacaatgcccggtgctagagtcatgagtgacatggttttactcccgaacggcgacgttttgattgttaatggagcagccgtagggactgcgggctgggaattgggccgtaacccgctactgagtccgtttctttataaaccaaataatcgggtcgggtcgagatttgaggttcaaacatcgtct

SEQ ID NO: 75815 - DNA, 238 bp, Glycine max
  Clone ID: 700907759H1
cataaatattccgttttgcgtttctctgcctaaaaggattgaaagatgggtcaagcactaggttgctatcaagttgatcagtcaaatgtggctatcaaggagcattttggaaaatttgatgatgtcctagaacctggatgtcattgcctgccttggtgtcttgggtaccagattgctggtagtttgtcactgcgtgtgcagcaacttgatgttcgatgtgagacgaaaaccaaggaca

SEQ ID NO: 75816 - DNA, 241 bp, Glycine max
  Clone ID: 700907761H1
tatagcccaagccctatacaaccaaaccctaacacacacccatttgattcagtttccatggctagcctcaaggttgcatttttggctgcagtgctctgcatggttgtggtgagtgcacccatggcacatgcagctatcacgtgcgggcaggtgacgaatagcctgatcaattgcatcggttacctccagaacggaggaacgccgccgtcgggatgctgcaacggagtgaagagcctcaatg

SEQ ID NO: 75817 - DNA, 228 bp, Glycine max
  Clone ID: 700907781H1
gtggcggggtagtgacattacagtgtgggcataaaattttcaaagtcgaagcgagaacttgccatttcgagggttttagggttagggttttctcaaattgcaagaacatgggtttcaacattcaaccctatgggattcagtccatgctcaaggaaggccataagcacctttctggcctcgatgaagcggttctcaagaacatcgacgcctgcaaacaactttccacac

SEQ ID NO: 75818 - DNA, 236 bp, Glycine max
  Clone ID: 700907786H1
gaaaccttcgccaagaaccgtgaactcgaagtgatccactccaggtgggccatgctcggagccttgggctgcgtcttcccggagttgctgtcccgcaacggggtgaagttcggagaagccgtgtggttcaaggccgggtcccagatcttcagcgagggtgggctcgactacttgggcaacccaagcctgatccacgcccagagcatcctcgccatctgggccacacccattaggat

SEQ ID NO: 75819 - DNA, 235 bp, Glycine max
  Clone ID: 700907791H1
cagtgttgtttcctccattttttttcttcttctcctctcaatgggttgcatttactcgcgagtctgcataggcgacaattgcagaggctccagcatcaacggagaccccatcgcgcgaaacgacgtcgccgaagtcgtgaatttctccccttcctcttcggatgttgaagaaggcgaaatcagagaccaattgaaccaattgagcatcaccagagactctgaagctggaatccga

SEQ ID NO: 75820 - DNA, 249 bp, Glycine max
  unsure (1)..(249): unsure at all n locations
  Clone ID: 700907805H1
caaatattttttcacttgctctccatcttttttcagttcatcagnggccaggtaggccatgggangggctccatgttgtgacaaatccaatgtgaaaagagggccttggtctcctgatgaagatgccaccctcaaaaactacnttgagaaacatggcacaggtggtaactggatagctctccccaaaaaagcaggccttaagcgttgtgggaagagctgtcgtctaagatggctaaactatctcaggcc

SEQ ID NO: 75821 - DNA, 255 bp, Glycine max
  Clone ID: 700907809H1
ctaacctacctctttttcttctctctcaacaacttcaccttcttcctcctcgatcatgtctcacttcaagggcaagtaccatgatgagcttatcgccaatgctgcgtacattggcactcctggaaagggtattcttgctgctgatgagtcaacagggacaattggcaagcgtttggccagcatcagtgtagagaacattaaatccaacaggcgagctcttagggagctgcttttcactgctcctggtgttcttca

SEQ ID NO: 75822 - DNA, 253 bp, Glycine max
  Clone ID: 700907874H1
tgggattggagggattgacgctgcgtctcttcctcttctctttcgatccatccctcattcctaatcctccaatccaaccacctcagcctcacactcacatatacacatatctgaacgcgtatcgtccctcctatggcttcaaagcgcatcctcaaggagctcaaggacttgcagaaagacccaccaacttcttgcagcgctggtccagtagctgaggacatgttccattggcaagcaacaataatgggtcctg

SEQ ID NO: 75823 - DNA, 248 bp, Glycine max
  unsure (1)..(248): unsure at all n locations
  Clone ID: 700907885H1
ccttgtttggggtttgcatttttcctggttgaaaaagggaagaacttgaactaattggttaagtnnnnnnnnnnnnnnnnnnnnnngggtataatattttatatcagttatnaaaggaaagaaaganagaaacgaagatgggaaggggtaaggtacagctgaagaggatagagaacaagatcaatcgccaggtaactttctccanncggagaagtgggttgctcaagaaagctcatgagatctctgta

SEQ ID NO: 75824 - DNA, 261 bp, Glycine max
  Clone ID: 700907906H1
gaaagatgctgctcagaaaacattttttgatattttaaaaggtcgaggggaaaagcttttgcggtatcccccacttgttgctgttgatctttccccgccaccagcagtgagggaaggggtatctgtacttcttgaagttatcgacaactacaacagcatgatggttcctgcttctggccaaaaacctgcttttggtccagttatatctgctatactggatccaatagttcagatgtgtgaacaagcagggaggcacacaag

SEQ ID NO: 75825 - DNA, 255 bp, Glycine max
  Clone ID: 700907916H1
actggctatgggctggttttctttgcccagctcatgcttgctgacatgaataaagaacttaaaggattaagatgtgctgtgagtggttctggaaagattgcaatgcatgtcttagagaagctaattgcttatggtgctcttcccatttcagtatcagattctagaggatatttggttgatgaggatggatttgactacatgaaaatatcatttttgagagacatcaaagctcaacaaagaagttacgagactatt

SEQ ID NO: 75826 - DNA, 257 bp, Glycine max
  Clone ID: 700907924H1
tttttatgtcattaaagggagcaatggaaatcttaagacttccttttgtgctgatcaatcaaggtcttctcaggcaaatgatgtccgcaagcaaatcgttggcagcgctgttccagttcttaaaggcgaaaagttttccttgcggatactggtggaccattctattgttgaaagctttgctcaaggtggaaggacggttgtgacatctcgggtttatccaacaaaggcaatctatggagctgctagttgttcttgtt

SEQ ID NO: 75827 - DNA, 259 bp, Glycine max
  Clone ID: 700907935H1
aaatttctctgaagtaatagaaattcttcagcagatagcaaaagaggtcaatgatcacaaagataaagcatcccatggctttctctcagctcttagacgggcccatcattgatattgatataagagtattacgcgacagtatagcctttttgtcctgtatagtagtcagactctgactaaatatctattgagttcgttgtttataatactcttgaaagattccgttgtattgtgtttgccttaaattctgttacaatct

SEQ ID NO: 75828 - DNA, 256 bp, Glycine max
  Clone ID: 700907938H1
gtggtgctgcatttccgaggtgccgacgtgtcattgccggcgacgaattacttgattccggtggataacagtgggagcttctgcttcgcgtttgcgggaactatgagcggtttgtccataattggtaacatccaacaacaagggttccgggtctccttcgaccttgcgggttctcgggtcgggtttgcccctagaggttgcgtttgagacttgggaaatgggaacaactctttccctgttgtttctaattatgatt

SEQ ID NO: 75829 - DNA, 257 bp, Glycine max
  Clone ID: 700907950H1
gcaaacatagcggtccctatcttgaaatagtcaattcctccatcccagcagcatgtcaacatgtctcagaagttgcagcataccgtctcatattccttgactccaattcagtcttctatggcagcctctatgttggtgacgtagccaactctcgcattaggccagcgctgaggatcctcaagcaaaacatcacgctgatgactacacttgtggcagatagagctcaagcacttgcaatgaaggaatgatgaaggcat

SEQ ID NO: 75830 - DNA, 253 bp, Glycine max
  Clone ID: 700907956H1
ctgtatttcaaacacgtgagagaatcatttgagtctggcagccaaacttgtcttgcaaaagtcttggggatatatcaggttactaaaagacacgttaaaagtggaaaagaggttaaatatgaccccctcatggtgatggaaaatcttacctacaatagaaatattactcgccagtatgatcttaaaggtgctctttatgcccggtacaattctgctgctgatggagctggagatgttctgtggatcagaactt

SEQ ID NO: 75831 - DNA, 248 bp, Glycine max
  unsure (1)..(248): unsure at all n locations
  Clone ID: 700907958H1
tctctnctnaaatgtttagaggcttcctnggccctctgtagcatttgtaatncatcctcctgaagatgcagttgtntncagtttgtggncatgttttctgnaaccaatgcatctgtgaacatcttaccggcgatgacaatcagtgccctgctgcaaattgcaaaagtcgactgagcacatctatggtattttcaaaaaccacactgnacagttgtctttctgaccagagttgtgatattcacccagtc

SEQ ID NO: 75832 - DNA, 253 bp, Glycine max
  Clone ID: 700907970H1
cttgtattgtctcaagcaaccatggcaatggcaacccaagcctctctcttaaccccacccctctccggtctcaaagccagcgaccgcgcctccgtgccatggaagcaaaactccagcctctccttctccagcccgaagcccctcaagttctccagaacaatcagagcagcagccgccgacgagaccacagaggcaccagcaaaagtagaggctgcaccggtcgggttcaccccaccagaactgacccaaacac

SEQ ID NO: 75833 - DNA, 137 bp, Glycine max
  Clone ID: 700907989H1
catcttgtcattcaccgagaaagtcgtactgattcctcttcatctttcgttaaagcgagtacttttcgttcttgatctgttggttacgatgtcgtattcaaggagatctaggtattctccttctccttctccttctc

SEQ ID NO: 75834 - DNA, 146 bp, Glycine max
  Clone ID: 700907992H1
ctccaatctgtttctgattggtttttggttttttcttttttggccactgatctgttttagtgtgctgaggaatgtacatgtatcataattttactgagcatttatttgcccatgcagactccaatatatcgccccattttcctttt

SEQ ID NO: 75835 - DNA, 243 bp, Glycine max
  Clone ID: 700907994H1
gttcaggatattgtttttattagttctgcatcgcgttttgctctggactctcaccgttccttcagagtggaaccctagttgtctctatccttaaggttccgccaccgcaccaagtctcagcacccaaccaggtcttctttcattcatggcggaggaacttatttctcaattaaacaatatgctagaagaaaatggaacaccaagtcatgtagaaagggctgctgatgctgagctgatgctgag

SEQ ID NO: 75836 - DNA, 245 bp, Glycine max
  Clone ID: 700907996H1
cttcaaaaactttgcagagctacggaaaaagttactgccattttcattggcccttttcagttttggagaagtaaatggcctgttgacaagagatgattttcagagagcagcatcacatgtatgtggcatatctctctcggacactgtggttgaaattgttttccatttgtttgatgcaaatcgggatggaaacctaagttttgacgagtttgtcagagtgctacacaagcgcgaagggacattgc

SEQ ID NO: 75837 - DNA, 251 bp, Glycine max
  unsure (1)..(251): unsure at all n locations
  Clone ID: 700908079H1
cactgtgttcctgtttttgttcttcgatggcngcaacctcaacatcactggcttctcaactctacattggcctgcgccgcccctgcctcaagctcgattctttcaattctcaatctttctctctcttcgaccctaatcttcgcctntccctctctccacccaaaccctcacgcgccgtcatcgccatggccggcaccgggaagttctttgttggtggcaatggaagtgtaacggaaaaaagatcaatcagc

SEQ ID NO: 75838 - DNA, 143 bp, Glycine max
  unsure (1)..(143): unsure at all n locations
  Clone ID: 700908082H1
gncttgantccntactttgaacaccccaaattagaanagtgtgttgtgttgtgttnaagnagcngnctaacanagatgtttgggntncttaggnggcantaangggcacaanatcaangatatgtggtgttgatgagcaanaa

SEQ ID NO: 75839 - DNA, 110 bp, Glycine max
  Clone ID: 700908108H1
actttgcgcagattgttgcctcgcgttgtggtggtatgtgatctggaacttcctctcactatggcgatgttcttgtcaattcttgttctgtagatctgatgattgttgtt

SEQ ID NO: 75840 - DNA, 265 bp, Glycine max
  Clone ID: 700908153H1
aataacccacgcaaaaaccttaaattgcccattaaaactgaaaccccttttgttttttgccttagattacaactgcaaaagggtcacagcttctcgggtttgtttccttttgagaccacattcaattttttgatgtgaatcctcacaacaatgtctgggttggaggaattgagaaaaaagcttgcacctttatttgatgccgagaaggggttctcatcaagttcaacgttggacccttgtgattcttacacattctcggatggtg

SEQ ID NO: 75841 - DNA, 225 bp, Glycine max
  Clone ID: 700908163H1
atttcaagggctgaaacatactatctttaactgtattctccctttgtttcctcaccagttgattcaggttgcaaacatggcttttccagacccatccatgtcagtttctccacagaggaagatgggaagggggaagattgagatcaagaggattgagaacactaccaatcgccaagtcacattctgcaagcgcaggaacggcttgctcaagaaagcatatgaatt

SEQ ID NO: 75842 - DNA, 260 bp, Glycine max
  Clone ID: 700908175H1
ggttttgatgcaagctatgtatggagttaaggtggagactgtatttatttgcagggtgtttactgcagcattctctggctcgtcaaagaagttatcagacttgaatgtggccgacatacattcatgggctccagattttagaaggttgcaggatcttgtaaatgaggaaattagagttagattttctggtggtaaatttactgtattgaatgagttggaagcggttgatgcctctgtgaagatattatatcctactatcc

SEQ ID NO: 75843 - DNA, 263 bp, Glycine max
  Clone ID: 700908178H1
aggtaagctaggacatcacttttttcataaaggcctgcttctccaggcatttgtacatccttcttacaataagcttggaggaggctgttatcagcgattggagtttcttggagatgctgtcttggattatttgattacttcatatctattctcagcttatcccaaactaaagcctggtcaattgacagatttgagatcattgtctgttaacaacaaggcatttgcttgtctagcggtagatcgcagttttgataattttcttt

SEQ ID NO: 75844 - DNA, 210 bp, Glycine max
  Clone ID: 700908190H1
tgtgtgtctgtggggtgtgtgcgtgttaactttggaatggttttgatcattggaagccacttcagaagagaacctaatcaagttatagttattggaggtcgttttagcatcatgtgatcattttccttatcctttgtaaccttcgggaaatgtcacttgcaccttgaaaaagcacgagattgaaaaaatgaatgtaatatgtttgaagtt

SEQ ID NO: 75845 - DNA, 270 bp, Glycine max
  unsure (1)..(270): unsure at all n locations
  Clone ID: 700908207H1
gtggttgcntcatctatgtnatgcacatcaggaantgcagtcatagngcagaagctgctcagtgtgctgttgctgttgctngtgttgtaatgcnggcccttggngccagaaacgatggtgtttgagcaaagacnacgtttctgctttacggaanattgatcctatggttagcaatganattacgtctgaagcatctgctgcggaggttgagggatatggtgcttcaaaactgcctcttgnactcggntgtgaaatacttgcagcttgctt

SEQ ID NO: 75846 - DNA, 260 bp, Glycine max
  Clone ID: 700908241H1
ggcgctcgtcgcgttctaccagaagtacgttgatgaacagagtaagaaggagatcaaggacattctggtgaggtacgatcgtaccttgctcgtcgcggatcccaggcgctgcgagccaagaagtttggtgggcgtggcgcacgtgcgaggttccagaagtcttaccgttgaaggagaatggtggtgtttttgtgtttttttgtttttggttcggttcatgttttatgctgtggaaaaaatgaaaacttttgttggtggtt

SEQ ID NO: 75847 - DNA, 264 bp, Glycine max
  Clone ID: 700908266H1
gttgttatgctaggaggaaggatacttgagatattgtccataaatcttgggcttagagaggattttctcctaaatgcatttggtggggaaaatgaccttggtgcttgcttaaggggaatttctaccctaaatgcccacaacctgacctcactcttggcttgtcccctcactcagaccctggtggcatgaccattcttctccctgatgaaaatgtgtcaggacttcaagtacgcagaggagaagattggatcactgttaagccag

SEQ ID NO: 75848 - DNA, 256 bp, Glycine max
  Clone ID: 700908276H1
caacactgacagccagaatggtccgttaaaaaaatctagttctaggaaagttcaaagtaacaatcaatcaagattttcttttgcatggcaggaggaatccaaattccaagccatgtacctccatcttctggtgctacccagccatttccaaagaatggctcactcatccaggattttgtggaaagagacttttctttgaacaagctgggttttgcaaatggcttcccctccaataacctcaaggaatctggaaatc

SEQ ID NO: 75849 - DNA, 99 bp, Glycine max
  Clone ID: 700908279H1
caaatgacttgctatttgggtcaaaaactacattttgtataaaatatcttggttttggggcttcctccttcaattcaaatgcatacatgttctccctcc

SEQ ID NO: 75850 - DNA, 150 bp, Glycine max
  Clone ID: 700908291H1
agaagaccgtttcaaatatctgtgctctcaaggttccaagaaagtctttttgtagtactgagggtgtgaaagttgctggttgctctattccagaggtttccaatgaccagagaagaagcaggctattagcaaagttattccacacaacat

SEQ ID NO: 75851 - DNA, 259 bp, Glycine max
  Clone ID: 700908303H1
gcagtgagatctgtatcgccaaaattcatgatttcgtgttgaatgcatcgtccgagttaggttaatttttcgacattttttggtgtaaaatggaggtgccaactaggagaaaacccgtgatctactggatttgccttttcgtcattgtcaatgcgtttgtacaaattagcaatgcattttatcttccgggaagctacatgcacacttactcaaatggagataatatatatgccaaggttaattcattgacttctattga

SEQ ID NO: 75852 - DNA, 260 bp, Glycine max
  Clone ID: 700908304H1
gatagctagaagcaataagatgaaaatgaaagtgcttgttttgtttgttgctacagttttggtagcatatgaatgccatggctcagactaccagaagttccctctccaaatgaaaactgggtttggtgggcaatacagcaatgaggtggcatgtgccagttggaggcttggcgtggaagcaaacaacgtagtcaagtggcaaactgttcctgcagcttgcggagagtacatagctgactacgttctaggagaccaatata

SEQ ID NO: 75853 - DNA, 257 bp, Glycine max
  Clone ID: 700908318H1
ttctcgttctggtttatagatctttgcgaaggaggtttacagcgctcaaccaaagatgcagaacgaggaaggacagatcactgagctttacattcctaggaagtgctccgccacaaacagattgattaccgctaaggaccatgcttcggttcagatcaacattgggcatgtggatgagaatggcgtctacaatggccatttctccacttttgccctctgcggattcatccgtgctcagggtgatgctgacagtgctc

SEQ ID NO: 75854 - DNA, 261 bp, Glycine max
  Clone ID: 700908325H1
gttcttgaggacatgagtgatgtaaaggaattggttcctgagctattttacctacctgaggtcctcacaaatgaaaattcaattgattttggcacaacacaaatgggaggaaagcttgatactgtaaagcttcctgcttgggctgaaaatccaattgattttattcacaagcaccggaaggctctagagagcgagtatgtatctgctcatttgcatgagtggattgacctcatatttgggtataagcaacgaggcaaggaa

SEQ ID NO: 75855 - DNA, 258 bp, Glycine max
  Clone ID: 700908327H1
cactgttgtgccatgtacatggtcagcatcagaaactttgaagatgaagccagacggggttcttttcagcaatggccctggagatccgtctgctgttccttatgccgttgaaacagtgaagaatattatcggaaaggtgcctgtttttggaatttgcatgggccatcaattgctaggccaggctttaggaggtaaaaccttcaagatgaaatttggtcaccatggaggaaatcaccctgttcgtaaccttcgaagtgg

SEQ ID NO: 75856 - DNA, 255 bp, Glycine max
  Clone ID: 700908337H1
gccaactagaggaccctaagactcagagatcaggctggcagcttgtatttgttgaccgggagaatgatgttcttcttcttggtgatgatccttggcaggagtttgtgaacaatgtgtggtacataaaaatactatctccactagaagtgcaacaaatgggcaaaggtcttagtccttctacttctgccccaggtaacaaactttctactcctgccaactcttgtgataattatgtgagtcaacaagagttgagaa

SEQ ID NO: 75857 - DNA, 257 bp, Glycine max
  Clone ID: 700908340H1
gcaaaatgaaaggcagtggaaatgtgccaaaacaagtggcactgtgatttgtgaccacaacaaatgcatagttcattttatggttcagaccaatcaacccgtagactccttataagtgcgcagaagttcaagtgtagagaatgagtcagcctaagattaaacgccgagttggtaaatacgaggtggggaggaccattggtgaaggtacatttgcaaaggtgaaatttgcaaggaactctgagacaggagagcccgtg

SEQ ID NO: 75858 - DNA, 253 bp, Glycine max
  Clone ID: 700908351H1
gagattctggagcctaacacgtgcattaggggttgctgcaccagcccctctattccccttcatctccctccctcttcttatacccttctctctcctattgcccgagggtctgagagtgttgtttatgaagggactttggatggcacgagggttgctgtgaagaaacccatcttgtcaacttcagaagacattaataagtttcataaagaattgcaattgttgtgcaagttagatcatccaggaatagcaacac

SEQ ID NO: 75859 - DNA, 252 bp, Glycine max
  Clone ID: 700908354H1
gtccagcagtgtggtcaaaacacagaaggtggctgttaatgtccatgctttgcctgaatcccgtagcttgttcatttgtggatcttcaattccctaatgggcaactaacctacgtatctggtgagggtctaagtaccagtgctttcctacctgtttgtggaggtcttcttcaagctcagggtcaatatcctggggaaatgagattcagcttttcatgcaagaataagtggggaacaagaatcacaccaatgg

SEQ ID NO: 75860 - DNA, 254 bp, Glycine max
  Clone ID: 700908357H1
atattttgcaaacaaatgtgttcaccggtggcaagggtgacagagaacaaagaatctacctctggtttgaccctacaagagaatatcacagatactcagtgctatggaacatgtaccagattgttttctatgtggatgactacccaataagggtgttcaagaacagcaatgacttgggagtgaagttcccatttaaccaaccaatgaagatatacaacagtttgtggaatgctgatgactgggccacaaggggt

SEQ ID NO: 75861 - DNA, 253 bp, Glycine max
  Clone ID: 700908358H1
gacgaatgtgatggacacgcttaacatgcttggccttgcgaaaagaattggggctaggtttctgcttactagtactagttaggtttacggtgatccgttggagcatcctcagaaagagacttactggggaaatgtgaatccaattggtgagaggagttgttacgatgaagggaaaaggattgtggagacgttggccatggattatcatcggggtgctggtgttgaggtcaaacatatgagaggcaatccatcc

SEQ ID NO: 75862 - DNA, 255 bp, Glycine max
  Clone ID: 700908360H1
aaaaaagaaaaaagagagcataaaccaatggctacttcactttcagcaactgggtgtgttggttcttccttctatggaagttggggaacttcaattgttggtgaggactacaccatgctggccaagtcagtgccatcacaagttcgcatggggaagggaaagcccacgagattgcagcctatgatgaagaatgttaatgaagggaaaggtatatttgcacctcttgtggtgatcactcgcaacatcgttggcaag

SEQ ID NO: 75863 - DNA, 250 bp, Glycine max
  Clone ID: 700908365H1
ctctgactcttccaaagtcgcttatgttcttcaaggtagtggagtggctggaatagtgttgcctgaatcagaagagaaggttgttgcaataaagaagggtgatgccttggcactcccctttggtgttgtgacctggtggtataacaaggaagaaactgagttggttgttctgttccttggggacacttccaaggctcacaaggctggtgaattcactgacttttttctgactggttccaatggaatcttc

SEQ ID NO: 75864 - DNA, 254 bp, Glycine max
  Clone ID: 700908373H1
cccttttcctaacctcaccggcgggtgctcgtactgctactgtcatgcctagaagggcggcggtcatcgtgtcggcggcgacggcggagacgccgaagaagaagggcgaatcgaaagggttcgtggaagagatgaggttcgtggcgatgaggctgcacacgagggaccaggccagggagggcgagaaggaggtcaagcagcccgaggagaaagccgttaccaagtgggacccatccgtcgaagggtacctgaaa

SEQ ID NO: 75865 - DNA, 252 bp, Glycine max
  Clone ID: 700908374H1
agagtcctgagagtgatggtgcgcagaaagatcttcagtgcacaagaatcagagacaggagaaaccctcttcggcttgacacgagcctcgaagtggatccttcgcgacacgaaaatgaccctagcacccatgttgctgctggagaaccacccaattcacctgaaccctgcgcactacatcagtgagattattagagaaggcacaaaaaatggcactgctttctttaagtgccatggacatgagcaatttgag

SEQ ID NO: 75866 - DNA, 252 bp, Glycine max
  Clone ID: 700908376H1
aaacaacagagtttatttctttttggttccttggttcacgctggctgcaaggcttgtgtttggtgggagcagcttctcaccgtgacgctgctctacgaagacgacgacaacctcgtgtgacaacatcaaataatgggaaaaggaaacatggaactcgagacaaacaaggtctatgactacgaggatgcacgaggggacgttgaagtcccagataccgctcatcagataagcactgattcatggtttcaagtg

SEQ ID NO: 75867 - DNA, 248 bp, Glycine max
  Clone ID: 700908382H1
attctgttcagtttcacccgctaaacaacgtcacctaagagatctacttcaaaacacaaccaaaatcttaaatttcttggaacccttttaattgttttttttctttaaaaaaatcattttcctttaaacttcaaatttagagttctctctctgattcatccccagcaatggcttgtgcattgcaagcaaccttagcagccaacgcctatgtcttttcttccaggagattctccttgaagctccaaaag

SEQ ID NO: 75868 - DNA, 228 bp, Glycine max
  Clone ID: 700908389H1
gttgctattgtgcctgtcatgctaaaagtggatttcttgttctgtacttctgtatacatttagtttccggctgtcacattttgcaagtgtcttatcgaagcctgaatttttatgttaaagatataagatactctgatatcgtatggagttgtcatctttattatggctgagttacctgagtaaatgagtaatcagggaagggaactatttcccttaacccgtatatgg

SEQ ID NO: 75869 - DNA, 254 bp, Glycine max
  Clone ID: 700908396H1
cctttgccgctgttgttgttgctgcaccaccgaacaacttcccctgtaaatcgcgtttcgtttgtgcaaggttttaaaagatggctgatgctgaggacattcaacctcttgttgttgataatggaactggaatggtcaaggctggttttgcaggtgatgatgctcctagggccgtgttccccagcattattgggagaccacgccatactggtgtaatggttgggatgggtcagaaggatgcttacgtgggtgat

SEQ ID NO: 75870 - DNA, 261 bp, Glycine max
  Clone ID: 700908409H1
ggaactgagcaagcattggttgctgaattgagtgccttggatgaacatctcaagacccatggtccatacattgctggggagaaagtcactgctgttgatctgagtttggcaccaaaactgtaccatcttgtggtagcactgggccacttcaagaattggaatattccagaaagtttggtacatgtgcacaattacactaagctgctgttctcccgagagtcatttgagaaaacaaagactccaaaggaggaatatgttatt

SEQ ID NO: 75871 - DNA, 258 bp, Glycine max
  Clone ID: 700908411H1
gccgtcgtcgctgtttttgtgtgtcgcttcttcgtaggtgcagctgcaatggtgaagggacgccaaggagaacgtgtcagactctacgtgaggggtacaatccttggatacaaaaggtccaagtcaaaccagtatccaaatacatccctgatccaaattgagggtgtgaatgccaaagaagaagtagcatggtatgctggcaagaaaatggcctatatctacaaggctaaggtgaagaagaatggaagccattaccgc

SEQ ID NO: 75872 - DNA, 252 bp, Glycine max
  Clone ID: 700908415H1
ggagatgggtattgtgggagtttctttcagaggtgcaagccttacatagccatggtttctctgcaattcggatttgcgggtatgaacataatcactaaggtttccctcaaccgtgggatgagccactatgtgcttgtggtttatagacacgcctttgctactgcagctattgctctttttgctattgttctagagaggaaagtgaggcccaagatgacatttctcatgttcatgcaaatatttgtgttgggt

SEQ ID NO: 75873 - DNA, 261 bp, Glycine max
  Clone ID: 700908424H1
gagaaaacaatgcgcttgtgggaagttttatggacacattatccgtctgagcatttgcacctgtatgtatgtgtggcaatcttgaaacgatatcgtggtaaaataattggagagcaaatggacttcgacacccttttgaagtttattaatgagttaagtggtcacatcgatcttgatgcaaccctcagagatgcagaggctctatgtatatgtgccggtgagaacggtgctgctcgtataccccctggaaccccaccgtcg

SEQ ID NO: 75874 - DNA, 253 bp, Glycine max
  unsure (1)..(253): unsure at all n locations
  Clone ID: 700908428H1
attggattngcattaggttnctctgaaatacgcaattgacatggcgagcgcgatggtagangacgcgaacttcgaagatgaccaactagccaatatgaccaccgacgacatcgtcngagcttctcgtcttctcgacaacgagattcgcatcctcaaggaagagttgcagaggaccaatttggaattggaatcgtacaaggacaagatcaaggagaatcaggagaagattaagctcaataagcagttgccctac

SEQ ID NO: 75875 - DNA, 252 bp, Glycine max
  Clone ID: 700908429H1
gccagtagtcatatgcttgtctcaaagattaagccatgcatgtgtaagtatgaactaattcagactgtgaaactgcgaatggctcattaaatcagttatagtttgtttgatggtatctactactcggataaccgtagtaattctagagctaatacgtgcaacaaaccccgacttctggaagggatgcatttattagataaaaggtcaacacaggctctgcctgttgctttgatgattcatgataactcgtcg

SEQ ID NO: 75876 - DNA, 261 bp, Glycine max
  Clone ID: 700908434H1
gcaagaaatcaaagcttggtttcacagtctacccctctcctcaggtgtccacctctgttgttgagccatacaacagtgtcctctccacccattctctcttggagcacaccgatgttgctgtcctcttggacaatgaagccatttatgacatctgcagacgctctctcgacattgagcgtcccacctacaccaacctcaaccgccttgtttctcaggtgatttcatctttgactgcttccttgaggtttgatggtgccctga

SEQ ID NO: 75877 - DNA, 261 bp, Glycine max
  Clone ID: 700908435H1
ggtgagaccaaggtgttcagccctgaggaaatcagtgccatgattctgactaagatgaaggaaactgcggaagcattccttggaaagaaaattaatgatgccgtggtcactgtcccagcttacttcaatgatgctcagaggcaggccaccaaggatgctggtgtcattgctggtctcaatgttgctagaattatcaatgaacccactgctgctgccattgcctatggattggacaagaaaggtggcgagaagaacattcta

SEQ ID NO: 75878 - DNA, 251 bp, Glycine max
  Clone ID: 700908444H1
gtttggaaaaaagggtttgttcggttggttcttgtagcagggatcttgtggatgttattaattcttcttgcattattgttccatatatggtcttgtcaaacttccgtctcctttttatcagctatgtgtaacaaagatagcaaggttttcaacatgttagacaatatgggacttgtatcaaaacctcacagatgtccaattcctctttccaatgaccctgataaaatagttatcccaactggaagaactcc

SEQ ID NO: 75879 - DNA, 255 bp, Glycine max
  Clone ID: 700908467H1
caaggatggtgttcatcgtccgagggcgcataaaacgcaaccaaagccttagcaaaggcatggtagcctcaagcatccttgagccaggagggtttttgggtgacgagctgctttcatggtgccttcgcaggccgtttatcgatagacttccggcctcctcggctacatttgtgtgtcttgaatcatcagaagcctttggccttgatgccaatcacttgaggtacatcactgatcacttccggtacaaatttgcga

SEQ ID NO: 75880 - DNA, 152 bp, Glycine max
  Clone ID: 700908471H1
cattcatcgttctgcaagcaagatgaatagacttatagttctggcatttcatgtcgtccatgcctggtgctttactcttccagtttatgggcgtgcatattctgccttgtgttataaactcatgagttataattacatccgattcatttgct

SEQ ID NO: 75881 - DNA, 254 bp, Glycine max
  Clone ID: 700908472H1
ctaagattgctttcttagggacccatttgcaggttcaaccttctcctgttgtagcggcttttagctccagaggaccaaatgcactcaccccaaagattctcaaaccggatctaatagcaccaggagtcaacattttagccggttggaccggtgcggttggaccaactgggttgactgttgacacccgccatgtcagcttcaacataatttctggaacatccatgtcatgccctcatgtaagtggcttagccgca

SEQ ID NO: 75882 - DNA, 251 bp, Glycine max
  Clone ID: 700908473H1
aacaaggcttacctagctcgtccatggaagaattactctaggaccattatcatggacacgtacattgatgatttgattgacgctgatgggtatttgccatggcaaggactagagggtccttctggtatggatacttgcttctatgccgagtaccacaacattggccccggttcagacaaatccaagcgtgtgaaatgggctgggatttggaacctcaattcaaaagcagcacgttggttctcaccatctaa

SEQ ID NO: 75883 - DNA, 246 bp, Glycine max
  Clone ID: 700908476H1
cacttccctcttcccactccccagatcccaaaggagtgtcttttctttttttatcaagtttgttgtttatatttaacaacctagagttaaggattttttttgtgctaattagatttaaggatttttaataatggacataaaagtgctttcttccggagttcagtactcaaatctgccggagagttacatccgacccgaatcggagcgacctcgtctttccgaggtttcggagtgcgaggatgttcc

SEQ ID NO: 75884 - DNA, 244 bp, Glycine max
  Clone ID: 700908478H1
acaggagctcagaagaatatgtcttcaatcactcaaacttggccaggcgtgctctgaagaatgttgctcttgcttatcttggatgccttgaggaaaaagaattcaccgatcttgtgttgcatgagtataaaactgctacaaatatgactgagcagtttgctgccttggctgccatagctcagaaccctggtaaaacccgtgatgatgttcttgatgacttttatggcaagtggcagcatgattt

SEQ ID NO: 75885 - DNA, 253 bp, Glycine max
  Clone ID: 700908481H1
cttccaggttgtgaatgaacctacagatgctcactgtcctgttgtggagatgtctacacgttcaaaacttagttgcttgagttggaataaatatgctaagaatcaaatagctagtagtgattatgaaggaattgtgactgtttgggatgtaaccactcgaaagagtttaatggaatatgaagagcatgaaaagcgtgcatggagtgttgatttttcaagaacagatccctctatgcttgtatctggtagcgat

SEQ ID NO: 75886 - DNA, 252 bp, Glycine max
  Clone ID: 700908483H1
gctctcctgaccccaattttacattggatgcgcatcaaaaaggagtgaattgtgttgattactttacaggtggtgacaagccttatctaataactggttctgatgatcacactgccaaggtatgggattatcaaaccaaaagttgtgtccagactctagaaggtcacacacacaatgtatctgctgtatgctttcatcctgaactacctataatcattactggctctgaggatggcacagtgcgcatttggc

SEQ ID NO: 75887 - DNA, 253 bp, Glycine max
  Clone ID: 700908484H1
ccatcgctggacgtgagacaagacgtagtggtgatggaggtgccgaagctgggaaaacaagccgcaacgaaagcgattaaggagtggggtcaaccaaagtcaaagatcacacaccttgtgttctgcaccacttcaggcgtggacatgcccggagcagattaccagctcacgaagcttctcggcctgaggccctccgtgaagcgcctcatgatgtatcagcagggctgcttcgccggcggcaccgtactccgcc

SEQ ID NO: 75888 - DNA, 251 bp, Glycine max
  Clone ID: 700908487H1
gctttggttataaactgtcacatgatgcttcattacatccccgatgaaaccctatctgatacaacaggcttgacctcttttctctacgattcttcttctcttgctgcttcttctgctgttagcgttactcccacttcctcactgcgatcattgttccttaagtccctgcgaggtttagacccaacggtcgtaatcttggtcgacgaagatgcggatttgacttcgaacaacttggtatgcagactaagatc

SEQ ID NO: 75889 - DNA, 236 bp, Glycine max
  Clone ID: 700908512H1
aagagctgatggttttgatctcaaggttgtgacagcagatcttaaggacattgattacaagtctggggatgtttgtggtgtgcttgtgcagtaccctggcactgagggagaggttttggactatggagagtttgtgaagaaggctcatgctcatgaggtgaaggttgttatggcaagtgatttgttggcactgactgtgttgaagcctcctggggagtttggggcagatattgttg

SEQ ID NO: 75890 - DNA, 256 bp, Glycine max
  Clone ID: 700908519H1
ggaggttgagtagttcttcatcatagtcttaaacattaaaccttagcaaaactcaacaatgctagacatcaaaggctacctcgtactcttcttcctatggttcatatcaaccattctgatacgttccatcttcaagaaaccacagcgtctaagactcccaccgggtcctccaatttcaatacccttgctgggacacgcgccatatctccgttcactgctccaccaagcattgtacaagctatcactgcgctatgga

SEQ ID NO: 75891 - DNA, 241 bp, Glycine max
  Clone ID: 700908540H1
ctctctctctttggaatcttccttctgcttggaaccctaaaaatctgattacgtacctacccattatttaattggtccgtttttataattggggttgtcggctgaactaattaatcatttggggttggaggaacaagaggagtgagagcttcaatttttctgtttttaaaaattagggcttcttcatttggtacccgattcccttgtttcttgggcttctggaattgatgcaaattttagg

SEQ ID NO: 75892 - DNA, 235 bp, Glycine max
  Clone ID: 700908543H1
aatttgtcaaccagaattgttgtttttctctttaattgtagattttttttcaaaaaatttgttttattttttttgaagctctttccgctctctgcaatggtggagatttgagttactgtgtcgcgtctttctcggagttcaacctcaaccgttcaaaattatgcttctgggttttcgtcatttcagacaaaagtttctatttttgaggtgtttctgagcagttacaactttttct

SEQ ID NO: 75893 - DNA, 254 bp, Glycine max
  Clone ID: 700908550H1
tcagcattgacatggttcacaacaacaacttgcaggccgtgcataaccaacaggctgacttcaagaactggctcagcgctgttatctcgtaccaacaggcctgcatggagggttttgacgatggcaaagaaggtgagaagaagatcaaggagcagtttcataccgagaccttggacaatgttcagaaactcactggcatcacccttgacattgtgagtggtttgtccaacatcctcgagaagttcgggttgaag

SEQ ID NO: 75894 - DNA, 232 bp, Glycine max
  Clone ID: 700908559H1
ccgaatcatgtgtgaaaccatctgctcaacttaccatcttctatgctggtactgtcaatatctttgatgatatctccactgagaaggcacaagctatcatgttgttggctggcaatagcttatctgcagcttctaacatggcacagccaaatgttcaggtgcctatctcgaagttgggtgctggtgctggtgtgcctgtgagtcaacctgcaaatacatcacctggctctgg

SEQ ID NO: 75895 - DNA, 231 bp, Glycine max
  Clone ID: 700908561H1
ggccaattactgtggaggaactaagccaaccaccagaagggtacccttcatccaaagtagttcttactggccttgaagcagagtcattgatgtttatttcagtaccctttggtgaagacaacataacattctatgatcgcataactagtgccttgagagaaagtgatgctatagccattagaacaagtagggaaattgagggtaacttttgtgactacattgcatcacagt

SEQ ID NO: 75896 - DNA, 253 bp, Glycine max
  Clone ID: 700908566H1
cttatgacagctatgaaaaactttcctctgctgttgatgagctctttaggggcctccttgcagagatgaagttatctcatattggctcttcccaatgctgttctggtcaaagagattcctgtgctggtggaattcaaaacaaggaacaggaagagaaatccaataagggtttattggttggaagtggggaatatactcttgtttatgaggataatgaaggagacaggatgcttgttggagatgtgccgtggca

SEQ ID NO: 75897 - DNA, 150 bp, Glycine max
  Clone ID: 700908570H1
atttttttgtgccagctctagtttatcactagcttttaaggaaggattctccaagtatctaggtgtttatcaattggtatttgtgtttattgttgtatctaaaaaattatatattttaaataattttgtgacgctatatattaatcaggt

SEQ ID NO: 75898 - DNA, 239 bp, Glycine max
  Clone ID: 700908571H1
ggccccaagagaggtgctaaggtgaagattcttaggaaggaatcttactggtacaaaggcaccggttcagtggttgctgttgatcaggaccccaacactcgctaccctgttgtggttcgattcaacaaagtcaactatgccaatgtatcaacaaacaactatgctttggatgagatcgtggaagtcgaatgaatccaacttaattgtaattttgatacttgtcatgctatcgcagttac

SEQ ID NO: 75899 - DNA, 231 bp, Glycine max
  Clone ID: 700908575H1
gtcaaaggttggacttgttgtgtatgattctcaagtgcctattggtgccactccggagtatatggctggtttctacatgctgcaaagtgcaagctcttttctgcctgttatggctttggctcctcaagagaaggaacgtgtcattgatatggcagctgcacctggtggtaaaacaacttacattgctgctctaatgaagaatactggaataatatttgcaaatgaaatgaa

SEQ ID NO: 75900 - DNA, 230 bp, Glycine max
  Clone ID: 700908576H1
cgtgatcaaagcgttcaacatgagcgacaggctgacggtggaacacggcaacagcagcgccggaatgaagatggctctggaggattgtaaggacttgttgcagtccgccatccacgacctagaggcctcaggcgtgttggtcaaagagagcagcctacaggacgtgcaccagcgcaccgccgagctcaagaactggttgggagccgttgttgcctaccagcaatcgtgcc

SEQ ID NO: 75901 - DNA, 230 bp, Glycine max
  Clone ID: 700908577H1
tccactggaggtttcgctctctcagtttcttttccccaaattgtttttcatctaacaatttactttgcagaaccctaaccctagccccttcgcctaccttgtaaccttcctttcgatccttcatctcgcagacaatgggtgaaactaaggacgaagcatacgaggaagagcttctcgattacgaggaggaagacgacaaggcccccgactccgccggagctaaagtcaac

SEQ ID NO: 75902 - DNA, 229 bp, Glycine max
  Clone ID: 700908579H1
cttttattaagactccaagcacccgggtagaatcattcacagtggtggaccccactaaacgtgctggtacagagttgaaatacgggccatatgaaaatcatcccccgtattcatattctcctgtacttattcattttgaaaataacaatgcatttgctgttgttgaggagctagaacgtgaaattgaaatatctcactggggaagcattcaagtcactgagcaatatag

SEQ ID NO: 75903 - DNA, 250 bp, Glycine max
  Clone ID: 700908582H1
gcttcttgagcgattgcgtgtcccttctgagtatgccacaagtttgacaggaggttcatttgatgaagcccgaatgcttcaaaatgtagaagcatgtgaatggttgaccagtgccttgcgtggtcttgaaatgcctaatctagaccctagttatgcaaacatgagagctgttaaagagaagcgtgcagaacttgaaaaattaaaatctacttttgtcaggagagcctctgaattcttgagaaattatttt

SEQ ID NO: 75904 - DNA, 243 bp, Glycine max
  Clone ID: 700908584H1
gggaagtggtgtgcgacgagcacggcatagatccgacggggaagtacgtcggaaactcagatctacaactcgagcgcgtgaacgtgtactacaacgaagcttcctgcgggcggtttgtcccacgcgcagtgctgatggacctggagcccggaaccatggacagcgtgcggactgggccgtacgggcagatattccggcccgacaacttcgtgttcgggcagtccggcgcgggcaacaactggg

SEQ ID NO: 75905 - DNA, 238 bp, Glycine max
  Clone ID: 700908586H1
agttaacataccttcaagctgtggtcaaagaaactttaagattatacccttcagttcctctctcatcacctcgtgaattcatagaggattgcactttaggtggctacaatgtcaaaaaaggaactcgtctaattacaaatatttggaagatccacacagatcttagtgtttggtcaaatccattagagttcaaaccagaaaggtttctaaccacccataaagacattgatgttagggg

SEQ ID NO: 75906 - DNA, 230 bp, Glycine max
  Clone ID: 700908590H1
ggaaaggcagccttagacggctgaggaaaaagtaccagtcagtagagtctgatgatgatggccgtcacgaagaaaagataattgctgatgacagtatggatgaccaaacccaggaaatcaaagatgatgaagatatcctacctatttcatctctttacaagaataaagcctctcaaagggtcttggacgaggaaatggatgctagtgttgacagacaggcaggtgatgcc

SEQ ID NO: 75907 - DNA, 230 bp, Glycine max
  Clone ID: 700908591H1
gaaacatcgtgtgcacagtaccccagaagatcgaacaaggatctccacgaagacaaacctctgttctcaactgtgtttctttacctctcacctactttcagaccataccaggctgagaagatgcagcagacaccgcctatgattcctatgatgccttcgttcccacctacgaacataaccaccgagcagattcaaaaataccttgatgagaacaagaagctgattctggc

SEQ ID NO: 75908 - DNA, 229 bp, Glycine max
  Clone ID: 700908592H1
cagaacagttgaagtgaatggcataaaaatgcatgttgcagagaaaggagagggtccagtggtgttgttcctccacggcttccctgagctctggtactcatggcgccatcagattctctctctcagctccctcggctaccgcgccgtcgctcccgatctccgtggctacggtgacaccgaagcaccaccttcaatcagcagctacaactgcttccacatagtgggtgat

SEQ ID NO: 75909 - DNA, 273 bp, Glycine max
  Clone ID: 700908601H1
caatagcaagtcggtcgctcagacacgcacagatctgatctgatctgatctatctgaagccgaaaacgccgacggtgatgatgaagatggggtgttcacgttgctccttcttcctcttcctcatcctcttagtggcgctcttcccctcgtcgctctccgagatccgcttctccgagatccgaaacgacgatcgccgcatcatccccttcgatcagtttggattcacccacaagggtcgccttgagctcagcgtttccaaaatctcactctcca

SEQ ID NO: 75910 - DNA, 259 bp, Glycine max
  Clone ID: 700908610H1
gcgtcttactggcatctacaagaatattttgaacaatgctggggtcaagctgattgaaggccatgggaagattatagatcctcacacagttgatgttaatggaaagctatattcagccaaacacattttagttaccgttggaggtcgccccttcattcctgatattcctgggaatgaatatgcaatagattcagatgctgcccttgatttaccaacaaaacctgagaaaatagccattgtgggtggtggttacattgcc

SEQ ID NO: 75911 - DNA, 257 bp, Glycine max
  Clone ID: 700908640H1
gcgaggagaggaatcagaatcgcgttagggagaagaagagaaaatcgcaggtgaaaatgagcggaacggtgaagaaagtaaccgatgtagcattcaaggtgggaaggaacatcgattgggatggaatggcgaacttctcgtctccgatgaggctcgcagggagttctccaatctccgtcgcgctttcgacgaggttaactcccaactcgaaaccaagttcagccaggaacctgaacccatagactgggattactata

SEQ ID NO: 75912 - DNA, 259 bp, Glycine max
  Clone ID: 700908645H1
ggagccaatgaactcagtgaagggtacagcacaggtgttggattgggtgctgagattattggaaccttcgttttggtctacactgtcttctctgcaactgaccccaagaggaatgctagagattctcatgtgccggttttggcaccacttccaattggctttgctgtgttcatggttcacttggcaaccatcccagtaacaggcactggcattaaccctgctaggagcctaggagctgctgtcatgtacaaccaacaga

SEQ ID NO: 75913 - DNA, 253 bp, Glycine max
  Clone ID: 700908658H1
gccttctttctttttttcaatttccaaatcacgaaactcaagaagatggagaaagcgatcaacagacagaagattttgcttcatcatctcaacccttcatcatccacccaccccaacgaatcatcctccctccatgcttcagcatgtgtggcgggggatagcgctgcttatcaaaggacatcgacattcggggacgatgttgtgatcgtggctgcttatcggactgctcattgcaaagctaaacgaggtggtt

SEQ ID NO: 75914 - DNA, 258 bp, Glycine max
  Clone ID: 700908666H1
ctcctatcacataataacaaccttaaccttaaccttaaaccccccaattttcatgtctcggatcccgtgattcggatccccaacaaaaaaagaaacctcgtatttgttattttcgtcggatccggttgggaacgctcatgacgcggcgttgctcgcattgcagccacaatgggcacaactccagaacctgccctaaccgcggggttaagctcttcggggtccgattaaccgacgggtcgatccggaagagcgccagat

SEQ ID NO: 75915 - DNA, 250 bp, Glycine max
  Clone ID: 700908674H1
ctcagaggaatggacagaagaaccataagaaaccacgaaacgcatgacatcggctagtaactggagttgcaaatgatccataaggcataaaccaagcatgtgactgatgatgctgtggagaaagttttgacttttgagttgtttcggagacatcacatattgtagtgacaaggtgataattttggcaagatgaaaaattcaagaggacgcagcatgaaacatgcacatttatttcattgtgaagatcaaa

SEQ ID NO: 75916 - DNA, 256 bp, Glycine max
  Clone ID: 700908678H1
gccagaatgtccaagtgcgggtgaggggttatcattcatgttatataatattatttacccttctcagtatttgaacttcgtgatagagggcgccaatatcttgccctacacaggttttccgtgtgttttttccccctttcttttttcggtggtgggatgtgttggtaggaaaacatgcagtgagtatctaaggcccatttttcactaatgtagggaatcatcagccgttgtaaatctgtattaaactgttgagtat

SEQ ID NO: 75917 - DNA, 254 bp, Glycine max
  Clone ID: 700908693H1
ggagagcccattgcaactctgcgtttgctgcactatgaaggtcaagtttcggatcccttgaaaggattatatggagctggagctcatactgactatggtttaattacactgttagcaacagatgatgtctcgggtcttcaaatatgcaaagatagggatgctaaacctcagaaatgggaggatgtagcaccattgaagggagcattcatagtgaatcttggtgacatgctggagcgctggagcaactgcgtttt

SEQ ID NO: 75918 - DNA, 249 bp, Glycine max
  Clone ID: 700908708H1
gcaatttcccggcacacatgttaaggaaaaatggtcaaaaaacctttaccttgcctgtttgtgctacggacgcacagtatgctgatttccatgacattttaaagcattttattgacaagcggattatgagttgtcatctgccccaccacaaaagatctttttgtagaaaggaactaattgttgtgccagcagagaaccttattttgttatgttataagaatattgttctgttccctgtccctccccttc

SEQ ID NO: 75919 - DNA, 251 bp, Glycine max
  Clone ID: 700908709H1
caagaagttctggaaatggagatcaccaatgtcagcgagtatgaagctattgcaaagcagaagttgccaaagatggtgtttgactactacgcatctggtgcagaggaccagtggactctgcaggagaacagaaatgccttttccagaattttgtttcggccacgtattcttattgatgtgagcaagatagacatcacaactactgtcctgggcttcaaaatatccatgccaatcatgcttgccccaacagc

SEQ ID NO: 75920 - DNA, 248 bp, Glycine max
  Clone ID: 700908710H1
atgaagatgagatctcaatacattcctgaggaggccaggagcaccatcatgaactttttccgcattcctctcaacatttttgtgtgtgttgtgctgtacaatgttgatgcattccctatcactgttatgtttggcatgtgctcaattttccttttggtggcttgtatcttgcaaaggcgactgatggtgatttccgataagccaaaaacagaagattggcaattgaaggatagggacgcagagtcaga

SEQ ID NO: 75921 - DNA, 249 bp, Glycine max
  Clone ID: 700908712H1
atttcttaaaaaaatatggtaaaacaggaggagaatttgagacaatagacccaagaaccggagaggtgattgcaaggattgcagagggaaccaaagaagacattgaccttgccgtcaaagcgtctcgtctggctttcgaccatggtccatggcctcgtatgcctgccgtagaaagagcaagaattatgatgaaatgggctgacctaattgaccaacacgtagaagaaattgcagcactggatgccattg

SEQ ID NO: 75922 - DNA, 250 bp, Glycine max
  Clone ID: 700908714H1
cttatagcttcatcccaaaaagctcttttccttctaaatttgattccttagttcagcattctattattatatatggcttcttcaccttcctcagaaaacaaaaacctagagggagtagctggtggtgccggagagaaacccattccacttggtgagaacgttctgcagaagcatgctgcattctttgacttgaataaagatggtgtcatctacccatgggagacttttaaagggttgcgtgaaatcggga

SEQ ID NO: 75923 - DNA, 256 bp, Glycine max
  Clone ID: 700908719H1
ggaaaattcaacctccatggagttttgggagagattgttgaactgataaaaccaatagcatccgtgaaaaagttacctatcaccttaattctgtctcctgatctgcctactcatgccattggtgatgaaaagcggcttacacaaactcttttgaatgtcgtgggtaatgctgtcaaattcactaaggagggctatgtttctgtaagagtatcagttgcaaaaccagaatcttcacaggattggcgacctccagagt

SEQ ID NO: 75924 - DNA, 248 bp, Glycine max
  Clone ID: 700908745H1
ggaagagagagggagattctttgtttgctaccttctctcggaaaaatggttacgttcaggtttcaccagtaccaggtggttgggagggctcttcccacggaagcagatcagcaccccaagatctaccgaatgaagctctgggccaccaacgaggttcgcgccaagtccaagttctggtattttctgaggaaactgaaaaaggtgaagaagagcaatggccaagtgcttgccatcaacgagatttttga

SEQ ID NO: 75925 - DNA, 257 bp, Glycine max
  Clone ID: 700908749H1
gttgaaacacaaagaagaaaaaatgggttcctctttgtggacttgtctgattttgttatcacttgcttctgcttccttcgccgccaacccaagaacaccaattgatgtgccatttggcagaaactatgtgcctacttgggcctttgatcacatcaaatacctcaatggtggttctgagattcagcttcatcttgataagtacactggtactggcttccaatccaaaggatcctacctgtttggtcacttcagcatgt

SEQ ID NO: 75926 - DNA, 253 bp, Glycine max
  Clone ID: 700908751H1
ccggtcccttgtgatttgctcacaaaaccagtgtcggtcacaccatctctcccttttctccacctgcaacgatgtcggttaaggagtgccaccaccaccacaagggaaagaagcacaagctctggagacgcatcttctggggaatagtgatcttcgccttcatcgtgttactgacagttcttataatctgggcaatcctaaagccttcaaaaccaaccttcatcctccaagacgtcaccgtttacggcttcaa

SEQ ID NO: 75927 - DNA, 244 bp, Glycine max
  Clone ID: 700908755H1
ggtttcgagatcaaggactctctgctagggacatggttgctttatctggagctcacacatttggcaaagcaaggtgtactagtttcagagatcgcatatacaatcaaaccaacattgatagaacatttgcattggccaggcagaggaggtgtcctaggactaatggcacaggtgacaacaatctagcaaatctagacttcagaactccaaatcattttgacaacaactacttcaaaaaccttct

SEQ ID NO: 75928 - DNA, 246 bp, Glycine max
  Clone ID: 700908757H1
attcaacctgtaagatccgcgagctaaaactcccacactccacagcttttcttgttttcctttcctcagatcagatcttcacgccgttatgcttagaacattagctagggtgttcaagcgagccacccttgccaatgacttgcttcaaaaacgcagcagattctatgcaaccacggttggtggaagaagtgacaggttagaaggaaaagtggcactcataactggatcagcaagtggactcggcaa

SEQ ID NO: 75929 - DNA, 246 bp, Glycine max
  Clone ID: 700908761H1
gaaaagggtcctcatcctcttgctcaagctggaactggctctttccctggaggcttcattgggaaacataggttgcaagcagccataaccaacctcaataaccaaattagtattttgcaggaagaattggaaaaagttgaaacaattggtgaatcctccaccgtttgcaaggatttaatttcaagcgttgaatccattccagatcctctccttccattcaccaaaagttcagttgatgctggttgg

SEQ ID NO: 75930 - DNA, 244 bp, Glycine max
  Clone ID: 700908775H1
aaaattagcctcacaaaagcaaagatcaaacaaaccaaggacgagaacacgatgttgcttgaacttgcacttggtttattggttttggctctgtttctgcacttgcgtcccacacccactgcaaaatcaaaagcacttcgccatctcccaaacccaccaagcccaaagcctcgtcttcccttcataggacaccttcatctcttaaaagacaaacttctccactacgcactcatcgacctctcca

SEQ ID NO: 75931 - DNA, 241 bp, Glycine max
  Clone ID: 700908776H1
aaaccctgaagaaagacacagccattgtttgtttactttccattgattgagcgaaagctttgttttttctgcgatcattttccattgggtggaagaaagtctcaacctttagtcgaaagagcaaggatctgagtgagtgagcgatcatgtgtggtggtgcgattatctccgacttcattccagcgggtcccgccggcggggcgcacgcgtgaccgccgacatcctgtggccgaatttgagg

SEQ ID NO: 75932 - DNA, 252 bp, Glycine max
  Clone ID: 700908782H1
gagacaattcaacttaagagatcaatatggccaccaccactacccagcctccctctaatatctgttttttccttctgttgttgcttctagcacactttcatttgggcataagccaacttgagctgaattactactctaaaagctgcccaaaagctgaagagatcatcaaggaacaagtcacacaactatataacaagcatggaaacactgccgtttcgtgggtcagaaatctcttccacgattgcgtggtta

SEQ ID NO: 75933 - DNA, 260 bp, Glycine max
  Clone ID: 700908825H1
cttcattcatttcctgtggctcaatgaggcaccagttggggagctacagtaaggcaaataaaatggtggcgtgccttcagaacccaatgggtattgcaaaaaaaaatgttcagttcaggggaaatttctccatacagtatttttttttatcagcatttctccaattttgtgagttaagcagcctaacttgatgcagcatataaactctcattggttacttttgtgcttgcttgctagcagttttatatttagttttgtta

SEQ ID NO: 75934 - DNA, 264 bp, Glycine max
  Clone ID: 700908847H1
caaaagacaaaaaaataaccaccaaataaacatctttctccacaaacctagcgggtctccacttatccaaaaaaagaattcactatccatcatggacattaggaaggttacctgtgccgttctcattgccgctgcctccatgagtgcagcattggctaccacagaggtctctgcacccgcccctggccctagcagcggtgcctccgccgccactgttggctccttggttggtgcctcagtcttgtccttctttgccttgttcca

SEQ ID NO: 75935 - DNA, 256 bp, Glycine max
  Clone ID: 700908867H1
cgaggataagaaaccagaggggtatgatgacatcccaaaagagctcccagatcctgaagccaagaagcctgaagattgggatgatgaggaagatggtgagtggacaccccctaccattgccaaccctgattacaagggcccatggaaggcaaagaaaatcaagaaccccaactataaaggaaaatggaaggcaccattgattgataacccagatttcaaggatgaccccgacctatatgttttccccaacttgaag

SEQ ID NO: 75936 - DNA, 256 bp, Glycine max
  Clone ID: 700908871H1
cttcactttcattcgatcaatcatgagaactcgaaacgccgattccgcctccaaatccgcaacccctaagaagacgccgccgaagaaatcccctgcggccaagcgcaccaccgccaccaaaaccagagccaccaagaagaacgagctctcgcccgcacccgattccaaccccgatcaatctcctctggaacagaaatcgttaggcagtgctagcagcgcaaaatctgtgaaaaagaagactccggggagatcgaga

SEQ ID NO: 75937 - DNA, 267 bp, Glycine max
  unsure (1)..(267): unsure at all n locations
  Clone ID: 700908904H1
gnngtcttttnctgctctttggaaaaagtagggtctttgcttgattttggangntgtctctgctctcagatctcaacaanctnaancntcancgataccaccgagnaggtgancgcagantacatntgnttcngtgnatcaggagtngaacctgtggagcanggcntggactctcccangancagttagcgaccctacagaagcttcccaagtgggactnngntgnttccaagcgcnggtcaagctnctggtgaaanacagtgaaat

SEQ ID NO: 75938 - DNA, 256 bp, Glycine max
  Clone ID: 700908915H1
gatttggacattttgctatcgcaactccagatgtttacaaattggttgaagacatccgggctaagggtggaaatgtcaccagggagcctggtccagttaagggtgggaaatctgttattgccttcgtgaaggatcctgatggttatgcttttgagctcattcaaagaccttcaacccctgaaccattgtgccaagtaatgcttcgcgttggtgatttagagcgctcaattaagttttatgaaaaggctttgggttt

SEQ ID NO: 75939 - DNA, 260 bp, Glycine max
  Clone ID: 700908919H1
caccgattgctagaatggaatttcgatgctcagtcatctcttttaccattctcttctctcttgctcttgcaggagagagccatgtccatgcatcgctacctgaggaagattattgggaagctgtttggccaaacactcccattcccactgcactgcgagagcttctaaagcctctccctgcaggtgttgaaatcgatgaactccctaagcaaattgatgatacacagtacccaaaaacattcttctataaagaagacctt

SEQ ID NO: 75940 - DNA, 258 bp, Glycine max
  Clone ID: 700908934H1
caccatcaataaggtgactggtgcttttggacacacgccatggctcttgggtgccaacttgaaccattatcaccttgagaggttttactggttgatgtgtgtacttagtggactcaacttcgttcattttctcttctgggccaattcctacaaatacagatgttcaaccaaaccgggatatactagctagaacgtacaaacctacctgcatttatgaatctatttggatataaaagtagaagtgcttttttgagagtt

SEQ ID NO: 75941 - DNA, 257 bp, Glycine max
  Clone ID: 700908938H1
ctctctcaccctttctcccccactccctagtcagctagctcctgcaacaacaaccactcctcttctttttctcacccaaatccacgcttcccttacaccgcgtttggatctccgttatacaaactcattaaaatgttgcgagagaaaaacaaaacagaaaaaaaattcagttaattattaaattttgttatggctttccacgaccatctccagcacgagatagcgttccagcgtttcacggaggagcaagagttgaa

SEQ ID NO: 75942 - DNA, 256 bp, Glycine max
  Clone ID: 700908950H1
ggctttcagagctgaatatgaattcccagaatggatttctccgcaggccaagaatcttatttcgaatctcctcgttgctgatcctggcaagaggtattccattcctgatataatgagggatccttggtttcaagttgggttcatgaggccaatcgcgttttctattaaggagtcttacgttgaagacaacattgatttcgacgatgtggagaacaaccaggaggaggaggttacaatgaggaaacctgccaggccg

SEQ ID NO: 75943 - DNA, 253 bp, Glycine max
  Clone ID: 700908953H1
tatggcgatatctgatgcggtggcgaggaacttcagcaccatcttcgtgggtctcatggcgtgttttgaggcctatggctttgcttcggggagaaggtttagcggcggttatgttgttattgtgtccaccgccgcggtcattctcttcctcgtggcaacgctcacgtgggacgtctcgcgtaaggccacgtgtgcctttcacagagaccacgctgacagccaagaggatgtgtgcaagggaggtatctgttgg

SEQ ID NO: 75944 - DNA, 248 bp, Glycine max
  Clone ID: 700908960H1
cgttttgtggggagggtgatgtcgagaagggaagggagctttttgatgagatgttgatgaggaaggttagtcccaatgtggttacatacagctgtttgatgcagggtcttggcaagaccgggcggtgactcaaggcttctgagatgttgaaggacacgatggatgagaacagaggacgaggctaaggtgttggatttgatggtgcaggagggggaggagccgggtactttgacatacaatgttgttgt

SEQ ID NO: 75945 - DNA, 250 bp, Glycine max
  Clone ID: 700908961H1
ctttgctgcaccagcacaaacttatgctaagcgcaatttgctttgctgttagaactggaaacactttcttgggctcactattgtgggtggattatgctcgctgggttggagtccagaagatacgggattaggcataatggttcttcagttacaagatattttcataggatgatttgggtcaaatcttgtctgttgattcattattgaagtacagttggtttgttgtatttttttttattcctcctgaaag

SEQ ID NO: 75946 - DNA, 123 bp, Glycine max
  Clone ID: 700908963H1
taacaattaacttatgctttattttgatgacacaatgtagctgatggtacgtacttaatccctcgacgcagtttttaacatttgtttttaccaagtaaaattgaatgaataatatagcagtgt

SEQ ID NO: 75947 - DNA, 252 bp, Glycine max
  Clone ID: 700908967H1
cgcggcttcaaccttgtagttattctctttcttcttttttagctatccctctcttgaaaaatctagatctcgttcttccttgatctacgttacgcttttagtgaccggatctgtatggatctgaaccagatctacacgccgatggtggttttggcctggtctttcatagatctgatgcatggaggctcagatctactgtacagaggtgtgcgattcatgttcgtctctcttttggaatctgtttcgtagaaa

SEQ ID NO: 75948 - DNA, 250 bp, Glycine max
  Clone ID: 700908972H1
cgttgattccatatcgattcgcatttgcgtacacccctgaccccttgatttctctcagttccgttctgcatcatagagtatggccagccacgatcttcgattcttcgagttgaacacaggcgctaagataccttccgttggtttgggaacgtggctcgctgaacctggcgttgttgctcgcgccttggccactgcaataaacgttggatatcggcatatagattgtgcgcaaatttatggcaatgaaaag

SEQ ID NO: 75949 - DNA, 249 bp, Glycine max
  Clone ID: 700908974H1
atgcacctataagagtatgtagtttctactttgttgataaccacatgctctctacatcttacaaagaagcatcctctatagactaatgggtttgttcagaagtaagggtgtgatttataggccagtgaaggatgttaacttaggtcctgatagcactgaattctatctccaagccaatgtcaaagctccccgcatgactggaatcctggtcaagattttcacttggttcttggagtctccaatacttgg

SEQ ID NO: 75950 - DNA, 250 bp, Glycine max
  Clone ID: 700908975H1
ctcataacacaaagcacaaagcaaagctcatccttgagttaaaaaatggcagcagcttcttccatggctctctcatccccatccttggctggcaaggccgtgaagctgggcccatcagccccagaagtgggaagggtgagcatgaggaagaccgtcaccaagcaggtctcctcaggaagcccatggtacggcccagaccgagtcaagtacttgggcccattctctggcgagcccccgtcctacctaaccg

SEQ ID NO: 75951 - DNA, 247 bp, Glycine max
  Clone ID: 700908978H1
caatgatgttgacttggagtttccaaaatttggatttcttcatgcggatgcctcagtggacaggaaagatgatcaacaatcaaaggactcgtgtcatagtgctgaaccgatgaaaggggattttgtagaagatcatttctggaaagatcatcctttcatgttggccaacttttatcctcttgatcagcaagactgggaagataaaatcctttggggcaattctcctgttccaagttataataatgtt

SEQ ID NO: 75952 - DNA, 247 bp, Glycine max
  Clone ID: 700908979H1
aagaaaccaagcaaatctttgttttttgtttctgttttgtgttgtgtaatttccccctagccaccaccaatggccaacaaagagatggaagttgtgaagggtttggatttgcaaaggtacatggggcgttggtatgagatagcctctttcccttcaaggaatcagcccaaggatggtgagaacaccagagccacatacactcttaggaatgatggtactgtgcaagtgctcaacgagacttggagta

SEQ ID NO: 75953 - DNA, 253 bp, Glycine max
  Clone ID: 700908981H1
gggatcttgtctttcttactgcaagtgaagaagtgaaaaagtgctgaagtgaacacaatggagagaagggttggctatgaggtgctggtggctttggtgacccttttggttttctcattgacttgtgtcactgcttcaccatcagggccaacaaaacttcaagaccatgtgaagcaattcagggggaatcttcttgctaatggccttggtagaactcctccaatgggatggaacagttggaatcatttcagct

SEQ ID NO: 75954 - DNA, 250 bp, Glycine max
  Clone ID: 700908983H1
gttcagagattactagtatttgactacatggccaatggaaatttgagggactgtttagatggagtttctggaaaacatatcgattgggccactcgtgttatgattgcaataggagctgcaaggggcttggagtatctccatgaagcagctgctccaagaattcttcatagagatgtcaaatcaactaacattcttctggatgaaaattggcaagcaaaaataactgatcttggcatggctaaaaacttga

SEQ ID NO: 75955 - DNA, 251 bp, Glycine max
  Clone ID: 700908985H1
aagaaagcaagataaatgggatcattgaaagtaagccatttgcagcttcttcaatcaagactcccactgccactgtgccagctactttggtaactgaagcatctgcaaagccaccccatccagataccaagtacttaggccaggtatattcagtacctaaggtggagcagtggtctgattttgatgatcaagagtggctatttgacaccaatgtttcacaagaaagaaaatctgtggtgaaatcttcaata

SEQ ID NO: 75956 - DNA, 248 bp, Glycine max
  Clone ID: 700908991H1
tcaaatccaaatggccctttacattacactaataattggcctcctagtaaacaccctagtactctataaatagcatttgcatgcaccttagtcttcaccaaaatactcctcttggcatcttgtgttgtgtccctcttttaagctatttccttctcttaacacaattggttgtgccaattgccatagtcaccaaccaattaacaaaggtatatatatcatcatatcatcaccaaatgaaaaatattggg

SEQ ID NO: 75957 - DNA, 267 bp, Glycine max
  Clone ID: 700909005H1
gtgaggaacaagcaagtgcttctaaaggactatgttaccggttttcccaaagaatccgacatgaatattgtcgaaagtaccataacattgaagcttccacaaggttccaatgatgtcttgctcaaaaatttgtacttgtcttgtgatccgtatatgaggaatctcatgaacaagcccgaaggccctcccaatagtcgtgcttacactcctggctctccattaataggatatggtgtgtctaaagtcctggaatctgggcacccagat

SEQ ID NO: 75958 - DNA, 251 bp, Glycine max
  Clone ID: 700909015H1
cttactctagactcttccttttctcttctctgtctaaggggtgccctgagatcacattgaacaatggtgaaggctgtggccgttcttggcagcagtgagggtgtcactggaactattcacttcgttcaggagggaagtggtccaaccaccgtaactggatctcttgctggtcttaagcctggtctccatggtttccatgtccatgccttgggggacactaccaatggttgcctctcaactggatcacattt

SEQ ID NO: 75959 - DNA, 273 bp, Glycine max
  Clone ID: 700909018H1
ggatattctgaaatcccatccaatcgaaggctgtgaagtgtgtgatgcactctatccttctttctgcttgaacccataattccatgactcggcgttgctcccactgcagcaacaacggccacaattcccggacatgcccttcgcgtgggggcggaggtgtgaagcttttcggggtcaggctgacggatggatcaatcattaagaagagcgccagcatgggcaacctaaacctctcctccgccgccgcacatcaccattccattcatctccttc

SEQ ID NO: 75960 - DNA, 269 bp, Glycine max
  Clone ID: 700909035H1
caccctctttccctcattgtgatttgtgagtaattaagatatgtatatgtctccaggccaagacatgtcatccatgtctaatgacagaaacaacatgtctatgatgatgcacaacagtttctactggggcaaagatgccatagtgcttttccctaggtggcctgagaacaatgttggcatgtacatcttagccctaatttttgtgttcttccttgccatggctgttgaagtgttatctaaccaaccactcctcaagccagggactagtc

SEQ ID NO: 75961 - DNA, 264 bp, Glycine max
  Clone ID: 700909037H1
tttcttagttgttcagacacggttctgggaactgccagcttgcaagtctgagttttatgtctggaatccaagcttctgatgttcccacattttttttaagccacaacatttcccagtgagctttctcatgggttttcaatggtgacagtcttgagttcctttctactgggtaggggtaggggtatttgatccttattttctagaggggttattttagattcatctagttgaacaaagcccttgcaaaaccctttttccagcaca

SEQ ID NO: 75962 - DNA, 257 bp, Glycine max
  Clone ID: 700909040H1
ggatgaagctcgttgcgccgagaagtatagagagatatgggccgagtatcgtaaacttgttccatggagaatattgccttacgtttattaggatgaaaaaaaaaagggcttcaccatgaattcttcatcccttctctctctccagattaacagaagcaagctcatcctagagttttaaaaatggcagcagcctcctccatggctctctcttccccatccttggctggcaaggccgtgaagctgggcccatcagcccc

SEQ ID NO: 75963 - DNA, 254 bp, Glycine max
  Clone ID: 700909041H1
tagagagagacgcttcgcaaatctcaatcgaatctcagaaaaatgagagaaatcatcagcattcacataggtcaggccgggatccaggtcggaaactcctgctgggaactctactgcctcgaacatggcatccagcccgacggcatgatgccttctgactccaccttcggtgtagcccacgacgccttcaacaccttcttcagcgaaaccggatctggcaagcacgtcccccgtgctgtcttcgtcgacctcga

SEQ ID NO: 75964 - DNA, 250 bp, Glycine max
  Clone ID: 700909047H1
cctgcacagactcaggggatttcgatttccaagaccatgcagttggaaagttctattcaaacccctggttccagtactttaaccgaaacccctagttctattcacgcgattccgcagaaccagagcgtcttctccagagaattgaacttttctgagtatggtttcgacccaaagactgggaacaatcagaatcaccattctctgaagccggaatccggcgagattctcagcttcggcgagagcaagagaa

SEQ ID NO: 75965 - DNA, 250 bp, Glycine max
  Clone ID: 700909048H1
gtcaccaacaacgaggagttgaaaacaattgggtccaacctttggaaggaagagccaaagtgtctagaatggcttaactcaaaagaaccaaattcagtggtttatgtgaactttgggagcattatggtcatgactagtgaccaattgacagagttagcttggggacttgcaaatagtaacaaaaactttttgtgggtcattaggcccgatcttgtggcagggggaattaattgtgcgttacccaatgaat

SEQ ID NO: 75966 - DNA, 252 bp, Glycine max
  unsure (1)..(252): unsure at all n locations
  Clone ID: 700909057H1
cagatagatacacacactctctcttttccactccctctttcgccgccaaaacanaccaaacccacacttcactctcactctcatccaattncnaatnntcgttgttggtgcactgaatgatcgagtaccggatgaacctgtggaccgacgacaactcctccgtcatggaggcctncatgagctcctccgacctctcctccctctggctccccacgccgcaatccgccgcctctactaccactcctggactgg

SEQ ID NO: 75967 - DNA, 247 bp, Glycine max
  Clone ID: 700909059H1
gctgttcagagttgtgatgcttcactgttgctggactccacaagaaggagcttgtctgagaaggaaacagatagaagctttgggttgagaaatttcaggtacattgagaccatcaaagaagctttggaaagagaatgccctggagttgtttcatgtgctgatatcctcgttctctctgccagagatggcattgtttcgctaggaggtccccatatccctcttaagactggaagaagggatggtagaa

SEQ ID NO: 75968 - DNA, 246 bp, Glycine max
  Clone ID: 700909063H1
gcatttgctaatggattgcagactattaacaatgatgatttggaggagatccgtgagcttggttctggaacctatggagctgtttatcatgggaaatggaaaggttctgacgttgccattaagagaataaaagccagttgttttgctggaaggccatctgaaagagcaagattgatcacagatttctggaaggaggcgttgatgttgagttcattgcatcatccaaatgttgtctccttttatggc

SEQ ID NO: 75969 - DNA, 249 bp, Glycine max
  Clone ID: 700909064H1
caatttgattttggattggagagaaaaattttagccgaagcagagaaggataacccaaattggagcaaatttggatcagaaaatgttccgactaaagtttctgattcatcaacagcaaaggttactgctttggatcccattgtgagcaaatttatggccatggggcttagccaagaggctgttcccattgccgttgaaaattatggtgataatccaaccaaagttcaggaattcgtcaatggctacacc

SEQ ID NO: 75970 - DNA, 246 bp, Glycine max
  Clone ID: 700909075H1
gttcatgaacattattcgaggcataatggaagaaattggaaggcctaatgttgcagacttgtttcccattcttcgtccacttgaccctcaacgtgtccttgctaggacgaccaattattttaagaggttgcttaagattatcgatgaaattattgaagaaagaatgccttcaagagtttcaaaatccgaccactccaaggtgtgcaaggatgtattggattcacttcttaacgatattgaagaaac

SEQ ID NO: 75971 - DNA, 107 bp, Glycine max
  unsure (1)..(107): unsure at all n locations
  Clone ID: 700909076H1
gngnaagtcaagntagctgngcnggttctcttanaatgggttcattctctggcacttgtgaaatagntgaagcaaggggngnggctaaatagcaagnaangctccgg

SEQ ID NO: 75972 - DNA, 244 bp, Glycine max
  Clone ID: 700909078H1
gtcttggtttaataatgtctgggaccattcgagtgcatgatgacctgcttctggctgcctctgaggctttggctgcacaagtgagccaagagaactttgataagggactcatatacccaccattcaccaacataagaaagatttcagcacacatagctgccaatgttgctgctaaggcttatgagcttggcttggccactcgccttcctcaacctaaagatttggtgaagtttgcagagagctg

SEQ ID NO: 75973 - DNA, 264 bp, Glycine max
  Clone ID: 700909082H1
cgtacacgcacattctcctcaaagacaacaatggcaccaacagccaagactctgacttacctggcccaggagaaaaccctagaatcgagcttcgttcgggacgaggaggagcgtcccaaggttgcctacaacgaattcagcgacgagatcccagtgatttctcttgccggaatcgacgaggtggatggacgcagaagagagatttgtgagaagatcgtggaggcttgcgagaattggggtatattccaggttgttgatcacggt

SEQ ID NO: 75974 - DNA, 255 bp, Glycine max
  Clone ID: 700909085H1
atcaagagaaacgataggacattcaagcttacagagccattgtcagagcactgccctcctggtgaattcgttcgtgaaatccctctttcaactcgaattcctgaagatgccaatatagaagcatactatgatgagccaggatctgtgcttgagataatggtgccaaaacttcttccaggagcagaagagcatgaagttcgtgtttgccttcgcccaaatgtggggaatgatctcatgttgacttgagttatagac

SEQ ID NO: 75975 - DNA, 254 bp, Glycine max
  Clone ID: 700909103H1
acgcagaactgcccaatcttcaagctaacataaacaccatggaagccgtccaagtcatatccaccactacaatcaaggcaccaccgagtcacaataaccatgactcagttcagaaaatcgatttaactccctgggatcttcagttcctcccaattgaaaccattcagaaaggccttctttttcgcaacaaaaaacacacagaaaaccaaatcgagcacctccaacactccctttcatccactctcgccttcttt

SEQ ID NO: 75976 - DNA, 252 bp, Glycine max
  Clone ID: 700909104H1
cctaaccctagaagaagaaaaaaaccacaaccaccaccatctagggtttttctttttctcatggctagtttgtcaactaggattttcttcatcatgtcccttgtgtgcctggctctcggtccaatggcacaaggggaaatgacatgtggccaggttgtgagcaacctgaccccatgcatctcctatgtggtgtatggtggaaccaatgttcctgaacagtgctgcaatgggataagaaatctctatggcatg

SEQ ID NO: 75977 - DNA, 246 bp, Glycine max
  Clone ID: 700909142H1
gtgcaatttcgtcctctaacactcttccaaatcatggctagctcactgcttgtgagggttgccagctgcatggttgtggtgtggatgtttagttttgggcacataattcccttggcagaagctgaaattccatgtggcagggtgcaaatcactgtggctccatgcatagggtacctaaggggtcctggtggaggtgtccctgcaccatgctgcaatggggttaagagcataaacaaccaagccaaa

SEQ ID NO: 75978 - DNA, 247 bp, Glycine max
  Clone ID: 700909143H1
cagcttcttgttgccctgagaaactttgtggttgcacttggttaccagtcacccatttgctacaatatactactgccaattctggagaatggaattgatattaatagtccagatgaactcaatctcctagaagatagcatgctgttatgggaggccacactttctcatgctccatcaatggtgcctcaattgttacaatatttttcacgccttgtggagattatggaaagaaattttgaccatttac

SEQ ID NO: 75979 - DNA, 245 bp, Glycine max
  Clone ID: 700909145H1
gaggttgtgacggttacaaagggggcgatggtgtgcttgaagtggagattcgctgaggtgtgttcagatggtttgttggttttggttggggagaggggcgcgtcggaacctggcgtggccggtacgggttcggccgaggagggatatgaccttcttgaacttggagactgccacgtcagcgacgaccttgcagtccatggcgatggcgatttcattagagctattgttgttgatttgatggcggg

SEQ ID NO: 75980 - DNA, 245 bp, Glycine max
  Clone ID: 700909150H1
agttctctcacacactcattcggtgctccgaatctcagattctagggttagggttcccaatttctccaccgatcagaaaatgagttcaactggtggttctaccaagggcggaaggggcaagcccaaagcctccaaatccgtttcaagatcgcagaaagctggtctccaattccccgttggaagaatcgctcgattccttaaggctgggaaatacgccgagcgtgttggtgctggtgctcctgtgt

SEQ ID NO: 75981 - DNA, 299 bp, Glycine max
  unsure (1)..(299): unsure at all n locations
  Clone ID: 700909203H1
gtgttttcggagttattcggagtgtttgggttncacgtagaccacntggttntgcntttattgactttgatgaccgcagagatgcacaggatgctatccgngaatnggatggnatgnttngaagnatgatgttgttggaatgtantaganttnagatcaannttanaatgtgcatatatntgnatatttgctacattctntctnatctgctaatntgntattgttttaacccccanngtnttttccggntgatatgttgaagggttttcctcaactagctagttaagtctctttgtggg

SEQ ID NO: 75982 - DNA, 288 bp, Glycine max
  unsure (1)..(288): unsure at all n locations
  Clone ID: 700909222H1
atgggagttacacagtgcacaatcgcgcatgcacttgagaagacaaaatatccagattcagatttatattggaagaaatttgaggataaataccacttttcatggccaatttactgctgancntaatagccatgantnatgctgatttaatcatcacnngtnnataccnggggattgnnggaccgaaaatnanggtnggccnngnnnngaanccngctggtttncccttcctgggtcccnaangggtgttcnangcnntgnagttttgnancccaggtcaatngnggc

SEQ ID NO: 75983 - DNA, 136 bp, Glycine max
  Clone ID: 700909237H1
aaatggtattaaaatcacacaatagtttgatttccggtttttggactgaatgagtcaataagacatgtattttatttgcttatgtaatttttcagctataaatggactcctgtattaataattcttgcacagctct

SEQ ID NO: 75984 - DNA, 274 bp, Glycine max
  Clone ID: 700909308H1
gttatcctaatgggtgccgttgaaggttaccgtattgctggtggccccctcggtgaggtcactgacccaatctacccaggtggcagcttcgacccattgggccttgctgatgacccagaggcttttgctgagcttaaggtgaagaactcaagaacggacgattggccatgttctctatgtttggcttctttgttcaggccattgtcaccggaaagggtccattggagaacctcgccgatcaccttgctgaccctgtcaacaacaacgcctgggc

SEQ ID NO: 75985 - DNA, 279 bp, Glycine max
  Clone ID: 700909312H1
ttcccatgctggtagcctcacaaatttggcaaagtgcccctcttcaactcttcaaattcttggtgcggagaaggctttgttcagggcattaaaaacaagaggaaacactcccaaatatggtttgatattccactcttcttttattggcgggcatctgccaaaaataagggcagaatggctcgatatcttgcaaacaaatgctcaattgcatcacggattgactgctttgctgaaaggggtactactgtttttggggagaaactgcgtgagcaagttgag

SEQ ID NO: 75986 - DNA, 280 bp, Glycine max
  Clone ID: 700909314H1
attagttcattctctttgcgcagttccctacctctcctttcaagatgcagatcttcgtcaagaccctcaccggaaagaccatcacccttgaggtggaaagctctgacaccatcgacaacgtcaaggccaagatccaggacaaggaagaattcccccggatcagcaacgtctcatcttcgccggaaagcagctcgaggacggccgtaccctcgccgactacaacatccagaaggagtcaacccttcaccttgtccttcgtctccgtggtggcatgcagatc

SEQ ID NO: 75987 - DNA, 273 bp, Glycine max
  Clone ID: 700909322H1
ctgaaacatcttcatcatctacgaacgaccataaattttctctctttccctttccctctctctgtctgtgttttttcttaaaaaattctgtgagaggcatagaggaagatgaaggaaagcagtgatgggtttgtgagagcggacagattgatctgaagagcatagatgaacagttggagaggcacctcagcaaggtgttgaccatagaaaagaaaaagcgctctgaaggggaagaagatgctgatcatgttcatcttcatgttcacaccacca

SEQ ID NO: 75988 - DNA, 273 bp, Glycine max
  Clone ID: 700909347H1
ctagcattgtgatgttgattgcatatgtagtctacattgtctttcaactgtggacacacaggcagttatttgaagccgaagatgagggtgaggatggtgaggacggtgaagaagaacaagctgtgattggattatggagtgcattgcttggttggtagggatgactgtgttcattgctgtgttgtctgaatatgtggtggatacaattgaggatgcatcagattcgtggggtttgtctgtgagctttctcagcataatcttgctaccaatagt

SEQ ID NO: 75989 - DNA, 267 bp, Glycine max
  Clone ID: 700909378H1
tgccatcgaaaaagactactgtgaagcacaagaacttaaatcctgaatggaatgaagaattcaatatggttgttaaagatccagactcccaggttttagagattaatgtttatgactgggagcaggttgggaagcagacaagatgggtatgaatgtgatccctttaaaagaagtttcccctgaagagactaaacgtttttctcttgacctcctaaaaaatatggatcctaatgatgtccaaaatgagaagtcacgagggcagattgt

SEQ ID NO: 75990 - DNA, 256 bp, Glycine max
  Clone ID: 700909383H1
gcccaagaggccctccgacaagcctctaaggcttccattgcaggatgtctacaagattggtggtattggtactgtgccagtgggacgtgtagagactggggttgtgaagcctggtatggtggtgactttggtcccactgggctgacaactgaggttaagtctgttgagatgcaccatgaggctctcacagaggctcttccaggtgacaatgttggatttaatgtgaagaatgttgcagtcaaggatctcaagcgtg

SEQ ID NO: 75991 - DNA, 288 bp, Glycine max
  Clone ID: 700909401H1
cagaagtgctcacgaaaatctccttcaggctcccttattgtctagatcaaatagcactgaggcttcattggcaaaggataattcctctaatgatgtaaaaaatggtcaagggtacaaaggtcatagtatgcttgctcctttcacggctgggtggcagtcttctgatttgcaccctctgatcatagaaaagtcagagggaagctatgtatatgacattaatgggaagaaatatcttgatgcacttgctggtctatgggccacttctttagggggaagtgagccacgcct

SEQ ID NO: 75992 - DNA, 280 bp, Glycine max
  Clone ID: 700909410H1
gtaatccctgaagtccatagacatggtggtgcagctcaccacaacaacctccttttgaaatggacataaattaatatttacaggtatctgattctagcttgagctcccatttctgtatgattctgggtaatgatttccttaccggtttggtcagtgtaagctaccaacttggctatttaaagtgtcatatgttattgctttaattaacttattgccacagcagtagtgaagataaacttcttgatatagcactagtaaacatgtggattgatttaattgc

SEQ ID NO: 75993 - DNA, 280 bp, Glycine max
  Clone ID: 700909414H1
ggaaagctgaaaggcattgttggagagagcagaacaaactacatcctatccaatagtctttatcttgtggtggcaggtagtgacgacattgccaacacctattttgttgctcacgccagaatattacagtatgacattccttcttacaccgaccttatggtcaactcagcctctaattttgtaaaggaactgtataatctgggagctcgtagagtttcagtactgggtgcaccaccgattggatgcgtgccatcacagagaactctggctggagggctaa

SEQ ID NO: 75994 - DNA, 278 bp, Glycine max
  Clone ID: 700909421H1
agagattataacatatctgttaaaggtgtgacggatctttcttttcatgctaatcaaaagcttggtggagatcataagtggggtcttgcatctttgactgaaaaacttctatcaaaacagcttaaaaagcccaacaaaataagactgggaaattgggaggctcctgttttgtcaaaggagcaactagagtatgctgcaacagatgcttttgcttcttggtgtctttatcaggcgattaaagatctcccggacgcccagaaagtcactgacagaagtgg

SEQ ID NO: 75995 - DNA, 281 bp, Glycine max
  Clone ID: 700909422H1
gctctttctctcttagaaaacaccctctaccgcctctaagtcctacaagaacccatcccctccccagccgctcccaaaatctcactcttcttactcttcttcctccaagagaagtaaacaaccctcacattcaccacagcagcacacacagacaaagacaaccttgtttgtctccaatcaaaacctttcaagctggcgttcgaaaaccaagacaaccctgtccgagaaatcaagcccaagaataggagaatcatgggtgctggaggccctgatgatgagga

SEQ ID NO: 75996 - DNA, 276 bp, Glycine max
  Clone ID: 700909437H1
agataaccccagcattaaatcttcctaaagatctcccatgttttggtacaaacaacaaacaaattatgttgaactataaaaaagattgcagggattgtgaaagattattccaaggcatcctccatttccatgaggtgagtgaatcgaaattgtgcttgaaacacaggaaagccacatccttgaggtgcactttcagaatttgattagtagagtgctttgctggaatgccatctggataccagtagcatttatgttgaagaagggtgccaatgtttg

SEQ ID NO: 75997 - DNA, 275 bp, Glycine max
  Clone ID: 700909441H1
gcagagatgatgttaaagtggctttagctggtgatattattgctcttgcaggtttgaaagatactattacaggtgaaacattgtgtgaccctgataatccaatcgtgctcgagcggatggacttccctgatcctgttattaaggttgcaattgaaccgaaaactaaagctgatgttgacaagatggcaactggtttaatcaaacttgcacaggaagacccttctttccacttctcccgtgatgaagagataaaccagacagtaattgaaggaatg

SEQ ID NO: 75998 - DNA, 276 bp, Glycine max
  Clone ID: 700909443H1
taaatctcttgttgccttctttcttacagattgttctctttcatgctagcatatcatccataaatgcatgcatgctttgcaatttgcaaaacagttttatgccaaattcaactaactttagtttttggttggtgatggggttttaggggactacagaacttctatggccaaaacgtagttacatgtgaaactattaggtgaaacattgatgtattaggaaaacaccataactaactgcgatattgacgattatgtccttgttggaaatgagttgca

SEQ ID NO: 75999 - DNA, 274 bp, Glycine max
  Clone ID: 700909453H1
gtgaaatctaacaccgagcgtgtagatagtctatgaaatccaattaaatgttcttctgagaacaaagaacataagataacaaacagaaagcgcttataaatggctttccacgaccatctaccgcacgaaatcacgttccagccgtttaccgaggagcagcagttaggtcagagcagggacatgcagcggctgctcccgctctccggcggggcgccgacgtggctgaacaacagcaccgcggcgacgctccgccagcagaatttcctccacctgc

SEQ ID NO: 76000 - DNA, 275 bp, Glycine max
  Clone ID: 700909456H1
gagagagagtgagagagtgagtgagatagagagagacgcttcgcaaatctcaatcgaatctcagaaaaatgagagaaatcatcagcattcacataggtcaggccgggatccaggtcggaaactcctgctgggaactctactgcctcgaacatggcatccagcccgacggcatgatgccttctgactccaccttcggtgtagcccacgacgccttcaacaccttcttcagcgaaaccggatctggcaagcacgtcccccgtgctgtcttcgtcgac

SEQ ID NO: 76001 - DNA, 272 bp, Glycine max
  Clone ID: 700909460H1
gtggagtcagtagaagtttagaatatatcaactgcaagttaattagtcaatattacctatttattttggaatgtatatgcagtgaattagtaattaataacgtttttattatattaactcaattaactagacatgttttcatgcacatatatgttttttcctatcaagttcagtctagctggaacttgttgtcaaccctttacccctgtcccttgaagatgtttcactctttcaatgaatgttcaagaagtaaaattcatcagcagattcaa

SEQ ID NO: 76002 - DNA, 270 bp, Glycine max
  Clone ID: 700909471H1
agactacatcattctgtcttgtgttagaagtaatgaacatcagggcattggatttctgaatgatcctaggaggctcaatgttgcttgacacgagcaagatatggcattgttattttgggaaaccctaaagttttgagcaaacagcctctatggaatagtttattgactcactacaaggaacatgagtgcttagttgaagggcctttaaataacttgaagcaaagtatggttcagttccagaaacccaagaagatttacaatgaacgaggc

SEQ ID NO: 76003 - DNA, 183 bp, Glycine max
  Clone ID: 700909485H1
tccatatacatgtactttttaattacccattcaatcccatatgatttatggctccttggagctgattttgtaattgtaacaattcacttttgtaatttatgtacaacaaccaagaattgctaaacgcatatacagtttggcgattcacattcaattttttaattccatttctccatcacacac

SEQ ID NO: 76004 - DNA, 159 bp, Glycine max
  unsure (1)..(159): unsure at all n locations
  Clone ID: 700909487H1
gcagtatctggcaatttgcagaatgaaatggtgcacatctatctttctgaagtacttgattggtatgctgatttaagtgctcaagaaaaatgggatgagaaagatcattccccaacaaggnaaaaattnttgactgccttagagagtatagcaggatac

SEQ ID NO: 76005 - DNA, 151 bp, Glycine max
  Clone ID: 700909527H1
aagatggcttcctttgtatccttcctagtgctgcttcttgcagcccttatcctcatgcctcaagggcttgctacttactacaaaccaattaagaagccaccagtgtacaagcctccagtgtacaagccaccagtgtacaaaccaccggttt

SEQ ID NO: 76006 - DNA, 244 bp, Glycine max
  unsure (1)..(244): unsure at all n locations
  Clone ID: 700909529H1
agcaaanangcgaagacccctttttcnggttattnncagagtcatccnanncccangtctnctangctctgtagctcnnatggtnggctantattntcngacctttgggttggggttgtnatggcttgcgcaagcgataggttgatnagcttgactgcacttgaatctctgtagtctcatgagnngcntatgatcggntgaatgtggtgnaaatagtgggntaggngtgaacnttanngccggc

SEQ ID NO: 76007 - DNA, 255 bp, Glycine max
  Clone ID: 700909534H1
catgagggtgtgtgttagagatatgatataaaaccatttatctatgttcacctaataacttaagcttttgagatagttagttcattacattattaaatattttggagtttcaacataattgctatgtaggaaattcataagaggaaaccttaggggatgcatgtgtagttactcttataaatttgagtcctgtatacattcggtttcacatacttatcatgtaagattgaatggatataaaatagttcctctctc

SEQ ID NO: 76008 - DNA, 249 bp, Glycine max
  Clone ID: 700909558H1
tgttgagaagcgtcagatgaccaaggctgtagcaatattggatgaaatgaatgtggcaggtgttggaccaaatgaacacacatatacaactcttatgcaaggttatgcttcactgggtgacactgaaaaggcctttcagtactttacagtgttgaggaatgagggcctggagattgatgtttatacttacgaagcgttattgaagtcatgttgcaaatcaggcagaatgcagagtgcccttgcagtcac

SEQ ID NO: 76009 - DNA, 245 bp, Glycine max
  Clone ID: 700909579H1
atgagatttgggatctaggtaacaaagaacagtttatgctgcttccatatctgatatagaatccttgaaaatgacatttgtatttaaagattggggttgaagagctctgtcatggggaaaagaatccatacttggttgaaggaggcttttattcttggatgaaacaaggtctccgtatcaaggaactcaaacctgagacagcactttccatcctcaatgaggaagctgaagcaattctggaggat

SEQ ID NO: 76010 - DNA, 245 bp, Glycine max
  Clone ID: 700909594H1
atcgtatcttcaagtactcaggttgcagcccatcatgctttgtcgtggcacacatatatgtggacagattcattcaacacacagaaatcaaattgacttcactttatgtgcaccggcttctgataacaagcatcatgctagcagcaaagtttatagatgacgcattctacaacaatgcttactatgcaaaagttggaggagtgagcacgtctgaattaaacaggttggagatgagctttctattt

SEQ ID NO: 76011 - DNA, 244 bp, Glycine max
  unsure (1)..(244): unsure at all n locations
  Clone ID: 700909657H1
atcagaaaaagcttgatgttgttntcaaatgagggtttctncaaactgcttgaggtcaagtgggaggacagggataatagcatcagaggaggaagatgtgccagtggcagtagaagagagttattctggaaactacattgtggngtttgaccccacttgatgggtcngcccaatantgatgctgcagtgtccaactggggtccattttgggatatacagccccangatgagtgncttgctgaca

SEQ ID NO: 76012 - DNA, 235 bp, Glycine max
  unsure (1)..(235): unsure at all n locations
  Clone ID: 700909696H1
tttgaaaatggtatccaaaaacccgaacccgcccgagggatnctacttggatcctagtggtggcatggctcttccggggaagcctcccttcgcttccgtnnnnnnnnnnnnnnnnnnnnngaactcgtcggaggacgccgccaagaagatccgcaagccctacaccatcacaaagtcaagggagaactggaccgaacccgaacacgacaattcctcgaagcantcaatgtttgac

SEQ ID NO: 76013 - DNA, 258 bp, Glycine max
  Clone ID: 700909715H1
caagttgtaatatttgtggggtaaaagccatgattcagataattggggcttgctgacataaaggcatgattgaactctccactcctttctatataatcccttccacacgcacttctccatggtcatagtcacaactagagatgacggttcaaaaggaagatttgggcttgagtctaagtttgagcttccctctcctctcctcttctccttccagcccacaaccctcagaaaccctcttggaacgaccctattttcact

SEQ ID NO: 76014 - DNA, 260 bp, Glycine max
  Clone ID: 700909719H1
actccgtccaatggaatcctgcaagcatcatattctctgtggacgggaccccaataagggagttcaagaatttggagacaaaaggggttccattcccaaagagccaacccatgagaatatactctagtctttggaacgctgaggattgggccacaaggggtgggcttgtgaaaacggattggagcaaggccccattcacagcctcatacagaaacttcaattcccaaacttcttcctccactggccaatcactggacgcc

SEQ ID NO: 76015 - DNA, 262 bp, Glycine max
  Clone ID: 700909720H1
gaaagaaggaaggagacatttataaaaagctctttcccttcccctaaatccctcacactcattccatttttacctttctctctcgctcgcaaacgcaaataataaaaaacaaggttttagccatggcatcgaagcggatcttgaaggaactcaaggatctccaaaaggatcctcctacctcatgcagcgccggtcctgttgctgaagacatgtttcactggcaagcaacaattatgggtcctccagacagtccttatgctgg

SEQ ID NO: 76016 - DNA, 257 bp, Glycine max
  Clone ID: 700909723H1
aaataattctcgtagctttgttgctcttataaattctattctggttgacgcttctctcaccatccccatttcgcgttggtgcaaagcatccttcgtttcaatttctctctctcagcgctttctgcaatcgaacctttcatctccaaagggatccacaggccgaaggagaaatggggctgacattcacaaagcttttcagtcggcttttcgcgaagaaggaaatgcgaattctgatggttggtcttgatgctgctggt

SEQ ID NO: 76017 - DNA, 255 bp, Glycine max
  Clone ID: 700909725H1
gtggagtaacaacaatcaccctgaacatgacaaaactgttcgttttggagagtatcagaactcgggacctggtgcagaccccaaagggcgtgctactataactaagcaactaagtgaaacgcaggttaaaccttacataacacttgcgatgattgaaggctccaaatggctacttcctcctccaactcccaaggtttaattaattaccacatttttgtctggcttgaggaataatgcaccccatgttttagtgga

SEQ ID NO: 76018 - DNA, 253 bp, Glycine max
  Clone ID: 700909728H1
gggaagtggtagccatgactggggatggtgttaatgatgctcctgccttgaagcttgcagacattggtattgcaatgggcattgcagggacagaggtggcaaaggaagcttcagatatggtgttggcagatgataattttagttcaattgttgctgctgttggtgagggtagatctatctacaataatatgaaggcctttatcaggtatatgatctcttccaatattggcgaggttgcttctatatttttaac

SEQ ID NO: 76019 - DNA, 252 bp, Glycine max
  Clone ID: 700909731H1
cttgactggtacaagggaccaactctccttgaggctcttgaccaaatcaatgagcccaagaggccctcagacaagccactcaggcttccattgcaggatgtctacaaaattggtggtattggtaccgtgccagtgggacgtgttgagactggtgtcgtgaagcccggtatggtggtgacttttggtcccactgggctgacaactgaggttaagtctgttgagatgcaccatgaggctctcacagaggctctt

SEQ ID NO: 76020 - DNA, 257 bp, Glycine max
  Clone ID: 700909734H1
aaaattcactatggattaacagtctcatattatggttttgttggtgatgtgttggaactttctgaaaaatatcagaagcgctttggcccgctgcggtattttgttgctggattcttcaagttcctatgcttaccacgctacaactatgaagttgaatatcttccagcttcaaagactgagagagaaggaaagctttctggtgaaaaggaagtagttgacatgtcagatctgtatactgacatcatgagcagatcaaa

SEQ ID NO: 76021 - DNA, 256 bp, Glycine max
  Clone ID: 700909737H1
cactgctgctcactggtcagagaagtacaaccatgtgatcaaggccatgactcaaaagggttatagtttcgtcgggtatctacctttgattcccattgaagagatagccaaggcattcaagcagggagaggcgaacttaaaaggagataatgcagcctctgaggaacaaagattagaatctgcatctgattctgattaaattcagctttacttcttcaaaaaaatttgcttatgagtgaacttgttttgtgggttg

SEQ ID NO: 76022 - DNA, 255 bp, Glycine max
  Clone ID: 700909738H1
ttggaattcaactcttctctttctctgtcgaagaacaagtagtttcagaaagatgctagagaatcttcaggctcctccgtcaacaacggaatcggccccagtggtgaagcgctatgctccacccaaccagaggaaccgttctgctaacaggcgcaaatcatctgatcggcttgatcggacaaacagtgtcgggaatgacttagaaaagaatcaagttgcttcttcaagaagtgttcacattccagatcatgaaga

SEQ ID NO: 76023 - DNA, 249 bp, Glycine max
  Clone ID: 700909747H1
cttggcatcttgtgttgtgtccctcttttaagctatttccttctcttaacacaattggttgtgccaattgccatagtcaccaaccaattaacaaaggtatatatatcatcatatcatcaccaaatgaaaaatattgggttgttttttcttgtggtggtggctacttttgtggtggcagccacagctggtagcttttaccaagactttgaaataacgtggggtggtgagcgtgccaaaatctatgagaat

SEQ ID NO: 76024 - DNA, 254 bp, Glycine max
  Clone ID: 700909751H1
ccacattcaaatccaaatggccctttacattacactaataattggcctcctagtaaacaccctagtactctataaatagcatttgcatgcaccttagtcttcaccaaaatactcctcttggcatcttgtgttgtgtccctcttttaagctatttccttctcttaacacaattggttgtgccaattgccatagtcaccaaccaattaacaaaggtatatatatcatcatatcatcaccaaatgaaaaatattggg

SEQ ID NO: 76025 - DNA, 255 bp, Glycine max
  unsure (1)..(255): unsure at all n locations
  Clone ID: 700909752H1
gggntctgnatgaggagttaactagaaaagttgtcactttggtggcagagaatgaaaacctaaagagggagaaagaattggctttgaaagagtatgagtctttggagactacaaataagaacttgaagacacagatagccaagtcaataaacactgnaagtggagaaaactcctgttgagcctgtgtcatctgtggctgagataacaccttcatccggtaatggtccatggttcctttataacctttttccagtt

SEQ ID NO: 76026 - DNA, 252 bp, Glycine max
  Clone ID: 700909756H1
gacaaaggctcgtgaagttctgcaaagagaagatgacctgaatgaaattgtccagcttgtgggcaaggatgctttagctgaaggagataagatcaccttagaaactgcaaagcttttgagagaggattatcttgctcaaaatgcctttacaccatatgataaattttgccccttctacaagtctgtttggatgatgcgcaacattatccatttctacaatttggcaaatcaggcagtagagaggggagctgg

SEQ ID NO: 76027 - DNA, 245 bp, Glycine max
  Clone ID: 700909764H1
atggaaatgaagaagccgtgttgtgaagagtcagagacaattgttggatcctgggaatgttggttcgacgatgcatgcatcgttgacatggattactttgtgaagaccctttcaagcatcaaacagaaaggtgttcgtgcagacttgattggttccatcatcactcattatgcctccatatggctccctgacctctcttcctctgctgaaaatggtgtcaccactcacttccaatcccccgaaag

SEQ ID NO: 76028 - DNA, 248 bp, Glycine max
  Clone ID: 700909769H1
acaatttctggctcaaaaaactccctcttgttgtgtctcactttcatctttctataatgatacccttgttccctgcctaacatgtgcatgtggctgccaaagtaactcatctcagtcagggacttgtgtagatccagatacaccacatttggcatcagttgttgctggctctgggaagaataacttttcacctttggttcaatgtactcatcatatgtgcccagtcagtatccactggcatgttaagc

SEQ ID NO: 76029 - DNA, 247 bp, Glycine max
  Clone ID: 700909772H1
aaaataagacattgtttggtttggttacttgctcgaatttcctcgaatcgcttaatttgtatttgattagttaaaccgcaacgcggaatctcttttctcgaactggctaactctcaggcaagtggttcggacgctgattccagcaacaagcggctggtgctcgcactgtatgacgccctaaactccggcgactccgacgccgtcgtcaagatcgtcgccgccgacctcgagtggtggttccatggtc

SEQ ID NO: 76030 - DNA, 244 bp, Glycine max
  Clone ID: 700909776H1
cgaacagtgaaccctcacctaacaatcagaacccaggatttggtgaaacgatgaacagtgataggaaaattggggttgccttggacttttccaaaggaagcaaaatcgctctgaaatgggctattgacaatcttatcagcaacggtgacactctctacatcgtccacaccaagccttccggaggaagtgaatcaggaaatcttctctggtccaccactggttcacctctgattccattgtcgga

SEQ ID NO: 76031 - DNA, 242 bp, Glycine max
  Clone ID: 700909778H1
agggtcttggcttgtgttctgatgatagcaatggtggaacacattctggtgatgctctttctccgtttcttatctcttgcaatccacatcaacctaaattttcacaaccagttcaagttgcatgtggggctgctcatactgtcattattgcgcatgagggttgcaagctatggtcttgggggagaggaaggagtggagttcttggaaatggtaagactatggatagttacactcccaccata

SEQ ID NO: 76032 - DNA, 245 bp, Glycine max
  Clone ID: 700909786H1
gcaattggttggcatcagtgccatgctgatggcatccaaatatgaagaaatttggactcttgaggttgatgaattagtccgcctcacagattatactcatgaacaggttctggtcatggagaaaaccatattgaataagctggaatggaatttgactgtgccaacaacttttgttttcctggttcgtttcatcaaggcatcagtcccagatcaggagttagaaaacatggcacattttctgtctg

SEQ ID NO: 76033 - DNA, 238 bp, Glycine max
  Clone ID: 700909796H1
atcagactccaaaacagttaaccaacaagcttacttttatgccagagacctcgaagtccatcccaaggacacatttgtgttcagtatagatggcaccgtactctctaatattccatactacaaaaaacatggatatggggtggagaaatttaactcgaccttgtatgatgaatgggttaacaagggcaatgcaccggcactgcccgagactcttaagaattacaacaagctggtgtct

SEQ ID NO: 76034 - DNA, 237 bp, Glycine max
  unsure (1)..(237): unsure at all n locations
  Clone ID: 700909828H1
cgaaacagtggctacagcctctccagcagttaccaagtctacaccagaagggaagncaaacattgaggaagggcagtgttgtgataactggggcttcatctggactaggcctggccactgctaaggctttggctgagacgggaaaatggcatgtaataatggcctgcagggattacctcaaagctgcaagagctgcaaaatccgctggcatggctaaggaaaactacaccatcatgc

SEQ ID NO: 76035 - DNA, 240 bp, Glycine max
  Clone ID: 700909836H1
cttttatttcactccatgatcatcactcacacatcaaacactactactagctccttgtatgagtgtcattccttctagctaaatctctctcttttggggtatggaattcaacaagttcagaatcagaagctatgaggggcaatctgatagggctcaagtggaagatcttgagagaagatgcgaggtagggccatcagaaagcgtgtttctcttcacagacactatgggtgaccccatttg

SEQ ID NO: 76036 - DNA, 240 bp, Glycine max
  unsure (1)..(240): unsure at all n locations
  Clone ID: 700909837H1
gtgtgatactntcctttcatcntcttcttctctctgcgataaaagcaaaacctaaaatttggtttaggcataggaatctgttgtagagttgatctacctggaatggagggagcatcgtggaatagtagtgtttgtgtggcaccgtttctgagcaagacctacgacatggttgatgatccttccaccgacttagtggtgtcgtggggcganaacaacaactcctttgttgtttggaacgtt

SEQ ID NO: 76037 - DNA, 80 bp, Glycine max
  unsure (1)..(80): unsure at all n locations
  Clone ID: 700909838H1
gcgctcggtgcgttcggtctgcggcgagcggttatncagactcatctacancaggacngtaatanggttatgccacanaa

SEQ ID NO: 76038 - DNA, 242 bp, Glycine max
  Clone ID: 700909849H1
agtgcctataatcatgattggtcctggcactggattggctcctttcagaggtttcttgcaggaaagattagctctgaaagaaggaggagctgaactcggcccctcagttttattctttggatgcaggaaccgtcaaatggactacatctatgaagacgagttgagtcacttcgttaatactggcgcacttgatgagctcattcttgccttctctcgagagggacccaccaaggagtatgtac

SEQ ID NO: 76039 - DNA, 233 bp, Glycine max
  Clone ID: 700909860H1
ggattgtcatagtccaggacaaggtttgatgcctgctagttttaaggttaggacagttcctttggacggtgatgattctgcaacagaagaagttttggatcctgactttggagaggcagccattggtcgtgttgctccagttgattcaggattgtggtggattattttattacgagcatacggaaaatgctctggtgatctatcagttcaggagagagttgatgttcaaacag

SEQ ID NO: 76040 - DNA, 235 bp, Glycine max
  Clone ID: 700909886H1
gtcttcttcggatcggtggaacttgaccctgccggcgtgaattccgacgctactcgtggcgccgaattgctatagcggtgacgaatatgaaggttttcgttaagactctcaaaggcactcacttcgaaatcgaagtgacgccgcaagacacggtttctgaagtgaaaaaaaatatagaaactgttcagggtgcagatgtctatcctgctgcacagcaaatgctaattcatcaagg

SEQ ID NO: 76041 - DNA, 233 bp, Glycine max
  Clone ID: 700909892H1
gaaaattttatcctcgtttcaaccttgaagataccataagtttccaggatttggatgatcatagcaagaatgttctcaaacgattataccatgactactatttctgtcgtcaagagaatctttggaggcaaaatgcattgaagaccctgcctgtacttctaaattcatcagacatgctggcctgtggggaagatttgggtctcattccatcttgtgtccatcctgttatgcaa

SEQ ID NO: 76042 - DNA, 257 bp, Glycine max
  Clone ID: 700909911H1
tgcaatctctacagaatgaagtggagatattatcaatgaaactggcagcagttaacccagtaattgatttcaacctcgatagcttactggctaccgaaggagtgactccaatggactgtaacttccctccgacagttgcacctgtcatgtggccagaaatcccacagaacggaaacagacaacaatatcagcaaccgtggcagtttgatgcattccaccaacccctttgggggagggaagaagacaaaactaacatg

SEQ ID NO: 76043 - DNA, 263 bp, Glycine max
  Clone ID: 700909918H1
ttcatagtgaggcgtcagttgagaaaaatgccagagagctaaaagagtacattgaggaaatttattggggttcaaataaacgtgttatgcttcttggacatagcaaaggaggagtagatgcagcagctgctttatctttgtattggtctgatttgaaagataaagttgctgggttggcattagcacaaagtccctatggtggaactcctatagcttcagatcttctgcgagaaggacagcttggtgattatgtaaatttacgg

SEQ ID NO: 76044 - DNA, 258 bp, Glycine max
  Clone ID: 700909925H1
gccgctggtggagctcgtggcggaacaggggaacggcatggcggagaaggccatggtggtgctgaacagcctggcggggattcaggaagggaaggacgcgattgtggaagaaggcggaattgctgctcttgtggaagctattgaggatgggtctgtgaaagggaaggaattcgcggttttgacccttcttcagctctgtgttgatagtgtcataaacagagggtttcttgttagagagggtgggattcctcctctcgt

SEQ ID NO: 76045 - DNA, 259 bp, Glycine max
  Clone ID: 700909928H1
tttccattgccttcatttctcttacatacgtggtggtgggatcacagtccagatggcttgcaatatatgctacagtgattggaagcttgataatgctctctacaattggctccatgtgctattgtgtaattttgcacaggatggaggagacaaaattgagagccgagagtcgatcgttctccatgtctcatgcatcagaccaagagattttgaacagtgaatacaagagaatgtacgcactgtagtctgtagtgtagtt

SEQ ID NO: 76046 - DNA, 260 bp, Glycine max
  Clone ID: 700909929H1
cttccttatgatggctctagtggaaagaagataattggagagatggaggttgatatggcaagtttaataataattgggaatgcttttggcttgtgttttgcaacgtttctttgaccctctcgattatgtcttcaagattgtggataagtgtagattaaagtctctttcatgacagggggagccttttgcactttcctctgtggtgttcttccctttagtgtgtcatttttttcttttaagttattctcttcagctgtcat

SEQ ID NO: 76047 - DNA, 156 bp, Glycine max
  Clone ID: 700909950H1
tctcagaactgtttcctgctggctctgatgttatttcagaacttcacaaactctatcactccccaaaattagttgctcttcatgagattcttgaagaatgtggaattggagttgacaattctggttctgagggtgcggttaacgttgggcagcata

SEQ ID NO: 76048 - DNA, 257 bp, Glycine max
  Clone ID: 700909976H1
gcacctcgtaatcccagggttacccaagattcacaccgatgacttgccggagcagatgcaggatcgtgcgaacgaaggttaccaggtttttatcgacatcgccacgtgcatgagggacagtgacggggttatagtaaatacttgtgaagccatggaaggtagggttgtagaagctttttccgaaggattgatggaaggaaccacgccgaaagtgttttgcattggacccgtgatttcttctgctccttgtagaaagg

SEQ ID NO: 76049 - DNA, 265 bp, Glycine max
  Clone ID: 700910014H1
gatcaagcagctgaaccgcaacggccaccaagggcacaaggagtggatcaacgaggtgaacctgttaggtgtcatgaagcaccctaatttggtgaagttggttgggtactgtgccgaagacgatgagagagggattagaggcttttggtttacgagtttatgccgaataagagcttggaggatcatctccttgcaagagtgccatcgacgataatcccttggggaaccaggttgaggatcgcgcaggatgcggcgaggggtttgg

SEQ ID NO: 76050 - DNA, 265 bp, Glycine max
  Clone ID: 700910023H1
gctgcaagacttttagaagtattgctgaacaatgtgaagattcgagaaacgaaagtaacaaagtcagctatcgtaccattatcacagtatcttttggacccacaaactcaagcacagcaggcaaggttgttggcatttggctcttggggatctgtttcagaatgaggctcttgctcgaacaagtgatgcagtttcagcttgtcgtgctttagtgaatgtgcttgaagagcaaccaacagaagaaatgaaagttgtagccatatgt

SEQ ID NO: 76051 - DNA, 264 bp, Glycine max
  Clone ID: 700910028H1
gcatctcagaggccaattctttcgccgcttcttctctctttccaacgcttccccctgtggtgttctcgtgttgctggtaacaatatggttgttgacgctttgaatgaggatttgagaatcaacggagcagttgaacttgcctgaggactttgatgcaacagctgtaatcatagatcccgtgcctttggcagttgtagacaatggcattgtcaaggaggaggcgcagatcattaaaggaaaagagaaaagagaaatagtactggg

SEQ ID NO: 76052 - DNA, 260 bp, Glycine max
  Clone ID: 700910034H1
gaggtttctggaataaaaaatactatggagacaagaaaaggtgaatttattactgaagaaattaaacatgcaagtgtgcagatcatgtgtgctggtgttgtaattggactggtaactttggttggtttaaagttttacctactaggaatggctcacccattcttcgtaaaatgactggttccgcaatggtgtcagatactatcaacttaggttccttgggagatgaagaaaaagtagagcagctaccaaaaatggatgca

SEQ ID NO: 76053 - DNA, 262 bp, Glycine max
  Clone ID: 700910038H1
gagaaaaaggcatctgttgaagaaaatttcaataatgttttaagtccagacatgaacaagaccaatagcagcgatgatgtggggtatcccgaagagttgaacttggacagaagttctggtgatgattctatggagaggatttgcctgagactaagcaaattgattctaagtttaatgttgatgaacttaaagacaaaatagagattgaagagcctattgtgaaggaggaaagtagtactatagctgttggagatggtctgtc

SEQ ID NO: 76054 - DNA, 261 bp, Glycine max
  Clone ID: 700910046H1
gggtgtcgtgggtttggccaaaggactgagaaaggccaaaagcatgtaccctttggtggttgctgtgttaccagatgttcctgaagaacatcgtgagattctcaaatcccaaggttgcattgtcagggagattgacctgtgtaccctcctgagaaccagacccagttcgccatggcctattatgtcatcaattactccaagctacgtatttgggagttcgtggagtacaagaagacgatatacctagacggtgacatccaa

SEQ ID NO: 76055 - DNA, 264 bp, Glycine max
  Clone ID: 700910061H1
ggctaatccctcactcttgttcttcagtctcctcctattatccgccaccgtagccaccaccttctccgccttcaagacaaagttcggcaagacctacgccacgcaggaggagcacgaccaccgcttccgtatctcaagaacaacttgctccgcgccaagtcacaccagaaattggatccctccgccgtccacggcgtcaccaggttctccgatctcactccggcggagtttcgccgccagttcctcggcctgaagccgctccgc

SEQ ID NO: 76056 - DNA, 259 bp, Glycine max
  Clone ID: 700910066H1
gagaagatagttttttctctctccaagttcatggattcttcaaactccaatggagcatcacagaggctcctggacttggctcaacggctccgcctgtacaaacccccaccattccctgaagacatcttggtcagatcatggaagagaagggagataaggttgtctcagaagtgagttacacgaaatcagccaccccaattgctcaaaacacagcaaaaatcggatacaagagagctgctgttttgatctgcatctttga

SEQ ID NO: 76057 - DNA, 259 bp, Glycine max
  Clone ID: 700910084H1
aactgctactcgctcatcccgtggaggtttcgctctctcagtttcttttccccaaattggtttttcatctaacaatttactttgcagaaccgtaaccctaaccccttcccctaccttgtaaccttcctttgatccttcacctcgcagataatgggagaaacaaaggacgaagcatacgaggaagagcttctcgattacgaggaggaagacgaaaaggcccccgactccgccggagctaaagtcaacggcgaagtaccaa

SEQ ID NO: 76058 - DNA, 263 bp, Glycine max
  unsure (1)..(263): unsure at all n locations
  Clone ID: 700910094H1
gtctaggtggatttgacacagcacatgcgggatgctcgtgcttatgatagagcggctattaaattccgaggagtggaggctgacattaacttcaatattgaagactatgaagatgacttgaagcagatgagcatcttaccaagncaagagttcgtccacgtgcttcgccgacaaagcactggatttccgagaggaagctccaaatatagaggtgtcactttgcacaagtgtggaagatgggaggctcgaatgggccaattttt

SEQ ID NO: 76059 - DNA, 331 bp, Glycine max
  Clone ID: 700862947H1
cgaggaatcaccgtcgtcgttggtgagcgagggggatgaagatttattagaaccatatgaaactgagatctctctaaaatgcttgcttttgcttcttctctctaaaactgcatccttggaatcaggcgagacagagttttcttcattctcgaaaattggcaaaggtaggtagttagttatttgcaatgatagaaggtggtagcatccggctgaagacatggcagcaggcagctgtggcagtgggttcggcggtgggggcgttgttggaccctcgaagagcggatttgatagcagctcttggtgagacaactggaaagcctgcttttgagag

SEQ ID NO: 76060 - DNA, 327 bp, Glycine max
  Clone ID: 700862961H1
atttgatgaagaagatgacagcattgaaacaatcacacttggggataaaaggattggcattaagactagtgtcttggaggagaaggctaccgcttgtaacatgctatgttgctatgctgatgagttgaaggaaggatttttcccttggattgaccaggttgctttcacattggttcctcttcttaaattttacttccacgaagaagttaggaaggctgcagtttcagccatgccagaactgttgtcctcggcaaaatcagctgtagagaagggacagtcgcaaggtcgtgataagacttacgtaaaacagttgtctgattatataat

SEQ ID NO: 76061 - DNA, 197 bp, Glycine max
  Clone ID: 700862986H1
cacagaacaagaaaactgagatatacaccagaattctttccatccttaagaatggcatagttgttggtgataagaagtttgaatttctagcattctcatcaagtcagttgcgggaaaactctctctggatgtttgctcctacagaaactggatgtactgctgcttacataaggaaatggatgggaaattttagccag

SEQ ID NO: 76062 - DNA, 331 bp, Glycine max
  Clone ID: 700862987H1
gtgagtgagatagagagagacgcttcgcaaatctcaatcgaatctcagaaaaatgagagaaatcatcagcattcacataggtcaggccgggatccaggtcggaaactcctgctgggaactctactgcctcgaacatggcatccagcccgacggcatgatgccttctgactccaccttcggtgtagcccacgacgccttcaacaccttcttcagcgaaaccggatctggcaagcacgtcccccgtgctgtcttcgtcgacctcgaacccaccgtcatcgacgaggtccgctgcggcacctaccgtcaactcttccaccccgaacaactcatc

SEQ ID NO: 76063 - DNA, 249 bp, Glycine max
  Clone ID: 700863002H1
ctttctgccacccccacaaaagggtgcttgcgtttctttctgtgatctcaaccatgaagcgtccactcacaccttcagccagcggcatgaagactaacaagaaagccaaggcgatggaaaatgacgaagacgtggaggggctggggctttcgacgacaaccttctgttcgaggtgttgaagcacgtggacgcgcggacgctggcgatggcgggatgcgtgaacaaacagtggcacaaaactgcgcaaga

SEQ ID NO: 76064 - DNA, 247 bp, Glycine max
  Clone ID: 700863003H1
ggggattctgacagtctcaaagagtctggctcaaagaaaagggttaggtctgagtcatgtgctgcttctggctccaaggcatgtcgggagaagttgagaagggataggcttaatgacaagtttgttgaattgggcgccattttggagcctggaaggcctgccaaaacagacaaggctgctatcctgattgatgctgtccgaatggtgacccagttacggggtgaagcccagaagttgaaagacacta

SEQ ID NO: 76065 - DNA, 245 bp, Glycine max
  Clone ID: 700863012H1
gaaggatattagtggaaatgccagagcattgaggaggttgagaacagcatgtgagagggccaagaggactctctcttccactgctcaaaccaccattgagattgattccttgtatgagggtattgacttctacacaaccatcaccgtgcccgtttcgaagagcttaacatggacctattcaggaagtgcatggagcccgtggagaagtgtttgcgggatgctaagatggacaagagcaccgtcca

SEQ ID NO: 76066 - DNA, 248 bp, Glycine max
  Clone ID: 700863017H1
ttgaaatggccatgagcattgttgaacagagtggaggccagtaccatgtgttggtgataatcgcagatggccaggtaacaaaaaatgttgacactaaacatgggagaccaagtccacaagaacagaagactgtggatgccatagtgcagctagtaaatttcctctttcaatcatattggttggcgttggagatggaccgtgggacatgatgaaggaatttgatgacaatatcccagctcgggcctttg

SEQ ID NO: 76067 - DNA, 240 bp, Glycine max
  Clone ID: 700863020H1
gtgaaataacatcaggtgaaaaatgcttgaacatagccatacttcaattttggaccatgtatatgaatgagtggagtaatggcttgggtcatcgatcggtgtatggattccttgagcctcaatctatacacaatgcaaaggtagacgtgggcaatgtgaagaatatattgaaaaatggcttaaggaatctcaacgacaactgtacataggagcttatttgaatgacgcccattggcaaat

SEQ ID NO: 76068 - DNA, 240 bp, Glycine max
  Clone ID: 700863021H1
gtaattttgacagatatctggtgaaacagtaggtgaagtgaggattgtttcagatatgcacgagcgtaaggctgcaatggcacaagaagctgatgcatttgttgctctccctggaggatatggaaccatggaagagctgttgagatgataacttgggcccaacttggaatccataaaaaaccggtaacatagtatttttactctgtagtacaaaatctttaatataacaatcaagtgcta

SEQ ID NO: 76069 - DNA, 242 bp, Glycine max
  Clone ID: 700863026H1
tgcatttgcattacttgttatatctctaattcacagttttatttcatcagtatcatatggtaactttgactcactgtttcgaaaatgaacgacctatttctgttggatgatctagttttcatcagttcttcatttgttggtgttttctctgcagatgctttcattggtgtcaacattggtacagatgtcaccaacatgccaagtccaacagaggttgttgcccttcttaaggctcaaggtat

SEQ ID NO: 76070 - DNA, 246 bp, Glycine max
  Clone ID: 700863034H1
cttgacagaaagcatgaaatccaatgttgtaattaataggacaagtgatgttgacataatgcaactcctgaatcacatacataatgctagaaatgccgtatatcagaaacatccgaaaagtgaaagtataattgtgcactctgaatgaaaggctttatacttgctcagggctgctcccaagataacaagctatcagttgcaattaacagccagggtatccagtcgagagcagatgagaagtgggga

SEQ ID NO: 76071 - DNA, 243 bp, Glycine max
  Clone ID: 700863043H1
taatgttgtgcttgacgacaacttcataagtaatcttggaaggactttcaatgagtcattacagattcaagatgctcataaatctgttcttgcttctgaggagaatgatatctataatgtgaatgaggaaaaattatgtgaacaatgaaagatcaagagacaaacataaatatgacgtgcttgaaaaaatctgcaacttttccaattcctaatacaatgttgccttcaagcccatctgataag

SEQ ID NO: 76072 - DNA, 243 bp, Glycine max
  Clone ID: 700863047H1
ctaacattaattttctctctcaactcaaaaccagtggaaaaaaaaagtattatttgctccttccttctttcgaatctcatactcacccaactaccctcgtgccagttctatctctttctcctccaaaataattggagttatgaaagttatcatcttttctctaaattggtttctgggtaatccttgttcatagcttttggattttcccatcaagcctccttttttgttgctagggcttcaacc

SEQ ID NO: 76073 - DNA, 242 bp, Glycine max
  Clone ID: 700863051H1
gcaggtagcaaatcatcttgaccgtatggtatcaacccttggaagaaatcctctgaaggttttggtgcaagtaaattcgagtggagaagaatgtaagttcagcttaaaattataatgagttactctaactccttgttatacttttggatcttatgaggtttcctcactccctttgggtgtgaggaaaattcttgcttgaggcattagaaatccttcttttgtacattgtaacttgtaaattt

SEQ ID NO: 76074 - DNA, 240 bp, Glycine max
  Clone ID: 700863052H1
cgtttcttgtgtcgcactgctgctagttttgtttctgcccttatgggaatcatctctaagcctccaatattgccaaatgatattggaatagctagagaaaggaatggtggtttgatagttgtgggatcatatgttccaaaacaacaaagcaggttgaagagctcaaattacagtgtggtcagttcttaaaaagcattgaggtatcagttgaaaaacttgcaatgagtcctattgaggaga

SEQ ID NO: 76075 - DNA, 247 bp, Glycine max
  Clone ID: 700863065H1
cttcacaccattctcagtttccaagaaatgaaaatgggctaactcttggtacacgacaaccagccactcctggatttcagaatgtcagcatttcaaatcctaattatagaggattggaggactacttcccagaggatgagattcaactagaagtcacgagatgctagaaaatgaagatatgcagcatctgctccgtatatttaatatgggaggagggcaatctcatgctccctttaatactcaagaa

SEQ ID NO: 76076 - DNA, 239 bp, Glycine max
  Clone ID: 700863068H1
gagaaaaatatatccaactaatggctacccttattgctcctagccaccattcccgggttgaggatgctgaagctctccgaaatgctttcaaaggatggggggctgatgacaaggccattatagcaatactgggtcacagaatgttcatcagaggcaagaaatcagaaaagcttatgaggagatttaccaagaggatctcatcaaacgccttgagtccgagatctctggtgactttgaga

SEQ ID NO: 76077 - DNA, 240 bp, Glycine max
  Clone ID: 700863073H1
ctttgttgcagatctcacaaatgatttcaaagagaccagaatctccaacttcacagaagaggacacaatttaccatggaagctgaagcagagatcaagcaaagacattataaggaagaaggtgtatgtgtgcccagaaccagttgcgtgcaccacgagccttcaagggccctgggggacctcactggcatcaagaagcacttctgcagaaaacacggcgagaagaagtggaaatgtgaca

SEQ ID NO: 76078 - DNA, 241 bp, Glycine max
  Clone ID: 700863090H1
ggtgaatgtggttgatggactgaagttgtatgaagatttatttgatagcactgaaattgcaaatcttgtttcattggtcaatgatctaagggtttctggaaaaaaaggacagttacaaggaagtcaggcatatatagtttcaagaaggcccatgaaagggcatggaagggagatgattcagttgggtgttccaattgctgatgccccagcagaaggggaaaatatgacaggagcctccaaa

SEQ ID NO: 76079 - DNA, 250 bp, Glycine max
  Clone ID: 700951714H1
ggaaagggcaaaagccgctaaagtggacagtcaggcagcttattttgaagacccatattcagtctccagcaacttcacttccagtgttagcgaactcacaattggcaagaaggatttacgaaggaacttgaagggaaaatatcgtggtgacggtccatgcatagccacaaaccccatcgacaggtgttggaggtgtgaccccaattgggccaacaatcgccagaagctcgcagattgcgtccaaggcttc

SEQ ID NO: 76080 - DNA, 238 bp, Glycine max
  Clone ID: 700951786H1
gcaggatgaggagggaaaagatttcaggttctactttgattttgagcatttaaaggaggcggcgtctgtattggacaaggagcagttttgggcagattggaaccaatggcaacaaaaagatgggatgagtcttcatcttgtggaggatttcagggtcacgcccatgaagcttatggatgtgaaggatgccttgatcatgaggaagtttggatctgtcgagccggataactactggtat

SEQ ID NO: 76081 - DNA, 238 bp, Glycine max
  Clone ID: 700951788H1
gtttggtctgttgttgatttacattaaacattacattacattacctgccgactagtttacgctatcagcaatagcaagtcggtcgctcagacacgcacagatctgatctgatctgatctatctgaagccgaaaacgccgacggtgatgatgaagatggggtgttcacgttgctccttcttcctcttcctcatcctcttagtggcgctcttcccctcgtcgctctccgagatccgcttc

SEQ ID NO: 76082 - DNA, 274 bp, Glycine max
  Clone ID: 700951822H1
gtttagttatctactcttttctgcatgtttgttctctcaacgactcctccgcgaaagagtattattcaatattttggttgggttgaatcccggggttgaagcgttgcagacatcacggctattctaagagtgtctcgctccctcattcatgtccgatctgtacgacggaggacgggtagttgcgtaactgccgttaacccttcgccgcacggtgggcgtggtgctttgccttctgaaggtggtagcccttcagacttgctcttcctcgctggtg

SEQ ID NO: 76083 - DNA, 161 bp, Glycine max
  Clone ID: 700951912H1
gtatatctattatagtttactactcaactaagatggactcgaagaggaagatagcattacttatttcaggccttctggccatgctcattttaatctcctcagatgtggcagccagagaattgaaagaggtcactggtgctggcttgtctggtggtcgtggg

SEQ ID NO: 76084 - DNA, 268 bp, Glycine max
  Clone ID: 700951916H1
agatcaaggagcagtttcataccgagaccttggacaatgttcagaaactcactggcatcacccttgacattgtgagtggtttgtccaacatcctcgagaagttcgggttgaagtttaatcttaaacccgcgtctcgccgtcttctcggcaaggatgggttgcccacttggttctctgctgctgatcgtaagcttttgggtcgtggatggagatcacgtgtcaagcccaatgttgtggttgcccaggatggcactggtcagttcaaaac

SEQ ID NO: 76085 - DNA, 261 bp, Glycine max
  Clone ID: 700951943H1
gttttctctctccacactctgcctctaacttgaaaaaaaaactcaaacactctgttctcgtcgcatgcacataaacaataacaaatggcttccacaactatgttgttgctggtcgtgttcatgattctatgtatatcacacccctcatttcaaatggttcttgtgcctttaacacacacactttccaaagcccaattcaacagcacccaccaccttctcaaatccacttccacccgttccgcaaaacgcttccgccgccaa

SEQ ID NO: 76086 - DNA, 263 bp, Glycine max
  Clone ID: 700951946H1
gttcattctctttgcgcagttccctacctctcctttcaagatgcagatcttcgtcaagaccctcaccggaaagaccatcacccttgaggtggaaagctctgacaccatcgacaacgtcaaggccaagatccaggacaaggaaggaattcccccggatcagcaacgtctcatcttcgccggaaagcagctcgaggacggccgtaccctcgccgactacaacatccagaaggagtcaacccttcaccttgtccttcgtctccgtg

SEQ ID NO: 76087 - DNA, 263 bp, Glycine max
  Clone ID: 700951950H1
ctgcatgtttgttctctcaacgactcctccgcgaaagagtattattcaatattttggttgggttgaatcccggggttgaagcgttgcagacatcacggctattctaagagtgtctcgctccctcattcatgtccgatctgtacgacggaggacgggtagttgcgtaactgccgttaacccttcgccgcacggtgggcgtggtgctttgccttctgaaggtggtagcccttcagacttgctcttcctcgctggtggtggtttct

SEQ ID NO: 76088 - DNA, 132 bp, Glycine max
  Clone ID: 700951971H1
ccaaaaacaagctgtgattgatgatttaaaaggttccaaagtgtaagggtaggcaacctgataaaggatgataattgtctaccatgtaaacataacatttttattatcaataaagggtatatctgtaattct

SEQ ID NO: 76089 - DNA, 257 bp, Glycine max
  Clone ID: 700951976H1
ctttgtcagctttttcttgcttccgtagttcatatggcgtgtgttcaagtcatcacagtttttctctttgcattggctctagctaaaatttacccctcaacatgtcaagtggtgcagggaaaagtctcctgcgttgactgcactcacaactatgacttatctgatattaaggtttcggtgaggtgtgatggtgtgaaaaaactggctttggctactacagaaaatgatggctccttcaaggttgatcttcccctaga

SEQ ID NO: 76090 - DNA, 257 bp, Glycine max
  Clone ID: 700951986H1
cctgatttcagtgataggtatgatagaaatggcagtggtgggtctaacgaagctggatcacggaataatcagagttccaaagggggaagttatgcttctcatgatgtttcaaatggaacacatgttgctggcaatgttgattcttctgtcagaggtcatggggcttcggatgctggagctggactatctcctgagtcttatcgacatcggcatgaaatatctgtgactggagacaatgtacctccaccccttgcatc

SEQ ID NO: 76091 - DNA, 256 bp, Glycine max
  Clone ID: 700951987H1
gctggtattattgctcaagaagttgccggtgatgtccgtatgactgatacccgtgcagatgaagctgagcgtggtattaccatcaagtctacaggtatctcactctactatgaaatgactgatgaagctctcaagagttttaagggagagcgcaatgggaatgagtatcttatcaatctcattgactcccctgggcacgttgacttctcatctgaggttactgctgcactccgtattactgatggagctctagttg

SEQ ID NO: 76092 - DNA, 257 bp, Glycine max
  Clone ID: 700951992H1
gtcattcccgaaggcatcagcaagcatgcaaaccggagcaaatattttcttgctggtggaatagcaggaggtatttctcgtacagcaactgctcctcttgatcgtctgaaggtggtcttacaagttcaaagcgaacgtgcttctatcatgccagcagtaacaaggatatggaagcaagatggtctgttaggattttttcgaggtaatggattgaatgttgtgaaggtagcaccagaaagtgccatcaaattttatgc

SEQ ID NO: 76093 - DNA, 257 bp, Glycine max
  Clone ID: 700951993H1
gtcttcccttagtgcccgcgacatgccaccagacgacttgaacatgatgtctgatcttgatggccagcagcagcatcctttgaatgacttgagctgttacttacagccgcggcctggtgctggttctgtgagtagatctggtcggtccaagatcctaactccatcaaatcttgaagatctcttttctgctgagatttcttcatctccccggtattctgatccagcagcgggttccgtgttttcccctacgcacaaat

SEQ ID NO: 76094 - DNA, 252 bp, Glycine max
  Clone ID: 700952042H1
gtttttgagagttgcatttgcactttgtaggatcatctcctagcattgatcgattgagatggcagacgaagctaacagaactgctttccttgaaattcaaagtcgcatgatcgatactactggaaaaataaaacaggtgcaaacccagatgcgttccaaagaagcagaaaaaaagcgtgcttttctgaccatggaggagctgaagcaagttcctgatgatacgaatgtttacaaatccattggagaatgttt

SEQ ID NO: 76095 - DNA, 268 bp, Glycine max
  Clone ID: 700952101H1
acacaccttgttttcctttctatagagacacacagagagagcaataaacacccttcaatggctaccactaccactaaagtttacattgtttactattctatgtacggacatgttgagaagctagctgaagagattaaaaaaggagctgcttctgttgaaggagtagaagcaaagctatggcaggtacctgaaacactgcctcaagaggtccttgggaaaatgggagcacctccaaagagtgatgtaccaattattacacccaatgagc

SEQ ID NO: 76096 - DNA, 256 bp, Glycine max
  Clone ID: 700952109H1
aaattcatgaacgagaagtactgtgttcgtactgcatatagtttgttgaggtttctgttcctccttcattcccttcctacactcttcatgcactattttcattttgctaagggatcgatcataaggaggaagaaatacaaggttttgggacctcttctcttggcttataaaaagtccaaaacaggagccttcttggtgttttagaaaggaggaggcttgggggaaaagggtggagaaaaaagtggttaaagggaca

SEQ ID NO: 76097 - DNA, 251 bp, Glycine max
  Clone ID: 700952113H1
gatcaagtcaaccggctcttagaacgctctgataggtcaaaaggaatgaaaaagtatactgccgtagacaaatggaacacacaacttaaatctctttaccaaactatcagcaacagagttggttaaaccgtggtgtctaacgggagagttatctgttttattgtccccgctgcagttttgttatgtgaattaatgtatctattatggagagttagggatgtgtattgcaccaatagtgaaccaaagcgaga

SEQ ID NO: 76098 - DNA, 255 bp, Glycine max
  Clone ID: 700952123H1
aaagtcaataaggattccagagctttatattgaggttcctgaaacttcaactgttggttcactaaagaggactatcgtggaggcagtgatggctatacttggaggtggtgcacatgttggtgttcttcttcaggggaaaaaagttagagatgacaatagaacacttgtgcagactggtatatcttgcaatgaaaatttggataccctgagttcatgttggagcccacttcactacaagcttctccaactgtttgt

SEQ ID NO: 76099 - DNA, 252 bp, Glycine max
  Clone ID: 700952125H1
cttcatcgttcgattcttctcctcctaaagatgcagatcttcgtgaaaactttgaccggtaagaccatcacccttgaggtggagtcctccgacaccatcgataacgtgaaagctaagattcaagacaaggaagggatcccacctgaccagcagagacttatctttgcgggtaaacagcttgaggatggtcgaacccttgccgactacaacatccaaaaggaatccactctccacctcgtgcttcgcctcagg

SEQ ID NO: 76100 - DNA, 257 bp, Glycine max
  Clone ID: 700952137H1
cttcaatggaatttggcaaaaagtagccatcgccccaacgatcccatttcccttgacttctctacgtgaagatccttgtgtcgcatagagctagttaaaatgtctgagggaaatgcagggaaaggaaagagaatcgccatcattggcgtctcagccttattgttggtggctatggttgtggcaatcacagttggggtcaatctcaatgagaatggttccaacaatgatacagaggacaacaagaaaaatcatgttgt

SEQ ID NO: 76101 - DNA, 254 bp, Glycine max
  Clone ID: 700952139H1
gtcgacggcgaatcgtggaagttccagcgcaagatggcgagtctcgaactcggcagcgtggcgattcggacgtacgcgatggaattagtcaacgaggagatccacgcgcgactgatcccgatcatggaatcaaccgcgcgtggcgaattaaactccgtctgcgttttggatttgcaagatatactacgaagattctcgttcgacaacatatgcaaattctcgttcgggctcgacccgggttgtctcctaccgaa

SEQ ID NO: 76102 - DNA, 249 bp, Glycine max
  Clone ID: 700952156H1
tttccctctatcgtcttctccctccttgttcaatggtcttagggtttccggtgtccatgcgtagaagctagcaataatgcgtttttgaaacccgtattcatctgtatccaacgatttactagaaggagatcgcaatttctccatcttctcgtttcggtggctcgtgaaatcgaaagttatcgaaactttcgcgcgacacgaagtattgggaaccaagcaaaatttctatggctgacgaaccactatatc

SEQ ID NO: 76103 - DNA, 192 bp, Glycine max
  Clone ID: 700952161H1
gttgtacacaaaaatagtccaagagggacccattttcgtcgtgctgggcctgctcagaaggtatattttgattcagaggaagtacacgcttgtattgtcacgtgcggtggactttgtcctggtctaaatacagtgataagagaaatagtatgcggcttatatcatatgtatggggtgcacaaagttttggga

SEQ ID NO: 76104 - DNA, 256 bp, Glycine max
  Clone ID: 700952166H1
ccctcgcgccgcatttttatttttctctttcattatttttttaccatttttttatggacctcttcgccggcgaccacttccctgtccccgaccacgtcgctccgttccccgattccggcgacctcgtcttcgccgccgacctcctctcccaccgccccaacccccagaagctccgccctatcaggtccgtccccgccgcccccattgcccaccctcctccgccccctctctcgcacgatccgattccctccgggtc

SEQ ID NO: 76105 - DNA, 248 bp, Glycine max
  Clone ID: 700952171H1
tcttcacctttaagttaaatagtttttcattgtttcatttaatctacaatggctgcttcaacaatggctctctcttcatcatcattggctggccaagctatcaagcttgccccctccacccctcagcttggtgttggaagggttagcatgaggaaaacagcctccaagactgtttcttctggaagcccatggtacggcccagaccgtgtcaagtacttgggcccattctctggtgagcccccatccta

SEQ ID NO: 76106 - DNA, 245 bp, Glycine max
  Clone ID: 700952180H1
atctctcttcccagttctcacctcaccgctgcatcttcacgtcgtctctaacgagggaaaatgagtcgaggaggtgcagcagcagcgaagggaaagaagaagggtgctacattcaccattgactgtgcaaagccagtagaagacaagatcatggacattgcttctctcgagaagtttcttcaagagaggatcaaggttggtggcaaagctggtgctcttggtgactctgttaccgttacacgtga

SEQ ID NO: 76107 - DNA, 250 bp, Glycine max
  Clone ID: 700952183H1
aaaaaaactcaaacaccttcaagaacttgtatctttctttgttagtatttgttactacaattttacattcttttcatctctacatatttcattagtcatggcacctcaagcagtttccttcaagtccttcgccgttgctcttattgtggcgcttttcttctccgcctccgctctggacttagtttcggggcagtcgccggtgccggcgccggcgccggcaccagatgccggagcagctggatccgtgtcg

SEQ ID NO: 76108 - DNA, 239 bp, Glycine max
  Clone ID: 700952191H1
atccattcattgtcttaatgttagcaatgtcttcctctttctccatccatttcttcctcctcctctcaatagcccttttctcagtttgttgcttagcagcatctcaagctcccaccaccaaatcacacccctatatccttcccattaagaaagaccccgcaacaaatttgtactacacttcagttggcattggaactcctaggcacaactttgatttagtcattgatctttctggtgaa

SEQ ID NO: 76109 - DNA, 238 bp, Glycine max
  Clone ID: 700952193H1
caaccagtgagtggagttttggatcttctgtcaaaaacaaccgaaggtgctaatgctatgagaatgaaaattgcatctgctataacatctgatgaacaacttctcaggaggagactgcctcgtgttataggtggtgataatctgctaaaactatacgatgagtacaaagctcaaggacaggtcatactgcagttggcagaatcaggttcattttttggtcaggttgatctgttcaagg

SEQ ID NO: 76110 - DNA, 238 bp, Glycine max
  Clone ID: 700952194H1
gggaaactaggagatatggtgttattgaatgtgatcctctggtgcaaaatggccttgaaaagtctgcaaggcacatggtcatcccctatatgccaatgttggtgccacctataaactggacagggtatgacaaaggagcatacttgtttttgccatcgtatgttatgagagtacatggagcaaagcagcaacgtgaagcagttaagagggctcccaagagtcaacttgatcctgtttt

SEQ ID NO: 76111 - DNA, 259 bp, Glycine max
  Clone ID: 700952201H1
gagataactagaaacagtgtgatgaaaatgaaggtccttgttttcttcgttgctacaattttggtagcatggcaatgccatgcgtacgatatgttccctctccgaatgaacactggctatggtgcccgtactccggaggtgaaatgcgcaagttggaggcttgctgtggaagcacacaacatctttggctttgagaccattcctgaagagtgcgttgaagcaacaaaggaatacatccatggcgaacaatatagatcag

SEQ ID NO: 76112 - DNA, 253 bp, Glycine max
  Clone ID: 700952204H1
agagaaacaagacaagcacaacaagcattctgaaattctcttatttgttagtatcaggactagtaacaattaaccttgaaaataaagcttcatctagttttatcttccataggtagaaaagtgatcaagagaatacacaagtcaccaggtgggaatgtaccatcatcaccaacaccaaggaaaaaacattcattcttcttccagaatgccaatcccctctgagaggcacatgttccttcaaacaggaaatgga

SEQ ID NO: 76113 - DNA, 255 bp, Glycine max
  Clone ID: 700952211H1
gaaggtcattgttacaaccaaacacaatgatgatgaacagtatgtttgggagtctcaagctggaggttctttcactgtcaccagggataacactggtgaggttcttggcaggggtactaagatcactctctacctcaaggaagatcagcttgagtaccttgaggagcgtcgcttgaaggatctgatcaagaagcattctgagttcattagctacccaatttctctttggattgagaaaactactgagaaggagat

SEQ ID NO: 76114 - DNA, 256 bp, Glycine max
  Clone ID: 700952212H1
catcatttccactgccttgatgactattgggattgcaattgttagttggattgcactcccaacttccttcactatcttcaattttggagtgcagaaagatgtcaagaattggcagctattcttgtgtgttgctgttggtctttgggcagggcttattattggatttgtaactgagtactatactagcaatgcatatagtccggtgcaagacgttgcagactcctgcaggactggtgctgcaactaatgttatcttt

SEQ ID NO: 76115 - DNA, 250 bp, Glycine max
  Clone ID: 700952216H1
actaaacatatacctcaccttatctcgtctttgccttttcatgtttttgtttatcggtttgattctaatgcaatgatatctcatcatgattgtcctagcaggtgacaaaaaaacagatgaggaggttgtggttgtgaatgcatcatcatggattgatgacaggtttgattttgaccctgaggagtgcaatgttgcaaatgggaaatgggtgtttaaccattcaataaagcctctctactcagacataagc

SEQ ID NO: 76116 - DNA, 246 bp, Glycine max
  Clone ID: 700952223H1
cactgttaaaatggctgtacagtacatgcggagggttattgagaagaaggcaaagtttgatattatgaatctgaactgtttgcaggttgcaccgaagacattcattcctgttttatttggacatgcaagcgatgacaaattcattcagcctcaccattctgatctcatctctgaagcctatgcaggtgacaaaaatgtcataaaatttgacggtgatcacaactcgtctcgaccacaattctttta

SEQ ID NO: 76117 - DNA, 261 bp, Glycine max
  Clone ID: 700952230H1
ctagcctaatataattggccaccatgaccgatgaacaacgagaaccacaagcttccccgagcaatggcgtccacaagttagaaagaaaacaaatagctgaaagagaaagaaaacaaatagctggaagggatagatcggtttttagaggcaggcgtccacgacctgggttttctgattcattttcaagcactgacttggaagctttagagattgaagagggctctcctaggagtcaagggtctgaaaccccaagttcaaggg

SEQ ID NO: 76118 - DNA, 246 bp, Glycine max
  Clone ID: 700952234H1
cgcttcttgtgggtgctgctttgaaccttgtgggatatggctgggtctggcttgttgtcacttctcaagtccctgtcttgcctctctgggctatgtgtgctcttatctttgtgggaacaaatggtgaaacctacttcaatacagtttctctggtgtcttgtgtacaaaatttccccaaaagccggggtcctgtggtgggaattctaaagggctttgctgggttgagtggtgcaatcttgactcaga

SEQ ID NO: 76119 - DNA, 245 bp, Glycine max
  Clone ID: 700952241H1
ggaaaatgctggagaagatattactggtgcaaagaatgaagtgaagtgtgacaaccaagcacctgaaaacaagagtgagacagagaaatccataccagtaacgaagaaagatggcgaaaatcctacacctgcaaaagctgaagttcctgacaacgagtttgagaagcgcataagaccagaggttatccctgcaaatgagataggggttacatttgcagatattggtgcgttggatgagattaaag

SEQ ID NO: 76120 - DNA, 244 bp, Glycine max
  Clone ID: 700952250H1
caaagtctcttattcctctttgtattaattttttcctcttctcccttttcattttccggtggcaattcaaatcgcactctttgcgtttgtgctgatccactgtgaatgaaaaaaacaaaactaagagagagaagagagaaaaattacaacaacattattatttattgtaactaattagctaattaattggttattaaaaattataaggccatgtttggcgaaaccgttccgcgaccacagttca

SEQ ID NO: 76121 - DNA, 242 bp, Glycine max
  Clone ID: 700952251H1
tgccactttctgagtacaatacaacactgccatggctgcctcagtctccactattggagctgtcaacagagctccactgagcttgaacagctctgaagctggagattcggttcccagttcagccttctttggcacaagcttgaagaaggttactgcctcaagggtccctaacgtcaagatttcttctggaagtttcaaaatcgttgcggcggagaaagagattgatgagcaacaacagacaa

SEQ ID NO: 76122 - DNA, 235 bp, Glycine max
  Clone ID: 700952271H1
gtggatgatcacccttttgatttggacaagatggttttaatggactggagggattctcatttggggaatgaaccctacttgagagctagtaattcaaggtttcctactttcctctatgcaatgccatttagttccaatttgatatttcttgaggagacttcccttgtgagccgtccagtgttgtcttacatggaagtgaagaggaggatggttgcaaggctaaggcacttaggca

SEQ ID NO: 76123 - DNA, 238 bp, Glycine max
  Clone ID: 700952282H1
caaggctaactcctacagtgtgcatggaagtgcactgggtgccaaagaagttgatgccacaaggcagaaccttggatggtcacatgagccattccacgtgcctgaggatgtcaaaaagcattggagtcgccacacccctgagggtgctgcacttgaagctgaatggaatgctaagtttgctgagtatgaaaagaaatacaaggaggaagctgcagaattgaaatctattatcaatggt

SEQ ID NO: 76124 - DNA, 234 bp, Glycine max
  Clone ID: 700952285H1
caacttaagagatcaatatggccaccaccactacccagcctccctctaatatctgttttttccttctgttgttgcttctagcacactttcatttgggcataagccaacttgagctgaattactactctaaaagctgcccaaaagctgaagagatcatcaaggaacaagtcacacaactatataacaagcatggaaacactgccgtttcgtgggtcagaaatctcttccacgatt

SEQ ID NO: 76125 - DNA, 250 bp, Glycine max
  unsure (1)..(250): unsure at all n locations
  Clone ID: 700952294H1
ctgagcgtgagaaagagaaggggaagaaagagagagagtgatgggaaggggaagagtggagttgaagaganttgagaacaagatcaacaggcaagtgacctttggcaaaacgaaggaacgggcttttgaagaaagcttatgagctttccgttctttgtgatgccgaggttgctctcatcatcttctccaatagagganaagcagtacgagttttgcagcggttcaagcatgctcaaaacgctggagaggt

SEQ ID NO: 76126 - DNA, 255 bp, Glycine max
  Clone ID: 700952295H1
caccacgaacccgaacgagcgacacggtccttagttggagtcttgaaccacaacccagagttgaagttgtgagtggcaaggggtgttcgaggctgttttcatcttcacttccttcattcagaggtttgcaaccattggagccaatgtctcctgcttcctcccctttgcaagtgccatcatcaactactccttttgctggtcttgtcatctgcgttactggtttatctaaagaagcaaggaatcaggtcatggagg

SEQ ID NO: 76127 - DNA, 280 bp, Glycine max
  Clone ID: 700952301H1
atcggaagaagaagacagtgaaagaggtggaagcagaacattggacaagaaaaccaacaaaatattcggctttgcggtagcccatgatgacagtgaccacccacccgtgacccatcagttttttcctgttgaggactccgaactgcctgtctccgccgccgccgcaggcagtggaggcggtggcggcggaagctccttcccacgtgctcactgggtaggtgtcaaattttgtcaatcggaaacacccggcgccggaaaagcagtgaaagtgtcggagccg

SEQ ID NO: 76128 - DNA, 277 bp, Glycine max
  Clone ID: 700952303H1
caggaaattaaagaagcagttgagcttcccctgacacatcctgaactgtatgaagacattggtatcaagcctcctaagggagttattttatatggggaaccaggaactgggaagacattgcttgcaaaggctgtggcaaactcaacatcagcaacctttttgcgtgttgttggtagtgaattaatacaaaaatacttgggagatggtccaaagcttgtaagggaacttttccgagttgctgatgatctttccccatctattgtcttcatgatgagat

SEQ ID NO: 76129 - DNA, 278 bp, Glycine max
  Clone ID: 700952318H1
ctgcaacagtagggtacatggcatccccagctagacaaagagaagatgacatgagaaaaccaccttcagggttccctgattgttccatcaagctgcatgcacatgaagttcggttccttgctgcagcaaggaaactagagtttggcaatggtgttcttttctatgatcgtatctcagttggtgcagatttgtctgatgctattggattcaaaggttgtagagaaattgaagggccttatgtggactatctagagacacaatttggtaagcccgttttg

SEQ ID NO: 76130 - DNA, 270 bp, Glycine max
  Clone ID: 700952326H1
agaatcttggttactggaggagctggattcattgggtctcacttagttgacagattgatggaaaatgaaaaaaatgaggtcattgttgctgacaactacttcactggatccaaggataacctcaaaaagtggattggtcatccaagatttgagcttatccgtcatgatgtcacggagcctttattgatcgaggttgatcagatctaccatcttgcatgccctgcctctcctattttctacaaatacaatccagtaaagacaataaagaca

SEQ ID NO: 76131 - DNA, 272 bp, Glycine max
  unsure (1)..(272): unsure at all n locations
  Clone ID: 700952338H1
tttatttctctcttctctctgcatcgcttcaggttcttctgaaaagatgtctcgcgtgtatgttggtaacttggattcacgagtcaccgagagagatctcgaagacgnattccgtgttttcggagttattcggagtgtttgggttgcacgtagaccacctggtnatgcttttattgactttgatgaccgcagagatgcacaggatgctatccgtgaattggatgggttttcctcaactagctagttaagtcttctttttggcctatggggca

SEQ ID NO: 76132 - DNA, 276 bp, Glycine max
  Clone ID: 700952349H1
acacaaagtaatggacaaaaaaccatgcaactcatcatctcatgatcctgaagtgagaaagggaccatggaccatggaagaagacttgatcttgataaactatattgcaaatcacggtgaaggtgtttggaactccttagccaaagcttctggtctcaaacgaacgggaaagagttgtcgactccgttggctaaactaccttcgtcctgatgttagaagaggaaacattacacccgaggaacagcttttgatcatagaacttcatgcaaagtgggg

SEQ ID NO: 76133 - DNA, 274 bp, Glycine max
  Clone ID: 700952351H1
gttactatctataattaattaaattcctcgtggaatattgaagaagccatgtctacagctgggcaggtcatcaagtgcagagctgcggtggcatgggaagcagggaagccactgtcaatagaaaccatagaagtggcaccaccccagaaaggtgaagtgcgtttgaggatcctcttcaactccctttgccgtagtgatgtttattggtgggatgctaaggaccagactcctctgtttcctcgtatcttaggccacgaagcttcagggattgtgg

SEQ ID NO: 76134 - DNA, 273 bp, Glycine max
  Clone ID: 700952353H1
aatttgacaaaaaagtagccactgccccaacgatcccatttcccttgacttctctacgtgaagctccttgttttgcataggagctagttgaaatgtccgagggaaatgcagggaaaggaaagaaaatcgccatcattggtgtctcaaccttattgttggtggctatggttgtggcggtcacaattggggtcaatctcaatgagaatggttccaacaatgatatagaggacaacaagaaagatcatgttgcttcttccataaaagccgtccaaa

SEQ ID NO: 76135 - DNA, 269 bp, Glycine max
  Clone ID: 700952358H1
cttcaagattcaggtactgcgtttcggaagcagacacagatggctcgtacgaagcaaaccgctcgtaagtccacaggaggaaaggctcctaggaagcagcttgcaaccaaggctgcacgtaagtctgcaccaactactggtggtgtgaagaagccccaccgttatcgtcctggtaccgttgctcttcgtgagattaggaaataccagaagagtaccgagcttttgatccggaagctccccttccagaggctggttcgtgaaattgctca

SEQ ID NO: 76136 - DNA, 270 bp, Glycine max
  Clone ID: 700952362H1
aaagatggtatcagagaggccagtggtgatattcagcaagagctcgtgctgcatgagccacaccataaagaccctcttgtgtgactttggggtgaatccagcggttcatgagctggatgagatcccaagaggcagagacattgagcaagctctttcaaggcttggttgttctccatctgttcctgctgtcttcatttctggtgagcttgttggtggagccaatgaagtcatgagccttcaccttaatcgctccttaattccaatgcttaa

SEQ ID NO: 76137 - DNA, 273 bp, Glycine max
  Clone ID: 700952364H1
gtatttacttccacaggcatggaaactgaagaacctcctgcacctgctgagaagaaagaggcgccaaaaagacggggtgctgctaaaaagaagtcaagtgccatagtgttggacgactcagatagtgataatgaaattcatgatgttgaggacgacgatgacaactttgaaatcatgcagccggttgccctagaagcagggaaaaagaaaggagggagaaagcctgctgctcaaaatgccaagaaggcacctgctgctgcttctaccaaaaag

SEQ ID NO: 76138 - DNA, 270 bp, Glycine max
  Clone ID: 700952371H1
ataattgttgcttgtcaaaacaacaaattgaatgagaaagttgatgatcttgttcaggtatatgaaacagtggagaaaatgttattggatcctgaagaagctctaaagatgattaggcagacagaggaatcaacaatggttaccggtgaaccaaggagcccgtttaggacgcttagccttatctttggaggcaaagataaattattgaggaagtctgtctcaaaagatcagacaaacgacgaagagaagtcaggtcggcagtcattctct

SEQ ID NO: 76139 - DNA, 270 bp, Glycine max
  Clone ID: 700952372H1
aacggctttgcctgcaagattttgcacgaattgatggatggtttttgccaaattcaagttccaaattatcaccattttcccaaagtgagtttggaagaacagaatctggtgccataatattcactgacattaacatgataagtggtatggaacagaccagttttctatttcagcaagcttctaaggtcagcttccaagcaggtcaaaatccttacaacgtaacaagtctttttctcgccgtgaaggaactcgaaaagtgtttgtcatttt

SEQ ID NO: 76140 - DNA, 268 bp, Glycine max
  Clone ID: 700952373H1
cttcttgaaacctctcttgagagagggacacctctgcaagaagtcaatgatcttatttttgaagccattggctgtggtgaattggaggatgtcaacgttgaaagtgtcaaagaagttgatgcagtcagcacaagcgaacaccctactgtggtggtagctggttcacaagaatgtgtgattctacactaacaaggctctaaaattatgaacaaattcagcaaatccgtagtgctttaagaataattgctgaattgtgtcaccgtttaag

SEQ ID NO: 76141 - DNA, 267 bp, Glycine max
  Clone ID: 700952378H1
ctcgctttcgattcgacgcctgaacaagtgaacatggaccctaatcacctcttcttcacgcatttccgcgatggtgctattgcctcacgcattgagggccaacacagaggagctcttccttctgttattgtgattggtgctggaatatctggacttgcagcagcacgaagtctctatgatgcatcttttaaggtgactgtactggagtcacgagataggcttggtggtcgcattcatactgacttctcatttggctgtccagttgac

SEQ ID NO: 76142 - DNA, 270 bp, Glycine max
  Clone ID: 700952380H1
gccaagtgaaagagagaagaaaagtcaaagacaatgtcagggatcattcacaagattgaggagacccttcatgtgggaggccacaagaaggaggaggagcacaagggtgagcagcaccatggtggagaatacaaaggggagcatcatggtgaacacagtactgaatacaaaggagagcatcatgttggtgagcacaagccggagcaccatggaggagaagagcacaaagaggggttcctagacaagatcaaggacaagatccacggcgag

SEQ ID NO: 76143 - DNA, 271 bp, Glycine max
  Clone ID: 700952383H1
gggaaaactcgagccaagcagtattacgcaaatgacgtggatagaacgaagaacatgggtgtgttgattcatggagatggaagttttgctggacagggtgtggtctatgaaaccctgcatttaagtgctcttccaaattacactactggtgggacgattcacatcgtgtttaacaatcaggttgcatttacaactgatccgacttctggcaggtcttcacaatattgcactgatgttgccaaggctttggatgctcccatctttcacgtga

SEQ ID NO: 76144 - DNA, 271 bp, Glycine max
  Clone ID: 700952384H1
cttactggaagccttgttgtgagtaagagaaaaggcttcctgcaccgagcacaccaacttgatacctctgattctttctttgcttagaattccacagaatatggagactgttcttttcaatcactccccacctttggaattcaagggtttgagcaaggaggaggaagactcattgctagggcaagtggaaatatggaggtacatgacatgcttcacggactccgtggccttgaaagctgtcatagagcttcgtatagcggacatactagac

SEQ ID NO: 76145 - DNA, 266 bp, Glycine max
  Clone ID: 700952392H1
gcagctgatacatagatagataaggatagggatagggttaaggccatggagcgcatcatcggcgccaagtacaagctaggtcgcaagatcggaagcggatccttcggcgaaatctacctcgccactcatattgataccttcgagatcgtcgccgtcaagattgaaaacggtaaaacgaagcatccgcaattgctttatgaggccaagctctacaatattcttcaaggaggaagtggaatcccgagcataaaatggtgtggtgtaga

SEQ ID NO: 76146 - DNA, 265 bp, Glycine max
  unsure (1)..(265): unsure at all n locations
  Clone ID: 700952403H1
ctcaccagtcaccacctctgaactctctctctcatctataagtcaacatggctcatcatgaagattcaagtgcatggaattcgagtaaacctcaccctaagctcaatgaaagaattctgtcttctctgtcacggagaactgttgctgctcacccctggcacganttagngattgggccaggagctccagcagttttcaactgtgtggttgaaattggcaaaggaagtaaggttaagtatgagctggacaagacaagtggacttat

SEQ ID NO: 76147 - DNA, 262 bp, Glycine max
  Clone ID: 700952406H1
cagaaacaaacgaaacccagtagacatggcgaaatcggcgtcgaattctctgatgcagagcctgaagcggttcataaagaagccatgggagatcacgggcccgtgcgcggaccctgagtacaaatccgcattgcccttggccgtggagtaccgcctcagctgccccgccaccgtcaaggagaagcccatcatccccaactccctcccggagaccgtctacgacatcaagtacttcacccgcgaccagcgccgcaaccgccct

SEQ ID NO: 76148 - DNA, 260 bp, Glycine max
  Clone ID: 700952408H1
gaagagttaaaaatttgaattggagatagaagagctatagtcacaaaggattggaatacatcttgggttggcaatttgtacttatcagttgtaatgtcctcccctgaataaccgacataaggttatggttcttgctcaaagcgcattccttcatttttgcccagttatgtttatcagaatttttgttgtaattttatcatatcatgtgaaatgatgcttacaagagaatctgttcaaagaaatatgatgttaatgttatc

SEQ ID NO: 76149 - DNA, 261 bp, Glycine max
  Clone ID: 700952450H1
cagcactagtgttctctctgttatctcatctctctaacccacactacaccaccgcgccgtcgtttgagtgtttgacggtgacatccctgttaaatttctctcgcggactcgccgtcactgtctcacggaggctactggagctgtttggaacagcgtccaatggcgtccctttctcaatctcaccgtatcgcactccctttctaaacgcacgcggcgagtgatgatggcgagactcgctccccctttcagtatcttcacaca

SEQ ID NO: 76150 - DNA, 255 bp, Glycine max
  Clone ID: 700952459H1
agcatacaacgatggctatgaatggatcacctcgacggtgggacgtgagattagttttgacattttctctacttttaatctcagcctctgtttctgctcttgaacatgtaaaccacaaaaagattgatcccaccaccgctgaaactagttttcttggcaaagtcatgaactttttgtggagctcatctgggtctggatacgaacatacttggccagaaatagaatttgggtggagaataataacgggtacgataa

SEQ ID NO: 76151 - DNA, 236 bp, Glycine max
  unsure (1)..(236): unsure at all n locations
  Clone ID: 700952476H1
gtccttgctgtantcatgaggaaantgaggaaaggggcatanncggttcaagaagatcagacactcattgcttacattcagaaacatggcacaggaagctggcgtaccttgnccacaaaaagcaggtcttcaaagatgtggnaganttncnnggctgagatggtttaactaccttagacctgacattaagagaggaaaattaagccaagaagaagagcagacaattataaaacttc

SEQ ID NO: 76152 - DNA, 256 bp, Glycine max
  Clone ID: 700952479H1
ctctaaaccctaaacaactctttctcttcttccttcgctcgttgttctccctcgcgtagatcgacaatggcggagacagagacgtttgctttccaggctgagatcaaccagctcctcagtctcatcatcaacaccttctactccaacaaggagattttccttcgtgaactcatcagcaacgcctccgatgctttggacaagattcgatttgagagtttgacagataagagcaagctcgatgctcagccagagttgt

SEQ ID NO: 76153 - DNA, 254 bp, Glycine max
  Clone ID: 700952488H1
gccaagtgaaagagagaagaaaagtcaaagacaatgtcagggatcattcacaagattgaggagacccttcatgtgggaggccacaagaaggaggaggagcacaagggtgagcagcaccatggtggagaatacaaaggggagcatcatggtgaacacagtactgaatacaaaggagagcatcatgttggtgagcacaagccggagcaccatggaggagaagagcacaaagaggggttcctagacaagatcaagga

SEQ ID NO: 76154 - DNA, 125 bp, Glycine max
  Clone ID: 700952492H1
gtgagctcaaaagaattttatggtgagggatatgatgatagtgacaagagaatccctgacatgaccataataaacaggcagcttggatggaatcccaagacttcactttgggacctgcttgagtc

SEQ ID NO: 76155 - DNA, 254 bp, Glycine max
  Clone ID: 700952496H1
cttcttatagcttcatcccaaaaagctcttttccttctaaatttgattccttagttcagcattctattattatatatggcttcttcaccttcctcagaaaacaaaaacctagagggagtagctggtggtgccggagagaaacccattccacttggtgagaacgttctgcagaagcatgctgcattctttgacttgaataaagatggtgtcatctacccatgggagacttttaaagggttgcgtgaaatcgggac

SEQ ID NO: 76156 - DNA, 265 bp, Glycine max
  Clone ID: 700952502H1
ctctgacttaccgtgaagtcatcgctattctgatgcagagacatgttcttgttgatggaaaagtcaggactgacaagacttaccctgctggtttcatggatgttgtttcaatcccaaaaaccaatgagaacttccgcctgctctatgacactaaaggccgattccgtctccattctgtcagggatgatgaggcaaagttcaagctctgcaaggttaggtcagtgcagtttggccagaaaggtatcccatacctgaacacctatga

SEQ ID NO: 76157 - DNA, 259 bp, Glycine max
  Clone ID: 700952504H1
ggtgggactatgttcaggtgaataataagttgttcaaagacatgaaccgttttcttgcgtactataaagggctaacaacttgggctaagtgggttcagagaaacgtcaatccagcaaaaaccaaggtcttcttcttaggaatttctcctgtgcattaccaggggaaagattggaatcgaccaacaaagtcatgtatgggcgagacacaaccattctttggactgaagtaccctgcagggacaccaatggcttggagggt

SEQ ID NO: 76158 - DNA, 256 bp, Glycine max
  Clone ID: 700952507H1
gttcgtagaattgggtaacattttagaccctgataggcccaaaaatgacaaagcaaccattctgtgtgatacaattcaattgctgaaggacctaatttctcaagttagtaaactcaaagatgaatatgctatgctaaatgaagaatctcgtgagttgactctagagaaaactgatctcagggaagagaaggcttctcttaaatcagatattgacaacttgaataatcagtatcagcagcagctcaggaccatgttt

SEQ ID NO: 76159 - DNA, 255 bp, Glycine max
  Clone ID: 700952508H1
gggccgattaccatggcaaggttaccagggtgatagcaaatccttccttgtttgcaaaaagaagatggggacatctcctgagacgctatgctgcttgtgtcctcctccttttaggcattttcttgagattgtagtgaatatgaaatttgatgaagaacctaattattccaagctaatatctttgtttgatggtacgattggacccaatccagcattgcggccaattaatactgaaggtgcccaaaaggttgggca

SEQ ID NO: 76160 - DNA, 254 bp, Glycine max
  Clone ID: 700952511H1
aaaaggaagaaaaacaaaatcaaagaacacaaacaaagaagagagcaaaatgaagagtgcgatttgtgggagaatcctctctcccaaccacgtcttcaaaccaggggacacacattcaatttgtaaaggaccatactccaatctttgtgtacccatggttgtattggcaacagggcctggtataggaggtggggtgctggaaaagccagttattgaaaaagtcacccctggccgtgagtctgaatttgatttaa

SEQ ID NO: 76161 - DNA, 251 bp, Glycine max
  Clone ID: 700952525H1
ggaaaaatggagttgttcttctacgcggtgttcggcggtttgggagcggttgttgcagtgacggagctgagcaagagcaacaaggaccgaatcaacacctcttccgcattcaattccttcaagaacaactacctcatcgtctattccctcatgatggctggagattggctacaaggtccatatgtctactacctttacagtacatatggatatgggaagggagacataggacaactcttcattgctggttt

SEQ ID NO: 76162 - DNA, 261 bp, Glycine max
  Clone ID: 700952550H1
ggagaagaaaagcataacaagcagagcacattgtttagtgctagcatttccaggtcaaggccatatcaatcccatgcttcaattctccaagctattggagcgtcaaggggtgagaataacacttgttactactcgtttctattccaagaatttgcaaaacgtgcctccttccattgctcttgaaaccatttctgatgggtttgatgaagttgggccccaagaggctgggagccccaaggcctatatagatcgcttgtgcca

SEQ ID NO: 76163 - DNA, 256 bp, Glycine max
  Clone ID: 700952552H1
atcggccagcaccaacagcatcggcggcgacagtcactctccgacaacaacacttccgcggcgaaaaatgtctctggtggcgaacgaggatttccagcacattctgcgtgtgctgaacaccaacgtggatgggaagcagaagataatgttcgctatgacctccatcaagggtattggaaggagattcgccaacatcgcttgcaagaaggccgatgttgacatgaacaaaagggctggtgagttgagtgctgcagag

SEQ ID NO: 76164 - DNA, 255 bp, Glycine max
  Clone ID: 700952554H1
cacgttccgagttttctgatcgctcatagagagttcgacgcggcggttgcagaagaagattgcaagatgaagttcaacatcgcgagtcccaccactggatgccagaagaagctcgagatcgacgacgatcagaaactacgagcattttgggacaagaggatctcacaggaggtcagcggagatgcacttggtgaggaatttaagggctatgtcttcaaaattactggaggttgtgacaaacaaggattcccgatg

SEQ ID NO: 76165 - DNA, 253 bp, Glycine max
  Clone ID: 700952562H1
ttctaaacaatagtatcttttcgcttcaaatttcatttagatccaaaatttctgaatcagtgaagaatcttagattctgtgggaaaagcttctcaatctttgacgaagataaacaacaatgtcttcacttgcggctgctagagcagacaacttttactatcccccagaatgggaaccgaatcagggttcgctgaacaagtttcatggtcaacatgccttgcgagagagggcgagaaaattagatcagggtatc

SEQ ID NO: 76166 - DNA, 255 bp, Glycine max
  Clone ID: 700952563H1
cacaaaacatctcatcattcacccaacaaaatggcgctgcttctgataattcccatctcactggtcaccctctggctcggttacaccctataccagcgattaagattcaagctccctccgggtccacggccctggccggtagtcggtaacctctacgacataaaacccgtccgcttccggtgcttcgcggagtgggcgcagtcttacggccccataatatcggtttggttcggttcgaccctaaacgtcatcgtt

SEQ ID NO: 76167 - DNA, 256 bp, Glycine max
  Clone ID: 700952568H1
gtggtggaggaggaatacacgaagcataggcaatgaaatgaggcgttttgactgaccttcttggatctgatcgaatccaaacccaaaccctaatctaatcccaaaaagcttattagtctctctcgatcaatcgaaccagcgagcaagattgtctctctcctaggccatgcgaccaccctgttcctccgccatcgccctctccagagaggtttcctttttcgttttcgccgatttctccatcgattccgccagccat

SEQ ID NO: 76168 - DNA, 253 bp, Glycine max
  Clone ID: 700952569H1
ataacggccattattcttcttccgaccatccccaagaatgcttttctcacccttcctcactctcactttcttcctcctcttctcttcttccgttgctgcgatttactcagcggcaacatgttctaacatagtgccgctgagataccgcagcgacagaatctccataacggacttcggtggtgtcggcgacggccgcacgctgaacacgaaagcgttcagagcggccgtgtaccgcattcagcacctgagaagg

SEQ ID NO: 76169 - DNA, 253 bp, Glycine max
  Clone ID: 700952570H1
acaagataagaaaaaagaaaaaatgtttgcagggaaaggggctgtttggttctccagagcggtggcgttggcagcaatcgcggtggtagcttgcgttgggcttacacaggcccaacccgaggccaggttcaagtgcaacagcgcgaacatccccacgtgtcgcgcgctcataagctactctcacccgaacaccaccaccctcggcgacatccaaaagctcttcaacgtgaaacacatcctcgacatcgtggga

SEQ ID NO: 76170 - DNA, 254 bp, Glycine max
  Clone ID: 700952571H1
ccttggctttggaagaaactcagcagttagttgaagcacagattcaaccagaagatttggctgctcctgtgtccacagggggtacttcaaatcatgttgaaaacgggaaagtagaggtagaggcacgcgtggaggataaaattgtgaaaccagaagcggattcagagtgcattccactacaagatgtcctaaatagtataaatactcttcactcagtccccgtaatggacgatgctcaagttttaaataacgca

SEQ ID NO: 76171 - DNA, 254 bp, Glycine max
  Clone ID: 700952579H1
gaacataccaatctacaataaacgatgattctcattatctccctcattttttctcttctctctttctcccatgcttctgtcctagatttctgtgttgcagattatgcaggtcctattggacctgcaggatattcctgcaagaagccttcaaaggtcacagcagatgattttgcttacagtggccttggcattgctggtaacacctcaaacattatcaaagctgcagtgacccctgcatttgatgctcagtttgc

SEQ ID NO: 76172 - DNA, 253 bp, Glycine max
  Clone ID: 700952587H1
atggccactcttcttcttcccacgctcctccttctcatacccttcgccaccctcgtctccgcccgccctcacctcgccggagactttctccgactgccctccgaaaccgataacgatgacaacgtccagggcacccgctgggccgtcctcctcgccggttccaatggctactggaattacagacatcaggctgatgtttgtcacgcctatcaaatactaaggaaaggtggcctgaaagaagaaaatattattg

SEQ ID NO: 76173 - DNA, 258 bp, Glycine max
  unsure (1)..(258): unsure at all n locations
  Clone ID: 700952613H1
acattctaaancaaaggacccagttttacatttntntttgttcctgagttccaatggctcttcaggctgcttccntggtttctgcttctttttctattgctaaagagggaaagtctggtgtatctctcagggacaccanaatgtttggtgtttcattgtcggatactctcaaatctgacttcagctctccctcatcgacttgnaaaagggnattccancaaaaatttggccctttgagggttcagtcagtggcaaaac

SEQ ID NO: 76174 - DNA, 262 bp, Glycine max
  unsure (1)..(262): unsure at all n locations
  Clone ID: 700952665H1
cccgttttctctctctgtttntccanggccatctgatcaaactnttcttgattctctctctcagtttttgctattctgagtgatgggtatgccctgccgctgttcccacacctcccacatcactgaaatcatcatcaccagcntcttccgccacaagtcttaaattacaacaattnccctcanttatncatcaaccaaccaccttaanagccttttcnaatggttccttaaagatccaacttggtcggagtnaacatggcgg

SEQ ID NO: 76175 - DNA, 249 bp, Glycine max
  Clone ID: 700952677H1
ctttctctctgtctctctctcgctcttcttctcatccagcaccgagtcacagactcaccgatcttccgattccctttcgtcttggtttatgagctcgaaggagagacccactcttggtggcacgcggattaagacccgcaaacggaatattgctgcgccgctggaccctgcagcattctcggatgcagtggtccagatttatttggataatgctggtgatctggaacttattgctaagagcattgaatc

SEQ ID NO: 76176 - DNA, 278 bp, Glycine max
  Clone ID: 700952702H1
ttgaagacagcttcagaatcagatctggtgtggtgtggtggctgttactgttagcacttagcagcgatggccaaagcgtcgatattcatttacatactcgtcgcagcggcgcttctcttattcctctctcattccccggataagcactccggccaccgccaccgccgcctcaagctccgctccaacttcaccctcgccccctcgcgccaccacgccgtcgccttcgaccctctcgtcgctgagctcgagcgccaccgcgaggacaaggagtgggagaa

SEQ ID NO: 76177 - DNA, 278 bp, Glycine max
  Clone ID: 700952705H1
ctccgctctcaaatccgccgtcgccggattgaacgaaatcagtgagaatgagaagaacggattcatccagcctcgtcggccgctatctcagtggcgaacgcagcatgtggaatggagcaagatccagacgcctacggacgaagtggttgtgccttacgacactttggcgccaactcctgaaggttcttcggaggtgaagaatctattggacaagcttgtggtgttgaagctaaatggaggcttgggaacaactatgggttgcactggtcctaaatctg

SEQ ID NO: 76178 - DNA, 272 bp, Glycine max
  Clone ID: 700952735H1
ggtttttagatggatgcaaaaacaacgatggtatattgctgataatgggatttactcaaaactcatatcagttatggggaaaaaagggcaaaccagaatggctatgtggcttttctcagagatgcgtaatactggttgtcgtcctgatacttctgtctacaatgcgctaattacagctcaccttcattcgcgggacaaaacaaaggctttggctaaagccattggctactttcagaagatgaaaggaatggagcggtgtaagcccaacattg

SEQ ID NO: 76179 - DNA, 273 bp, Glycine max
  Clone ID: 700952736H1
tcaagatcgaattgttggtgcccatttcttcagtcctgcacatgttatgccgcttctggaaattgtacgtaccaagcagacctctgcccaagtgatagttgacgtgttagatatttcaaagaagataaagaaaactccagtggtggttggaaactgcacaggatttgctgttaataggatgttcttcccatatacccaagcaggtctcttgcttgttgaacgtggtgcagatgtttatcaaattgatagagtaataaccaaatttggaatgcc

SEQ ID NO: 76180 - DNA, 274 bp, Glycine max
  unsure (1)..(274): unsure at all n locations
  Clone ID: 700952739H1
actaaactaaactagcgaagagaaatgtccgaaaacggagaagaganattactcgcngtggcgcggcacatagcgaaaacgctgggccacaacaacaccatgtctgatgacatattccaaatactatcgaacttcgacggaagattctcgagagagaatctttctgagaaaggcgcagatgcggatcccagaggctgcgccgcactggatcattccctcaaaaccctagaccgccggatctctctctacgtctcctacgaccgccctatctggt

SEQ ID NO: 76181 - DNA, 272 bp, Glycine max
  Clone ID: 700952742H1
ggggcctgtaagcaaagttgattataaagcggctgaggaaacaatagcaacgctagaggctctgaaaattgcccttgctcagattagaatctgttccagactggaagccttattgctgaagaaaaaaaatttaagcaatggagactctcccgaaattcatgctcaaaaggttgataagctgaaggtattaacggagtctcttgccaactctgctacaaaagctgaaaagcgtattttagataacagactacaaaaagaggaagcattaaagg

SEQ ID NO: 76182 - DNA, 270 bp, Glycine max
  Clone ID: 700952745H1
cccatttctggacaaagacacatctttgaatttcattggattcaattcatttgggtatcaatcaagattgaattgttgttgtcgtcgtcttggggatgggatcgtgcctgtagatgacgggggcacgggtgtgacgttgctgaagcagggacaggaccttgttattgtgaatgtagatgactccagagctgtattagctgcccaagatcgtagcaatggttctcttattgctgtccagttgagcactgaccacaagccacatcttccaag

SEQ ID NO: 76183 - DNA, 269 bp, Glycine max
  Clone ID: 700952758H1
tctttaccaactgctactcttgacggacccataccacctgtaggagccttgagtagcgctctcagtagattacaatcaaataggcctcttagagaattgagagaggttgccaagggagttactaaacgaattggaggtcctatgcatgaattggctgcaaaagttgacgagtatgctcgtggcatgatcagtggttctggatcatcactttttgaagagcttggactctactatattggtcctgttgatggtcataacataaatgatct

SEQ ID NO: 76184 - DNA, 268 bp, Glycine max
  Clone ID: 700952761H1
ctttctctctctcattctcttctccatcgcgcgtaagaaacacattttagttgctactaatgggaactgttgaagctgcaaacaaggatgcaaatggaagtctcctagagaaaaatccttcagttgtttttgtgttaggtggcccaggaagtggaaagggtacccaatgtgcaaatattgtccaaaattttgggtatactcatctcagcgctggtgatcttctgcgagcagaaatcaaatctggttctgaaaatggtacaatgattca

SEQ ID NO: 76185 - DNA, 267 bp, Glycine max
  Clone ID: 700952781H1
cagctacactcaacaccgtgtttagatggaagcctaagttttgcggcaactttggaaaatacttcaaaagtgcgttcaagtctcacaaaacggtgcattggaacacgtgtcaatggattaaaacggtaaaacgaacacacccttgttacttggacgtggaaattcacgttcgcgctcctttttatcttggcattgcgtttgtgtgtgtgtgcaatatcacacaacccaaccttattcgttcttctgttgttctgaggcgagccatga

SEQ ID NO: 76186 - DNA, 267 bp, Glycine max
  Clone ID: 700952783H1
tccatttgccgcctctggaactccgaacgttgaacatggacgctgccaaagaagaatttctcagagactttggtgaacactacggctaccctaacggccccaagtccgttgatcaaattcgagctactgaattcaagagattacaattacaagatcttgtatacttggatcatgctggggcaactctatactctgacctgcaaatggaatctgttttcaatgatctcactactaacctatacgcaaatcctcacagccaaagtgact

SEQ ID NO: 76187 - DNA, 266 bp, Glycine max
  Clone ID: 700952789H1
ccaagatgtaaacaacctggatcaagttcgtgctttggagaatgagatgctccatcgcattaagcaacaaggattggacattgttcctcgtattctcattatcacccgtcttctccccgatgcagtaggaactacttgtggccaacgtcttgagaaggtgttcggaactgagcactcccacattcttcgagttccctttagaactgagaagggaattgttcgcaagtggatctcaagattcgaagtctggccctacttggaaactt

SEQ ID NO: 76188 - DNA, 258 bp, Glycine max
  Clone ID: 700952801H1
gggagaagggaaggtgagtagtaatggtcatggatgttgcaaatcagggccaggctatgcttccccactggaagccatttctggtcccagagagtctctcatttatgtaacctctgtctacacagggaccggaatagagaagccagactatttggcgacagtggatgtggatccaaactctccaacttattccaaagtcatccataggcttcctgttccttatttaggtgacgaattgcatcacacaggctggaattc

SEQ ID NO: 76189 - DNA, 256 bp, Glycine max
  Clone ID: 700952805H1
ggcaattgggtacaccatagcagcttccataagcatgatggcagtcaaaaggtctaattgttatcatagtagcggagggaaaaatccatgcaaaatgaatagcaattggtacatgatttcatatggtgttgcggaaattatcttctcccaaattccagatttccatgagttgtggtggctctctattgtagctgctgtcatgtccttcacatactcattcattggacttggccttggtattggtaaagttatagga

SEQ ID NO: 76190 - DNA, 256 bp, Glycine max
  Clone ID: 700952806H1
gcgtcgctgctccgtaccagtttcactgcataaatttgagagaaaactctgcaaacatgttggtttatcaggacctccttacaggtgatgagcttctctcggactccttccgttacaatgaaattgagaatggaatgctgtgggaagttgaggggaagtgggttgttaagggagcagttgatgttgacattggtgcaaacccttctgctgagggtggagaagatgagggagtcgatgacgcagctgttaaggttgt

SEQ ID NO: 76191 - DNA, 255 bp, Glycine max
  Clone ID: 700952808H1
gtttattcgttgggtccgctgggcttcttgggcttggtggtgggcctttgtcattaacttcacaaatcaaagcgacgtcgttttcgtactgtttagtggatcgcgactcgggaaaatcgtccacgctcgagttcaactcacctcgacccggtgactcggtcgttgcaccgttgttgaagaatcagaaggtgaacactttctactacgtggagctcaccggagttagcgtcggcggggaaatcgtgaccgttccgc

SEQ ID NO: 76192 - DNA, 255 bp, Glycine max
  Clone ID: 700952809H1
ccagacagcagcagcaacaacaaacaaactctttctggattcagtttttgatgtgaaaatggcagtgactcttacatcaacactctttctggctttgctatttgctgcttcagcttttgctgctcttcagcctagagtacctgaagcttacctccaaaatgggaactttgaggagcagccaaaccctaaatacctgaagaaaacaaagctctttggtaaatacgctttgcctaaatgggagatcaatggtctggt

SEQ ID NO: 76193 - DNA, 251 bp, Glycine max
  Clone ID: 700952812H1
ctctgttctgctcttgtcctgcttttccatccatttatgtgaaaaaggaaaaattgcctgaggtggttcaatcactatggaatcctgcaattgtattgacccacaagtgccagctgatgacttattgatgaaataccaatatatctctgatttcttcattgcccttgcttatttctcaatccctttggagcttatctactttgttaagaaatcagcagtatttccatatagatgggtccttgttcagtttg

SEQ ID NO: 76194 - DNA, 250 bp, Glycine max
  Clone ID: 700952813H1
catatccccccctagctacagagcagccaaaggggaggaataataataagcctatattctaaggccggaaaaataaaaaaggaataacaaaaatgtctggaaaggtaattatctcggctgtttctctcatcctggtggttggagtggccataggtgtggtggtggccgtcaacaagaagggcgaggatcccacacttcaatctcaacaaaaatcagtaggggttatctgccaaaacactgatgaccagaa

SEQ ID NO: 76195 - DNA, 251 bp, Glycine max
  Clone ID: 700952815H1
catcatcttcatccttgtctttccaatcattatttcttgctcctgggcctcgtcgttgggcctgagtagcaatgcgacgaccatctacgaggtcctgagcgagcacgggctgcccatgggcctgttcccgcagggcgtgcgggagttcgcggtgggcgaggatggtagcttctgggtgcgcctcgacgaggcctgcaacgccaagttcgagaacgagctgcattacgagcgcaacgtctccggccacctca

SEQ ID NO: 76196 - DNA, 254 bp, Glycine max
  Clone ID: 700952823H1
gaaaatccaaagaaagaaaggaaacggaataattcgatacccctctcgtctcgtaactaaccatggcagcgttccgatggaagagcttcgaggagaatgaggatcgcccagccaagcctcgtcattttggcgtcaccgagattcaaagcccccactgcactctcttctcccacaaccttcttcaggatatttttgaatctatgggagactatgtagatgggttaaagttttctggaggttctcacagcatgatg

SEQ ID NO: 76197 - DNA, 248 bp, Glycine max
  Clone ID: 700952827H1
ctaaacaactctttctcttcttccttcgctcgttgttctccctcgcgtagatcgacaatggcggagacagagacgtttgctttccaggctgagatcaaccagctcctcagtctcatcatcaacaccttctactccaacaaggagattttccttcgtgaactcatcagcaacgcctccgatgctttggacaagattcgatttgagagtttgacagataagagcaagctcgatgctcagccagagttgtt

SEQ ID NO: 76198 - DNA, 247 bp, Glycine max
  Clone ID: 700952828H1
aaaaacttcaaagtgggtgataaagttggagttggtgtgatagtggagtcttgcaaggaatgtgaaagttgccaacaagatctggagagttactgtccccgccctgtttttacctataactctccttattatgatgggacacgaaccaaaggtggttattctaacatcatggttgtgcaccagcgttatgtgctccgatttcctgagaacttgcctcttgatgctggtgctcctctgctgtgtgctg

SEQ ID NO: 76199 - DNA, 248 bp, Glycine max
  Clone ID: 700952837H1
gtatatcctagttgttctgatgcaagggtaatgtgggatcagaagacaggccgttccaggggatttgggtttgtttcttttcggaatcagcaggatgctcaaagtgctataaatgatttgactggaaaatggcttggaagtagacagattcgttgtaattgggcaaccaaaggggccagtgccagtgatgaaaagcagacttcagattcgagaagtgtcgtggagttgaccaatggatcatctgaaga

SEQ ID NO: 76200 - DNA, 248 bp, Glycine max
  unsure (1)..(248): unsure at all n locations
  Clone ID: 700952838H1
gttcatggaagggaaaccagatctagttattggaaattacactgatggaaatttggtagcatcactaatggctagaaaacttgggataactcagggaactatagcacatgctttagagaagaccaagtatgaagactcagatgtcaagtggaaagagttggaccccaagtaccacttctcgtgtcaattcatggcggatacagtggcaatgaatgcatctgatttcatcataaccagcacataccngg

SEQ ID NO: 76201 - DNA, 250 bp, Glycine max
  Clone ID: 700952840H1
gaacgatcctcgtcttctaaaggaagatactcttaataatgaactgagttcatcaagaagagatatgcaattatctgtaagggatgcacttaactcaaagaaagacgagcctcagaaagattcagatgctggtagcatggcatgtcttaatttcagtgatgacgatgaagcagattttgatgcaagaatgcgcatgcaaatactcaaaaagaggaaggagttgggtgatctccctcccaagccaaagttg

SEQ ID NO: 76202 - DNA, 243 bp, Glycine max
  Clone ID: 700952845H1
gcattttggaagttaagccagtggacattactcacacagaccaaataaaggaagaccaacatggcacattggtctcagcaaacagcattggtgtttaccatgaccatttctacatattccatcttgattttgacattgatggtgtggaaaattcctttgtgaagaccagtctcaagactctacaagtcacagacaacagttccaagagaaagagctattggacaactagtaatgaagttgtta

SEQ ID NO: 76203 - DNA, 243 bp, Glycine max
  Clone ID: 700952847H1
gtctcatctgcagtccgagtggagactggagttaaagaaggagacaaagttagcatgcactatgatcctatgattgctaagcttgtggtgtggggagaaaatcgtgctgctgccttggtcaaactcaaggatagtctgtcaaagtttcaggttgcaggtctgccaaccaatgtcaactttcttcaaaagcttgctaatcacagggcatttgcaaatggcaatgtggagactcattttattgat

SEQ ID NO: 76204 - DNA, 247 bp, Glycine max
  Clone ID: 700952849H1
ggaagacaagataaagatggttgtacaccgttgcactgggctgcattaaggggaaatgcagaggcatgtgctgtgcttgtacatgcaggcacaaaagaagaactgatgatgaaggacaatgctgggaacacacctgtacagcttgcatatgataaaggtcatcggcatgtcgctcctttcctttcaaatcaacaacgggctcatagcaactactggaaagggaaactgtgtagtgggatagtgacag

SEQ ID NO: 76205 - DNA, 240 bp, Glycine max
  Clone ID: 700952858H1
gtatttatggaatggatttctttgttgttctggagcgacctggctatcgtgttggacgtcgccgaagatgcaagtcccgtgttggaattcagcaccgagtcacaaaggaggatgctatgaagtggttccaggtgaagtacgagggagtgatccttaacaagtcccaggctattctttagttagattgagttcactttaggagtgtgttatcagttttgtcaactatagctcgatctttct

SEQ ID NO: 76206 - DNA, 140 bp, Glycine max
  Clone ID: 700952862H1
accaacaatgcatgcagttggcattctgctaaaaaaacattgtaatcttttttactacttccttaaatatttgcttgctacaagcattcaaacactcgtcaatcctcaactgcttaaagtaaagttcttatttaatattg

SEQ ID NO: 76207 - DNA, 234 bp, Glycine max
  Clone ID: 700952876H1
cggcaaacctggccgccgacgccttttgaacaacaacgttcttggccacgactactttgaccttcccgaatgggttgatgatcaagttggtgttcgcaaactcctacatatgactggacggaaacgcatggcccatgtggttgttgcaaaggatggcagtggaaatttcaccaccatcaatgaagcattgaagcacgtgcccaagaaaaacctaaggccatttgttatctacgt

SEQ ID NO: 76208 - DNA, 238 bp, Glycine max
  Clone ID: 700952882H1
ttgttattgagggaacgggagtgtttgtggatggccctggggctggcaaacacatccaagcaggtgctaagaaggttatcatcactgctccagcaaagggtgctgatattccaacttatgttgtcggagtaaatgaaggggactacactcatgagatctctaacattataagcaacgcttcctgcaccacaaactgtcttgctccctttgtgaagatcctggatgcagagtttggaat

SEQ ID NO: 76209 - DNA, 237 bp, Glycine max
  Clone ID: 700952886H1
caaaatcactctattttttagcaccaacttcaattattacaacaaagtataattaattaggcagagaaatatggtggtgaaggtgtatggtccagcaagtgcagcctgtcctcaaagggtgttggtttgcctcttagagaaaggagtagagtttgaacttgtgcatgttgatcttgatctaggagagcataagaaacctgaatttcttctcagacagccctttggtcaagttccagc

SEQ ID NO: 76210 - DNA, 203 bp, Glycine max
  Clone ID: 700952891H1
ggacgtgttccttccatttgttaaaagacattaatgtataatctttcttttcattcccgctgttgacgtattgaggataagtctcgtgctgtccacataacaataggaggattttgagtttgtttgtatgaaacttctcctgtgagtgctggaaaatatctgtagctgtgttcttcagtgtattcccacttatttatcttttc

SEQ ID NO: 76211 - DNA, 231 bp, Glycine max
  Clone ID: 700952892H1
gtaacccttattttatctattctctctctttcttttgtgttctaagcagctagaagcaatggagaggaaaagaagccatgcctctttcaccatgtttgcaatgcttgttggagtgatctctcagagccttgtcattcctgtagtatccaccactgttgaagatcagaagaactactacaccccagatccacatgctggaagtcccccctcaggtttctccgattctctgtg

SEQ ID NO: 76212 - DNA, 52 bp, Glycine max
  unsure (1)..(52): unsure at all n locations
  Clone ID: 700952903H1
gcttncattccacacgcttttgntatccacttcgttntantttatnnagcga

SEQ ID NO: 76213 - DNA, 62 bp, Glycine max
  unsure (1)..(62): unsure at all n locations
  Clone ID: 700952908H1
atcaggctgttaatggngaatgcgaangttgactgagcattncncatananctctatnatgc

SEQ ID NO: 76214 - DNA, 95 bp, Glycine max
  unsure (1)..(95): unsure at all n locations
  Clone ID: 700952948H1
ggtttgacccacngtttgangacggananngtccgtcgacgtgtatnanaactnngcgagtctctggcgacgcgcnngcatctccaactgggctg

SEQ ID NO: 76215 - DNA, 104 bp, Glycine max
  Clone ID: 700952967H1
cagaactgcagttatcttgttagtttgggttttcatgattggatgctagtgtgtaagttgtattgtcattttacagtttgtacccgcctgtgttctgccactga

SEQ ID NO: 76216 - DNA, 256 bp, Glycine max
  unsure (1)..(256): unsure at all n locations
  Clone ID: 700952976H1
gaattaattgatgaatganattcaaatactaattgttgctatcacaattcacaagagattggattttggaatggaaagggtgttgtcagtagatgagatatcggagcaatactgggtggctgnnnnnnnnnnnnnnnnnnnnnnnnnnnnnnnnntcaagtcaaagatgaaccggagcgantccgaatgggcctttcagcagttcctacagcaggaagctgcttcttcttcatctaattctgatcatgntgatgat

SEQ ID NO: 76217 - DNA, 256 bp, Glycine max
  Clone ID: 700953008H1
gtccaataccatggcacaaatggtcaaggcagtgcgcatgatccttgggctagaatcctttggccctacaccaaagaagccattaaatgaatgcttggatattgaaattgaggacgatgaaccaaaacgaaaaccatctttggaagagattgatgccttggaggtacacaccctttacatttatttaattagtattttgatttctcctcttcaagttttattttctgctgtggaattaaaacatatgttgtctact

SEQ ID NO: 76218 - DNA, 257 bp, Glycine max
  Clone ID: 700953011H1
gtggcactaacgtctgccaaagaagtgtcaccgctgaagggatatttcacaatatttttaggcacaaggttactcacatggggggtgcaccgacagttttaaacatgataatcaattcaccacccaaagtccggaagccgcttccgggaaaggtcgaagtgatgacaggtggtgcaccaccgcctccggatgtgattatcaggatggaagaactaggatttaatgtgactcattcatatggtttgacagaaacctat

SEQ ID NO: 76219 - DNA, 130 bp, Glycine max
  Clone ID: 700953015H1
gaccaacttactcatgtttacacatttatcctccgtccggatgcaacctacagcatcctgattgataatgtggagaagcaaactggtagtctctactctgattgggatcttctccctccaaagacaatca

SEQ ID NO: 76220 - DNA, 255 bp, Glycine max
  Clone ID: 700953017H1
cgccgtgataacacactaacaccaccacttcatcaactttacttgacaacaatattgtaaaactacaaaatctagtttcatactttttttcttcttcttgaaatggctctccaggctgcttctcttgttcctgcttctttctcggttcttaaagagggaaagagtggtgtgtctctcaaggactccaccttgttcggtctttcattttcagaacctatcaaagctaacttcagctcttctgcatgaggtgcaaga

SEQ ID NO: 76221 - DNA, 253 bp, Glycine max
  Clone ID: 700953019H1
gaggcaaaggtgcaaaagaaggaaagtagttcagatgattcttcttcagaatctgaagatgagaaacctgcacccaaatctgctgttctttcaaaaaagatacctgctaagaatggtgctgcccctccaaagaaaggcaagctcgcctccagttcttctgaagatgactcctctgatgaggatggtgtgcgtgcaaagaagccacagaaaatggttgctgagaaacaaaagaatggagcaacgtgcaaaagaa

SEQ ID NO: 76222 - DNA, 250 bp, Glycine max
  Clone ID: 700953042H1
cggccaccctttcttttcttttttcttttttctctttcctcattctacttaaaactcccaccagtgatggcaggtttggctccagagggaacacaattcgatggtcgccaatatgatgctaagatgagtgaattgctttccactgatgggcaagaattcttcacctcttatgatgaagtgtatgacagctttgatgcaatgggattgcaagagaatcttctgcgaggcatatatgcttaggttttgagag

SEQ ID NO: 76223 - DNA, 114 bp, Glycine max
  Clone ID: 700953047H1
tccatttccatttcctctctctcagtttccaagaatcttaagctatgggaaagtcttacccaaccgtgagcgctgattaccagaaggccgttgagaaggcgaagaagaagctca

SEQ ID NO: 76224 - DNA, 245 bp, Glycine max
  Clone ID: 700953068H1
caacttctgctacttcctactccaaccgcacttctgctccgcaattatcatgggcaaggtcaagatcggaatcaacggatttggaagaattggccgtttggtagccagagtggctctgcagagagacgatgttgaactcgttgccgttaacgaccctttcatcaccaccgattacatgacatacatgtttaaatacgacagtgttcatggacactggaagcatcacgatgtcacgttaaggacga

SEQ ID NO: 76225 - DNA, 247 bp, Glycine max
  Clone ID: 700953075H1
cgcgactactatgtcaacataagaaaagctatgctagctgggtatttcatgcaggtagctcatctggagcgtacaggacactacttgacagtgaaagacaaccaggtggtgcatttgcatccatccaattgcctggatcacaagcctgaatgggtcatttataatgaatatgttcttaccagtcggaattttattcgtactgttacagacatacgtggggaatggttggttgatgtgcaccacatta

SEQ ID NO: 76226 - DNA, 101 bp, Glycine max
  Clone ID: 700953080H1
cctcgctctatttctcagtctctgtgtttgcggctgaggattccgaacgagtgaccttcttcgtttctcgcaaagtttaagtaatcatgggtaaggaaaag

SEQ ID NO: 76227 - DNA, 127 bp, Glycine max
  Clone ID: 700953083H1
cttatctgagtgggttcggtggaaccaaagcgtgcttcctcttgctcctatcctaagtcctaattcagcatcgtgctgttccaattcgaaactcatatatataaatacagatcccaactcaaaagcc

SEQ ID NO: 76228 - DNA, 243 bp, Glycine max
  Clone ID: 700953084H1
ttcggatctagagtcttcagtttctcctcgttgttcttcgctttcctgttttcaatttcgattctttcgttaatttaataagatgtttgggagggcaccgaagaagagcgataatacgaggtactacgaaatcctcggcgtctccaagaacgcttcgcaggatgatctgaagaaggcttacaagaaagccgccattaagaatcaccccgacaagggcggtgatcccgagaagttaaagagctg

SEQ ID NO: 76229 - DNA, 151 bp, Glycine max
  Clone ID: 700953094H1
ccatagcccgcctcctccacggcagaactgacaacgccatcaaaaaccactggaactccaccttgaagcgcaagtgcacttcaaccatgattgacgacgacaacactcccccgctcaaaagatccctcagtgccggcgctgctattccagt

SEQ ID NO: 76230 - DNA, 256 bp, Glycine max
  Clone ID: 700953101H1
gattgacccgtattggacagtgatacctgtgatgcttgttcattactattcaactcaccctttggcacagtatcagtggtggaggtcgaggatcgtaacgttgttgacttgggcgtggagtgttaggctgatccacaactacttcaggcgagaaaagtggcagtggggtgccagggaggattggcgtttcactgatttgagccatcgctatggaaggcattggtggtgggcttctttcttcgccatctacgtccct

SEQ ID NO: 76231 - DNA, 255 bp, Glycine max
  Clone ID: 700953112H1
ctaaggatggggaacagtgggtttttgtattacaatcaagcaagtggaggaccctcttcttataagagtactcttgggggtcatcaccaccaagcattgttggcacagacccaccagggacatgttgggtttggggcagcatcatcgtctacatcatccttaggtgttgtgaatgcgttgaggaattcaaaatatgccaaagctgctcaggaattgcttgaagagttttgcagtgttgggagaggccagttcaag

SEQ ID NO: 76232 - DNA, 256 bp, Glycine max
  Clone ID: 700953113H1
caattccattctctttgcctgcctagtttcaattctgtccaatttccaaaaccaaaacaagccacacaagttcatggcaactcccaataacagactctctcttgccatggagagaactgggcaatgggttttctctcaagacataccaactgatgttatagtggaagttggagaaacaactttctctctgcacaagttcatgctagtggcaaaaagcaactacataagaaaactgatattggaatcagatgagagc

SEQ ID NO: 76233 - DNA, 257 bp, Glycine max
  Clone ID: 700953115H1
gttcaggatcaagtaaacgtgcaccccaatttaagtctctgatttgtctctccacagatcacaacaacgctctcacgcactagtttgaccacttcgctgtttgcacttttggttcctcaccgatccacacaggttggagacacggagtggcagcagaaaaaaaataaaaataaaaaagctaccttttttatttattttgtgttgggggatgggaaaaagtgacccttatatttatataacggtaatttggaaatgag

SEQ ID NO: 76234 - DNA, 257 bp, Glycine max
  Clone ID: 700953116H1
aaagatcatgggtgttaaagttccttcaagcatacttggaattcacccattgcttttcattagagttttgcagatgtgccagtggcgttttcctccagatgttcctcccccttataagggatacagggatgaggactggcaagacaatgatggagcactaaatacaatatccatgactcatcctcgcctcccaattgaacaccccaactgcttggttgaaaaggaatcagactgccaaccattacaacctggcatct

SEQ ID NO: 76235 - DNA, 255 bp, Glycine max
  Clone ID: 700953117H1
agaaagataaagcattccatagcctcccataaaaatgaagaatactatcttctctgctctctttctactttgtgccttcaccacctcatacctaccttcaaccaccgcggtggtcgataccgacggtgatattcttcagaatcctggcacatactttatcttgtccgtttttcgacccggcggcggagtagaattcgccgccactggaaacgaaacttgccctctcactgtcgtgcagactctcttcgggagggg

SEQ ID NO: 76236 - DNA, 253 bp, Glycine max
  Clone ID: 700953119H1
tgcagttggccagaaaatggacttggtgttttatacattgcagcttggtttctttgacatggattttgatctcatttccaaaagcatagacaaagccaaaaacttgtttgaggaaggtggtgattgggaaaggaagaataggctgaaagtgtatgaaggcctgtactgcatgtccactcgaaatttcaagaaggctgccaagttatttttggattctatttcaaccttcaccacctatgaactttttccctat

SEQ ID NO: 76237 - DNA, 255 bp, Glycine max
  Clone ID: 700953130H1
ctggatttcttaatactagttggtagcacagaatcgattcgaaatcgaaccaaaaaaaatatcacgttcttgtaacaagtcaaagacacaactcaacttgaaccaaaaaataacaaaatgcgttcgatctaaggtctgaactaaaaacatcccatttccactcccaactctgtttcaccatttcttcaattgaatacttctctgaatcactatgatatattcactctctttctgctgcatcccacttttattctg

SEQ ID NO: 76238 - DNA, 253 bp, Glycine max
  Clone ID: 700953131H1
ccaaaatccccggtaacaccgaatgtgacggcgttggcattttgggcatcgcttgggccttcggtggcatgatcttcatccttgtttactgcactgccggaatctctgggggacacatcaaccctgcggtgacattcgggttgttccttggacgcaaggtgtctttggtgagggcgttgttgtacatgatagcacagtgtgccggtgcaatctgcggtgctgggttggccaaagggttccagaaatcgttcta

SEQ ID NO: 76239 - DNA, 252 bp, Glycine max
  Clone ID: 700953134H1
ccatatccccccctagctacagagcagccaaaggggaggaataataataagcctatattctaaggccggaaaaataaaaaaggaataacaaaaatgtctggaaaggtaattatctcggctgtttctctcatcctggtggttggagtggccataggtgtggtggtggccgtcaacaagaagggcgaggatcccacacttcaatctcaacaaaaatcagtaggggttatctgccaaaacactgatgaccagaag

SEQ ID NO: 76240 - DNA, 252 bp, Glycine max
  Clone ID: 700953136H1
gccatttcaatccccagtttcttcttcaacgtcctcttacgagcagatcccaattctccttcccagtttcaaaccctaattccctcattcccatggcctcagaagagcccactgtcgcggtggaacccgctcccgaacctgccaccgccgagcctcccccggaggagaaggaggagcccaaacctgaagccaaggctaagaaaaccaaggaacccaaacctaaaaaggtttccagaccacgcaaccctccca

SEQ ID NO: 76241 - DNA, 252 bp, Glycine max
  Clone ID: 700953140H1
ttgttgaggaagcacatggctggtagtagttcaaagccagtgatatgtccgcgaaccagggacaaacttggctttcccatggccccacttccaattaccactccttcaatcatcttgtttcaagaggaggaattggaaggctcagtcgttgttgttgtactttcaatttcaggttaagaaagagcaaaacggctgcgttttcggtcatgagaaactttggcgtgacgacggaggaagaccatgagttcgtga

SEQ ID NO: 76242 - DNA, 253 bp, Glycine max
  Clone ID: 700953148H1
atcgtcatcgtactactactacccacgttctgctcctttgcggatcgtgtccacaaaagatggcagacaatgaggatggaagggataagactactcgtgggaatgaatgggaggttgtatctctgacagcatcgacatatgcagctgctcctggtcctgatgaagttgagatgaaggatgatgggaacgaagatgtatatggacaagatgaaggagaaacgttacatgctttatttatgtctcgtcactttgt

SEQ ID NO: 76243 - DNA, 250 bp, Glycine max
  Clone ID: 700953149H1
aatttatcatcgcagcccattattttcagaggtcattcagatggcatatccagtttctccatttggggccaagatgttatttcaatttcccggaatagaattgggcttctctccttgtctaaatctcccaatgaaacagatgggcagcatcacattagccctcagaaactatatgtttctgataatggtcagagaagcttgtcagcgttatcaagtattagtatacttccattctctcgattgtttctca

SEQ ID NO: 76244 - DNA, 249 bp, Glycine max
  Clone ID: 700953152H1
gtttacaaccccaaacagctaggaaagaaggtaatttggtgggtgaaaaagttagataaagagacgctcctagctactgttttatttagttggatgtttgcttctttgttgggaccctgttgtgttggttcacgtgacaaagaacgtagcaacataatctgtgagcatgcaagacatgatctgctggattgacaaactatgttagcacgaactgtttggatctattttttgaggaaatatggtttaatt

SEQ ID NO: 76245 - DNA, 250 bp, Glycine max
  Clone ID: 700953153H1
cttcagagcacagggcaccggtatgaaggtggattctggacagaccatgcaaagcatgatccattggacaatgaaagacatgttgcaatagtgacaactgctagtcttccttggatgacgggaacagctgtaaacccactatttcgagctgcatatttatcacaatctgcaaagcagaaagttactctgttggttccatggctttgtaaatcagatcaagaactggtttatcccagcaatctcactttta

SEQ ID NO: 76246 - DNA, 250 bp, Glycine max
  Clone ID: 700953160H1
caacggaaaggaactttgcaagagtattaacccagatgaagctgttgcttatggtgctgcagtgcaggctgcgattctcagtggcgagggtaatgagaaagtgcaggatcttcttttgttggatgttactcctctatccactggtttggagactgcaggaggagtcatgactgtgttgattcccagaaacacaaccattcccaccaagaaggagcaggtgttctcaacctactctgacaaccagcccggt

SEQ ID NO: 76247 - DNA, 250 bp, Glycine max
  Clone ID: 700953161H1
gccactatagtaaacaatcttctctatctaaaatggagtttgttctaaactacctaaatgccactgccattggagttctttctctaaccctcttctttttgtttttgtataatcccttcaaatttgcattaggtaaaaaagaggctcccgaagttgcaggtgcatggccaatacttggtcacctaccactattgagtggttcagagacacctgatagggttttgggtgctttggctgataagtatggacc

SEQ ID NO: 76248 - DNA, 248 bp, Glycine max
  Clone ID: 700953167H1
gggattgaagagtaaacataggatccacgatcaactcgattttatacttttgtttctatttctctggaggcagctagctagggtcatactcatggggagcttgaaaggagacagtggacatgccaatggcgaaaatcttaccgaagctcttttgccaacacgagatgcacaacaacaacatcaaacagacgacgaggaacaaagatttggtgacaagctctggcttgaaaccaggaagttatggctca

SEQ ID NO: 76249 - DNA, 247 bp, Glycine max
  Clone ID: 700953168H1
gtggggtgggaggcacacgcacaaacgcagagtcagaatctccaatcttcaatcggagacaaagctagctcgaacgaacgaagtagagtagtgtgctacgaaaaatgtggcggtgcatcgcacgtggtctccgtggacctgcttccaccagatccacctccaatcactcacttggatctcaactttctagattcttctctagtggggcgaactcctcgtacaccgtggtggatcatacttatgatgc

SEQ ID NO: 76250 - DNA, 249 bp, Glycine max
  unsure (1)..(249): unsure at all n locations
  Clone ID: 700953178H1
gtcgagctcgcctccgcggaggtcatttttcagaaccccgatctgatgaacaaggtgcgtgatttgttnnnnnnnnnnnnnnnnnnnnnnnnnnnnnnncctgaaacgtgttcctgggcgttgaattgcgttgccaccaccgatcaaggcgagaacgacccttcctcgctctggctcaaccctgaaatcaaagactcctccaccgtctcgccgccgaattccacggttaataagacgatgcatttcgaa

SEQ ID NO: 76251 - DNA, 250 bp, Glycine max
  Clone ID: 700953180H1
caaaaaggaaagaagcagattctgtcctttgaaatcaacaagaaaagatgtcaggtgaagaggtagctgttgcagttgaggtacctgctacttcaattccaggtgagccaatggacatcatgactgctctacagcttgtgctgagaaaatctctggcctatggtggtcttgcacgaggtcttcatgaaggtgccaaggtgatcgagaagcatgctgcacagctctgtgttctagcagaagattgtgacca

SEQ ID NO: 76252 - DNA, 246 bp, Glycine max
  Clone ID: 700953184H1
ctctttcaaaagggagaagaaaaggaaaggaaacaaaacgcacaaaggattattatagcaatggcagaacaaaaccaaaaccagacaactgaagctggaaggcaccaagaggttggccacaagagccttctccagagtgatgctctttaccagtatattctggagaccagtgtctacccaagagaacctgaatccatgaaagaactgagagagttgacagcaaaacacccatggaacatcatgaca

SEQ ID NO: 76253 - DNA, 246 bp, Glycine max
  Clone ID: 700953185H1
acttgtccttctttgcgagattgaatcgtaagcagcggctaccctaatcctctcctcttcctctctactaatttcagctatggccgacgaagctgtggttgttccagatcccacccagatcgatgtcaagctctttaaccgctggagcttcgacgatattgagattactgacatttctctggctgattatatcggagtggcgacatccaagcacgccacgtatgtgcctcacaccgccggcaggta

SEQ ID NO: 76254 - DNA, 244 bp, Glycine max
  Clone ID: 700953189H1
agctgcgatcctctgcttcgatggccaccgtgcaactccaatccctaacccttgttcgctcctcagcacttccttccgccaccttctcccctccgatcgccgtctccggccgccgcaactccgccgcgctgccgcgctactccggcctccggctccgacccgccgctgagaccagtttcccgactcacgccagctcgagaaccgcttctcgcggcggaggtgtcaagtgcgaggcaggagacac

SEQ ID NO: 76255 - DNA, 247 bp, Glycine max
  Clone ID: 700953195H1
cgtctttctcgtcttcgattcatcgccaaaccccaacctttcctatctcctcattcaacaccatcccatttttctctcacccccaaaaccaagaaaccgaatcgattccgattccgattccgatcaatggctgcggaacccaaggaatcgccttccaacaaccccggtcttcacactacccctgacgaagccaccaagggttacatcatgcaacaaactatgttcagaatcaaggaccccaaagtga

SEQ ID NO: 76256 - DNA, 277 bp, Glycine max
  Clone ID: 700953210H1
tctacctctgccactttctgagtacaatacaacactgccatggctgcctcagtctccactattggagctgtcaacagagctccactgagcttgaacagctctgaagctggagattcggttcccagttcagccttctttggcacaagcttgaagaaggttactgcctcaagggtccctaacgtcaagatttcttctggaagtttcaaaatcgttgcggcggagaaagagattgatgagcaacaacagacaaacaaggacagatggaaaggtcttgcct

SEQ ID NO: 76257 - DNA, 276 bp, Glycine max
  unsure (1)..(276): unsure at all n locations
  Clone ID: 700953222H1
gtttgatacaggagcatntgttggtggaagcaaacagatctttgaccatgaagctggaagaaatcanttcaagaaaccagtataggcaaacatgggaagctggtgagcaaagtatgccatatggaacccaaaatgctcactctcaaggcttcttccagcctttggagtgcaaccccacattggcagataggttctgactacaggtacatccctgaagcctcagagcagcagctagctgccacaactcaagcttcaacaagtcatggatttttcctg

SEQ ID NO: 76258 - DNA, 278 bp, Glycine max
  Clone ID: 700953228H1
caaaccctaaccctagaagaagaaaaaaaccacaaccaccaccatctagggtttttctttttctcatggctagtttgtcaactaggattttcttcatcatgtcccttgtgtgcctggctctcggtccaatggcacaaggggaaatgacatgtggccaggttgtgagcaacctgaccccatgcatctcctatgtggtgtatggtggaaccaatgttcctgaacagtgctgcaatgggataagaaatctctatggcatggctcagaccaaaccagaccgc

SEQ ID NO: 76259 - DNA, 283 bp, Glycine max
  unsure (1)..(283): unsure at all n locations
  Clone ID: 700953247H1
gatgaaagggantnttgantccacttctggggttggcgatggttcgagctgcggaagggagaataatgatcgagccaaacaaggagttgaactcagcacagcacagagacaagagcttcagatgaagaagtccaagcttgtgaccatgctcgatgaggtggagcaaaggtacagacagtatcaccaccaaatgcaagttgtgctaacatcgtttgagcaagcagcgggtgttggtgcggcaaagtctttacacgggccttgccttgaagacaatctcaaagca

SEQ ID NO: 76260 - DNA, 271 bp, Glycine max
  unsure (1)..(271): unsure at all n locations
  Clone ID: 700953253H1
gcactacatggggttggtggagcatntgcaaagagtatntttgtggatgagcttggggcacaagaaagctctttactgaactgtacaccaaaggaagactttggaggaggacacccagaccccaatttgacatatgcaaaagagttggttgctcgtatgggattgggcaaatccgaaccacaagatgatcccccagagtttggtgctgcttctgatggtgatgcagatcgcaacatgatacttggtaaaaggttttttgtcactcctcaga

SEQ ID NO: 76261 - DNA, 281 bp, Glycine max
  Clone ID: 700953264H1
gagctttattactgggaaacctgtatttggtactctcgttgctcttctacaaaatggcacaccaatccttggcataattgatcaacctgtgttaagagaaaggtggatcgggatagcaggaaagagaacctcactgaacggacaagaaatatctacacgcacttgtgcggacctttctcaagcatacctgtacaccacaagcccacatctgttcagtggagatgcagaagaggcattcattcgtgttagaagcaaggttaaaattccattgtatggctgcg

SEQ ID NO: 76262 - DNA, 267 bp, Glycine max
  unsure (1)..(267): unsure at all n locations
  Clone ID: 700953271H1
gttttggatggatacnttgcatgtggttcagaatctaatgaggtgtactgttatcacaaatcactgcctgtgccaattgctactcataaatttgagtcaattgatcacatttctggtcatctaaatagtggtgataataatggacagtttgtttctagtgtttgctggagaaagaaatctaacatgcttgttgctgccaactcagttggaattgtgaaactattgcagatggtctgacacaaaagagaaaatatttggttaacattt

SEQ ID NO: 76263 - DNA, 271 bp, Glycine max
  Clone ID: 700953282H1
gtgacttttgcaccaactggactgacaaccgaagttaagtctgtggaaatgcaccatgaagctctcacagaggctcttcccggtgataatgttggattcaatgttaagaatgttgctgttaaggatctcaagcgtggttatgttgcctcgaactcaaaggatgatcctgccaaggaggctgctaacttcactgcccaggttatcatcatgaaccatcctggtcagattggaaatggctatgcccctgttcttgactgccacacttcccaca

SEQ ID NO: 76264 - DNA, 263 bp, Glycine max
  Clone ID: 700953290H1
tcgtgaccgcacgatcaagctgtggaacaccctgggagagtgtaagtacacaatccaagacggcgatgcgcattctgattgggtaagctgcgtccgtttcagccctagcacccttcagcccactattgtttctgcctcgtgggaccgcaccgttaaggtttggaacctgacaaactgcaagttgaggaacacgcttgctggacacaatggttatgtgaacactgttgctgtttcccctgatggctctctgtgtgccagtggtg

SEQ ID NO: 76265 - DNA, 268 bp, Glycine max
  Clone ID: 700953302H1
ctggagggggccaaaatcctaaagataattatcttgtgaagtttctttttctgctaccattttgtgctgtgctgttctgctgttgtcgttcgtttctaaagaatcagaggtactttggttcctgttgtagaaattcactatgcgatcatgtcagacacctttattacaggattaaatcaagggtgccacttgcatatactaccatttctacctcaactttcaattccctcataaggtcatcttttgcttctatatcttcttatttagg

SEQ ID NO: 76266 - DNA, 265 bp, Glycine max
  Clone ID: 700953304H1
gatcaaggtcagtgatgcggacttggagttcctcacaggaagtgacaagattgatgatgaatctgctttgtcattgtggcaccccaatttgaagttgctccttgtcactcttggggaacatggttccagatactacaccaagagtttcaaaggatcggtagatgctttccatgtcaatacagttgatacaactggtgccggtgattcctttgttggtgctttattgccaagattgtcgatgatcagtccatacttgaagatgaac

SEQ ID NO: 76267 - DNA, 265 bp, Glycine max
  Clone ID: 700953308H1
gtaagatcgaagcaacgataggtccatagtaagttggcagacatgtttggcatagaaaaatctgaaatgttaagtagggtgctttactgcgattcagttggggctatcaaacacattggtgatgagccattcagtgacttcacaagaacagccaaaaggttgactattctaatggattctggcagcaacaatgtaggagtgtagtggggcagaataaactattctttaattgtacagatagttcacgaagtctcattttctaacc

SEQ ID NO: 76268 - DNA, 264 bp, Glycine max
  Clone ID: 700953311H1
caatggaggcgattaggaagagtaggattcttatatttggaggaactggttacatagggaagtatatggtgaaggcaagcgtcacgttaggccatccaacttttgtctacactcgccctcttgatgcacaaactccttcctctaaggcacagctttgcaaggagttcaactctatgggggtcacacttgtccatggagaacttgagcatgaccagattctggcatgattaaacaagtagacattgtgatatgttctcttccata

SEQ ID NO: 76269 - DNA, 264 bp, Glycine max
  Clone ID: 700953312H1
cgaaaatgtggaagagaacgggttttgaagaagaagcagttcaattgatcaactcagatttcagggacctaagtctagctgctaatagactcgcccatcatgccatcaaacttggtggcattggctttggagcctcttttttcggattgtttgctgccattgctgctatttatctgttgattttggatcgtacaaactggaaaacaaatattctcacagcactatcattccatacattttcttcagcttgccttcattaatttt

SEQ ID NO: 76270 - DNA, 263 bp, Glycine max
  Clone ID: 700953319H1
ctcgagatgcacaagcaaaactcaaggcacgtcaaggagtggcccatgttgggatggaagacctagatgtgaaagatcctcacacaatgaagagtgtaccagctgatgctaaaaccatgggtgaggtgatgttcaggggcaacactgtgatgaatggatatctgaaggacttgaaagcaacacaagaggcatttaaaggtggatggttttggactggtgatttggagtaaagcatcctgatggatacatagagcttaaggatc

SEQ ID NO: 76271 - DNA, 264 bp, Glycine max
  Clone ID: 700953324H1
gagattacggcgtcctcaaagccaattatgaatcacttaaacttaactacgacaccctccaacaagaccacgaagccttactcaaagagataaaggaattgaaatcgaggctggtgcaagaagagaacaacaacaacactgaaagcgatgtttcggtgaaggaagagatgctgaccaccacgctctgtgaaaccgccattcctggatcggacacgaaggagttggttacgagtgttttaacaagagtgatgaggtgggaggggg

SEQ ID NO: 76272 - DNA, 262 bp, Glycine max
  Clone ID: 700953327H1
tcgggattgactgcctcaattgctctagaaaaggcaggacagatggaatctggaaaagtggtccttgttactgctgcggcaggaggaacggggcaatttgctgttcagctagcaaaattagcaggaaatacagtggttgcaacttgtggaggtggggcaaaagccaagcttctgaaagatttgggagttaacagagtcatagactatcatagtgaagatgtaaaactgttctaagggaagagttccccaaaggtattgacat

SEQ ID NO: 76273 - DNA, 262 bp, Glycine max
  Clone ID: 700953328H1
cttgaatcttcgttatccttctttttttctccttgaactcgaatattcactatggcagatgaggtggttctgctagatttctggccaagtccatttgggatgagggtcaggattgcacttgctgaaaagggtatcaaatatgagtccaaagaagaggacttgcagaacaagagccctttgctcctcaaaatgaacccggttcacaagaaaatcccggttctctccacaatggcaaacccatttgtgaatctctcgttgctgt

SEQ ID NO: 76274 - DNA, 264 bp, Glycine max
  Clone ID: 700953330H1
gcgagcgagcgagcagtttcaaagagaggatttgggattgggaaggcgagggattgcgctgcgtctcttcctcttctctttcgattcatccctcattcataatcttccaatccaacaacctcagcctcacactcacacatacacacatctgaacgcgtatcgtccctcccatggcttcaaagcgcatcctcaaggagctcaaggacttgcagaaagacccaccacttcttgcagcgctggtccagtagctgaggacatgttcca

SEQ ID NO: 76275 - DNA, 261 bp, Glycine max
  Clone ID: 700953335H1
caacttctgctacttcctactccaaccgcacttctgctccgcaattatcatgggcaaggtcaagatcggaatcaacggatttggaagaattggccgtttggtagccagagtggctctgcagagagacgatgttgaactcgttgccgttaacgaccctttcatcaccaccgattacatgacatacatgtttaaatacgacagtgttcatggacactggaagctcacgatgtcaccgttaaggacgagaagacccttctcttc

SEQ ID NO: 76276 - DNA, 260 bp, Glycine max
  Clone ID: 700953336H1
ctcaacattttacactcttttcttcttctcgttgttgcttcgctgttgaatcatggatcagaaggtcgatttcagcgctccccattccatgggaaccactatcatcggcgttacttacaacggcggtgtcgttctcggagccgactctcgaaccagcaccggagtgtatgttgccaaccgagcatcggacaaaatcactcagctcactgataatgtatactgtgtcgctctggatcggctgctgattctcagattgtctc

SEQ ID NO: 76277 - DNA, 261 bp, Glycine max
  Clone ID: 700953341H1
caacctccaaaacacaacaccacaaggaaacaaaacaacccattgagagcttgcacaactctcatggtagtagtagcactactacttcacacactctctctctgagtgcctcacaccacagattctgtgatatatataccaatggaggccctcaatgctgctggcttgacccctctatctgtgctctctgatacaaaaacaacaagaactaaacacccttcgtttctgtatgcaaagtctcaaacttttccacctcaacca

SEQ ID NO: 76278 - DNA, 260 bp, Glycine max
  Clone ID: 700953344H1
ctgtggttgtcaaaaaggtagatttgaatttatttaagagagaatcgtatgttgtggaattgggactattaagtaaggttccacatgcaagattggttccaatcctgggccactgcttggacaatgaaaatgagaaatgcatagtttacaagtacatgccaaatcgagatttagctacttccttgcacagagtcactggttcagatggtaaaatacagtcctggattggatcacgagattgaaaattgcgataggagctg

SEQ ID NO: 76279 - DNA, 260 bp, Glycine max
  Clone ID: 700953345H1
acaaaatacggtgcgttgaatggtggtgccaactttgttgcccctggttacaccaagggtgatggtcttggtgctgagattgttggcactttcatccttgtttacaccgttttctccgccaccgatgccaaacgtagcgccagagactcccacgtccccattttggcacccttgccaattgggttcgctgtgttcttggttcacttggcaaccatccccacaccggaactggtatcaaccctgctcgtagtcttggtgct

SEQ ID NO: 76280 - DNA, 260 bp, Glycine max
  Clone ID: 700953350H1
gtttctttgcacgctaattccatcttcaaattctgccttcattcgattcaggggggaattaaattgtttctattttttttcgaatttaccacaaattagaaatcgataaagaaaaatggtgagggtgttgagaagctgcattcaatcgattttgaagctggtgaactcggtgattgggatggcggggctagccatgattctgtactccgcatggatgattgggtttggcagaggaagatgggcgaacttccctttggtca

SEQ ID NO: 76281 - DNA, 259 bp, Glycine max
  unsure (1)..(259): unsure at all n locations
  Clone ID: 700953353H1
gttcctgtattaatttttctctccctgagattaccaagctctgcaactttgcttctcaacatggagtatcgtctcctacccatttttactttactcaatcttgcactggtggcaatccatgctgctttacctcctgaagtttactggaagtcggtgcttcctactacgccaatgccaaaagccatcactgatatcctttaccccgattgggtggaaganaaagtacctcagtgaatgttggaggcaagggcgtaaacgt

SEQ ID NO: 76282 - DNA, 258 bp, Glycine max
  Clone ID: 700953361H1
ttcgacccctccaagcgcaaaggatacttatcgtgggatgactattttatggcaattgcgtttttgtcagctgagaggtccaaagaccctaataggcaggttggggcttgtttggtgagtcaagatggtgtaattcttggaattggttataatggatttccaagaggttgttctgatgacaagctaccctgggcaaagaaatccaggactgggaatccttggagacaaagtacccttatgtttgtcatgcagaagtaa

SEQ ID NO: 76283 - DNA, 256 bp, Glycine max
  Clone ID: 700953375H1
gatgttcttctaccctttttgccactcactcgacaacaccataaccataaaccaccccattagagacggcgacgttttggtctccaacggtttaggaaactttgcgctcggtttcttcagcccgcgaaactccacaaaccgttacgttgggatttggtacaacaaaatctcggaacaaacggttgtgtgggttgccaacagagacactcctcttaagacacttccggtgttctcaaaataagcaacaacggaaacc

SEQ ID NO: 76284 - DNA, 257 bp, Glycine max
  Clone ID: 700953381H1
gagcataaaagaatttcaattatttaaaatttctccctcatccaatcacacttttaatgaacgtggcaattcaattgtgcgtttcagcatccaattttttaattgatgaaaggtgcgaggtgttctacgaatgctgcaagggttttctggtcccccattcttttgggataaaaatgcaaacattttccgtgcaaagagcggagtgtacgttagtcattctcacagaaaagtcttcactctctgctcaatcagtttat

SEQ ID NO: 76285 - DNA, 256 bp, Glycine max
  Clone ID: 700953382H1
atttgtcagggcatgctagataaatttattccttagaaaatatataataattgctcccaaacataaataaaatatacttttgtggaaaataattcaagcttcgtgttattttctttttttagtttcattgacgaaatataaaagtttctgaccgttcaatgcaaactcctgggcaagactaaaaggtagtttgaatgctgtgaaagtatggttggcttcaattttccaagttcctaagatgagccaaaattttcaa

SEQ ID NO: 76286 - DNA, 253 bp, Glycine max
  Clone ID: 700953387H1
gtcagcacaggctttaggcggccatatgaatgttcatagaagagatagggcaagactcaagcagccatatagccctcagaatgaaatcctaagtgttgatcttgagaaaattaccacgcaacccctgaattcagttcagatttcttttacttctttgggttacttatacccatcttctcttggtgtattgacccataataacactaaccctaatctgatccttattctcatgctcctccttcaccttccaagg

SEQ ID NO: 76287 - DNA, 254 bp, Glycine max
  Clone ID: 700953392H1
ggagcagaagaaggcaaagatagtggcagagctccaagctgtgaagcacaacagtggcaagtcctacaatcagttagcggaggagactggactcaccaacgtctatgttgctcagcttctcaggagacaggctcagctcaatccccaaactgcccctctacttcgggcagcgctgcccgacctgccccaagaccttgtttctgagatgatgagacccctttgaggtcttatgaccctaatctcatccaagaccc

SEQ ID NO: 76288 - DNA, 254 bp, Glycine max
  Clone ID: 700953393H1
gtttaggaagggatggaagcggcagtggtggacgtcggctctaagctcctcaaagcgggctttgcaattcctgaccagactcctgccatggcccgcacttggagaggttttatctccttcaatgcataattctaagtttctaacccacttagctattctcaagtattactttggacttcacaaccgcacaatcatatcaccactttagtacctactatacctaactatctatctctgtcagaatccctaattga

SEQ ID NO: 76289 - DNA, 254 bp, Glycine max
  Clone ID: 700953394H1
cgcactgatggtattcctgaacaggacattgtcaagcttgttgacaccttccctggccaatccattgatttctttggtgcactgagggccagagtatatgatgatgaagtgaggaagtggatttctggtgttggtgttgacagtgttgggaagaagcttgtgaactcaaaagatggacctccaacctttgagcagcccaagatgactctggagagctcttgctgtatggtaacatgcttgtccaagaacaagag

SEQ ID NO: 76290 - DNA, 253 bp, Glycine max
  Clone ID: 700953411H1
gaacaagggtttctctgtctgcttcttcactttctctcgtttcaatcgaaaccaaaacaaaaacatgggcagaaaattcttcgtcggtggcaactggaaatgcaatgggaccactgaggaggtaaagaagattgttatactttgaatgaggctaaagtccctggagaagatgtcgtagaagttgttgtgagccctccttttgtgttccttcctgttgtaaaaagtttgctgcgccctgatttccatgtttcgg

SEQ ID NO: 76291 - DNA, 256 bp, Glycine max
  Clone ID: 700953418H1
ccaacgtgtcctcgaagtcgtcgaattttagcgacgatttcgatgatgcgttggaggcagccgttagagcctaccagaagaacttcaacctcaacatcacaggggagctcgacgaccccacgatgaaccaaatcgtcagccacgctgcggcgtggctgacatcatcaacggaaccacaacaatgaactccggcaagacaaacaccacggattcaccgacgttccacacggtagcgcattattctttctttgacggc

SEQ ID NO: 76292 - DNA, 254 bp, Glycine max
  Clone ID: 700953436H1
cagacactgatttatgtagatagataaccataaccataccatagcttacaaattaagctccgctcactctctttctctctagaatccatggcagccattggtctgaatggcgtaaaggttgggacgacgtcgtctcaggcgtaccttgaaggcaaggcagtgaaggagacgagagcgttgatggctgaactgtgtcgccatttctacacccttggatgggtgacagggacaggtggcagcatctccatgaaggt

SEQ ID NO: 76293 - DNA, 245 bp, Glycine max
  Clone ID: 700953445H1
cagcaatggagctgtcttccagtgcatttgtggtaatattgttggcagtcgcagctacagcagtactctcaaatgggttggatctatctttcttgcccagcgatttcctctttggcattgcttcttcctcttaccagtatgaaggagcttacaagagtgacggcaaaggactgagcaactgggataactacactcacggaccaggtagaagtgtaataatggatggaagcaatggggatatcgcg

SEQ ID NO: 76294 - DNA, 249 bp, Glycine max
  Clone ID: 700953457H1
cttaatacagcctatgactcatggcaggtccaaacaagcttagctccttcatcagcagatccccatggcttttggcatgattgtagattaaatcatgctaaatgtacttcttcacaaatccaatatttgcaagtggtttgacatatgagaaatagctttcacaagaagtataaatatgtcttcagtaaattactgtaacaagtcatttccctgtatctaatgcaggattcaggaatcaaatgctgaatg

SEQ ID NO: 76295 - DNA, 182 bp, Glycine max
  Clone ID: 700953470H1
gtaatataagagaatctattctctttctttgtcgttttttaattatcttggagctttagaataaagtgtttgctatgtgttttgttggtcttttataaatatgtaatttgaatcatcaatctctgcttataatgaatacttttggtgttatatgaataaaaagtttgttgggttatttcatt

SEQ ID NO: 76296 - DNA, 246 bp, Glycine max
  Clone ID: 700953485H1
ctcagtgaaagagaatccgaggcgaagagaagagaaaaattaagatggaggggaaggagcaggatgtgtcgctgggagcgaacaagttcccggagagacagccgattgggacggcggcgcagagccaagacgacggcaaggactaccaggagccggcgccggcgccactggttgacccgacggagtttacgtcatggtccttttacagagcagggatagcagagtttgtggccacttttctgtttc

SEQ ID NO: 76297 - DNA, 113 bp, Glycine max
  Clone ID: 700953486H1
gttctcagttgaagcgttaccctcgctggcgccgcatctctccgcagcaaagcgccgcacctcaccgcagcaacgcgccgcacctcactgcagcagctccgtcgccggcaacg

SEQ ID NO: 76298 - DNA, 242 bp, Glycine max
  Clone ID: 700953509H1
atttctttcgagctgacaatcctgaaggtgtggaggcacgtaacgaggtagcaaagatggcatttgaagatatgatatcttggatgcaagaaggtggccaggttgggatatttgatgccacaaacagtagcaagcagcgaagaaacatgctgatgaaattggctgaaggtagatgcaagatcatttttctggaaacaatatgcaatgatgtagacataattgagaggaatattcgctttaaa

SEQ ID NO: 76299 - DNA, 243 bp, Glycine max
  Clone ID: 700953515H1
caacaacttctcaaccacaacgagttgctattcccttcgattcacgaacccagaaaattaaaacattaaaaaagatatcaagtatcaaaatctaaacggcatcagcaaacatgtctcaacaccatggtgatgaaatggagtatgcggcagatgataatgaaatggcagaggtagaagaggatatgtatttccgtggcagggcatttggtgaatcagattcggatgatgacgacgactacgaat

SEQ ID NO: 76300 - DNA, 251 bp, Glycine max
  Clone ID: 700953517H1
gcaatttggccactatgaacacagggcttgctgcaggtgcagccttgcttgcactcttggctatcaccttctccttgttgagccctcaaaccctgttttctccgcctgagattccgggctcgaaggaccaccttcacgctgctcggttactccatgtcaccggagccgtcgggccggagagtcttgtcttcgacgctgacggcggagggccctacaccggcgtcgccgatggccggattctcaagtgggaa

SEQ ID NO: 76301 - DNA, 239 bp, Glycine max
  Clone ID: 700953529H1
tttgtcataaaaatgttgtttttaacaacatagactagtattaataatgtgactgaagttgtgtttctgggtcaactaaggcatccacatctcgtgaagctgattggatattgctgtgaagaagaacacaggcttctggtatatgagtatttaccacgaggcagcttagagaatcaactatttagaagatatacggcatcgttaccatggtcaacaagaatgaaaattgcagctggagc

SEQ ID NO: 76302 - DNA, 238 bp, Glycine max
  Clone ID: 700953530H1
gctagatggaaaccaacttgctgaggctgacgaatttgaggataagatgaaggagttggagagcatttgtaatcccatcatagcaaagatgtaccagggtgctggtggtgatgcgggtggagccatggatgaggatggtcctgcagctggcagtggaagcggtgctggacccaaaattgaggaagtcgattaagcagaagattctcatgggttgttcttgattttgtcaaagaccctt

SEQ ID NO: 76303 - DNA, 240 bp, Glycine max
  Clone ID: 700953531H1
gtgcctgccatgtatgttgcaattcaggctgtcttgtctctgtatgccagtggacgtactacaggtattgtgcttgattctggtgatggtgtgagccacacggtgcccatatatgaagggtatgctcttcctcatgcaattcttcggttggaccttgctggccgtgatttaacagagtacttggtgaaaatccttaccgagagaggatactccttcagcacctctgccgaaaaggaaatt

SEQ ID NO: 76304 - DNA, 247 bp, Glycine max
  Clone ID: 700953535H1
catctttctctcagcttcaccttcaccttcaccttccgaattgtatcaaacctcaaaaaatggatcatcaaaacaaacacgtagcagtctttgctttcccctttggcagccaccttatgcctctcttaaaccttgtcctcaaactagctcattcccttccaaactgttcattctctttcattggcacacacaaatccaatgcaatccttttcccaaaaccccacatcccaaataacatcaaggccta

SEQ ID NO: 76305 - DNA, 234 bp, Glycine max
  Clone ID: 700953543H1
cgcaacaaaaagaaagaatcccaggcgaggagaaagatggaggggaaggagcaggatgtgtcgttgggagcgaacaagttccccgagagacagccgattgggacggcggcgcagagccaagacgacggcaaggactaccaggagccggcgccggcgccgctggttgacccgacggagtttacgtcatggtcgttttacagagcagggatagcagagtttgtggccacttttctg

SEQ ID NO: 76306 - DNA, 238 bp, Glycine max
  Clone ID: 700953557H1
ggaatcagaggctccccctaacttctggggccacaccccggaagaagaatactacacctcccaaggcgttcgcaacaccaagtcccacttcgaaacccccaacggcaaaatcttcacccagtccttcctccctctcaacctccaaccccaccaagtcaaagccaccgtctttatgacccacggctacggctccgacaccggctggctcttccagaaaatctgcatcaacttcgccacc

SEQ ID NO: 76307 - DNA, 235 bp, Glycine max
  Clone ID: 700953560H1
ctgcgactctctttccttccctctttttccgaatctgaatcgaaatggcttcggagactgagacgtttgcttttcaggccgagatcaaccagctcctcagtctaatcatcaacaccttctacagcaacaaggagatctttcttcgtgagctcatcagcaatgcctctgatgctttggacaagattcgatttgagagtcttacagacaagagcaagcttgatgctcagccagagtt

SEQ ID NO: 76308 - DNA, 230 bp, Glycine max
  Clone ID: 700953575H1
ctcggatcgcgcattcacaaataaggttgaagagggccctgccggaagaagataaataccgtctttcattttccggcgatctcttttttcttccatcaccgttttccggctatccctaatccttaacagaaatgacgacatcaaggcgccttgcggacaggaaggtggagaagtttgagaaaaacatcaccaaaagaggatttgtgccagacacaaccactaaaaagggg

SEQ ID NO: 76309 - DNA, 126 bp, Glycine max
  Clone ID: 700953578H1
ggaactatcactggagaagagtctgtttttcattggaattacttgtatttcaacatctaatccttttaggaggaggatatttgagcccatgggccgcatattgaattttggattagtcctaatttt

SEQ ID NO: 76310 - DNA, 230 bp, Glycine max
  Clone ID: 700953592H1
atggccactcttcttcttcccacgctcctccttctcatacccttcgccaccctcgtctccgcccgccctcacctcgccggagactttctccgactgccctccgaaaccgataacgatgacaacgtccagggcacccgctgggccgtcctcctcgccggttccaatggctactggaattacagacatcaggctgatgtttgtcacgcctatcaaatactaaggaaaggtgg

SEQ ID NO: 76311 - DNA, 231 bp, Glycine max
  Clone ID: 700953593H1
ggaacaacaatgagtttggactcgtcacttctgattccttgcttaaccctacacagaaaagaagctttgattcttcttcttcacaaaaggatgattctgagtcccaacaacaacattccctcaggcacttcattgatgactctcccaaaccaccatctcataatcatcatcgttcgtcgtccatttggcccgaactcgacaacatacagtcagataggactcagttatcaa

SEQ ID NO: 76312 - DNA, 259 bp, Glycine max
  Clone ID: 700953609H1
ccaagcttctctgttaaaaaaaaattaggcgtctaaagggccaaagcttagaaagttgaagctttttttgttgaggtgaaagtgaaatggttggcaaggataatctgagggctgaggacttgaacttgtgctttaagaagcttatgatggtggccgggagtgggaacagtgagaaaggggtgaacttgaaggttggggtgatcaccgagtggaaggatattcctgtggagcttctgatgcaaattctgtcccttgtgga

SEQ ID NO: 76313 - DNA, 260 bp, Glycine max
  Clone ID: 700953610H1
ccgacgtctccactttcaacatcttaattagggctttgtgcaaggcccatcagctccggcccgcgattcttatgcttgaggacatgcccaactacgggctcaggcccgacgaaaaaacgttcaccacacttatgcaggggtttatagaagaggctgacgtggaaggcgcgctgaggattaaggaactcatggtggagtctgggtgcgagctcacgagtgtttcggttaatgttttggtgaatgggctttgcaaagagggg

SEQ ID NO: 76314 - DNA, 261 bp, Glycine max
  Clone ID: 700953611H1
cacaaaacttgctatagcagtaagctataactcatttgaggctctgtgagaattgagaaatggctaaagatgttgaggttcaagagcaaggaggagagtactctgccaaagactaccatgaccctcctccagcacctttgttcgacccagaggagctcacacagtggtccttctatagagccctcatcgctgagttcatagcaacccttctcttcctttatgtcactgtgctcaccattattggctacaaaaggcagactg

SEQ ID NO: 76315 - DNA, 258 bp, Glycine max
  Clone ID: 700953618H1
ggaaaaggcgtcttcataaacgccgcccaaaacttctcatacccttttattcattccattcgtttctagggttttcttttctttgccgagaaaatgagagagtgcatttcgatccacattggccaggccggtatccaggttggaaacgcctgctgggaactctattgccttgaacacggcattcagcccgatggacagatgccgagtgacaagaccgttggcggaggagacgacgccttcaacacatttttcagcgag

SEQ ID NO: 76316 - DNA, 266 bp, Glycine max
  Clone ID: 700953630H1
gtgagatacactaagttatcctcataaatacactctaattaggtggcaagataagtgtctaaccttagtaacattgccacatattgtgttcattttggaattgtgccactaaaattctattcaattcatctatggctgcctcttcttatgctatgcaatcaatcctggcaaaccctttgatccgcatttccagcgggtctagggtgaaccaatttggcgttcctgctttgcacatgagaaggaatgttggcctgagagttaggtcc

SEQ ID NO: 76317 - DNA, 254 bp, Glycine max
  Clone ID: 700953643H1
ggcggagtttcagccttacttcgtcctcggggatttgtgggagttctttcgggaatggagtgcttatggcgcaggagtgccacttgtactgaatgacaaggatagtgttgtgcagtactatgttccctatctttctgggatccaaatttattcccagaatgtgaagccagctgtaaagtcaaggcaacttggggaggatagcgacagtgattttagggactcaagtagtgatggtagcagtgatagcgaacctg

SEQ ID NO: 76318 - DNA, 250 bp, Glycine max
  Clone ID: 700953653H1
cagtgaagtaaatgacaagtcagtttctggtacaactcaacttgtttgtgagagatgttggtgtgctattgaaaataacaaaggtattacatcattggactctatcagtcctggagagggaataaactctgttaataactctggcgctgcatcagctggctgtaatagcagcagagaagttacaaaagtgaaaaagaacaccgtattgaaagagcaacttgaattttctcaaagttcaaagagtagccaa

SEQ ID NO: 76319 - DNA, 251 bp, Glycine max
  Clone ID: 700953656H1
gtttcttcttctgttgcgttgtgtgtgagtgtgggcacggtaagatgcagaccattgctaggcgcttagggcagcaatcgctgaggccatcgacgtcgctcaagtccatctatccaatttccgatcaccattatggaatggatcacgagcgttacgtttctaccctcgccaccaagggagttggtcacctcgttcgtaagggcactggtggacgatcctccgtcagtggcattattgctacagtatttggg

SEQ ID NO: 76320 - DNA, 253 bp, Glycine max
  Clone ID: 700953657H1
gggttatcatatctccatttccatttcctctctctcagtttccaagaatcttaagctatgggaaagtcttacccaaccgtgagcgctgattaccagaaggccgttgagaaggcgaagaagaagctcagaggcttcatcgctgagaagagatgcgctcctctaatgctccgtttggcatggcactctgctggaacttacgacgtgagctcgaagaccggtggtcccttcggaaccataaagcacccctccgaac

SEQ ID NO: 76321 - DNA, 250 bp, Glycine max
  Clone ID: 700953673H1
gggtttattgccaaatgaagaaggctcacgagatacgcatgggatcagtcacatgctagcgctcctccttcttcttctctctccggtggtggtgactcgccggaagacaccaacttccaccttcaacgccgccgctgaagtgctcagtgataccctttgtttagaacaatgagagcagggaaagggagccaggaagaggatgagtacgaggaagaagagtttggttcttccaagaaacagggtacttcct

SEQ ID NO: 76322 - DNA, 251 bp, Glycine max
  Clone ID: 700953675H1
gtatttccctacctctcccttcaagatgcagatcttcgtcaagaccctcaccggcaagaccatcacccttgaggtggaaagctctgacaccatcgacaacgtcaaggccaagatccaggacaaggaaggaatccccccggaccagcaacgtctcattttcgccggaaagcaacttgaggacggccgtacccttgctgactacaacattcagaaggagagtactcttcacctcgtcctccgtctccgtggtg

SEQ ID NO: 76323 - DNA, 257 bp, Glycine max
  Clone ID: 700953678H1
gaaacaaggagaaagaaagaagatggcaggaaagaaaatcccagatgtgttgctgaattcaggacacaaaatgccagttataggcatgggaacttcagtggagaatcgtccatcaaatgagacccttgcttctatctatgttgaagccattgaggtgggttaccgtcattttgacactgctgcagtgtatggaacagaggaagccataggcctagccgtggccaaagccatagacaaaggccttataaagagtagag

SEQ ID NO: 76324 - DNA, 247 bp, Glycine max
  Clone ID: 700953685H1
cagaaaatggcacagtcctcctcgatcgtcgttactctgaggcagcacttgtttaaaaggaacctcacctctctcactctgcctcactctccttctcttccttccttctccttctctctgagaacaacaccccacactcctctctctctctccgcttccttctcttctcacacctccatggcccacacttcccttccctccgccgatgccggcatggacgctgtccagcgccgtctcatgttcgaag

SEQ ID NO: 76325 - DNA, 250 bp, Glycine max
  Clone ID: 700953689H1
gagaaaaagcatatggtctcccgtcacagatccaagaagtggtttcaaccgggaatccagaactttccacagcctcaagccccctctccgtctccctccccccaacgccgccgtctccgcagccgccttcgccctcttcctccgccgcaactcgcagttcccggactcctccaccgcctttatcgactctgccaccggccaccgcctctcctacggcgagctcctccaccgcgccaaaaccctagcctcg

SEQ ID NO: 76326 - DNA, 254 bp, Glycine max
  Clone ID: 700953693H1
cttagatcagattcgtttcaaaagggtggtacttggtagtgctagttcaaacttcaaagagctgatatcgattattgaaatttcaaattttcaatatttttcattggttgttggattgagatatatggccatagctcggttagttcggcaagcaaagcgccctcatgggttgtgggtgaagatgacagccgtgaccatattgggtctctgcttcatctttgtgtggggggtgttttcgtcttcttcaacctctg

SEQ ID NO: 76327 - DNA, 260 bp, Glycine max
  Clone ID: 700953701H1
gccaacgcaaacgtatcgagccagcctcacaagctagggttcttcaccgcgctccacccttcttccctctcccttcgtcccctccaattggaatgtgtttgtgacttcatatgctggtagttgacattttgaaattgtaactgtggtgggagcaataatatattttgacatcatcatggagatacagacttgtggcaggccgattgactccttgctagagaaagtgctttgtatgaatattctgtcgtctgattacttca

SEQ ID NO: 76328 - DNA, 249 bp, Glycine max
  Clone ID: 700953709H1
ggattacaccggcgaagatgttactgttgataacttttttgctgctttacttggaaataagtcagcactgactggtggcagtgggaaggttgtggacagtggtcctgatgatcatatatttgtatactatactgaccatggaggtcctggggtgctcgggatgcctgctggtccttacttatacgcggatgatctgattgaagtcttgaagaaaaagcatgcttctggaacatataaaaacctagtatt

SEQ ID NO: 76329 - DNA, 249 bp, Glycine max
  Clone ID: 700953713H1
atcatcacccgccccaccaccatcaccagccggtgacaatagatttccctcccgagaaacccaccaacaatattgcaactccgggtctcggcaacactgtccacatcaatttctgctcttcctgctcttacaagggaacagcagtgacgatgaaaaatatgttggagattgcatttcctggaactgaggttattcttgcgaattatcccccaacgcttccgaagcgtctgctaagcaaattggttccag

SEQ ID NO: 76330 - DNA, 252 bp, Glycine max
  Clone ID: 700953715H1
ccctaaacaactctttctcttcttccttcgctcgttgttctccctcgcgtagatcgacaatggcggagacagagacgtttgctttccaggctgagatcaaccagctcctcagtctcatcatcaacaccttctactccaacaaggagattttccttcgtgaactcatcagcaacgcctccgatgctttggacaagattcgatttgagagtttgacagataagagcaagctcgatgctcagccagagttgttca

SEQ ID NO: 76331 - DNA, 254 bp, Glycine max
  Clone ID: 700953719H1
caaatattcatggctttctttattctctccttcctcttccttcttcttgtttcatctgccactgcttgtgatcgctgcttgtatcaatccaaggcttcctatttctccaaagcttctgctctttcatctggggcatgtgggtatggctctttggcactagacataagtggtggacaccttgcagctggtgtggattctctcttcaaaaatggagcaggttgtggtgcctgctttcagataagatgcaagaaccc

SEQ ID NO: 76332 - DNA, 247 bp, Glycine max
  Clone ID: 700953726H1
agcacaaccacaacagatctccttcacaaggttcgccttttgacgacaaatgttccctctttatatgcgtgggacagtgtctgtgttacaatctcgagccgttttcattttggtcaggtctgtttccagagacaaatattcgtggagctttgaagagctgcggtgtagatatatacaacaactctggccaactctctagtcatatcttccccaactgtagcaggtgttcgtccttgctgttgtggtt

SEQ ID NO: 76333 - DNA, 249 bp, Glycine max
  Clone ID: 700953740H1
cacaccatgaaaccccttctccgcttcggaatcgccttcatcctcctcctccattcctccctcgcttctcatatcccctaccccaaagcaatttccgatttgaaggatacaattgtgaagggatttgggttcacggcggaagatgatgttacgattacggggttcgatcctcgagacgccgaggtagggcattccgtggagtaccaattcgacctcgaaatcgatcacaaggttattcccttcaagctc

SEQ ID NO: 76334 - DNA, 246 bp, Glycine max
  Clone ID: 700953743H1
tctactctcgggaaacacctctcaaagtccatcttcattgtggtgattggtggcaatgatatctttggttactttgactcaaaggatcttcaaaagaaaaacacccctcagcagtacgtggattccatggcttccacattaaaagtgcaactacagagattatacaacaatggtgcaaagaaatttgagattgctggtgttggtgcaattgggtgctgccctgcatacagggtcaagaacaaaaca

SEQ ID NO: 76335 - DNA, 250 bp, Glycine max
  Clone ID: 700953755H1
aatagaccaccgctaagcctcaggactccagctcctgttctgccctttgaccctcccattcataataataataagcccaaagataaaagatttccgtttgatgctggactccttcaaccaaaagattcaggagaccagcgtgaggcttctgcacttcgtgatgaggttgatatgctgcaggaagagaatgaaagtattctagacaagctcagactcgaggaagagagatgcaaggaatcagaggccagag

SEQ ID NO: 76336 - DNA, 249 bp, Glycine max
  Clone ID: 700953756H1
caaaaccttaaggttcttgtcaatttttcagtcttcaccacgaaattgttgtgcatctgagggaggacttcacctcatacttgcatttcaacaagtatcatagtagtagtactctcctacgggagttcctggcagcaacctatccttattaggtggagctcgacaccgggcattaaatcttgtacttgcatagcctcttaggagaaactagagtctagagatataatccttcaacggtttgcttggttt

SEQ ID NO: 76337 - DNA, 246 bp, Glycine max
  Clone ID: 700953760H1
gatcgatcttaatttgcgcttcccattttcttcttcctttcccccaaaagttaattaaacattaattcccgtccgttactgtaatagttacgatattaatctaattttggtggggtgagagatgttgatcaatgtgaagcaatccaccatggttcggccggcggaggagacgccgcggagggcgttgtggaactccaacgtggatttggtggtgccgaacttccacacgccgagcgtgtatttcta

SEQ ID NO: 76338 - DNA, 251 bp, Glycine max
  Clone ID: 700953763H1
cattcttcccatcattacttttctcatgcttgttgtggcaactaatgctgatgctgcattacctcctgcattttactggaagtccaagcttcctaccacaccaatgccgaaagccatcactgatttgctacaacctgattggaaggaagagaaagacacctctgtggatgtagggaaaggtggagtaaatgttggtgtagaaaagggaaaccaaggaccaggagatggcactgatgttaatgttggtggtg

SEQ ID NO: 76339 - DNA, 253 bp, Glycine max
  Clone ID: 700953764H1
ctgtaatgtgatgtaggacatctcctattttgataaagaaagagttggtgacttgacaagcagacttgcagcagattgtcaacgactatcccatgttataggaaatgatcttcagctgatattacgcaactcttgtcagggaactggagcaataattaatttgatggctttatcttggcctctggcattatctgccttggtgatttgttctattttatctgcaattttcctggtttatggccagtatcaaaga

SEQ ID NO: 76340 - DNA, 249 bp, Glycine max
  Clone ID: 700953770H1
atctcaccaaaggacaagacattaagaaaggagtgaattttgcatacgctggttcaactgcacttgataaggattttttagtacaaaaaagaatcaatatagaggaagctactttttcattgagtgctcaatttgattggtttaaaggactcaaatcctccctttgtacaagcaaagaagagtgcgataattacttcaaaaactcattgtttctagtaggagagattggtgggaatgacatcaatgcac

SEQ ID NO: 76341 - DNA, 246 bp, Glycine max
  Clone ID: 700953777H1
gaaacaaagaagtaaacacactgtttcatactttcgtttcgttcattcggcgtagaagcaaaagagagagatagagagagggaaaaaggttgctaccaacaacaaacaaaaacagtgttgcttgattccgcggtggcgagaaccgacgtgagcggcggaggagaggcgcggaacggtggtcttcagggttttctgacgtctctgttctcgaccctcggcggtgttttcgggtcaacgtttcaagaa

SEQ ID NO: 76342 - DNA, 247 bp, Glycine max
  unsure (1)..(247): unsure at all n locations
  Clone ID: 700953788H1
gaaagagagaaaagaactagctagctggagtctgagaactctagcatgtactagtactactcctacattcctccatcttcctttgtacnnnnnnnnnnnnnnnnnnnnnngcaagagcacaaagatggtgagagctccttgttgtgaaaagatgggtttgaagaagggtccttgggctcccgaggaagatcaaatcctcacatcttacgttgacaaacatggtcatggcaattggcgtgccctccca

SEQ ID NO: 76343 - DNA, 244 bp, Glycine max
  Clone ID: 700953790H1
gctttgattagtgtggcctagttgttgttttctcgatgagaaaggcttcttccactatgcattgcgcacttctgcgcttttgggttcccttgttgctgcttgctagcttcagctatgctccttctgtttcggccacaactgaaatttcagggaatgaagtgaacacagatgggaaggtgataaatgaagagttagcaaaaccaagtctaaaaggacatgatgaagaagcaaagttcaaaggatt

SEQ ID NO: 76344 - DNA, 244 bp, Glycine max
  Clone ID: 700953791H1
cgcttcctcaactgcacaacattcctattcaattccagaggaaagaatcatgagttgtttcagctgttgtgaagaagatgactaccagaaggcttctgaaagtggaggacagcatgtagtaaaaaactcaacaggaaatcatggaaatggtcgtgcatccgaaactgcaaagcagggcactcaagctgtgaaaattcagcccattgaagttcctgaattaccagtggatgaactcaaagaaatt

SEQ ID NO: 76345 - DNA, 247 bp, Glycine max
  unsure (1)..(247): unsure at all n locations
  Clone ID: 700953795H1
gaaccttcctccatagacgaggttgggttgtggtatggccgccacaaagagtcaaagaagatggtcaacgagcaaagaactcctttgatggttgctgccacctacggtagcattgatgtcatgacgttgatnctntctctatcagangctgatgtgaaccgatcatctggcctgacaaaagcactgcacttcactgtgcagcttcaggtgggtctgaaaacgccgtcgatgctgtgaaatgcttcta

SEQ ID NO: 76346 - DNA, 247 bp, Glycine max
  Clone ID: 700953806H1
ctctagggtttgatcagactcaagggtttaagccatgggaaaaaggaaggcaaaggcaaagcctcctccaaagaagcgaatggataagctcgataccgtcttcagctgccctttctgcaatcatggcagcagcgtcgaatgccgccttgacatgaagaacttgataggggaagctatttgcgggatatgccaagagagctttagcactaccatcacagctttatcagagccaatagacatatacagt

SEQ ID NO: 76347 - DNA, 248 bp, Glycine max
  Clone ID: 700953808H1
agaaagtgttcaaactggagccaaaagaagaggtggcgctggtggtctaaacaaagtttgtggtgtttctcctgaacttcaggcagttgttggtgagccggcaatgccaagaactgagattgtgaggcagctgtgggcatacataaagaaaaacaacctccaagatcctggtaacaaaagaaagataatttgtgatgatgcactgcgtttggtatttgagacagactgcaccgacatgttcaagatga

SEQ ID NO: 76348 - DNA, 245 bp, Glycine max
  Clone ID: 700953814H1
gcctcgaaatcggtgacgattacgctttcaattcctggatcccttattgctccgttgcacaccatgtccccaaaaacagaatgcctgaggctttctccctcttgagggaactcaagcttccggtttccggttacgccatggatatcgctctcgttcagttctctccggttcgggaaatcttctcgtttgtgctcggcaacaacagttgagataccagtctcaggagtgcttgccggtgtgctgga

SEQ ID NO: 76349 - DNA, 207 bp, Glycine max
  Clone ID: 700953820H1
atttcaagggctgaaacatctatctttaactgtattctccctttgtttcctcaccagttgattcaggttgcaaacatggcttttccagacccatccatgtcagtttctccacagaggaagatgggaagggggaagattgagatcaagaggattgagaacactaccaatcgccaagtcacattctgcaagcgcaggaacggcttgctc

SEQ ID NO: 76350 - DNA, 254 bp, Glycine max
  Clone ID: 700953850H1
ggaacaagcaagtgcttctaaaggactatgttaccggttttcccaaagaatccgacatgaatattgtcgaaagtaccataacattgaagcttccacaaggttccaatgatgtcttgctcaaaaatttgtacttgtcttgtgatccgtatatgaggaatctcatgaacaagcccgaaggccctcccaatagtcgtgcttacactcctggctctccattaataggatatggtgtgtctaaagtcctggaatctggg

SEQ ID NO: 76351 - DNA, 238 bp, Glycine max
  Clone ID: 700953863H1
taaagatatatatagtcattcacatagtaatcatcattaatttcagaagcgccaatatatgatgaatggtagtggcggttttatgatgctgacgcttaagtccggcggttttcctgtggaagtcaacacccaaaagctgaaacgcactgacagcagacaaacgggcgtgttctctgtggaaaggttcatcacatactcggtggttggtatgcagcgactcctttcattgaagataact

SEQ ID NO: 76352 - DNA, 253 bp, Glycine max
  Clone ID: 700953865H1
ctcgcgcagtgcacgccggacttggctgcctgagactgcaaactgtgtgttgccgatgcggtggccgagtttgtcaagtcttgttgcggagggagcataggggcgagtgttctgtttcccagttgcattgtaaggtatgagacgtatccgttttatcagcattcgggaacctctgcgccaacaatgattcagcgtggaagaaatattggaactgaagtgcttgtgatcgttgttgtcttgcttgtggttttgg

SEQ ID NO: 76353 - DNA, 252 bp, Glycine max
  Clone ID: 700953866H1
cagagatccttgagaagaatggtgtcaaattcggcgaggccgtgtggttcaaggccggtgcacagatcttctcagagggaggccttgactacttgggcaacccaaacctgatccatgctcagagcatccttgctatctgggctgttcaggttgtgctcatggggtttgttgaaggttacagagttggtggaggaccacttggtgaaggacttgacccaatctaccctggtggtgcttttgaccctcttggtc

SEQ ID NO: 76354 - DNA, 242 bp, Glycine max
  Clone ID: 700953870H1
attggggttgtttcaaatgcacaatcccttatgcatggtttccatcaacatatatataatgacaatatatacaaaatatataaaatatttgaattaaagctcataaacttgcacctcatttgttcacaactaattggattaggatttactaaaaaatcacatttcctcttggcaactaatcttccagtgagattacctatcaaatacgaagcttcatctagacatttttgtatatcgctgaa

SEQ ID NO: 76355 - DNA, 244 bp, Glycine max
  Clone ID: 700953871H1
gagaagctgagcttgttatcttctccgccatggattctttgttcaccaaaactggtctcaaacctaaggacatagacattctcattgtgaactgcagccttttttctcccactccttctttgtctgccatggtcatcaacaagtacaagctcaggagtaacatcaagagcttcaacctctccggcatgggctgcagtgctggtttgatatccgttgacttggcacgtgaccttctccaggttca

SEQ ID NO: 76356 - DNA, 242 bp, Glycine max
  Clone ID: 700953877H1
agatgtcaaggaattgggattccttgttaagcatatggagggaatggtgaggaaaatggatagatatgttactgtcactaggaatttgtacagtgagatggaggtgttgaatgagttggagcaagcagtgaagaagtttcagcataaccagcacgaggagagtaggagggcttttgagcagaagctcatgtggcagaagcaagatgtgaggcatcttaaggatgtttctctttggaatcaga

SEQ ID NO: 76357 - DNA, 241 bp, Glycine max
  Clone ID: 700953878H1
tttattttgcggcgactgaaatctgatgtgatgcaacaacttgttccaaaaatacagcaggttgaatatgttataatggaaaagcagcaggaaactgcttacaaggaagccattgaagagtatcgtgctgtttcacaagctcggatggaaaaatgttccaatcttaattcaaagagtgttcttgaagttcttcctcgacgacagataaacaactattttgttcagttccgcaagatagcaa

SEQ ID NO: 76358 - DNA, 237 bp, Glycine max
  Clone ID: 700953879H1
gcaattcactctgtacaattcttcgttcgttctctgcagttatatcctttttgagcttcaatggcggacgctgaaaccttcgctttccaggctgagatcaaccagcttctaagtctcatcatcaacacattctacagcaacaaggagattttcttgcgtgaactcatcagcaatgcttctgatgctttggataagattcgattcgagagcttaaccgacaagagcaagctcgatgct

SEQ ID NO: 76359 - DNA, 251 bp, Glycine max
  Clone ID: 700953882H1
ttcctatggctaacaagcaagtagtacatctttgggagtgcgacttatggagggagaggcgaatttgtccaagcttatgctcacttccccgaccgattgaaagagaatattcttccatggcctccaagcggattctaaaggaactcaaggacctctagaaagaccctccaacctcttgcagttccggtcccgtagcggaacatatgtttcattggcaagcaactaaaatggatcccccttatagcccttat

SEQ ID NO: 76360 - DNA, 246 bp, Glycine max
  Clone ID: 700953884H1
caaatcagcaacccggtttaaacatcataacagaatacataattggttacatgtatccagagcgtcctgtggctaacatgtgctttaaggtctacggctacatcagcatggttcaagcattaacctttttgcaagacttcaaacttggacactatatgaagattccaccaagaacaatgttcatggcacaggtggtaggaacaatcttatcagtatttatatacacagtaacagcatggtggttga

SEQ ID NO: 76361 - DNA, 259 bp, Glycine max
  Clone ID: 700953916H1
ctcctatactctatttttcgcgtcacataaacaaaaaaaataaactggggagaagcatgttgttgatgttgggactatgcttcctattgttctctgcatttccacttgcgttctctgagagatgccacccacaagacaagaaagcgttgctccaactccagaaggacctcggcaacccttatcacatcatatcctggaacgcaaaggaggattgctgcgagtggttctgctgcgttaagtgtgacgagaaaacaaaccg

SEQ ID NO: 76362 - DNA, 252 bp, Glycine max
  Clone ID: 700953920H1
gtagttcttcatcatagtcttaaacattaaaccttagcaaaactcaacaatgctagacatcaaaggctacctcgtactcttcttcctatggttcatatcaaccattctgatacgttccatcttcaagaaaccacagcgtctaagactcccaccgggtcctccaatttcaatacccttgctgggacacgcgccatatctccgttcactgctccaccaagcattgtacaagctatcactgcgctatggaccctt

SEQ ID NO: 76363 - DNA, 247 bp, Glycine max
  Clone ID: 700953922H1
aacaataaaagaccatgtcggtgaaggagtgcgagcaccacaaggggaagaagaggaagatcttccggcaagtgttctggtgcttagtggtgttccttttcatcgtgctggtcacaattcttttgatatgggcaatccttagacccaccaaacccaccttcacgctccaagacgtcaccgtctacgccttcaacgccaccgtggcgaacttcctcacttcgaattttcaggtcacgctcatctcgcg

SEQ ID NO: 76364 - DNA, 249 bp, Glycine max
  Clone ID: 700953926H1
ctagcacacaaaacttgctatagcagtaagctataactcatttgaggctctgtgagaattgagaaatggctaaagatgttgaggttcaagagcaaggaggagagtactctgccaaagactaccatgaccctcctccagcacctttgttcgacccagaggagctcacacagtggtccttctatagagccctcatcgctgagttcatagcaacccttctcttcctttatgtcactgtgctcaccattattg

SEQ ID NO: 76365 - DNA, 252 bp, Glycine max
  Clone ID: 700953929H1
gaaaaaagtgctatttttttacttcttttcttgagactttctgtgctgtgctgccatgggtgtgacacagttgaaccccacttgctcaaaacctcgtcttcactcatctcagctctcttttctatcaaggactcttcctagacatcgccactgcacttttgcgccacttcatagaactcaacaagctaggatttcctgttctgttgcaccaaatgaagtgcaggtgccaactgtgaaaacccaggatcccaa

SEQ ID NO: 76366 - DNA, 255 bp, Glycine max
  Clone ID: 700953930H1
ctcagaaagaagagagagaaagggaagaaagagaaagaacaaagaaggggaaaaataactgataactgagataacaataccatagatatagagagatagttccgagctccaattcccagaaaataaaaattaaaactttgcttcgctttttctcttcattgtttttcttcctcttctacccctttgatctcatgcaatctctcctcatggatccctttgatttgattcgcaaagggtttggctgaagctatctgg

SEQ ID NO: 76367 - DNA, 257 bp, Glycine max
  Clone ID: 700953931H1
ggttcgagaaggaggctgctgagatgaacaagaggtcattcaagtatgcctgggtgcttgacaagctcaaggctgagcgcgaaagaggaattaccattgatattgctttgtggaagtttgaaaccaccaagtactactgcacagtcatcgatgcccccggacatcgtgactttatcaagaacatgattactggtacctcccaggctgattgtgctgtccttatcattgactccaccactggtggttttgaagctggt

SEQ ID NO: 76368 - DNA, 246 bp, Glycine max
  Clone ID: 700953938H1
gactatccttatgcttctgatgggctagagatatgggatgccatcaagtcctgggtgcaagaatatgtctcattctactacaagtcagatgaggaactccaaaaagaccctgaactccaagcttggtggaaagaacttgtagaggtgggtcatggtgatttgaaagataagccatggtggcaaaagatgcaaactcgtgaagagttggttgaagcttccgctatcctcatatggattgcttcagcc

SEQ ID NO: 76369 - DNA, 244 bp, Glycine max
  Clone ID: 700953940H1
gtctgtatttgtttttgcctacccttacgagagatgtcaagttcaaggtttcttccttccaaccaaggttaagtcacaaaccatatataattgccttctttgtgacgaaagcattatagccaacggtttgtcaaccttcacccgccctaccgtttaagcttttagacagtgttggaattggatatgcccccagcctcatatcttcggcatcactcaaattctcaattaaagataacaactgaga

SEQ ID NO: 76370 - DNA, 248 bp, Glycine max
  Clone ID: 700953944H1
gttggttggacaggttgtggaggtttcaacttccaaaactggcaagcatggacacgcaaagtgtcactttgttgcaattgacatcttcactgggaaaaagcttgaggatattgtcccatcttcccataactgtgatgttccccatgttaatcgcattgactaccagctcattgacatctcagaggatggatttgtaagatttcagttgcacttgtgtcccttattcattccccttttcttttaagcta

SEQ ID NO: 76371 - DNA, 251 bp, Glycine max
  Clone ID: 700953946H1
tgatcttcttgaagatctaatatgtttcattgatgaaacttgcgatgagggtgccatccttgtatttctacctggaatgtctgaaataaactatttacatgataagttggtggcatcttcccaatttggtgggccatcttctgaatgggttattcctttgcattcagcagtagcatcaagtgaacagaaaagggtatttttacgtcctccaggaaatatacgtaaggtcgttatagcgacaaatatagcag

SEQ ID NO: 76372 - DNA, 246 bp, Glycine max
  Clone ID: 700953953H1
tcacaaccttaaacctttctttcttgtaaactttattgattgattctgagaatagaactaagagggtatagacatggctagcgcaattgcagcttcttttttggttctgcttctggctttccccactgtatttggagctgaccatgaagttggtgacactagtggatgggccctcggagttaattacaacacctgggcctctgggaaaactttcacagttggtgacactttggtgttcaagtatga

SEQ ID NO: 76373 - DNA, 246 bp, Glycine max
  Clone ID: 700953958H1
cgaaacaaaaccccatcactgaactgagaaagaggctaccaacagacaccacctattttatgcctttcttcttcttctctcgacaatggtggataaaccaatgagcattcatcgaacccggttcccattctcgatcaccaagctcctcttctggtcgcttatcctactcagcttcattgtgctcttcttcttgggatctcccccgtcctccgcttccccttcccaccgccggcgctccctccgcgg

SEQ ID NO: 76374 - DNA, 249 bp, Glycine max
  Clone ID: 700953961H1
cgggatttattcaggtcaacagtgaaatagcaatgggtgcaaccatttccccagtttctggataccgaaactctcagttcgatatcagtatccttatctggaaggatccaaaagagggacactggtggatgcaatttgggaatgactatgtattggggtattggccttctttcctgttctcatatttggctgacagtgcttccatgattgagtggggaggtgaagttgttaactctgagcctgatggtc

SEQ ID NO: 76375 - DNA, 252 bp, Glycine max
  Clone ID: 700953967H1
ttcttcttcgcgaaattcgtatgcgaagaaggaggtaggaattcacgctcctgcattctcagaccgttaggattccaattgtgcctaaatatatcttgtattctgcgaagaagaagctgagagaggttgaagatgggaggagatgattttgattggaatactgatgatgagcttgaaattgagaactataactcttcatcttcgtgtttaacccttcctaatggggatgctggagaggcaagctcgtctgca

SEQ ID NO: 76376 - DNA, 247 bp, Glycine max
  Clone ID: 700953969H1
gtcttctcgaggttcctccgaatcagctctacgcagctgctgcattcgtgattttcacaacgctgcttcttctctcaattcggttgttcaagcgtgcgaagtcaaacactgttgtgttggccgggctcagcgggagtggaaaaactgttatcttctatcagcttagggatggctctactcatcagggtactgttacatcaatggagcctaatgaaggcacttttattcttcacaacgagaaaacaag

SEQ ID NO: 76377 - DNA, 247 bp, Glycine max
  Clone ID: 700953976H1
gacttttcttcaacaagaatgctgcaaaatgcttttagaatgtctctcagaggactcagtatgtccactcctccaagtggtttcttcaatgccatcatgtagacttattaaagaatcattgcagaggagaatttccatgaactttgactattatatcagtgcgagtactgactttgtgttattagatgagacaactttaatcaatatcattaagcatccagatctgacagtaacgtctgaagagaaa

SEQ ID NO: 76378 - DNA, 251 bp, Glycine max
  Clone ID: 700953978H1
gggaaagaaacctaatacaataccctttttctcagaaatcacactctcacacccacttcccccaattcccattctctctgaattacgagggttttcgaaatcgaagagtctctgatcgatttcgattcggaaaaatggcgtcttcgagcgcaaccggtgctggatccaccgatcccacagctgccagaagaaacaccaagcgacccaagtattcaaagtttactcagcaagaacttccagcgtgtaagccg

SEQ ID NO: 76379 - DNA, 253 bp, Glycine max
  Clone ID: 700953979H1
ggagaatgttttgcctgttctacagagttatggtattgctgcaatctctccattttctcacagactgagttttgacaacttgcctatggatattcaacacctacgctgtaaagtcaacttccaagctttaacctttgttcctcatatcagagcacttggagatgcccttatcagccgccttcgctatcctgaaggctcagctggagaaatgggctccaactaccttcaagaggtcactggtgcaggtgctagg

SEQ ID NO: 76380 - DNA, 244 bp, Glycine max
  Clone ID: 700953985H1
tgagaacgccgttttgtctgagtttctctgccaccaaacacctccgtcaaatacaggcgcggccgtccagatcttgcatcaagatggcgtcaactaaaacggtggagcacattgtcctgttcaaggtgaaggaggaaacggagccgtcaaaggtgagtgacatggtgaacggactcggctctctggtgtcgctggacccggttctccacctcagcgtgggcccactcctccgcaaccgatcctc

SEQ ID NO: 76381 - DNA, 243 bp, Glycine max
  Clone ID: 700953988H1
gagaaaaacagatagtgtgggagagagaagagcggaagagaaaatgacgaccaggttcaagaagaacaggaagaagagaggtcacgtcagcgccggacacggccgtatcggaaagcaccgcaagcatcccggaggtcgcggtaacgccggtggcatgcatcaccaccgtatcctcttcgacaagtaccatcctggtttcttcgggaaggtaggcatgcgctacttccacaaacttcgcaacaa

SEQ ID NO: 76382 - DNA, 247 bp, Glycine max
  Clone ID: 700953992H1
gctattgcaagactcgtgcttaaaaatgtccagcagggagcagcaacaacatgctatgtagcattgcacccacaagtgaagggaactagtggcaagtatttttcagccagtaatgtggccaaaacaacctcacaggggactgatgctgatttggcaaaaaacctatgggatttcagcatggatttgaccaagtaaaaaacccaattgttatttgtcagcagagatagcatcatgcactcttattaaa

SEQ ID NO: 76383 - DNA, 256 bp, Glycine max
  Clone ID: 700953996H1
cttgaaaggaccaatggccacccctattggaaaagggcatcgttcattaaatcttactctgagaaaagagctcaatttgtatgccaatgttcgaccttgctacagtcttccaggctacaaaactcggtatgataatgtcaatctaatcacaattcgtgaaaatacggaaggcgagtacagtggacttgaacatcaggttgtgagaggtgtagtagaaagtctcaaaatcattacacgtcaagcaagtttaagggta

SEQ ID NO: 76384 - DNA, 261 bp, Glycine max
  Clone ID: 700954006H1
tctctcattccccatttcctcacctccttcaaccgctgctaaattctagggttccgaaatggacgctggcggaaagatcaagaagggcgccggaggtagaaagggcggcggcccaaagaagaagccggtttcaaggtccgtcaaagccggtctccaattccccgtcggaagaattggccgttatttgaagaaaggaaggtacgctcagcgtgtcggtaccggtgctcccgtatacttggctgcagttctcgaatacctagc

SEQ ID NO: 76385 - DNA, 252 bp, Glycine max
  Clone ID: 700954013H1
gtcttatagagctcccaatctcctacatcgcttgttaagtttactcaagaacgtgcggccaggatcagatctcacacacttccaactgccagctgtgtttaacttcccaaaatctcaacttcaatgctatggtgaatcagtgtactgcacatcttcaaacttgctgagcaaatgcaacaatgggcagagtccactggacaggttcacatcagtagtagcatggagcatatctaccacacgccccacatcttt

SEQ ID NO: 76386 - DNA, 254 bp, Glycine max
  Clone ID: 700954031H1
cttctatattacttcagggtctttgagcgacagataggttccaataaatactcagtctttatcgtgttctccatattaacttcactactgcttgaggtccttgctgtagcacttttaaaagatcctacagcaaacctagtcactcctggaccatatggccttatatttgcttcatttgtaccctttttctttgacattccagtttcaacacggtttcgtgtgtttagcttcctcttctcagacaagtcattcat

SEQ ID NO: 76387 - DNA, 263 bp, Glycine max
  Clone ID: 700954066H1
ctcaggtcctggaattgttgatggattaaaattgaagggtttacctcgtggtaggggtctattactgcttgctgaaatgagctcagctggtaaccttgccaagggagattatacaacttctgcagtaaaaattgctgaggatcattctgactttgtaattggcttcatctcagtcaatcctgcatcatggccaggggcaccaataaatccttctttcattcaggcaacccctggagttcaaatggtaactggtggcgatgctt

SEQ ID NO: 76388 - DNA, 252 bp, Glycine max
  Clone ID: 700954096H1
gcttggaggcattgacaagcgtgttattgagagatttgagaaggaagctgctgagatgaacaagaggtctttcaagtatgcctgggtgcttgataagcttaaggctgagcgtgaaagaggaatcacaattgatattgccttgtggaagtttgaaaccaccaagtactattgcacagtcattgatgcccctggacacagggatttcatcaagaacatgatcactgggacatcccaagctgactgtgctgttct

SEQ ID NO: 76389 - DNA, 272 bp, Glycine max
  Clone ID: 700954107H1
gaaagaatgaaggcattgcaggaattagttcccagcatcaataagacggacagagcggcgatgcttgatgaaattgttgactatgtgaagttcctaaggctccaggttaaggtcctgagcatgagtagactgggaggagctggtgcagttgctcagcttgttgctgatgttcccctttctgcagtggagggggatcaggacatagaaggtgtatccaatgagcaagcctgggacaagtggtccaatgatggcacagaacaacaggtggctaa

SEQ ID NO: 76390 - DNA, 263 bp, Glycine max
  Clone ID: 700954111H1
gtccctttctctctctcaaactaaaaactaaaacccattttcttctccaaaaccttcgactttcttttctctaaccgaaacgcgcttcgcagcacttcttctccactctctcacatctctgacccattgcgctatatttacgcactgtgtcaaattcccccataaaaccggtattgattctccctcagatcaaaatagagttctgagaggtagcagtgttactggcaatgaaaaatcttctgtagcttctattccgcactcaa

SEQ ID NO: 76391 - DNA, 271 bp, Glycine max
  Clone ID: 700954121H1
cttcagcagcaaagggaaaagcaaacagagtgtctaatcgaagatagaagaagagatggctaaatctccagaaactgaacttcccgtcgaagctttcggttgggctgcttcagacacttctggcacccttgcaccttttcatttctccagaagagaaaatggcgttgatgacgtcactctcaagattctcttctgcggggtttgccactcggatctccacactctcaaaaacgactggggtttcaccacttaccctgtcgttcctgggcat

SEQ ID NO: 76392 - DNA, 263 bp, Glycine max
  Clone ID: 700954127H1
gaggaacttcagcaccatcttcgtgggtctcatggcgtgttttgaggcctatggctttgcttcggggagaatgtttagcggcggttatgttgttattgtgtccaccgccgcggtcattctcttcctcgtggcaacgctcacgtgggacgtctcgcgtaaggccacgtgtgcctttcacagagaccacgctgacagccaagaggatgtgtgcaagggaggtatctgttggcacggcgtcgcgccgcgatccccagcctctcagg

SEQ ID NO: 76393 - DNA, 264 bp, Glycine max
  Clone ID: 700954128H1
caaggctctaggtgattatacgaggatgatcaatgatttttcgacccttcctttggaggcgagggagggcaaggttggatcatattggtaccatgaggatacaaatgcattttttgatgatgtggaccattacaggatgatcaaggctatgtgcaggctttcgtgcaatgtatgtgacaagattgaggatcaaccacaggatgctgcttcaaggcggcgagcaaagtttaggaatatagggcagttgaagggtcatttattcca

SEQ ID NO: 76394 - DNA, 269 bp, Glycine max
  Clone ID: 700954130H1
gagcattcaccattttcttgtggtttggtttcctagagacactaagtactcccatggaacaaaacaacaaaagccttgtttcttctaaattcttatgtttatgtttgttgatcaccttgatcagcattattgttgctccacaagcggaagcagcacgagcatttttcgtgtttggcgattcgcttgtagacaacgggaacaacaatttcttggccaccacggcgcgtgccgattcatatccttatggcattgattctgcatctcataga

SEQ ID NO: 76395 - DNA, 275 bp, Glycine max
  unsure (1)..(275): unsure at all n locations
  Clone ID: 700954134H1
gaaactctttatatatttattattgttactgacccaaacaaactcaacaaaaccatgatcccaaacgntgaaatccctcactgggacgccgacggaggaggaccactctctccgttcatctcttcttcttccaangctgacaagtgctcattattattctccctccgaccatttccgaatgttccagtncaaggtccggatctgtccacgtggcaggtcccangattggacggagtgtccctacgcccaccctgccgagaaggctcgcngccgtg

SEQ ID NO: 76396 - DNA, 271 bp, Glycine max
  Clone ID: 700954135H1
aaggaacaggagggttcattgagccgaaatggctagcatatggtgagataatcaatggtcgttatgcaatgttgggtgcagttggtgcaatagcacctgaaattctaggcaaggctggtctgatccctcaggagacagcactcccatggttcagaacgggtgtgttcccacctgcaggaacctacaactactgggcagactcctacacattgttcgtgtttgagatggcactgatgggatttgcagagcacagaagattccaagactgggc

SEQ ID NO: 76397 - DNA, 268 bp, Glycine max
  Clone ID: 700954139H1
gtttaacctcaccaagaacatcatctaccgcgccgcgttcgggtcgagttcccaagaaggccaggacgagttcattaaaatactgcaggagttctccaagctctttggcgcgtttaatattgcggattttataccctatctcgggtgcgtggatccacaaggtttgaactcgagactcgctagggcacgtggcgcgctcgatagcttcattgataagatcatcgacgagcacgtgcataagatgaagaatgataagagcagtgaaatt

SEQ ID NO: 76398 - DNA, 268 bp, Glycine max
  Clone ID: 700954140H1
tgaccggagtggtcatggttaccaagggaggtggatgcggcggcggcaagcgggcgagggcggcgcgaaccgccgaggaggaagaagagcagcagaaccagctgtcgctggtggcgcttctgttggcggccatcagaaaatcgatggtgtcgtgcagggtggacccacccgacgatgtaatctccaccgtccatcacatggagatcggatggccaaccaacgtccagcacatcactcatgtcaccttcgaccgcttcaacggcttcct

SEQ ID NO: 76399 - DNA, 276 bp, Glycine max
  Clone ID: 700954147H1
gtggggcaggcctcagacatcgaaacctgagtcagatggctctgatcaagcaaggcagcaggcttctgtggctcatagtggattgttgcctcgggcagtgatatcacagcagcagaaccaggaccaaacacaaggaatggtttactataacaatccaccaggaccaccacctcttcagcaggaaagaagctactacccatcaatggatcctcaaagaatgggtgctcttgttgcatctcaagatggtcctcctggtgggccttctgggtcagggga

SEQ ID NO: 76400 - DNA, 267 bp, Glycine max
  Clone ID: 700954152H1
ctctttcttcttttttagctatccctctcttgaaaaatctagatctcgttcttccttgatctacgttacgcttttagtgaccggatctgtatggatctgaaccagatctacacgccgatggtggttttggcctggtctttcatagatctgatgcatggaggctcagatctactgtacagagatactgtagataatcgatgagaagaacgcagatccagccgcttccgcttgttcgatcgctacagacgcttgtatcggattattcat

SEQ ID NO: 76401 - DNA, 266 bp, Glycine max
  Clone ID: 700954153H1
cgaaatagttgagcgggaaataagagggttcaatacggtggaagaggccataaaacagaagaaactgttcatcctggactaccacgatttgttgttgccattagtaaaggatgtgagagaacttgaaggcacaacgctatatggatcaagggcattgttcttcctaacccgcgaaggcacattgagacctctggctattgagctgactcggccaccaatggacggaaaaccgcaatggaaggaagtcttcacgccttgctggcact

SEQ ID NO: 76402 - DNA, 266 bp, Glycine max
  Clone ID: 700954154H1
catcaaactctctttccagaacttgttccataactgacaacctgatcttcatgaatttgagaagtattgccacacccactgtttcctgtaaagcgggaagcaacaacaatttccttttctggattttggtttgcttcttgctaccaagttttctgggagctcctgaagtatatgctcatttccaattgataaagctcatttggggtgtgatcttttggcaaggcacacccatttgtggtgtcattttctgaagtttccttgttttt

SEQ ID NO: 76403 - DNA, 265 bp, Glycine max
  Clone ID: 700954155H1
cgttcgacgaggattttgaagaccgttgggttgtgtctcagaaagatgagtacagtggtgtctggaaacatgccaagagtgagggacatgatgattatgggcttcttgtcagtgagaaagcaaggaaatatgctatagtaaaagaacttgatgaggccgtgagtctcaaggatgaaacagttgttcttcagtttgaaactcggcttcagaatggccttgagtgtggtggtgcatatctaaaatatctccgaccacaggaggctgg

SEQ ID NO: 76404 - DNA, 272 bp, Glycine max
  Clone ID: 700954160H1
agtaactccaactccaagtcacattggtgacaaagttagaaacaaggagaaagaaagaagatggcaggaaagaaaatcccagatgtgttgctgaattcaggacacaaaatgccagttataggcatgggaacttcagtggagaatcgtccatcaaatgagacccttgcttctatctatgttgaagccattgaggtgggttaccgtcattttgacactgctgcagtgtatggaacagaggaagccataggcctagccgtggccaaagccataga

SEQ ID NO: 76405 - DNA, 273 bp, Glycine max
  Clone ID: 700954161H1
ctgagcttccctaagaatgggatgagtaatatgaaattctggagtgttttaggctcccacatgatatcccaaagccagtctggcgctacccaatgtcatacatcagtttccacttctgggcactacagggtcagtaccagaacgatttgcgcggtttgatattcgacaaccagacaccagaccttccaaagatagcgggtgaatacatcttggaaaaagtgttccaaattgatgtcaacagatcaaagtggataaacttgagtgtgatcttca

SEQ ID NO: 76406 - DNA, 276 bp, Glycine max
  Clone ID: 700954164H1
cgttaaactaaacgttgtttccactttattggtgtgaagcacttgggacaaagcggttagcttcagaagagttggtttatgattgggacaacaagagattgaatataggaactacaaatgatcagcatcaaatatatacaagtttagagcaagtggtagggacaggtgcagatccaaaacctggactcttcccctcttatcccagcatgaactcaactacagctccaagtttgccattggccacatggcttccacctcaagcttctgcacctgccc

SEQ ID NO: 76407 - DNA, 266 bp, Glycine max
  Clone ID: 700954168H1
aaataattattttaattttgtaatctcattgtttggttctggttctcaggaatggtagatttgaggtgaagacgttccacattggtcaggtcccgatctcacgatggggaagtcaccaggaaaatggatcaaaactgtactgttcgggaaagtcatctaaatcaaatatttcaaaaggcagagagaagcttgttaatcaaaaaggagtagtagttacctccaaggtgccagaaactggtttggctttagaaccaacctccgatact

SEQ ID NO: 76408 - DNA, 267 bp, Glycine max
  Clone ID: 700954176H1
ctaatttctccaacatttccccctttttctaattaatcagatctgcaaaaccctaatttccctaaccctaacgaaacccccaaatccaatggcttcgattcaacgcccggcgagttcgggatcgtcggagggaggagatccggtgatgtacgagaggaagaggaagcgtatggagtcgaaccgcgagtccgcccggcgatcgcggatgaagaagcagaagcagctcgaagacctaaccgacgaagtgagccgattggaaggcgagaa

SEQ ID NO: 76409 - DNA, 272 bp, Glycine max
  Clone ID: 700954178H1
gcttcatcaacgacatcttcgagaagcttgcccaggaatcttctagacttgcccgctacaacaagaaacccaccatcacttcgagggaaattcagaccgcggtcaggcttgtgctgcccggtgaattggctaagcacgccgtctctgagggtaccaaggccgtcaccaagtttactagctcttaaactgttgtttatgggcttgttgcacgcccaagtctgttctatgtatctggacacctatgttcagattttaatcaattgtaggggtgg

SEQ ID NO: 76410 - DNA, 272 bp, Glycine max
  Clone ID: 700954179H1
aaaattgttctctcaccgtgaaagagagagagaggttaggctatggctgatgagagcgttgttgagtccccagtgaagaggcagagagatgatggtgaagaaaatggtgtctctgtttccatggacgcggagggtggcaaagaccctcttagtaacggtttatcatctgtgattcctgggtggttctctgaaatcagtgcaatgtggcctggagaggctcactccttgaaggtggaaaagattttgtttcaaggaaagtcagaataccaaaa

SEQ ID NO: 76411 - DNA, 263 bp, Glycine max
  Clone ID: 700954184H1
gagcaaagaaaccagtcctcctctccatggcatattgatatgtatatatgttggtagttatgtatgcatgtatatattgggtgagcaatagctagctagcattatattaaaaatgaaactggctacccctaaaataattagaaagatcccaagccctctgaagttggtatccagaagctcaagttcagcagcaaagaagccactattggtgtcaggatcaggacaaccgtcgtcgtcgtcggatggaagtagcaagcaacagg

SEQ ID NO: 76412 - DNA, 263 bp, Glycine max
  Clone ID: 700954185H1
gaaaggcgatggacctcggaacctatgaagtgccagaaggagtggacattctaggaagatacgatgcagagtttgcaaaaatcctcacaaaagacgctttgaaattcgttgctgagctgcaacgtgagttcaggagcgatatcaagcatgcattagagagcagaagagaggcaaagaagaagtacaatgaagggactcttccggggtttgatcctgccaccagtcacattagagaccaggagtggctgtgtgcacctgttcca

SEQ ID NO: 76413 - DNA, 266 bp, Glycine max
  Clone ID: 700954191H1
tttcaaggagagagagaaaatatagcacgccgaaaaacacgctcccacttgtaacttagtataacgacctccaacaactgatacatacaatctcctttccttcgtgttggacaacaacaatggcggcgaaatctagttcgagttcgacaacaaacgtggtgactctgaaggcggcgtgggttctcccgcagcgcacgcagaacatccgtgaggtgtacgaggtggggcggaagttggggcagggtcaattcgggactaccttcgag

SEQ ID NO: 76414 - DNA, 271 bp, Glycine max
  unsure (1)..(271): unsure at all n locations
  Clone ID: 700954194H1
caactacaaaggttgctgtaggagataagatattgaagtagtgctaagtgcctaacacctgcagtgaacaatggcctctgcatcagcatctcttctcaagtcttcacttgtncttgacaagtctgagtgggtgaagggacaaacacttcgccaaccttctgctgcatcagttgtgagatgcaaccccaccaccccatcaggcctcaccatcagagctggttcctatgctgatgagctcgttaagaccgcgaaaacagtggcttcaccaggg

SEQ ID NO: 76415 - DNA, 271 bp, Glycine max
  Clone ID: 700954195H1
taattttcctacaggagcatatcctcactggtggtcatggactcatggtgcaaggatatgatcctgttgtaaaagctcttgcaaatgatcttgatatacgcttgaaccacaggtttgcctgtataatttattgcacgacttagctacatgatttgatgcataatcatttttcataatttattgtggaattaattattatcatttttcgtcacttttatcaacaagaacgcataccaattttttctgttacctcctcctctcataggggtag

SEQ ID NO: 76416 - DNA, 271 bp, Glycine max
  Clone ID: 700954196H1
tctcatcactacctctgcatttttctctcgctctctgccttccatcaccctcgccatttcccttcccaagatagtagaagatggcagacgctgaggatattcaacctcttgtttgtgacaatggaacaggaatggttaaggctggttttgctggagatgatgccccacgtgctgtgtttcccagcattgtaggtcgtcctcgtcacactggtgtgatggttggcatgggccaaaaagatgcatatgttggtgatgaggcacagtctaagag

SEQ ID NO: 76417 - DNA, 254 bp, Glycine max
  Clone ID: 700954211H1
ggttcttccatttgactcttgttctgaacgacttttcaagagaatcaaaccatggcagtgaaagtatacggtccccactgtgcttccaccaagcgggtgctggtttgtctggttgagaaggaagtcgaatttgaggttgtccctgttgatgtcactaagggggagcagaaggatcctgagtacctcaaactacagccatttggagttgttcctgtcatcaaagatggagattataccttatatggttacacttt

SEQ ID NO: 76418 - DNA, 254 bp, Glycine max
  Clone ID: 700954212H1
ctgcacatgatgtatcagatattctggtcacaagagcaactacagtggttgatattattcaaaatgtaatagacaatcttcatgcgactaaggacatacaagtagctagtttctatcttccagacgatatcaagggagccattgaaaaggctgaaaaattttccactcaaactgattatattaagaaccaatcagaggaaacagcaagaatctcaatggaattcctgggcgctataagtgaaagtcttatcatt

SEQ ID NO: 76419 - DNA, 256 bp, Glycine max
  Clone ID: 700954219H1
gagagtcgagagaggagaggagagaaatttgaagaaacagcaaaggaaaatttccaattttgatgtcttctcttttactgtatgtaatgtgagtcatgtcacttcccaacacctaccactgataattccatgccttcttcttattaaccccaccacttgcctctcagaatttcatgtgcctcatcttgtgttctccacttccctccaactgcaccacaacagggcctggttagtgccattgctgtgacctcctcct

SEQ ID NO: 76420 - DNA, 233 bp, Glycine max
  Clone ID: 700954220H1
ggacaatataagggacgttattccttttcctcgaacacctggctcggctgagttttagaccttgcagatataagcacttcacttcacattcatttgtacgattcaaactgtattttaggcaataaagtatcttgagtctttccttttcttctttttgttttgaaaaagaaaactgcttgcttctaaatgaagtatttatacattatgaatttagtagaatggaattttgaggc

SEQ ID NO: 76421 - DNA, 252 bp, Glycine max
  Clone ID: 700954222H1
tggatacttaaatgatattttggccgaaaatgcaattgtggatgatactgatctgaatcctttggagtttttagcctccctgttccctggttttgcagcagaaagccttgcagaagcttactttgctaatagatgtgatttacatctgaccactgagatgctcaatcagttagagcttcaagttgatggtggtttcaatcagaatctgaattcaaagactttgtctgctcccaatctcagtgcaatggacta

SEQ ID NO: 76422 - DNA, 253 bp, Glycine max
  Clone ID: 700954223H1
catcaacttgtcatcttataattgaattgtgtatgtaacaaaaaaaataaaattcagaagagaagagggttgtgagtgtgactccgctgagggatatgacgccagagagggttttcgggaagatgggacatttgcagaagttgttggatcggtttttggcttgtaggcctactgggttggctaagaatagcaggatggttttgattgcgctgtatcctgtggttaaggagagttttcagttgtatgctgatat

SEQ ID NO: 76423 - DNA, 256 bp, Glycine max
  Clone ID: 700954234H1
tagggtttcttcctccttcaaacaccatcgcagattcttcgctcctttccattgattcaaaacatggctaccaccaccactcctgctagatcttttctccaagtcgccgctacagaggaggccgcgccgcctctcagagtcgttcagattgaaggactggttattctgaagataattaagcattgtaaggaccactcgccttctttagtcactggacaacttcttgggttggatgttggcagtgttcttgaagtta

SEQ ID NO: 76424 - DNA, 254 bp, Glycine max
  Clone ID: 700954235H1
tatttttttggatatttcctgtatctgctgtgtctgtctgtcccatttcatttcacctctctttcctaacccccaacgccacgccactgtcactttctccaccaatgtgcaccaatagcaataataagaatcatctctcacttctccattaaaattaaaatccaatctaatctgggtttccctttctcccatcagaggacaaagcttccaactttgcgggattcgtatttgttgtttcagtgctgtgatgggga

SEQ ID NO: 76425 - DNA, 251 bp, Glycine max
  Clone ID: 700954252H1
gtcatcgttgggatctccatacgccggatctgctaaaatacgcttgatccatatgggcctcctcgaccacttgtgggacgacaccgtcgccggcccaaggccggaaaacggtctcggcaagctccgaaaacaccacaccttcactttccgacctagctccggcaaggaaacggagggcgggagcgtgagatcgtacggagacgaatcgtcggaggaagcgacgagagtgacgcgtagtatcatgatcgtga

SEQ ID NO: 76426 - DNA, 249 bp, Glycine max
  Clone ID: 700954255H1
gcttctggtgatctcgttttcttacagtgctctcttccccctttctctctcctctttatctctctcttccattgctcctccacaagcaacgccgcgcgaggtcaattttcgcaatcgccatgactgtgatgactcctgctcccattgaccagcagcaggaggacgaggagatgcttgtcccgcacacggatttggctgagaataatcaccaacctatggaagttgtggctcaacctgatgctgccaaca

SEQ ID NO: 76427 - DNA, 248 bp, Glycine max
  Clone ID: 700954258H1
cacattccatcaccaaagcagtgtagttttccgttgtcactgccatggctttcaaaaaagtactattccaatatttcactctggctttgtgtcttgtcttcgcattttgtgcttttgagggcaatgctcgcactctcgaagatgctccaatgcgtgagaggcatgagcagtggatggctatacatggaaaagtctacacgcactcttatgagaaagagcagaaataccagacattcaaagaaaacgtg

SEQ ID NO: 76428 - DNA, 248 bp, Glycine max
  Clone ID: 700954261H1
gtttttgccttcccataggaaaagcaaagattgagagggaaggaaaagatgtgactattacagcctattcgaaaatggttggctttgctctcaaggctgctgagacactggcaaaggaaggaatcagtgctgaggtcattaatttgcgttcaatccggccacttgatcgatccacaatcaatacttctgtcaggaaaaccaacaggctggtgacagttgaagaagggtttcctcagcatggcgttggc

SEQ ID NO: 76429 - DNA, 248 bp, Glycine max
  Clone ID: 700954263H1
ctctccctctcccacgcgccaccgccagaaagaggattttccatttctgccctccgattgcatgccgctcatccatggatcagtcttctggcctgaatctggaagatctgaaatgggaccattccttcgtcagagaattgcccggcgatccccgccgcgactcctttccccgtgaggttctgcatgcttgttacacccaagtctctccttctgttcaagtacacaatccccaacttgtagccttctcc

SEQ ID NO: 76430 - DNA, 252 bp, Glycine max
  Clone ID: 700954265H1
cagacattgtatgagaggatacaatcagcaaagataaactcatcatctgctgataggaaatggaaggcttcaagtgatacaagctccactgatcaatatgacaggttcatgaatgccctttacagtttgctggatggttcttctgataatacaaaatttgaggatgattgtcgagctataattggaattcaatcatatgtcttattcacattagacaagctgatatataaacttgttaaacagcttcaagct

SEQ ID NO: 76431 - DNA, 245 bp, Glycine max
  Clone ID: 700954271H1
cgcggcttcaaccttgtagttattctctttcttcttttttagctatccctctcttgaaaaatctagatctcgttcttccttgatctacgttacgcttttagtgaccggatctgtatggatctgaaccagatctacacgccgatggtggttttggcctggtctttcatagatctgatgcatggaggctcagatctactgtacagaggtgtgcgattcatgttcgtctctcttttggaatctgtttc

SEQ ID NO: 76432 - DNA, 246 bp, Glycine max
  Clone ID: 700954272H1
gcgtgattgagaccatttaccttgccgtatttatcacttactgccccaagaaagctaggatgtcgacattgaggatgattgttttgttaaattttgggggattttgcacgattgttctcttaacccacctactagcagaaggagagggccgtgtcaagcttctaggatggatttgcgtagtatttgctactagtgtttttgcagcacctttaagcattattagggtggttattcggaccaaaagcg

SEQ ID NO: 76433 - DNA, 244 bp, Glycine max
  Clone ID: 700954276H1
gcaaaaagaaagaatcccaggcgaggagaaagatggaggggaaggagcaggatgtgtcgttgggagcgaacaagttccccgagagacagccgattgggacggcggcgcagagccaagacgacggcaaggactaccaggagccggcgccggcgccgctggttgacccgacggagtttacgtcatggtcgttttacagagcagggatagcagagtttgtggccacttttctgtttctctacatcac

SEQ ID NO: 76434 - DNA, 246 bp, Glycine max
  Clone ID: 700954277H1
ctttctcatcatcgaagcccgtcgcgagaagaagctgcttcgtcgcggttcccaaaatcgcgtttcccaagctccgtttcaaacccgtcgctatggctacgctcggcgctcgcatggtggccgccgcacccaccgtcactccgccggcctcgctcgacttcgaaacctccgttttcaagaaggagaagattaacctcgctggacacgacgagtacatcgtgaaaggagggagggatttgttccctc

SEQ ID NO: 76435 - DNA, 243 bp, Glycine max
  Clone ID: 700954278H1
ccaaggcaagggtgccaatgccaatgctcttagggatgttgtctccatgggaactgggaagtacaccatgggcaatgatttgtggtatggaccagacagagtgaaatacttgggacccttctcagctcagaccccttcatacttgaaaggagaattccctggggattatggatgggacactgctggcttatctgctgacccagaagcatttgccaagaacagggctcttgaggtgatccatgg

SEQ ID NO: 76436 - DNA, 245 bp, Glycine max
  Clone ID: 700954279H1
gccggacttggagatgttcggcgagttctccgtggatgtcagcaccggcgaggaatcgtcggagatgaactcgtcggctaaaagcagcaaacttgagaacgatcagaatgtcatcgccactacttcaaagaaagaagaggaagaagataaaacttcttgcaatgcttctggtcaagacttggggtcaaaccgtggagaggagattgtgagcgagagagatgaatccgtggtggtgaatccagcac

SEQ ID NO: 76437 - DNA, 245 bp, Glycine max
  Clone ID: 700954283H1
gataaattcaaaggcttgtttctctaaacattcgcagtggccggccaagagctttcgccttcgccaggcttgagagctaatgctgctattatccttccttggatgtctgagagttggttcattgtgctgtgaattgattattttgttttgtatttcatttaatttttataagttttgtatacaagtttttctcaccaattttttattttggcattttgtcacattgatccacgccaatgatgata

SEQ ID NO: 76438 - DNA, 245 bp, Glycine max
  Clone ID: 700954285H1
tgaagctggaatttcaaaggatggacagactcgtgaacatgctctgctttcattcacccttggtgtgaaacagatgatttgttgctgtaacaagatggatgctactacaccaaagtactccaaggccaggtatgatgaaattgtgaaggaagtttcttcctatttgaagaaagtaggatacaaccctgacaagattccttttgttcctatatctggttttgagggagacaacatgattgagaggt

SEQ ID NO: 76439 - DNA, 245 bp, Glycine max
  Clone ID: 700954286H1
gattcttcccacaattaggcttacaatgaaccttgtaagaaaaagctttgctggtggttgtctcacaacaagtgatcataacatggaaatgtttttgatgaaataataaaaataataggtgagataatgacagatattaaatgaaaaataaattaatattcaaaataattaaatatcttctataagggattttcaaaggtgtctcactttctagctgctaagcaaaactaaaactagtttctact

SEQ ID NO: 76440 - DNA, 242 bp, Glycine max
  Clone ID: 700954292H1
cgctctgtttctgtctctgtgtttgcggctgaggattccgaacgagcgaccttcttcgtttctcgcaaagtttaagtcatcatgggtaaggaaaagactcacatcaacattgtcgtcattggacatgtcgactctgggaagtcaactaccactggtcatttgatctacaagcttggaggtattgacaagcgtgtgattgagaggttcgagaaggaggctgctgagatgaacaagaggtcatt

SEQ ID NO: 76441 - DNA, 243 bp, Glycine max
  Clone ID: 700954293H1
ctgggcctcaagaccaatttaaaaacagtcattgcagagactcctcagagaatgcttctaacaatgatctagctgatgctggagatcaggtgcttgaagcctctcaatgaagaaaaaggttccccagaaattggagatatgcaaatgttctctgttattgtcagctgtctggatcataatcaaggcaaccgttaaagtctatcatcatataatcctgaacagctgtttcgcatgtgcatgtta

SEQ ID NO: 76442 - DNA, 268 bp, Glycine max
  Clone ID: 700954309H1
ggggcacaaatacatatggtatgcgctacccgggtatgccattggcctggtaactgctttggctgctggtgtcttgactcactcacctcaacctgcacttctttatctggtgccttctactttgggacctgtagttgtgatctcttggatgaaaagggaactacttgagttgtgggaaggaaacaccccaaatctcaatgataaagatcgcgaaatagaagtttagtctagtgacaggtggtttatagccaaacagaaagctgtaaat

SEQ ID NO: 76443 - DNA, 266 bp, Glycine max
  Clone ID: 700954337H1
caaataaagcacagaacagttgaagtgaatggcataaaaatgcatgttgcagagaaaggagagggtccagtggtgttgttcctccacggcttccctgagctctggtactcatggcgccatcagattctctctctcagctccctcggctaccgcgccgtcgctcccgatctccgtggctacggtgacaccgaagcaccaccttcaatcagcagctacaactgcttccacatagtgggtgatctcgttgcgcttattgactctctggg

SEQ ID NO: 76444 - DNA, 263 bp, Glycine max
  Clone ID: 700954354H1
agcatctgtggcttggggaaaataaactctctggcaacatccctgatttgagtggactgaaggagttagaaactttgcatttggagaagaacaactttgaaggaccacttcctccgtcaataaagaaacttccaaaattacgtgatattgattcagattttgagaataagcctccaaacactaatcaaaatgaatagaagtgaaagtagtacaagtggttctagagattcatcagtgataaagagcacaaggccattacaaat

SEQ ID NO: 76445 - DNA, 249 bp, Glycine max
  Clone ID: 700954429H1
ctcaaaatcaaaatttaaaatacaaacaacctccatctccaccgttaaaatattccatcaaacggcccagcgccttctgaggacaaagcgagggaacaaacgtgaaccgtggagtctcactataaaaatctcgctcactaactcttgttcttccaaaaccaattctctgcactcttcatcaagctccgctccaacacaggggaaaatgagggagatccttcacgtgcagggagggcaatgcgggaacca

SEQ ID NO: 76446 - DNA, 244 bp, Glycine max
  Clone ID: 700954444H1
tgcaggctcgaaaatgctcgcctgagagaagagattgataggatatctgccattgctgcaaagtatgttgggaagcctgtggtgagctatccacttgtttctccttcatctgttcctcctcgtccactagaacttggggttagtggtggttttggtggccaacctggaggcattggaggggacatgtatggtggagctgcaggagatctctaaggtcaataagtggacctatgaagctgataag

SEQ ID NO: 76447 - DNA, 244 bp, Glycine max
  Clone ID: 700954458H1
cggcgtaaaagaaaccgtctgaaacgctcctcctctttccgttctctctctctgtggcacttgatttcgtcaaaaggcaaagggatgtgttcccgagtgaatgatgttggtttgtatttgctgatgcaattggtggttatgttggtttaagaagctaagaactgttgctactacttcacaatgggtgctgcttgttgtgttgctgccagagacaaaactatacaaagtggatcaaccagtgaca

SEQ ID NO: 76448 - DNA, 245 bp, Glycine max
  Clone ID: 700954461H1
tccaattgaaattttaaaaatgactgggataaacttaagaattcaattattgaaattgaataagtaaacaatttaattggattggtcgaatggtatcaaaaaaatggagtactaactcccatttcttatttattattgaattaaccgatcaacttgctttgttatcgaacatttctttttgatttcaaaaattttccggaaaaaatttgaatctatttttatatgcgaatcaatcctactacttc

SEQ ID NO: 76449 - DNA, 244 bp, Glycine max
  Clone ID: 700954488H1
gtcaattcctgaatgccagaaaaagcttccaggtgcttttactggtggggagcctttacctgaggctgtactgtggcttctattgacaggaaagataccaagcaaagcgcaagttgactcattatccaaggaattgcgaagtcgtgcaactatcccagattatgcttataaggcaattgatgcattgcctgtttctgctcatccaatgactcaattcacaactggtgtcatggcccttcaggtg

SEQ ID NO: 76450 - DNA, 241 bp, Glycine max
  Clone ID: 700954490H1
atcggagcgaagttctgggaggtggtgtgcgcggagacgggatcgattccacggggaggtaccagggggacaacgagttgcaactcgagcgagtcaacgtctattacaatgaagcgagttgcggaaggttcgtgccgagggcggtgctcatggatctagagccagggaccatggacagcgtcagatctggtccctacggtcagattttccgacctgataacttcgtcttcggccagtccgg

SEQ ID NO: 76451 - DNA, 243 bp, Glycine max
  Clone ID: 700954493H1
gcgttggtactgaattccttaatcgagtccagtattcataatctttgagttgatatgggcaactggagcagtgaacgtcatcaaaccactcaacaaagtgatctcggtgcagttttgcgtgatggaaaagaagtacttcttcaagcattcaactgggagtccaacaaatacaactggtggaataatttagaaggcaaagtttctgacatagctaaagcaggatttacttcagtctggttgcca

SEQ ID NO: 76452 - DNA, 313 bp, Glycine max
  Clone ID: 700954511H1
agaaactacaattctcactgaaagaaagttgctaactcttggcaccagttatcagcttaacatagttgataacaccaaaggcacaacaacattgagggaatgaggcttgtcatatcagctgtatgtgttattgtgctattttcttatgctgctgcgtatgatcctttggatccaaatggaaacataacgatcaaatgggatgttgtgtcatggacaccagatggctatgtagccgtggtaacaatgagcaatttccaaatgtttcggcacatcatgaatcctggatggaccttgggatggacagggcaaagaa

SEQ ID NO: 76453 - DNA, 318 bp, Glycine max
  Clone ID: 700954530H1
tgtgtatccaattccaaattcacccgtaaaataccttcctttgtctcaccagccatatgtgtatgatggaaggagatgagaatattcaagcatcaacaaagggaaaaaatgtggaaagcttcaccagcttggaggcaccaaggaagaaaagcaagaagatagaaaacaagaggaggtttagtgatgaacagataagatcactagaatgcatatttgagtcagagtcaaagcttgagccaaggaagaagatgcaactggcaagagtcttgggccttcagcctcgccaagttgccatatggttccaaaacagaagggcaa

SEQ ID NO: 76454 - DNA, 258 bp, Glycine max
  Clone ID: 700954603H1
cgcactttgcgttttctgcgtcatctccgattccccgacaatggccacccaaatgagcaagaagagaaagttcgtagctgatggagtgttcttcgctgaactgaacgaggttctgacaagggagttagccgaggacggatactccggcgtggaagttagggttacgccgatgcgcaccgaaatcatcatcagagccaccagaacccaagccgttctcggtgagaagggaaggagaatcagggaacttacctcggtggt

SEQ ID NO: 76455 - DNA, 255 bp, Glycine max
  Clone ID: 700954604H1
gaaatggttatgcagaagtggctgaaacataggttcctcacacctattagactggcctttgcttacatcaaagtcttgtgtctctttgtttttttctcttgggttgatgaaaatggtgacaacccagcatggaaagccattggatatgaggtaccagctgatgaaaacttgaccaatgcctccaaaactaggccccttgaaaaggggattatagaaaccatgaatgaatctgactccgctcttcaacaatctctt

SEQ ID NO: 76456 - DNA, 204 bp, Glycine max
  Clone ID: 700954609H1
tgacatctggtagagatccaggaattatccccagaaatgctcacccacctgaattagatgaaccattagacataaacacaccatccatggaatgggtaaataatagggcccctaatcttaagctgcccagagtgaaagatgttctagtcaatggccacacagtgaaggtgaaattttgtgatacttgcttgttgtatcgtccac

SEQ ID NO: 76457 - DNA, 251 bp, Glycine max
  Clone ID: 700954610H1
aaaatcttctgtgcaaccagaaaaaaacggaccttgccctcagtctcttttttccatcatcacttcattaaacattattcactctctttctctgtctctagtttttacaacatggctactgcggtaactgctgcagtgtcctttccagccaccaagtccacttctctttcaagcagaacctctatcactgccccagatagaattgtcttcaagaaggtttcgttgcaatacagagatgtttcaaccagtgg

SEQ ID NO: 76458 - DNA, 216 bp, Glycine max
  Clone ID: 700954614H1
tttccattatactaaatgcaatcatgcatgttttaacttttaacaatgctgctgtgaagtgcaaactagaagaaaatatcatcttatctgagtcgcaatttcaattgcagcaagggttagtttttaaaattgcattggccatgtatccaagatatcatttttcctgccaagtcagggcagtataggaaattctagtccacaagctgttatatgacc

SEQ ID NO: 76459 - DNA, 203 bp, Glycine max
  Clone ID: 700954615H1
caaaatgtttcgtttcgagcaggaaaagatccgaaaacgaatttgattcgtaaagttaatttcttttcgacaatcaaatagtttccagcttgttgggtgttgccatggccgacgctctctcgttgattccggcagccgtgcttcgcaaccttgctgacaagctctacgagaagcgcaaaaatgctgctcttgatattgagggg

SEQ ID NO: 76460 - DNA, 259 bp, Glycine max
  Clone ID: 700954617H1
cagaatatggagactgttcttttcaatcactccccacctttggaattcaagggtttgagcaaggaggaggaagactcattgctagggcaagtggaaatatggaggtacatgacatgcttcacggactccgtggccttgaaagctgtcatagagcttcgtatagcggacatactagaccgttatggtaaaccactatccttgtcgcaaattgtggagaacatagaagacgcaccctccccagatgcctctcttctccaga

SEQ ID NO: 76461 - DNA, 256 bp, Glycine max
  Clone ID: 700954620H1
ggaatctcttattccctctttcctttcattacccaataaaatcgtagaaatccaatcccatctctcatgaacaatcaaccaagaaaacagtgagcacagttcagttgcacaccttctctgtgcttcttcttcgatgttcaattacaataacaccaactcgcttcatgaaacaccccactccaatttcgccctgtcacaatcgcatcactcatgcattggccactgtcacataaccgcgatcgctggatacgacacc

SEQ ID NO: 76462 - DNA, 253 bp, Glycine max
  Clone ID: 700954623H1
atgaacgacccttcattagttctagaaaggttttgatggacttggggccacctataagcaaggaagtccagcttatttcttttcactccgtgtcaaaaggttattatggtgaatgtggacagcgaggtggatattttgaaatgaccaacattcctccagagacagttgatgagatctacaaggttgcatcaatatcacttagtccaaatgttccagcacaaatatttatgggagttatgctccatccacctca

SEQ ID NO: 76463 - DNA, 250 bp, Glycine max
  Clone ID: 700954626H1
ctatgttacaaaaggttactttgatgaaccatgcaacattggattttccgcagactgtcataaccatcctcagttttcattaccttcaaactactttgggaactgtttgatccctctcctcacaaccctaaagaggggtgagttggtgggacaaaatgggattgttgcagctgcaaatgccattgaaaggaagattagagatttcaagagtgatgctttgagattggctgaaacaacgatgtcagatatt

SEQ ID NO: 76464 - DNA, 202 bp, Glycine max
  Clone ID: 700954628H1
ctgagtgcccgcaatttgctgcccatgaaggccagggaagggaggactactgatgcatactgtgtggccaagtatggcaacaaatgggttcgaaccagaactctgcttgatactctctcccctcgatggaatgagcaatatacctgggaggttcatgatccgtgcactgtcatcacagttggggtttttgacaaccaccaca

SEQ ID NO: 76465 - DNA, 254 bp, Glycine max
  Clone ID: 700954632H1
gcattacattacattagattggtggcaaagcaatggcatcgtcactacaagcagcagctactttcatgcaacccaccaagtttttgcagctaaagtctactcaggccatatctaaggcttttggtttggaacctgctggagttaataaggtcacatgctcccttcaggctgatcttaaggacttggctcacaagtgtgttgatgctaccaaaattgcaggctttgcccttgccacctctgctctcgttgtttct

SEQ ID NO: 76466 - DNA, 255 bp, Glycine max
  Clone ID: 700954635H1
ggcaatcagatgctaaaacaccaaaaggtttgcaagaccaggcaggactgcttttctttattgctgtgttttggggattctttcctgtcttcactgctatattcacatttcctcaagagagagctatgctgactaaggaacgaacaaccgatatgtacagactaagtgcatatttcgtggccagaactacaagtgaccttctactagacctggtgctaccagtgtttttcctccttgttgtttatttcatggcca

SEQ ID NO: 76467 - DNA, 143 bp, Glycine max
  Clone ID: 700954637H1
caaaacactcataacacaaagcacaaagcaaagctcatccttgagttaaaaaatggcagcagcttcttccatggctctctcatccccatccttggctggcaaggccgtgaagctgggcccatcagccccagaagtgggaaggg

SEQ ID NO: 76468 - DNA, 251 bp, Glycine max
  Clone ID: 700954640H1
cttgggtgatgttaaacctagaataagtgaagaatctaatgacaagtcaaagatatggaagctcactgaaatcaacgaacaatctcaatgtagatccttgaagctaccggagaatgtaagagtaaccaagatatcaaggttgatatatacaaattcaggtaatgctattctggcattagcatcaaatgccattcacctactctggaaatggcagcgaaatgagcgtaactcatctggcaaggccactgcta

SEQ ID NO: 76469 - DNA, 248 bp, Glycine max
  Clone ID: 700954645H1
agccaagttcaacttatccacaaagaaacatcgtggttccctcgcatcagcatctttcgtaattttcttcactgctatttaccattgccacactctcattctcgatggcggcgaagatttcattggcaattggtttgagaactctcttcactgttttgggacttctcatgcttgctgtctttctttacactgccttcaccgatggtctaggtgttcgctttctcaaagaacttgtcagaccgtggatg

SEQ ID NO: 76470 - DNA, 249 bp, Glycine max
  Clone ID: 700954646H1
cttctaaccagtacacttacatggagcccccagggcctccaccacctggcagaatgacttcttcagaatggcttcgttggtacagagaaaattacaaacctgaaaggactaacaataacatgcaacccactcatttgaatactcctggtcctggaaatcatgtcaacttcctctaccatgatacttacaggtttggtcaatttgatacatggaacaacaacccccctttgtcttctaaccagtacactt

SEQ ID NO: 76471 - DNA, 256 bp, Glycine max
  Clone ID: 700954649H1
ttttcggattagtcatcgaattaattaattattataattgctcatttatgcatttcattcataactcttacccaaacaaacatacacagagattcaacattcatagtttcatagtcctacctttttccttttttttttcttttttctcaacgttgttataataaattttattagtaattaccacaactcttgaaggtggtggttgatgttacgggcatgtttggggttgaattaccatggtagaatggaggagctg

SEQ ID NO: 76472 - DNA, 254 bp, Glycine max
  Clone ID: 700954651H1
cggatatctcaaaggtttatccttcagtgaagagaaatggcagctgaggcaaattttgatagcaaaagcagcaggtggtctttgcaggggatgacagctctcgttaccggtggttccaaaggaatcggatatgctatcgtggaggagttggcacaacttggagccactgtacacacttgcgctcgcaacgaagctgaactcaataaatccttaaatgaatggaacacaaaaggatacagagtaactggttcggt

SEQ ID NO: 76473 - DNA, 205 bp, Glycine max
  Clone ID: 700954652H1
ttgctttgcagagtataagatcttgctcccacgtctctgattacttgcaagcttcatctgcactcatggatcccaaccagcctgtgggtgaaaactacgccaatcccaggacttgcttctttcatgtcctcttcaaggctgcagccttggcattttacattctctcggccctctttattgataactttgtcatcattttcgtggt

SEQ ID NO: 76474 - DNA, 251 bp, Glycine max
  Clone ID: 700954668H1
ctgcgattcatcgacgaccacaactccgcggaggaccgaacctacaagctcggactgaaccggttcgctgatctcaccaacgaggaatacagggccaagtacttgggaaccaagatcgatcccaaccggaggctcggaaagaccccgagcaaccgctacgcgccacgtgtcggcgacaaattgcctgattccgttgattggaggaaggaaggtgcttttcctcctgtcaaagaccaaggaggctgtgggag

SEQ ID NO: 76475 - DNA, 199 bp, Glycine max
  Clone ID: 700954673H1
caagggtttaacctttctggctgtgttaatatgcgtttcagcactgtcactgagtccttctgttgcgggggaagggcaaaataatggccttgttatgaacttctacaaggaatcatgccctcaggctgaagacatcatcacagaacaagtcaagcttctctacaagcgccacaagaacactgctttctcctggctcagg

SEQ ID NO: 76476 - DNA, 245 bp, Glycine max
  Clone ID: 700954677H1
gagagagagagagaaatggcttgcaggcaattgtgggcttcaagagctgcctcttacctgaggatctctgtgtttcacagatgcttttctaatgttattaaagatttcaagtatgttgattctcatgagtgggtgaaagttgatggaaattacgcaaccatcggcataactgatcatgcccaagatcatttgggtgatgttgtatatgttgaattgccagaagtgggagcagctgtgacacaagg

SEQ ID NO: 76477 - DNA, 254 bp, Glycine max
  Clone ID: 700954681H1
gggtttcataggaagagttgggagatatttgggctatggccactgggaagacggttatgtgttcgctgagccagttgcgtccgctaacatgcgcatcgacgtcagcgtcacgattagtgccccagccacccgacctcatcaagtgggtaaccagagaaggtggcttcgtgcaccgcgccgtcaagataacacaactcgactcctccaacggactgggcctggtggccaaggaagaaattccacgtggcagtgat

SEQ ID NO: 76478 - DNA, 253 bp, Glycine max
  Clone ID: 700954682H1
attctttgagggaatttgacaaaaaagtagccactgccccaacgatcccatttcccttgacttctctacgtgaagctccttgttttgcataggagctagttgaaatgtccgagggaaatgcagggaaaggaaagaaaatcgccatcattggtgtctcaaccttattgttggtggctatggttgtggcggtcacaattggggtcaatctcaatgagaatggttccaacaatgatatagaggacaacaagaaaga

SEQ ID NO: 76479 - DNA, 248 bp, Glycine max
  Clone ID: 700954687H1
cttagccgaggtcacgaggagcactagctagtttcacaatttccaaatggctaggggattgaagaagcatctcaagaggctcaatgctcctaagcattggatgcttgacaaactgggtggtgcatttgcgcccaaaccctcatctggaccacacaaatctagggagtgccttcccctcatactcatcctacgaaaccggctaaagtatgctctgacttaccgtgaagtcatcgctattctgatgcaga

SEQ ID NO: 76480 - DNA, 246 bp, Glycine max
  Clone ID: 700954691H1
cttttctcctctctctcacttgcgttattagggttttagttagacagtggcggggcagtgatacagtgtgggcataaaattttcgaagttgaagcgagaacttgccatttcaagggttttagggttagggttttctcaaattgcaaggacatgggtttcaaccttcaaccatatgggattcaatccatgctcaaggaaggccataagcacctttctggcctcgacgaagcggttctcaagaacatc

SEQ ID NO: 76481 - DNA, 246 bp, Glycine max
  Clone ID: 700954693H1
cacaaagctagctatagctgctacctcttattggcttttttgtcttactgtttcaataacagtaagctctaagccaccgccaagtttcatttccttctttaatttcctccctttctaccttgttgttattcttcttcaccttggttaccctgccctacccaaaagttcaatatcttttttgcagcgtcaataccctccaaattccaataaagatatacacacacacatttatatgttcatatagta

SEQ ID NO: 76482 - DNA, 90 bp, Glycine max
  Clone ID: 700954695H1
atcaattttagagttatatagtattttatatgtatagttctctaataagctggttttataataactttaattagtggcacttcttgagtt

SEQ ID NO: 76483 - DNA, 250 bp, Glycine max
  Clone ID: 700954696H1
gttttccaatgcagaaagcagggtacggtggcgatggaatatacaggtctctaaggccttgtttggttctcccaaatgaccccaacctctccctcgtctcattcctcttccaaagcgtttcctctttcccatccaaaatcgccctcgtcgattcccactcttcccaaacacttaccttggcgcacctcaaatcacaggtcgccaaacttgcccacggtttcctcaaactaggcataaacaaaaacgacgt

SEQ ID NO: 76484 - DNA, 268 bp, Glycine max
  Clone ID: 700954701H1
ctctgggactttcagaccctgaaggaacaggagggttcattgagccgaaatggctagcatatggtgagataatcaatggtcgttatgcaatgttgggtgcagttggtgcaatagcacctgaaattctaggcaaggctggtctgatccctcaggagacagcactcccatggttcagaacgggtgtgttcccacctgcaggaacctacaactactgggcagactcctacacactgttcgtgtttgagatggcactgatgggatttgcaga

SEQ ID NO: 76485 - DNA, 268 bp, Glycine max
  Clone ID: 700954702H1
gtattctgatcgctccctgagagagctcgtcgcggcggttgcagaagaagattgcaagatgaagttcaacatcgcgaatcccaccactggatgccagaagaagctcgagatcgacgacgatctgaaactgcgagcattttgggacaagaggatctcacaggaggtcatcggagatgcactcggtgaggaatttaagggctatgtcttcaaaattaccggaggttgtgacaaacaaggatttccaatgaagcagggagtgctgactcct

SEQ ID NO: 76486 - DNA, 262 bp, Glycine max
  Clone ID: 700954704H1
tgagaaggttatgcgagctctaggtgattaccttggtgtcaaggttcatgcttgtgttggtgggaccagtgttcgtgaggatcagcgcattctccaagctggtgtccatactgttgttggcactcctgggcgtgtatttgacatgctacggagacagtctcttcgtccagatcacataaagatgtttgttttggatgaggctgatgaaatgctttctcgtggtttcaaggaccagatctatgacatcttccagcttctgccg

SEQ ID NO: 76487 - DNA, 259 bp, Glycine max
  Clone ID: 700954707H1
aggagtgatatctttggggagagaggaattttacttggtgctgttcatggagttgtggaatccttgtttaggagatacactgataatggaatgaacgaagatctggcctataagaatactgttgagtctataacagggattatatctaaaaccatctcaactaagggcatgctagctgtatacaatgctttatctgaagatgagaaaagggaatttgagaaggcttatagtgcttcttattatccttgcatggaaattc

SEQ ID NO: 76488 - DNA, 257 bp, Glycine max
  Clone ID: 700954711H1
cccaaagcctattttcccattttccccttttcatgataacaactctccatgtagggcaaacttcacttcaattgaactaacttgtctgtggctttttgtagattgattcaattcaatgggttcagtaatgctcagtggaactgaaaagctcactctcagaaccctaaccgggaacggcttaggtttcactggttcggatttgcacggtaagaacttcccaagagtgagtttcgctgctaccactagtgctaaagttc

SEQ ID NO: 76489 - DNA, 267 bp, Glycine max
  Clone ID: 700954717H1
cttgaagctgaactaactcgtttaggaaagcctgtagcagctgatgctgggggaaagttgtatgcaatcatggaaatatgccgctcatttgatcaaatatttaaagaccatcttgatggcgtgcggcctggaggtgataaaatttataatgtctttgacaatcagctccccgctgctttaaaaaggttgcagtttgataagcagctttcaatggaaaatataaggaaacttattactgaagctgatgggtatcagcctcatcttata

SEQ ID NO: 76490 - DNA, 261 bp, Glycine max
  Clone ID: 700954720H1
gtgaagatgatgtccggaaaatatacgtcgattgacgcgcacagcttcagggatctgttcctgccgttccagattcacgacccgccaccgtcaatttcgcagattcaaatcttcagacatttcctccatctggtcctctgggcaagattactgctgcttccgggcctcctcgtgacgctgatgattcattttcaaaacctgtatctggttctgatgaaccccagcagggtggttggtttcagacttttacaattgctgctt

SEQ ID NO: 76491 - DNA, 261 bp, Glycine max
  Clone ID: 700954723H1
gtcacatgcatcgttccctcacttgggtcaaccccagaatcctccaaggcctaccttaaaactcttccttcaaacatagactccatttttctccctccaattagcaaggaaaatgtaccccaaggagcatacgctggactcctaattcaactcactattaccctttctctgccatcaatatatgaggccctgaaatccttgtcctctaaatttcctttaacagcgttggttgcagatacttttgcatttccaaccttggaa

SEQ ID NO: 76492 - DNA, 255 bp, Glycine max
  Clone ID: 700954728H1
cccaaacaaaactcaagtacggtcagacgttgaggcttcggtttaaggtgagcgcgactttggttggggattcggtgtctgttaccatgctggcgccgccatttaacacgcactcgttctccatgaatcagaggctgttggtgctgaagccgcaccatttgagtggggttggagaatcaacgcacgaggttgaagttaccgcgccggcttccgctgttcttgcgccaccgggtttctatctgctgtttgtggtcc

SEQ ID NO: 76493 - DNA, 267 bp, Glycine max
  Clone ID: 700954733H1
atcgccattagtgactgctgtgaggagaggatcttctgattcaaaattggtgtcctcctcgtctaccctcactccagaaaccaaaactaccatggaagacaaaggccgtggtgctggtgaaagtcgaggtggagtgaatctgacaaagaagagagaattcaccatattcgtagactatagagatagataaacgttcgctaaacccaaagtagatagttgagatcccagcccaacccaatagcgcgaaagccccaaaccttcgccttt

SEQ ID NO: 76494 - DNA, 258 bp, Glycine max
  Clone ID: 700954738H1
cccgaaccctaaccctagaagaaagaaaaaaacccacaacacacaatcagtactaccaactagggtttttgtcatggctagtttgcaaactagggttttcttgatggcccttctgtgcctgctggctcttggtgcaaccattattccaatggcacaaggggaagtgtcatgtggccaagttgtgagtaacctgaccccatgcatctcctatgtgctatatggtggagccacggttcctgcacagtgctgcaatgggat

SEQ ID NO: 76495 - DNA, 254 bp, Glycine max
  Clone ID: 700954748H1
cacaaacaactcttgagaaagaaagaatggctgccaacacattgatgagttctgccatctcagccttcccatctctcctttcctcctcaaaatccagatttgccgcagcagttcctctttccagctttgttgtcaccaatgcctcttcttctcgcttttccatgagtgctgactggatgcctggccagcctagacccccctaccttgatggttcagcacctggtgactttggattcgaccctcttcgtcttggt

SEQ ID NO: 76496 - DNA, 264 bp, Glycine max
  Clone ID: 700954750H1
agaaagggctgcagacctgccattcagaatgttgaagaaggaaacaatgactgaagaacagataccaaatatacaaatgctgctttcctcacttattaacagtctccaattactaagatcccgtaagacactcgctttccgcaatagaaaaaaaatggcctatatggttttgtctaagcttggattgcctcagtggtttggttgtaaagaagtgtcatgtatgtacgtgtgttaatgtggttgtaccagcaaactgtaattaaa

SEQ ID NO: 76497 - DNA, 258 bp, Glycine max
  Clone ID: 700954754H1
gttttcagcccccttgttggagaggcactttcaaggttagatgctgtgataaggcatccaaatgcactacatgctgataacataatggcatatgacaatgccgtctcagctcttggaaaaatatgccaattccatcgtgatagcataaatgcagcacaggttgttcctgcctggctaagttgcttgcctataaaaggtgatttaattgaagctaaggttgtgcatgaccaactttgttcaatggttgaaagatctgat

SEQ ID NO: 76498 - DNA, 257 bp, Glycine max
  Clone ID: 700954757H1
aaaaaaggcaaagcttattcccccaagacttagctagcactagcaaacacctctatatctaaaatggtttcaatttctgatcatgaactggttttgatctttggtctcctaggtaacattgtgtcattcatggtgttcttagcacccttgccaaccttctatacaatttacaagaagaaatcatcagaaggatttcaatcaattccatatgcggttgcacttcttagcgcactgttgcttctatattatggcttcat

SEQ ID NO: 76499 - DNA, 255 bp, Glycine max
  Clone ID: 700954759H1
ggaacaaaggcattagctaagatgatggctgtttgtggaccctttcatcaaaatactgcaagtgcatatagtcttctagctgtggttctctaccacactggagattttaaccaggccaccatctatcagcaaaaggccttggatataaatgagagggagctagggcttgaccaccctgacactatgaaaagctatggggatctttccgtcttttattatcgtctgcaacacattgagttggctctgaactatgtt

SEQ ID NO: 76500 - DNA, 253 bp, Glycine max
  Clone ID: 700954762H1
gtttctatattctccggatttaagaaaaccacagcagctaggtggtggcctggaatcgtggtgcggcttctatcagagtataaggccaactcagatgggattgtcacttaatattgacatgtcatcaatggcgtttattgaaccacttcctgtaattgactttgttgctcaaattttgggaaaagatgtgctctcaaagccattgtcagatgcagatcgtgtcaagattaagaaggccttaagaggtgtgaaa

SEQ ID NO: 76501 - DNA, 263 bp, Glycine max
  Clone ID: 700954765H1
cgttaattccggtcgtcgtcgaccccgtcatcggaaaatcgaggttgttggttacccctaccgtgaaggagcatgccacggagatcgcggagacttggaagagcagcctggaggatcgtggcggcgtggaaaacctgaagacacctgacgtccacactttcttgcagcacgttgttaccttcgggattgtcaagaacgatgactccgatttgtaccggaagcttgttattgcttccgcttggaggaaacagatgccgaagctc

SEQ ID NO: 76502 - DNA, 255 bp, Glycine max
  Clone ID: 700954772H1
ttcacctttcagtgttttttttctctctctctcctctgtctccccgccggagcccactttcgtcgccggtgtttcctttctgaagctgctcttccgttgcgagccaccgcgacccttttgagagccctgttcaacaagctcgaaagtccggtttttttcccgattcgggaaaactggtttggtctttgacttggaaccgtgagtggagttgaagggattttttttgggttctgcgaagaggtgcggatccaggaa

SEQ ID NO: 76503 - DNA, 253 bp, Glycine max
  Clone ID: 700954775H1
ctcactcttgaacctaaaaatcatagaggtaaggaaaagcaagccatttactttttcttttttctcttcttcccaaaacaaaaacagtcacttttacacaatgccaccaaaatggtgtaaaattattctggggtccaacaagaccaagtgatgcaaattctgagacccactgagaggttgcaactgtgtgctgcactgtggctagaactacatgttctgtggttcccttcatgctttgcactgtggctggctc

SEQ ID NO: 76504 - DNA, 257 bp, Glycine max
  Clone ID: 700954784H1
cttgtgttacttctccttggttgcaccatgtcttgctatttgtatcatcttgtgtaccttcttaagctttgagcaattcccttttacttttatttcactccatgatcatcactcacacatcaaacactactactagctccttgtatgagtgtcattccttctagctaaatctctctcttttggggtatggaattcaacaagttcagaatcagaagctatgaggggcaatctgatagggctcaagtggaagatcttga

SEQ ID NO: 76505 - DNA, 257 bp, Glycine max
  Clone ID: 700954785H1
ctcatttcaatttgcatttgcatttcatttggcgttttgtttctttctggaagcttcacttcggcatccatggcgtcgttcgaagaagctcctcccggaaactccaagaacggcgagaagatcttcaagaccaagtgcgctcagtgccacaccgtggacaaaggtgccggtcacaaacaaggacccaatctgaatggtttgtttggaaggcaatctggcacaactcctggatattcctattctactgctaacaaaaa

SEQ ID NO: 76506 - DNA, 255 bp, Glycine max
  Clone ID: 700954786H1
cagaaattgtggcttgctggcttttcaaagggcatacaggaaatgcacagaaaggcatctttggttcttgaagatgcagttaggaatatttacactgttgttgcattttgtgctggtaataaggtgatggaactctaccagttgcagttaaataaaatatttaagcaaagctttcttcatggagtggccattggttttggatttggcttttcacagtttctgctctttgcttgtaatgcccttctactttggtac

SEQ ID NO: 76507 - DNA, 255 bp, Glycine max
  Clone ID: 700954789H1
acaggactttccgttcacgacactcccttttatcgtttcacttccgtcgtcgtcgtcttcaattttggatcttcgaatcgaatcgcatcctatgggtagcagcagaggacacacgctcatggaggttggacccgacggggttgccgtcatcaccatcgtcaaccctcccgttaattcactttcctttgatgtattgcgcagtttaaaggagagttttgatcaggcgatacagagagatgatgtcaaggcaattgt

SEQ ID NO: 76508 - DNA, 251 bp, Glycine max
  Clone ID: 700954795H1
cgctgaggaggaacatggtgcagaacatgctcagctcaacaagacttaaggagtttcgcagtgttcgggacaatgcgatggacaagctcatcaacagactcaaggacgaggccgagaagaataacggcgtggtttgggtgctcaaggatgccaggtttgctgttttttgcatacttgtggctatgtgttttggtcttgagatggatgaggagacagtggagagaatagatcaggttatgaagagtgttctc

SEQ ID NO: 76509 - DNA, 271 bp, Glycine max
  Clone ID: 700954809H1
gggaattaccagccatggcatcgtttggggcggaagagtggtactttttcagcccgagagaaaggaagtacccgaatggcgcaaggccaaacagggctgcaacttcagggtattggaaggccacaggtacagataagcctatatgtagtggaactcaaaaggttggggtgaagaaatctttggttttctatggagggaagccaccaaaaggggtcaaaactattggatcatgcatgagtaccgtgttgctgaaaacaagcctaacaatagg

SEQ ID NO: 76510 - DNA, 270 bp, Glycine max
  Clone ID: 700954812H1
aacttacagcttgatggggtcctttgttccatttggtgggttcttttctacacctgaaatcagaagtcccgtaagctgtacaaatgcaccttttacccgttgtgacacatgcaataaaaaatgtgaacaagaagttgcagatcttctgaaggtaggtccttcatctagtaactcaacgagctcaccctggttacaaaaggttgttaatgtggagacgcatgagggtcggatgcggcaaagactaatgaagaaaacacaagtttgaatgat

SEQ ID NO: 76511 - DNA, 272 bp, Glycine max
  Clone ID: 700954815H1
caaaatgactcaagcccagattcaaccagttaaacttggaacccaaggctttgaggtttcaaaattgggattcggatgtatgggccttactggagcgtacaatgaccctctccaagaacaggatggcatatctgttatcaagtatgcgttcagtaagggaatcacattttttgatactgcggatgtttatggagccaatgctaatgaacttttggttggaagctttgaagcagctgcccagagaaaagattcagatagccacaaaatttggt

SEQ ID NO: 76512 - DNA, 268 bp, Glycine max
  Clone ID: 700954828H1
cacacacaaacacaacaacatatggaggtgctaagggtgcaaaccatagcttccaaatccaaagatgctgccatcccagccatgtttgttagggcagagacagagcaaccaggcatcacaaccgttcaaggggtgaaccttgaggtgccaattattgattttagtgacccagatgaagggaaagtggtgcatgagattttggaggcaagtagggactgggcatgttccaaattgtgaaccatgacatacctagtgatgttataagaaa

SEQ ID NO: 76513 - DNA, 265 bp, Glycine max
  Clone ID: 700954840H1
tgttgaaattaagctaaaggagttagaacaaaagtcagctgaagtcagtaccgagtggagtattgtccctggacgtggagggcatcccactctggcttcccttcagccaggtggcactgttagttttgaacatcggaatctgcaagggctgaatagatctattaacggttctataacaacaagcaacttcttgaatcctcaggatgatcttgcattaagctagagtatgtgcatccatatctggatggtgtatactattcacgca

SEQ ID NO: 76514 - DNA, 265 bp, Glycine max
  Clone ID: 700954843H1
gccgttttggtaacatccattcggaacttccgttcaaacagaggacccgtttcggggattctgaaaggctttgtagggttgagcactgcgatattcactactctctgttccgctctcttcgccgacgatcctggctccttcctcatcatgctctctgtcattcccttcgcagtttgcctcaccggtgtgtttttcctccgggagattcctcccgtgcctccgccgacgccgacgccgaggaggtaaagtatttcggcgtcttcaa

SEQ ID NO: 76515 - DNA, 267 bp, Glycine max
  Clone ID: 700954845H1
cggattcgcatcgtgattctaacgttaacttccatttccattttctttgctgcgatgcgaatatgcttcctccaatccgtccttctacaaatgctatctgctgacagatactgagtaccgatctattttctctcctttttcacaatttctcaagttaccattagaaggaagccatggaatctgagagagaaagttttgacctctcaggacctttgctctaacttatgtcttatgggacaatgcatatcatcgaatgtcagttgctgc

SEQ ID NO: 76516 - DNA, 269 bp, Glycine max
  Clone ID: 700954848H1
attaggggacaatttgtcagacgaatagtgtctgaaggcaaagaagaaaaagataaacaaagtgacaacctggttcctggggataattctatcgacattcctcaatagcaccagacaaagtggtgatcattatttgactgattccgttccattaactgcctctagcttcttgctagcagaccagcttttcacacgttcacctaggaaggagcttggaggttgtgttagaggaatctgtgattaggtagtttaattttatctctattgtg

SEQ ID NO: 76517 - DNA, 262 bp, Glycine max
  Clone ID: 700954876H1
cttcctcagccacacttgtagaagcaaaggggaaaaaaactaaggaaaggaacatagcattgctcttaatatcctaactcctagattcccatctctggcttctcaccttgcataatggctacaaaagtgaaacgcaagactttttcaattgctgcagcaacatggatggtcttgtgtatcatcactatgatctgcaatgtcagtttagcagaagaattttgaaagaaaaagaattaggaaatgatgttccgaaagagagaca

SEQ ID NO: 76518 - DNA, 258 bp, Glycine max
  Clone ID: 700954890H1
aacaagaacataagggaaccacagcggcggtaacagaagaacaagcagagaatgggtcgagtgagaacgaagacggtgaagaaatcctctcggcaggtgatagagcgtcactactcgcgcatgaccctggacttccacacgaacaagaagcttctggaggaagtggcgataatcccgtcgaagaggctaaggaacaagatcgcggggtctcgacgcacctgatgaagcgcatccagaagggccctgtgcgcggcatct

SEQ ID NO: 76519 - DNA, 247 bp, Glycine max
  Clone ID: 700954986H1
gcctcgtccctgccatgagaacccttcactcagccctcctagccgagggcataaccgacattaaggtaaccactgctcactctctggcgataatgcggtcatcgataccaccaagtatgggcaggttcaggcccgggtacgcaaagcacgtgttgggcccaatgctgaagtttctgagggagacgagaacacccttgatggtgaacccgtacccgtacttcggttacaacgggaaaaacgtgaactt

SEQ ID NO: 76520 - DNA, 247 bp, Glycine max
  Clone ID: 700954990H1
catgatttgggtcctaggaatgtacttgtcaagggtggtgacctccctaattcgttagatgctattgatgtattctttgatggtgaggagttctacgagctgtgttcaccgcgtgtaaatactcgcaatagtcatggtactggttgtaccttggcatcatgcatagcagcagagctggcaaagggttcatcaatgctttctgcagttaagacagctaaacattttattgaggctgccttggattata

SEQ ID NO: 76521 - DNA, 266 bp, Glycine max
  Clone ID: 700955001H1
gcacagcaacacctgaaaaaggaagggttagtgagtgtgtgtgtggaaattgtcatcgctcgcaagagcaacaacaactagtacttaaagagacagagagtgtgcacatcaatgtctgctcaggtcggtgtcaggacacgagcccaagccgcattagccatggaagctgttagttctgctgaaccatcatccaagagaaagaagatcagcaacagtactaaccaagagccaaaactctccaagactccgagaacgagttcttcctc

SEQ ID NO: 76522 - DNA, 261 bp, Glycine max
  Clone ID: 700955003H1
ctaatttatcgaaaggtagggttttgcagagcctcctcctccgttaccagtttcttcttctttatcctctctcctttcttcttccattcctctaacctaagatgggcaagtcaagcaagaaatcagctatcaaggttgacgctgctccagctgtggttccgccatccaagtctgccaagaagggaggcaagcgacaagctcaagatgaaattgagaagcaagtgagtgccaaaaaacagaagatagaggaggttgctcaga

SEQ ID NO: 76523 - DNA, 257 bp, Glycine max
  Clone ID: 700955006H1
aaaagacacagactaggcgctgcccaaaattgctctgccactcttaacggcaaccacaagctcactgatgctgttcttcctcccacgaaagactggaggaaagaaggaatagtgagtgatgttaaagatcaaggcagctgcggatcatgctggacattcagcacaactggggctttagaagcagcctatgcacaagcatttgggaagagtatctctctttctgagcagcagctagtggattgtgctggccgtttcaa

SEQ ID NO: 76524 - DNA, 257 bp, Glycine max
  Clone ID: 700955008H1
cctctaccgcctctaagtcctacaagaacccatcccctccccagccgctcccaaaatctcactcttcttactcttcttcctccaagagaagtaaacaaccctcacattcaccacagcagcacacacagacaaagacaaccttgtttgtctccaatcaaaacctttcaagctggcgttcgaaaaccaagacaaccctgtccgagaaatcaagcccaagaataggagaatcatgggtgctggaggccctgatgatgagg

SEQ ID NO: 76525 - DNA, 254 bp, Glycine max
  Clone ID: 700955011H1
agcttgcataataatttcgtacacttcttctcttcttttctctaactttctttcttaaatcaaacaaaacataaatgaatagggtgaaaccaagtaacctaagacaatgagggagggaatggtcacgtggaaacaattgaagttactgtacgatagggctgctcctcagtcctcattattattcgtttccaactttcaactacctcatttacactagcaactcctttcttcactataaaattctcaacttggtt

SEQ ID NO: 76526 - DNA, 253 bp, Glycine max
  Clone ID: 700955012H1
ttctctattgctcccatccctttcgtttcatacacttttcaaagggcgcttcttcctcatagctggcaaaatggcaaatgcagcgtctggaatggctgtgcatgatgactgcaaactgaggttccaggagcttaaagcaaagcgagtctaccgcttcattacattcaaaattgagcaacaacaagttgtggtcgacaaaataggggaatctacggaaagctatgatgattttcaggccagtttgccagctgat

SEQ ID NO: 76527 - DNA, 255 bp, Glycine max
  Clone ID: 700955022H1
ctggacccagacccagttcctttgttcaacacgttacaataatggcccatttttctctctcccctctctcctgtgcaccttctcctctaccaccacgccgccgaatctttctctctcctcctcgagccgccgcatcttccgccaccgacgtcgtttccacttccacttccacttcatcttctgcttcgaatttcgcgcccaaagtcgttgtcaccagagagcgcggcaagaacgccaagcttatcgctgctctgg

SEQ ID NO: 76528 - DNA, 254 bp, Glycine max
  Clone ID: 700955024H1
ttttgcgatcgcctttccttttatggattaccgttattttattttttatttttatattcctacaaaatttacctttccgccgtgggaaagaatcatgagttgtttcagctgttgcgaagaggatgacctccataaggctgctgaaagtggaggaccctatgttgtaaaaaatccagcagggaatgatggaaattatcatgcttctcaaactgcaaagcagggcactcagcctgttaaacctcagcccattgaag

SEQ ID NO: 76529 - DNA, 253 bp, Glycine max
  Clone ID: 700955025H1
attttataagttgccaaaatggaaacaaaacaaactcaaaatggcagttcagttgttctgagttaaattacacttcaccttctgtctcctccgtgcattttaagttgcagttagagggaactttggttatcgtcaaagtttacatattttttccttgacattgttatctgtgttttatatctcagggagcttgctatctgttttgcagtaagaaactgaacatatggaagtgaaaggggacagcatgagcgtt

SEQ ID NO: 76530 - DNA, 252 bp, Glycine max
  Clone ID: 700955026H1
acgacatgcttcctctttcccttctcaagactgcccaaggccaccctatgttggtggaactgaaaaatggggagacatataacgggcatttggttaattgcgacacatggatgaacatccatctgcgagaagtcatttgtacatctaaagacggagatagattttggaggatgcctgaatgctacatacgaggcaatacaatcaagtaccttcgagtacctgatgaggttattgataaagttcaagaagaaa

SEQ ID NO: 76531 - DNA, 252 bp, Glycine max
  Clone ID: 700955030H1
gctgctaataactatggcatcaacgacgaatacgctcaggcactccccgcccgctgcaatgtcagcgtcccttacaagatcagccgatccaccaactgcgactccatcaagttctaaaggagcgggtagctttgccaatttcttccgcgggataatgaggcaacgtatgctgtaacacttgttatcgttatcattaaaataaaagaaagcgagtgtgactcgggttccactcatgtgagcctgttattgtat

SEQ ID NO: 76532 - DNA, 261 bp, Glycine max
  Clone ID: 700955033H1
gctatgggaaagtcttacccaactgtgagtgctgattaccagaaggccgttgagaaggcgaagaagaagctcagaggcttcatcgctgagaagagatgcgctcctctaatgctccgtttggcatggcactctgctggaacctttgacaagggcacgaagaccggtggacccttcggaaccatcaagcaccctgccgaactggctcacagcgctaacaacggtcttgacatcgctgttaggcttttggagccactcaaggcg

SEQ ID NO: 76533 - DNA, 254 bp, Glycine max
  Clone ID: 700955037H1
tgagaaaatgccatacctacacgctgtggtgaaggagcttctaagaaagcaccctccaacacactttgtgctaacacatgctgtgactgagcccaccactttgggagggtatgacataccaattgatgcaaatgttgaggtgtacacaccagccattgctgaggaccccaaaaattggttaaaccctgagaagtttgaccctgagagattcatctctgggggtgaggaagcagacataactggggtcacagggg

SEQ ID NO: 76534 - DNA, 132 bp, Glycine max
  Clone ID: 700955042H1
agggaacaaaggctttgaatttgattgcagttgagttagctttcactttcagtgtgagatcttcgtctcttctcttgcttccttcttcaattcatctccgaaccgcgtttctatttttgactctctctctct

SEQ ID NO: 76535 - DNA, 248 bp, Glycine max
  Clone ID: 700955044H1
caagatcggaatcaacggatttggaagaattggccgtttggtagccagagtggctctgcagagagacgatgttgaactcgttgccgttaacgaccctttcatcaccaccgattacatgacatacatgtttaaatacgacagtgttcatggacactggaagcatcacgatgtcaccgttaaggacgagaagacccttctcttcggtgacaagccagtcactatttttggacacagaaaccctgaagaga

SEQ ID NO: 76536 - DNA, 251 bp, Glycine max
  Clone ID: 700955045H1
attaaatccaataaaaattctaaaagaaaagaaaaaaggaaaaacagccggcgacaaggcattgggggtctccactctgcagcttccactctctaaagtctaaagtcttccaaatcccaaaaccctagggaagatgatggcgtcttccaattcacgaaaatcagaaacttccccttctcccgccccgcaattcaccaccaccaacttcatccccatccccgccgccgcagcccctaaaaccgtcgatgacg

SEQ ID NO: 76537 - DNA, 253 bp, Glycine max
  Clone ID: 700955047H1
cagaatcaccggcagcaaaaactacgtcgatggcatcaaaacttacaacaccgctaccttcggtgtgaacgctgctaacttcatggcgatgaacatcgggttcgagaacacagcaggagctgagaagcaccaagccgttgccctgagggtaacagcagacaaggctgtattctacaactgcaacatggatgggttccaggacaccctctacacacaatcccagcgtcagttctaccgcgactgcaccgtcacg

SEQ ID NO: 76538 - DNA, 256 bp, Glycine max
  Clone ID: 700955049H1
gctagtctcagttcagttagcacaccaacaccacatccataggttcatttcaatatggcaatcttgtcaagttttgctcctttgaccattcttagtttagtcttgttagtggttggaatcattgtgtctggggttgaagctaggccaagagcattctttgtgtttggagattcacttgttgacaatggaaataacaattacttggccaccacggcacgtgccgatgctcctccttatgggattgattaccctccaa

SEQ ID NO: 76539 - DNA, 248 bp, Glycine max
  Clone ID: 700955059H1
attttagaagaataccccctcttttgctgcatcagaggagttgtaaattaagagcatggctgcacaagctcttgtatcatcatcttctcttaccttctcagcggaggctgcaagacaaagtcttggaccaagatcactccaatctccatttggcttctccagaaaagcctcctttcttgttaaggcagctgctaccccccctgtcaagcaaggatcagacagacctttgtggtttgcatcaaagcaaa

SEQ ID NO: 76540 - DNA, 248 bp, Glycine max
  Clone ID: 700955062H1
ttcgccagttaatagaaactcaactttgagtagataatactgctggatgtctcgtctctaattattgtatttggaaaatagttttgagttgaggatctaatcattaccagatttaatatacttggcaaatggggtctgaaggtcctacgacaccgacaacaacaattcatgtgacaggatttaagaaattccatggagtttcagagaatccaacagaaacaattgccaataatttgacggagtacatg

SEQ ID NO: 76541 - DNA, 248 bp, Glycine max
  Clone ID: 700955070H1
cactgctttctttaagtgccatggacatgagcaatttgagatgacgggtttggatcctgagtataataggttgttcaatgagggcatggtgtgcactgctagggttgtgtccaaggctgtgatcactggctacaaagatgggttcaaccagattaagtccttggttgatgttggaggtggcattggagggtctctttcggagattgttagggcttatcctcatatcaatgccatcaactttgacttgc

SEQ ID NO: 76542 - DNA, 244 bp, Glycine max
  Clone ID: 700955076H1
atcaaatacctcaatggtggttctgagattcagcttcatcttgataaatacacaggtactggcttccaatcaaaagggtcctacttgtttggtcacttcagcatgtacataaaattggttgctggtgattcagctggcacagtcactgctttctatttatcatccacaaactcagaacatgatgaaatagactttgagttcttgggaaacagaaccgggcaaccttatattttgcaaacaaatg

SEQ ID NO: 76543 - DNA, 246 bp, Glycine max
  Clone ID: 700955077H1
gcaaaagctaggtgttgcatcagaaatattccatctttggttccatttgcttcaacaagttaagaagagtggaatgcgtactaattttaaaagggaacatgaaaagaaagtatgctgccttggtttaacatcattactggcactcccagctgatcaattgccagcggaggctttaggtcgggtgttccgggccaatcttgatcttctagttgcctacaaggaacaagttgcagaggctgcaaaaga

SEQ ID NO: 76544 - DNA, 246 bp, Glycine max
  Clone ID: 700955087H1
cactctgaaccaaataccatagtcttctctttgtctgagaaaatagttccccccaaaaataaaatgaacaagggtctctcctttgtgctgctgattcttctgatccactacaacaacgttgtcaacgccaacaacaaaaactgtgtcacagaggattgcctcatcggcaacaatgatttggaatcagaattctacttcggttcccatgtggccagaatgctctacgatgtgagccaatctgtgtct

SEQ ID NO: 76545 - DNA, 243 bp, Glycine max
  unsure (1)..(243): unsure at all n locations
  Clone ID: 700955092H1
cgtgtcaatttctaaatccaccaccacaccctctcttctattctctattattattatctccacacccttcactctctctcactcttctctcgaatcttccaccgcaatggccaccgctgccgagaaactctccgctctcaaatccgccgtcgccggattgaacgaaatcagtgagaatgagaagaacggattcatcagcctcgtcggccgctatctcagtggcgaangcagcatgtggaatgg

SEQ ID NO: 76546 - DNA, 260 bp, Glycine max
  unsure (1)..(260): unsure at all n locations
  Clone ID: 700955121H1
cttgagcnttatgttgtcccaactcccgcaactgctgcaaattcagcacatgtatatgccgctaacatgacagagaatccaaggtcactaatttgtgggtctggcagcagttcatatcccatcaaggagatgcaggttattgtgcctgatccatctaagatttttcanagttctggaatggttgantccaagtcagttggaacnttttcacctctgcaaaagcaagagagtcagaggggactttttgttgatagaggtgt

SEQ ID NO: 76547 - DNA, 244 bp, Glycine max
  Clone ID: 700955186H1
tgaagaaagacacagccattgtttgtttactttccattgattgagcgaaagtttgttttttctgcgatcattttccattgggtggaagaaagtctcaacctttagtcgaaagagcaaggatctgagtgagtgagcgatcatgtgtggtggtgcgattatctccgacttcattccagcgggtcccgccggcggggcgcacgcgtgaccgccgacatcctgtggccgaatttgaggaagcggttct

SEQ ID NO: 76548 - DNA, 246 bp, Glycine max
  Clone ID: 700955187H1
tagaagcaataagatgaaaatgaaagtgcttgttttgtttgttgctacagttttggtagcatatgaatgccatggctcagactaccagaagttccctctccaaatgaaaactgggtttggtgggcaatacagcaatgaggtggcatgtgccagttggaggcttggcgtggaagcaaacaacgtagtcaagtggcaaactgttcctgcagcttgcggagagtacatagctgactacgttctaggaga

SEQ ID NO: 76549 - DNA, 245 bp, Glycine max
  Clone ID: 700955212H1
gctttgtgacaaagcttgaaatgagaattgcttttgatatggatgttagttagcaaagatgattcaagatctgtgattctaaccaacatttgtgtaaagttgactattcatttttcagttgatggacttgatcagtgatcattgattttgttgctggttacaagtgggtctctcgaggaaaattatagtagaaaacaatgcatatgaaggaagctcagtttcatatattgagaaacatttggttt

SEQ ID NO: 76550 - DNA, 260 bp, Glycine max
  Clone ID: 700955236H1
ccatccaacatattcttcagttagctcccccaacctatacacttcaccaccacaccacaaccctaccctctctctctgtcatggtcattggaggagccttccctcgtttcgacccaatcaccaaatgtagcacccaagaccgctccaaccagactatcgcctcggacctcgatggcaccctccttgtctcccggagtgccttcccctactacttcctcgtcgccctcgaagccggcagcgtcttccgagccctccttctc

SEQ ID NO: 76551 - DNA, 255 bp, Glycine max
  Clone ID: 700955241H1
caaaacttgtacaacatgggaatgaagaacacctcaacaacgtttgcatcggccaccgttaatgtcatgccagccattacttttataatggcactgatttgcaggttagagacagtgaacttgagaaaaatacccagcgtagccaaggtagttggaacagcagtaacagtctcaggagctatggttatgactttgtacaaaggcccggctcttcagttcataaagggacaagcagcaacccaccatgaaagtggc

SEQ ID NO: 76552 - DNA, 255 bp, Glycine max
  Clone ID: 700955243H1
gaaatcaacacacacaaacacaacaacatatggaggtgctaagggtgcaaaccatagcttccaaatccaaagatgctgccatcccagccatgtttgttagggcagagacagagcaaccaggcatcacaaccgttcaaggggtgaaccttgaggtgccaattattgattttagtgacccagatgaagggaaagtggtgcatgagattttggaggcaagtagggactggggcatgttccaaattgtgaaccatgaca

SEQ ID NO: 76553 - DNA, 255 bp, Glycine max
  Clone ID: 700955254H1
gtaccattatcccagtatcttttggacccacaaactcaagcacagcaggcaaggttgttggcaactttggctcttggggatctgtttcagaatgaggctcttgctcgaacaagtgatgcagtttcagcttgtcgtgctttagtgaatgtgcttgaagagcaaccaacagaagaaatgaaagtcgtagccatatgtgctttgcagaatcttgtgatgtacagtcgatcaaataggagagcagttgcagaggctggt

SEQ ID NO: 76554 - DNA, 253 bp, Glycine max
  Clone ID: 700955257H1
ggttgagaacagcatgtgagcgggcaaagaggactctctcttccactgctcaaaccaccatagagattgattccttgtacgagggtattgacttctacacaaccattacccgtgcccgttttgaagagctaaacatggatttattcaggaagtgcatggagcccgtggagaagtgtttgcgggatgccaagatggataagagtaccgtccatgatgttgttcttgttggtggttctactaggattcccaaggt

SEQ ID NO: 76555 - DNA, 254 bp, Glycine max
  Clone ID: 700955277H1
caggaattgatcatatgatggcaatgaagatgatcaaccaagcacatgtgaggaaggggaaaataaagtctttcacttcttattgtggtggacttccatctcctgaagctgctaacaatccattagcatataaattcagttggaatcctgcaggagccatccgagctgggcgcaatcctgccacctacaaatggggtggtgaaactgtacatattgatggggacgatctttatgattcggctacaagactaagg

SEQ ID NO: 76556 - DNA, 259 bp, Glycine max
  Clone ID: 700955280H1
gcaagaatatcaaattggtctcttgtcttcctcctcatctctacactactccacatagagcccagcctctcaagcccaagcccaagcccaagcccaagcccgttcataaaatcctcctgcagcagcacccagtacccagccctctgcgtctcatccctctccgtctacgcctccagcatccaacaggaccctcaccaactggttcagacagcactctccctctccctgaaccgcacccaagccaccaaaaccttcgtgg

SEQ ID NO: 76557 - DNA, 273 bp, Glycine max
  Clone ID: 700955336H1
aagaattgcaatataacttcaaggagtatagaacaatcacttgacaattccaattcacgtctcatgttaaattataaggatgatgattccagagttgcacgcaaatcttttgatgatgttgaattcttatgcaaagatttctgtccatcttctctggatgacattgccgacatgagttggccactatgtcaagaatcagctcccacttctcactcgatgagattcactagaagtttgagtgggctttcggtcaggaggtctttagttggttca

SEQ ID NO: 76558 - DNA, 270 bp, Glycine max
  Clone ID: 700955401H1
atttcctcctctatttaacttcaaacaggaattatctgaagcatctccagtgcttgttaacaaattgatacctgaccacgtgaagcggcaaatagggctgcaatttgttcctccagcaggatcatgatgatgagctttagggggctttagtgtatactagttgataagttaaacaaaagtgacaccgttatttttgtctaaattagcatgttctgtggcctgaccagtgtagtttcaagctgaacctagactgagacttggggtgctgga

SEQ ID NO: 76559 - DNA, 266 bp, Glycine max
  Clone ID: 700955405H1
ctcctcaatcttcattgtcctgttcttcccctaggtgacacacacacgcagagatcatagcttgtgttagtgaggttagaagataaagaaagaatggcatttgcaggaacaacccagaagtgtatggcctgcgacaaaacggtttatctggttgataagttgaccgcggataaccgagtgttccacaaagcttgcttcagatgccatcactgcaaaggaaccctcaagctgagcaactacaactcttttgagggagttctttactg

SEQ ID NO: 76560 - DNA, 263 bp, Glycine max
  Clone ID: 700955421H1
gcacaatttctctctttctttttgtgtccaaaatggctcctagttctactcacaatactgggttctatgtgcttatgctagttgggatagtgattagcactatggttgctacctgtgctggtagcttctaccaagactttgatctaacatggggtggtgaccgtgctaagatattcaatggtggccagcttctatctctttcccttgacaaagtctctggctctggcttcaaatcaaagaaagaatacctatttgggaggatt

SEQ ID NO: 76561 - DNA, 259 bp, Glycine max
  Clone ID: 700955474H1
tgatagttccaaaggcattattctttctggtttccatccaaaggcatattatgtgtacaatactgtgaccaagcaaaagtatgaactcccagaacctcagcaattctataaagttctgtgcatggcattgatgttgaggaatatctggatagtgacatatgctacaaggtgatccgtgcaagatgtgaatgcaaactaaaggaacgcaacactgtctcaattgagacttactcatcaaaaagtagacaatggaagcaat

SEQ ID NO: 76562 - DNA, 259 bp, Glycine max
  Clone ID: 700955487H1
ggcccttcaagctgccctttcaacaggagttttgcagctggtaggaactgatcattgtgcctttaattccacccagaaagctcttggaattgatgacttccggaaaattcctaatggtgtcaatggtattgagaaaggatgcatttggtatgggatatcatggtggaatctggccaaatatctgtcactgactatgtccggttgacaagcactgaatgtgctagaatcttcaatatatatccaaggaaaggagctattc

SEQ ID NO: 76563 - DNA, 260 bp, Glycine max
  Clone ID: 700955489H1
gtcggtctggcctgattctgagtggcgatcattaaaggtgcaatgggatgaaccatcctcaattttgcgtcctgacagagtttcatcatgggaattggagccacttgtgtctaccactcttgcaaactcgcgccaacccaaagaaacaagagggcacggcctctcattctaccttctacaatgcccgattcttctttgcaaggcatatggaaatcatcagttgaatctacctctttctcttattgtgacccccaacaagg

SEQ ID NO: 76564 - DNA, 259 bp, Glycine max
  unsure (1)..(259): unsure at all n locations
  Clone ID: 700955490H1
ggttgcttggcggggataagattaaagattcaacaatgggcctctgcttctgctactcttctcaagtcatctcctgttcttgncaagtgcgagtgggtcaaaggccagacccttcgccaacctctcgtgagtgtaacccttcctcagcatcagctctcaccatcaaagctgcttcctatgctgacgagctcgtcaaaaccgccaaaacagtggcctcaccggggcgtggtattttggcgatggatgagtcaaatgcaac

SEQ ID NO: 76565 - DNA, 257 bp, Glycine max
  Clone ID: 700955506H1
aaattagggtttgtagtgtagcaggaacaagcagcaatggcgccgaaggtaacacgcaaggttagcagaaaccccgaattgataaggggaattggaaagtactcgaggtcgcagatgtaccacaagaggggcatttgggctatcaaggccaaaaatggtggcgttttacctcgccacgaccctaaacccaaacctgaaacacccgctgaaaaaccacccaaattttaccctgctgatgatatcaagaagccccttgt

SEQ ID NO: 76566 - DNA, 252 bp, Glycine max
  Clone ID: 700955509H1
cagtcattgacagctacagattgttgaaagaaggacaggcattaaatgatgacgaaattttccttgctagtgctcttggttggtgtattgaatggcttcaggcatattttcttgttcttgatgacattatggataactctcacacacgccgcggccagccatgctggtttagagtgcccaaggttggaatgattgcagccaatgatggagttctactaagaaaccatattccacggatccttaggaagcact

SEQ ID NO: 76567 - DNA, 133 bp, Glycine max
  Clone ID: 700955518H1
gcaggttcgtgctttcccgccgccgctatactgccaccgtctccgccagcgatggcagaagatgattcaaagcctctgaactacatctccgaagtcatactcaagaagaggaaaagcaccgaagcatgggcgt

SEQ ID NO: 76568 - DNA, 256 bp, Glycine max
  Clone ID: 700955521H1
gttgaagtccttgactacttcagcaactgctgatggaattgaggaatgccgcaaactatgtggtggccatggttacctttgcagcagtggtctccctgagttatttgcagtctacattcctacctgcacatatgaaggagacaacactgtgctgcttttacaggtggctaggcatctcatcaagactatttctcagttgggctccagaaacaagcctgttggtacaacatcttacattggacgagtggaacagctt

SEQ ID NO: 76569 - DNA, 254 bp, Glycine max
  Clone ID: 700955523H1
ctcatcctggtggttggagtggccataggtgtggtggtggccgtcaacaagaagggcgaggatcccacacttcaatctcaacaaaaatcagtaggggttatctgccaaaacactgatgaccagaagctctgccacgaaaccctaagctccgtgaagggcatggacaccgctgatccaaaggcttacatcgccaaggcggtgaaagccaccatggacagcgtgaccagggccttcaacatgagtgataggctcag

SEQ ID NO: 76570 - DNA, 249 bp, Glycine max
  Clone ID: 700955530H1
tcaaatcttcttattgacaatgaaggaacacttaagattgctgactttggactggcttctattttcgatccaaacaataagcatcccatgactagtcgtgtagtaaccctttggtatcgacctcctgagttgcttcttggtgccacagattatggtgtgggtgtagacctctggagtgccggatgtattttaggagagttattggctgggaagccaatcatgcctggtcgtacagaggtggaacaattg

SEQ ID NO: 76571 - DNA, 123 bp, Glycine max
  Clone ID: 700955531H1
gggaatttgacaaaaaagtagccactgccccaacgatcccatttcccttgacttctctacgtgaagctccttgttttgcataggagctagttgaaatgtccgagggaaatgcagggaaaggaa

SEQ ID NO: 76572 - DNA, 254 bp, Glycine max
  Clone ID: 700955538H1
gcaatgggtgtgaactcttactccaacagcatgaagatccaagccgagatacaaatgccacccttagaaatccacaaggttcgtttgccaccagaacgcaccaccttgcagaaactcagacacagactctctgagatcttcttcccagatgatccactccacagggaatcagctatgctaagcttgcaaacttgccacctattcttggattatattccagttttgtgcccccgttgatatattccctgcttgga

SEQ ID NO: 76573 - DNA, 254 bp, Glycine max
  Clone ID: 700955539H1
atctcagaattctctaaaagagatctttttctgctctttgaagaaagaagggtctttgcttgattttggagatgtctctgctctcagatctcatcaaccttaacctctccgataccaccgagaaggtgatcgcagagtacatatggatcggtggatcaggaatggacctgaggagcaaagcaaggactctcccaggaccagttagcgacccttcagagcttcccaagtggaactatgatggttccagcacaggt

SEQ ID NO: 76574 - DNA, 249 bp, Glycine max
  Clone ID: 700955546H1
gtctcgtttacacatctctccaacctttcactttcgtttctcagttttattcgaatccctctctcaatctcctttccaaatggccagcgttgaggttgcacagcaaacaccaacaacagttccagaaaatgaaacaaccgaggtaagcaagacccaggaaacaaccccagtcactgaggctcctgcaacagaacaaccagcagctgaggttcctgcaacagaacaaccagccgctgaggctcctgcccc

SEQ ID NO: 76575 - DNA, 247 bp, Glycine max
  Clone ID: 700955561H1
ctcaaatgcagttctttttggctttggcattgttgaacaatgctctaagcatgatgaaattttaaaggtgctaatgtctgagactgctgaagcagggatagatggagggaatttatccttgttatcagacttgatgaaattgcagttgtcaggcattgatgaaacccagcaaccatcatcatctcttatctacccaactggaaaattcaacatcccaaagcattttctgtattttgttcaagattcg

SEQ ID NO: 76576 - DNA, 251 bp, Glycine max
  Clone ID: 700955570H1
gtgggacactcctattcatgttgatgcagcaagtggtggcttcattgccccatttctttacccagagcttgagtgggacttccggttaccactagtgaagagcatcaatgttagtggccacaagtatggtttggtctatgctggaatcggttgggttatctggagaagcaaggaggacttgcctgaggaactcatctttcacatcaactatcttggtgctgatcaacccaccttcacccttaacttctcca

SEQ ID NO: 76577 - DNA, 252 bp, Glycine max
  Clone ID: 700955571H1
gcacgcataagggtgccgatgaccgcagcttcaggtgtgtgtaccaagaggaagatgagcaaaaactaaagggactaaagatcagcaaagacttaattgaaattggtggtgatgctctaaaaaccaacatcaccacactaggacccttggtgctacccttttctgagcagcttctcttctttagcacccttgtgtggaggcacttatttggcagcaaaaatgatgggaattcaccctcaatgaagaagccat

SEQ ID NO: 76578 - DNA, 245 bp, Glycine max
  Clone ID: 700955576H1
gccggggagcggaggtgcggcgtcggcgcagaacgaagccatagaccggcgagagcgtctccggcgattggctctggagaccatagacctggcgaaggatccctatttcatgcgcaaccacctcggaagctacgaatgcaaactctgtctcactctccacaacaacgagggcaactacttggctcacactcagggaaagcgccaccaaaccaacttggccaaacgtgcagctcgcgaggccaagg

SEQ ID NO: 76579 - DNA, 245 bp, Glycine max
  Clone ID: 700955577H1
ttcttctcctttccttaccacagaagaatagtagcaatcagagactgaagacgagcttccccttgcgccgaagggccaccgatggttgaaaccgagatggatgcagaaactgttgcaaatgtggttccaccaaaggagactccaaatagtgtttccatttctcatcattcctcacaccctccccttaatgagaggattatttcatccatgaccaggagatctgttgctgcacacccatggcatga

SEQ ID NO: 76580 - DNA, 253 bp, Glycine max
  Clone ID: 700955585H1
gagaacacaacacaacaaactaaaacacacaccctctaagttcattaacctcttcaacatcaaaacttgtaatattttaatggcaacacgcgtgatccctccaagaatcctcaagaatcttcgttacaacacaacaaccaagcccctcaacgccgcccaaccctccatctctccggccatcgcctcaccgtcgctcttcgagaggtcgccgtcccctcctgccgcggacgtcattccggcatctgcggctggg

SEQ ID NO: 76581 - DNA, 251 bp, Glycine max
  Clone ID: 700955586H1
caaagagattgggtggatttacggctcggtcacagaagatattttgactggattcaagatgcactgcagagggtggaaatcagtatattgcatgccaaagcgaccagcattcaagggatctgccccaataaatctatcagatagattgcaccaagttctgaggtgggctcttggctctgttgaaatttttcttagtcgtcattgcccgttgtggtatggctatggaggaaaacttaagtacctacagagga

SEQ ID NO: 76582 - DNA, 250 bp, Glycine max
  Clone ID: 700955587H1
tattaacaagaaaatactatcattgggttatggggaactcagtgcagagatcgtatcagtggatgcacaagaatcttatgacgggggagtcattgtcttggtcactgggtttatgataggaaaggatgacattaagcagaaatttactcaatgttttttccttgctcctcaagagaaaggctactttgttttgaatgatgtttttagatatgttgatgaaaatggaatccaagggtctgctcatgatatt

SEQ ID NO: 76583 - DNA, 245 bp, Glycine max
  Clone ID: 700955592H1
ggtttttataaaatttcagttcatgatgatgcacagcagtggagttcctcaagtggttcttctggtccaatacacaaggtaccaagtttatcaggatttcttagatccatggaatccgtctctaagttgaagtggcctaggaatggttatagaaagctgaaagcagaggatcatcataaagaaactgatggtgaactacttccaacagctggattgaataggggcaacaatgcacgctgtgaaag

SEQ ID NO: 76584 - DNA, 261 bp, Glycine max
  Clone ID: 700955601H1
gaaggatgccacaatcgagcaacttctgcctattttcctttctcttttgaaagacgagtttcctgatgtcaggctaaatattatcagcaagcttgatcaagtgaaccaggttattggtattgatttgttatctcagtctctgttgccagccatagtagaactagctgaggatcggcactggagagttcgacttgcaatcatagaatatatacccttattggcaagccagttgggtgttagtttttttgatgataagcttgg

SEQ ID NO: 76585 - DNA, 253 bp, Glycine max
  Clone ID: 700955605H1
gtgaagagacactcagaaagatgaggttatcgttgaggcatgctttggtgtttgtgttaatcggggcgttgtggaacttgcaaagggcagagggtatccgatttgtgatagacagagacgagtgtttctcccatgatgtgaagtacgagggtgacactgttcatgtctctttcgttgttattaaggctgattctccctggcattacggcgacgaaggtgtcgatctcgtggtaaagggaccttctggcgagca

SEQ ID NO: 76586 - DNA, 254 bp, Glycine max
  Clone ID: 700955607H1
gctagctttcaaatgagaatgtttgcagaaagggctcaaaagcaacacacttcttccaatcattcccttgttgatactctgccagtgacattatcaggtccatctgaacagagaaatgactcgggcaatgcttcagcaacagctgcccatgcatggatgtctgttggggctggagggtttaaacaaggacccgataattctagttcacccaaaaataagatatctgtagaatctttgtacaactcaacaagaga

SEQ ID NO: 76587 - DNA, 257 bp, Glycine max
  Clone ID: 700955618H1
cttgaacttgaactatcgtgtcttcttggctttctctgttcaggatcaacatggatattgtatcacgagctttgctatttccgttggctatacttgtgctcatattaagcacaccttgctcaggtgcttttgggaagagtggaactaatgtgaaaacagctatttttctgtcccccaagtttgaacttggaccaggatcggtagccaataaatatgattatgacgctgattttccaagaggtcatatagcacttaag

SEQ ID NO: 76588 - DNA, 253 bp, Glycine max
  Clone ID: 700955622H1
ctatggtatgtttcaaatatctgctagcgatggcgaaactttcatatcagctgatgatttacgaataaatctttggaacctggaaattagcaatcaaagttttaatattgttgatgtaaagcctgcaaatatggaggatctgaccgaggttataacatcagcagaatttcaccctacacattgtaatacattggcatatagcagttcaaagggttcaattcgtcttgttgacttgcggcagtcagcattatgt

SEQ ID NO: 76589 - DNA, 250 bp, Glycine max
  Clone ID: 700955627H1
ccgagtttgggcgtttagatcagaaccaaatcgtgttctcttccattggcaaacatggcaactcaaatgagcaagaagagaaagtttgttgcggacggagtgttctttgccgaactgaacgaggttctgacacgtgaattggcggaggacggttactccggcgtcgaagttagggttacgccgatgcgcaccgagatcatcatcagagccaccagaacccaagccgttctaggtgagaagggaaggagaa

SEQ ID NO: 76590 - DNA, 257 bp, Glycine max
  Clone ID: 700955634H1
gaaataaatgttctttaaggatggtgaattggtgactatcgtccaagtaacaccattttcacttatccgcattggattcgaatagctttttttatccttttttttaggcctggcttattaaggtgtatgtagtatgtaccttggtccatctgagacacagtgcatgtaagaccatcactattgtgttaccccacaattctgtaatgtgggtgtgtcctacttgtaggtagcttctcaacattttccttaatcaacat

SEQ ID NO: 76591 - DNA, 143 bp, Glycine max
  Clone ID: 700955636H1
gtaccatgttatcttatcaaggatacagatgggttgtttgaccttgatctgattagagattgtatcatcatctttctttagcttgtggatgcttaagctttagttgttatggatcttggaaattatgtcaagtttagtttctt

SEQ ID NO: 76592 - DNA, 252 bp, Glycine max
  Clone ID: 700955638H1
cacaaagcacaaagcaaagctcatccttgagttaaaaaatggcagcagcttcttccatggctctctcatccccatccttggctggcaaggccgtgaagctgggcccatcagccccagaagtgggaagggtgagcatgaggaagaccgtcaccaagcaggtctcctcaggaagcccatggtacggcccagaccgagtcaagtacttgggcccattctctggcgagcccccgtcctacctaaccggtgagttcc

SEQ ID NO: 76593 - DNA, 251 bp, Glycine max
  Clone ID: 700955639H1
ttcagcttttccctcgttgaaatgaaaatgggttcttctttgtggactttgtgtctaattttggcttcactagcctcttctgcattctgtgcctttccacggaggccagtggatgttccattcggcagaaactacgttcccacttgggcttttgatcacatcaaatacttcaatggaggttctgagattcaacttcatcttgacaagtacactggtactggcttccagtccaaagggtcatacttgtttgg

SEQ ID NO: 76594 - DNA, 249 bp, Glycine max
  Clone ID: 700955642H1
ctgatatcattgttctgatgaaagacaaaagatggcagacaatgaggatggaagggataagactactcgtgggaatgaatgggaggttgtatctctgacagcatcgacatatgcagctgctcctggtcctgatgaagttgagatgaaggatgatgggaacgaagatgtatatggacaagatgaaggagaaacgtcacatgctttatttatgtctcgtcactttgtctttcctcccagtcagcatgaaaa

SEQ ID NO: 76595 - DNA, 248 bp, Glycine max
  Clone ID: 700955644H1
ctaggtttgtacagcgtttgctttgggggcgaaaaattcagccttttccgatttgcaccaaattcaacagagaacaacaccatttggtcagtcttctatgcttctgcctccaatctagggtttccttttcctgaattgttattctcttcaattgatgcggttcgatttgaaaggattgagggggttgtttgttggaattggactcaaaattagggtttgtgttttaggatcgtctcgtgtgaatcgat

SEQ ID NO: 76596 - DNA, 249 bp, Glycine max
  Clone ID: 700955645H1
aatgttatctgtgaggtcattcttgtgtggtgatgaattcaattcagtccttgcagagaatgattcagcttcagttaagagctctgaagtcacggtttcacagtccgtacatgagggcttgttaaacgatgaaggagacactgaaagtgaagaaactgtggagaatgtagcacagaacaggccaagttcaaactccaaaaagtcattgaatgaggaagaagcagctgttcttattcaatcagcatttag

SEQ ID NO: 76597 - DNA, 248 bp, Glycine max
  Clone ID: 700955646H1
caagattcgatttgagagtcttacagacaagagcaagcttgatgctcagccagagttgttcattcacattattcctgacaagaccaacaacacattgtctatcattgacagtggtattggcatgactaaggctgatttggtgaataacctcggtactattgcaaggtctgggaccaaggaattcatggaagccctggctgctggtgctgacgtgagcatgattgggcagttcggtgttggtttctact

SEQ ID NO: 76598 - DNA, 256 bp, Glycine max
  Clone ID: 700955650H1
gaggaaatgaaataattattttaattttgtaattcattgtttggttctgcttcacaggaatggtagatttgaggtgaaaaggttccacattggtcaggttccgatctcacaatggggaagtcaccaggaaaatggatcaaaactgtattgtttgggaaaaagtcatccaaatcaaatatttcaaaaggcagagagaagcttgttaatcaagaagaaggagttgtagttacctccaaggtgctagaaactggtttgg

SEQ ID NO: 76599 - DNA, 252 bp, Glycine max
  Clone ID: 700955654H1
atttatcaactcactcatcaatctcgtttgttctcactaactattacttcatcatgtcgtcgagcacagttggtcaagtcatcaaatgcaaagctgcggtttcatgggaggcagggaagccacttgtgattgaagaagtagaggtggcaccaccacaagctggtgaagtgcgtttgaagatcctctacacctctctttgccacactgatgtttacttctgggaagccaagggccaaactccattgtttcctc

SEQ ID NO: 76600 - DNA, 249 bp, Glycine max
  Clone ID: 700955655H1
gttgattcatgtcttcacgaactgctacattggccgttccgagatgtatgcttaagagagtgtcagggtctttatgatcttatggctgcagatacaagtgatgcagagtttgcaaccttgctagagttgaatggctctgatatgcattcaaaatctctggcatttgttccgctccgtgccagacatattctaaatgccatgattgattgtaagatgcctcaatctatttatacaaaggatgaaggaagt

SEQ ID NO: 76601 - DNA, 249 bp, Glycine max
  Clone ID: 700955662H1
cgccggagccacattgggcgttctgctacacaatgctccacaaggtttctcgaagtttcgccctcgtcattcagcaactcggcaccgagcttcgcaacgccgtttgcatattttatttggttctgcgagctctcgacaccgttgaggatgatactagcatagaaacagatgtcaaggtgccaatactgatagcctttcaccgtcatatttatgatcgtgattggcacttttcatgtggcacaaaggagt

SEQ ID NO: 76602 - DNA, 251 bp, Glycine max
  Clone ID: 700955668H1
taattttgacatattaactcgtgggatggaatctatcatctgttcttcactgattgagtgcactggtcaagctaagaagtcaacagatgaagagcctccaggataaaggatgctgcaggagttagtatttatgttatgctcactctggttgcattcagattaagttgcccctgttttgaattctgtttgcttttcacctattctttgatctgcaattctcggaattgtcgtcggttgaagttaaagtgcta

SEQ ID NO: 76603 - DNA, 250 bp, Glycine max
  unsure (1)..(250): unsure at all n locations
  Clone ID: 700955669H1
caactactactactataggtacttactactttgcctagctcctctttctctctcttcccttttgcactgaacttcactctctcttctatatcaagggttgatcacataacctcaatatatttctaataataattgatatagtntgagtnattgtttcgnnnnnnnnnnnnnnnnnnnnnnnnnnnnnatgggtagagggagagttgagttgaagaggatagagaacaaaatcaaccgccaagtaactttc

SEQ ID NO: 76604 - DNA, 250 bp, Glycine max
  Clone ID: 700955670H1
aagaaaaggtcaagtggggtatatgcatcactatccgagagagagagaggagagtattattcccagagaccgccaactccgctactagacaccgtcaactatcctattcatatgaaaaatctctctaccaatgtacgctgctcactctaactcaaacccatctacattataatattatataatggttatgtcaaaggattgattgatgcaggagctgaaacaactcgcagatgaactgcgttctgatgtt

SEQ ID NO: 76605 - DNA, 248 bp, Glycine max
  Clone ID: 700955671H1
cggattttgagagggatttgaagaagggtgaggctctttcgttgccgaggatcaagctctcaaggattgaccttgagtgggtccatgtcctcagcgaaggatgggccacacccctgaaaggcttcatgagagaagccgagttcctccaaacgcttcatttcaactcgctccgactcgatgatgggtcggtcgtgaacatgtcagtgcccatcgtgctggctattgatgatgcgcagaagcatcggatc

SEQ ID NO: 76606 - DNA, 247 bp, Glycine max
  Clone ID: 700955674H1
tattgcctcatgcactcatccaaataatcatgtcaatgaattggtccccatcaagaaattgtaccaagatatggaaagccgaatagaaaatgcagctaaggtgggtcaagtacccgaagaagtacgcccaaagtataaaggattttctcagtgggattcatatacttctcgacgtgaccatgacacaattcttcaaatattacttcatggaaaggactcgagtgccaaagatgtagatggaaatgtt

SEQ ID NO: 76607 - DNA, 246 bp, Glycine max
  Clone ID: 700955676H1
ctgagttgactgagtcttcgtaactcgctctctactgtctcagctactcatcgcattctctgcatttatcctccgatcacattttctctctcttcgttcgggatgtcggagaaagctcttagggatctcaatacaattcttggaactgaaaggaagaatgaggactccagtaaggcatgtttatccaagccttctgttgacaatgctgttgaaaatattgaagaatggcaaaagaaaaataatagt

SEQ ID NO: 76608 - DNA, 247 bp, Glycine max
  Clone ID: 700955690H1
ctctctcccaaactaaaaactaaaacccattttcttctccaaaaccttcgacttttctctaaccgaaacgcgcttcggaacatttcttcttcgctctctcacatcttccattgctccaactttcacgcactatcaaattccgacactactggtattggttctctccctcagatcaaaatagagttcggagaggtagcattgttactggcaatgaaaaatcttctgtaacttctattccacacttgaa

SEQ ID NO: 76609 - DNA, 250 bp, Glycine max
  Clone ID: 700955696H1
cgaactcaaaccgtttaagcttctccgagttttgacctacaacactctcgaatcccctcttgtgtgttgtagccgccccgtgaccatcaatggcggaaactgctgtcgacaaatcccaatctctcgctgaggaatattatgtgaaggataagcaaacagctgtagttgaaaaacctgttgaggtcaaagaagttgaaaacccagaggaggctgcttctgaggaacccgttgctgagaaaactgtggaaga

SEQ ID NO: 76610 - DNA, 243 bp, Glycine max
  Clone ID: 700955707H1
accgttttctccgccaccgatgccaaacgtaacgccagagactctcacgtccccattttggcacctttgcctattgggttcgcggtgttcttggttcacttggcaaccatccctatcaccggcactggtatcaaccctgctcgtagtcttggtgctgctatcatcttcaacaaggaccttggttgggatgatcactggatcttctgggtgggacctttcattggtgctgcacttgcagcactc

SEQ ID NO: 76611 - DNA, 242 bp, Glycine max
  Clone ID: 700955710H1
ccttcttccaaatttccaacttccctctgcctcttctaatggtatcgtatctttcgatggaagggtttgtaagggtttaagctcaaccaaaccctaaaccctaaatttcccaatttcttctttcgatcttccactctctccctttccatctcataaatttcgaatccatacactctcacctcatgccctcagatccaatccgcacccttttatcactgaagtgagtggcgttgttgaggtgt

SEQ ID NO: 76612 - DNA, 240 bp, Glycine max
  Clone ID: 700955714H1
caaatccaaatggccctttacattacactaataattggcctcctagtaaacaccctagtactctataaatagcatttgcatgcaccttagtcttcaccaaaatactcctcttggcatcttgtgttgtgtccctcttttaagctatttccttctcttaacacaattggttgtgccaattgccatagtcaccaaccaattaacaaaggtatatatatcatcatatcatcaccaaatgaaaaa

SEQ ID NO: 76613 - DNA, 249 bp, Glycine max
  Clone ID: 700955718H1
caactttctcacaaaacaaaactcgatttgtaactctcacaccatttccactcatatcccataagcaccaccatgactccacctaaagaaattgtgaccatcatttaccacaatggtcacattgtagatgatccagttcaaggatagatgtacacgtctatgaccccaatatttttttacgccagttgttctattacgtttatacaattcattcgaaaaattaacaatcgcctccctactcaagcaact

SEQ ID NO: 76614 - DNA, 243 bp, Glycine max
  Clone ID: 700955722H1
gcaaagatgctgctggacaagttcgtggttctccaaatgaatttgctggaataggctccacatcagcccttctttggctggctagaaggtttgcaattctatctgggcctaccattcctattattggcgagggtgatgaagaggcaaatgataggtatgtagaacaattagttgcaagtgcagaggctgctgtggaggaagttatccagcgtggggtggctgatccgaagaaaatagctgttg

SEQ ID NO: 76615 - DNA, 243 bp, Glycine max
  Clone ID: 700955724H1
ctccacttgattcagatgttgattttgatgtagagacagagaaaaaacaacaccggtttaacatgtggaagcattcatacttgaagacttgtgctgccattgatcgcgaactagagcagaatcgcaagatagattcattttacagtggaacaactgccttgtcaattgttagacagggtgaactcattatcattgcaaacgttggtgactctcgtgctgtgttagctacaacatcagatgatg

SEQ ID NO: 76616 - DNA, 242 bp, Glycine max
  Clone ID: 700955740H1
cccttctcctctcacactaattaacacactcatcaaaaaacccttctttctttcaggttcattacttgatcagtgtcaaaagggtagttgcaaattgcaatggctaagcatgatgttgagggtggttccttctcagcaaaggactaccatgatcctcctccagcacctttgattgatgctgaggaactcacacagtggtccttctacagggctttgattgctgaattcattgccacattact

SEQ ID NO: 76617 - DNA, 241 bp, Glycine max
  Clone ID: 700955741H1
taaaatcatggccaccacagccaccgaacctctcccttcctccgctgaaatgcctcctgccccgcctcctccgaagcaaccgccgcaaccggtggcggcggcgtcagcagtgaagcctgaggctccattgtccgattcgaaagcttcggcggaggcgaacgtaatagtggtcccgagctactctcgttggttctcgtgggattcgattgacgaatgcgaggtgcgtcacctccccgagttc

SEQ ID NO: 76618 - DNA, 239 bp, Glycine max
  Clone ID: 700955742H1
cttccggcgccatatcgcgtatctttctctgttctattcctacgatggagttttggggtgccgaggttaaggttggtgagtctgttaaggtagatccagccgaattcgaggcatgcatacacctttctcaggctgctcttggtgaggcaaagaaagacaaatcaaatgaaccagttgttctctacttgaaagttggtcaacagaaatttgtcttgggaaccctttccagggagaaaatt

SEQ ID NO: 76619 - DNA, 239 bp, Glycine max
  Clone ID: 700955746H1
cacttcaccaccacaccacaaccctaccctctctctctgtcatggtcattggaggagccttccctcgtttcgacccaatcaccaaatgtagcacccaagaccgctccaaccagaccatcgcctcggacctcgatggcaccctccttgtctcccggagtgccttcccctactacttcctcgtcgccctcgaagccggcagcgtcttccgagccctccttctcttaaccttcgtccccttc

SEQ ID NO: 76620 - DNA, 240 bp, Glycine max
  Clone ID: 700955747H1
atttgaatatgttgagggcccttctgtcaaagatgtgtttcttgaattcaggtcacatgttgtcaataaagagtggctggatgatattgcatcccaaattggtgatgcaattggaaagctacatgatggtggtcttattcatggtgatttaacaacatcaaatatgttactgaagagtgatacaaagcagttggttcttatcgattttggtttgagcttcacttcaactctaccagaaga

SEQ ID NO: 76621 - DNA, 242 bp, Glycine max
  Clone ID: 700955748H1
caatgcagcaagctccaaccacactcaccggattgctccatcgcgtcgccggaatattcccctcccgccgcgccgtctccgtctccggcaagttcgacctcacgcactcccgtctccaccacctcgtcgaactcgccgcctcgcgcctcctctccgccggcatcaaacccggcgatgtcgtcgccctcaccttccccaacaccgtcgagtttataataacgttcttggccgttattcgagcg

SEQ ID NO: 76622 - DNA, 242 bp, Glycine max
  Clone ID: 700955753H1
tgagatttccttgcagaagtacaaatgatggtttgggcgagaagacccaccacttcacattacttgatggtgagatggttattgatacattgccagattcacagaagcaggagagaagataccttatatatgatatgatggcaatcaaccaagtatcaataatagagcgtcccttctatgaacggtggaagatgcttgagaaagaagtgattgaacctaggaatcacgagcgacataatata

SEQ ID NO: 76623 - DNA, 242 bp, Glycine max
  Clone ID: 700955754H1
gtctcagaccctttctcaccaccatcttctttctcacactcacagtgctcaaggtttcagcatcatcctcagtgattttctacaacaagtgccagcacccagtgtggcccgggatccagcccagcgtaggaaagcccgttctggcccgcggaggcttcaagctcgccccaaaccgggcctactccctccagctccccgctctatggtccgggcgcttctggggccgccacggctgttccttc

SEQ ID NO: 76624 - DNA, 235 bp, Glycine max
  Clone ID: 700955775H1
agaaaaccctaattaatagataatagaaagagattgcatgatcgatggaaaaaccctagaagaatcatcggagcaggcaggcaagggggcacaatcgacgacgccgtagatgcttgttgcggttggagcgtcgtgggatctgaattggttcctgcaactgttgctctccgtcatcgtcgtggccgttggggttcactatttcgtcaaggccaccgcttccaagtacttcttagtc

SEQ ID NO: 76625 - DNA, 236 bp, Glycine max
  Clone ID: 700955777H1
gtatatactcactaattggacaacccttctcctacctccatggctaatttcataactttcttcattcccctagccctaaccctccttttctcctccctcgtcactgccagttaccatcaaagcatctctccaagccttctacgttctcgtgagaagctcacgcaccttcgcttctatttccatgaaatttttactagcgacaaaccctctaatctcgtgatcgacccccccaaggt

SEQ ID NO: 76626 - DNA, 241 bp, Glycine max
  Clone ID: 700955784H1
cgtttccaactaccaaaaagacgacgctgcagactctcctcgtcccgtcggaggttgtggtcggaattgcctcaaagcttgttgccttccagatgcaaagctgcctttgtatgctttcaagaaggctaatggaaaggatttggccctgcatgcatgcgccggggagcctcccctcacattcctcgactcacttcttcttggagagtgggaagatcgcatgcagagaggactttttcgctat

SEQ ID NO: 76627 - DNA, 235 bp, Glycine max
  Clone ID: 700955793H1
ctaaaaacaaagagtgtgatagtaagagtagtagaagagcggtctggtccaagtgctgcaatatgcaaggcaaagaaatggaagggttgtcgtcttcgtcggcgatcgcgcagaaaacatgggaactcgagaacaacatcatcccgatggacactccgggcggcgccgccatctcctccacaaccaccacgacaagcgccgacgactcgatcttctactacgacgaggcgggcca

SEQ ID NO: 76628 - DNA, 245 bp, Glycine max
  Clone ID: 700955808H1
cataacttcaacaacttctttcttctcgatctcacgatggctcatttggccctgtctcagatggctgtaactgttcctgttggcaacgatttgtctctcagaagatctgcagttaaggcccctaacttgaacttttgggataaatcatgggcaccagtatttactttggacttgaagccaaacaacccaagtttaagaagtcgtcatgtggtatgcatgtccgtgcaacaagcaagtgtatccaa

SEQ ID NO: 76629 - DNA, 251 bp, Glycine max
  Clone ID: 700955818H1
tgaattctccagagagaagaagaaacttaatcgatcatcacttcacttcactaatacatcatggcagacgagacccagaacaagtatgagagctctgaggttgaggtccaggatcgtggtgtttttgactttctcggtaagaaaaaggatgaagaagacaagcctcatcctcaggaggaggtcatcgccaccgagtttcaaaaagtcactgtctcagaccaaggagagaacaagcacagcctcttagaaaa

SEQ ID NO: 76630 - DNA, 248 bp, Glycine max
  Clone ID: 700955819H1
ataacacaaagcacaaagcaaagctcatccttgagttaaaaaatggcagcagcttcttccatggctctctcatccccatccttggctggcaaggccgtgaagctgggcccatcagccccagaagtgggaagggtgagcatgaggaagaccgtcaccaagcaggtctcctcaggaagcccatggtacggcccagaccgagtcaagtacttgggcccattctctggcgagcccccgtcctacctaaccgg

SEQ ID NO: 76631 - DNA, 249 bp, Glycine max
  Clone ID: 700955820H1
taaaaactcaatatcaaattctttgtcccacaaaagatggggttcactcccacaagtactgcaacatgctttctcataatagcacctctggttgtgctatggtgttggaagctactaaagtgggtgtggctgaggccaaagagattggagagagcattaagggcacagggccttcaggggaatccctacagcctcttgattggggacactaaggaaatgtacacagtgctcatgcaagctgccagatct

SEQ ID NO: 76632 - DNA, 246 bp, Glycine max
  Clone ID: 700955824H1
aaaaaaaatctcaaaataaaacaaccaaaccacacacttcacaccctcttcaacatcctcagcaagtacaagaacaagaagaaacaatgtcttgctccaatctcacaatgttggtgtcctcaaaaccttccctttccgatccctccaatctctccttccgctctgtcctcaacccttttcagctcccttcacaaaacccaacttcatgcactccttcacgctcctcaaccacccaaattcagtgtg

SEQ ID NO: 76633 - DNA, 247 bp, Glycine max
  Clone ID: 700955825H1
gccgaagctgggaaaacaagccgcaacgaaagcgattaaggagtggggtcaaccaaagtcaaagatcacacaccttgtgttctgcaccacttcaggcgtggacatgcccggagcagattaccagctcacgaagcttctcggcctgaggccctccgtgaagcgcctcatgatgtatcagcagggctgcttcgccggcggcaccgtactccgcctcgcgaaggacctcgccgagaacaacaagggtgcg

SEQ ID NO: 76634 - DNA, 80 bp, Glycine max
  Clone ID: 700955836H1
ggttctttgtttagaccaaagaaacgcatgattcactagaaacattgagtacaagctcaataattattttttttttttct

SEQ ID NO: 76635 - DNA, 242 bp, Glycine max
  Clone ID: 700955843H1
ggagttaataaggtcacatgctcccttcaggctgatcttaaggacttggctcacaagtgtgttgatgctaccaaaattgcaggctttgcccttgccacctctgctctcgttgtttctggggcaagtgctgaaggagtaccaaagcggctaacctttgacgaaatccagagcaagacctacttggaagtgaaggggacaggaacagcaaaccagtgtccaacaattgatggtggattggagtc

SEQ ID NO: 76636 - DNA, 244 bp, Glycine max
  Clone ID: 700955846H1
gttccaggacaaggttttaatcagaatgcagtgagttttaattctttgcattcttcaagctgccaagcagttggacaaagtcaagtagcagttcccattctaccttcaaagggtggaattgttgatggtatgctgaaacaggaagtctccactgagaaaaagtacactgctgaaccaaatatcatggatgctggcttatcacaagttagttcaagaaatcctcctccaaccgcgaacgtggtag

SEQ ID NO: 76637 - DNA, 243 bp, Glycine max
  Clone ID: 700955855H1
agagtgttgtgttgctagtgcaagaggcaccaacatagatagatacatacgtgcgtgcgtacgtaggaagggtacgtacgcggtagtacacaacacaccaacacaccgttttgcactctgttctgatcatgagggcgcacaagatgggtgttatcgtggggatcactgttgctactgcttctgcttcttaagccttttcttttcttctgtgggttccccctctttcgatattctgcactttag

SEQ ID NO: 76638 - DNA, 244 bp, Glycine max
  Clone ID: 700955857H1
caaaaggccttctttcctcatttcggacgcacgctccccatccatgtctacttgtgtaaaatcccgaggtgtgaaaataatggaccacctttggtgaagtggacacatatataattgataagaatacttaatctctctctctatgtgttttttgggtacagatgtttgtattgttggtgttgcacggacgccaataggtggtttacttggcaccctatcatctctttctgccacagagttaggc

SEQ ID NO: 76639 - DNA, 244 bp, Glycine max
  Clone ID: 700955859H1
ctctccttgaaaacagaggagaagaggaagaagcagaggaagagagaagaacaaacgaagcatggtttcgacgagacgcagtggatctctctctgccaaaagatcttcctcctcggaagataaatctccttcgccgaagcgccaaaaggtcgacaatggcggttcgtcggagaaatcggtgccgacgccggcggagaattccaaggatttatcttccccggagcccgtgcctgatcccggagaa

SEQ ID NO: 76640 - DNA, 244 bp, Glycine max
  Clone ID: 700955861H1
gcatcttctcctgaaatcattgactttaactaagttcttgcatagaacctttatgtgtgtgaagcatgaactaatgagaaacgaattagcaaacagtcaaacactaatatccagacatagcttttcattattaaagatagcgtggtatctttggcggcctgagcagaatgattattgttccaattggggcttagcattttttttcttttcaggcttctaaccccacctgggactccccttttcc

SEQ ID NO: 76641 - DNA, 248 bp, Glycine max
  Clone ID: 700955864H1
ctctgggaagtccactaccactggccacctgatctacaagcttggaggcattgacaagcgtgttattgagagatttgagaaggaagctgctgagatgaacaagaggtctttcaagtatgcctgggtgcttgataagcttaaggctgagcgtgaaagaggaatcacaattgatattgccttgtggaagtttgaaaccaccaagtactattgcacagtcattgatgcccctggacacagggatttcatca

SEQ ID NO: 76642 - DNA, 245 bp, Glycine max
  Clone ID: 700955867H1
tggttgtacagcaatattgaagccatctgaattggcatctgtgacctgtttggagctggctgaaatatgcagagaagttggccttcctccaggggtattaaacattgttactggattaggcaatgaagctggtgctcctttgtcatctcatcctgacgtagacaagatttcctttactggaagctctgcaactggaagcaggattatgacagctgcagcacagctaacgaagcctgtttctctag

SEQ ID NO: 76643 - DNA, 245 bp, Glycine max
  Clone ID: 700955869H1
aacacggtcccgctccctctccatcccatcacaaagaaaacagagattcgcattattagcagatcggactcaaccgatgaagttgaagccgcagtgaaacaaaccagaataattgacgcatcatcaattagatcgagctgctagaaatgaaggatgaggacgggcttccgacgaccgccgccacgaagaaggaaagcatggattcgagtctgtttgggaaagggaggtacaaattctgggcgtta

SEQ ID NO: 76644 - DNA, 242 bp, Glycine max
  Clone ID: 700955876H1
ttcggttccgaagggacaaccaacgaccaccctctcttctgactcacttctcgaaccttccaaacatggaacgcatcgttggcggcaagtacaagctcggccgcaagatcggaagtggatccttcggcgaaatctacctcgcgacgcatattaataccttcgagatcgtcgccgtcaagatcgagaatagtaaaacaaaacatccacaactgctttacgaggcaaagctatacaatattctt

SEQ ID NO: 76645 - DNA, 243 bp, Glycine max
  Clone ID: 700955891H1
acgaaacagatagctgcttctttctctcacgcaaccgtcgtcgttcatcaatggctacactcaacctctcttcgttgcaagctctcgccttccatcgtttatcctcttcttttccccaaagtacccctaccctttccttcaatttccaaccaaaacccttcgctaacccgcgcccaatttctctgaaaccctacgtttccgagaaacctcgcgcgcgcgtggtggcgctggccgtgaagagcc

SEQ ID NO: 76646 - DNA, 243 bp, Glycine max
  Clone ID: 700955893H1
ggaactccttaagcagcttcagagtctgagaagtgagaagcggaagaagaagcgatgcgtttttgcccgtgttttggatccgaggaggccaagggggtggcggatcgcgacccggtcctgctggtttcgggcatgggcggctccattgtcaattccaagcccaagaaattcgggttcaccactcgggtttgggtcagactcctcctcgctgacgtcgagttccgaaacaagatttggtccctt

SEQ ID NO: 76647 - DNA, 243 bp, Glycine max
  Clone ID: 700955894H1
tggggtttcacacgtgcgcaatttgaaggtattattggaggagagagtgtaaatgaagaaaccaacaaccgacgcaattagtatggggaaaaggagcctggagggtggagaagatgaccagcctgaacgaaagaggcctgctcttgccagtgtaattgtggaagctctgaaggtggacagtttgcagaagctttgctcatctttagaacccattcttcgtagagttgtcagtgaagaagtgga

SEQ ID NO: 76648 - DNA, 245 bp, Glycine max
  Clone ID: 700955895H1
ctccaatccaaccaaattcaactacctgtacagtttggtacaagtagaggttgaaactaaaacggctaagtcatcatccagttgtaccaatggacttctttggcttacaaggtaaagaacaccaagcaactaccatttaacatgtaattcatactgttatggcattccaaaatttgttattttagagaactatttccttaatttgtaatgttccaagcccagagtctgttgtccatgagtaaaca

SEQ ID NO: 76649 - DNA, 260 bp, Glycine max
  Clone ID: 700955910H1
agccccgagaggagcttaccagaatgctttatcgggtaagtttgttccagcgttggaaacgtgcgctcggattaaaataaccgacccgaacccgaaatgggatatggaaacaatgcccggtgctagagtcatgagtgacatggttttactcccgaacggcgacgttttgattgttaatggagcagccgtagggactgcgggctgggaattgggccgtaacccgctactgagtccgtttctttataaaccaaataatcggg

SEQ ID NO: 76650 - DNA, 255 bp, Glycine max
  Clone ID: 700955929H1
gaagagcgtcgcagttgtaaccctaatcagaagaagcgcagttcaagcgagtgacagccaccagccatgggtcgtatgcacagccgcggtaagggtatatcctcttctgctttgccctacaaaaggacacctcctagctggctcaagatctcttcgcaagatgtcgaagaaaatatctgcaagtttgcgaagaaaggtttgaccccgtctcagattggtgtcattctcagagattctcacggtattgctcaggtc

SEQ ID NO: 76651 - DNA, 254 bp, Glycine max
  Clone ID: 700955930H1
gccaaattttaggtacacttacaagttggggcatatgctgtctaacggttcttatgtatggagtaagaagtattcattcaaggcatccccatatcctggacagaactctttgcaacgtgttatcatatttggtgacatgggaaaggctgagcgtgatggttcaaatgaatatgctgattatcaaccgggttctctaaacaccacagaccaactcgtcaaggatttagaaaattatgacattgttttccacatag

SEQ ID NO: 76652 - DNA, 257 bp, Glycine max
  Clone ID: 700955931H1
ctttgcgcagttccctacctctcctttcaagatgcagatcttcgtcaagaccctcaccggaaagaccatcacccttgaggtggaaagctctgacaccatcgacaacgtcaaggccaagatccaggacaaggaaggaattcccccggatcagcaacgtctcatcttcgccggaaagcagctcgaggacggccgtaccctcgccgactacaacatccagaaggagtcaacccttcaccttgtccttcgtctccgtggtg

SEQ ID NO: 76653 - DNA, 266 bp, Glycine max
  Clone ID: 700955934H1
cttttggagtgtgtgtgcacccattgatgacaagcaaccccattgcatggaagcctaagaggaggagaagacgaagaggacaagggtaactgaatcgccgcttctgcagcttcgttctttcgtttttgtttcatctttttagcttcagagggtaaataaaaaatggaggttttggtgggtcccgctttcaccatcgacgttccctcgtctccgccgcagcatgccggttccgatgatcggatctttcttaacgtgtcacccgaaga

SEQ ID NO: 76654 - DNA, 260 bp, Glycine max
  Clone ID: 700955940H1
gaaagaatcccaggcgaggagaaagatggaggggaaggagcaggatgtgtcgttgggagcgaacaagttccccgagagacagccgattgggacggcggcgcagagccaagacgacggcaaggactaccaggagccggcgccggcgccgctggttgacccgacggagtttacgtcatggtcgttttacagagcagggatagcagagtttgtggccacttttctgtttctctacatcaccgtcttaaccgttatgggagtcg

SEQ ID NO: 76655 - DNA, 256 bp, Glycine max
  Clone ID: 700955943H1
aaaatatattcaattttgcgtttctctgcctaaaaggattgaaagatgggtcaagcattcggttgctaccaagtcgatcagtcaaatgtggctatcaaggagcattttggaaaatttgatgatgtcctagagcctggatgtcactgcctgccttggtgtcttgggtaccagattgctggtagtctgtcgctgcgagtgcagcaacttgatgttcgatgtgagacgaaaaccaaggacaatgtctttgtcaatgtgg

SEQ ID NO: 76656 - DNA, 253 bp, Glycine max
  Clone ID: 700955946H1
gaagaaaggtattggagcgaatgaattgctgtcccatctttcagcacatcctgcacctgctcaagaaaagatgagtgctctggttgaagctctattcgagggaactgagaaaggttttgctaaagaagctgataagaagaagaactactttgctgctgctgttgccgaagagggatcccagctgttattgcttcatgctattgaagaattttcttgcaagtctacttccaatgctttgaaggaggttgccctg

SEQ ID NO: 76657 - DNA, 164 bp, Glycine max
  Clone ID: 700955954H1
caaatgacacatttatgtttttcttactgccatatttatgttttgtttttcaatagttgactcttgatatctgctctcttattttcatgaacatatagaacaattgcctgcccataattgtatatagttgcaaataaaaatataacaccttgttagtttgacat

SEQ ID NO: 76658 - DNA, 257 bp, Glycine max
  Clone ID: 700955958H1
ggcaattttctgcatcaagtatggaagcaatttatgaggcattaatttatagtaacatataacaatcaactttggttcatcaagctctatccaaattcaatcaccaaatttaatcctctccctattatgtaagtactttatataccaaattgaatttggtttgttcaaatttgtcaacaagttaggatcaaggtgaacttctgcatccttttgctactatgtttgaaaagttgataccaaattgaatttcgtttgtt

SEQ ID NO: 76659 - DNA, 254 bp, Glycine max
  Clone ID: 700955960H1
ttttatttacaacaacaatggcttctgtgcctcaaccaaaaatctcccttctaaccttattcttcttctcgtccttcaccatcattgcgcatgcaattgttcctcaaaacgaaaccttcaaatttgagaactcaggtgaacttggaccctacatcgttgagtacggtgcagattacagaatgataagcatcttcaactctccattccaagttggtttctacaacaccaccccaaatgccttcactctagctttg

SEQ ID NO: 76660 - DNA, 252 bp, Glycine max
  Clone ID: 700955961H1
gatctatgggatgatgagaagaagaaggcgcagtttcattggacattcatattctcaaaccttattgtgcaatgggctcagtggttagcaaatttggtattaggatctggatctattcttgggcgtcttttatcttttccttctgctgcactaaatatgcaaaacaataggatgtttcctccatctctaagccctctgcaggaagaaagactaagaaatctacgacaacggcttgaagttccctttgatggt

SEQ ID NO: 76661 - DNA, 251 bp, Glycine max
  Clone ID: 700955962H1
cggcaaccttcccgatgccttccatattgccgagactaccaaaatcttcctcccagctcttcgagactgcaacaggttaaccatttcggagccatttcctgagtgggagagcgagttgatgccttcagggagaacaatgggagaccttttggtcctccccaatggggacctcttgctcatcaatggtgcaaccatgggtacggctgcatggtgggatgctgacttgcctaactacacgcccgtgttgtaca

SEQ ID NO: 76662 - DNA, 254 bp, Glycine max
  Clone ID: 700955963H1
gcagaaagcaagctcatcctagagttttaaaaatggcagcagcctcctccatggctctctcttccccatccttggctggcaaggccgtgaagctgggcccatcagcccccgaagtcgggagggtcagcatgaggaagaccgtcaccaagcaggcctcctccggaagcccatggtacggcccagaccgcgtcaagtacttgggcccattctctggcgagcccccgtcctacctcactggcgagttcccaggtgac

SEQ ID NO: 76663 - DNA, 255 bp, Glycine max
  Clone ID: 700955973H1
taatgaataatgttggtctatagtgcgcacacatgctgatgctgtagattgacgaagaagcagttggccaaccgcgataatctctacatattaatataatctttctcgtcacctgagagaaatagaaaatgtggagtcgcgcaagaacccttttccttcgcgtcctggtaatcttctattctcctttctccctctctctccatctctgactttggatattgtttcttctcgactccaggaacctcctaatcacaa

SEQ ID NO: 76664 - DNA, 252 bp, Glycine max
  Clone ID: 700955979H1
tgccaaggcaatgacattccagaacactgccggtgctgagggacaccaagccgttgcattcaggaaccaaggagacatgtccgctctcgttggttgccacatcttgggttaccaagacaccttgtacgtccagaccaacaggcaattctaccgcaactgcgtcatctccggcacagtcgacttcatcttcggcacctcctccaccgtgatccagcactccgttatcatcgtgaggaagcccctggacaacca

SEQ ID NO: 76665 - DNA, 255 bp, Glycine max
  Clone ID: 700955987H1
tgatgaacttgatccatggaccgcatgggcatacaagcctcgcaccatcacattgttacttattggtgcttgctttcttatatgggcaagtggagcacttgatccagaaagagatgcatctggggatcttgttacttctgttaaaaggggtgtatgggcaatgattgctgtttttcttgcttattgcctactgcaagctccttctacggttcttattaggccacatcctgcaatttggcgcttggttcatggaat

SEQ ID NO: 76666 - DNA, 252 bp, Glycine max
  Clone ID: 700955991H1
attttatccaattgaaattttaaaaatgactgggataaacttaagaattcaattattgaaattgaataagtaaacaatttaattggattggtcgaatggtatcaaaaaaatggagtactaactcccatttcttatttattattgaattaaccgatcaacttgctttgttatcgaacatttctttttgatttcaaaaattttccggaaaaaatttgaatctatttttatatgcgaatcaatcctactacttct

SEQ ID NO: 76667 - DNA, 251 bp, Glycine max
  Clone ID: 700955992H1
ctaatgaggtctgatacggataatcactgtctgaaaaaggtgaagttggaggttcaagatgaaatcccccctcttcacactcacaagcgacccaaattggaatctccccttaagtgtggtgcaagcgatgaatccatttcaatcccaccagcttcatacaatcccttggatgagccaagccctttgggtttgcgtctcaggaagagtccctcccttttggatttgattcagatgaggctctcgcaacaaga

SEQ ID NO: 76668 - DNA, 249 bp, Glycine max
  Clone ID: 700955994H1
caacagctaacgtgcaagttccaaggcagagaaaacaataatggccaccacctcggagagggatatggagaacaagagtgatcaagaagaactgaagcatcttgggtttgtgaagattgcggcaattaaagcctttgtgtgtgtgtcgaatctctacgacttcgcaaagcaaaactcgggacctttgagatctgctgttggaaccgtggaagacactgtaaccaccgttctgggtcccgtctaccacca

SEQ ID NO: 76669 - DNA, 254 bp, Glycine max
  Clone ID: 700956008H1
atttttctcagttctcgctatcccgcaccccccaacccccgcgtatggcttcctctgcaacagacgataacccaagatctgtaaaaagagtagctgttgttggtgctggggtaagtgggcttgctgcggcttacaaattgaaatcacatggtctggatgtcactgtatttgaagctgagggaagagctggagggaggttgagaagtgtttctcaggatggtctaatttgggatgagggagctaatacaatgact

SEQ ID NO: 76670 - DNA, 253 bp, Glycine max
  Clone ID: 700956011H1
tcttcttctcttaaaagagcctttgctttttctttaggcctttccgaattaagtacttgtttcattttctctcgaagcaagaaaaatgttcatcgagagtttcaaggttgagagtcctaacgtgaagtacacagagactgagattcagtccgtgtacaactatgaaaccactgaacttgttcacgagaacaagaatggcacttatcagtgggttgtcaagcccaaaactgtcaaatatgaatttaaaaccaac

SEQ ID NO: 76671 - DNA, 158 bp, Glycine max
  Clone ID: 700956012H1
aatttctgccagcctcaaaaaagacttgctctgcctctgccactctctgagtaggactacactgccatggctgcctcagtctccactgttggagctgtcaacggagctccactgagcttgaacagctctggagctggagcttcagttcccagttcagc

SEQ ID NO: 76672 - DNA, 259 bp, Glycine max
  Clone ID: 700956018H1
caaaatcaaatcgaattggattggatacaatacaatacaaccctatataagccttcaaaacctgcgctgcgtgctgtcgtttcatttgctttactcaccgaaagtaacggagggatttccttaacccacaaactctcaaataccctctctctctcaccgaccactatgttgcagagacctagacgccgctgcgagggcactgccatgggcgccatcgttctcgatctccgtcccggtctcggaattggacccttctccc

SEQ ID NO: 76673 - DNA, 159 bp, Glycine max
  Clone ID: 700956026H1
tctcaactgcgcggtgagtgagtgagagacggaaagtgcaaagccaccgtcttctcttctcagagcttggctttgcttatcgattctctctcctctcatctttctcattcaaggtttgtaaaagatggccgatgctgaggatattcaaccccttgtttg

SEQ ID NO: 76674 - DNA, 253 bp, Glycine max
  Clone ID: 700956045H1
gtttgaaaagaaagtctccagagagtggagacaatttactcttcaacagattttctctggatgaccttaatgaagatctcttggagagggtactttcatggctaccaacttcctcattttttcgcctcacttcggtgtgcaagaggtggaaatcagctgctgcttctgtgagtttcaagcttgcctgctcacacgttccttcacgtgacccttggtttttgatggttgctccaaacctcaaccaatctattgt

SEQ ID NO: 76675 - DNA, 261 bp, Glycine max
  Clone ID: 700956048H1
caactactaaagcgatcgaagaagggaactaaaaaccaagccagtgtctcactctcaccccagaaactcattgttgtgtggcacaacaaacttcaccaatgatgaaagccctcacaagctcttgttctaaggccatggtcgagactctaggacccttctctcccagagttcccctttgtgtttctgatagacccgaattctgcttcacccttcgttccaaaaatgagaaaaagggatggaatttattgctcctgaaactgg

SEQ ID NO: 76676 - DNA, 252 bp, Glycine max
  Clone ID: 700956052H1
cttcatctattttttcttcgcccccttttgtgtttcttttttaggttgtttgttctttcttctcgttcgtcgctttgtgatctctctctgcaaccatgtccgccgagaaagagagagagacccaggtttacttggccaagcttgccgagcaggccgagagatacgaagaaatggttgagtgtatgaagaaagtagcaaaacttgatcttgatctaactgtggaagaaaggaacctcctctcagtgggataca

SEQ ID NO: 76677 - DNA, 250 bp, Glycine max
  Clone ID: 700956058H1
gttggtcaatccagtactagtagtgttataccatctgaacatttgttctgtgcatttgctgctgccaactgcccccttgaagataaatgttctcgcattcatggaaatcagtgcttatactgtagaaaattttgcttacatcctactgatcgaaaggaaaaagaaaaccatttgagaacttgtgagaaaaaggaaaaataccttcaggctttgaaagatagtcaagaagtagagtgcaatgtttgtttgg

SEQ ID NO: 76678 - DNA, 247 bp, Glycine max
  Clone ID: 700956059H1
aaagaagaaagaaacaaagatataaggaaaaagggaaaatattttgaataaggaagatataaggcaatatataaaaatattagtatttgataataattaggtgtagaaatattatggggaggggaagagtggaactcaaaaggatagagaacaagataaacaggcaggtaacgtttgcaaagaggagaaatgggctctcaagaaagcctatgagcttctgttctctgtgatgctgaggttgccctca

SEQ ID NO: 76679 - DNA, 261 bp, Glycine max
  Clone ID: 700956064H1
atttaacctagaaataaagaaaagaaaaacaaaagcaaaacggcatgtcgtgtaatgtaatgaaacgaatgaaatgataggtaggtggaggattgagagagtgcggtgttggttcaccatgaggaagtttggtgcttgaacttgaacccgaacattgcgattcagacatagagaatggccatggcccgaagagtccctcgttatgttttaggatcggtccaaaggaacatgtccttcaaatctttggatcccccttcctcc

SEQ ID NO: 76680 - DNA, 256 bp, Glycine max
  Clone ID: 700956066H1
cagcagagtgtgctcgtaatgctttgttggagaaggttgtggacaataaagcagattctgagaaattcaggtcagacttattgaacattgcatgactactttgagctccaagattctctcacaggacaaggagcattttgcaaaattagctgtggatgctgtaatgagactaaagggaagcaccaatttagaatctatccagattataaagaaacctggaggctcattaatggattcattcttagatgaaggattc

SEQ ID NO: 76681 - DNA, 250 bp, Glycine max
  Clone ID: 700956068H1
gaaacttgcagagcagcttctagacttgctatgcgagaatctgggcctggagaaagggtacctgaagaaggtgttctacggatccaagggtccaaattttgggacaaaagtgagcaactaccctccttgtcccacccctgatctgatcaagggactaagagctcacactgatgctggtggcataattctactcttccaagatgacaaggtgagtggcttgcagctcctcaaggatgaccagtggatcgat

SEQ ID NO: 76682 - DNA, 250 bp, Glycine max
  Clone ID: 700956074H1
gcaacctacaagggccaacaaattactggtgatacccctgtgccacccttttatcaaggccaagaagagagtaatctcataacagcttctttggtgggaaatgctttacccgtggctccgtctcttggctatgaacttggtcgtgatcaaattgttggaagactagtcttgaatctcaaagccaatggaaagcttcgttggaaagtgggaacatgggtctctggacgttacaggttcaatgttaattgtg

SEQ ID NO: 76683 - DNA, 258 bp, Glycine max
  Clone ID: 700956080H1
gcggaatcggagtctccaagatcctcatcatagcaggagcaggttacaccggcaccgtcctcatcaaaaacggaaaactctcggatttaatcggcgagcttcagttgctggtgaagggattggaaaaatctggggagcatgctgaaggtgaaggtgaatatgctgatgccatagctgctcaggtgcgtcgcctggcgaatgaagttcggcagctagcatcaaacaggccaatcacagtactgaatgggggttctgaac

SEQ ID NO: 76684 - DNA, 250 bp, Glycine max
  Clone ID: 700956093H1
gttctgttgcaaatgacaatcatctccctgctagtggatgtattgggtcagcatccacatcatgtctatcaggatcagtgccttctctgggcacagtaaatcctactggtccaaatgatcaagctgttaatgatgatattttaccaatgcttcatatttttaatgatgacaaatggtttgaggagatttataatcctggtcaggaaaatattgttgaaggtgcaccaccttcagatgatttttttgcggg

SEQ ID NO: 76685 - DNA, 270 bp, Glycine max
  Clone ID: 700956108H1
gtggactttatattcaacaagttttctgtcaaacccgggtcagaggaggctcagatcatgaagaatactattagtgagtgtgaagagggtggaatcaaaggagaggaaaagtactgtgccacttcgcttgaatccatggttgatttcagcacttccaagcttggaaataatgttgaggttgtgtccacagaagtggacaaggaaacgggattgcagaaatacaccgtagcaccgggagtgaagaagttatcaggggacaaggctgttgtg

SEQ ID NO: 76686 - DNA, 265 bp, Glycine max
  Clone ID: 700956127H1
cagaaacctagcaaggcaaagtattatttggaagacacaagtgagattttgagaatgttgcaaggccttgccaatgcttctgagcactctactagaacttctttgcaaccagcttctcattaagctttttttggtcagttttcttcatatgtgcacaaatttcagtgagtggttcttttctttctttagcaacaattgctcgtacaattaattgggggccgaaagctgtggacttgtggtcatataaatgttttaccgaggtggt

SEQ ID NO: 76687 - DNA, 264 bp, Glycine max
  Clone ID: 700956135H1
cagaaacctagcaaggcaaagtattatttggaagacacaagtgagattttgagaatgttgcaaggccttgccaatgcttctgagcactctactagaacttctttgcaaccagcttctcattaagctttttttggtcagttttcttcatatgtgcacaaatttcagtgagtggttcttttctttctttagcaacaattgctcgtacaattaattgggggccgaaagctgtggacttgtggtcatataaatgttttaccgaggtgg

SEQ ID NO: 76688 - DNA, 263 bp, Glycine max
  Clone ID: 700956143H1
tgccaataatatatgagcgtggattattcggtatttatcatgattggtgtgaatcattgaatacttaccctagatcatatgatcttctgcatgccgactctatattctcaacacttaaggaaaagtgcaacatactggcagtgattgcagaagttgataggatcctgagaccagaaggatatttggtcataagagacaatgttgaaactattggcgagatagagagcatggctaaatctctacactgggatattcagttgaca

SEQ ID NO: 76689 - DNA, 262 bp, Glycine max
  Clone ID: 700956151H1
ttgtgttgtgtccctcttttaagctatttccttctcttaacacaattggttgtgccaattgccatagtcaccaaccaattaacaaaggtatatatatcatcatatcatcaccaaatgaaaaatattgggttgttttttcttgtggtggtggctacttttgtggtggcagccacagctggtagcttttaccaagactttgaaataacgtggggtggtgagcgtgccaaaatctatgagaatggaaaccttctcacactctccc

SEQ ID NO: 76690 - DNA, 262 bp, Glycine max
  Clone ID: 700956152H1
gtccatatggaaaacacttggtgggaaaagaagggattttactgattcagattggttagaatctgcgtttctcttctacgatgagaacaagaaccttgtgcgtgtgaaggtcaaggattctcttgacactagaaaactagggtatgtttaccaagatgttgacattccatggttaaattctaagcccacgccgcgtaggtcaagggttcagaaggtagcattagcacaaaattttggtgttggtgcagcacatgctgctgag

SEQ ID NO: 76691 - DNA, 258 bp, Glycine max
  Clone ID: 700956161H1
ctaaacactcaactgatactcgggttgaggatcttgttagcaggatgactcttgaggagaaaattggccaaatgttgcaggttgagcgcaagtatgtatctgctgatttacttaagaagtattttattggggctgtattgagtgagggagggagtattccagctccacaggcttctgctgaaacctggattgacatggtgaatgaatttcagaagggtgccttatcaacccggctcggaattccaatgttttatggga

SEQ ID NO: 76692 - DNA, 261 bp, Glycine max
  Clone ID: 700956166H1
gtcgaaaagttcctctctctctcacacacacacatcccagccatgagcctcttcggtataggcagaaaccagagaacattccgcccgaaaaaaagtactccttctggaagtaagggagctcaacttcgaaaacatattgatgccacgttaggtagtggaaatctgagggaagcagtaaagctacctcctggggaggatttaaatgagtggctagctgtcaacactgttgatttcttcaatcaggtgaatctgctttatggt

SEQ ID NO: 76693 - DNA, 258 bp, Glycine max
  Clone ID: 700956176H1
aagcagcgttgcaacgctgtttcctttctgtttcttttcttcttccttccgacgagatctacaacgttgttgttgtttagatcttgaatagtgttttggtgttcggtgagatggaagaaaggaagcaatcacgttatgtgaagttgactaaagatcagacacctctcgaagacattacccctggcgaactcaaccagccaattcaggttcctcagttggacgttcgcaagtgccctgaatgtagacagccgctacctg

SEQ ID NO: 76694 - DNA, 256 bp, Glycine max
  Clone ID: 700956179H1
gtcgacattgaggatgattgttttgttaaattttgggggattttgcacaattgtcctcttaacccacctactagcaaaaggagaagaagcccgtgtcaagcttctaggatggatttgcgtagtctttgccactagtgtttttgcagcacctttaagcattattagggtggtaattcggacgaaaagcgtagagttccttcctttccctctttcacttctccttctgataagcgcaattatgtggctcttatacggt

SEQ ID NO: 76695 - DNA, 252 bp, Glycine max
  Clone ID: 700956227H1
gagttttatggaaaggtcaacaccaaacatgcagtacaaagcttggcgtcacgatcctgagacaggtcctactgtttactgtagtagaactgtcttcgatgatgcaactccagagttggtgagggatttcttctgggatgatgactttcgtcctaaatgggatgctatgcttgcatactgcaaagtattggaggaatgccctcgtaatgggacaatgatttctcactggattaaaaagttcccctttttttg

SEQ ID NO: 76696 - DNA, 251 bp, Glycine max
  Clone ID: 700956229H1
gttgtccgtgctcttcgagctgcctacaacaaccctgagagagctgttgaatatttgtatacaggtatccctgagcaagctgaagctccacttgtagcccgggcgcctgtaagtgctcaacctacaaatcctcctgctgatgctccacaaacagcacaacctgctgcagttacctcagctggacctaacgctaatcctttagacctttttccccagggtctccctaatgtgggttctggtgctgctggtgc

SEQ ID NO: 76697 - DNA, 250 bp, Glycine max
  Clone ID: 700956235H1
gttcccgaacatttatacatccatggcaaatccaaaccaatttcctggagtgctcttagcatgttttggtatttgtaccttattgtatgctggggctgctgtaatgggatacacaatgtttggagaagctatactgtctcagttcactctcaacatgcctaaagaattggtagccacaaatattgctgtctggactacggtggttaatccatttaccaagtatgcattgactatatctccagtggcaatg

SEQ ID NO: 76698 - DNA, 246 bp, Glycine max
  Clone ID: 700956276H1
gattgtgcagtggtgtactgcacatggagttcctcttgagccaccagaggtcacggatgcgatgggtgaagctttcccatcggcctgtccctccaaagctgcccttgaagccaacagagccacagcaacacttctcattcaacagctcgctggtgggtctcaagctgggaagactgtggctgctagggagattcggttgctcgcaaaaactggaaaggaaaatcgtgccttcattgcagaagctgg

SEQ ID NO: 76699 - DNA, 240 bp, Glycine max
  unsure (1)..(240): unsure at all n locations
  Clone ID: 700956305H1
cctcgcctagctagctccagaaaattaggatctgcttcanatctagtgtttccctgtcccaaatcacgagtccattgagtttgattttgtggatgaaaagcatagatagggcttttgcaaaactctccaatgtttcttgaaattatatgaccatgcgtcgaattcgtatgctgcactccttctccgtcgtgttcctctactggttctacgttttctcatgaactccctcttaaatccgtg

SEQ ID NO: 76700 - DNA, 238 bp, Glycine max
  unsure (1)..(238): unsure at all n locations
  Clone ID: 700956307H1
acagccaacacatgtatggtagggagttccaatcgatgttggacggactcgacgaggaagggtgtgttgaagaaccggggtatcaatctgagaagaagcgtcgtctaagtgtggatcaagtgaaggctttggagaagaactttgaggttgaaaacaagcttgaacctgagaggaaggtgaagcttgcccaagaacttgggttncaacctagacaggtagccgtatggttccaaaaccg

SEQ ID NO: 76701 - DNA, 235 bp, Glycine max
  Clone ID: 700956312H1
caaagggacaccggagtatgtgcggtcgtgttgtgaagcaagcttgaaacgccttgatgttgaatacattgatctctattatcagcacaggattgaccaaacagtacctatagaggaaacagtgggtgaacttaagaaacttgtggaagagggtaaagtgaagtatatagggttatctgaagcgagtccagatacaataagaagagcacatgcagttcatcccatcactgcttta

SEQ ID NO: 76702 - DNA, 234 bp, Glycine max
  Clone ID: 700956325H1
tatcattaaccaataaccaataaatacattaatcaccatggggaagtactttgctgttgttgctctctttgtctcagctttgtgcttctcctctatcttggctcgtaagacacctgcccttgataaattcttcgttgagggcaagatttactgtgacccttgccacttcgcatttgagtccaggctcagtttccccttggaaggtgttaaggtaagcctgcaatgtctgaggag

SEQ ID NO: 76703 - DNA, 235 bp, Glycine max
  Clone ID: 700956327H1
atttctatctatctcttgtttcaatttcaacaacggttactcctttttcgttttgagtttcaatcaagccatcatcatgtctaccgcatcgcaacccaaggccaagaaaacggcgtcgtccaagaagcccctctcccaccctcccttcgccgtgatgatagcagaggcgattgcgagtctgaaagagagaaccggttcgagccaatacgcgataaccaaatacatcgaagggaag

SEQ ID NO: 76704 - DNA, 233 bp, Glycine max
  Clone ID: 700956352H1
cgatttcatcgtgttgatgatagggtcgctctttctgttcaaagctttcgattttactttctgtgtctccttcttctgcttcttttgattcccccaaatcttcagttttaaaaaccctaatctgctgccatgaggaagaagctcgatacccgtttccctgctgctcggataaagaagataatgcaggcagatgaggatgttggaaagatagcactggctgtgcctgttttagt

SEQ ID NO: 76705 - DNA, 231 bp, Glycine max
  Clone ID: 700956359H1
ctgttttccagttgaagtctttccctagccaatggccactgatcgtttgacccgggttcacagtctccgtgagaggcttgatgaaaccctcactgccaacaggaacgaaattttggcccttctgtcaaggatcgaagctaagggcaaggggatcctgcaacaccaccaggtcattgctgagtttgaggaaatccctgaggagaacaggcagaagcttactgatggtgcctt

SEQ ID NO: 76706 - DNA, 231 bp, Glycine max
  Clone ID: 700956373H1
ggtcgattgacataacacccgaatccaagtgaaacgaaaaacactcatcatcatggattcagttgcattaaatggcaaaagcaatgataagcctcttcacgttgccatgctcccatggctggccatgggtcacatatacccttacttcgaagtcgccaagattcttgctcaaaagggtcactttgttaccttcataaacagccccaaaaacattgaccgcatgcccaaaac

SEQ ID NO: 76707 - DNA, 230 bp, Glycine max
  Clone ID: 700956375H1
atctccatttccatttcctctctctcagtttccaagaatcttaagctatgggaaagtcttacccaaccgtgagcgctgattaccagaaggccgttgagaaggcgaagaagaagctcagaggcttcatcgctgagaagagatgcgctcctctaatgctccgtttggcatggcactctgctggaacttacgacgtgagctcgaagaccggtggtcccttcggaaccataaag

SEQ ID NO: 76708 - DNA, 233 bp, Glycine max
  Clone ID: 700956378H1
cgtggctgttcatgattcaaaacctggagccactgagggtctggtgattgtgtctggagcaccagatcaaactcacgctgctcaatgcctaattcaaggtttcattttgtgtgggcagactgtagcttgagactgcaagaacaagaggcaatctaaaaattaaaatccacgcagcaaatcttgtaatagatattccattcgtgatggattaaggatttatgtcaaggttgtcg

SEQ ID NO: 76709 - DNA, 255 bp, Glycine max
  Clone ID: 700956406H1
ctcttggcatggggggaatcccctgggttataatgtctgagatatttcccattaatgtgaagggctctgctggaagtcttgtgactttggttagctggttgtgttcttggattgtatcatatgcttttaacttcctcatgagttggagttccgcgggaacctttttcatattctctagcatatgtggcttcaccattctattcgtggcaaaactagtaccagagacgaaggggcgaactctagaagaagttcaag

SEQ ID NO: 76710 - DNA, 253 bp, Glycine max
  Clone ID: 700956426H1
ctcccaagtgtgctcaccacaacaatcatcatgaaggtttcatgaatttcattcacagggatgaggaggttaattacttcccttcaaggtatgatcctgttcgtcatgcagaaacgttccccatacctcctgctatctgcagtggaaggcgtgaaaagtgtggaattgagaaggagaacaactttaagcagcccggagagagataccgatcttgggcacctgacaggcaagatagatttaatcgccgatgggt

SEQ ID NO: 76711 - DNA, 251 bp, Glycine max
  Clone ID: 700956461H1
caaggactaaaaaccaccaatcaaaaaccatgaatgctaagagagaaaagggagagtgctttgaaaatgggaaagtttagttcaagttacagtacttctgattttgttcactttggagttctacttccctttcttctgttatcacagttgttctttcaacttgcatggtgtggctccatagtaaagttccttcctggattagagggaccccttccttttgttcttgaatccgggtatgtgggagtgggtga

SEQ ID NO: 76712 - DNA, 250 bp, Glycine max
  Clone ID: 700956476H1
gagagatagagagatagaggagaagatgaacggtggtgaatcttacggtgctattgagacacaatacataaggaggcatcacaaacatgaaccaagggaaaaccagtgcacctctgcacttgttaaacacataagagctcctgttcaccttgtgtggtcactggtgagaagatttgatcaacctcagaaatataaaccatttgttagcaggtgtatcatgcaaggggatcttggcatcggaagtgttcga

SEQ ID NO: 76713 - DNA, 254 bp, Glycine max
  Clone ID: 700956479H1
gttccagtttccaaagaaccagcaggagaaaataccaagatggaaactgatgaagctcctgccaatgttgctgcacctcctagcaccaatgacaatgatgttaacatgcaagatgctaattccaaggcaactgctgatgcccctgggtccgaaaatgggacccctgaggcaggagataagcctgtgcaaatggatactgataccaaggttgaggctccaaagaaaaaagttaagaaaataaacattcctgtggt

SEQ ID NO: 76714 - DNA, 200 bp, Glycine max
  unsure (1)..(200): unsure at all n locations
  Clone ID: 700956487H1
ctctctctcaaaacaagttatggtagtatttgtcattcatttcacaaaaccggttcacntttggacccnnggcttctaaaacccctaccttattccactctcgtttcttccaccttcggcttctattgctgggactgggaatttctcaccgctctcctcctctttagttcttcttcctaattaattaaattacatacacc

SEQ ID NO: 76715 - DNA, 302 bp, Glycine max
  unsure (1)..(302): unsure at all n locations
  Clone ID: 700956492H1
aaattttgtgagtgtggacatactctgagcgtgaganagagaaggggaagaaagagagagagtgatgggaaggggaagagtggagttgaagagaattgagaacaagatcaacaggcaagtgcacctttgcaaaacgacaggcaaacggggctttcngaagaaagcttatgnagactantnccgtatgcttntgtggattgaccgaaggtntagactactacatncatactttacttcccaaatnagganggnannaggccagttgancgnagnttntttggccagacgggttttccaaagnc

SEQ ID NO: 76716 - DNA, 257 bp, Glycine max
  Clone ID: 700956557H1
tcgagctctgcgagatcttcattcgccgattttaaaagatgagtaagcttctgagtgatgctttgcgtgaagccatttcaggaatcatggccgattccaaggagaagaatcgcaaatttgtggagaccatcgaactccaaatcgggttgaaaaactacgatccacagaaggacaagcgtttcagtggctctgtcaagctgccccacatccctcgccccaagatgaaaatttgcatgcttggtgatgctcagcatgtt

SEQ ID NO: 76717 - DNA, 84 bp, Glycine max
  unsure (1)..(84): unsure at all n locations
  Clone ID: 700956561H1
gggttcggggtnanagtgcancctctaaggcaangacnaccagtacgcacgggtggcgacantggattcacacggcaaggcaag

SEQ ID NO: 76718 - DNA, 273 bp, Glycine max
  Clone ID: 700956604H1
tggccacctctgctattcagcaatcagcattcgcaggtcaaactgctctgaagcagctcaatgagttggtccgcaagaccggtggcgccggcaaaggtcgcaccaacatgcgccgtaccgtcaagagtgctcctcagagcatttggtatggccctgatcgtcccaagtacctgggtccattctcagagcagattccgtcatacctgaccggagaattccccggtgactacggatgggacactgctggactatcagctgacccggaaaccttcg

SEQ ID NO: 76719 - DNA, 270 bp, Glycine max
  Clone ID: 700956620H1
caaccctcgttgttccgtgttcaggtgaaacgacaccgttttacccttcctcttctcggcacagcatctagcaggttgtagaaaatatggccaagcatcatcctgatttgattatgtgccggaagcagccagggattgccattggacgactgtgcgagaaatgtgacggcaagtgtgtgatctgtgactcttatgtgcgtccttgtacgcttgtccgagtttgtgatgaatgcaactatggatcatttcagggtcgatgtgtcatatgcg

SEQ ID NO: 76720 - DNA, 267 bp, Glycine max
  unsure (1)..(267): unsure at all n locations
  Clone ID: 700956625H1
ctgcttttgtctcctgcctcccacatttcaccaccccctttatccntatctcctnctcttcattgttctgctcttccccttaacaaacaataactctatttaaagcacacacaaagggatcatatatcttggttgcaccttggtaaggtgagaaaatatggcatttgcaggaacaactcagaagtgcatggcttgtgacaaaacagtttatctggttgataagtcgaccgcagataaccgagtgtaccataaggcttgcttcagatg

SEQ ID NO: 76721 - DNA, 261 bp, Glycine max
  Clone ID: 700956643H1
ggcctccccatactcttcattcttcactcttcactcttcactcccaaccctagccaaacgcaaaccattcattcattcagttcagtaactcacctcaccatggccgcatccattacattgtccaggctcgtctcttccaccctcaccactgcctctttcttcccacccataaccctgccttccaaactctcctctctccgactccccacccgccgccaccccaagccactcagattctcctcctccaccatcaccgccacc

SEQ ID NO: 76722 - DNA, 271 bp, Glycine max
  Clone ID: 700956649H1
ggcttgctgcaggtgcagccttgcttgcactcttggctatcaccttctccttgttgagccctcaaaccctgttttctccgcctgagattccgggctcgaaggaccaccttcacgctgctcggttactccatgtcaccggagccgtcgggccggagagtcttgtcttcgacgctgacggcggagggccctacaccggcgtcgccgatggccggattctcaagtgggaaggggaagagcgaggttggactgaatttgctgtcaccagttccaa

SEQ ID NO: 76723 - DNA, 258 bp, Glycine max
  Clone ID: 700956658H1
caacttcaacctcaccaaaggaactaagaatttcattgaggctagagaaagtggtgatcaatatgtcaaagaatccaaaagttttctttgatattctaattggaaagatgaaagctggacgagtagtgatggagttgtttgccgatgcaaccccaaaaacagctgaaaacttcagggctctctgcactggggaaaaggggattggacgatctgggaaacctttacactacaaaggttctgtatttcatcgtattattc

SEQ ID NO: 76724 - DNA, 258 bp, Glycine max
  Clone ID: 700956688H1
ctcgtgcctctagggttatcatatctccatttccatttcctctctctcagtttccaagaatcttaagctatgggaaagtcttacccaaccgtgagcgctgattaccagaaggccgttgagaaggcgaagaagaagctcagaggcttcatcgctgagaagagatgcgctcctctaatgctccgtttggcatggcactctgctggaacttacgacgtgagctcgaagaccggtggtcccttcggaaccataaagcacccc

SEQ ID NO: 76725 - DNA, 251 bp, Glycine max
  unsure (1)..(251): unsure at all n locations
  Clone ID: 700956693H1
tttttgcaaaatcagttactatttagggtccgacttactgagatcagattctcttgttggtgacatgatgctgaaacaactgtngcatcaccaggatgccattctatgctgttcactgaagtcattgccagtgttcatatttgcaaatcaagctggccttgacatgttggaaacaaccctagttgccttacaagatatcacattggataaaatatttgatgaggctggacgcaaggcattgtgtacagact

SEQ ID NO: 76726 - DNA, 253 bp, Glycine max
  Clone ID: 700956710H1
aggaaatccaagttgggatgggaccagcaggtgagttgcgttacccttcgtacccagagcaaaatgggacatggaaattcccaggaattggtgctttccaatgctatgacaagtatatgttgagtagcttaaaagctgctgctgaagctcacggtaagcctgaatggggaagcacaggccctactgatgctggccactataacaactggccagaagacactcaatttttccgcaaagaaggtggtggatggga

SEQ ID NO: 76727 - DNA, 254 bp, Glycine max
  Clone ID: 700956713H1
atcttttatctgaattgtcaaatgcagcagcaaaagctactagtggagaaacaattgtgacgtctttgccacaatctattatgggtcgaaatgctaaagattctttggagaaggatgctttagtgaggcagatgggtgtgaatccctcgagtcagaatcctaacttgttcagtgacttgcttggctaatcttttttctaagccaattctagatcatgatgcttgaagatagattgcctagcgactttgctgctt

SEQ ID NO: 76728 - DNA, 261 bp, Glycine max
  Clone ID: 700956716H1
cacacacagaggtattttcacttctctcgctttcattttgcgatgcgtcgattaaaaattgaacaaccttcactgactcgttcagcgttgggttattgactttgatggttccaaattgtgttctgtttagagacaacaccgctaaccaaacgtctttctctcaacttcaacgtctttgctatttaaatttaaatcactgcacaacctattgcagtgtacctcattcttcgtttggttttggtttcaatttgcgtcgcacaa

SEQ ID NO: 76729 - DNA, 249 bp, Glycine max
  Clone ID: 700956722H1
ggaacaagtgacaaacctttgcatcaatgcactattttcataccgtaaattttgtgctactgtatcctcatctggacaacttattcttccggaggcattaaagcttttgcccctgtacacacttgcattaactaagagtacagggttgcgaacagaaggaaagatagatgaacggtcattttggataaactatgtatcctctatctctgctccattagcaataccacttgtgtatcctaggatgatggc

SEQ ID NO: 76730 - DNA, 256 bp, Glycine max
  Clone ID: 700956748H1
ttgcaacctagcaatggaggcgattaggaagagtaggattcttatatttggaggaactggttacatagggaagtatatggtgaaggcaagcgtcacgttaggccatccaacttttgtctacactcgccctcttgatgcacaaactccttcctctaaggcacagctttgcaaggagttcaactctatgggggtcacacttgtccatggagaacttgagcatgaccagattctggcagtgattaaacaagtagacatt

SEQ ID NO: 76731 - DNA, 244 bp, Glycine max
  Clone ID: 700956753H1
aaaatggccaaatcaatcaaattctttgagttgaacacaggggccaagattccttctcttgggttagggacttggcaagctgaacctggtgttgtagctgaagctctcaccacagccattcaggttggatacaggcatattgactgtgctagtgcgtataagaatcaagcagagattggttctgctcttaagaagctttttgatgatggtgtggtgaagcgtgaggacttatggatcacttcca

SEQ ID NO: 76732 - DNA, 245 bp, Glycine max
  Clone ID: 700956754H1
ggcttattttgccttcttggaggttttgttcaacagccacatcacttttgtattaaacttggacacaaacacctttatgcatatggttggctcccttgaatctggacttaaagggttggatacaagtatctcatcacagtgtgcatctgctgttgataatttggctgctttctatttcaacaatatcactatgggagaggctccaaatttacctgcatctgtcaatcttgctcgacatattgcag

SEQ ID NO: 76733 - DNA, 248 bp, Glycine max
  Clone ID: 700956757H1
cacaactccactcttagctgccattggtttttcttcttccatttctcttcctttctaagcttttttcgattacccatttggagattctgtcctaatggctcttgctccttccaaagtttcctccttttccgggttttctcccaaacccagtgttggggatgctctgaaaaacccaacttgctctgtttctctgagctttgcgaatgtgaaacttggaagcagaaaccttagggtttgtgcctcaactg

SEQ ID NO: 76734 - DNA, 254 bp, Glycine max
  Clone ID: 700956769H1
ctgccattattttacttgattgtttctcatactggcagacattgcttatgcgccagtttcaaagtcaactatattatataattaagttatgcttgtggctcaatcatcacatgtatctgactgataattactcaatactagtagaaattttacatttggttgtgttaaaaatgctccattggaattacaaaatgtagaaggtattgtcctggctctgagcatgatctcaatctaattctcactgcgggttttac

SEQ ID NO: 76735 - DNA, 121 bp, Glycine max
  Clone ID: 700956779H1
ctgcaattcactctgtacaattcttcgttcgttctctgcagttatatcctttttgagcttcaatggcggacgctgaaaccttcgctttccaggctgagatcaaccagcttctaagtctcat

SEQ ID NO: 76736 - DNA, 244 bp, Glycine max
  Clone ID: 700956789H1
ggagtacgctcacctatcccctggctagatgccccactattttcagatgggcagccaaggcctgtaagtagcacaaccatcacttcttcgatatcaggtggcaacaacactgcctcaaggaacccaactttccgccctaattctcagtttatgggcttgcaccacccaagaccaatgcctgccatgggagccacccatagcttcataaataggatgtacccaagcaaactatatggtcaatatg

SEQ ID NO: 76737 - DNA, 243 bp, Glycine max
  Clone ID: 700956790H1
ggaaaggataaacgaaggaagttgggccaatgaaaatggtttggcactttcctacctaaagagagagatgggtggggacgtatcgtatggccttatgaggagctacctcacctcacacaccaatagcatatgaagagagagaagaagtgaagataagcacagagagtgtcatctactcacctctactaccataaaaaaagaaaaacaaaaagccttcagagtcgactattcatcctttcttat

SEQ ID NO: 76738 - DNA, 262 bp, Glycine max
  Clone ID: 700956819H1
tacaaattctctgtgttgtgttgtgtacttgtgttaattgtgttgttgttgtaggaaatttaagtgaagagagaatgatgatgaagtctgctatgtgtgcattggtgcttgtggcactggttgtggttgaagtggggcccatggctgaggctgcggtgacttgcaacccaacacagttgactccttgtcttccggcaattaattcaggttctgcaccttcgagtgcttgttgccagaagctgaaggagcaaaagccatgctt

SEQ ID NO: 76739 - DNA, 259 bp, Glycine max
  Clone ID: 700956827H1
ctacaatcagaaccagccaagtgagtgggctttagtactctggaaccagatgcttaaacctgaagtaatggaggagtttgtggctgaatttgtggcagttttacctcttcagccttcaatgctgtttgatttagctagattctatagagctgaagttgctgccagaggggaccaatcccatttttctgtctggctcacagggggaggattgccagctgaatgggctaaatatttagggagatcattcaggtgcttactg

SEQ ID NO: 76740 - DNA, 260 bp, Glycine max
  Clone ID: 700956843H1
caaaaaaagaaagtaaaaaagaaaaccctagaggagaagaagccaaaaaaaagaagccaaaaaaaaggctccaaagatgggtttcaaaagctcttctcttctatgcctagctcttttgcttgcatgctcttcggctattcatgcctttgacatcacacaactgctaggccaatatccagagttttccacattcaacaaatacctaacggaaaccaagctcgcagacgaaatcaacagccgcaacaccatcactgtcctcg

SEQ ID NO: 76741 - DNA, 260 bp, Glycine max
  Clone ID: 700956845H1
cgctcgccttgcttcgccacacaacagcaactgcagcaatggctcccaaacgaggtggaaaggctccggctcttgccgctaagaagaagcctgagaaggtttcgaatccgttgttcgagaagcgtccaaagcagttcggaatcggaggggcgttgcctccgaagagagacttgactcggttcgtgaagtggccaaagaatgttcaaattcagaggaagaagaggattctgaagcagaggttgaaggttcctccagctttg

SEQ ID NO: 76742 - DNA, 261 bp, Glycine max
  Clone ID: 700956847H1
aaaagacaatatagggtgtggagcaattacgtttgatcacaagggaaaaggtgcaacggtttgcaagatagcatagaagattttgaagaatcttaattgcaacatagtagtgcagttgcaatgggggctcctttatcagcatggccttgggataactttggaacatacaagtatctattatatggaccgtttgtggggaaagtcctttatgaatggttctatggtgaagagcagtcctactacaacctcagctggtgcctt

SEQ ID NO: 76743 - DNA, 255 bp, Glycine max
  Clone ID: 700956853H1
attaaagcagctgcacgcagtgatacagaggtagtttctgaaaccacaaaggctggtggcctacgtggaaaattgaataaggtggtgttggcttacagtggtggcttagacacatcagtcattgttccatggctgagagagaattatggttgtgaagttgtttgcttcactgctgatgttggccaaggtataaaggaattggaaggtttagaacagaaagccaaagccagtggagcctgtcaattagtggtaaaa

SEQ ID NO: 76744 - DNA, 252 bp, Glycine max
  Clone ID: 700956885H1
tggaaagcaagtctatctgttaccacagtgttatgcagagaaacaagctcttggagaagtggatgctgagcttcttgacacccaagtgaatcctgctgtgtgggaaattagtgggcacatggttctaaagaggaagaaggattatgatgaggcatctgaaggcaatgcttggaggcttcttgcagaggtgtccctctctcaagagaggtttcaagaagtcaatgatcttatttttgaagccattggctgtgg

SEQ ID NO: 76745 - DNA, 270 bp, Glycine max
  Clone ID: 700956967H1
gctgctgaggagttcaagtcagggtggctttatgatgtctcagacttctctgctcttccaggaaggggcatccagtgctttatagacgggaggcgtattttggttggtaaccggaagctgctggaggaaaatggcataaatatttctacagaagtggaaagttttgttgtagagattgaagaaagtgcaaagacagggatactagtagcatatgatgatatattaattggagtcttagggattgcagacccactaaagagagaagctgct

SEQ ID NO: 76746 - DNA, 267 bp, Glycine max
  unsure (1)..(267): unsure at all n locations
  Clone ID: 700956972H1
gtgcatattgttgggatgtggaaactggtaaagtganaatggtattcaaggggcacatggactatttgcattgtatagttgctcgcaactcatcaaatcagatcataacaggttcggaggatgggacaacacgaatttgggattgcnaaagtggaaagtgtacgcaagtnattgatccagcaagagatttgaaattaaagggatctgcttcatgggttggttgtgttgctttagatgcaagtnagagctggttggctgcagtagtgg

SEQ ID NO: 76747 - DNA, 272 bp, Glycine max
  Clone ID: 700956981H1
caaaactataaatcaaaagctcagagaacccatcccgccgccgccgtgtgctccgaccgccacctccattcgccgtgtactctcactcccttaataattattgatttcttctcttactttttgctctcgctggagttgagtgtgatggtataggttaataggaaagaaaaactaagtgaggaaaggtgaaaaaagaattaattagagtggaagagtgtggttattttctgatttgagaagcaaataccaaagagtgaagaacaaaagaaaaa

SEQ ID NO: 76748 - DNA, 268 bp, Glycine max
  Clone ID: 700956983H1
cttgttcctctcgcccagaatccgagatcaaccctgacccctaaggccaggggtttttctcggcttcttcagattcctgaaatggcgtctgtttcagctttagccaagtacaagctcgtcttcttgggtgaccaatccgtgggcaaaaccagcatcatcactcgcttcatgtacgataaattcgataacacctatcaggctacaattggtattgattttctatcaaaaactatgtatctcgaagatcgaactgttcgactgcagttgt

SEQ ID NO: 76749 - DNA, 269 bp, Glycine max
  Clone ID: 700956987H1
tcaagattcagccaaagcttagcacttgctccaaaacaggtctcggtgcaaatactgagcctccaagccttgacaaactcaaccctctcaagcaaagcagtgaaggtgagccatgccaattgtgacgactcattggagacggaattccacgttgacgtgaaaaacgaaggctcaatggatgggacccacacccttctcatattctcgaaaccacccccgggaaaatggtcacaaattaaacagttggtgaccttccacaagacccatgt

SEQ ID NO: 76750 - DNA, 266 bp, Glycine max
  unsure (1)..(266): unsure at all n locations
  Clone ID: 700957024H1
ccgagtcgccatggcgtcgcaggagagtatcganaagatgcaggcacggcagaattaccggaatttatggcacaccgatctcatgagatccattcaggccgatactccttattgttgcctcgcgttgtggtgtgcaccatgtgtgtcnaccttcttcgcaaacgagctctctatgatgatatgtcaaggtacacatgttgtgctggctacatgccttgcagtggtaggtgtggagaaagtaaatgtcctgaatttgcctttgcact

SEQ ID NO: 76751 - DNA, 261 bp, Glycine max
  Clone ID: 700957057H1
ctgagcagttgaggaaatgggaacccttgggagagcgatctacagcgttggtaactggattcgagaaactggacaggccattgatcgtctcggttcccgtcttcagggcggttactacttccaagagcagctctctaggcatcgaactctgatgaacatatttgataaggctcctgttgttgataaggatgtatttgttgcgccaagcgcctccgtcattggagacgttcaacttggaagaggatcatccatttggtatgg

SEQ ID NO: 76752 - DNA, 260 bp, Glycine max
  Clone ID: 700957073H1
catagttggtgttgctgggtggggaactggtctcaaactcggaagtgactcggttggtattaagtataacacccatagagcactcgggatcaccctcttctgccttggaacccttcaggtttttgctctgctcttgaggcccaacaaagaccacaaaatcagaatctactggaacatttaccactacgccgttggatactccaccataatcatcagcatcatcaacgtctttaaagggtttgatgcattggagacttctg

SEQ ID NO: 76753 - DNA, 258 bp, Glycine max
  Clone ID: 700957091H1
gaagatgttgcgaacgacaatactgcaattcgctgcgttgcaggttttgtttattctgttgggtgttggtgccgattacataccgccttcgagatttgatggcttcgtctacgggaaggggaacttgaatttgttggatacggttttgatagaagcgttttatgacccagtgtgcccagatagcagggattcctggcctccactcaaacaagctcttcatcactacgcttctcgggtttcgctccttcttcacctcct

SEQ ID NO: 76754 - DNA, 250 bp, Glycine max
  Clone ID: 700957109H1
gtgagattctgaaccaagacaaagaaagggttaagtacattaactcaaggatctcaaagaacttgggccaagatagtagtgtgagtgaattggactcagttacactaccagccaagtctggtagccttattgggtctgggaattactttgtggttgttggtcttggaacacccaagagggacttgtcactcatctttgacactggcagtgatctcacttggactcagtgtgaaccatgtgctcgttcttg

SEQ ID NO: 76755 - DNA, 149 bp, Glycine max
  unsure (1)..(149): unsure at all n locations
  Clone ID: 700957110H1
cgaatatcgcattcgcgaaatcatgcaggagtcggtaaaatgcatgcgccattcaaagagaacttntcttactacagaggatgtggatactgcacttgcattgagaaatttggagccaatatatgggttcacatctaatgatcctccac

SEQ ID NO: 76756 - DNA, 237 bp, Glycine max
  Clone ID: 700957193H1
caaaaaacccttctttctttcaggttcattacttgatcagtgtcaaaagggtagttgcaaattgcaatggctaagcatgatgttgagggtggttccttctcagcaaaggactaccatgatcctcctccagcacctttgattgatgctgaggaactcacacagtggtccttctacagggctttgattgctgaattcattgccacattacttttcctttacatcacagtgctcactgtg

SEQ ID NO: 76757 - DNA, 248 bp, Glycine max
  Clone ID: 700957204H1
aagattaaagattcaacaatggcctctgcttctgctactcttctcaagtcatctcctgttcttgacaagtgcgagtgggtcaaaggccagacccttcgccaacctctcgtgagatgtaacccttcctagcatcagctctcaccatcaaagctgcttcctatgctgacgagctcgtcaaaaccgccaaaacagtggcctcaccggggcgtggtattttggcgatggatgagtcaaatgcaacctgcggg

SEQ ID NO: 76758 - DNA, 262 bp, Glycine max
  Clone ID: 700957304H1
gtgatgttgcatatgtagagaagcgtcacaaatcaatggaggaagcgttgctacagggattcccatcaagcaatttgaaacaattgttgattgtatgtgccaaagccttgtctgaaaacaacatgaaaggttttgatcagttaatagagaaggctagaagtgctgtgtctataactggggagccaatccagcgcctgggtgcttatttggtagaagggcttgttgcaaggaaggaggcatcaggaaataacatctaccatgc

SEQ ID NO: 76759 - DNA, 196 bp, Glycine max
  unsure (1)..(196): unsure at all n locations
  Clone ID: 700957305H1
cccttacttcaatttcatcaacacaaccatcaatttcatcaaccatcgcataataatagtattatcatgatagccgtggcccgaaaggacatggaccggatcaagggcccgtggngcccggaggaggacgaggcccttcagaagcttgtggagcggcacgggcccagaaactggtcgctcatcagcaggtccattc

SEQ ID NO: 76760 - DNA, 260 bp, Glycine max
  Clone ID: 700957316H1
gtaggcatagaagacatgtttctcaaggctattgtcccaacagacatcccagaagatgaaatacctcgatacaactttgacttgttcaatactttatgggaggcatgtggctcatcctccagcactggccgggagacatttcagttgaaaggaggcaaagggattgctgccatcagtggaactcaatcagtcaagcttcttgatgtccctgcaacctctttaatccaggcaactgagcgccatttggcacattttgtcgt

SEQ ID NO: 76761 - DNA, 259 bp, Glycine max
  Clone ID: 700957319H1
cggggagtggaaggaacgattacgggttcaaagcggagatagagacggtggggaagataaggcacaggaacataatgaggcttttgggttacgtgtcgaacaaggagacgaacttgcttctgtatgagtacatgccgaatgggagcttaggggagtggctgcatggtgccaagggaggtcatttaaagtgggaaatgaggtacaagattgcggtggaagctgcaaagggactatgctatttgcaccatgattgttcccc

SEQ ID NO: 76762 - DNA, 253 bp, Glycine max
  unsure (1)..(253): unsure at all n locations
  Clone ID: 700957362H1
caattgaccattctaacatggtcgntctttcaactcaaacttctggngccttgaccagggattggagcccaatgagtatatgtcctcctcatggaagggtgtcatcatcagangcaaatgcttttaatcacgaggcaagtcatttccttattggaagcagttctagtaatgctcctgtagatgttggaggttttcataatgaatttggaactagtagaaatcctactgctcctcaaagttttcataataatct

SEQ ID NO: 76763 - DNA, 257 bp, Glycine max
  Clone ID: 700957372H1
ggagcgtcaccctctcacatggcggcagcaaccacaatttgctacggtccctcctcttatattcttcttggctcaaatttacttagacagggacacttgaaaaacacttcatttgctcatcgtttttctccttcaagatcattcctttgtaacggatttgttcccaggaaacctgttttgggaagaaactcgttctgggtatcaaaaaccatggatgaatccgcgagaacttctgctttcagagatggaaaaggcga

SEQ ID NO: 76764 - DNA, 255 bp, Glycine max
  Clone ID: 700957373H1
ctctcttcattccaattttggcaccacaccatgccaaccctcaaccatgtcctcacattcacattcttccttctcctctcttgccattgccacctcctcaatggccaagaggacacctcatttggccgtgccatagacagaaaattgttaggcctaaagagaaaagaaaagctcagccacttcaaattttattggcatgacatagtgagtggccgcaaccccacttcggtggcggttgttccgccaccgccgaag

SEQ ID NO: 76765 - DNA, 253 bp, Glycine max
  Clone ID: 700957380H1
tatcatttcatttcgataatcatccatagttactgaagaaaatggcaaccatctccgctgctatcacaaccccatcgatcacccgcgcatgtctagtgcaaaaacgttctcttgggttctcatctcccgttcttggtttgccagcaatgggtaaggtgggaagagtgagttgctccatggaggaaaagccttcttctgtgaaggaaagcagctcaagcatgttggggatgggggcatctttgatggcagcggc

SEQ ID NO: 76766 - DNA, 253 bp, Glycine max
  Clone ID: 700957383H1
ccttgttctcctgctgtgctacattgttattggggcatgcttcttcgtacaaagaacaccctttaataaccaagctgatgttactaacatcacacttaaaccagccactaatgcagttttaagcgcttaattagtaggctttggcctatttcttgtcctttcctgagatgaagaatggtggtatcgatccaaacccaaaatcagattcaaattcaatggattggttattgtttcattctgatcacattgtcat

SEQ ID NO: 76767 - DNA, 250 bp, Glycine max
  Clone ID: 700957394H1
gtgccacacacgtatgtttgtcaaagccaaaatttttatagaaatttattcacctgttcatatcttaattgtatgtagaaaacaatgtttatgaggaatgatcatgaagctcagatcaaagcattgaggtgtgaacttgaagatgagtgtcggaagctggaagaggagttgcatcttcaaaaaatccaaagaagacaggcaaagggctttgttgcagttgcagtggaaagtgatgagtgacaagcctaaa

SEQ ID NO: 76768 - DNA, 251 bp, Glycine max
  Clone ID: 700957395H1
caacaataaaagaccatgtcggtgaaggagtgcgagcaccacaaggggaagaagaggaagatcttccggcaagtgttctggtgcttagtggtgttccttttcatcgtgctggtcacaattcttttgatatgggcaatccttagacccaccaaacccaccttcacgctccaagacgtcaccgtctacgccttcaacgccaccgtggcgaacttcctcacttcgaattttcaggtcacgctcatctcgcgtaa

SEQ ID NO: 76769 - DNA, 252 bp, Glycine max
  Clone ID: 700957396H1
ctgagtttagctattgatgttacatacatgccatttggactctttgaaatatgtaatctatgacttcaaggaaatggttagaagttattcatactttcattaagctaaaattaaaaatatccttttactagctgttttctttaatctttataataagattatcctcccaaacgaatctgcaatcagtttcgtggaggttttccacatggatttccttaataccatgatgttgagaaaccgagaaacctattt

SEQ ID NO: 76770 - DNA, 147 bp, Glycine max
  Clone ID: 700957401H1
gttgattgcacatcctttttgctttcagggttggaagaatttttgcgataaaatattttttcacccaaaaaaatggtgttggatccaagactggtgctggtgctgttcatcggcactgcattttggccatcaatggtgacacagatc

SEQ ID NO: 76771 - DNA, 252 bp, Glycine max
  Clone ID: 700957441H1
gtaagtatggtggttatcttagcagcttgagaaaggaatttctaaagaaaaggaaaaaaggtaagctaccaaaggatgcaaggatgatactcatggactggtggaacaacactataggtggccttatcctacggtaattgaaattaatatcatgaagtatatatatagcaatatagcttacgttatattgtgtattgctcattaacagtagtatgtgatctgatttgatgaaatatgccaaattgccatata

SEQ ID NO: 76772 - DNA, 251 bp, Glycine max
  Clone ID: 700957463H1
gttgcttacccttgtttatggtttcatattgttcatgtatcattctaggtggagagaaaggttacctgcaaggcctgcatactacaagtatgttactattatgctctcttgaatgcaattgcactgtttgcttgtggtattacaggaaacggcactgcttttggtttctggttatatcatttcacggttgtatgttaccatgccgcttatcttcccctgctgtatataaccttcctggctgacttttttca

SEQ ID NO: 76773 - DNA, 114 bp, Glycine max
  Clone ID: 700957467H1
cgtgggcccaggcctaagtatgcacctgcttttgccgataccgatatggagtacaataatgttgcacctgatgggtcatatgttggtaatggtcgattaggcagaagccattga

SEQ ID NO: 76774 - DNA, 122 bp, Glycine max
  Clone ID: 700957553H1
ctgcaaatggagttgggaggaaaagatgcctgcattgtacttgaagatgctgacctggatttggttgctgcaaacattataaagggaggtttttcatacagtggtcagagatgcactgctgt

SEQ ID NO: 76775 - DNA, 236 bp, Glycine max
  Clone ID: 700957580H1
taaagacaaccattttagcaaagaaaattggtgtaattaaattctcaatcttctttacattttcactgtcagaactgtagcacgtgactctttagtgaaaccttcactccatggtttcctcattgccctttgaagcttgaactcggataaagatcgtgactttggctgattctggaaatgggttctcggattcagcttctgcctatttgcttttggctgcacttgacatgcttcag

SEQ ID NO: 76776 - DNA, 257 bp, Glycine max
  Clone ID: 700957609H1
cggggttcaacatcattcacgcgataaacgcgtgggaggaggacgagggaagaacggtggtgctggtggcgccgaatattctttcgatggagcacgcgctggagagaatggagctagttcacgcgatggtggagaaggttcggatcgagctggacacagggataatcacgcggcaaccggtgtcggcgcggaatctcgatttcgcagttataaaccctgcgttcgtggggaagaagaacaggttcgtttacgcggcg

SEQ ID NO: 76777 - DNA, 251 bp, Glycine max
  Clone ID: 700957614H1
ttctttcgttgtttctcatgctgatgggaatttgtacgtatatgaaaagaacaaagatggcgctggtgattcttctttcccagttgtaaaggatcaaactcagttttcggttgcccatgcacgttacagtaagagtaatcctatagcgagatggcatatatgccagggttcaattaatagtatttctttctcgatggatggggcattcttagcaactgttgggcgagatggttatttacgagtgtttgatt

SEQ ID NO: 76778 - DNA, 255 bp, Glycine max
  Clone ID: 700957624H1
ctggaggccaaattcatgtaccaatatatgtcactggcattatcaaagtcagcaatgcggaaattgctgttcttgacagtgatcttggaagtgttgaaacccaaaaaacgctagatttggctggaaatgatgttgtttcactctcagctaaccacttgcaaaagttgcgcttttctttccaattgacaacacctcatgatcatgcttttaagcctcttcaggcatttttcaagttgaagcatgagacaaagcatg

SEQ ID NO: 76779 - DNA, 260 bp, Glycine max
  Clone ID: 700957633H1
ccctcatagcatcgaatttgttcttgaagttcttggtattcttcctagcttcttctcatcttagagaaagagtgagagatggaacgaatgttccctcctaagaagccttcaactatgaattcccatgacaggtccatgtgtgtgcaaggggactcagggcttgtcctcaccactgacccaaagccacgcctccgttggactgttgaactacatgaacgctttgttgatgctgttgctcagcttggaggacctgataaggc

SEQ ID NO: 76780 - DNA, 250 bp, Glycine max
  Clone ID: 700957650H1
aagaaaggttagagagccaaaggaagaaaacgtgactctgggcccagctgttagagatggcgaacatgtctttggcgtcgctcgcatctttgcctccttcaatgataccttcattcatgtcactgatctgtccgggagggaaacacttgtccgcatcacaggtggaatgaaggttaaggctgacagagatgaatcgtctccctatgctgctatgcttgctgcacaggacgttgctgccagatgcaaggaa

SEQ ID NO: 76781 - DNA, 237 bp, Glycine max
  unsure (1)..(237): unsure at all n locations
  Clone ID: 700957658H1
ctcccctcttccccacccaaccttctctcnatcacacacacaagtcaatggataaaaaacaacagtgtaagacgtctcaagatcctgaagtgagaaaagggccttggacaatggaagaagacttgatcttgatgaactatattgcaaatcatggggaaggtgtttggaactctttggccaaagctgctggtcccaaacgtaacggaaagagttgccggctaaggtggctaaattacc

SEQ ID NO: 76782 - DNA, 229 bp, Glycine max
  Clone ID: 700957675H1
ggaggtgccgaagatgaagtcgactgtgccggagatgacgcagttgcggtagaacatggctacaggaatcgtgatccagggttgcaacatcgtcccagaagccgaacttttccctacaaggttccaagtgaagtcataccttggaaggccatggaagcaattctcaaggacggttgtgatggaatccaccgtgggtgacttccttcaccccgaaggatggtgcccatgg

SEQ ID NO: 76783 - DNA, 238 bp, Glycine max
  Clone ID: 700957682H1
caagaacattagtttcactgtctgggatgttggtggccaggacaagattcgtcccttgtggaggcactacttccaaaatacacagggtctcatttttgttgttgacagcaatgacagggacagagttgttgaggccagagatgagttgcacaggatgttgaatgaggatgaactgagagatgcagtattgcttgtatttgctaacaaacaagatcttcccaatgcaatgaatgctgct

SEQ ID NO: 76784 - DNA, 57 bp, Glycine max
  unsure (1)..(57): unsure at all n locations
  Clone ID: 700957685H1
acaaacttggtttnaattggtanaggcttgccaaggtcttgttnantgagcgttaag

SEQ ID NO: 76785 - DNA, 272 bp, Glycine max
  Clone ID: 700957703H1
attctgcaggaaagttataagattctgtttcaggggtgtaaagaaactggctttcgatcattatctccaggttcggtgaaaatgagttcaggaggaaagcaggggggcttcgtttcgtaccaaaacgtcttcgtaatgaggcacggggagcgtttggacaacttcgagccgtcgtgggtgatgacggcggcgcggccgtgggacccgccgctggcagaggcaggtagaaaacgggcgttcgaaacgggtcggaggctccgggagagtgtcgg

SEQ ID NO: 76786 - DNA, 268 bp, Glycine max
  Clone ID: 700957710H1
ctcaatttcatgaagcgcaaagaacagcttcagaggcatatgaggaaatgtgatcttaagcatccccctggtgatgagatatacagaagtggtacactgtcaatgtttgaggtcgatggcaaaaagaacaaggtttatgggcagaacctttgttatttggccaagttatttcttgatcacaagaccctctattatgatgtagacctgtttctgttctatgttttgtgtgaatgtgatgatcgaggatgtcacatggttggctatttct

SEQ ID NO: 76787 - DNA, 272 bp, Glycine max
  unsure (1)..(272): unsure at all n locations
  Clone ID: 700957717H1
tttctgctgagatttctttgtctccccggtattctgatccagcagccggttctgtgttttcccctactcacaaatcagctgttctcaatcagtttcaacagctccaaagtatgttatcacctataaatactaatttgctgtctcctaagaatgttgagcatcctctttttcaggcttcttntgggtgtctctccttctgganggatgtcaccaagaagtgttgaaccaatctctccaatgagtgctcgtttatctgcattgctcagcgagag

SEQ ID NO: 76788 - DNA, 264 bp, Glycine max
  Clone ID: 700957753H1
gcataggcatagactagagagagagttgcaatggccgtttctttggcagtgaaccgtcctctgcttggtcttcacgagaatgtaccattagctgttgctcatccccaattcctcccgttcaaatggccacccaagtccaaactcccctccgtcgtcggaattcgatgctcctcctcccctttcaacgacaaaaccctcatttccatcacacctaacacttcccacctcaatcccaaccctctcgcttgtcgctttcacgcttcc

SEQ ID NO: 76789 - DNA, 261 bp, Glycine max
  Clone ID: 700957757H1
gccattatttcctggagaaaaccaagtggaccaacttgtggaaattatcaaggttcttggtactccaacacgcgaggaaatccgttgtatgaacccaaattatacagagtttagattccctcagattaaagctcatccttggcacaaggttttccacaagcgaatgcctcctgaagcaattgaccttgcatcaaggcttctccaatattcacctagtctccgctgcactgcgctggaagcatgtgcacatcctttctttga

SEQ ID NO: 76790 - DNA, 49 bp, Glycine max
  unsure (1)..(49): unsure at all n locations
  Clone ID: 700957785H1
tctctctctttctctttctctctcatccagatcttgcaaaanaaaaaaa

SEQ ID NO: 76791 - DNA, 256 bp, Glycine max
  Clone ID: 700957789H1
cagttagtacaaaaaagggttacttcagcttccacatatcttgaagaattgatcaatgggcaagtctgtagttgagaagctactttggatggcaattgtgtgcttggtgctgggtgtaatttccattactcccaaggcccaagcagcagtgacatgcaaccaggtggtgagcaacctcaccccatgcatttcttatgtgctcaatggtggcaaaaccgtgcctggcccttgctgcaatgggatcaagaccctcttt

SEQ ID NO: 76792 - DNA, 255 bp, Glycine max
  Clone ID: 700957790H1
gacacttttgtcccaaaccctggttatgaggttcccattcccggcagtggtggaagtgttccagcaccagctgcaccatgagttaactcatgcatgattaatgtgatgcatggtagttaataaggtggttatgcttaagtttgtctttttctttctgttttctagccataataataacttatcataaataagtatgctccatgtgcacattggtgtatatggtgaacaccatggattgccaagtcattctgtttg

SEQ ID NO: 76793 - DNA, 256 bp, Glycine max
  Clone ID: 700957804H1
ctgaaacgacacacacaaaaaaaagctttagtttaggatgacccaagtgaggaacaagcaagtggttctaagagattatgtcaccggattccctaaagaatccgacatgaacattgttgaaggcaccataatattgaaggttccagaaggttccaatgatgtccttctaaaaaatctctacttgtcatgtgatccatacatgcgactcctcatggccaaggaccgttctttcggagatggctccttcacccttgcc

SEQ ID NO: 76794 - DNA, 257 bp, Glycine max
  Clone ID: 700957809H1
ggcagaaagcaagctcatcctagagttttaaaaatggcagcagcctcctccatggctctctcttccccatccttggctggcaaggccgtgaagctgggcccatcagcccccgaagtcgggagggtcagcatgaggaagaccgtcaccaagcaggcctcctccggaagcccatggtacggcccagaccgcgtcaagtacttgggcccattctctggcgagcccccgtcctacctcactggcgagttcccaggtgacta

SEQ ID NO: 76795 - DNA, 257 bp, Glycine max
  Clone ID: 700957814H1
aattggctgaattaataatagtcacaccggagccatcaagttgagtgggagatgcttgccatgactgagattcttgaagaataaaatatcaaatcttgacagattcagcgtgtgtgaccaagttagtggaaattgtactttggaactgtaatcacaaattccctatcactaattttaggtggtggttgtacttttaataagtttatgtgaaaaagaaaaaaacagtgcttttgtatattattcctagatgaattgta

SEQ ID NO: 76796 - DNA, 254 bp, Glycine max
  Clone ID: 700957821H1
agccattgaatcgtttcgtttcggaggtggcggatatggacgattacgcgagcagcgacgaggattaccattacgactccgatcaggaggactccgtcgaggcctacgaaaacgacgagaattacgccttgctttcttccaagggccccactactaaggtgattacaaaggaatcactgctggctgcacagaaggaggatttgcgcagagtgatggacatgctatcggtgagagagcaacatgctcgtactctg

SEQ ID NO: 76797 - DNA, 255 bp, Glycine max
  Clone ID: 700957822H1
ctgcgtctcttctcaaaaaccctacaaacaaaacactctctgcttcgcaaattcgaacctttgaatctgaatcatgccgcgcaagaagaaagctcacgacccattcttcaccaacgattcccgaaagcgccaaaaaccgaataaaaaactcgacgaagatgaggaagacgccgagatagaaagcgactttgatgaagacggcttcttcgccggcggcggtggcggcggctcgggtgaagagcaggaggaggaaga

SEQ ID NO: 76798 - DNA, 253 bp, Glycine max
  Clone ID: 700957839H1
aaatcttttatttcattcttcagaccaaaaaaagaaaaagagaacattgttcaacgaagcaagatgcttagcaaccgcatatggcagaggagagctttgatctccgcccggaccttattttctggctctgcttctcactcttcatcatcttcccatgcgatctcgcttcgcttcgccaaagctaatgctccttcttcttcacatgtcattttcaattttgcacgtgtggacagatattggttttctactcaac

SEQ ID NO: 76799 - DNA, 246 bp, Glycine max
  Clone ID: 700957890H1
cacactagctatagctagaatcccctccaatccctctttgtctttgtgcttttctttagttctttccaaaacagcaacaatgatgagttgccaagcatggcctgaacccatagttcgagtccaatccttagctgacagtggcctaagctcaatcccttcacgctatattaggccacactcccaaagaccctccaacaccacttcttttaaactttcacaaaccgaacatgatcatggtcacggtcg

SEQ ID NO: 76800 - DNA, 253 bp, Glycine max
  Clone ID: 700957896H1
gactatatatatatatgccatcagaacgtggagttctttgtgtggtgatctttttttatatggaatagtagagaagaagaataataacgtagggccttggggcatccagtttgttgaccggattgtggtcaactcgtttagaaatataagcaatttgttcttgtttcttgtttgtgggtgcatgaatcctacaattttacatttaaaaaaattgtactacttttttcttaaactgttgttgatttttcataaa

SEQ ID NO: 76801 - DNA, 267 bp, Glycine max
  Clone ID: 700957904H1
tgctttgagacccttaatcccatccacaaaagcactgtctctgatgatgaagatgacattgaatttgtggggggttcaggcacaaccaatccaaccacaaaaaaagatgctagcagctttcaaatctttgacatcattggccattttgctcaacccaatccccacacagttttgccaaagacaccaattatttgcaaaccatcagaaaatgccattgagttggccctcaagatagccaaccttaatccacaaagaactttgttcttt

SEQ ID NO: 76802 - DNA, 265 bp, Glycine max
  Clone ID: 700957905H1
tctgaggtgactttaattatgaatggaaaacaatactaaaaatacctaaagaaccacatcaaagttttgtcctttgttttatattataattttgcaatgactatttttccctagtgaacagaatttctggcagaataaattgtgccattgttttgcatttgtagaatctggactattataaccttttatctcctcttactgtctaatgttcttactgctctgcgatagatttgttcattctttgttcactatgtttgtagtggaa

SEQ ID NO: 76803 - DNA, 264 bp, Glycine max
  Clone ID: 700957949H1
gcttatagtagcaattgacatttattagcactgagtaacacgcccgaatatggcaccctcaatctccgacgaaatgccaagcaccaccacctctctcctccgccgcaaccggtggctcccctccagcatcaaactgaaaacaacccttttctcagaactctccggcgcggtgggtgacctaggcacctacatccccatagttctagccttatccttagtgaacaacttggacctcaccaccacactggtcttcactgctctcta

SEQ ID NO: 76804 - DNA, 130 bp, Glycine max
  Clone ID: 700957965H1
accaattctaaggcaccaacaatcgtgtgggacgcacgtgacctctgcgactttcatctcgtcctcaaacacggcacgtgctacatgacacttcatgtcttacatgcggagggtgatataggagaatata

SEQ ID NO: 76805 - DNA, 261 bp, Glycine max
  Clone ID: 700957966H1
caacaagttgatggccaaagctgataaacaaacaagactcagtctcacgaggtggagtgcggattggaaaagtgctactgttctatatgagcaggcagctaatgggtttagagttgccaaggactatgagaatgccaaaatagcatatgagaaagcttcgaaaggacaagagatgctttcttcaccttgggatgcagctaagcacatggaatctgctgctgctctagcgaaggatctaagacactggcaagaagttgtgga

SEQ ID NO: 76806 - DNA, 247 bp, Glycine max
  unsure (1)..(247): unsure at all n locations
  Clone ID: 700957994H1
gtttttatttctctcttctctctgcatcgcttcaggttcttctgaaaagatgtctcgcgtgtcntgttggtaacttggattcacgagtcaccgagagagatctcgaagacgaattccgtgttttcggagttattcggagtgtttgngttgcacgtagaccacctggtnatgcttttattgactttgatgaccgcagagatgcacaggatgctatccgtgaattggatggtatgtttagaagaattat

SEQ ID NO: 76807 - DNA, 247 bp, Glycine max
  Clone ID: 700957996H1
aaagctattaagcccaaacaaggcaacaactctgaatccaaatgcagcagagtttgttccttttgccctcagatcatcgtcattatctggaactaccagctcggtagatgcaacagcaaagctttctgctgctggagctcttgggaaagcagtttttgatagatcagaatcatccatttcaaataattctgatgatgaggtacaccaatactggcgatgtcagctccctgatgatatcacccctgat

SEQ ID NO: 76808 - DNA, 113 bp, Glycine max
  unsure (1)..(113): unsure at all n locations
  Clone ID: 700958066H1
ctgtcttcnntggngatngccttttgcnttttgcgttaggccttgccgaattaantnctngtntcatggttctctcgangtcaagaanaatgtgcatgcgagagtttcnaggt

SEQ ID NO: 76809 - DNA, 271 bp, Glycine max
  Clone ID: 700958105H1
cttttgtctgaggtgtgtgcattcttgtttaactcctctttgttcctcagacatcccagaagggaaccaaaaataaaaaataaaaaaataaacacaatcaataaaggggagaaaacaaacatgtcattcacaggaactcttgataaatgcacagcatgtgacaagactgtctatgtggttgacttgttaactcttgaaggaattccttaccataaaaactgcttcaagtgcagtcactgcaagggatgtcttacgatgtgcacatactcct

SEQ ID NO: 76810 - DNA, 269 bp, Glycine max
  Clone ID: 700958109H1
ctagtttagttatctactcttttctgcatgtttgttctctcaacgactcctccgcgaaagagtattattcaatattttggttgggttgaatcccggggttgaagcgttgcagacatcacggctattctaagagtgtctcgctccctcattcatgtccgatctgtacgacggaggacgggtagttgcgtaactgccgttaacccttcgccgcacggtgggcgtggtgctttgccttctgaaggtggtagcccttcagacttgctcttcct

SEQ ID NO: 76811 - DNA, 269 bp, Glycine max
  Clone ID: 700958116H1
ctctgcttcatccagggggactcctactcctagggcctcaagacagtttttggataattctctggattgtttacctctttccagtactgttacagatgaggcctatgagtcactgaaacggcaaaaggtttatttttcagatacagagcttaaagtgggtgatgaatctgacagtccccttttgaatttgagctactcaaaatctgccaaccgtgagaagaaaggtcaagctggaaatggaggcaattacaactcaaacaacactatgc

SEQ ID NO: 76812 - DNA, 256 bp, Glycine max
  Clone ID: 700958195H1
gttacttgcgatacggtatgctagcagctcgtgcagaggctttaaaggttcgtgattctgaaaatccttgtattttggctggctttgatgggtattacgtatatggaggagtgcagtataaggccaaagctcccccttctggctcaagcttcagccaatgccaaaatgttgttgttgaagcactccatgttaatgcaacatgctcttacaaggattgcactttcggagggatatggaatggtggtgggggagctgg

SEQ ID NO: 76813 - DNA, 259 bp, Glycine max
  Clone ID: 700958210H1
attagcagcagcatatgttgttgtttgtggtcatcccttacagcagtgttgatcagaagaagactatataatagcctttgctccaatcacttcctcttgttcatgccataaactaaaccctttctacagttacaaatctatgctactccacaaagactctttttgcatgagacatcctctctcttaaaaaaccccttcttcagtcaaacctccccaatcatacttttaccatttcaccactcacacttttctctccctc

SEQ ID NO: 76814 - DNA, 261 bp, Glycine max
  Clone ID: 700958215H1
aaaatatctcacgcaataacaaaccctaataacaatgctgaagcatttcaacatgaacattttcttcacgttgcttatagttgtcaccttagctagtttctatgttccccatttgaagcctagtctttcaattacaatacccttctgcatggttgcaaccctagcataccaatttataatgagaacacccaacaaaatttacttggtggattttgcatgcttcaagccaagccttgaatgcctgtgctccaaggaaatgtt

SEQ ID NO: 76815 - DNA, 260 bp, Glycine max
  Clone ID: 700958220H1
gtcatttccaaaagagaaaaagacattttcaataccattttttaagcctgtaccaaagtttcttccgattgttaaacctataccaatgccttttccaaagcctctacctctacctatcccagttttccagaagcctataccaaagtggattccagatgttaagcctataccaaagccaattcctatcccggtgttcaggcctgtcccagttccagtgaagccaataccaaagccatctccaacaattgagaagccaaagc

SEQ ID NO: 76816 - DNA, 257 bp, Glycine max
  Clone ID: 700958221H1
gtgagatacactaagttatcctcataaatacactctaattaggtggcaagataagtgtctaaccttagtaacattgccacatattgtgttcattttggaattgtgccactaaaattctattcaattcatctatggctgcctcttcttatgctatgcaatcaatcctggcaaaccctttgatccgcatttccagcgggtctagggtgaaccaatttggcgttcctgctttgcacatgagaaggaatgttggcctgaga

SEQ ID NO: 76817 - DNA, 257 bp, Glycine max
  Clone ID: 700958224H1
atgtcacagttgggtttatgtgcttttcgggttggactgatttctgaagcccatggctgcctgtctgaactgtactctggtgggagggtgaaagagttacttgcacaaggtgtgtcacaaagtcgctatcatgagaagactccagaacaggaaaggttggaaagaagacggcaaatgccttatcatatgcacatcaatcttgagctcctggagacagtacatcttgtatctgctatgctgctggaagttcctaatat

SEQ ID NO: 76818 - DNA, 255 bp, Glycine max
  Clone ID: 700958240H1
ggaccgttgaaaaaagctgaagctcatcatgatggtcccatacaattatcagcatctgcgtgtgagttgttagagacaagaaaaacgagacctttagatggtcggaagatcaaaaggagaaagccaaacagcacctcctcagcaaattaacataaaaaacctctctttctctatttcttttattattgggtatgtcttgaagttcttctgaatttgaagcatatatttgtccttgaatggaaacacgtgctggaa

SEQ ID NO: 76819 - DNA, 257 bp, Glycine max
  Clone ID: 700958250H1
ctcggaagcgtgcattaaatttcccgaaaggctaaaatatccaatgcacctttctcttcctccgatggctaatctctcactcttgttcttcggtctcctcctattctccgctgccgtagccaccgtcgaacgaatcgacgatgaagacaaccttctgatccgtcaagtggtgccggacgcggaggaccaccacctgctcaacgcggagcaccacttctccgccttcaagacaaagttcgccaagacctacgccacgc

SEQ ID NO: 76820 - DNA, 256 bp, Glycine max
  Clone ID: 700958251H1
tattaaagcaggtcacaatttgtaattgtaattgtaattgtagtagaatgaggatgcgttcagctaaataactttaagtgttgtgttaataagtgttcttatcttataagagcttatgtcaaaattttgatcatgaaacttactaatgtggtctggtgatgggtgttagaattcaattgcaaggtgtgagacttgagtctcaaattggaagtatgaaattctagtgtggggtgtataaggctctacaactacaaca

SEQ ID NO: 76821 - DNA, 253 bp, Glycine max
  Clone ID: 700958255H1
atatagcccaagccctatacaaccaaaccctaacacacacccatttgattcagtttccatggctagcctcaaggttgcatttttggctgcagtgctctgcatggttgtggtgagtgcacccatggcacatgcagctatcacgtgcgggcaggtgacgaatagcctgatcaattgcatcggttacctccagaacggaggaacgccgccgtcgggatgctgcaacggagtgaagagcctcaatgccgccgccaag

SEQ ID NO: 76822 - DNA, 253 bp, Glycine max
  Clone ID: 700958256H1
gaaaaagcaactaagcatagtgtgtaagaaagggagaaaaacaagtgctgtgtagagagaaaaatggctaggtggtgcatgatcttggtggttcttgctcttgccgtggttgcaagtgccagaaacatgcccaatgacgctggtttggaggaccagaagaacttccttgggtatgggttttcgggagttggcaacaatggccttccctttggtggagtgggttctgggtttgatggtaatatgggtgggcctt

SEQ ID NO: 76823 - DNA, 253 bp, Glycine max
  Clone ID: 700958260H1
ctcactcatcatgagtggctgcctcaacttgacatcagtgcattgtgcctgtgctgtccatgcgcaccgtgcattcaccactttcccttatcctgcccattaagaagctcatgcttttgatgttgaacacacttcgaggatgtgccccttgaaagggctcagagaagtgaaagaagtgaaatccaccccccttgtagatgtatgcctgcataagagagacttgaatctagctgattatgtacatcttttcttc

SEQ ID NO: 76824 - DNA, 255 bp, Glycine max
  Clone ID: 700958267H1
caaaaatgcgacgcctgaacatatttggaaatcaagttttggtccctccttgagtactgaagagcgcgagaaacggatgagacaagctgctgggagatctggttttgtgcaggaactgtttctttcaactttgttaggtgaataatggaagctgtaaggtgctttcagaagaataatcaacacgagatccatcgttaaggatcttgaatgaaggatacctctagtgggattcgttggttatctgacaatccatgt

SEQ ID NO: 76825 - DNA, 251 bp, Glycine max
  Clone ID: 700958273H1
ttgagtctggaagattggcttcactcttctgctcctgctgatatctatgttcttgggtttcaagaaattgtacctctcaatgcgggtaatattttgggcacagaagacaatggccctgccagaaagtggctagctcttattaggaagaccctgaatagtcttcctggaacaagcggggaatgccacactacttcaccgcttcctgaccctattgtagagttagatgctgattttgagggatcaatgaggca

SEQ ID NO: 76826 - DNA, 251 bp, Glycine max
  Clone ID: 700958284H1
gtgtgaagaacgacgtcgctttctcgtttgggggaaatctaaaatttccctaatctgaagcgcaggcagagaccttcccactcctcagagtgtcgccgcagcagcctccgtcgccggcagaaattgcaatcttctgctgccttattggaattcagatcttataatcctcagtttggtcctatgaaggacagacacatgaagaaaaaagtcaaaagattgaaagacatggttgagccagataaaaattgcga

SEQ ID NO: 76827 - DNA, 251 bp, Glycine max
  Clone ID: 700958288H1
gttaccttcaacataaaatggaagaatccaagggttttgttagtggtgagactcaaaaacctcacccaaaaatgccttctagttccttcccaattcctttgccagggaggaatcgccatggccagcagtgtccatcaagatatgccccacaatggaggcaaagggcaatactagggcacaccgtgggaaaccctagcggggcaagtgagaatacaactttgaaggtgtaagtcactcgaggagtaataata

SEQ ID NO: 76828 - DNA, 249 bp, Glycine max
  Clone ID: 700958291H1
aatatattttacagtttcttgtgaataagaccagagaaaatacaccaaattaacataatagaaatgctgacatacaaacaatacttgtgttttctcccaaatagcatagtaaattttgtttaatatgtgaactgtgaagcatttaaaatttgatgtgaatgtgatgatatcctaaacgggttttgttgcgtgaataggtatacccactcttcgcttcagttggtgtggctgttggaatctgcggtatgc

SEQ ID NO: 76829 - DNA, 249 bp, Glycine max
  Clone ID: 700958292H1
gattgctctgcatcaagttcctgatatttctgtacctcgatatgttcgtgtgaatacacttaaactggatgttgattctgccttgcttgaacttcagaaaaaatactcggttcaaaaggataatttactgcctgatttgctgatactcccaccaggaacagatttacatgatcatcctcttgtcaagaatggcagtatctttctgcaaggtaaggcaagttccatggcagcaccagcccttagccctga

SEQ ID NO: 76830 - DNA, 248 bp, Glycine max
  Clone ID: 700958293H1
tgcctctggctggtcaaatggtagtgcagagagtagcccaagaagcagcagcggacctggtgatgactggagatctgcctttgatgcagctgccaatggccctgttagtcgaagtggttcatcaagatcgggatccaatggtcacagtcgacattctagtgatgctgcccaaaatggtgatgtgaactctgggtcaaactccagcagccgtcgaacgcctaatcggttgcctcctgctcctccgggtt

SEQ ID NO: 76831 - DNA, 252 bp, Glycine max
  Clone ID: 700958296H1
tggacagaaaaattcgggtttagcaagatgaaacccaaccagcttaccaactacagaatgaactgccatcaaatcatggcattcaaagggacaaatatgcttcataaaacggtgcctcaatgtcgggtcatcaatactcaattgtgagaaatttgtatacaaaaaagtgaatcgtgaaaggggaaaaccctagctttcttgtcgccatcttttttttcattcaacctagtctgtacatgtatcgactttagg

SEQ ID NO: 76832 - DNA, 245 bp, Glycine max
  Clone ID: 700958323H1
cgaggatgtgctactctgtgtgttgcctatgtttcatatctatgcgctcaattccattttgctctgcgggattcgttccggtgcggccgtgcttattttgcagaagtttgagatcactactctgttggagctcatcgagaagtacaaggtgacggttgcgtcgtttgtgccgcccatcgttttggcgttggttaagagcggagagactcatcgctacgacctgtcgtctattcgcgctgtggtca

SEQ ID NO: 76833 - DNA, 241 bp, Glycine max
  Clone ID: 700958326H1
aaatatcatctgggtattccctggaatttagtggggtgcctttgttttcttcatcggaaatcgttgttgttggattccaagcatgggaggctgttgcagccacgatgtttcggttcgagggaaggtggagagcgagatggatgatagagaatatgagtatgattatgaaaatgatgtgtcttatcaacaaggtggagcattggtcaggttaagaggttcctctaggtttgcatcaatgtac

SEQ ID NO: 76834 - DNA, 247 bp, Glycine max
  Clone ID: 700958330H1
ttttcggggcacccacataaaaatattttgcatgtgtttgcctgagggagagagaggcatggcactagaagcagtagtgtatccccaaccacaggacccgtttggccatggaatcaaagacccttcttacaactacaacaacttgttagaaggtggtggaggcaattggggctatgcagatttcaaccttgaaaaagaagaccgaacttgtgtcccttttcttgcgaaccaaacagagaattatcct

SEQ ID NO: 76835 - DNA, 240 bp, Glycine max
  Clone ID: 700958345H1
ccagttcttattaatcgatttacggacacataggggtttcacttttctctacgcagattaattgagatggaagtctctgggcagaatattgtgaaatgtgatgaagagaaagcattgaagtgcttgcttgatgcctttggctcagttttttctcttgaagagattgcttctgcctattgcaaggcgagccgcaatgcggacttggctggggaaatgttgtatgaaatgaagggaagttcc

SEQ ID NO: 76836 - DNA, 239 bp, Glycine max
  Clone ID: 700958357H1
gagagagagaaatagagagagaacttcaagtgagggtgagagtgacacaaatctagagagagcactagtactctaaaagtctattatattcttcaaaatatgaccatgcatcgcgagtcttgggcttttgtcttcggcgttatgggcaacatcatctcctttggagtgttccttgctccattgccaaccttttaccaaatctacaagaagaaatccactgaaggtttccagtcacttcc

SEQ ID NO: 76837 - DNA, 246 bp, Glycine max
  unsure (1)..(246): unsure at all n locations
  Clone ID: 700958366H1
gcatacaactacaaaggttgctgtaggagataagatattgaagtagtgctaagtgcctaacacctgcacngaacaatggcctctgcatcagcatctcttctcaagtcttcacttgttcttgacaagtctgagtgggtgaagggacaaacacttcgccaaccttctgctgcatcagttgtgagatgcaaccccaccaccccatcaggcctcaccatcagagctggttcctatgctgatgagctcgtt

SEQ ID NO: 76838 - DNA, 241 bp, Glycine max
  Clone ID: 700958368H1
tttcaatacaatattgctctctaagctttgattcttcttaattcatacccttcccacactcattcattgttgtgcgtctggttttctgcctgaaatggagtacatgaaccagagaccaaaatatgattgccttctttttgatttagatgatactttgtatccactaagcactggtcttgcaaaagcatgtggccaaaacattaaagactatatggccgaaaagcttggcatagagaaaagc

SEQ ID NO: 76839 - DNA, 238 bp, Glycine max
  Clone ID: 700958372H1
cgcagagagagagagatccatcgatcaattaatttccaatggccgatcagctcaccgacgaacagatctctgagttcaaggaagcctttagcctcttcgacaaggacggcgatggttgtattaccaccaaggaacttgggactgtgatgcggtcgcttgggcagaacccaactgaggctgagctgcaggacatgataaatgaggttgatgctgatgggaatggtaccattgatttccc

SEQ ID NO: 76840 - DNA, 238 bp, Glycine max
  Clone ID: 700958373H1
attctctctgtgtatttccctacctctcccttcaagatgcagatcttcgtcaagaccctcaccggcaagaccatcacccttgaggtggaaagctctgacaccatcgacaacgtcaaggccaagatccaggacaaggaaggaatccccccggaccagcaacgtctcattttcgccggaaagcaacttgaggacggccgtacccttgctgactacaacattcagaaggagagtactcttc

SEQ ID NO: 76841 - DNA, 245 bp, Glycine max
  Clone ID: 700958380H1
ctgtgccaattgacatagatctgaccatgagtcatgctagcgtatcagggaaattcaatactcatgcaacaaatggcaaagagattgaagtaattgatttagaaaatgatgattccattcaagaagagaagtcaatcgacaatatggatagaaagacagagactatgtttcctggccttgaaggtttttctagccatgctcaaaatgctgctgacatgcatgatgttcaggatggatatgggctt

SEQ ID NO: 76842 - DNA, 117 bp, Glycine max
  Clone ID: 700958387H1
ctcagtctctgtgtttgcggctgaggattccgaacgagtgaccttcttcgtttctcgcaaagtttaagtaatcatgggtaaggaaaaggttcacatcaacattgtcgtcattggaca

SEQ ID NO: 76843 - DNA, 240 bp, Glycine max
  Clone ID: 700958394H1
cattagcagcgttaaagaagagagaagaaaaatgcgaaagttcgatccatggcccgttttcttcaagcgcgagtggaaacgcaactggcccttcctcgttggattcgcagtcaccggagctctaatcaccaaactttcccttggccttaccgaggaagatgctaagaattccaaattcgttaaggcgcacaaaaggtgatttctgaatcgtgacatctgcctggctttgcactttatgtt

SEQ ID NO: 76844 - DNA, 259 bp, Glycine max
  Clone ID: 700958421H1
tcgtgttgtagctagctcctcgaaaatgctggcacgcctcgccgcgagtcgcttcaacgagatccgtcagattttccgtcagccttctagggctttctcgaccgctctgaactaccaccttgacacaccggacaacaaccctaaacttccatgggaattcaccgaggccaatcaagcaaaggttaaggagattttgtctcactatccatccaactataagcaatctgctacaattcctcttttggatcttgcccagcag

SEQ ID NO: 76845 - DNA, 261 bp, Glycine max
  Clone ID: 700958423H1
aaaagcataaacaaaaaaaaattgaaaatcaaagcaataagaacacgcattctttacttccaattcccaattcttcttctgccctagattttaccccctttattattgcactccaccaccactgtgcatcgatcgatcgttggttcttgaatttcccttgtggttaggtttcctcgatggagtcggaggatgatatgcccgacgccaacgacatcgagtccctcgacgacgatttctacagtggcgagaccgaggacgctc

SEQ ID NO: 76846 - DNA, 253 bp, Glycine max
  unsure (1)..(253): unsure at all n locations
  Clone ID: 700958434H1
ggtttttctttttctcttctcactgcatcgcttcnggttcttctgaaaagatgtctcgcgtgtatgttggtaacttggattcacgagtcactgagagagatctcgaagacgaagtccgcgttttcggagttattcggagtgtttgggttgcacgtagaccacctggttatgcttttattgactttgatgaccgcagagacgcacaggntgctatccgtgaatggatggtatgttcagaagaattatgttgttg

SEQ ID NO: 76847 - DNA, 248 bp, Glycine max
  Clone ID: 700958501H1
ctccgcactccgtcttcatcaatcagcatcaccaccgctccaacacaggggaaaatgagggagatccttcacgttcagggagggcaatgcgggaaccagatcggttcgaagttctgggaagtggtgtgcgacgagcacggcatagatccgacggggaagtacgtcggaaactcagatctacaactcgagcgcgtgaacgtgtactacaacgaagcttcctgcgggcggtttgtcccacgcgcagtgct

SEQ ID NO: 76848 - DNA, 241 bp, Glycine max
  Clone ID: 700958507H1
acgaaatgaaacttgcttctttgatttctggtttcactgattacactcacctcctctctattaaggacaatgtgatgagggaagagaagacaattcctacaaggaagaatgaagtgaagtttttcaagagcttggctcctcctcttgtggctgcttttctagtcttatctccaatttgcagcactccagtttcaagtgctcaaaccgtagatattcagagaggaaccacattgtttcgtca

SEQ ID NO: 76849 - DNA, 242 bp, Glycine max
  Clone ID: 700958508H1
agacacgcgaatggaggaaactcatgaacctgttaggaacaatccccttcccattgctcggcgctaccaagatcagatggttccaagcatcacttcttccttgttgagagtggaagaggaagaaacgtcttctgatcttcgaaactcagcagaagagagcagcagagctgaagtgccagtaactgcaaatgcacaacaaaatgcaggagttgcattgaacgaacggatgttgcagaccacta

SEQ ID NO: 76850 - DNA, 239 bp, Glycine max
  Clone ID: 700958510H1
caaacacaaaccgaaaaggcgaaaggggttttccgagtgagatctagggtttccatcgattcggagagaggatattgatagaacgacctcaacgagcaaggtcaggaggtggagtactagaacatggattcggtgccttcgaattcgcatggaaacctcgatgagcagatttctcagctcatgtagtgcaaacccttgtccgagcaagaggtaagggtcttgtgtgataaggcaaaaga

SEQ ID NO: 76851 - DNA, 238 bp, Glycine max
  Clone ID: 700958512H1
aaacggatctcttcttcagtggtggaagctactagaacactagtttgttgagcactgcgatgaggaagtggacggttgcttccgctctccttcttctctctctcctctttctctttgcagatcaaggtcgaaagtttcaggcgaatgccgagggagattccgacgagcttgtagatcctccgaaggtggaggacaagatcggtgctgtgcctcatggcctttccaccgattcagatgt

SEQ ID NO: 76852 - DNA, 239 bp, Glycine max
  Clone ID: 700958513H1
ctagggttttaggaaaagacactgtctcgcgagtgaacacaggttacagcaatggctttctttggtagaattgggaatttattaagacagacagcaagcaggcaggttagttcagaattgcgatcatccccttcgttttttcaggctatacgcagtatgtcatctgctccaagcacaaagctgtttatcggaggtgtttcatattctactgacgagcaaagtttgagggaagctttttc

SEQ ID NO: 76853 - DNA, 247 bp, Glycine max
  Clone ID: 700958516H1
cagagacagaaaaagaaccccttccgttgtttctaacccgctactttcccgagaaaattccccgagaaaggggaagaaaaacaccaagagaaaccctagaaagcaccaaaatccaaaacaaactcaatcccgatcccgatccgatccaacgaaatggatcattacaaggttctcggcctgcaccgaaccgcgaccaaggaagagatcaaagcggcgttcaagaagctagcgttccagttccacccgg

SEQ ID NO: 76854 - DNA, 239 bp, Glycine max
  Clone ID: 700958523H1
ctcgcaagcaaaaagaaagaatcccaggcgaggagaaagatggaggggaaggagcaggatgtgtcgttgggagcgaacaagttccccgagagacagccgattgggacggcggcgcagagccaagacgacggcaaggactaccaggagccggcgccggcgccgctggttgacccgacggagtttacgtcatggtcgttttacagagcagggatagcagagtttgtggccacttttctgtt

SEQ ID NO: 76855 - DNA, 241 bp, Glycine max
  Clone ID: 700958524H1
gtcccaaagagctaacaagagattcaagaccggcatggctaatgaagaggaacagaaaaaccacctcttcggcatcaaagatctcggtcacaagactctccttcagagtgatgcactctatcagtatatacttgaaaccagtgtctatccaagagagcacgagtgcttgaaagagatacgcaagatgactgcaaaacacccactgaacatcatggcaacaccagcagacgaaggacaactt

SEQ ID NO: 76856 - DNA, 233 bp, Glycine max
  Clone ID: 700958543H1
ctttgaggaaactctcattgtgcaattataggattcgtagtgccttgaaaccatctggacttggacttgtgctcttgtagtttgatactattcagttttggtttcactatgtaattggtaaaaccattcatttgttttgttttattagcttgttgtttcaacattatttcttgttcctttcaaatattggcaattaacatattaggttttcagggtatgtgagagcccatctt

SEQ ID NO: 76857 - DNA, 235 bp, Glycine max
  Clone ID: 700958556H1
ataaccctaagcttcaaacgggtaagtgtcgctgggacttcaatggcagtgaccgaagctcaaaatcctcttcttggagaaaacacatgtggttccttgttaaaaaagcttcaggaaatatgggatgaggttggtgagagcgatgagcaacgagacaagatgcttcttcagttagaacaggagtgcttggatgtgtacaagagaaaggttgagcaggctgcaaagtcaagggcgc

SEQ ID NO: 76858 - DNA, 231 bp, Glycine max
  Clone ID: 700958560H1
agtcaggccatgaatgagaatagagatattgcaaagacccttcttctgtactcaaggtggacgcattacactgggcagaaacaaaaggaagatgtaataagtctttatactagggtgagggaactgcaacccaaatgggagaaagggttcttttatattgctaagtattgtgatgaagtgcttggtgatgccaggaaacgccaggaggaactgcttggtgatgccaggaaa

SEQ ID NO: 76859 - DNA, 234 bp, Glycine max
  Clone ID: 700958566H1
aatgggtccaattccttcctatggtgcaggttcccacgttcttcttttcccgttcatgtccaaaggtcacaccgtaccccttatccacttggcccaaatcctcctccgtcgttccatatcggtcaccgtcgtcacaacccctgccaaccactcattcatggccgaatctctaaacggcaccgtcgcctccatcgtcacgcttccattccccaccgccacgaatatccccgccgg

SEQ ID NO: 76860 - DNA, 232 bp, Glycine max
  unsure (1)..(232): unsure at all n locations
  Clone ID: 700958582H1
ctttattctctcacacaaaataatggntggagaagcttggcaacacgtctcatgatcctgaagtgagaaaggggccatggacaatggaagaagacttaatcttgatcacctatattgccaatcacggggaaggggtttggaactctttggccaaggctgctggacttaaacgtaccggaaagagttgccggctccggtggctaaactacctccgtcctgatgttagaagagg

SEQ ID NO: 76861 - DNA, 230 bp, Glycine max
  Clone ID: 700958586H1
gatcgatcgaacaagtgaattagctagaagcattgaaggacgtagctgctatggctcgaggaaagatccagatcaagaggatagagaacaccaccaaccgccaggtcacttattctaaacgacggaatggccttttcaagaaggccaacgagctcaccgttctatgcgatgccaaggtttctattattatgttctccagcactgggaaactccacgagtacatcagcccc

SEQ ID NO: 76862 - DNA, 227 bp, Glycine max
  unsure (1)..(227): unsure at all n locations
  Clone ID: 700958592H1
cagcaataagttcaggtggaaggagaagcatgttgaagctggcacagcgcatgacgaacaacttctgtgctggtgtgtgtgcctcaacagtgcacaagtggaacaagctgaacgcgggaaacgtnggggaggacgtganggtgatgacgaggaagagcgtggatgaccccggtgaaccgccggggatcgtcctcagtgccgccacctcggtgtggcttcccgtctcg

SEQ ID NO: 76863 - DNA, 232 bp, Glycine max
  Clone ID: 700958595H1
cagcaataagttcaggtggaaggagaagcatgttgaagctggcacagcgcatgacgaacaacttctgtgctggtgtgtgtgcctcaacagtgcacaagtggaacaagctgaacgcgggaaacgtgggggaggacgtgagggtgatgacgaggaagagcgtggatgaccccggtgaaccgccggggatcgtcctcagtgccgccacctcggtgtggcttcccgtctcgccaca

SEQ ID NO: 76864 - DNA, 260 bp, Glycine max
  Clone ID: 700958607H1
gcttgatcagttcatgacccattatgttctgttgctctgtgcctttaaagaacaactgcagcagctcgtccgtgttcatgccatggaggcagtgatggcttgttgggatctggagcagtctctgcaaagcttgacaggtgatctcctggtgaaggaacgggtgcaacaatgtcagacgatgaagatgaccaggcagagagcaatgccaacttatacgaaggaagccttgatgggggtgaaatcttggatttggtcctctt

SEQ ID NO: 76865 - DNA, 266 bp, Glycine max
  Clone ID: 700958618H1
gcaggaacaggcttgaactgttgaactcctacagggtttggaaattttgctaacccaactggatatgccatgattactcctggtgtggttgggggtgcaacggctttagaagattcatctcgagtcaagtacaaagataatcttatgtcccaaatcctcaggctgagacatcagaaatttggttacagaatccaagggaccatcctggcatgcaatctactccatactataacatgccagggcaaacacctcatgcggcttacatg

SEQ ID NO: 76866 - DNA, 265 bp, Glycine max
  Clone ID: 700958619H1
gagaattggggaactcacataatgggcacccctgctgttccaagcagccacccagataacaaaaaagcagctttacaaagtggacaacctcaaccagttcaatactaccatgaccaacatcaacatccctacgtgcaacatacccagttgacaaaccaagcaacagtcccatggagtcaatccttaacatgttcgattcatggagcaaaaaagctgaagccaccgcacacaacgtctggcacaaccttaaaactggtccatcagt

SEQ ID NO: 76867 - DNA, 259 bp, Glycine max
  Clone ID: 700958623H1
caaaaggtcttgaatatctatacaaggacatgccaagcctaattgcaccccatggaaatctcaagtcctctaatgttctcttgactgaatcattcgagccactcctcacagactatggcttagtcccagtgataaaccagatctggctcaggacatcatggtgatatacaagtctcctgagtacttgcaacaaggaagaattacaaagaagactgatgtgtggtgccttggaatactaattcttgagattctaactggg

SEQ ID NO: 76868 - DNA, 263 bp, Glycine max
  Clone ID: 700958632H1
cgagccacttattgtgagagacgggaacagaaggctaatgcaagacatagattgtggtgggttgtgcaagacgaggtgcagtgcacattcgagacccaacttgtgcactagggcgtgtggcacgtgctgtgtgaggtgtaatgtgtcccacctggcacatctggaaatagggaactatgtggaacttgctacactgatatgactacccatggcaacaagaccaagtgcccttagagaaaaaacccattgggaaatttgtgctt

SEQ ID NO: 76869 - DNA, 259 bp, Glycine max
  Clone ID: 700958648H1
cgccttcattgtttgcttgttgatgaagaaaagaaagagcgttagggttcttcgtagtcttgtctattctatgtaatctcattgaattttaaatgtgaagaactttcttaggttttattgtttgacagatccgtattctctttccttcaaaatttcgaagaaattaataatttacgggatgtatatctgttcttcgagatctttagattgaattgtgcaaatatagtaccaacatcccaccggtagttgcacgagtagg

SEQ ID NO: 76870 - DNA, 201 bp, Glycine max
  Clone ID: 700958682H1
gtttcatttatcttcttctgctataggctagagcgattcaccgtagaatattacctacaagaacatgacccggtacccatatttattattacgtggtgtcattgctttgtagaagtggtccgcgggttatttaacgcggtacgatgcgtgtacatctgtaaatcatgagtagaagacgattttttatatttgtgcagaatt

SEQ ID NO: 76871 - DNA, 244 bp, Glycine max
  Clone ID: 700958701H1
gggaaggagagcagatatgaagcaaggaatttacccacaaaattgaatcctcagccagaagaagtatgcccaagtgccgaatggaagtggtctagaactactgtagtttatgatgcttcatctgatcatctcattcctttttatcccctctctttttggaaacattggttcaaccactgggagttacttgcaacttagagctgcaaatattcacaatagaccaatttctggtttaagaggagag

SEQ ID NO: 76872 - DNA, 249 bp, Glycine max
  unsure (1)..(249): unsure at all n locations
  Clone ID: 700958710H1
gcaataactcagccacagccacaacacacaaacacaaacccttcgttcctctctcgttcccttcttcaattcgatcaaacacagaatagtacttttttattatgatggccgtggcccgaaaggaaatggaccggatcagggcccgtggngcccggaggaggacgaggctcttcagaagctcgtggagcggcatgggcccagaaactggtccctcatcagcaggtccattccgggccggtctgggaaatt

SEQ ID NO: 76873 - DNA, 242 bp, Glycine max
  Clone ID: 700958718H1
acaaaattgagatattgcaagtgaaatgaaggccaggcacatctcattcttctcttgatatttctgatggcactcgctgcaaacaaagtttctagcagtcctattgtgactaaaagaacagctctttgcagtcacatgaaaaacactatttttcctcgtcaacaaggatcaatagaatacagttgtcaagacatagactggaacatggacatctgaactatagatgtctccacacacagaga

SEQ ID NO: 76874 - DNA, 244 bp, Glycine max
  Clone ID: 700958722H1
ctttttgattcctaaattctctaaaattcgaaattctaatttcgttaggggaaagagattgtttgtgtgtgagtgagtatggctggaaaaggcgagggtcctgctatcggaatcgatttgggaacgacgtactttgcgtcggcgtgtggcaacacgatcgtgttgaaatcatagccaacgatcagggtaacagaactaccccatcctacgtggctttcaccgacacagaacggttgatcggcga

SEQ ID NO: 76875 - DNA, 247 bp, Glycine max
  Clone ID: 700958731H1
gcagatcttcgttaagacactcaccggcaagaccataaccctagaggttgaaagctccgacaccatcgataacgtcaaggccaagatccaggacaaggagggtatccccccggaccagcaacgtctcatcttcgcggaaagcagctcgaggacggccgcaccctcgccgactacaacatccagaaggaatcaacccttcacctcgtcctccgtctccgtggtggcatgcagatcttcgttaagaccc

SEQ ID NO: 76876 - DNA, 248 bp, Glycine max
  Clone ID: 700958732H1
gaaagaatcccaggcgaggagaaagatggaggggaaggagcaggatgtgtcgttgggagcgaacaagttccccgagagacagccgattgggacggcggcgcagagccaagacgacggcaaggactaccaggagccgcgccggcgccgctggttgacccgacggagtttacgtcatggtcgttttacagagcagggatagcagagtttgtggccacttttctgtttctctacatcaccgtcttaaccgt

SEQ ID NO: 76877 - DNA, 246 bp, Glycine max
  Clone ID: 700958741H1
ggtacagcacgggtgttggattgggtgctgagatcattggaacctttgttttggtctacactgtgttctctgcaactgaccccaagaggaatgctagagattctcatgtgccggttttggctccacttccaattgctttgctgtgttcatggttcacttggcaaccatcccagtaacaggcactggcattaaccctgctaggagtctaggagctgctgtcatgtacaaccaacagaaggcctggga

SEQ ID NO: 76878 - DNA, 245 bp, Glycine max
  Clone ID: 700958757H1
gcaaataaagcacagaacagttgaagtgaatggcataaaaatgcatgttgcagagaaaggagagggtccagtggtgttgttcctccacggcttccctgagctctggtactcatggcgccatcagattctctcttcagctccctcggctaccgcgccgtcgctcccgatctccgtggctacggtgacaccgaagcaccaccttcaatcagcagctacaactgcttccacatagtgggtgatctcgt

SEQ ID NO: 76879 - DNA, 244 bp, Glycine max
  unsure (1)..(244): unsure at all n locations
  Clone ID: 700958780H1
cgtgcacacaaaataatggacaaaaaaccatgcgactcatctcatgatccagaagtgaganagggaccatggatcatggaagangacttgatcttgataaactatatngcaaatcacggtgaaggtgtttggattctttagccaaagcttctggtcttaaacgaacgggaaagagttgtcgactccgttggctaaactaccttcgtcctgatgttagaagaggaaacattacacccgaagaaca

SEQ ID NO: 76880 - DNA, 253 bp, Glycine max
  Clone ID: 700958815H1
cagtttcgggggaagagatccagcagcaatggtgtacgtcaaggctcagaaatcaaaagcctacttcaagagatatcaagtcaagttcaagagaagaagagagggaaaaaccgattaccgtgccaggattcggttgattaatcaggacaagaacaaatataacactccgaaataccgatttgtggttcgctttagcaacaaggacattgttgcacaaataatatctgctagcattgccggcgatttagttctt

SEQ ID NO: 76881 - DNA, 113 bp, Glycine max
  Clone ID: 700958821H1
ggaagtagtcctaatgcagctgatgttcctactttacttggatatggttcattttcgcttcttaatgttgatagaaaaacagctgacaaactggtgaagccccctccacacaa

SEQ ID NO: 76882 - DNA, 254 bp, Glycine max
  Clone ID: 700958834H1
cttgctcagggtcttatagcggaaggtgtcaaggttgttgcagctggggccaaccctgtgctcatcacacgtggcattgagaagacagcgaaagctcttgtatctgagcttaaacagatgtcaaaagaggttgaagatagtgagttggcagatgtggcagcagtcagtgcagggaacaattatgaagtaggaaatatgattgctgaagcattgagcagagttggtagaaagggtgtcgtgacccttgaggaggg

SEQ ID NO: 76883 - DNA, 247 bp, Glycine max
  Clone ID: 700958840H1
cccagaaatagagagtaagcctgagatcatggaaaaagttggtgtggctgtaaatagcaaaaatcaagaatccaaagcaacttccaccattaccattaagggtttcatgagccttctaatgaaaagtgtagatgagaatggtgatggtagcaagagagttatttctctgggtatgggtgacccaactctcaccacttattttcccatctcaaatgtagctgaaaaagctgttgctgaagcacttcag

SEQ ID NO: 76884 - DNA, 248 bp, Glycine max
  Clone ID: 700958847H1
ctccgagctctacaccgaagaacggagccatggggaagacacatggaatgggagctgctcgcaagctcaagtctcaccgcaggaggcaaaggtgggctgataagtcatacaagaaatcccatcttgggaatgaatggaagaaaccttttgccggttcatcccatgccaagggaattgtccttgaaaagataggtattgaagctaagcagcccaactctgctattcgtaagtgtgccagagttcaactt

SEQ ID NO: 76885 - DNA, 248 bp, Glycine max
  Clone ID: 700958848H1
tgatgttgaagttggctgtgaagaggattctccttatgtgcctgagccacaggcaagtgagaaacaattagaagatgcttcctttcctgatactcagctgcatgaatatgtgcagggagaagagcatggtcatgacaaagagagtgggcaaagaaaaggtcgtagccggggccggggtaagggacgtggccgagtacattgtcatcaaaataatcgtgtgggaacaccctcttcaaataatacaattt

SEQ ID NO: 76886 - DNA, 249 bp, Glycine max
  Clone ID: 700958851H1
tattgctaccctggctttcccttcattcacattttgcagggcgcttctttctcattgctggcaaaatggcaaatgcagcgtccggaatggctgtgcacgatgattgcaaactgaggtttcaagagcttaaatcaaagaggagctacaggttcattgtgttcaaaattgaagaacagcaagtggtggttgagaaattaggggatcccacggaaagttatgaggactttatggccagttttccagctaatg

SEQ ID NO: 76887 - DNA, 248 bp, Glycine max
  Clone ID: 700958867H1
ccgcaacaatgcaaatgaacagaatgaacagagaagaacatctttatactgccttccaatactttgataaagataacagtgggtttattaccactgaagaactagaacaagccctccgtgagtataacatgcatgatggcagggacatcaaggaaatccttcaagaagttgatggagataatgatggacgcattaactatgatgagtttgcggcaatgatgagaaaaggaaatccagaagttatgaca

SEQ ID NO: 76888 - DNA, 163 bp, Glycine max
  unsure (1)..(163): unsure at all n locations
  Clone ID: 700958885H1
cactctcactctttccgcgagaggtttgatgnaactctcactggtcacaggaatgaaattttggcccttttgtgcaaggcttgaagccaagggcangggaatcctncaacaccaccaggtggttgcagagtttgaagaaatccctgaggagagcagaaanana

SEQ ID NO: 76889 - DNA, 239 bp, Glycine max
  Clone ID: 700958887H1
cacgatgatgaggtcaaggatagtgttgtttggagactccatcacggagcaatcgatccgagagaatggatggggtgttcctcttgccaatgcctattctcgcagggctgatgtacttgttcgtggttatggtggatacaacactaggtgggctatgttcttactgggccatctcttccctctggactcaactaaaccacctactgctaccacaattttctttggcgctaatgatgcag

SEQ ID NO: 76890 - DNA, 240 bp, Glycine max
  Clone ID: 700958906H1
attggttgctgttgattccctctctatatgcatgaatatcaatgggtgggaagccatgctcttcattggagtaaatgcagctgtcagtgtcagagtttccaatgaacttgggcttggacatccaagagctgccaagtactctgtctatgtgacagtctttcagtcgcttttcttgggaatctttttcatggctattattttggcgactagagattattatgccatcatttttacaaacag

SEQ ID NO: 76891 - DNA, 184 bp, Glycine max
  Clone ID: 700958908H1
ggatttgcaaagcaagtgacaaattctgtattagtggaccctggtatgggaggatgcactgtcgagaactgggtattattggacccattaattgagtgctttcggattaattccagtttgggtttctgttgattacatttgcagaacggtcgatcattttaaataaattaaaataatttatagt

SEQ ID NO: 76892 - DNA, 248 bp, Glycine max
  Clone ID: 700958914H1
tttgacagccgcgttttcttgttctctcgccgctgcttctctctccgccgccgccggtttccgccggaataaatgcttcccctccaagttttttcattcctcttccacgtgcatgccctcttccttgcatgatcaccactaccactctttcttattgcgagttgccaatgatgctgataggagtgaaatgtcatctgataccgcaaccgaggcatcgtattcagaagctgataagatggttgatggta

SEQ ID NO: 76893 - DNA, 253 bp, Glycine max
  Clone ID: 700958916H1
cctattcacaaactagaaagaggagaaaaggcataacaagagagagatggattctctgaagatgttgaaaggttatggtaaagtagaacaccacctcgaagatcatcgtaaccccaaacccaaacctaaattctcaaaacccttcatcgccgcaatttccgtcttcgcaatcctcttccttactctcaccttcgcattcgccctagcatccatgctccaccacagtcaccacaccgagtcacaacaacaactt

SEQ ID NO: 76894 - DNA, 240 bp, Glycine max
  Clone ID: 700958920H1
cgaataggaaattgagaattgctgctgctaatagacaagcttccattaagatgggggagttcaccgggagtggtgagtatgtgactcacggtgaattaccttcctccaggccaaatcattcaaggaaagttacagttcttcctcttgtgtttctcatcttctatgaggtttcaggggggcctttcggggtggaggatactgtgcacgcagcaggtcctctgttagccctcattggattct

SEQ ID NO: 76895 - DNA, 240 bp, Glycine max
  Clone ID: 700958922H1
gcagaacctcatctggataaaggagccatttctcaaccacaggctgaggttgatctattttcttcacaaccagccattcctgcagttacacctacagttgacttgttttccattcctgaactggcagtgcagccaaacaacaagtcggagaagtctgttcctatgaataacagctctatcgatccctttgctgctgttcctcttaataattttgatggatctgatatttttggtgatttt

SEQ ID NO: 76896 - DNA, 241 bp, Glycine max
  Clone ID: 700958923H1
cacattttcttagctctctccaacaatccctctcgttcacactttcagattgtgtgaagatgggggctggtggccgaactgctgttcctcctgccaacaggaagtcagaggctgaccctttgaagcgggtaccatttgaaaaacctcagtttagtctcagccagattaagaaggccattccacctcactgtttccagcgctctgttctccgctcattctcctatgttgtttatgacctcac

SEQ ID NO: 76897 - DNA, 243 bp, Glycine max
  Clone ID: 700958941H1
ctttgaaagactgcaagtttcctgagtacctcatgcttgaccctgggggaactgagtctgagggagtttcacttatgaaggtttgcccatatacatattgttctcttaatggccatggtcatggtcattctcctttgcctccattgaagagcttcatgtcagcaaggaggcatcttttggagactcagaagaatataaaggcggaagttgcgagccctcaaagatggaaggtgcccccctgtg

SEQ ID NO: 76898 - DNA, 240 bp, Glycine max
  Clone ID: 700958950H1
ggtatggagggcaaatatacctcatacccatcttgcaactgagaaatctgaccagagatggatggttgtaaaaggtgaaaagataggttttcctggtggaggaacccacttccattatggcgctggcaagtatattgcatcaattgccaatgtaagctagttactcctatccggtatggcactaaaataatcaccaaaacatgaaactcttatatgactggaaaaagttataagtttgta

SEQ ID NO: 76899 - DNA, 241 bp, Glycine max
  Clone ID: 700958956H1
gaaaaaaagcgtttgtgagtgtgagagagtcataacaatggttgtggaagatgcccaaaaatcagccatcacggaggaccaaaaccctagcagggtcgccaacgacaacaacgacgacgaagatctcgaagagggggagatccccgacgacggtgacgacggcgcctccgccacatcaaagcctccgtccgccctcgtccgcaacccccaccctctcgagaattcctggaccttctggttc

SEQ ID NO: 76900 - DNA, 243 bp, Glycine max
  Clone ID: 700958965H1
agaatgaagcggagggtgaagaggaaagtgcctgaagctaactccaacactatgataatcattcggatacaggggtgagtgaagaaaaaagacatgcatcctaggactaggaaggtgttgtacagcttggggttgaggagaaggttcagtgctgtgtttgtgaagccaagtgagggaataatggccaagctgcagagggtggaaccatatgtcacctatggatatcctaatcttaaaagcata

SEQ ID NO: 76901 - DNA, 236 bp, Glycine max
  Clone ID: 700958971H1
ttctttttattttgtcaggtggcggccttatgatgatccaaccatcaagtctaaaatcgacttgtctgacaaagacattagcaagaaaaatcaagcccggtttcagatcactgaagcactgaaggcaaagcggtcagaacgagccgagttgatttctcaggtcaagtctctaagaggcgacagtaggcaatttcagagtattgtggatgagaaattgaaagagattggacctctgc

SEQ ID NO: 76902 - DNA, 240 bp, Glycine max
  Clone ID: 700958973H1
gaagaaggtgggagatggagaagccacaaaacggagaagaaaaggaagaaaccacggcctctttctgcggttacgattctcttcaccgtcttctcaaggataatcttaacccccatcacttccaggaagtcagccgtttgcttactgggcttaattgtggaaaagcacttgaagcagtttctctcccagaatctgcaacttccctctctgcggaacatggttttgacatccaggcctttt

SEQ ID NO: 76903 - DNA, 118 bp, Glycine max
  Clone ID: 700958976H1
gcttcaggggtgtagatcttctcctgtttttggagacttgagtgtttgagctagtagttgaagttgtacaattattttttgtctttatttttctattaatggatcctgtttttaacgc

SEQ ID NO: 76904 - DNA, 247 bp, Glycine max
  Clone ID: 700958980H1
cttcttcttttacgttcattctgttttcatagtgaggatcttctgaagaaatggcaaatcaccctttgacacactctcactctttccgcgagaggtttgatgaaactctcactggtcacaggaatgaaattttggcccttttgtcaaggcttgaagccaagggcaagggaatcctgcaacaccaccaggtggttgcagagtttgaagaaatccctgaggagagcagaaagaaactccaaggtggtgt

SEQ ID NO: 76905 - DNA, 238 bp, Glycine max
  Clone ID: 700958982H1
aaacaaaacaaaatgtaagagagagaaaagaaaagaagaaggaagccccaacccgataatcatactcgtacttgagatgatattggataatctcaacctcaattttcctcaataaacaatcactttcactttttttctctcctcttcatttctgaactcatccccatggatccctttgatttgatacgcgaagggtttggttgaggctgactggacatgtgctgttactacttttaaa

SEQ ID NO: 76906 - DNA, 235 bp, Glycine max
  Clone ID: 700958985H1
gatttgcagagggcgtttcgtgatgatgcgtggaggaacattgtgcctggccttcctgctgttattctcaggtgtacgtgtaggctcgccaacgctgtctctgctggcaccattctcgcttctagacaggtgagaaggaagcttgtagaagattggttgccggttttggttgtatgcaaagataatgtttcaccaatatcacccagcaacaaatcgttgtatctggaactggaag

SEQ ID NO: 76907 - DNA, 240 bp, Glycine max
  Clone ID: 700958992H1
gagaagtgcaaaaacagtgtaaaaaaaaggaaaagaaaaccaatatgaagttcactataatcacaatatttttctctttatttctacttgactttggttttgcacaacagggggatcttgacatatcaagatttggaggaaaaccaaatacaaatataggccaggctttcttaagtgcctggactcaagcatgtgcatcaccaactgctgtcaaaattgtgattccagctggcacatacc

SEQ ID NO: 76908 - DNA, 241 bp, Glycine max
  Clone ID: 700958993H1
gagataactagaaacagtgtgatgaaaatgaaggtccttgttttcttcgttgctacaattttggtagcatggcaatgccatgcgtacgatatgttccctctccgaatgaacactggctatggtgcccgtactccggaggtgaaatgcgcaagttggaggcttgctgtggaagcacacaacatctttggctttgagaccattcctgaagagtgcgttgaagcaacaaaggaatacatccatg

SEQ ID NO: 76909 - DNA, 244 bp, Glycine max
  Clone ID: 700958995H1
ggcaaatctgcattgcgatggcgcctccgaagctcttcgtctttgcgctttctgtaaccctaattttcgccatcgttggggccgaagccgatatttccatcgaaggaagcactccagagcctgatacctccgccatcaggatccaattagatcaactcaattccaagatccaaattctcgagtctcaaatcagcgaaaagttggaagaagtgaagaagaaggacgaaattatagcagaaaaaga

SEQ ID NO: 76910 - DNA, 261 bp, Glycine max
  Clone ID: 700959005H1
cttggaggggtcattcagaaacttcaagacactagggagcagcgcatagaagaacctattctttacattaagatgcaaatagcaatattcaagcttgagcaaggtgatcaaaaggaatgcaagaaacttctagaagatgggaagagtacactcgacagcatgacagatattgatccatctgtatatgctagctattactgggtatcatctcagtttcataagacatgccaagaatttgctgagttctacaaaagtgccctt

SEQ ID NO: 76911 - DNA, 260 bp, Glycine max
  Clone ID: 700959007H1
cttgaatttttcaacaacatcctccgtgagaagctccactcctttctccttagccgtctgatatgctgaccatgatcttatgtaggtcaagaaatcatccaaatccatcattgtttccgtcacaaactcaaagggtcctgtgtgatcagctccatccacgggctcaaatggaaaatcaatgcttctataattgtcatcaacccatttacgagctgggtcccaataagggcttacattagtggaatagaattggtcaaaga

SEQ ID NO: 76912 - DNA, 262 bp, Glycine max
  Clone ID: 700959018H1
gttttctatttgtccaccggattacaattgggcaaaaaagaattttgaaatacaaggtgcagcaatgatgaaaaatattctaaatgaggctcgaaccacaatgaataaaccaaattgggtcaaagacgatgtttgggagagattatgtgagcattggaaatctgaagaattaaaaaagaagagcacccaagctaatatgagtaaagagactggcacccttcctactccattggacttgtttcgtctcaagcatcaactttca

SEQ ID NO: 76913 - DNA, 265 bp, Glycine max
  Clone ID: 700959046H1
gtacttccttaatttgccaccctaacctactgcattattattctcttccccttaatttctatctccaatccctcagcaaaacgcagcaaatgggtcggcttaatctcctacttgtgtggtcactctcattaacactgtccctttattatctacacccaatctctgctcagctcagtccaaaccactatgctaaaacatgccccaatcttgaaagcatcgttagacaggccgttaccaagaagttccaacaaacctttgtcaccgt

SEQ ID NO: 76914 - DNA, 258 bp, Glycine max
  Clone ID: 700959050H1
tctagagctaacttgcctgatcgcagtattctggataaaaaggatgaaaaagatacatcaaaaactgctgctatgattttacaatatgaatatgaagatgagtatgacgactcttttgatgacttgggtctaagtgtagcagactctggagtagaagaaaatgagacattgagcgaccaaataacgcaaagtcagggaattcgtgggcaacagggggtaactctgtcaaaaatgcccctgattcaaaatggggctcca

SEQ ID NO: 76915 - DNA, 264 bp, Glycine max
  Clone ID: 700959063H1
ggaagaagacaattcaactacgagttttaccccaagacacaagccaagaatacttacagtttaccttttcttgctcaaaccaacgacgctaacgctgaaaacaatctctacccgtttgtttttctaaacgtcgatggcaacctttttatctttgccaacaaccgcgctatcttgttcgattacaataagaacagtgtcgtgagaacctaccctcaaatacccggtggagatccacggtgttatcctagcaccggttccgcagtt

SEQ ID NO: 76916 - DNA, 253 bp, Glycine max
  Clone ID: 700959072H1
ataggatggagggggttgagagcaaagaaagagaagtgatggtggcaaaaccagttgcagtgggtgtcagtgatttgcttctgaggctgttggccttcacagtcactcttgtcgctgctatagtcattgcggtcgataagcagaccaaggttgttcccattcagctttcagattccttaccacctttggatgttcctctcactgctaagtggcatcaaatgtctgccattgtgtactttctggtgaccaatgc

SEQ ID NO: 76917 - DNA, 256 bp, Glycine max
  Clone ID: 700959082H1
ctgaaatttccgattcgggatggagaaatacgagctcgtgaaggatataggatctgggaatttcggtgtggccaggctcatgcgacacaaagacaccaaggagcttgttgccatgaaatacattgaacggggtcacaagattgatgagaatgttgcgagggaaatcataaaccatagaagtcttcggcaccccaatattattcggttcaaggaggtggttctgactccaacccatctgggtattgttatggagtat

SEQ ID NO: 76918 - DNA, 256 bp, Glycine max
  Clone ID: 700959083H1
atggatgagtgggtgcagaaccctactgcacatacagccttggatgaaattcttccttgtgtggataatgcaactgcgcaggaaaccttgtttcgaaccagggatgtgacacaccaacttgctaacttacttggcaacattgtttccaatgtcacaaatagaaatctcccacctgctgctggacccttgtattacaatcaatcaggccccttgatgcctcctctgtgcaatccatttaacaatgatctcacaaatc

SEQ ID NO: 76919 - DNA, 257 bp, Glycine max
  Clone ID: 700959088H1
ctcacagatacagaacctgtctcccttctctagtgtaatggcttatacaaattctttgcccagtgcactgttggcttcaactgttcaaacagcaagggaggatatcccatactcacccttccctgcaacacaatcaatgcctgcaaaatatagcaatattgcttcttcaattggtggtcccactataaacatgtcagaggctctaagggcaaataacatttcaacacctcaacctaatccacaagccctgcctggtg

SEQ ID NO: 76920 - DNA, 261 bp, Glycine max
  Clone ID: 700959094H1
caatgacaagggtagattgtcaaaggaagatattgagaagatggttcaagaggctgagaagtacaagtctgaggatgaagagcacaagaagaaggttgaggccaaaaacgctttggaaaactatgcatacaacatgaggaacaccgtgaaggatgacaagattggtgagaaacttgacccggctgacaagaagaagattgaggatgcaattgagcaagcaatccagtggttagacagcaaccagcttgcagaagcagatga

SEQ ID NO: 76921 - DNA, 243 bp, Glycine max
  Clone ID: 700959106H1
ctctagcgtgcacacaaaataatggacaaaaaaccatgcgactcatctcatgatccagaagtgagaaagggaccatggatcatggaagaagacttgatcttgataaactatattgcaaatcacggtgaaggtgtttggaattctttagccaaagcttctggtcttaaacgaacgggaaagagttgtcgactccgttggctaaactaccttcgtcctgatgttagaagaggaaacattacaccc

SEQ ID NO: 76922 - DNA, 127 bp, Glycine max
  Clone ID: 700959129H1
attacaataattatcaaacctaaccagtaaaaatggtgaccgtggaggaaatccgcaacgctcagcgttcccatggacccgccaccatcttggccttcggcaccgccacgccgtccaactgcgtctc

SEQ ID NO: 76923 - DNA, 153 bp, Glycine max
  Clone ID: 700959153H1
caggagagaaaaattttcccattttatcccttcagcttgcttcatttgcattcgacttgggttaacagtgacctagagagagaaaaaaaagaaaagaaaaagatgtgatccggtgcgtccctccaaaattgaggcagaaagaggatagaagtg

SEQ ID NO: 76924 - DNA, 120 bp, Glycine max
  Clone ID: 700959159H1
gagatggcaaagaatgtggggattctcgctatcgacatctacttccctcccacctgtattcagcaggaattgctggaggctcatgatggtgccagtaaagggaaatatactattggactt

SEQ ID NO: 76925 - DNA, 121 bp, Glycine max
  Clone ID: 700959161H1
ctgattctgaggaggagctgaaagaggcattccgggttttcgacaaggatcagaatgggttcatctctgctgctgagctccgtcatgtgatgaccaacctcggggagaaactcaccgatga

SEQ ID NO: 76926 - DNA, 235 bp, Glycine max
  Clone ID: 700959180H1
gtgactatccggagagtatgaaatcttcagtaggttctaggctcccaaaattcacaaaagctgaatctgaaggtctaaaaaattccatagattttcttggtgtgaattactacaccacttattatgcggaacatgctgaacctgtcagtgccaaccgaaccttctacacagacatactagccagtctcagtacggaaaggaatggtctacatgttggaaccccgactgatttgaa

SEQ ID NO: 76927 - DNA, 233 bp, Glycine max
  Clone ID: 700959188H1
caaaaaagaaaatgatgctcggagagcaccatcgcgcgaatccaacggttcacgtgccaccgtggccaacccacgacgatccaacggccgagatgtactccgcgtttttaacaaacgacgtcaatgctggtgagtactctccgtactatcttcaagaagcactaacggctctgcagcgttttctgccgtctaacgaaacggacgctgactcggacacggaggctcaacccgac

SEQ ID NO: 76928 - DNA, 118 bp, Glycine max
  Clone ID: 700959196H1
gacaaacccaacattgtcactggagccaacgttcaggtttgctgggagaaatttgcaaggtactttgaggtggagttaaaggaggtgaagctccgtgatgattattatgtaatggacc

SEQ ID NO: 76929 - DNA, 268 bp, Glycine max
  Clone ID: 700959201H1
ccccggttcagctcggcgagatcacggcggaggagctcaaggcctacgacggcaccgatcccgagaagcccttgctcatggccatcaaggcccagatctatgatgtctcccagagcaggatgttttatggacctggtggaccttatgccctatttgctggcaaggatgctagcagagccttagcgaagatgtcttttgaagagaaagatctgactggggatatttctggtctcggcccattcgagattgatgccttacaagactggga

SEQ ID NO: 76930 - DNA, 264 bp, Glycine max
  Clone ID: 700959203H1
cacctccttaatatccatcactgcctagctagctagctcgcacatttaattatattacacatattttgctagccaagaaatactatcattgaatatatggggagtgtagattatgagtaccctttaggcatgaacaacgttgagagagtgcaccaagtggaggttccaccacctcaaccgtttttcaagtctcttaagtactctttgaaggagactttcttcccagatgaccctttgaggcagttcaagaacaagccagcttcc

SEQ ID NO: 76931 - DNA, 262 bp, Glycine max
  Clone ID: 700959206H1
gtgcagtatagaatgcacccccagattcgggatttcccttctaggtacttctatcagggacgccttactgatagtgaaagtgtggctaaattgcctgatgagccatactacaaggaccctttacttagaccatatatattctatgacatcagacatgggcgcgagtctcacagaggtggatcagtgtcttatcaaaacatacatgaagcacaattttgtctccgactgtatgagcatgttcagaaaacagtgaagtctttgg

SEQ ID NO: 76932 - DNA, 258 bp, Glycine max
  Clone ID: 700959210H1
agcgaggtagggttttcgttgttcccccgtctttgaattcagttcgcgacgatggggtccatccccgatccaggcgagttgagcgagttgactcagccgagcttcgacgagttccagcgccaaacttccctcatgaccagctgcaccctcctctggaaggagctctccgaccacttctcctccctcgagcaagacctcaaccacaaatccgaagccctcaaacgcaagattcgcaccctcgacaacactacttccgac

SEQ ID NO: 76933 - DNA, 255 bp, Glycine max
  Clone ID: 700959212H1
atgacaaggagtttattgtatgctctcttgatttgctttctggactagcagagggtcttggcagtgggatagagagtttggttgcacaatgttctttgagggacctacttctgcattgttgtgtggatgatgctcctgatgtaagacaaagtgcctttgccttacttggagaccttgcgcgagtgtgctcggttcatttggactctcgtttgtctgagtttcttgaggctgcagccaaacaactggagatttcta

SEQ ID NO: 76934 - DNA, 264 bp, Glycine max
  Clone ID: 700959218H1
tgaagttgagcaacccgtttttcagtctcaggagaaggatgaaggaactgcaaattttcaaggacatggatctgaagaagatctgtctgatcatgagggagagcttcagaaggatgaagtagaagcagaaaatgcaggtgaagtggtgtcagctcaacatgaacaggcgaaccaacaagcagatgtagagtataatgagcgagatgtagaggcaaaggaccagcagtcataccccaggaggggttatcagaaccatagaggtgg

SEQ ID NO: 76935 - DNA, 262 bp, Glycine max
  Clone ID: 700959219H1
tggaaaactccacagaatctttttctcctgtagcacttaaagaatttggagagaagagacaagggactgcaaatggctgtagactctttaggattcagttacatgacaattctaattctaatgaagaaagtctaccaatggtcactttgtcaggaaggatgggtgatgatggcccccttccatctttggatgctgagtctgaccagcattctgaaccatcaaatgttaatcgatctgatatcccttcggtaagctgtgatgc

SEQ ID NO: 76936 - DNA, 257 bp, Glycine max
  Clone ID: 700959224H1
cttttacaatggagatatggaatagttggtgggttttgcaaattatgcaatttctgggtttttttagtttttggatttcatttgcaaagtttaggactttattctcaagagcttttggttatggccacaaggttgtgaagggtgactgcagtacttggatctttgtttccttcaatgggttggtcacagttggttctttcatattcttcctcttggtcctttcctgggcttatttatacgcatttcccagttctcaa

SEQ ID NO: 76937 - DNA, 215 bp, Glycine max
  Clone ID: 700959226H1
atttcaacttggtaatggagccttgctaggagcaagttatattcagagtgtgacacagcatttatcattgggtggggaggtattttgggctggtcagcatcggaagtctggtattggttatgctgctcgctacaacactgataagtcggttgctacagggcaagttgctagcactggaatggttcttctaagctatgttcagaaggtatctgaga

SEQ ID NO: 76938 - DNA, 255 bp, Glycine max
  Clone ID: 700959227H1
aaaaaaagttgtgctgtgccgcctcttccgtaggcagcagcaatggcctcaaatcccaaaactttgacctttgaggaggtagctaagcacaacaacaaaaaggattgctggattattatcaatggaaaggtgtatgatatcacaccatttttggatgagcatccaggaggtgatgaagttttgctgacgtcaacagggaaggatgccaccattgattttgaagatgtgggccacagtgattctgctatagaaatg

SEQ ID NO: 76939 - DNA, 264 bp, Glycine max
  Clone ID: 700959232H1
ggaaatcttcattctttgttccatcaacagatggctatgccaaagcaggtgtgaaatggataggctatgagcctcgttgcacaccatactggccgcatactcttctttgggctgtggcattctcattgcccgagtttgttgttgatgcttggcgcctgtggttttgcttgggtattcgaaagaggggacagcgcaaagagtccatgaagaaggaataaaaggatgcttggttctgatgtgtaggccaatagacgctactcatct

SEQ ID NO: 76940 - DNA, 255 bp, Glycine max
  Clone ID: 700959242H1
gctatagtaagctacacttatttgaggttggagaaatatggctaaagatgttgaggttcaagagcaaggaggagagtactctgcaaaagactaccatgaccctcctccagcacccttgttcgacccagaggagctcacacagtggtccttttatagagccctaatcgctgagttcatagcaacccttctcttcctttatgtcaccgtgctcaccattattggctacaaaaggcagactgatgccacgctaggtgg

SEQ ID NO: 76941 - DNA, 263 bp, Glycine max
  Clone ID: 700959249H1
gagaaagggagaaagggtgtgagaatggagagcaaagaggaagatgtaagggttggagcaactaagttctcagaaaggcaaccaattggtacagcagctcagggtgacaaggactacaaagaaccacccccagcacctttgtttgagcctggtgagctaaagtcatggtccttctacagagctggaattgctgagtttgtggccactttcttgttcctctacattaccatcttaactgtcatgggtgtcaacaggtcaccctc

SEQ ID NO: 76942 - DNA, 251 bp, Glycine max
  Clone ID: 700959259H1
gtctgcttcaaatcttccggatggtgctgggcgttcttttgctacgtcattctctggttctattcagggattgcacaacattcatgggaactttaatgtacccaatatgcccagtacactcacatcaagaaactcaacaataaatagtgttccaactgggggaggagttcagcaaccttcggcaagcctttctagtggaagatttgcatcaaataatctacctgttgctctgtcacagctatctcatggaa

SEQ ID NO: 76943 - DNA, 259 bp, Glycine max
  Clone ID: 700959263H1
taaagacaaatgtgattggcacactgaacatgcttgggcttgcaaagcgagtaggagcaaggattttgcttacatcaacttcagaggtatatggggatcctcttgtgcatccccaacctgaaagttattggggcaatgttaaccctattggagttcgtagttgctatgatgaggggaaacgggtggccgagacattgatgtttgattaccataggcagcatgggattgaaatacgcattgcaagaatctttaacacata

SEQ ID NO: 76944 - DNA, 262 bp, Glycine max
  Clone ID: 700959264H1
gtagaatgtaaggaagttgtttctgaatatggagaattgttatgggatctcttggtatcaggggtacgacctgatgatgtatgctcacaggttggtttatgtttcaaaagggctaaatcagagaggttaggatttggtcttttaaatttgtaagaagcattttttatatatcaatgttttgtatgctctttttgtcatatttgattcagtatacttcgattgagtaatgatttaaagatgtttgatggatgcttaataattc

SEQ ID NO: 76945 - DNA, 254 bp, Glycine max
  Clone ID: 700959283H1
ctacactgtgggagagtaccttctcttggctgctgttagtgcactgcaagtcatatacatcaggcgcctcttcagcaagtcagtggcctacaatcgtgtttgagtccccttcatgattaacgttatggtttccttcattagcaacaggattaggtttattacatatgcgttctctattcaacagtacgattacaatcccttggtgaacactttttttcttttcaagagagactccacttgtatgttgataccca

SEQ ID NO: 76946 - DNA, 247 bp, Glycine max
  Clone ID: 700959291H1
gccgaaccttggctgattacaacatccaaaaagaatctaccctccacttggtgctccgtctgcgcggtggtatgcaaatctttgtgaagacccttactgggaagaccattactttggaggtagagagctcagacacaattgacaatgtgaaggcaaagatccaagacaaggagggtatcccaccagaccaacagaggctcatttttgctggcaaacagcttgaagatggccgaaccttggctgatta

SEQ ID NO: 76947 - DNA, 247 bp, Glycine max
  Clone ID: 700959292H1
atcagaaagggctttctcataaacgagttagaaaggccaaggagaagaagtcatcagatgttgatagggtccctgaaaagaatatcaaatgcttatcttgtggtgcaaatgtcttgattactcttggtgataagggttggagagaatccggggcccatgttgtactagagctgtttgaccacaatgagtggagactttctgtgaaacttctaggaattactaggtattcatacaaagcacatcagtt

SEQ ID NO: 76948 - DNA, 254 bp, Glycine max
  Clone ID: 700959295H1
cagtgcttcccttgaagcttttcgagattgtgctctccaggatctttacttgggagagtatgatggtgttaatgataattggatgggtgtcatctcatcccagggttcatctttgctttctgtagatctttctgggtctgatgtcactgattttgggctgacataccttaaagattgtgaaagtctcatttccttaaatctaaattactgtgaccaaatttcagatcgtggactagagtgtatcagtggtctgt

SEQ ID NO: 76949 - DNA, 259 bp, Glycine max
  Clone ID: 700959296H1
aaaaccggtttctcttgtcacaccaaatggaccgacccgccgccatattttccgacaccgtcaacctcaacggcacggtgacgcagctgtctctgctcgccgacgggaggctgtggtggccggagggcggtcaacgcaatttgagcatcgagaaagaggttctcgggttcaccggcgacggtcccgatataaggctcaaaacaatcgtggaaaccgaagatggatgctgtggcggtgcaagcagagcaaaactagtccg

SEQ ID NO: 76950 - DNA, 262 bp, Glycine max
  Clone ID: 700959309H1
gacttgatgaaattgcagttgtcaggcattgatgaaacccagcaaccatcatcatctcttatctacccaactggaaaattcaacatcccaaagcattttctgtattttgttcaagattcggccctttcttcaaagatcacggttcatccagatggtcaaatgacatttatgggtaccgcaattgagttgaaagatcttctctctgtagttgctgagtcatgcttatcaaaatggtcacgaagggatgaaaagcaatctatgc

SEQ ID NO: 76951 - DNA, 256 bp, Glycine max
  Clone ID: 700959312H1
ggtgattataggtcctgatggtaaaacaataaccgtacacgggaggagtttgataaacttgtaccaagagaatgcgtaccctttcaccaaggccaaagtggaggagctggagaaacagctggaggaagaggccaagggtcttccagcattggtgtatcaccaagggcatcgacatgatctgaatttggtgtctgatggaaatggtggagggccctttatctgctgcgtgtgtgatgaacaagggtctagctgggcc

SEQ ID NO: 76952 - DNA, 259 bp, Glycine max
  Clone ID: 700959318H1
aagaagaggagatgaatgggtcatagttaagcctgtcccaaatgcattcgtcatcaacattggtgaccaaattcaggtgctgagcaatgcaatatacaagagtgtagagcacagggtgattgtgaactcaaacaaagatcgtgtgtccttggcattgttctataatccgagaagtgatttactcattcaacctgccaaggagcttgtgacagaggagaggccagccttgtactcaccaatgacctatgatgaatacaga

SEQ ID NO: 76953 - DNA, 253 bp, Glycine max
  Clone ID: 700959329H1
cacttttctactttgagtcttcttgatccttctttttctccttgaactcaaacatggcagatgaggtggttctgctagatttctggccaagtccatttgggatgagggtcaggattgcacttgctgaaaagggtatcaaatatgagtacaaagaagaggacttgaggaacaagagtcctcttctcctccaaatgaacccggttcacaagaagattccggttctcatccacaatggcaaacccatttgtgaatc

SEQ ID NO: 76954 - DNA, 262 bp, Glycine max
  Clone ID: 700959333H1
atccctggcaaaagcttttgttgtaattgcaaaagaaagtaataatctccaatttgcttgggaattaagtgcccagatccacaattcgcagatgctcctctcgaatgcagccactaggcgtcttcctttaacaaccagggaaacagaaagggctatccatgatatggcattattgttataccaggcccagcagctccattatgatagtgcaaccatgatcatgagattcaaagcaaaaattcaagctcttgaggaacagatg

SEQ ID NO: 76955 - DNA, 258 bp, Glycine max
  Clone ID: 700959334H1
ggaaagtcttacccaaccgtgagcgctgattaccagaaggccgttgagaaggcgaagaagaagctcagaggcttcatcgctgagaagagatgcgctcctctaatgctccgtttggcatggcactctgctggaacttacgacgtgagctcgaagaccggtggtcccttcggaaccataaagcacccctccgaactcgctcacggcgctaacaacggtcttgacatcgctgttaggcttttggagccactcaaagcggag

SEQ ID NO: 76956 - DNA, 257 bp, Glycine max
  unsure (1)..(257): unsure at all n locations
  Clone ID: 700959339H1
aactaactccctctcaatcccctaccctaattcctccaatttccccattttttttctaattaatcagatttgcaaaatcctaatttctctatcctaacaaaaaccccaaattcaaacaaatccaatggcttcgattccgcgtccggcgagttngngatcttcggagggaggaggagatccggctgcgatggacgagagaaagaggaagcggatggagtcgaaccgcgagtccgcacggcgatcgcggatgaagaagc

SEQ ID NO: 76957 - DNA, 253 bp, Glycine max
  Clone ID: 700959342H1
ctcataacaggagcagcaggcttcattgcatcccatgtatgcaacaggatagtgcgaaactaccctgactacaaaatcatagtccttgacaagctcgattactgctcaaatctgaagaatctcattccctcgcgttcatctccgaatttcaagttcatcaagggagacattggaagtgctgatttagtaaactacatcctcctcacagagtccattgacaccatcatgcactttgcagcacaaacccatgtag

SEQ ID NO: 76958 - DNA, 254 bp, Glycine max
  Clone ID: 700959350H1
ttctcaaatactcaactcattagcccttatcttgcccttattcctcttcatgattctgatcctaaaactagggagaaaactcaagagaactgaattgtctctaaacataccccgaggaccatggaaactgcctattataggaaatttacaccagcttgttacatcgacaccacaccgaaaattaagagacctggccaaaatatacggacccatgatgcatctccaacttggggagatcttcacaatcgttgttt

SEQ ID NO: 76959 - DNA, 256 bp, Glycine max
  Clone ID: 700959356H1
caatgcagagatccttttccgtgaggatgctacagtggatgatctcatagatgtcattgaaggaaaccgaaaatacatgaagtgtgtatatgtctacaacaagatagatgttattggtattgatgatgtggacagattagcccgtcaaccaaattctgttgtcattagctgcaatttgaagctgaacttagacagactgcttgcaaggatgtgggatgaaatgggtctggttagagtttacacaaaaccacaaggc

SEQ ID NO: 76960 - DNA, 251 bp, Glycine max
  Clone ID: 700959357H1
cttcccttcccttctcttccctctcacactagggtttacctctcttcacacttcacacttcacccttcacacttcacacattgccatttgaacactatttgggaatagtgggtcagggagtttaaaggagtggtcttttcgttttcctttgtatcctttacgacttgggagattataatatgcagacaccaaaagcaagagttggtgcttcagaagtgccccaaaagaaatctcctgcaactcctcgaact

SEQ ID NO: 76961 - DNA, 255 bp, Glycine max
  Clone ID: 700959365H1
gaagagtggtagctccaagacaacaagatgcagatgcgatttatttggactaaattgcctattcactcgatttatttgtgagaagagtggtaaaactagttgttgtaactctctctatatattccttctaatcttgtaagattttcgcacatatgaattatgcaaaacttgtataagattttcagaaaactattactctgcgatgttgctaaagatggactatatcaattcatctcttgaggctcttgaagatga

SEQ ID NO: 76962 - DNA, 251 bp, Glycine max
  Clone ID: 700959366H1
ctacgattcgttttgccccttttgttgccctaatttcaaccatgcctcgccgtagctccggtggaagatctgcccgtcctgctcctcgggcagctcctcgtcctgctccagttcaccatgctcctcctccagcccctgctcagagtggtggtggatctatgcttggtggcattggttcaaccatagctcaaggtatggcttttggcaccggaagtgcagtggcacacagggctgtggatgcagtcatgggt

SEQ ID NO: 76963 - DNA, 244 bp, Glycine max
  Clone ID: 700959378H1
ccggaattgaatagaaatagaatcgtcgattttctctttctctgactctagggtttcattattttcttctgtagatccatctatctagcttcggagctgcaaatggacgtcgcagtcactgccttccggtcaccgctgatcatcctccgaagaccggtcaacgagtctgcctcagctcggttcggttccacttttgggttttccagaaagcaacggttcagttcagtatgtatccccaaacaca

SEQ ID NO: 76964 - DNA, 249 bp, Glycine max
  Clone ID: 700959380H1
gagaaaggccaagagaaggaaatgagttcacttcatcatatttttctgactcaggcaccttgcagtcattctcatctgttgacgaaacagcttttgattctcaaaaaagttttggatcgatagaggaaatgatattttccatgtctgggtctcgtaattcatcaatattggacccaatgttatatactaaggctatgcatgctagagtttcctttggagtagatggtccccttggcaaggtaaaatatt

SEQ ID NO: 76965 - DNA, 247 bp, Glycine max
  Clone ID: 700959383H1
gtcctcagatcacattgctctcttagctgagtttcgctgctgcaagaataaatctaggcgttgacagttaaggtcactttcagtgatacataaagaaaaagtctgaaagaagcatttggttggtaagttttttgtaaaaatggtagatcatgcctgtctttttcaggtatctccatgtggagtcattgcaatgatctgctatgtatcatgtcacctttatctcagagaaaaaaaatatgattttctg

SEQ ID NO: 76966 - DNA, 250 bp, Glycine max
  Clone ID: 700959387H1
gagtcattgtttttaagaccaagtagaagtcactttatgggtcaagacttagcactaaagccaagagaccaaaaagactaaaacaatgatggagtcattcaagtgttatgtttgagtgagagtcttttctaagcttacgaagtttcagggcagaagacatgcacagcttctgattcctctccaattcattcaacttccaaggtaggtggattattgttctaagaggtaggccttgagccagagtggaaaa

SEQ ID NO: 76967 - DNA, 244 bp, Glycine max
  Clone ID: 700959390H1
gttttcttcatgtgtcgcgaaaatggtcaaaagaatattactgtaagcagggcagtaactgcatggaaattagttcttgctgggaggttttcactgcttcatccatggtgtgactttgttgagaagaatcaacggtacaacatctctgaggatacctggcaacaggttctagctttcagctggtgtacccgtgatagtctggaagcatatgatcctgaaggtgcttggcctgttttaatagatg

SEQ ID NO: 76968 - DNA, 243 bp, Glycine max
  Clone ID: 700959394H1
tgaaaaggggatgcctactgcgcccattgtctccttcaacgacgccaaataaatacctcaaaacgataccttgacagagttgggtattgatatttgcattaaagttcataatctggtgaattactgctaggggcaaggctctgccgtcatttgaggggtgccctgtgaaagttcctgggatgatgcgacgtggttctggtttaggttctgctgcttctcaccgttctcgggagtcccttcctc

SEQ ID NO: 76969 - DNA, 261 bp, Glycine max
  Clone ID: 700959405H1
tatcaactctttcaaaagggagaagaaaaggaaaggaaacaaaacgcacaaaggattattatagcaatggcagaacaaaaccaaaaccagacaactgaagctggaaggcaccaagaggttggccacaagagccttctccaggtgatgctctttaccagtatattctggagaccagtgtctacccaagagaacctgaatccatgaaagaactgagagagttgacagcaaaacacccatggaacatcatgacaacctctgcag

SEQ ID NO: 76970 - DNA, 271 bp, Glycine max
  Clone ID: 700959416H1
catcaatttcaccatgccaatgttcctcgtttgttctcgtcagagctgactatacctgtatttctgggaaggatgctattgggaatacctacaattctaattgtgaagttctgcagtaagactctcgcaaaatggaccattcctgtgtagcgaacaccttgggcatcccaataaaatcaaccggctatatacctacactgaatggatctgtgacaggtaaaatgtctgataagcttaaacaaggttacttgcaaaagctcctttcccagca

SEQ ID NO: 76971 - DNA, 263 bp, Glycine max
  Clone ID: 700959433H1
aatttctgcattgagggtaacgtgaaggaagcagttgaagttttggaattgctggaaaaactagatattcctgtggatttgccccgatatttgcaattaatgcaccaatgtggggagaataagtctcttgaagaggcaaaaatgtacacaggcatgctttacaacatctgtcacctctccaagtcagcacatataatagaattttggagatgtatttagaatgtggttctgtagatgatgctctcaacattttcaacaatatg

SEQ ID NO: 76972 - DNA, 258 bp, Glycine max
  Clone ID: 700959450H1
ccctaaaaagcgcaagaaaacaaaatccccaaaatatctctcgctctgaaaccgccatggatttgcagcagagcgagttcgatcgcctcctgttcttcgagcacgctcgtaaggccgcagaagccgaatacgagaaaaccctctcgacgctgataacttaacaagatggggtggagctttattagagttgtctcagtttcagagttttcctgaatcgaagaaaatgacccaagaggctgtttcaaagctagaggaggc

SEQ ID NO: 76973 - DNA, 259 bp, Glycine max
  Clone ID: 700959458H1
atccccccctagctacagagcagccaaaggggaggaataataataagcctatattctaaggccggaaaaataaaaaaggaataacaaaaatgtctggaaaggtaattatctcggctgtttctctcatcctggtggttgagtggccataggtgtggtggtggccgtcaacaagaagggcgaggatcccacacttcaatctcaacaaaaatcagtaggggttatctgccaaaacactgatgaccagaagctctgccacgaa

SEQ ID NO: 76974 - DNA, 253 bp, Glycine max
  Clone ID: 700959471H1
cgccaatttcggcgacttcgaggaggacccggaggcgtacaagcagcccgaggtggacgagaaggacgtcgtcattttgaaggagaagaacttcaccgacaccgtcaagagcaaccgcttcgtaatggtcgagtctacgcgccctggtgcggccactgccaggccctcgcccccgaatacgccgccgccgcaacggagctcaagggcgaagacgtaattttggcgaaagtggatgccacggaagagaatgaat

SEQ ID NO: 76975 - DNA, 251 bp, Glycine max
  Clone ID: 700959486H1
agggtttttgtgatctgcaagctacgatgggtaagggaacggggagtttcggtaagagaaggaacaagacccacaccctctgtgtgaggtgtggccgccgcagtttccacctccagaagagtcgttgcgcccgtgcgctttccccgctgcgcgcaccaggaaatataactggagcgtgaaggccattaggagaaagaccaccggaactggaaggatgaggtacttgcgtaacgtgccccgtagatttaaga

SEQ ID NO: 76976 - DNA, 254 bp, Glycine max
  Clone ID: 700959489H1
gtcgacaaatttgactttgtcgtgtgcatgagtgcatacgttggcgtggtctttggcagtgttgaaattggcttagtcatagctattgcgatatctgtacttcgggtacttctatttattgcaaggccaaggcatttgttttgggaaacattccaaattctgtgatatacagaaatgttgagcactatccaaatgcaaaacatgttcctggaatgctaattctagagattgatgcaccaatttactttgccaat

SEQ ID NO: 76977 - DNA, 256 bp, Glycine max
  Clone ID: 700959493H1
ggaccttcagttgatgaagtcaccactgaatcctcattgttttctctgcatgccaggagcagtgtgccatctcaaccgcttgtttctggacttagggtgagtactgctgagccagtcaacttctcttggcttcctccagtggcaacacctattctgctgtcacaatatcttcaattatgcctgatagaggggatcatcccttttcaattgttgccccaaatgggccacaaaggttgttgactcctgctgctggtgg

SEQ ID NO: 76978 - DNA, 257 bp, Glycine max
  Clone ID: 700959506H1
gttgttcccatcttctctctcgtaccaatcaaatcacacttttgtgttgtgttgggaaaccctaaaccccgttttcggtgagatcgagatcgatcgaacatggatgaggagtacgatgtgatcgtgttgggcacgggtctcaaggagtgcattctcagcggtcttctctccgtcgatggcctcaaggttctgcatatggataggaacgactattacggaggagaatccacttcgctcaatcttattcagctttggaa

SEQ ID NO: 76979 - DNA, 252 bp, Glycine max
  Clone ID: 700959512H1
gcgcactattcaatttgttgactggtgccccaccgggttcaagtgtggaatcaattaccagcctccgactgttgttccaggtggtgatcttgccaaggttcagagggccgtgtgcatgatctccaattccaccagtgttgttgaggtcttctctcgcatcgaccacaaatttgacctcatgtatgccaagagggcgttcgttcattggtatgttggtgagggtatggaagagggggagttctctgaggcccg

SEQ ID NO: 76980 - DNA, 254 bp, Glycine max
  Clone ID: 700959514H1
gtgcgtgggagggtccgaagttggagatagtgattctggttctgttctgttcttctttctactcacaacaacatcagaatcagaaacaacaatggccaacactaacttggaagatgttccctctctggatctcatgactgagctccttcgtcgtctcaagtgctcttccaaacctgacaagcgtcttattctcattggcccacctggatctggaaaaggcacccagtcaccaatcataaaagatgagtactgct

SEQ ID NO: 76981 - DNA, 253 bp, Glycine max
  Clone ID: 700959526H1
gcattccaatcgctcccaaaatcttttctaatttgttcataactcaataattctcatcatgggctccttgattgttccaggtgaacatgatcacaaactaaagcttgtttctcttccctttgtatcaaccagtcacctcattcccgtagtagacatagctaggctctttgccattcatggtgttgatgtcaccataatcaccaccacagccactgccgccattttccaaagctctatcgatcgcgaccgtgac

SEQ ID NO: 76982 - DNA, 257 bp, Glycine max
  Clone ID: 700959532H1
cttttagcaagttaacaacacttttgtcttcgttccattatctagttctcaattctcttcaccctttgcctctgaaagaaatgggtagtcttgaagcggaaagaacaacagtaggattggcagcaagagacccttcagggattctctccccatacacctacaatctaagaaacacaggccctgatgatgtttacattaaagttcactactgtggaatttgccattctgatctccaccagattaaaaatgatcttggc

SEQ ID NO: 76983 - DNA, 253 bp, Glycine max
  Clone ID: 700959551H1
gttagtatctctccaactatgcttaatggctcccagaatacaatagatcctgatcagagcagggatattgtcaacaaaacggctgagaggcaacctgatttagtaagcaagggaatacctcttccccttgctatgcatgcaaacatgtctgttcctgtcagaagtgatggcgtacttgcacatcctcttcagggaactgtttctaatgcacaatcaactgaatgcccaacaactagtgaaccacagaatcaac

SEQ ID NO: 76984 - DNA, 51 bp, Glycine max
  unsure (1)..(51): unsure at all n locations
  Clone ID: 700959559H1
tgaacttacattatttaatngtcgtcatccactttaaatattatcntccnc

SEQ ID NO: 76985 - DNA, 245 bp, Glycine max
  Clone ID: 700959579H1
ccacattcaatgttgtcaagagaaagtggtgtatgtgctgagcacaccgatgccggtatatatggaagacgaaactctggatcaaacaaggaagcgttcgaaatgggagaacgacgattacatttgtcgtggacacattctgaacggtatgtctgactctctctttgatatttatcaaaatattgagtctgctaaggaattatgggactctcttgaatccaagtatatggcagaagatgcctcaa

SEQ ID NO: 76986 - DNA, 50 bp, Glycine max
  Clone ID: 700959591H1
gcttggctagtgggtaaaacaattggactctacttctcagcggaatggtg

SEQ ID NO: 76987 - DNA, 225 bp, Glycine max
  Clone ID: 700959604H1
aaaggttgttatctctgttaagtttccgtgtgtgagattttcagaatttgaatatggcgttagggtttgagggttatagttatacaacaacacttggaaggaaaagggttgtgttattacacagtgaagcttcttctctcaactccaattcaccggtgaattcattgaagagaatgtgtagcaagaaattcacatttgactctgaaaggtctcgccttgaggccc

SEQ ID NO: 76988 - DNA, 233 bp, Glycine max
  Clone ID: 700959610H1
ctagggttatcatttctccatttccattttctctctcacttttcaagaatcgtaagctatgggaaagtcttacccaactgtgagtgctgattaccagaaggccgttgagaaggcgaagaagaagctcagaggcttcatcgctgagaagagatgcgctcctctaatgctccgtttggcatggcactctgctggaacctttgacaagggcacgaagaccggtggacccttcggaa

SEQ ID NO: 76989 - DNA, 233 bp, Glycine max
  Clone ID: 700959614H1
gagagaaaaagctattactatgtggttgactatgcgtaaaaaagaatcagaattcagaaaaaaaaagtgtacttgaactgggattcatctgattccttaacttgtctctctgctgattcataatctcttttaaggaagaggttttgccaaccccaacctgcagcaaataatattgcatgggttggtttactaagttgcttaagggatccaaccgtaaatcgtcaggaggaaga

SEQ ID NO: 76990 - DNA, 227 bp, Glycine max
  Clone ID: 700959619H1
taaaggaccacctcaccctccccctccattactcccactgcatcttcttcaaattcctgtcctgaagatgacagcaaagtggtatctcattgtgtgtgttgtagcgatctgggccgttgatctgggttcatcatcacaccatgcccgtgccccagcaccagcaccgtcagtggagtgttcaaacctggtattgaccttatcggattgcctcaccttcgttagcaacg

SEQ ID NO: 76991 - DNA, 231 bp, Glycine max
  Clone ID: 700959625H1
attgaattcaaaaacttaagttcattccttgtgttttgctttcttcctcaaaaccaaacatgtcgaacacatgcggcaactgcgactgcgctgacaagactagctgcaccaagggaaacagctatggtgttattgtagagactgagaagagttacatcgagactgttgtcatggatgttccagcagctgagcatgatgggaagtgcaagtgtggcactaactgcacttgca

SEQ ID NO: 76992 - DNA, 227 bp, Glycine max
  Clone ID: 700959655H1
atagaggtgtaactttgcacaagtgtggaagatgggaggctcgaatgggccaatttttgggcaaaaagtatgtttatctgggtctgtttgacaccgaaattgaagctgcaagggcatatgataaagcagcaataaaatgtaatggcaaggaggctgtcaccaattttgatcctagcatctacgatagtgagcttaattctgaatcctcaggaggtgtagctgcagat

SEQ ID NO: 76993 - DNA, 228 bp, Glycine max
  Clone ID: 700959683H1
ctgtaagtcagtggagaagattaaatatgtccactcaaagtgtggtgaaggaaatggagcagtttggagtgctttattttagattgtttttaaaagggagatggttttttctggttgggagaggatataattgcagctgggacaaagacaaagacagttttcagatttgagattgagcaaataggtataacatggaagatctcgtaaactattcaaagctgtggaagc

SEQ ID NO: 76994 - DNA, 164 bp, Glycine max
  Clone ID: 700959688H1
ggcagaaagcaagctcatcctagagttttaaaaatggcagcagcctcctccatggctctctcttccccatccttggctggcaaggccgtgaagctgggcccatcagcccccgaagtcgggagggtcagcatgaggaagaccgtcaccaagcaggcctcctccgg

SEQ ID NO: 76995 - DNA, 285 bp, Glycine max
  Clone ID: 700959702H1
agaaatttaagtgaggagctagagaatgatgatgaagtctgctatgtgtgcagtggtggttgtagcacttcttcttctggcggaggtggggcccatggctgaggctgtgacatgcaccccaacagagttgagtccgtgtcttccagcaatcacttccggtgctaaaccttccaatgcttgttgcacgaagctgaagcagcaaaaaccatgcttatgtggctacctcaaaaacgctagcttgaagcagtatgttaactctcctaatgcccgaaaaaccgttgcttc

SEQ ID NO: 76996 - DNA, 260 bp, Glycine max
  Clone ID: 700959745H1
gtcatagggtacaagcaccagactgacctcaaggaaaatggtgaaatctgtggtggggttggcattcttggcattgcatgggcctttggtggcatgatcttcatccttgtctactgcactgctgggatctcagggggtcacattaacccagcggtgacatttgggctgtttttggctcgcaaggtgtctttgatccgagccatcatgtacatggtggctcagtgcttaggtgctatctgtggagttggtttggttaaggc

SEQ ID NO: 76997 - DNA, 255 bp, Glycine max
  Clone ID: 700959804H1
attttctatccgctcatccccctcacaaattagggtttttgcgaatcttttatcgtctgaaatcgaatccaacgtttcagccatggtttccgattcaatcgccgccgtaccgattccctccgccgcaaacaccaagaacccggggaagaagaagaggactaacaggtccgcgaaattgaagcagtacaaaatcgatgcgcgccgcgagcaatggttatctcaaggtgcggtgaagagcaaggggtgcaaggacgg

SEQ ID NO: 76998 - DNA, 251 bp, Glycine max
  Clone ID: 700959810H1
gtgaagttgtaaatgaagatgaatacctgagggttttccctaggggcataggtccaacactcttgggcgcaagaaccgaatcttctaggcaaacagccatagttatcatgcatcatatgaaactcgttgagatgcttatggatgtcaatcaatggtcaaacatgttttgcggcatcgtttcaagggcggtaacacacgaagtgctgtcaactggagaaactataagatacgatggtgcctgccaagtgatg

SEQ ID NO: 76999 - DNA, 250 bp, Glycine max
  Clone ID: 700959821H1
cttgattccaaaccacaatgattccatgtcctcagtgctgtctcgttttcaagccattggcattgacgttgaagccacagtcgctcttttaggagctcactcagtgggaagagttcactgcaagaatctggtgcacagattataccccaccatagattcaacactggaccctgcacatgctgagtacctaagacgtcggtgcccaacacccaatcccgatccaaaagctgttctgtattcaaggaatgac

SEQ ID NO: 77000 - DNA, 250 bp, Glycine max
  Clone ID: 700959823H1
cttttctaggtaactccctctgtggccgaccactctctctctgtcccggagatgtcgccgatcccctctcggtcgacaacaacgccaagggcaacaacaacgacaacaagaagaacaagctgtccgggggcgccatagcggggattgttgtcggatcggtggtgtttcttctcttgcttgtgttcctcttgattttcctgtgcaggaacaagagtgccaagaataccagcgcggtcgacattgccactgt

SEQ ID NO: 77001 - DNA, 248 bp, Glycine max
  Clone ID: 700959828H1
ctgtggagttctgtgtgcatatagtacatgcattcatggtaagcttgggggataggagccaacgagcaaagacagcattgtgtaccatgggggcttctgtattcagtggaatcacacttacaaaattagtcggagtcctcgtcctttgcttctcaacatcagaaatttttgtggtgtattacttccagatgtatctggccttggttatcattggcttcttacacggtcttgtgtttctacctgtggta

SEQ ID NO: 77002 - DNA, 205 bp, Glycine max
  Clone ID: 700959835H1
tccaggtgctgctgctgcagatcaaggtggtggtgctgctgctgtagaccaaggtggttctcctatggacatctgataatttaaaattaagcactagaggtgttgaataccaatatctaaagacgagtaggtttcatgtgccatgggacaagatatttctttgatggattttttttcttcttaatcctgtttgtttttgcaattc

SEQ ID NO: 77003 - DNA, 244 bp, Glycine max
  Clone ID: 700959859H1
gtgatttgatcagaaaggaatatgacatgaagtgcaaattcttacggaatctggaatcaaaaggagaaaagacttctagaattgataaaatgcgtgctgtagtcaaggatctgcattcaagaattagaattgcaattcttaggatagactctatatctaagaggattgaggaattgcgggacaaagagcttacgcctcaacttgaggagttgattgacgggttaagtcggatgtgggaagtgat

SEQ ID NO: 77004 - DNA, 241 bp, Glycine max
  Clone ID: 700959870H1
ggcgacacagctactaaacttgaacgacaaggaatataccgtgcttcggaaatatcacaatcacagtctgctgttattggccctttcactgtcataggatctggcaccaaaattgggcataacactaaaattttaaattctgttattggtgaaggatgtaaaattgggtcaaatgttatcatagagggatgctatatatgggataacatcagcatagaagatggctgtaaactccagcatg

SEQ ID NO: 77005 - DNA, 244 bp, Glycine max
  Clone ID: 700959872H1
acaaatcaaagccatggccacctccaacttctctattgttctctccgtctccctagccttctttttggtgctacttaccaaggcacactcgaccgataccgtttctttcaccttcaacaagttcaacccagtccaaccaaacattatgctccaaaaagatgctagtatttcatcctctggggtgttacaactcaccaaagttggcagcaacggcgtgcccacctcgggatctctcggtcgtgcc

SEQ ID NO: 77006 - DNA, 242 bp, Glycine max
  Clone ID: 700959877H1
gagcaagctgacgagatgattagacgggagcttctaagtttactggagcatgacaatgctaagtatccacttgatgagaaagtgattaaggagaagaagaaaggagccaagcgtgctgtaaatgggtctgctgtccctgtgatagaagattttgaggaagatgaaatgaaagaggctgataagttgataaaggaagaggccctgtatctttgtgcagcaatgggtcatgaagatgaacccct

SEQ ID NO: 77007 - DNA, 241 bp, Glycine max
  Clone ID: 700959887H1
cggcggcgcagagccaagacgacggcaaggactaccaggagccggcgccggcgccgctggttgacccgacggagtttacgtcatggtcgttttacagagcagggatagcagagtttgtggccacttttctgtttctctacatcaccgtcttaaccgttatgggagtcgccggggctaagtctaagtgtagtaccgttgggattcaaggaatcgcttgggccttcggtggcatgatcttcgc

SEQ ID NO: 77008 - DNA, 166 bp, Glycine max
  Clone ID: 700959889H1
tcctccaccagcaacatcaccaccagcaacaacaccaacgccaacaccaacagctgcacctacacctgcttcttctcctgcaacctcaccagtcccttccgctagttctccaccagcaccaggcacagccggaacccgctcccggacccgcaggtggcgccgagcc

SEQ ID NO: 77009 - DNA, 244 bp, Glycine max
  unsure (1)..(244): unsure at all n locations
  Clone ID: 700959894H1
aagagatgcaagaagcaggcttggngaatgatgggtgaggtctccggcgatcagcaccgtcagctgaaggcggagatagcgactcatccgctgtacgagcagcttctggcagcacacgtggcatgcctccgtgtggcgactcccatcgatcagcttccactcattgatgctcaattatctcagtctcaccatcttctacgctcttatgtctcacacaacactctttctctctcccctcatcacc

SEQ ID NO: 77010 - DNA, 245 bp, Glycine max
  Clone ID: 700959896H1
gtacctgagactctatgcttcaagatacggtagggacgagagtattgcgcttttggagagaacaggagtgtacttcggtcctgagcgttacacatttgagcacatgccaattgatgccatgagaggacaaatatttaatgcctgccgttcatgaattggtatgttacagaatatggatgctgcttggtcgagtggttcatttgtcaacagcttaaaaattcaggtttcagcatctaagtttcaaa

SEQ ID NO: 77011 - DNA, 246 bp, Glycine max
  Clone ID: 700959910H1
acacggtttacttaagatcaaggagttgtgctgttgtattgactccatacaggtggtttcctgcacttgcagtggttaaattctgtaagacttggtatttaatcgtggggcttctcaacaagatgcttttactgagatatcacagttggtacaaagtgcgcttgatgggtacaaggcttatgctctaggatacccatcaaccgatgtgaagtggtttactcacaaaattagacttcaatttgatga

SEQ ID NO: 77012 - DNA, 261 bp, Glycine max
  unsure (1)..(261): unsure at all n locations
  Clone ID: 700959914H1
tggggtgacaacgcagagcgtgttcttgagtcaattcaacttctcttggatcttcttgnggcccctgacccttgcacccttgagactttccttggaagaattcctatggtcttcaatgttgtcattctttctccccatggttactttgcccaagataatgtcttgggataccctgacactggtggccaggttgtttacatcttggatcaagttcgtgctttggagaacgagatgctccatcgcattaagcaacaaggatgg

SEQ ID NO: 77013 - DNA, 252 bp, Glycine max
  Clone ID: 700959929H1
cgtcatcgtttcgttcaactttcaacgccagttcacactctctgcttcgcgtgtaccaacaagtgcaagttcgaatcaatggccagcgctcagctcacagcaatagcgtcatcgatctctacggcgtcgtttgaagggcttcgaccttccgctgttcagtttgcttccacgggcagaattagaattggcaatctctcccaaaggtccttccggggcttggttgtcaaagccgccaccgttgttgcccccaaa

SEQ ID NO: 77014 - DNA, 260 bp, Glycine max
  Clone ID: 700959943H1
ctcttaagcaagtgaggtcaacaaagactcagttcatgctggaccagttagctgatcttcagaataaggagcatatgttggtggaagcaaacagatctttgaccatgaagctggaagaaatcaattcaagaaaccagtataggcaaacatgggaagctggtgagcaaagtatgccatatggaacccaaaatgctcactctcaaggcttcttccagcctttggagtgcaaccccacattgcagataggttctgactacagg

SEQ ID NO: 77015 - DNA, 254 bp, Glycine max
  Clone ID: 700959975H1
ctcgtcttcaatcctttcgttattctcttattcatccttctcttctgaataatccagatctctttctgcccttttctccgtcacgcttttcgtgaccggatctgtatggatttgatccagatctacacgccgatggtggttttggccgggtctttcatagatctggtgcgtagaggctcagatctacggtaccgaggtacaacagagaatcgatgacaagaacgcagatccgacggtagatccagccgattccg

SEQ ID NO: 77016 - DNA, 256 bp, Glycine max
  Clone ID: 700959976H1
ggttcatcaatggtgtcacaaccgctttctttgcctccttggaacgttgctgcatccgaattgccaccgaagaagacgtcgaagatggcaacgacgacgtgcccttgatcctcaacgacggaaatctccgccaccgcaccgtggacaccaccacccgccaaaggaagaaagtgaaaggaaagaaaagttaattgttcttggtagttgaccaacgctaatatatagtgaaagtcaacgatctctcttttcttggtga

SEQ ID NO: 77017 - DNA, 261 bp, Glycine max
  Clone ID: 700959980H1
gcgttttcaagaggaaagagggagaaaaactgttgttgactctgaaggacacgtgtaagccgctccttatcccttgctttgacctcaagagctctgcgccgttcgtgttctcccgagccgacgcgtccgagtcaccgagcttcaacttcgagctttggaaggcgtgccgcgccacgtcggcgacccctggcctcttcactcccttccacttctcctccgtcgacggaaaaacctcgtgcgccgccgtcgacggcggcctgg

SEQ ID NO: 77018 - DNA, 258 bp, Glycine max
  Clone ID: 700959995H1
gaggacaccaaaccaacaccaccatcgatccaaatccaatccaatgggttcggttcccgcagaactgagcttggatttaagacccactttcatccccaaaaccatcaccgatttcctccgccacctctccgacaacaacaacccccccgccaccctccacgatttcctcgcccgcctcgaagacgagctccgcaagatccacgccttcaaacgcgaactccccctctccatgctcctcttaaacgacgcaatttcagt

SEQ ID NO: 77019 - DNA, 155 bp, Glycine max
  Clone ID: 700960008H1
gtttcatgtagtttctttttcatcatccattgaactgaaccttaaattaattatagaaccatgtttgcaactaccaattcctccactttgtcacctttattctctttcagtagaacaacagcaacctctctgccttccaaacccacattctggaa

SEQ ID NO: 77020 - DNA, 255 bp, Glycine max
  Clone ID: 700960015H1
ctcgatattttgatttgttttcttttattgtttttccttgcatttctttgattcccttcacttcaccaatatatattacaccacgcgttagttactcacgtattctgcttctttctttctctcacccttggttgtttatgctttactacttgtccgtccattcattcaacttttcatattataatgaatactcgggaattcgcacacacactcactcactttgtttcttgttcttggtgtagttgaaatctgggt

SEQ ID NO: 77021 - DNA, 123 bp, Glycine max
  Clone ID: 700960022H1
gcttacttggacttacaccacttgctgaacgtgtgagcttcattacagaacaagttgccttttacactggtcccacagttggaggacttctgaatgctacatgtgggaatgttactgagctca

SEQ ID NO: 77022 - DNA, 129 bp, Glycine max
  Clone ID: 700960052H1
atttggagtttggagcgactgaactaatcattaatttgcactcgctgtttcagcttcatcacccttcttttgcatcatttatatctcttgagaaatggcacaagaaacctttctattcacatctgaatc

SEQ ID NO: 77023 - DNA, 245 bp, Glycine max
  Clone ID: 700960059H1
gttgatttggatttgggaaattacgagcgcttcctcgatgtcacgcttaccaaagataacaacatcaccactggaaaaatttaccagtctgttcttgagaaggaacgtaaaggcgattatctcgggaaaactgttcaggtggtcccgcacatcactgatgctattaaagattggattgagtcggttgctgtgattcccgtggatggaaaggagggccctgcagatgtttgtgtgattgagctggg

SEQ ID NO: 77024 - DNA, 242 bp, Glycine max
  Clone ID: 700960070H1
gtatgaaattaaaaatgagcagcatgcagaggcattctggagccaaaaatcacttgcaggggaggactcacttcctatgggagacagagttgcagctctcaaagataaccaacaaccttctcgtgttccaaatggtgttaaacagggtccaggaggatcacgagaaatcactttctccacaagaagctcagctaagtacaaggaagacgaggaagataaagaagtgccacacaggaaaaaga

SEQ ID NO: 77025 - DNA, 116 bp, Glycine max
  Clone ID: 700960073H1
cgctggtggtggtttcttctagtttcttcactcttttcattacttttagcctgcatagttttaaataagaaaaaaaaaacagcgactttgtgactagttaagatcaccgtttcttc

SEQ ID NO: 77026 - DNA, 247 bp, Glycine max
  Clone ID: 700960095H1
gaaaaagcaatggaagctcaatcacaccaccgactcaatgtcctttttcttccatatccgacacctggccatttacttcctatggtagacacagcaagactatttgccaagcatggtgttagtgttactattctcactacccctgctattgcttcaacattccaaaatgccatagacagtgacttcaattgtggatatcacatcagaactcaagtggttccattcccttcagcccaagttggtctca

SEQ ID NO: 77027 - DNA, 272 bp, Glycine max
  Clone ID: 700960103H1
cttcttctttttcatcaatcatcaccagtggttcttttccttctgagaagatcgaattgtgttttgcaaaaatgggagttccagagaaagaccctctttcccaattgagtttgcctcctggttttcggttttaccccaccgacgaggagcttctcgttcagtatctgtgccgcaaggtcgctggccaccatttctctcttccaatcattgccgaaattgacttgtacaagttcgacccatgggttcttccaagtaaagcgattttcggtgaa

SEQ ID NO: 77028 - DNA, 272 bp, Glycine max
  Clone ID: 700960104H1
aaaaatatctcacgcaataacataccctaacacaaacaccttcctcccttaaaaatgctgaagcatttcaatttcaacatgaacattttcttcacgttgcttatagttgtcacattagctagtttctatgttccccagttgaagcctcgtccttcaattacaatagctttttgcatggttgcaaccctagtataccaatttataatgagaacacccaacaaaatttacttggtggactttgcatgcttcaagccaagccttgcatgcctctg

SEQ ID NO: 77029 - DNA, 272 bp, Glycine max
  Clone ID: 700960105H1
agaaaaccgagaaagaagaaaccgacttcaaagttccggaaacgattacgctttgcgtcaacaactgcggcgtcaccggaaaccctgccacgaataacatgtgccagaagtgcttcactgcctctaccgccaccacttccggcgccggaggtgccggaatagcttctccggcgaccagatccggcgtctccgcgcgtcctcagaagagatcttttcctgaagagccctcgccggtggcggatcctccttcttcggaccagacgacgccgtcg

SEQ ID NO: 77030 - DNA, 271 bp, Glycine max
  Clone ID: 700960108H1
ggaagaggggatatgaatacaaggagctagttgtctatttgcaataacataacatcatcaagcaggatcatcgatccaaccttagtattcaacccagagagatttgtagtaataattactacaacaacttaaaacaatggcaggaggaggttatgtagattcgggaaatgcaaagcaatttgaagggaaggtcactgcattcgtattggttacatgctttgtggcagccatgggaggcttactcttcggttatgatcttggaataaccgga

SEQ ID NO: 77031 - DNA, 263 bp, Glycine max
  Clone ID: 700960113H1
caaaaacttcatagatggaacgaacacttatagaactgccactgtcgctattcaaggagatcactttgtggccatcaatatggggtttgagaattctgctggacctcataagcatcaagcggtggcattgagagtccaagcagacaagtccatcttttacaattgctcaatggatgggtatcaagacacactttatgcacacaccatgcgtcaattctatagagattgcaccatttcaggtaccatcgactttgtgttcggta

SEQ ID NO: 77032 - DNA, 267 bp, Glycine max
  Clone ID: 700960126H1
cagaatcccaccgccatggatttcatgaaggtcttcgatcaaaccgttcgagaaataaagagagaggtgaatctgaaggtgctcaaggttccggaaatcgaacagaaggtgctggatgcaactgataatgaaccttggggtcctcatggtactgtgctggcagagatttcacaggctaccaaaaaatttactgaatgccaaatgatcatgaatgtcctttggacaagactgggtgaaactggaaaagattggcgttatgtatacaag

SEQ ID NO: 77033 - DNA, 261 bp, Glycine max
  Clone ID: 700960128H1
atatagcgaaaggggtggagtccctactgcgtcactctgacccaaactccataactacggtaaacggcgtcgttcagcagctggaggccaaactagggttagacctctctcacaaggccagtttcatcagagaccagatcgatcatcttctccggtcacagccacagacatttgctcctcaccctcctccacttcacaaagactattttgcccctcacacccaactgcacttcccaaccacccactttgctccccattttg

SEQ ID NO: 77034 - DNA, 231 bp, Glycine max
  Clone ID: 700960143H1
tgagattaagaactactggaggacaaggatccagaagcacctcaagcaagcttccagcagcttccagcaacagagtagtaattctgagataatttatcatccccaagcttgcactagccaagtgtccaccatggcgcagccatagaaacctattctccacccagttatcaaggaatgttagatccattttcaattcagttcccaacaaatcctcatcattctagttgttgt

SEQ ID NO: 77035 - DNA, 261 bp, Glycine max
  Clone ID: 700960158H1
cactagcgtgtttcgtcttcttcgtctttactcttttcttcaccgaagcgaaaaagaaaaggcttgacttgagagaaatagagcttcgaatcgaaactcagaattagaaaaaaacacaaatcacaatcacaatggcaaggtacgaccgagcaatcaccgttttctcccccgacggccacctcttccaggtcgagtatgccctcgaagccgtccgcaagggcaacgccgccgtcggcgtccgcggcaccgacaacgtcgtcc

SEQ ID NO: 77036 - DNA, 260 bp, Glycine max
  Clone ID: 700960172H1
cgggtgcgtacgtcgttccaagtaaatcactttgtcgagccctaattttgaatttgtgcgccattcctaaaacagtgcagtgaaaatcacgtatttgcgatggagattctgtattcgaagctctacgacaagtacaccaaactcaagtctaaaaaactctccgatttggatcacataaacaaagaacaagaagttaaattcgtgaattacttgacggctgcggaagagttgatagagcacttgaagagcgaaaaggaagg

SEQ ID NO: 77037 - DNA, 258 bp, Glycine max
  Clone ID: 700960181H1
caagtcagcgttaagggtttagtttggtgcgtgccatgaagatcgaggaattggacgatggagagtgtagtagggacgaggaagagaagtgtgagaggcagattgtgagcgttgatgcgaagagagcgttggttggagctggtgctcggatcctgttctaccccacactcttgtataatgtgcttcgtaacaagattgaagctgagttcaggtggtgggatcaaattgacgagtttttgttactgggcgctgttccgt

SEQ ID NO: 77038 - DNA, 259 bp, Glycine max
  Clone ID: 700960182H1
cgtttcctgaaaagaatgagctgcagagcagatctttagatagagagagattctttcaccaaaagtttcagctgaggaatatgcaaatgaacggtattggtaccatggatgatgattctgttcatcggagaggtaatggatccgaaaagtatgtgtcttttgacattgaggataagtctgaaagaggaacaaaaggtgttgattcctacatttctgtgggaggtgatgggtcattgggaaaaagcttccagaatcctat

SEQ ID NO: 77039 - DNA, 286 bp, Glycine max
  Clone ID: 700960202H1
aagcgcttgaaggagatggaagatgaagctgctgctttgcgagagatgcaggccaaggtcgagaaggaaatgggatctgcgcaagatcctgcaaatgcttctgcaagtcaggccaataaagaggaaatagattctcgatcagtctttgtaggcaatgtggactattcatgcactcctgaagaagtgcaacagcattttcagtcttgtggaacagtaaacagagtcaccattcgaactgataagtttggccaacccaagggttatgcctatgttgagttccttgagg

SEQ ID NO: 77040 - DNA, 283 bp, Glycine max
  Clone ID: 700960204H1
gcaagtggaaccattgagtccaacacatcaagtgctgggactcaattggtgtttgataggtcaggagatgtgtatattttgagagacaacaaagaaaagtataacttgtcagatgggggttctatttccaccactcaattttaccttagagcaactcttgattttgatggggtgttcacactctatcaacatccaaagggttcttctgggagtgtaggttggaccccagtgtggtctcatccagataatatatgtaaggattatctttctgctgcaagtagtg

SEQ ID NO: 77041 - DNA, 278 bp, Glycine max
  Clone ID: 700960226H1
ctaatttgaaaatcaagtattttcagagagagctgaggcaatacttggtgtatttcattgtggcactgactatattcttctacatgattccaattacatttatatctgcattaactactttggataatttggtgaaatatctcccattcataaagccaattgttaatataaaggcattgaaaacagtgttggaagcttacctccctcaactcgcactgattattttcttggctttgttgcccaagttgcttctgtttttgtctaaatttgaaggcatt

SEQ ID NO: 77042 - DNA, 273 bp, Glycine max
  Clone ID: 700960242H1
gagcgattgcccttgctgcggcgactacctcaccaacaccaacctcttccctaacttgttgctcgacaagctactgaagaagacttctgcgcgtcaaatatcaaaaaccgcttcacctgtcgaacattttcggcaggtattgcaaaagggttctgatgtgtcaattaaggagctagacacccttttgtcacttcttgccgagaagaaaagaaaaatggaacaagaagaagctgagagaaatatgcaaatattgttagacttcttgcattgctt

SEQ ID NO: 77043 - DNA, 269 bp, Glycine max
  Clone ID: 700960257H1
gggcttcgtcggaggattgtcacgcctgaacgagcccttttccatttcagccttgagcggctcctgttcttgtcaagttggtgtgaattaggagctgcttaattcaaagaatggggggagatgcacagaagagaaacgtcatcattggcgtctctactttcttgttggtggccatggtggtagcagtcacagtcaatgtcaacttcaataacaagggatcaagcagtgattcaaaggaagaaagcaaatcccatgtagcttcctcgatg

SEQ ID NO: 77044 - DNA, 267 bp, Glycine max
  Clone ID: 700960269H1
cgatcataccatggtaaatatgagaaacttggaggattatgtttctcttattgtcgatgcaactgtgaggtctggagtttcaagacaagtggaagcttttaaatctggctttaaccaggttttctccattgatcatcttcggattttcaatgaagaagaacttgagcgaatgctttgtggagagtatgactcttgggctgtcaacgagtttggagatcacattaagtttgatcatgggtatactgctagcagtcctcccattgttaa

SEQ ID NO: 77045 - DNA, 266 bp, Glycine max
  Clone ID: 700960277H1
gtgtttgaatcgtgaaaatgttcagaaaccagtatgacacggacgtgacgacatggagcccggcggggaggctgttccaggtggagtacgcgatggaggcggtgaagcagggctcggctgcgatagggctccgatccaagacccacgtggtcctcgcatgcgtcaacaaggctaactccgaactttcatcgcaccagaagaagatcttcaaggtcgacaaccacatcggcgtcgccatcgccggcctcaccgccgacggccgcgtc

SEQ ID NO: 77046 - DNA, 263 bp, Glycine max
  Clone ID: 700960288H1
cggtggtgtatttggtgtgttgatgttttattaaacttttgtactcttgctttgaaactagttggttaggcaagttttagttttctattttatttcagacttttcaggtgctcatattcttatgatgatcatcaaactgcaaatatagtgagcccattaagctattactgaaatttgttgcagatttgaaattcttctaagatggatacttcttataggactggtggagtcaagtacgagtgcttgctttttgatatggatga

SEQ ID NO: 77047 - DNA, 263 bp, Glycine max
  Clone ID: 700960291H1
gcagaagcacaagcccagctcttcaagatggccaacgaaggaagaatgaagcctagaccatgatgaaatacagattaagtagtagtactcttaattagttaattagtatggtgtgccaatttattgagttaagaccattttatatttaagatttctgttagtttgtgtcatttaaggctctcacatgatatgttcattaatatgcattgagatggatatcatgttaatttcttcgaaatttaatgcaaaatttatggttttgg

SEQ ID NO: 77048 - DNA, 263 bp, Glycine max
  Clone ID: 700960293H1
gttagagtgtttctttccacaactcaagaagccactaatgtaaatccttttttatatataagtatttgttggttaagttagagcgtttcttccatatcttagaaacaaccagaatttaaatcttgtaccacttgtttaggaaacacaagtcgctatcacttttatcgatcgttgttgatcttataaatgcttatataacaaattattcaaacactttaaaatttcataaacatttatcaatgtgtcaactgaaatttaagaaa

SEQ ID NO: 77049 - DNA, 259 bp, Glycine max
  Clone ID: 700960311H1
gtctaaatgatgctgattttgaagagagaattattcaacatttagctgctgctgcagcaatgaggagagctaaccaacttggttggagggaagggcagcgagctcgttcatcagctcatggtcatccacaattctctgttctctaatcagcctattgcaccttcatcagttgctggaggagaaaatgacccaactgcaattcctaatagaagtccatctaccccaataacatccgttggaaatgaagcatcgcagcaga

SEQ ID NO: 77050 - DNA, 260 bp, Glycine max
  Clone ID: 700960315H1
aacatgcacacaaagtaatggacaaaaaaccatgcaactcatcatctcatgatcctgaagtgagaaagggaccatggaccatggaagaagacttgatcttgataaactatattgcaaatcacggtgaaggtgtttggaactccttagccaaagcttctggtctcaaacgaacgggaaagagttgtcgactccgttggctaaactaccttcgtcctgatgttagaagaggaaacattacacccgaggaacagcttttgatc

SEQ ID NO: 77051 - DNA, 112 bp, Glycine max
  Clone ID: 700960345H1
ctacagtcaaaataggttttattaggtcagagttccacacaattgtcatattgtagaacgtttcgattttacttaagaggctcttatatgtattttttaaaccaattattaa

SEQ ID NO: 77052 - DNA, 256 bp, Glycine max
  Clone ID: 700960365H1
gcaaaacttagggttgggcctttttttgaggttttcagcgcttctttctcacaatggttcttcagaatgatattgatttgctgaatcctccagctgagttggagaagagaaagcacaaactcaagcgtcttgttcagtcaccaaactctttcttcatggatgttaagtgccagggatgcttcaacataacaactgtgtttagccactctcaaactgttgtggtgtgcggaaactgccagactgttttgtgccaacc

SEQ ID NO: 77053 - DNA, 250 bp, Glycine max
  Clone ID: 700960374H1
attaaatcttctctcaaaatatttgtgattccatgcccaacgccctaccctgaaaatatggtagccgagagagaggttaacggtaacggcgtcggagagggaagaacaacgctaatattcacctacggaaccctgaagcgaggcttctccaaccacccccttctccaagacctcattcgctccggcgacgcctccttcgtcggaacctaccgcaccgccgccaaatatcctctggtctgtgggccctaca

SEQ ID NO: 77054 - DNA, 99 bp, Glycine max
  Clone ID: 700960378H1
caaaaaaaaagaacaagaaaatggaaaaaaaagcaacactcgtctctgctgtttctcttattctcgtagtgggcgttgccctaggcgttgttgcttatg

SEQ ID NO: 77055 - DNA, 253 bp, Glycine max
  Clone ID: 700960381H1
cgctgagggaaatcagaaagtatcagaagagcaccgagcttctcatcaggaagcttccgtttcagagactcgtgagggaaatcgcgcaggacttcaagaccgatttgcgttttcagagtagcgccgtttctgcgcttcaggaagctgctgaggcctacctcgttgggttgttcgaggacactaacctttgcgcgattcatgcaaagagggttaccattatgcctaaggatattcagcttgctcgcaggatcag

SEQ ID NO: 77056 - DNA, 250 bp, Glycine max
  Clone ID: 700960382H1
cacactcactctccttctctctcctattgcggctagggtttgggtttttcactttcagcctctccattccttcaaccttcttcttctctttgatctctgatggagacgttccgtgtttagtagcaagggttagttgaggccttgtgtttggaaacgtacggtgtcgttttggagttgggaaaacaaataattctgagagatggcaaccacgaacccttttgatttgttgggtgacgacgctgaggaccct

SEQ ID NO: 77057 - DNA, 248 bp, Glycine max
  Clone ID: 700960384H1
agcattcagtgaaacactagctagggtattgggagctctcgttgtttcggagttagggaccttacgcagccatggccactgctacgaatgccgccgccgccccaccacgccagctctcccagaaggaagctgacatccagatgatgttggccgccgacgtccacctcggcaccaagaactgcgacttccaaatggaacgttacatcttcaagcgccgcaacgacgggatttacattattaaccttggg

SEQ ID NO: 77058 - DNA, 100 bp, Glycine max
  Clone ID: 700960388H1
atttaaaaaccaaaaaaaactaatcctcgtggtcacagtgggtttgagtgaactaaaaggaacaaaggcaatacatagagggcaacgcgattttcattct

SEQ ID NO: 77059 - DNA, 247 bp, Glycine max
  Clone ID: 700960390H1
ggagagggtccagtggtgttgttcctccacggcttccctgagctctggtactcatggcgccatcagattctctctctcagctccctcggctaccgcgccgtcgctcccgatctccgtggctacggtgacaccgaagcaccaccttcaatcagcagctacaactgcttccacatagtgggtgatctcgttgcgcttattgactctctgggtgtccaacaagtgttccttgtggctcatgactggggag

SEQ ID NO: 77060 - DNA, 263 bp, Glycine max
  Clone ID: 700960413H1
gggttatcatttctccatttccattttctctctcacttttcaagaatcgtaagctatgggaaagtcttacccaactgtgagtgctgattaccagaaggccgttgagaaggcgaagaagaagctcagaggcttcatcgctgagaagagatgcgctcctctaatgctccgtttggcatggcactctgctggaacctttgacaagggcacgaagaccggtggacccttcggaaccatcaagcaccctgccgaactggctcacagcg

SEQ ID NO: 77061 - DNA, 266 bp, Glycine max
  Clone ID: 700960416H1
ttcggatctgagagatcgccacgcacgcacgcacgcttcctttgattttgtcttccgcttcgtcatttcctattctcagcttccaattctcctcctccttcttctaattctacttcttttcgagggttttcgttcctctgtgcctgattgatccctaattcgataccatgcggaagaagctcgatacccgtttccccgctgctcggataaagaagataatgcaagcagatgaggatgtcggaaagatagcgttggcagttcctgtt

SEQ ID NO: 77062 - DNA, 259 bp, Glycine max
  Clone ID: 700960430H1
gttaattcagactcccctcagaaacaagccattggtaatgcaaaccctagtcctactcctgcaatgaactatggtatggctaatcgacaaagatcaatgaagcagcgtggagggtcaaatggctataatgttgggtctggtcctgttcagaacaacttctccggtgctacccagaatcttcctccaccgccaccaccgcccccctttcctgtgcttccgatgcctccaagaacatttgcccatgggataccaggggttc

SEQ ID NO: 77063 - DNA, 265 bp, Glycine max
  Clone ID: 700960438H1
ggatgatgctggaaactgctctcaaactacttccatatatgggtctaagcttagttcatgggttgagaatagtagtaattttaaacgtgaaagcagtgtttcaactggatactccaagcgaccagatgaagtttgcaaatcaaatcgtaaaagacttaaaccaggagagaaccctaggcctaggcctaaagatcgccaaatgattcaagatcgtgtgaaagagttgcgggaaattgtgccaaatggagcaaaatgtagcatagat

SEQ ID NO: 77064 - DNA, 264 bp, Glycine max
  Clone ID: 700960439H1
ggtttttgatacgaatatcagccaatgagataggaggggcttcaacagccacaaccttgatcttgcattgagccatgaaactacttagccacttgggttcctcactagagacacttgtctattaactcttttttgttgttgtggtgtttcatttgtgaaactaacaacaacacaaggccatcatcatggcagctgcttccccaatggcaagccaactcaagtccaccttcactaggactcttgtagctcccaagggcctctctg

SEQ ID NO: 77065 - DNA, 263 bp, Glycine max
  Clone ID: 700960452H1
gcctctctcttcattttttgtttagcatgttttgccactgcagcacggtgaagagacttaccttggatttggtgggaagaacagaacaggttgatgtggcagagtttgggattactttgttggattgttttccaaacataacatatcttaatttaggtcctggagcttggcatgtgatggagaattctttcagctggggaggtttgaaagatgggattgggatgaagatgataaaagaacttatagcacatctagtggtccat

SEQ ID NO: 77066 - DNA, 261 bp, Glycine max
  Clone ID: 700960456H1
gggttcgaactatactagacataggttgtggctatggtagctttggagcacacctcttcgacagtcagcttttaactatgtgcattgcaaactatgaaccttctggcagtcaagttcagctcactctggaaaggggtcttcctgctatgattgcttctttcacttcaaagcagttgccatatccatctctatcctttgatatgttacattgtgcaagatgtggcattgattgggaccagaaagatggccttctcctgattg

SEQ ID NO: 77067 - DNA, 243 bp, Glycine max
  unsure (1)..(243): unsure at all n locations
  Clone ID: 700960504H1
agaacattnaccaagantnttgttgaagcttttnagccnanccgggancancgactggnactnnancttctgganccgcacatnccggtggtcccgcnatcctcgatnaagtcgagnagaagctccggatcaagcnggacaaactccagtcccacccggcatgtgntgagtgantacggaaacatgtcaanngcgtgtgtnttgttgattgtggatganatgagnaanangtctaaggacnaa

SEQ ID NO: 77068 - DNA, 230 bp, Glycine max
  unsure (1)..(230): unsure at all n locations
  Clone ID: 700960506H1
ttggagcatcgaggatatctggtcgtctatgcacttactccaatggagattaaacctagctatatgcatgccntatataaatgcatatatatgatgatatataaacctaagctcttgtagagtgtgttcaggcttaataacatcattaggtctgtttatatgagtagtctaagtttggtgtttgtaatgaatgatgtgagttaagaattaatttagttatggattgaaat

SEQ ID NO: 77069 - DNA, 259 bp, Glycine max
  unsure (1)..(259): unsure at all n locations
  Clone ID: 700960516H1
ggtgcagctgcctgattttgacgaggacgaattggaagcagaacttgaagaattggagggtgctgagttggaagaacagcttcttcagccagcaactacagctcctgcagccccagtgcaggtcncagctgggngccaacctactcgcgccagttcctgcaaagcgaactcgtgaagaanatgaattggcagctttgcaggctgagatggcatttgagcaggtgcctttcctcagctgtaacatancaanttgtatgcc

SEQ ID NO: 77070 - DNA, 252 bp, Glycine max
  unsure (1)..(252): unsure at all n locations
  Clone ID: 700960520H1
tcgagngattccggctnagatttganttcnttnnttccgaatcaaaattctatctggncnatctcnntctcaaaataaacagtgccttatttgngtagngtgaatgtgtgatggcgagtngttccttcttaaaaaattgnaaaatcnttgattttgcttcgtnactactgggagagtttacgagnagtatcaaaccgataaaagacgtttcttcaacatcattgactccgntgaanntaattgntcanaacg

SEQ ID NO: 77071 - DNA, 252 bp, Glycine max
  unsure (1)..(252): unsure at all n locations
  Clone ID: 700960523H1
cttttgctttntntctcccaaattgatnacaacttccngtccgganctgtgcagagaagtaaacatataggagtgagaggganggagagagaaggaaagcttggtagcgatggggaangagcaagttcaggtgctgantgnctggangtggcaaagacacaatggtatcatttcacagcaatcatccattggtggaatgggttnttcagtgatgcttatgatntgttntgnatatcatagtcacaaagctac

SEQ ID NO: 77072 - DNA, 251 bp, Glycine max
  unsure (1)..(251): unsure at all n locations
  Clone ID: 700960524H1
gtcggaatcgacggtnggagatttagtggcggcggnggtgcggcaatacgtgaaggaaggtcgncgaccaattttgccgtccaacgacccttccccacttcgaccttcattattgtcagttcagcttagaaagtttggatagggaggagaagctgagggatantggatctanaaantctttatgtgtccgangaagtgtggnggcggcnnggcgaggtagangaacgaagccgtttgttcatgntcaagac

SEQ ID NO: 77073 - DNA, 253 bp, Glycine max
  unsure (1)..(253): unsure at all n locations
  Clone ID: 700960530H1
taaatcangtcttanttaggnagttgtganctaattgtataattnacnancatntgatttcnaantnttntttccganantttctttctttntcntgaaaacacttcangnacaataattcaagcgggggcttgtggcantgtttgttctggctcgtatcatgttacagttactttaaccaaatananacatanagcagcaagtctgtcattactgtttnatntctactcttngnctctgcgtgccccttcac

SEQ ID NO: 77074 - DNA, 252 bp, Glycine max
  unsure (1)..(252): unsure at all n locations
  Clone ID: 700960535H1
agaaaantccgggtcanactgctttgaanaattntgagaaagtattntttcagggctctttggngtcatctccttcatccctcaatctgttgtncaggtcgttggcaacttaactgcagttcactcatactttnatttattctcaaggaaaattgaccaagatnatatgganttgaggaggtgagttgnagctanacanaattcagaangaacatgcantacaacncacnaatggangnttcnaaanattnc

SEQ ID NO: 77075 - DNA, 204 bp, Glycine max
  unsure (1)..(204): unsure at all n locations
  Clone ID: 700960536H1
actaatttcgtagttactttcgtntngaacgcgcacggtaaactaggttgttntgtncntcttctcttcatcgttcgncnaagtcaagntttgactgngcnctgcatctnncaatctctacgaagcaacgctnngaagtnnnnatgtnaagttccgncaaaggtattaccttgatacaaaaactntgaagtanatnttgtcnag

SEQ ID NO: 77076 - DNA, 196 bp, Glycine max
  unsure (1)..(196): unsure at all n locations
  Clone ID: 700960546H1
tttcctttcaacaccccttgtttatnttgtactgaatgccacccantgataacaatttntatcttggagttagcntttatggtaggtttcctctttataacncagtgtatnaaatgtgcatatttnatgtgataattgttgtganttatttnttgganngaaagtataaaaaaaatgaangattagttggatgttg

SEQ ID NO: 77077 - DNA, 252 bp, Glycine max
  unsure (1)..(252): unsure at all n locations
  Clone ID: 700960548H1
aanaaatgccacaccctctactatcgcgcanccntttnttcacttcttcatgnttcgactcttctgcgcctganctccnacngtngtctgagtngcgccgccgtttggnttcgcggatttctccnatgttcgnntaacgagacanagtgaatctgaatcgcattcgaacgtgntctcttcgacatcttcacttaagccttcganttgcataagatgcttncgagggtttatngnccaaatcacctcaaaccc

SEQ ID NO: 77078 - DNA, 83 bp, Glycine max
  unsure (1)..(83): unsure at all n locations
  Clone ID: 700960553H1
aggtaatttaagagagagaaacgagagagtgagagagggacnaccncatnccacttcttcccatttcncacnnctcccnaacc

SEQ ID NO: 77079 - DNA, 96 bp, Glycine max
  unsure (1)..(96): unsure at all n locations
  Clone ID: 700960554H1
gttcgtctccctcccatcgaaataatggnttcngtttcctacctcttcgtgtttcgttccnnttccttcttcctctcntctccaccaccaanatnc

SEQ ID NO: 77080 - DNA, 246 bp, Glycine max
  unsure (1)..(246): unsure at all n locations
  Clone ID: 700960557H1
tgcagttntgctccgcaattatcatgggcaaggtcaanatcggaatcaacggatttggaagaattggncgtttggtancanagtggctctgcagagagacgatgttgaactcgttgccgttaacgacctttcatcaccaccgattacatgacatacatgttnaaatacgacagtgttnatggacactggaancatcacgatgtcacgttaaggacgagaagacgcttctnttcggtgacaanccag

SEQ ID NO: 77081 - DNA, 250 bp, Glycine max
  unsure (1)..(250): unsure at all n locations
  Clone ID: 700960561H1
anganacacaccttcagcancagcagccatggttgtcaaaaccgaactatgccgattcagcggtgccaanatctaccccaggganaggcatcagatttgttcgtggtnattctcaggttttcctgtttgntaatcgaaatntaanaggtanttccacaanangttnaagccatnaaagctcactgnactgcaannnacaganagcaacacaagnaggacattgtcaanaagctgtnaagaaaagaanacg

SEQ ID NO: 77082 - DNA, 251 bp, Glycine max
  unsure (1)..(251): unsure at all n locations
  Clone ID: 700960562H1
atnacaacaacaanaactcccaccaancanctccaccaanaaatatgcntgagatccttncccaagccttcttgacttccnnttngcttgctctnagcgctgtnacancattgaatgatgacccttttgacaagtcntctgcttcantggggaantcatcanaggaggataaagncatagtgaaaagggctnctacttgcatcccctnccatgaccantccaagagantnagaacaagctcttncgntgcc

SEQ ID NO: 77083 - DNA, 255 bp, Glycine max
  unsure (1)..(255): unsure at all n locations
  Clone ID: 700960564H1
anttnaaacaaattttnagtcagggtttgcactcacttcagagcaccntaagctatctanntgataccatctncccanaagccggttgtganatacaattatncaaaagaagctaagnnattttatgctcgccannatgatganggaactgtagctgcgtttganttggntgtnccaaagnttggaacaataatatctggtagcnaaaacgaggaacgtcttaacatnataagctccaggattgatnagttangt

SEQ ID NO: 77084 - DNA, 110 bp, Glycine max
  unsure (1)..(110): unsure at all n locations
  Clone ID: 700960569H1
canccggcntccganccacacctaacccaaaccagcctatggcggngatgcagaggnccaccngcaannagaaccannncaatggccaaagctacgtgcgtgcttttnct

SEQ ID NO: 77085 - DNA, 246 bp, Glycine max
  unsure (1)..(246): unsure at all n locations
  Clone ID: 700960573H1
atggttgtacagcaatattgaagccatntgaattggcatctgtgacctcgtttgnagctggctgaaatatgcagagaagttggcnttnctccaggggtattaaacattgttactggattangcaatgaagctggtgntcgtttgtnatcatcctgacgtagacaagatttcntttactggaagctctgnaatggaagcaggattangacagctgcagcacagctaacgaagctgtttntctagagt

SEQ ID NO: 77086 - DNA, 253 bp, Glycine max
  unsure (1)..(253): unsure at all n locations
  Clone ID: 700960581H1
tctagcncaacnggatcttcacgactaggagatggcaaagtcgaacaaccacacccgctcacaacccantnctacaaggcccataanaatggcatcaaaaagccaaagagggatcgncacacttccaccaaagggatggatccaaagtttctgaggaaccanaggtacgcnaggnnncataacaagaanagcggtgaaacagccaccgaagnngagtaaagtgccactctnaaatgggctantaggattggtt

SEQ ID NO: 77087 - DNA, 83 bp, Glycine max
  unsure (1)..(83): unsure at all n locations
  Clone ID: 700960584H1
tgccanatcccaaatccaaatccnacnctgttcgatttcntcctttgaagatcctccatcgttnttccctcaaaacgncgagc

SEQ ID NO: 77088 - DNA, 245 bp, Glycine max
  unsure (1)..(245): unsure at all n locations
  Clone ID: 700960587H1
acatgttcacaanttggttnatgntcttcnanaaggcatgaatctaagagtgcnggaantgaaatggtnactgaaaaggagcaggnanagttnacggnaagagataatcctttgtgtncttcttgtcagatgcttnttctttggatccanaatcaactaaaacaaaaggcaacgaangacanannattcaactangtgaatcaatntgtgagagcctaaccaagtccattgganantcantgatc

SEQ ID NO: 77089 - DNA, 249 bp, Glycine max
  unsure (1)..(249): unsure at all n locations
  Clone ID: 700960588H1
attnaatctncanaattcncngacaagagatctttttctgctccnttgaanaaagaagggtntttgnttgattttggagangtctctgctctgagatctcatgaaccttaacccgtacgatanccaccgagaaggtgatcgnagagtacatatggatcggtggatcaggaatggacctgaggagcaaagcaaggatctcccaggaccanntagngaccntcagagttcccaantggaantangatngnc

SEQ ID NO: 77090 - DNA, 178 bp, Glycine max
  unsure (1)..(178): unsure at all n locations
  Clone ID: 700960590H1
agaaagatgagcgatgaggaaagaacnaagcaaatacgcggagtgagnaaaagcntgaaagaaggagagagaatcgtgggcccaacgagacggcccgacggaancctccgcaancccattcgaatccgcgctggttacacccctcaagacgaatcgcccatttaccaaccaaaggagc

SEQ ID NO: 77091 - DNA, 259 bp, Glycine max
  unsure (1)..(259): unsure at all n locations
  Clone ID: 700960601H1
tacaaangttgctgtaggagataagattgcagtagtgctaagtgctaacacctgcagtgaacaatggcctctgcatcagcatctctgctcaagtcttcacttgttcttgacaagtctgagtgggtgaagggacaaacccttcgccaaccttctgcatcagttgtgagatgcaaccccaccaccccatcaggcctcaccatcagagctggttcctatgctgatgagctcgttaagaccgcgaaaacagtggcttcaccag

SEQ ID NO: 77092 - DNA, 108 bp, Glycine max
  Clone ID: 700960603H1
gatctcactgagtctgatcaactaggagaaatgctaaagcaaattttttagttggactgaggcatagtctacaaaatgctatgagaacctgttcatggttttgatttg

SEQ ID NO: 77093 - DNA, 243 bp, Glycine max
  Clone ID: 700960607H1
cttccaaaaagtaagtcattagtcatataaggttaagatactatgtttgctttgagatttaattataagaacgagacttgattaacatgcatgtactaagcttgagaagtattaatatgaagaataacagcttttgaaataggattcgcacataagaaatagtcttaccaagaggatagttgctaattgattataagcatacaagattgaaaatgcatttagaatatcaaagtgcagtaacat

SEQ ID NO: 77094 - DNA, 255 bp, Glycine max
  Clone ID: 700960608H1
gttcattccatcactgccacccagaagactgttgatgggccatcagccaaagactggagaggtggaagagctgcttcatttaacatcattcctagcagcactggagctgccaaggctgttggaaaagtccttcctgctttgaacggaaaattgactggtatggcattccgtgttcccaccgtggatgtctctgttgttgacctcacagtgaggctggagaaggaagcctcctacgatgaaattaaaaatgctatc

SEQ ID NO: 77095 - DNA, 251 bp, Glycine max
  Clone ID: 700960610H1
atccccccctagctacagagcagccaaaggggaggaataataataagcctatattctaaggccggaaaaataaaaaaggaataacaaaaatgtctggaaaggtaattatctcggctgtttctctcatcctggtggttggagtggccataggtgtggtggtggccgtcaacaagaagggcgaggatcccacacttcaatctcaacaaaaatcagtaggggttatctgccaaaacactgatgaccagaagctc

SEQ ID NO: 77096 - DNA, 255 bp, Glycine max
  Clone ID: 700960633H1
tttatctcaaaactgggacttgcaaatttggattcaattgcaagttcaatcacccgcttaggaggaaaaacctggctaaaaacgagaatgcgggagaaagagaagagcaggaagaaagatcaggccagacggaatgcaagtattatttaaggtctggggggtgtaagttcggaaaggcttgcaagtttaatcacacaagaggaaagagttcatcagcatcctctactgcagagcttaacttccttggcctgccta

SEQ ID NO: 77097 - DNA, 250 bp, Glycine max
  Clone ID: 700960634H1
atttacaaagtgtcataaattgatgggattctctacagggccaagatcacgagctacacattggaaacaaacagtcctatacctagaagatgtcttgaccgtttgtgagggggaggcaattgtggggagcatgactgttgctccaaataaaaaaaatcctcgggatgttgatataatgctcaagtattcattgaatggaaggcgatgcaatgtttcaagggttcagtactacaagatgcgttgaacctgg

SEQ ID NO: 77098 - DNA, 248 bp, Glycine max
  Clone ID: 700960641H1
gcttcttctgtgtgccaccccctctttaattttttttttctttagcttttggagtttggagtctcttgaaccatggctaagaatagaggagagttgaggattcatgagagtgtggatgagctaaggactgatttggcagactatgttgctgagttatcagaggcatctgtgaaagagcgaggagtctttgccattgctttatctggtggttctctcattggcttaatgggaaaactctgtgaagctcc

SEQ ID NO: 77099 - DNA, 206 bp, Glycine max
  unsure (1)..(206): unsure at all n locations
  Clone ID: 700960664H1
gtaatggacaaaaaaccatgcacgntcatnatctcanngatcctgaagtgagaaagggaccatggaccatggaagaagacttgatcttgataaactatattgcaaatcacggtgaaggtgtttggaactccttagccaaagcttctggtctcaaacgaacgggaaagagttgtcgactccgttggctaaactaccttcgtcctgat

SEQ ID NO: 77100 - DNA, 245 bp, Glycine max
  unsure (1)..(245): unsure at all n locations
  Clone ID: 700960671H1
tgctgagatcattgagcatggtatatcaggattccacattgatccttatcntcctgatcaagcttcagagctattggttgaatttttccaaaagagcaaggaggacccagaccattggaagaaaatatctaatggtggtcttcaaagaatttatgaaaggtacacttggaagatttattctgaaaggcttatgacctttgcgggagtttatagtttctggaaatacgtttccaaattagagaggc

SEQ ID NO: 77101 - DNA, 244 bp, Glycine max
  Clone ID: 700960674H1
ctccaacttccaacgagactgcgtgtggtatccttatagattggctgcaatattaccctttttcatttttgaagtatcgtttgaaattgaagtacaatggcactttccttcagggaagaaagagatacctttggagccattcaagttccctccgagaaattatggggagcacaaactcaaagatcgttgcagaacttcgatatcggtgggccccgcgaacgcatgcccgaacccatcattcgcg

SEQ ID NO: 77102 - DNA, 243 bp, Glycine max
  Clone ID: 700960686H1
gtcagctgggaggatattggaggccttgagaatgtcaagcgtgagtgcaagagactgttcaatatcctgtggagcacctagaaaaatttgagaagtttggtatgtcaccattaaaaggggttctcttctatggtcctccaggatgtggaaaaactttgttggccaaagcaattgctaatgaatgtcaagctaacttcatcagtgtaaggggcccagaattgctcactatgtggtttggtgaaa

SEQ ID NO: 77103 - DNA, 205 bp, Glycine max
  unsure (1)..(205): unsure at all n locations
  Clone ID: 700960755H1
ttcctatgtttgatnggnnnggaggtagaacgtcagnnatgtctgcagttggcctgcttccagcagcccttccagggattganatnanagaaatgcttgccggtgcatcattgatggatgangctaanaggagtactgtgnnaaggaataaccctgcagctctgctggctttatgttggtattgggctacagatggtgnaggatc

SEQ ID NO: 77104 - DNA, 263 bp, Glycine max
  Clone ID: 700960849H1
cacactctctttcttctgctgcaccagcaacaacagagaatgaacagtactgaggaggggatgcaaggcataggcataggcataggctgcttccaaaacgacgtcgtagggcagctggagctgagtcccactatgagcaactcctcctcctcgctatccatggagctggacgagtccccggagagcagaatccaacggttgatatcggagcacccggtcatcatcttcacccgatcctcctgctgcatgtgccacgtcatgaa

SEQ ID NO: 77105 - DNA, 260 bp, Glycine max
  Clone ID: 700960881H1
cagcctcatacagaaacttcaatgccctaacctcttcctccactggccaatcactggacgccacggggctggccaagatccattgggtgcaaaagaattacatgatttacaactattgcactgatattagacgtttcccacaaggcctccctccagaatgttccattgcttgagaatgttcattattcaattcaatgttgcatattattatatatataaaaaaaatggtccccatatacgtgacacgtgtatgcctatta

SEQ ID NO: 77106 - DNA, 261 bp, Glycine max
  Clone ID: 700960909H1
cactatcattaaccaataaccaataaatacattaatcaccatggggaagtactttgctgttgttgctctctttgtctcagctttgtgcttctcctctatcttggctcgtaagacacctgcccttgataaattcttcgttgagggcaagatttactgtgacccttgccacttcgcatttgagtccaggctcagtttccccttggaaggtgttaaggtaagcctgcaatgtctgaggagtgagaatgataccgtgacatatgt

SEQ ID NO: 77107 - DNA, 259 bp, Glycine max
  Clone ID: 700960914H1
caggattcagaggttttaatgactaccctccatttttgaacctctctctttctctctctccgagtctgagcctcgttcttcagactcgctttctctgctcactcagagactgagacacttatcttttctgtcattggtctctgtgtttgcttccaaaagctctacacgataagccaaagattgaaagaccctctctagcctattctctgttttttttccctgtcccagttgctcagatctactaccacccctttctgca

SEQ ID NO: 77108 - DNA, 252 bp, Glycine max
  Clone ID: 700960936H1
ctcctgcaaagcttccaacactggtggacatgccagccaatgtctctggctgcggcgacggtgctgggaaccagagaaaatttgatttcaaattcattcgcatttccctctaaatttcagagattatcgtcccgttatcgctgaacattgaaagccctcatttcatgacctatctcatttctcatcatgacctagctccaggctttgctccacgaaagtgttgttgttcaggtgaggtttatgttgtatcaa

SEQ ID NO: 77109 - DNA, 254 bp, Glycine max
  Clone ID: 700960942H1
gttctcttttttttatcttcttctttctgcctccgaattaccactctcttgctttgctatcttacaggaagaggatcaaaataccccaccataagacaaatccaaaggaacagcaacatcaattatgggaggttcaatggagaagaaggtgttgtgagagaaaaagaagaagaaaacaagtggccttcatggctgcagccacttctcaagacacgtttctttgttcaatgcaaagtccacgcagattcccacaa

SEQ ID NO: 77110 - DNA, 250 bp, Glycine max
  Clone ID: 700960957H1
gtgaaactggggcaggaaagcacgtgccccgtgcgatttttgtagatcttgagcccactgtgattgatgaggttaggactgggacataccgccaactattccatcctgagcagctcattagtggaaaggagatgcagcaaacaactttgcccgtggccactataccattggaaaggagattgttgagctttgcttggaccgcatcagaaagcttgctgacaactgcacaggtctccaaggttttctggtt

SEQ ID NO: 77111 - DNA, 250 bp, Glycine max
  Clone ID: 700960964H1
gtggttctggtgcttcctcatctgttctcgacaaagtagttcatgctgctaatgagaacataggctcacaggaaagctctattgatctagacaaaaagacgtcggaagatggaagtgtgaagaacagttctgtttctgccaaagttagtgatggggccagcagtcttgcaaagacaagtggaagtgccaagatcagcaaccgggctgattttgttgagagtggtaagagcagtatttgcagaggaagcac

SEQ ID NO: 77112 - DNA, 248 bp, Glycine max
  unsure (1)..(248): unsure at all n locations
  Clone ID: 700960965H1
tttcttccaacctctcaagtccaacctacccctttttcttctcccaccaacttcaccgtcnacttcctcgatcatgtctcacttcaagggcaagtaccatgatgagcttattgccaatgnngcttacttggcactcctggaaagggtattcttgctgctgatgagtcaacagggacaattggcaagcgtttggccagcatcagtgtagagaatgttgaatccaacaggcgtgctcttagggagctgct

SEQ ID NO: 77113 - DNA, 248 bp, Glycine max
  Clone ID: 700960972H1
gaagacgaaggacagagcaatgcctcgatggtagcatctgcatcttcaccttcctcggagtgtttcaccctaaatgaggctagattgaaagaacgcaattacctgggattgtcagattgctcttcggtggacagttctattgtcccgagtttgtctgatgagaaaaaggagaatctgaatttgaaggctactgagttgaggcttggacttcctggatcccagtcacctgaaagggatccggatctttt

SEQ ID NO: 77114 - DNA, 243 bp, Glycine max
  Clone ID: 700960994H1
gccaacctcggcgactcgagagctgttcttggcaggagggatacggtgagaaagaacagtccagtggtggcacagcgtttgtcaacagatcataatgtagctgatgaagaggtgagaaaagaattgaagctctccatcctgatgactcgcacattgtggtttataaccgtggagtttggaggattaagggcattatacaggtgtcaagatctatcggtgacgtgtatttgaagaaacctgatt

SEQ ID NO: 77115 - DNA, 272 bp, Glycine max
  Clone ID: 700961009H1
tttggggtttctctcttcaaactagggttttacagaatataagctctctctatctttggttttcgtcattcaaatccaatccaatatcaaatatgagtcgtcatcccgaggttaagtgggctcagagacttgacaaggtctatatcacggtgcaattggctgattcaaaaaatgccaaggtggatcttacaccagatggtatttttaccttctctggtagtgctggtgctgaagaccatcagtatgagctaaaactggagctctttgacaag

SEQ ID NO: 77116 - DNA, 265 bp, Glycine max
  Clone ID: 700961018H1
cgagtttcagactcaaaacggcacgcacaaacgatgtcgtagcatcggggatattttctccctctcggaactagccaacagcaagagcgtggtgaagctctgggacaccataggcttcggcctgggcttggacttcgatgattacgatggttactacgttggtaacgcggcggttccgacgagctccaccgcgtctccctcggtggttgtctcggcgggggaaggcgcgtgcgggaatctggcgctggagatctgggacacgcgg

SEQ ID NO: 77117 - DNA, 264 bp, Glycine max
  Clone ID: 700961027H1
aaggcagaaagcaagctcatcctagagttttaaaaatggcagcagcctcctccatggctctctcttccccatccttggctggcaaggccgtgaagctgggcccatcagcccccgaagtcgggagggtcagcatgaggaagaccgtcaccaagcaggcctcctccggaagcccatggtacggcccagaccgcgtcaagtacttgggcccattctctggcgagcccccgtcctacctcactggcgagttcccaggtgactacggct

SEQ ID NO: 77118 - DNA, 254 bp, Glycine max
  Clone ID: 700961046H1
atcaaagtttcttcctttctctgctctttgccttctctgacacatttggtgccttgtagagcgtgttttggcaggaaggtggtatggcgaaggacgttgaggttgctgagcgtggctccttctctgggaaggactaccaggaccctccaccagcaccactcattgatgctgaggagctcacaaagtggtccttttacagggctctcattgctgaattcattgccactttgctcttcctctacattactgtgctc

SEQ ID NO: 77119 - DNA, 257 bp, Glycine max
  Clone ID: 700961073H1
atcttctcataagctttacttaattagcaaatccaaatatggcactttcttcttcatcatcttcaacatccatatttgctttagctttgttcactcttttgcttataggaagttcttcagctcaactctctgagaacttctatgatagtaaatgtcccaaggttttctatgccgtaaaatccgttcttcaatctgctttggctaaagaacctcgccagggagcatctatcgttcgcctcttctttcatgactgcttt

SEQ ID NO: 77120 - DNA, 250 bp, Glycine max
  Clone ID: 700961082H1
catcttttgtttgttcttcagtactttagtgtgtgatttaattccaagattttgagaatgtctagctgtgggtgtggaagtagctgcaactgtggcagcaactgcggttgcaacaagtactcttttgacttgagctatgttgagaagacaaccacagagactcttgttttgggtgttgggtctgtgaaggcccaattggagggtgctgaaatgggtgttgcagctgagaacggtggctgcaactgtggat

SEQ ID NO: 77121 - DNA, 237 bp, Glycine max
  Clone ID: 700961111H1
ctcgttgaaatgaaaatgggttcttctttgtggactttgtgtctaattttggcttcactagcctcttctgcattctgtgcctttccacggaggccagtggatgttccattcggcagaaactacgttcccacttgggcttttgatcacatcaaatacttcaatggaggttctgagattcaacttcatcttgacaagtacactggtactggcttccagtccaaagggtcatacttgttt

SEQ ID NO: 77122 - DNA, 239 bp, Glycine max
  Clone ID: 700961115H1
ctcatgaatgttcatcagcaagggccagttcatctagtcagtctgacaactcttgtatcgagtgtcctgtttgtcggaggtttatctgtgtggactgtaaggttccttggcattcttctatgagttgtttagaataccagaacctgccagagaaggagagggatgtttctgacattaccttgcatcgtcttgctcagaataaaaggtggaagcgctgtcagcagtgtcgtagaatgatt

SEQ ID NO: 77123 - DNA, 243 bp, Glycine max
  Clone ID: 700961116H1
gtaatgtagtgcttaatgtagcttgactgttaaatggggatttgagtaggctttatttggcattcagatagttatgaaatctgaattgacttcagtttcttgctaaccttggtgagaagcagactttgtagctggatctgaatggtgcactatgaatcgaccatgtactttaactgttttaacattttctagccagttgttaggtttctagtgtttctgtaatcacagggcagcgttattcaa

SEQ ID NO: 77124 - DNA, 269 bp, Glycine max
  Clone ID: 700961204H1
ctatttttcaagtaacttaaggtttcaaacctaggaagttggaagtcatggcagcaacattgatggcagcaacaacaagttctggtactcttaaagcaactcctttccttggccaaggcaagggtgccaatgccaatgctcttagggatgttgtctccatgggaactgggaagtacaccatgggcaatgatttgtggtatggaccagacagagtgaaatacttgggacccttctcagctcagaccccttcatacttgaaaggagaattc

SEQ ID NO: 77125 - DNA, 265 bp, Glycine max
  Clone ID: 700961212H1
aaatgattgagtctggctttcagcctactatttttgttctgacatcgcttgtccagtgctatgggaaggttggacgtactgatgatgttttgaagacatttaatcaactcttggatttgggcatcagtccagacgaccgtttctgtggttgtcttctgaatgttatgacccaaacaccaaaagaagagcttggtaagctaaatgattgtgtggagaaggctaatccaaagcttgggtctgtgctaagatatttggtggaagggct

SEQ ID NO: 77126 - DNA, 265 bp, Glycine max
  Clone ID: 700961213H1
aaagaaagaggtgaagtcaaatggtccttagttctgggagtgttgatgcttgagtcttgacggaacgaacggaaaaggggatctcaatggacaacaccaagccccttatcgaactggaactcgacgatgatggcagaatcagaagaaccgggaatgtgtggactgctagcatacacattataacagtggttgtaggggcaggggtgctgtctttggcatgggttatggcacaactaggatggttagctggcatagccagtatcat

SEQ ID NO: 77127 - DNA, 264 bp, Glycine max
  Clone ID: 700961241H1
gtttgaatgatccctaccaattcttgcagcactttcggaaatgatcttgaacccacaagcaactggctagaagtgattttcagtatatgcatagtactcagtggactattgcttttcacattattgattggtaacattcaggtattcttacatgcagtcatggcaaagaagagaaagatgcagctgagatgtcgtgacatggaatggtggatgaggaggaggcagttgccatcgcgattaagacaaagagttcgccattttgaa

SEQ ID NO: 77128 - DNA, 263 bp, Glycine max
  unsure (1)..(263): unsure at all n locations
  Clone ID: 700961244H1
agcgagcgncgtctntgncgaccgcgtctnccttcgnattcgcntccgccgcggactnctctgtcatgganntctgccgcggatcggcgattcagctgctgaatttcgccgacgncntcncgatcgggagccggtcgccgnaaaggctgttccgaancctcgacgtgttcgagacgctgcgtgacctatttccggagttcgaggctctgtttgctgatcagtttagtgtgtcgctcaggaatgaagcgattacgatttncaag

SEQ ID NO: 77129 - DNA, 262 bp, Glycine max
  Clone ID: 700961249H1
aatcaattaactgaatgcttagagagagaaagaggagaaggagtagtgataaggtgatcatagagcatattataagagagtgaaaactaatggaggttggcctcaagaaggagaacatggggtttgaggaaactgagttaaggcttggactgcctggaaacggaggcactgaagaagtgctcatcaggaagaggggtttctctgagactgaaactggtcatgaagatgagtctgccaccactgtggatttgatgcttaatct

SEQ ID NO: 77130 - DNA, 268 bp, Glycine max
  Clone ID: 700961265H1
cttatagcttcatcccaaaaagctcttttccttctaaatttgattccttagttcagcattctattattatatatggcttcttcaccttcctcagaaaacaaaaacctagagggagtagctggtggtgccggagagaaacccattccacttggtgagaacgttctgcagaagcatgctgcattctttgacttgaataaagatggtgtcatctacccatgggagacttttaaagggttgcgtgaaatcgggactggggttttgctgtccg

SEQ ID NO: 77131 - DNA, 262 bp, Glycine max
  unsure (1)..(262): unsure at all n locations
  Clone ID: 700961280H1
attaaaacggtaaaacgaacacaccctngttacttggacgtggaaattcacgttcgcgctncctttttatcttggcattgcgtttgtgtgtgtgtgcaatatcacacaacccaaccttattcgttcttctgttgttctgaggcgagccatgacggacggncatctcttcaacaacatcaccctcggtggccgtggaggcaccaatccagggcagataaaaatatatcctggaggaattgtatggaagagacagggtggtggt

SEQ ID NO: 77132 - DNA, 259 bp, Glycine max
  Clone ID: 700961295H1
ggttacttcagcttccacatatcttgaagaattgatcaatgggcaagtctgtagttgagaagctactttggatggcaattgtgtgcttggtgctgggtgtaatttccattactcccaaggcccaagcagcagtgacatgcaaccaggtggtgagcaacctcaccccatgcatttcttatgtgctcaatggtggcaaaaccgtgcctggcccttgctgcaatgggatcaagaccctctttaacctcgctcactccacacc

SEQ ID NO: 77133 - DNA, 243 bp, Glycine max
  Clone ID: 700961304H1
cttgtctcacgatctcaacggagcacctctcttcaggtcgccatctagactgcaatcatggctgatggaccacagcatccatcagttgttcagaagctagctggacagtcttacctggtgtccaggctaagccccaactttaactctgggaattattcctcgactggttcttacttcaatggaggactgcactcttctgggttggctgttgtgtcgcctggatctccagttactgtgcatgct

SEQ ID NO: 77134 - DNA, 249 bp, Glycine max
  Clone ID: 700961316H1
cacaatgaatgcattaaaaaacttaggtctcaatgttgttaaggcaaatgtctttctggattcatctggcaagcacaacaagttctccatcacaaaagctgatactggcagaaaagtggaagagccagagttgttagaggcaattcgtttaacaattataaataatcttattcagtaccacccggaatcaagttcccagttagcattgggagcagcttttggacttctgcctccaaaagagcaggttga

SEQ ID NO: 77135 - DNA, 243 bp, Glycine max
  Clone ID: 700961319H1
ttacaatatagtatatattattactgctccatattgctgaaccatccttctagaattccaatgaaatgtatattatccaattaatcccaaagggtttaagcataaagcaatcattacgtgattccttttacttttaacatcatttcattttttggttcagctgtacattgtaacatttctagatattgttagagttgccccttgccactttataaatagtgaaatactatcaaactgactttt

SEQ ID NO: 77136 - DNA, 72 bp, Glycine max
  Clone ID: 700961352H1
caagaaccaggttgtttgagtgttttttattatcaatgttatctgatcaataacactatgcttggatttgtc

SEQ ID NO: 77137 - DNA, 78 bp, Glycine max
  unsure (1)..(78): unsure at all n locations
  Clone ID: 700961355H1
aanggttgncannctccatgtgttagcctgtagcctttgctccttncgtcgtgnggtgttatnganggacagtgagna

SEQ ID NO: 77138 - DNA, 241 bp, Glycine max
  Clone ID: 700961356H1
ctttaatccctcgcctatatcttcagaaaattagatctgcttcagatctagggtttcccttttccaaatcacgagtccgttgagtttgattttgtggatgaaagcatagggatagggcttttgcaaacctctccaatgtttctcgaaattatatgaccatgcgtcgaattcgtatgctgcactccttctccgtcgtgttcctctactggttctacgttttctcatgaactccctctcaaat

SEQ ID NO: 77139 - DNA, 84 bp, Glycine max
  unsure (1)..(84): unsure at all n locations
  Clone ID: 700961366H1
gcttgtaatacgaanacaaagcntccatgggaagaatgggtggnggaaanggccacnttggtncttccttgntngagggnagna

SEQ ID NO: 77140 - DNA, 236 bp, Glycine max
  Clone ID: 700961381H1
tctcacacaaaataatggacaagaagcttggcaacacgtctcatgatcctgaagtgagaaaggggccatggacaatggaagaagacttaatcttgatcacctatattgccaatcacggggaaggggtttggaactctttggccaaggctgctggacttaaacgtaccggaaagagttgccggctccggtggctaaactacctccgtcctgatgttagaagagggaatattacaccc

SEQ ID NO: 77141 - DNA, 234 bp, Glycine max
  Clone ID: 700961382H1
attggggtggcctgatatgcgtttgccaatcctctatacattatcatggcctgacaggatttattgttctgaagtcacttggccacgccttgatctttgcaagcttggttcacttacatttaaaactccagataatgtaaagtatccatccatgaatcttgcattttctgctggccgtgctggaggcacaatgacaggagttcttagtgcagcaaatgaaaaagctgtagagat

SEQ ID NO: 77142 - DNA, 232 bp, Glycine max
  Clone ID: 700961392H1
cctggcttggcctccccaacttacctcaatggcactcttcctggtgacaatggatttgaccctctgggactagctgaggacccagagaacttgaggtggtacgttcaagccgagcttgtgaatggacgttgggccatgttgggtgttgcaggaatgctacttcctgaggttttcaccaagattggaatcatcaatgcccctcaatggtatgatgctgggaaatcggagtact

SEQ ID NO: 77143 - DNA, 257 bp, Glycine max
  Clone ID: 700961403H1
gcgaaaaaaggtggcgaattagtttttggtggtgttgacccaaagcacttcaaaggaaaccacacttatgttccaattactgaaaaaggttactggcagattgaaataggagattttttcattggaggtgtttcaactggtgtttgtgagggtggctgtgctgctattgtggattcaggaacatctttgcttgctggtccaactcctgttgtggctgaaatcaaccatgctattggagctgaaggagttctcagtgt

SEQ ID NO: 77144 - DNA, 258 bp, Glycine max
  Clone ID: 700961404H1
agatacccaaagtagaaatatgggcaagtcaaacaaaaagaagcatccaactaaaaagaaaaaggtgaactctgaagcagaagtgataacagttggggcattagacaacttgcaacaaatggacaaattcagcacaagagcagtaacccttgaaggttattatggcacacagcagagcgtgcaagggatgttgaacttgatgggaccaacacgtgatgattactacgggaatcaacagacacttcaggggctgggacc

SEQ ID NO: 77145 - DNA, 258 bp, Glycine max
  Clone ID: 700961406H1
tgaagatgatattggacttttacctctccctccagatgtcagcaactacttgatgtctgaggatgtaccgaatggtaatgctaatgcccccatcagtgaaggaatcaatggtgcagaagtggaacgaaggttaagccaacctgatgataaattttcggttgatttagtcacccgacccatgacaaacagtgttgaattcagacatgaaacctctcagccaactgctggtattatttcaaatgtcactggccctgcatc

SEQ ID NO: 77146 - DNA, 256 bp, Glycine max
  Clone ID: 700961410H1
gattgtttgttgttgtaactcgttcttcttcttttgttgttctgtgtttgtgtttgttttttctctcacctgaaaatgtcttgctgcggtggtaactgtggttgcggaagctcctgcaagtgcggcaacggctgcggaggctgcaagatgtacccagacttgagctacactgagtcaaccaccaccgagaccttggtcatgggagtggcacctgttaaggctcaatttgagggtgctgaaatgggtgtgcccgctg

SEQ ID NO: 77147 - DNA, 252 bp, Glycine max
  Clone ID: 700961448H1
cagaacagggactcactctggcagcggcactctcggtggctataatctttctgtggtgagttgtcaagatgtacacatcaaggaagaaaatccacaaggataaggatgctgagccaactgaatttgaggaatcagtcggacaggcattgtttgatctggaaaataccaacaatgagctgaaaagtgatctgaaagatttatacataaactcagctgtccaaattgatgtttctgggaaccgcaaggctgtgg

SEQ ID NO: 77148 - DNA, 247 bp, Glycine max
  Clone ID: 700961479H1
ttcaactcttttccattttattattcttccaaaactggaccttactttacccgaatctaaatcccaacccgaaccaaccatgttcggaccaacccaaaccgcttcccaacctccgaaatccactctcaaattcctctgcagctacggcggcaaaattctcccccgctaccccgacggcaagctccgttacctcggcggccatacccgcgtcctcgccgtcgatcgctccattccattctccgagcta

SEQ ID NO: 77149 - DNA, 245 bp, Glycine max
  Clone ID: 700961491H1
caatttaaacacagaaacaaaatcaccaccttcaaagtcttctctctcgagaatcatcgaataaaactagggtttccgatcgtcgtcgaggagaatgccgaagaacaagggaaagggaggaaagaaccggaagcgcgggaagaacgaggcggacgacgagaagcgggagcttgtgttcaaggaggacggccaggagtacgcgcaggtgctccggatgctggggaacggccgctgcgaggcgatgt

SEQ ID NO: 77150 - DNA, 249 bp, Glycine max
  Clone ID: 700961509H1
gaacataccaatctacaataaacgatgattctcattatctccctcattttttctcttctctctttctcccatgcttctgtcctagatttctgtgttgcagattatgcaggtcctattggacctgcaggatattcctgcaagaagccttcaaaggtcacagcagatgattttgcttacagtggccttggcattgctggtaacacctcaaacattatcaaagctgcagtgacccctgcatttgatgctcag

SEQ ID NO: 77151 - DNA, 247 bp, Glycine max
  Clone ID: 700961518H1
cttctgtctctagaattattcctggacaaagaactgctgttttccaacgttacttgcgtcctgagaaggactatttgtctttttcacttatttacagtaacggaaagcgatcgcttgatttgatttgcagagataaagttgaggcagaagtgtggattgctggcctcaaagcactgatagcttctggtcaaggtggtcggtccaaaattgatggatggagtgatgggggtctcattcttaatgatag

SEQ ID NO: 77152 - DNA, 244 bp, Glycine max
  Clone ID: 700961521H1
ctcccctttgccgctgttgttgttgctgcaccaccgaacaacttcccctgtaaatcgcgtttcgtttgtgcaaggttttaaaagatggctgatgctgaggacattcaacctcttgttgttgataatggaactggaatggtcaaggctggttttgcaggtgatgatgctcctagggccgtgttccccagcattattgggagaccacgccatactggtgtaatggttgggatgggtcagaaggatg

SEQ ID NO: 77153 - DNA, 117 bp, Glycine max
  Clone ID: 700961540H1
ggttaggcccaaatatgcagtttttctcccccttgtgaagatgtatacatgtgctggaaaactcagtgtaacccggaaatgtagattatgtctaatgtctaatatttcattctagtt

SEQ ID NO: 77154 - DNA, 240 bp, Glycine max
  Clone ID: 700961546H1
gtcgttgtgaaaacactgcaacgttgggtgagagaaaaaatgttaaccttcctggtgttgtggtggatctacccacacttactgagaaggataaggaagacattcttggatggggtgtacccaacaagattgacatgattgctctttcatttgttcgtaaaggctcggatcttgttaatgtccgcaaggttctggggccacatgcaaagaatattcagttgatgtcaaaggttgagaatc

SEQ ID NO: 77155 - DNA, 241 bp, Glycine max
  Clone ID: 700961554H1
ctgaaagaaggaatttgtactagtatggtgcaactgcaagcagtagtgagtgatgaagatgaaaagtggtttccatttaattgaagtggtagtatgctagccaggtagcatttacatatttgctttggtgtgtggcactgcaaattaagagcaaacaaagtcttggtctttgtggctgtgaagaagggaagggatgctttgcttgatgcttggaaaaacaaaaacaaaaaggcatgaggat

SEQ ID NO: 77156 - DNA, 237 bp, Glycine max
  Clone ID: 700961563H1
atcatcagtgctgtattgaccagtcgagcaatattccaaaggatgaagaattacacaatctatgcagtttccatcacaatccgtattgtgcttggtttcatgttactggccctcatatggcaatttgattttccaccattcatggtgctgattattgctattcttaatgatggtaccattatgacaatatcaaaggacagggtaaaaccatctccatatccagatagctggaagttg

SEQ ID NO: 77157 - DNA, 241 bp, Glycine max
  Clone ID: 700961565H1
gaaccagtttggaatatatttttattccttctttgtttcttcactttcttccatacacataaccatgtcttctcagaccgttgtcctcaaagttggtatgtcatgtcaagggtgtgctggagctgtaaacagggttttggaaaaaatggaaggtgttgagtcatttgacattgatctgaaggagcagaaggtgacagtgaaaggaaatgtgcagccggacgaagttctgcaagccgtttcc

SEQ ID NO: 77158 - DNA, 238 bp, Glycine max
  Clone ID: 700961571H1
caacatcatccgggatgtaaacggaattgccactttccagagaacgaaaggaacaaggaaatattgaatctgtacgttgccttttaattctggtggctggtgatcatgttaaattacatttgtcctttctattagcataatttggtttgtaaattcttttaagtgccatttttatttcaagggaaatcttaagggcagcaatagttgaattattccagggcaacaaggctatggtgta

SEQ ID NO: 77159 - DNA, 240 bp, Glycine max
  Clone ID: 700961572H1
gtgatttcagtgagtgatcggtgttcacttgatctcatcataatcgtcagcgtcaattgaagaagatgccgatcagaaacatcgccgtcggaaggcctgaagaggcgactcaccccgacacgttgaaggcggctttggctgagttcatctcaaccttcatcttcgtgttcgccggctcaggctccggcatcgcctacaacaagctcaccgacaacggcgctgccacccctgccggcctca

SEQ ID NO: 77160 - DNA, 237 bp, Glycine max
  Clone ID: 700961578H1
atcaaaacttttatcatgtgactcatcgatggatttatctcttccacattccaatcagaggtttagcactggagcatcaattaactcacccactaatcaaaacatcagttctcaccctcgtggatactttcagcattccgaacaaattggttcagagttctcaacagttccccttacatcatcagatagtaaaactactagttcaagacttcctagatactaaatatacattttttt

SEQ ID NO: 77161 - DNA, 237 bp, Glycine max
  Clone ID: 700961586H1
aaaagcttaacaggaactgcacgttatgcaagttgcaacactcacatgggaattgagcaaagttgtcgtgatgatttggagtctcttggctatgttcttatgtactttttaagaggaagccttccttggcagggtttgaaagctgctaccaaaaaggaaaaatatgacaatatttgtgagaagaaattatcaactaccattgagatgctttgcaagtcgtatcctgcggagtttgct

SEQ ID NO: 77162 - DNA, 210 bp, Glycine max
  Clone ID: 700961625H1
ccatcttcgagatttttcgttgcccttattgttgggctctgaaggtaagtttcacatttttcctgttgtaacgctgttttagttgttaaaaactactttcaatgctcaaccttgtcgtagtaccagcagcagccttaagtctttgaaacgaggatgtattaaaatgatgccccaacagatttgcggaagttgcgaagataatttctttct

SEQ ID NO: 77163 - DNA, 273 bp, Glycine max
  Clone ID: 700961630H1
ctgtcatcgaccatatcactttggtcaccttcagatacattcgtcgcattcatccatttaacttccacaaattcctacaaattctaaccaaacccttcactactccaaatcccacaacttctctcttttttttccctccttcttttccctttttctgttgtccgatcttctgcctcctagatcttggtatttgggattgatcacctggagttggaaatggttaaaagttatggagtgttctgatttgcgaaagatatcatgttgcagtgctta

SEQ ID NO: 77164 - DNA, 269 bp, Glycine max
  Clone ID: 700961639H1
gcaaataaagcacagaacagttgaagtgaatggcataaaaatgcatgttgcagagaaaggagagggtccagtggtgttgttcctccacggcttccctgagctctggtactcatggcgccatcagattctctctctcagctccctcggctaccgcgccgtcgctcccgatctccgtggctacggtgacaccgaagcaccaccttcaatcagcagctacaactgcttccacatagtgggtgatctcgttgcgcttattgactctctgggtg

SEQ ID NO: 77165 - DNA, 267 bp, Glycine max
  Clone ID: 700961659H1
ggattttaatagccacactctaactggtgtggggttttttaaccccccggctagggaaaacagcgtgaaaaagttgcagcaagagataaaacttgaataagttcatatatttgaagtccgatcaagcatcaattctcatattgctgtttgtgatcttttttcattttcattttttccaccttttcttctttttattacagtttatgctgtatttgtacccctatcaaggcacatgtatcttaattatgctgtttgttatcctgtcta

SEQ ID NO: 77166 - DNA, 266 bp, Glycine max
  Clone ID: 700961665H1
gtgtgagagcaaaatcaaaatgtgggcaagcgcagaaggtggtgctccggaggttactctggaaacttccatgggttctttcaccgttgagctgtactacaagcatgcgccgaggacttgtaggaacttcattgaactgtctcgccgaggttactacgacaacgttaaattccacaggatcatcaaggacttcatagtacaaggtggggatcccactggaacaggaaggggaggagaatccatatatggtgcaaagtttgaagatg

SEQ ID NO: 77167 - DNA, 257 bp, Glycine max
  Clone ID: 700961704H1
aaaatgcccactttttttcttccaacgctcctcctccttctcatagccttcgccacctctgtctccggccgccgtgacctcgtcggagactttctccggctgccctccgaaactgataacgacgacaacttcaagggcacccggtgggccgtcctcctcgccggttccaatggttactggaattacagacatcaggctgatgtttgtcacgcctatcaaatattgaggaaaggtggtctgaaagaagaaaatattat

SEQ ID NO: 77168 - DNA, 250 bp, Glycine max
  Clone ID: 700961714H1
attcattcaagattcagcaagtgcgttttggaagcagagaccgaaatacttcgagatggcccgtacaaagcaaactgctcgtaagtcaactggaggaaaagctcccaggaagcagcttgcaaccaaggctgcacgtaagtctgcaccaacaactggtggtgtgaagaagcctcatcgttatcgccctggaactgttgctcttcgtgagattaggaaataccagaagagcactgagctcctaatcaggaag

SEQ ID NO: 77169 - DNA, 246 bp, Glycine max
  Clone ID: 700961770H1
atccgcaacggaggcagagattgagcgtatgatatgagagagaagacggaacaaaatcaagggcggagaatgccccatggctgacatcatgtcggttaacactttattcagacaacactatactcattaatcaaaatcaaatgacctaaccactctctctttttcccaattttcgaatctctctcctccatggacccaacttcgatccctccccctccggccaccaccgtccccttcactgtcgaa

SEQ ID NO: 77170 - DNA, 240 bp, Glycine max
  Clone ID: 700961778H1
tgaaaacgtgaagaagagtcaatatgctgtcagaggtgaattataccttcgagcttctgaacttcagaaagagggcaaaaagattatctttactaatgttggcaacccgcatgcattgggacagaaaccactgagcttccctcgccaggttgttgctttgtgccaagctccattcctacttgatgatcctaatgttggactgctattccctgctgatgcaattgcaagagctaaacacta

SEQ ID NO: 77171 - DNA, 243 bp, Glycine max
  Clone ID: 700961785H1
gtgtagactgtcgagcagtgaataccagttgctcctatagccggcgctcaacaacatggcggacaaggcagtcaccatccgaaccagaaagttcatgacgaacaggcttctctccagaaagcaattcatcgttgatgtccttcatccagggagggctaatgtttccaaggctgaactgaaggagaaattgggcagaatgtatgacgtgaaagacactaacactgtatttgtcttcaagtttcg

SEQ ID NO: 77172 - DNA, 238 bp, Glycine max
  unsure (1)..(238): unsure at all n locations
  Clone ID: 700961790H1
gccagttcgtggaggccgtggaggtggacgaggtgggggacgtggatttggacgtggtcgtgggtttagtcgtgactcctcgantgatgagaactcattccctaccagcagagctccttataatcagggtccttttgaagaaggagatgctgggaagtcttctgaaagacgcagttatggtggaccacgagttccttaccgtggtggtcgtcgtggaggtttcagcaatggtgaaatg

SEQ ID NO: 77173 - DNA, 250 bp, Glycine max
  Clone ID: 700961802H1
gacaaaatgaagagttttttgttgtggcgtgtggccattgtggaaaaaaatagaccctatgttgcaatgttgttcattcagtttgtgtatgctggaatggccttgctttccaaggctgcaatttccaagggaatgagcccttatgtgtttgttgtttatagacaagcctttgcatcagttgctctatctccatttgctttctttgacagcaagcaaccagctcctttgtcatgcaacttgttgtgcaaat

SEQ ID NO: 77174 - DNA, 244 bp, Glycine max
  Clone ID: 700961805H1
cagctatttttctaaagctgtaaaattttatttttgattttttgagatcttagagatgttttttgagggaaaagtcaaaccataaagctatggattttattttcttgttagctaatcaggtgccatgtttctccgaaggtgtcccattaggggtccaatgtttttgtatttcattagtctcaatttacttatttttgttgacatagtaattgtttaacttgtcagttcataaataacattatcg

SEQ ID NO: 77175 - DNA, 242 bp, Glycine max
  Clone ID: 700961812H1
ctcttggcatcttgtgttgtgtccctcttttaagctatttccttctcttaacacaattggttgtgccaattgccatagtcaccaaccaattaacaaaggtatatatatcatcatatcatcaccaaatgaaaaatattgggttgttttttcttgtggtggtggctacttttgtggtggcagccacagctggtagcttttaccaagactttgaaataacgtggggtggtgagcgtgccaaaatc

SEQ ID NO: 77176 - DNA, 243 bp, Glycine max
  Clone ID: 700961813H1
gagatttcattccccatcaaatctcttccttctctctcctcatttccaaagttcccaactttcctaacccgagctgcaaggaatgccgctgatattagcgaaaagcgattcgatccagattcgcgaggtgtggaacgataacctggaagaggagttcgcgttgattcgcgaaattgtggacaactacccttacatcgccatggacacggagtttccggggatcgttctccgaccagtggggaa

SEQ ID NO: 77177 - DNA, 250 bp, Glycine max
  Clone ID: 700961817H1
aaggacttgaaaatgtgattgcaagacacagtcgtttaggcaaagcaaccagacttgctgtagaggcatggggtttgaagaattgcacccaaaaggaagagtggtacagtgacactgtgactgctgttcttgttcctgcttacattgatagtactgaaatagttagaagggcatggaagagatacaatttgagcttaggtcttggactgaacaaagttgctgggaaggttttcagaattggacatcttgg

SEQ ID NO: 77178 - DNA, 232 bp, Glycine max
  Clone ID: 700961891H1
catctcctgagatgctatgctgtttttgccctgctccttttaggcagttccttgagattgtagtaaacatgaagtttgatgaagaacctaactattccaggctaatatctttgtttgatggtatgcttggaccgaatcctgcattgaggccaattaacactgaaggtgctcaaaaggttgggcagaagaggggtagattgaatattgaggaagaggatgattcacagcccaa

SEQ ID NO: 77179 - DNA, 264 bp, Glycine max
  Clone ID: 700961901H1
gtttgggtcttttaacacgcaaaacgacgccgttgagaatgggaataatgctgaaacgccgttgatggaatcggccaaggtttcgattcttgactccggcgcctcgatgttctccggcatggaggtggctgcgcggacgactctgccggtgcggggacgtgctgccgtgaagttccggtggggagttaggattccggcggagttcaaggggaacaacgcgtttcagaagattccgtttctcgtaatggataagatcggcgtgga

SEQ ID NO: 77180 - DNA, 254 bp, Glycine max
  Clone ID: 700961910H1
gccgccgcagagttcctcgcatttgaatgaagagaagaagaaaccgaggcccaaggatgttttcgggcggcctcttccgactgaggaggaattcgaagttcttaaaaatgcgcctaggctggaaacaggagctcctgccagggtgaaaccttttggaattgaagtccgtaatgtaaaatgcttaagatgtgggaactatggtcaccaaagtggtgatcgtgagtgtcccttgaaggatgctataatgcctaatg

SEQ ID NO: 77181 - DNA, 258 bp, Glycine max
  Clone ID: 700961918H1
gaggatatagaagaaggagtagaaggtactggatttgatgatgagaaatcactacttatgtcacaaatgagtcttgagaaaaggtttggtcagtccgctgtctttgttgcctctacgcttatggagaatggtggtgttcctcaatctgctactccagaaactcttcttaaggaggctattcatgttatcagctgtggttacgaggataaaactgattggggaagtgagataggatggatttatggttctgtcacagaa

SEQ ID NO: 77182 - DNA, 252 bp, Glycine max
  Clone ID: 700961928H1
ttctccatttccattttctctctcacttttcaagaatcgtaagctatgggaaagtcttacccaactgtgagtgctgattaccagaaggccgttgagaaggcgaagaagaagctcagaggcttcatcgctgagaagagatgcgctcctctaatgctccgtttggcatggcactctgctggaacctttgacaagggcacgaagaccggtggacccttcggaaccatcaagcaccctgccgaactggctcacagc

SEQ ID NO: 77183 - DNA, 259 bp, Glycine max
  Clone ID: 700961933H1
aaaggcttaaaaatgagcaagtctttgggtaatgttgtggatccacgtttagtgattgaaggaagtaaaaatcaaagggaatcacctgcatatggagctgatgtcctccgactctgggtttctagtgtagattatacaagtgatgtgatgattggcccacagattcttcggcaaatgtctgaggtttacagaaagttgcgaggaactttgagatacctcttggcaaatcttcatgattggaaaacagaatacactgttc

SEQ ID NO: 77184 - DNA, 241 bp, Glycine max
  Clone ID: 700962010H1
ttttctctctcgatacaaaaatacatagaaatggcctcttctcttgcatcctcatcaactgttctctggatcctttttctaaccattgcaactcttcatttgagttcagccaggaagttgtccgggtcagacccgcagttgcagtttcaataccacagaggccctctcctcaaaggcaaaatctcagtaaacctcatttggtacggtaaattcaaaccttctcaaaaagccatcgttgctg

SEQ ID NO: 77185 - DNA, 236 bp, Glycine max
  Clone ID: 700962012H1
caattgttgaaaatattcttaaatatccatactttgaaaatagacaatttagttcttgatagatttatgagacctattctgtatgttaatcttgggtatcatgttatcatcattatttttattattttacatgaatcttgggttgtagcatttgcgatcattggtttgttattggtgaatttacgtaaatgttggctgatggttgctgcatctcttttgatcttttttgtttttgg

SEQ ID NO: 77186 - DNA, 235 bp, Glycine max
  Clone ID: 700962014H1
cttggaggcttcatccttccaaaacgtgaaattcctgattggtgggtgtgggcttactgggtgtcaccattgacatacggctttaatgccttgtctgtgaatgaaatgttagctccaaggtggatgcatccacagacttcttctgataaaaataccacattgggtctatcagtactaaggaactttgatgtttatgctaaaaaagattggtactggattggagctgctgctcttc

SEQ ID NO: 77187 - DNA, 235 bp, Glycine max
  Clone ID: 700962015H1
ttcgaatagattatcctaagtctttgggaatagtgctgcaatggcttcaagtcaggaggaggtgacccttttgggagctactggaagcccatttgtgtgcagggttcatattgccctcaagttgaagggagttcaatacaaatatgtcgaagaaaatttgaggaacaagagtgaactgcttctcaaatccaacccagttcacaagaaggttccagtgtttattcacaatgagaag

SEQ ID NO: 77188 - DNA, 233 bp, Glycine max
  Clone ID: 700962031H1
ccccatacacctacaatctaagaaacacaggccctgatgatgtttacattaaagttcactactgtggaatttgccattctgatctccaccagattaaaaatgatcttggcatgtccaactatcccatggtcccaggacatgaagtggttggtgaggtactggaggtgggatcaaacgttagcaggttcagagtgggagagttggtgggagttggactcctcgtaggttgctgc

SEQ ID NO: 77189 - DNA, 232 bp, Glycine max
  Clone ID: 700962045H1
gcttcatcttgataaatacacaggtactggcttccaatcaaaagggtcctacttgtttggtcacttcagcatgtacataaaattggttgctggtgattcagctggcacagtcactgctttctatttatcatccacaaactcagaacatgatgaaatagactttgagttcttgggaaacagaaccgggcaaccttatattttgcaaacaaatgtgttcaccggtggcaagggt

SEQ ID NO: 77190 - DNA, 231 bp, Glycine max
  Clone ID: 700962046H1
aattagttcattctctttgcgcagttccctacctctcctttcaagatgcagatcttcgtcaagaccctcaccggaaagaccatcacccttgaggtggaaagctctgacaccatcgacaacgtcaaggccaagatccaggacaaggaaggaattcccccggatcagcaacgtctcatcttcgccggaaagcagctcgaggacggccgtaccctcgccgactacaacatccag

SEQ ID NO: 77191 - DNA, 235 bp, Glycine max
  Clone ID: 700962057H1
cagatttcaaagcagctgtagcaagggctggccatcctgaatgggaactgccagatgacgcaggcaagtacaatgatgtcccagaatctactggattcttcaaatcaaatggcacgtatgtcactgagaaagggaagttcttcttgacctggtattctaacaaattgctgaatcatggtgatcaaatactagatgaagccaacaaagctttcctgggctgtaaagtcaaattagc

SEQ ID NO: 77192 - DNA, 232 bp, Glycine max
  Clone ID: 700962058H1
ctatgcttcccagattactgccaaacccaggcttcttgagcctgtctacctggttgaaatacaggctcctgaacaagctcttggtggaatctacagtgttcttaaccagaagcgtggacacgtgttcgaggaaatgcagaggccaggtaccccactatacaacatcaaggcatacctccctgtcatcgagtcctttggtttctcgagcacattgagggctgcaacatcaggc

SEQ ID NO: 77193 - DNA, 229 bp, Glycine max
  Clone ID: 700962060H1
gagatgttgactgcctccaatcttattcctggtgctgtctattggaccattcggagtattgtgtcctgtgcatcgcatattttaggcataactggcttgggtcaaggatatatgacatcaacaacagagacttgggagctttccagtttggcccataagcttgataacataaatagtcaccttcgaaagcaactcaccgtttgtcgtcagcatttagatgataacagac

SEQ ID NO: 77194 - DNA, 230 bp, Glycine max
  Clone ID: 700962061H1
agaaagtcttttgcttttgattctgatgcccctggtgctggcatgactgagaaaagaaaagtcttcgagatggctctgagcacagcagatgccacattccaaaatcttgattcatcagaaatttccctcactgacgtcagtcattactttgactcagacccgactaatctggtacaaaatctaaggaaagatgggaagaagcctagtgcatacattgctgatacaaccac

SEQ ID NO: 77195 - DNA, 229 bp, Glycine max
  Clone ID: 700962063H1
gaagcactgagcagttgaggaaatgggaacccttgggagagcgatctacagcgttggtaactggattcgagaaactggacaggccattgatcgtctcggttcccgtcttcagggcggttactacttccaagagcagctctctaggcatcgaactctgatgaacatatttgataaggctcctgttgttgataaggatgtatttgttgcgccaagcgcctccgtcattgga

SEQ ID NO: 77196 - DNA, 229 bp, Glycine max
  Clone ID: 700962064H1
aaaggagttgaaaccatcgcttattccacgatcgcctcttactcagctgaactaatggcggtggttgggtcctctgttcttgagtcaaatttgtatttctattgtaacatcacattgcctttgttacccattaaattgttggaagaatgcatcatcatccgcagatagattattgtatttgatatttagagcaaagtactcatgtaaatcccaccttgggatgaagtat

SEQ ID NO: 77197 - DNA, 234 bp, Glycine max
  Clone ID: 700962073H1
gggaagaggaaccctagctagggtttggaagaagctgatccgagaagatggtgcagcgtctcacctaccgcaaacgccacagctatgctaccaaatccaaccagcacagagtcgtcaagactcccggtggcaagcttgtttatcagaccacgaagaagagggccagcggacccaagtgccctgtcactggaaagaggattcaagggattccacatttaaggccagcagagtata

SEQ ID NO: 77198 - DNA, 227 bp, Glycine max
  Clone ID: 700962077H1
atttaatgagtttgtgaattccctgctttctgattctaaggatttctggcctacaatatgatgatttagtgaaggttgactgtaatttgtatgagatccaaattgagaagtatcttgtggaaggactaaatacttgcttaatggttcataagggtcaattgttggtatctctggagaccctagtgttccatttgtgtactggatttctgtgggtttatctgcactat

SEQ ID NO: 77199 - DNA, 227 bp, Glycine max
  Clone ID: 700962079H1
ctctttttgaaaacactttagtttcgcaaagttgattctttctctctttatctttctttccccaatttgtgagtgttactgttgaatcgattggattggcattaggttgatctgaaatacgcaattgacatggcgagcgcgatggtagaggacgcgaacttcgaagatgaccaactagccaatatgaccaccgacgacatcgtcagagcttctcgtcttctcgacaa

SEQ ID NO: 77200 - DNA, 242 bp, Glycine max
  unsure (1)..(242): unsure at all n locations
  Clone ID: 700962082H1
gaaccgtcgagctcgctggaagaccaagacgctggagaaggattacgaggctctgcatgcaagttttnagaatcttaagtccaactatgacagcctcctcaaggagaaagacaacttaaaagctgaggtggcgagcctcaatgagaaggtgcttgcaagagggaaacaagaggggcacatgaagcagcaggctgaaagtgaagaagaaacaaaaagattattgcatttgcaggaacaggaac

SEQ ID NO: 77201 - DNA, 233 bp, Glycine max
  Clone ID: 700962088H1
cacactctctttcttctgctgcaccagcaacaacagagaatgaacagtactgaggaggggatgcaaggcataggcataggcataggctgcttccaaaacgacgtcgtagggcagctggagctgagtcccactatgagcaactcctcctcctcgctatccatggagctggacgagtccccggagagcagaatccaacggttgatatcggagcacccggtcatcatcttcacccg

SEQ ID NO: 77202 - DNA, 230 bp, Glycine max
  Clone ID: 700962089H1
gagcaaacaaacaactagcaagggaagaaagaaactacagaaaagaaatggcttccacttctgcagtttcaatggctatgccagtaacttatgctagccagaagagggtggtgcctagctcggatgcattcttcaagccactgcctctacggtcttccaaggcagtgacagcatcaaaactcaatggaaggtttcaagtgagggcctccatgaaggagaaagttgtgacg

SEQ ID NO: 77203 - DNA, 225 bp, Glycine max
  Clone ID: 700962090H1
gggagagatcgcacgggagttgcccggggtctctctctcgtgtggtgtgtggtgtttgctgtgctctccttttcgttatgccttttattattacctatctgtcgctccactccgtattacgactctggatcagagggatacatcagaggattcgctccaactcctatcgaataaggtattatctgtcaatttacattggaaagggttaggatattcaattttaca

SEQ ID NO: 77204 - DNA, 224 bp, Glycine max
  Clone ID: 700962093H1
gctttattagaagcgaagttggttttgtcattactcttacaacgcttctcatttgagctttctcctacctatgcacatgctccagtcactgtgctcactcttaatccaaaatttggtgctcatatcatcttacataagttgtagtgtcatctattaatttgtatcctgcacacctaattatctccattcctttcttatgttctaatctcttgtatttatagagg

SEQ ID NO: 77205 - DNA, 224 bp, Glycine max
  Clone ID: 700962094H1
atcaagcaccgagtcctcttctatccgtgtgtggtcgcgactacgcttcttcgtaactcgaagcgcgtgaaaaaaatagcttcttctggatctggatcacgaaagccatggcgttttggagatctctcgtagcgttctctgcggttcttctgcttctcatccatggctctcactgcttctacctccccggcgtcgctccacaggatttccagaagggagattca

SEQ ID NO: 77206 - DNA, 224 bp, Glycine max
  Clone ID: 700962096H1
attagatctgatgaattaattgagcatctgagtgcagaaagaatagaggatcgtggtcgatggcgtctgctagccttggaagtggtggggtcggcagttcgaggtctgttaatggtggcttcaggggttcttccagttccgtcgattggcttggcagagagatgcttgagatgaggttgagagaccacgaagacgatagagatagtgagcctgacatcattgat

SEQ ID NO: 77207 - DNA, 256 bp, Glycine max
  Clone ID: 700962104H1
acaatacaacactgccatggctgcctcagtctccactattggagctgtcaacagagctccactgagcttgaacagctctgaagctggagattcggttcccagttcagccttctttggcacaagcttgaagaaggttactgcctcaagggtccctaacgtcaagatttcttctggaagtttcaaaatcgttgcggcggagaaagagattgatgagcaacaacagacaaacaaggacagatggaaaggtcttgcctat

SEQ ID NO: 77208 - DNA, 257 bp, Glycine max
  Clone ID: 700962108H1
gcaatgaatctgatgcaggcggttcgctacgacgcctacgggggaggtcctgccggcctcaagcacgttgaagttgccgttcccagtccaaaggcaaatgaggttttaatcaaactggaagcagttagcattaaccctattgattggaagattcagaagggtcttctccgtcctttatttctccccagaacctttccccacataccttgcactgatgtggctggagaaatagttgagatcggaactcaagtcaaaga

SEQ ID NO: 77209 - DNA, 259 bp, Glycine max
  Clone ID: 700962116H1
cctttcctgatttcgttaaccctgcggggaagaaaatatctaaaagagaaaagatacaaattaatgtggatgctgttactggaggtgagcttctgtgcaagacattaagccacccactgaaggaagtgaggcgtcatgttgggagcatgggcttcttatatgattccgatgttctttcatggtctaaagttgattttagcttttcatatgctgtttcttcaagtcatataactggtggtgttcttttggaatctgcatc

SEQ ID NO: 77210 - DNA, 252 bp, Glycine max
  Clone ID: 700962121H1
gtcgatgcaatttcaattctgatcatgtcaattttctcttttctctatactatttcctgttgctgtttttgttacaaaattgttgctttgtttttgttttttttgttttcattttatctgttttgtggttgatgtcggcgtcgaattacgaattctcgcttgggtttcttcaattttctagaattttgttatggaagttgtgaatctattttaaaacttgtcaaattactgatactcattttgaaataattt

SEQ ID NO: 77211 - DNA, 255 bp, Glycine max
  Clone ID: 700962124H1
ggtgaatcgatgccagattcaggaatggtatctaaagttcaaatctgtatccatcaagaccttaattcgtcaacttccggaatcatttattcagtaccttttagatgactcggggcccttcttgttgcatgtttctgtcttaaatgaagatgcattacccaatagaattcataacccagatgaggaagatgattttcaggtgtcagaaggatctggagatgaagcagaagaaggttctccaccgccttcttttcc

SEQ ID NO: 77212 - DNA, 254 bp, Glycine max
  Clone ID: 700962129H1
cttggctattcgagaaacccgaatcaaggctgcgcctgtgcatgcatcagcccattggtatctggagaatgttttgcctgttctacagagttatggtattgctgcaatctctccattttctcacagactgagttttgacaacttgcctatggatattcaacacctacgctgtaaagtcaacttccaagctttaacctttgttcctcatatcagagcacttggagatgcccttatcagccgccttcgctatcctg

SEQ ID NO: 77213 - DNA, 254 bp, Glycine max
  Clone ID: 700962135H1
caaagagacaattcaacttaagagatcaatatggccaccaccactacccagcctccctctaatatctgttttttccttctgttgttgcttctagcacactttcatttgggcataagccaacttgagctgaattactactctaaaagctgcccaaaagctgaagagatcatcaaggaacaagtcacacaactatataacaagcatggaaacactgccgtttcgtgggtcagaaatctcttccacgattgcgtggt

SEQ ID NO: 77214 - DNA, 251 bp, Glycine max
  Clone ID: 700962136H1
gttgcgttttaggcctaccagacaaagactatggagagattgttagtgcaatcgttgtgccagaggccgatgttaaacgaaaacaagatcaagaatcaaagcctgttctaagcctagaagaattatccaactgggccaaagacaaaattgcaccttacaagattccaactcagctaatcgtgtgggataaactccctcgcaatgccatggggaaggtaaataaaaaagagctgaagaagctgcttgtttca

SEQ ID NO: 77215 - DNA, 249 bp, Glycine max
  Clone ID: 700962142H1
ctcggaggaatgggttgcagcgccgggatcattggtgtggacctggccaaggacattcttcaggcgaacccaaataactacgcggtggtggtgagcacggagatggtggggtacaactggtaccaggggaaggataggtctatgcttatcccgaatagcttcttccgcatggggtgttccgcggttctgctttccaaccgtcgaagggactatagccgcgcaaagtaccgccttgaacacattgttcgc

SEQ ID NO: 77216 - DNA, 250 bp, Glycine max
  Clone ID: 700962151H1
gttctcgctctcttattcctttctctcttgtcttctctccgaatccacgtcctagatctgttgttctcttcccacagttctcactgaatcaggatccattttgataccaagttgctgtttagagatctgtttccttctagacaacggtctgtggtatctgttattttagttgaatcgaagctgcaacaaaatcttcctgatctttgctttgaggttatggcatcggcgggtgtagcacctgcttctgggg

SEQ ID NO: 77217 - DNA, 121 bp, Glycine max
  Clone ID: 700962153H1
gaacaacagggaattaatttccttcatcattatctcaccatggcaccattcactccgtcgaagttgcttctgttaactctggttttcacgttgagccagaaacagagtctctgttccacac

SEQ ID NO: 77218 - DNA, 250 bp, Glycine max
  Clone ID: 700962161H1
aaagaaaaagaaaaagaaaaagcatacaacgatggctatgaatggatcacctcgacggtgggacgtgagattagttttgacattttctctacttttaatctcagcctctgtttctgctcttgaacatgtaaaccacaaaaagattgatcccaccaccgctgaaactagttttcttggcaaagtcatgaactttttgtggagctcatctgggtctggatacgaacatacttggccagaaatagaatttggg

SEQ ID NO: 77219 - DNA, 121 bp, Glycine max
  Clone ID: 700962172H1
gctcagctgagtagtgttgttggtattttggggtctgatgtatcataatgcttgacttgactgtctatcgtggctttcatgctgcgagaaataataaattcaggtaactgtttgtccttgt

SEQ ID NO: 77220 - DNA, 118 bp, Glycine max
  Clone ID: 700962179H1
attgactgtgatgaaataatgttcattttgttttcttgatatttcacacatgttgtgtttatatttgacaatatgacttctatttacattgcttaatggtatgtgatgtgttcttatg

SEQ ID NO: 77221 - DNA, 254 bp, Glycine max
  Clone ID: 700962180H1
aagaagtcctgagaaggcatctagaacaaagctctgaatctgattttgaaaactggaacgcgtaaaatgaacggtacccctccctcataaataaaatctactactaaacgctcttctcttctgcaatcaatttgcaaaccaaacacaacacaaggagaagaaccagatctctctttctcaaatcaccaagaatagttgaaaatggggctgtctttcacgaagctgttcagccggctctttgcgaagaaggagat

SEQ ID NO: 77222 - DNA, 245 bp, Glycine max
  Clone ID: 700962187H1
gcctaaggtcccatctgggagttacaacatagctcaggtaacatatgaattaaatgtgcttgggactcgaggaccaagaaagatgcactgcgttatgcattcaataccagcttcagcactagatgcaggtggcactgttcctggccagccagagcttcttccccgttccctggaggactcgtttcggagcatctcgttttcaaagtctctagatcattctattgagttcagcagttcgcgatttt

SEQ ID NO: 77223 - DNA, 244 bp, Glycine max
  Clone ID: 700962190H1
ccctaatgtaaatagttcttccaattgcttggttaacacatcaacccatgtttctgatacaaaaccatcaccacataagcttgggtttgatttgcaaaatcctccaggtctgtccagaagatgtattacaagcaggaggggaaggagacaccctgatataaatagttcttccaattgcttagttaccacatcaactcatgtttcttctacaaaaacatcaccgcataagctgggatttgatttg

SEQ ID NO: 77224 - DNA, 244 bp, Glycine max
  Clone ID: 700962191H1
cttttgtttgttcttcagtactttagtgtgtgatttaattccaagattttgagaatgtctagctgtgggtgtggaagtagctgcaactgtggcagcaactgcggttgcaacaagtactcttttgacttgagctatgttgagaagacaaccacagagactcttgttttgggtgttgggtctgtgaaggcccaattggagggtgctgaaatgggtgttgcagctgagaacggtggctgcaactgtg

SEQ ID NO: 77225 - DNA, 284 bp, Glycine max
  Clone ID: 700962236H1
atccatttagaaagacattgtggttacccatagtctcatagtgtcatactgcaacacaaaacaatgggttcccttatggcaggatgggactctacccacatagatcctcaatcagccacacttaaaaggaaccgctcactcaccaaggatgaaattgatgcttactggaaatcaaagaagaagatagaggaagaacaccttagagctatttccaacttgtcagagactattcaggctagcaaaagcacagaacctgagaagaagttgcagaagtcaatgaccat

SEQ ID NO: 77226 - DNA, 284 bp, Glycine max
  Clone ID: 700962249H1
tggaagggttatatcagttaaatggggtgattatacaaggcgaataggtattgatggcaccccagaagccattaaagaagcaattagggctgcttttaggttgagaactaaacgtacattttggttggaggatgaagatcagattatcagaagtattgaccgtgaaatgcctttaggaaattacactcttcacattgatgaaggaatggccattaaattacctctctatgatgagcctgaccatatacctgtgcatactgaagataagatattttacactgaag

SEQ ID NO: 77227 - DNA, 270 bp, Glycine max
  unsure (1)..(270): unsure at all n locations
  Clone ID: 700962277H1
ccatggnaggaaatgatcaggctattgcaaacgaatgancccttgtggatgaaaggtgctgatgggagggatgtccttgatcttgattccnatganagaatgttccccaaggcnaatagtcacttgaagaaccccaatgttcatgctgaagcttcnagagattcaggagttgnaattatgaacggcttaactttggttganatgttnatggacccgaacaagtggatggagntatttcccaccattgtcacaatggctagaacaattgag

SEQ ID NO: 77228 - DNA, 270 bp, Glycine max
  unsure (1)..(270): unsure at all n locations
  Clone ID: 700962294H1
aattggttcataaatgcacgagtacggctatggaaaccaatgatagaagaaatgtacaaagaggagtttggagagttttctgaagactccaacccggctggtaacaactacttgacgagggaagataccacggattgtgtagaggattgaatcaaaagctccagtgaacaaaaaacttattgtttgacaaacatgggcctttaaatgcttgcntttttcctccaaaatcgagagataaacattatgtaacatgacaagatgatgagccaa

SEQ ID NO: 77229 - DNA, 171 bp, Glycine max
  Clone ID: 700962305H1
ttacaatctcaccagtgatcctgtaattgagtttgagggacaacaatagtgatcttctccccccaaaatgagtgtcttttgcattttccatcttcaatgatggatcacttttttggtacataatgatgaaactcttacgttgggctggttaatgtagtccactaagcatct

SEQ ID NO: 77230 - DNA, 267 bp, Glycine max
  Clone ID: 700962316H1
aacaccttctctgcacgcaaaaaccgcgaaaagaactagaaccaaagatgcagagattcaaagctctgctacctcaacaaactaggtcctcacttcgcactctctgttctcaccgtcgagctttctccgctcaaccgaattacgcaaagcaccacgacgacgattctcaggaacagattttagtcgaaggaagagcgaaatcacgagcagctattctcaacaggccgtcttcgctgaactcgctcaatgcttcaatggttgctcggt

SEQ ID NO: 77231 - DNA, 266 bp, Glycine max
  Clone ID: 700962334H1
cagtcctgcacatgttatgccgcttctggaaattgtacgtaccaagcagacctctgcccaagtgatagttgacgtgttagatatttcaaagaagataaagaaaactccagtggtggttggaaactgcacaggatttgctgttaataggatgttcttcccatatacccaagcaggtctcttgcttgttgaacgtggtgcagatgtttatcaaattgatagagtaataaccaaatttggaatgcccatggggcctttcagattgatgg

SEQ ID NO: 77232 - DNA, 256 bp, Glycine max
  Clone ID: 700962341H1
tgataaagttcagcatgtagatctttctgacacaattatgcagggttctgctgtcagttgtcagaaaataccttggaatgagggaaatgccaagttagaagacagagaaagttctggcaagaagttaaagacaggtttcggtgggatttatggttctggaggtagagactcttttaatgacagttttacatctcttggaaataatcttggctcctgttcttcagttgaggacaaaggatgtgaggaagcttgtgat

SEQ ID NO: 77233 - DNA, 255 bp, Glycine max
  Clone ID: 700962343H1
ctcgatgtttccaggtgtgcaatcactgatactggtatcgcagcccttgcccgaggaaaacagttcaacctggaggtactttctttggcaggttgcgcattggtttcagacaagagcgtgcctgcattgaaaaaattgggccgttcccttgctggattaaatatcaagctttgcaatgcaatcagcagccgctcagttgacaagcttctgggacatctctgcatgtgtgacatcctctactgaacaggaaaatgc

SEQ ID NO: 77234 - DNA, 61 bp, Glycine max
  unsure (1)..(61): unsure at all n locations
  Clone ID: 700962347H1
cgaactgcacaacttgttcattctagttcagttgttccacacaacatacgnncnccnanaa

SEQ ID NO: 77235 - DNA, 254 bp, Glycine max
  unsure (1)..(254): unsure at all n locations
  Clone ID: 700962359H1
gggtactgtgcttggaaatatgatgggagattcttggttaagagcacacgagcaatataaggactattatgcagcactttatttgaggaccagctggggaaagcttctatctattcttgtagttccaagggacatactttcaccctccagtgcaagtgtgacaagccaagacttggcaaagagactaaatgctttcaatctagcttttgntgaaaggtacaagaagcaatctaattgggtaatatccgatgaga

SEQ ID NO: 77236 - DNA, 256 bp, Glycine max
  Clone ID: 700962361H1
ccggtatctagatatgcatagataaagaggaattggatttcactggcgaacgttatgaatacttgcactattattatgaattccatgccagttccttctcctttgttgataaagtcctttaaaacatttccatcgttcaaatgctgcagcaagagctcagatgagaagggaagtgaagatgtgaaggacacattatctggggtggtggacgagcaagttgaagagttcttgagtagaaaagagaacaaggttttgc

SEQ ID NO: 77237 - DNA, 258 bp, Glycine max
  Clone ID: 700962362H1
acctattctaattcctagaagtgatggtcataggcatcggaagggaagccatggtgatgttatcttcttgacaaatcgtggagagattacatcatactcccctggcttgcatggtcatgatgctatttggcagtggcaacaatcaactggtgttacatggtcaaacctaccctccccatcaggaatgatggaaggtggtctggtgattcccacactaaagcctctttccttacggttgcatgataatcaagaaatgat

SEQ ID NO: 77238 - DNA, 256 bp, Glycine max
  Clone ID: 700962368H1
tttcattaccgccgtgataacacactaacaccaccacttcatcaactttacttgacaacaatattgtaaaactcaaaatctagtttcatactttttttcttcttcttgaaatggctctccaggctgcttctcttgttcctgcttctttctcggttcttaaagagggaaagagtggtgtgtctctcaaggactccaccttgttcggtctttcattttcagaacctatcaaagctaacttcagctcttctgcatgagg

SEQ ID NO: 77239 - DNA, 254 bp, Glycine max
  Clone ID: 700962378H1
tacagttacagcataacttctattctatatttctttctactcgcaagcaaatcagaagaagagaatggcagcagcagaggggctaaacagagagcagtacgtgtacttggcgaactgtcggagcaggcggagcggtacgaggagatggtggagttcatgcagaaggtggtggtggggtcgacgccggcgtcggagctcacggtggaggagcgcaacctcctctcggtggcctacaagaacgtcatcggctcgct

SEQ ID NO: 77240 - DNA, 253 bp, Glycine max
  Clone ID: 700962386H1
caggtggcgagaggaacagtagtgtataccgagagtgcttgagaaatcatgcagccagcctaggaagctacgccacggacgggtgcggcgagtacacggtggacggcgcggggggactacaatgcgccgcgtgcgggtgccaccgcaacttccaccggaaagtgaagtacctggcggcggctgaaagccctcccacggagtatgggggcagcaacagcaagaagcggttcaggtctaagttcacggaagatca

SEQ ID NO: 77241 - DNA, 236 bp, Glycine max
  unsure (1)..(236): unsure at all n locations
  Clone ID: 700962419H1
tggcttcttcaatccctaatgcgccttctgcgttcaattctcagagctacgttggtctcagagcgccactgaggaccttcaacttttcttctcctcaagctgccaaaattcctcgctcccaacgccttttcgtctcagagcctccgattcggagttcgaagccgccgttgtcgccggtaaggttccgccggcgcctcccgtgccgcccagaccggcggctccggttggaanccggt

SEQ ID NO: 77242 - DNA, 136 bp, Glycine max
  Clone ID: 700962431H1
caatgatgtaatttagcatgtaagatgtaatgttatgttgttgatttctttgctttgtttggtcttttgttgaaaagggaatccttgaaatattgcttgtacatgatgtgggataattcatttagtcttcagtagt

SEQ ID NO: 77243 - DNA, 236 bp, Glycine max
  Clone ID: 700962434H1
aaaaaaaatgggttcttctctgtggacctgtctgattttgttatcacttgcttctgcttccttcgccgccaacccaagagcaccaattgatgtgccatttggcagaaactatgtgcctacctgggcctttgatacatcaaatacctcaatggtggttctgagattcagcttcatcttgataaatacacaggtactggcttccaatcaaaagggtcctacttgtttggtcacttcag

SEQ ID NO: 77244 - DNA, 236 bp, Glycine max
  Clone ID: 700962450H1
attttccattcgtagacgccaagaaccctaacagatcaaaactcagaagctgaagcctttggggcatgaggttttgcatgtctacatttatgggatttgtgtaatttacccccttttctggtttgactttatcgagctgaaacaaaggagaatgcaatggacctggataatttatgaggatatttaacatagtgtacattgtgctcctgtaattattttcatcagttggtgttgtg

SEQ ID NO: 77245 - DNA, 232 bp, Glycine max
  Clone ID: 700962468H1
cccctttctctgcactctgcaactccctccaatttagtttgagccttagaggcattgttctttggttggatagatctctgatctgaagatgagtgcgtcgaggttcattaagtgcgtcaccgtcggcgaggcgctgtcggcaaaacctgcttgttgatttcctacaccagcaacacttttcccacggactacgtgcccacggtttttgacaatttcagtgctaatgttgtgg

SEQ ID NO: 77246 - DNA, 239 bp, Glycine max
  Clone ID: 700962492H1
ggaaggagagaaagaaaatcccgatggtaacgccgctttggtgaactccttctgcgaaatcacttcctcttccaaggaagaagctcttttctttttggagagccacaatttcgacctagacgctgccgtttcgactttcctcgacaacgccaacaaccccctcatccctctcaacgacgaccttgccattcccaaccccaacgccgtttcccctccctcagattctcactctccggact

SEQ ID NO: 77247 - DNA, 258 bp, Glycine max
  unsure (1)..(258): unsure at all n locations
  Clone ID: 700962504H1
atcagatacgaaggcattctctacaacatcaacacngnagagtccagtattggcctcagaaatgtgcgatcttttggaacagaaggaagaaaaaaggatggcccacaaattcctccaggtgacaaggtttatgagtatatacttttccgtgggactgacatcaaggatttacaggttaaatcttctccacccgtccagcctattccacangtcatcngacntgnanntattattcagtctcactatnctcacccggtc

SEQ ID NO: 77248 - DNA, 258 bp, Glycine max
  Clone ID: 700962506H1
gcgttgccattctcatcctcttctttctctctctaccattgccatggatccctacaagcaccggccatccagcgccttcaattctcccttctggactacaaattctggtgctcctatttggaacaacaactcctctttaaccgttggagctagaggtccaattctgctggaggattatcatcttgtggagaagcttgcaaattttgatagggaacgtatcccagaacgtgttgtccatgccaggggcgctagtgcaaa

SEQ ID NO: 77249 - DNA, 253 bp, Glycine max
  Clone ID: 700962512H1
ctcgcaatcttcactattttcaccgagcatttgcattccacattgaatatggctgaggctacacaatctaatgctgagttattggagtggcctaagaaagataagcgccgcttcctgcatgttgtgtatcgtgttggtgatcttgatcgcaccattaagttttatactgaatgttttgggatgaagcttttgaggaaaagagatattccagaagagaaatatgccaatgcttttcttggatttggccctgaac

SEQ ID NO: 77250 - DNA, 254 bp, Glycine max
  Clone ID: 700962514H1
atttagatgaggaaggagtttctaaacagaatgatgagatgctatacgaggtaaatgcaaattctggaaattggatgatagccgggaggaaaagaggatatgcatctctgtccacaaaacaaggggcaagaatagttatctcggtactatgcatgccactggtggctggttatgttcaccctcccgtacttgggctgccagatgttgatgaggcaaatataagctgcaaacctgctgggccacatctggtttgt

SEQ ID NO: 77251 - DNA, 251 bp, Glycine max
  Clone ID: 700962528H1
atctttgtcagctttttcttgcttccgtagttcatatggcgtgtgttcaagtcatcacagtttttctctttgcattggctctagctaaaatttacccctcaacatgtcaagtggtgcagggaaaagtctcctgcgttgactgcactcacaactatgacttatctgatattaaggtttcggtgaggtgtgatggtgtgaaaaaactggctttggctactacagaaaatgatggctccttcaaggttgatctt

SEQ ID NO: 77252 - DNA, 236 bp, Glycine max
  Clone ID: 700962529H1
acggggagcgtgagttcatgttctacagaaaccccagcgccgacatgctcctcaagcccgaagaactcaatctcgaactcatcagatctgcaaaagttttccattacggatcaatcagtttgatcgtggagccatgcagatcagcacacttgaaggcaatggaagtagccaaggaatctgggtgctgctctcctatgaccccaaccttcgtctacctttgtggccttcggctgagg

SEQ ID NO: 77253 - DNA, 258 bp, Glycine max
  Clone ID: 700962533H1
gttcagcgttcaccaacagaaacagcagaaggaaggaaaaggtgactgcacagaggtatcgaataaagtcaaaagtcggaatggtttcactctgatcaaactgaggaatcgaggaaggaagggttaggatcagctagagtaccttgaggagcgccggttgaaggatttgattaagaagcattctgagttcattagctacccaatttctctttgggttgagaagactaccgagaaggagatttctgacgatgaggatga

SEQ ID NO: 77254 - DNA, 256 bp, Glycine max
  Clone ID: 700962534H1
ctccaagtgcagtggcaagggttctaagtctggtgcttcgatgaagtgtgctggttgtcaaggaactggtatgaaggtttctataagacatcttggcccatccatgattcagcagatgcagcatgcctgcaatgaatgtaagggtactggagaaactatcaatgacagagatcgctgcccacagtgcaagggagagaaggttgtgcaggagaagaaagtccttgaagttattgtagaaaaggggatgcagaatggg

SEQ ID NO: 77255 - DNA, 252 bp, Glycine max
  Clone ID: 700962542H1
gtagaaacaaaaaccgcggaagcagccatggccgaagcagaacacaacgatcccacctcgccggagcgcgaggaccaaaccaaaagcaacaaaaagaagctccgaaagagaaaaagacctcaaaagaccgagcagaaacaagaggaggagaagaacgatgcgaacattgatagcgcccaaacacaaactgaagatgaaggagagaatcaagaagacacaaatgtgaacaacaacgtctcatctggaatcatg

SEQ ID NO: 77256 - DNA, 249 bp, Glycine max
  Clone ID: 700962544H1
ttttaaacatgcaatgtcaagatcttctgatgatcttcatgctttacgcatgaggcagaaagaggaattcatcactgagtttcatgatcaaataaggggagatcaagaaagagagaatgaaatggaaaaacctgaagatggtcatatggacaatttctttgatgatggttttgattcttatctgctttctggttcagcagaaaactgggtaatgccaattacagatgattcaagtgatgtcaaaaccct

SEQ ID NO: 77257 - DNA, 250 bp, Glycine max
  Clone ID: 700962545H1
acctgatgtcttcattcacacttcccatggaacacgcattccagcccacgcacccattctggcttctatgtccccggttctggagaacttgatagatcgcccacgtaagcatcggagctccgagagaataatccaaatccacggcgtcccctgcgacgctgtcaccgccttcgtccgattcctctactcctccaggtgtacggaggaagagattgaccagtacgggatgcacctccttgcattgtcccac

SEQ ID NO: 77258 - DNA, 248 bp, Glycine max
  Clone ID: 700962561H1
aatgcttacacattcacagttgatcaaggcaagacatacagattcaggatatcaaatgtagggctcaccacttccatcaactttagaatccaagggcataaaatgacaattgttgaggtggaagggacccacactctccaaaacgtttatgactcacttgatgttcatctggggcagacttactctgtgttggttactgctgatcaaccaccccaagactacctcattgtcgtcacgacacgattcac

SEQ ID NO: 77259 - DNA, 249 bp, Glycine max
  Clone ID: 700962567H1
ggagagtgcaacaacaaacgcaccaggtacgctctctttctctctccctaaatttcaattcaaaccacaaacacaaacccatatccccaaaacctgtgtctgtcaactgcacttagagagagtgagtgacgcaaccagactagcacgcacaacacacaataactgcatatggataggtatcagagggtagagaagcccaaggcagagactcctataaacgagaatgagatacgcgtcactactcaagga

SEQ ID NO: 77260 - DNA, 246 bp, Glycine max
  Clone ID: 700962568H1
tgatagacaggtgacagttgatgttccagatataaggggaaggactgaaatcctaaaggttcatgctagcaacaaaaagtttgatgctgatgtttctcttgaagtgattgcaatgagaacacctggctttagtggagctgatcttgcgaatctgttgaatgaagctgctatattagctggtcgccgtggaaagacagctatttcatctaaagaaattgatgattctattgataggattgtggctgg

SEQ ID NO: 77261 - DNA, 249 bp, Glycine max
  Clone ID: 700962570H1
aaaaacccttcttctcttctcttggtttcgttctgtgcatctgccaaattaggattaggattagggctaccaataccaataccaataccaattctattctatggcttgctcaagcgcccaaatacacggtctcggaaccccttcctcccgaaccctatttttaggtcagaggctaaataccaaggccgcctttatcaagctcaagtccacacctagaagactccgccctctcagagtggttaatgagaa

SEQ ID NO: 77262 - DNA, 248 bp, Glycine max
  Clone ID: 700962571H1
atcttgatgctgaaaaagagatgatgtctcaatgtgtggctcttcttggaaaatttattgctgtccgtgaaccaaacattcgatatcttggcttggagaatatgacaagaatgttgatggttactgatgtacaagatatcattaaaagacatcaagctcagattattacctcattgaaggatcctgacatcagtattcggaggcgtgctctagatttgctttatggcatgtgtgatgtttcaaatgca

SEQ ID NO: 77263 - DNA, 244 bp, Glycine max
  Clone ID: 700962579H1
tttggagagtttttttgtgttgttttgttgaggttgggtttgtgagtgagagaatggtgggtgctctatctgttgtgggctcatcagtgatggactctcacactggcccttgtttgtgtgttgatgctctcccaacaactagtgttaatctcaagagtggtggagatgttttgtacaagaatttgatgggaaggaagcataatttggtgaagcatggtggtgggaccatgaagttgagcagttc

SEQ ID NO: 77264 - DNA, 246 bp, Glycine max
  Clone ID: 700962586H1
aaaattgctcctgcgctgattgctggaaactccattgtgctcaagcctccaactcagggagctgtttctgctcttcatatggttcactgctttcacttggctggttttcccaaaggcctaatcaactgtgtcactggcaaaggctcagaaattggtgacttccttacaatgcatccaggagtgaactgtataagctttactggtggtgatactggcattgcaatttcaaagaaggcaggcatgatt

SEQ ID NO: 77265 - DNA, 244 bp, Glycine max
  Clone ID: 700962590H1
atcaacttggagcacatcaaggccatcatcaccgcccacgaggtcctcctcctcaactctcgcgacccctccgtcacccccttccttcaggagctccaggccaggatcctccgccaccaccaccagactctggccgatgccaaccccaaccctgacgacgccatcaagattctccccttcgagttcgtagcccttgaggcctgtctggaggccgcttgtagcgtcttggaaaacgaggctaaga

SEQ ID NO: 77266 - DNA, 243 bp, Glycine max
  Clone ID: 700962591H1
aacgtgtgttcgtttgttcggtggtgaattcctatccacacgtctcaccggaaacatgtcagcggtggttgctggttcctcctcttcattctctgccaccttcacccccataaggagcccctccttaaaaaactctcaactctctcattccaaggcactcacttcacctcaatgccagaaaacatctttacaagggctctcacttcatgaagccaaaaggggtgtttcagaatccttcctagt

SEQ ID NO: 77267 - DNA, 242 bp, Glycine max
  Clone ID: 700962592H1
caaatcgcaatagaaatggaaagtaacgcaccagtactagcagagaaagtgtggagcatggtacgtgtgctgttgttcatgcttcgaaaaggcatatcaaaggggaagctaatgatggatctcaacatgatgctcaaacgccgcggcaagctcgccggcaaagccattgccaatctaatgtcccacaaccacaaccaccgtgggtcccacaagtcgcaacttcggttctctgctccaaggga

SEQ ID NO: 77268 - DNA, 242 bp, Glycine max
  Clone ID: 700962594H1
aaaaaattaggcgtctaaagggccaaagcttagaaagttgaagctttttttgttgaggtgaaagtgaaatggttggcaaggataatctgagggctgaggacttgaacttgtgctttaagaagcttatgatggtggccgggagtgggaacagtgagaaaggggtgaacttgaaggttggggtgatcaccgagtggaaggatattcctgtggagcttctgatgcaaattctgtcccttgtggat

SEQ ID NO: 77269 - DNA, 244 bp, Glycine max
  Clone ID: 700962596H1
gaaatttatccagtttcagctcacggttaatgttgctgctcttgtaataaatgttgtggcagcaataacttctggtgatgttcctttaaatgcagtgcagcttttgtgggtcaaccttatcatggatacacttggggcgcttgcactggctactgaaccgccaacagaccgcctaatgcacagatcaccagttggccgaagagaatctcttataacaaatatcatgtggagaaacttgatcgta

SEQ ID NO: 77270 - DNA, 251 bp, Glycine max
  Clone ID: 700962615H1
cgaaaaccaaagaagaaaaaagagtttcttctttccgaaatccaagcagtagggttagggttttttccgatctcaatggcggaggaaccggagagcaccgtcaccaccggcgcccccgacgaatcgctgctcgataagatcaccgagaagcttcacggccacgattcttcctcttcttcctcttcggattccgattccgaaaaaaccgttacttcgtccgttaaggatagggtttttcgcctcttcggaag

SEQ ID NO: 77271 - DNA, 242 bp, Glycine max
  Clone ID: 700962645H1
cgcggcttcaaccttgtagttattctctttcttcttttttagctatccctctcttgaaaaatctagatctcgttcttccttgatctacgttacgcttttagtgaccggatctgtatggatctgaaccagatctacacgccgatggtggttttggcctggtctttcatagatctgatgcatggaggctcagatctactgtacagagatactgtagataatcgatgagaagaacgcagatccag

SEQ ID NO: 77272 - DNA, 120 bp, Glycine max
  Clone ID: 700962759H1
ctcatttttttaggctcataaatcttttttatgggtttcagggtcactactactctgtctctgctctccctgttttggctcttgtccctgcaccaagcaagagctgcaaagttccacaat

SEQ ID NO: 77273 - DNA, 259 bp, Glycine max
  Clone ID: 700962775H1
catatccccccctagctacagagcagccaaaggggaggaataataataagcctatattctaaggccggaaaaataaaaaaggaataacaaaaatgtctggaaaggtaattatctcggctgtttctctcatcctggtggttggagtggccataggtgtggtggtggccgtcaacaagaagggcgaggatcccacacttcaatctcaacaaaaatcagtaggggttatctgccaaaacactgatgaccagaagctctgcca

SEQ ID NO: 77274 - DNA, 118 bp, Glycine max
  Clone ID: 700962778H1
aaagatggtatcagagaggccagtggtgatattcagcaagagctcgtgctgcatgagccacaccataaagaccctcttgtgtgactttggggtgaatccagcggttcatgagctggat

SEQ ID NO: 77275 - DNA, 259 bp, Glycine max
  Clone ID: 700962793H1
ggaggagcttcactcaccggaagcctatgagatgatccaaaaccacttggctctcattttgggcaaccgtttaggggattcaacatctgttgctcagatcagcaaaatcagggtaggacaggtttatgcagcttcaataatgtacgggtactttctcaagcgagttgtgcaaaggttccagctggagaggacaatgaagattcttcctaatgcaacagaagagaatagcattcaacaaactgttgtagatgattcaaga

SEQ ID NO: 77276 - DNA, 55 bp, Glycine max
  unsure (1)..(55): unsure at all n locations
  Clone ID: 700962833H1
atttgatgaccatgaacctattgatttgtccaaactncatnctntnctcccttng

SEQ ID NO: 77277 - DNA, 261 bp, Glycine max
  Clone ID: 700962849H1
ggaaaaaagaagaaggaagaaaagttagcagtagtttggcgtggtaattggtagagcgagaaacagagaaatggacgattacacgagggaaatgatggacctgaagacactggtcactcgcactctcgagaagaaaggcgtcctcgccaggatccgtgccgaactcagggcgagtgtgttcgaagccatcgaagaggaagatcgtgtgattgagaaggaacaaggtctacctcctgcattgctaggtagttgcaacgatcg

SEQ ID NO: 77278 - DNA, 56 bp, Glycine max
  unsure (1)..(56): unsure at all n locations
  Clone ID: 700962853H1
gaagcatcgctcacctttccctttgcgaacgccgtgaagatnacgaaagcncaaca

SEQ ID NO: 77279 - DNA, 251 bp, Glycine max
  unsure (1)..(251): unsure at all n locations
  Clone ID: 700962864H1
attgaaccagctctaaaaaagcagcttatcanctctacagtactcatgactgttggaattgcaattattagttggattgctctgccaacatccttcacaattttcaactttggtgctcagaaggaagtaaagagctggcagctgttcctctgtgtgggtgttggtctatgggctggacttattantgggtttgttactgagnactatacaagcaatgcttacagtcctgtacaagatgttgctgattcctg

SEQ ID NO: 77280 - DNA, 250 bp, Glycine max
  Clone ID: 700962877H1
gtgaaaaaggagagatggcagctgcaacatctagtgctgtgttaaacgggtttggatctcacttcttgtgtggaggaaagaggagccatgcccttcttgctgctagcattggagggaaagttggtgcttctgttagtcctaaaagagttattgtggcagttgctgctgcaccaaagaagtcatggatccccgctgtaaaaggtggtgggagtttcatagacccagaatggcttgatggctcgctaccagg

SEQ ID NO: 77281 - DNA, 253 bp, Glycine max
  Clone ID: 700962885H1
aagaagggttgaaggaagaaaaaaagaaaaacacagaaatggagggtgggaacaacagcagcagtaacaacaaccctgatgagttggcggtggggtgcttgctttcgatcaggacaacgttgggcgacgaattcgaaggccaggtcgtcaccttcgatcgcccctccaacattctcgtactccaggagccttccaaacctagccctcgtcgaaatcttaggttgctcaaagccaattacatcaaagacttcac

SEQ ID NO: 77282 - DNA, 247 bp, Glycine max
  Clone ID: 700962889H1
tccaaatcatggctagctcactgcttgtgagggttgccagctgcatggttgtggtgtggatgtttagttttgggcacataattcccttggcagaagctgaaattccatgtggcagggtgcaaatcactgtggctccatgcatagggtacctaaggggtcctggtggaggtgtccctgcaccatgctgcaatggggttaagagcataaacaaccaagccaaaccaccccagatcgtcaaggggtgtgt

SEQ ID NO: 77283 - DNA, 261 bp, Glycine max
  Clone ID: 700962901H1
gttggtggcaaagctggtgctcttggtgactctgttaccgttacacgtgagaagactaagattattctcacctctgactgtaacttttccaaacggtatttgaagtacttgacgaagaagtacttgaagaaacacaatgtgcgagactggctcagagtgattgcttcaaacaaggatagaagtgtttacgaactgaggtacttcaacattgctgagaatgagggagaggaagaagattagttgtctgatagccttatttgc

SEQ ID NO: 77284 - DNA, 249 bp, Glycine max
  Clone ID: 700962921H1
tctcagtctctgtgtttgcggctgaggattccgaacgagtgaccttcttcgtttctcgcaaagtttaagtaatcatgggtaaggaaaaggttcacatcaacattgtcgtcattggacatgtcgactctgggaagtcaactaccactggtcacttgatctacaagcttggaggtattgacaagcgtgtgattgagaggttcgagaaggaggcgccgagatgaacaagaggtcattcaagtatgcctgggt

SEQ ID NO: 77285 - DNA, 248 bp, Glycine max
  Clone ID: 700962936H1
cgcaacacaacaaaaaaagacaacccagagagcgcgtcttaataaacgctcttctctgaaaacccccatttcttttcttctttcttcttctctttcgcttcttcgatcttcgatcttcgtcgctgaaaatgagagagtgcatttcaatccacatcggccaggccgggattcaggttggaaacgcctgctgggagctttactgcctcgaacaggcattcagcctgatgggcagatgccaagtgacaaga

SEQ ID NO: 77286 - DNA, 257 bp, Glycine max
  Clone ID: 700962948H1
caagaatatcaaattggtctcttgtcttcctcctcatctctacactactccacatagagcccagcctctcaagcccaagcccaagcccaagcccaagcccgttcataaaatcctcctgcagcagcacccagtacccagccctctgcgtctcatccctctccgtctacgcctccagcatccaacaggaccctcaccaactggttcagacagcactctcctctccctgaaccgcacccaagccaccaaaaccttcgtgg

SEQ ID NO: 77287 - DNA, 284 bp, Glycine max
  Clone ID: 700963004H1
aaaatggccaaatcaatcaaattctttgagttgaacacaggggccaagattccttctcttgggttagggacttggcaagctgaacctggtgttgtagctgaagctctcaccacagccattcaggttggatacaggcatattgactgtgctagtgcgtataagaatcaagcagagattggttctgctcttaagaagctttttgatgatggtgtggtgaagcgtgaggacttatggatcacttccaaactctggtgttcagatcatgcaccagaagatgtgccaaa

SEQ ID NO: 77288 - DNA, 280 bp, Glycine max
  Clone ID: 700963024H1
gagagggggtggggtgacactgccgagcgtgtcctcgagatgatccagcttctcctggaccttcttgaggcacctgacccttgcaccctcgagacattccttggaagagtccctatggtcttcaatgttgttatcctttctccccatggttactttgcccaagataatgtcttgggataccctgacactggtggacaggttgtttacatcttggatcaagttcgtgccttggagaatgagatgctcaaccgcatcaagaaacaaggcttgatatcacccc

SEQ ID NO: 77289 - DNA, 274 bp, Glycine max
  Clone ID: 700963053H1
ttccattcttgtattctcgtattagcacaagatttcgtttttgtctatctatgtccccatcgtaattgatggtataacatcaacatgcatatgattatgggttatgagagagtgagagtgctgtttcttctgtttctgataccactgccaacggttctgggttggggcaaggagggccactatgccacttgtaagattgcacaggagtatcttagtgaagatgctctatttgcggtcaaacaattgcttccagattctgctcaaggtgatcttg

SEQ ID NO: 77290 - DNA, 278 bp, Glycine max
  Clone ID: 700963066H1
gtcaagataccagtgatctacatgagaaagtcgattttgtggcatgcttgggtggagatggcgttatactgcatgcgtcaaatctattcagagatgctgttccccctattgtgtcatttaaccttggctcccttggttttctgacttctcatgattttgaagattacaagcaagacctacgacaagtcatccatggaaataatacacgagatggtgtgtatattactcttagaatgcgcctccgatgtgaaatttttcgtaaaggtaaagcaatgcca

SEQ ID NO: 77291 - DNA, 244 bp, Glycine max
  Clone ID: 700963114H1
tggcatcttgtgttgtgtccctcttttaagctatttccttctcttaacacaattggttgtgccaattgccatagtcaccaaccaattaacaaaggtatatatatcatcatatcatcaccaaatgaaaaatattgggttgttttttcttgtggtggtggctacttttgtggtggcagccacagctggtagcttttaccaagactttgaaataacgtggggtggtgagcgtgccaaaatctatgag

SEQ ID NO: 77292 - DNA, 241 bp, Glycine max
  Clone ID: 700963142H1
cgctttccccaacgaacctcgttgttgtgaatcgcgctgctgaatcaatcgttctcggttttcgcgtactctactcgttcatcccgacatggtttgcttggcttgtttgctgcccctctttctcgtcccaatcgtcaacatcctccctcttctcttccattttatcatggggaaaatctatcgggtttttggttgggagtacaggaaaccggagagggctcctcctgcatgtccattcaag

SEQ ID NO: 77293 - DNA, 237 bp, Glycine max
  Clone ID: 700963178H1
acttaagagatcaatatggccaccaccactacccagcctccctctaatatctgttttttccttctgttgttgcttctagcacactttcatttgggcataagccaacttgagctgaattactactctaaaagctgcccaaaagctgaagagatcatcaaggaacaagtcacacaactatataacaagcatggaaacactgccgtttcgtgggtcagaaatctcttccacgattgcgtg

SEQ ID NO: 77294 - DNA, 234 bp, Glycine max
  Clone ID: 700963192H1
ctccatgcttctgtgctcgcccttgtattccttcttgtcatactatttcaggaaggattggtaacatgtatgaagaatgaagacggatcagaagaatggggatatgtgcaagttagaccaaaagcccacttgttctggtggctttacagaagtccatacagagtggagaatccctccaagccttggccaatcattctctggcttcagggaggaccaggctcttcaggagttggg

SEQ ID NO: 77295 - DNA, 234 bp, Glycine max
  Clone ID: 700963193H1
ctcgagatgaaaccaacgaatcttttgttactgatgagcttgaaaatcagaagttggagatagatgatggcaagcacacacaaaagactaatgacacttgtgaagtctctaagttggagaattctggtgcttcagaattggttcaaactgagaaaacagatggtcgtaattgtgcattaacaatagatggggtgccaggcaatcagaattacccaagacatgtccctgtgcacg

SEQ ID NO: 77296 - DNA, 254 bp, Glycine max
  Clone ID: 700963206H1
cttcattttccattcgtagacgccaagaaccctaacagttggtgttgtgatggatggtgataatggccttaacatacgtaattggggttactatgaacccgccacgtcgtttaagagccacctggggctgcaactgatgtcatccatgccggaaaaacctctaattggagggcgcaatgctgcggttttagctggtactaatggggcatttcaccatagggacattggtggtatgccccaagctacatacccta

SEQ ID NO: 77297 - DNA, 253 bp, Glycine max
  Clone ID: 700963214H1
gagagaacttcaagtgagggtgagagtgacacaaatctagagagagcactagtactctaaaagtctattatattcttcaaaatatgaccatgcatcgcgagtcttgggcttttgtcttcggcgttatgggcaacatcatctcctttggagtgttccttgctccattgccaaccttttaccaaatctacaagaagaaatccactgaaggtttccagtcacttccttatgttgttgcactgttcagtgcaatgct

SEQ ID NO: 77298 - DNA, 256 bp, Glycine max
  Clone ID: 700963248H1
caaccttgtagttattctctttcttcttttttagctatccctctcttgaaaaatctagatctcgttcttccttgatctacgttacgcttttagtgaccggatctgtatggatctgaaccagatctacacgccgatggtggttttggcctggtctttcatagatctgatgcatggaggctcagatctactgtacagagatactgtagataatcgatgagaagaacgcagatccagccgcttccgcttgttcgatcgc

SEQ ID NO: 77299 - DNA, 254 bp, Glycine max
  Clone ID: 700963268H1
tctgtatggaaacatcgtgcttagtggagggtctactatgtttccgggaattgctgatcgcatgagcaaggaaattagtgctcttgcacccagtagcatgaaaatcaaggtggttgcacctcctgagagaaagtacagtgtctggattggtggttctatcttggcatcacttagcaccttccaacagatgtggatctccaagggtgaatatgatgaatctgggccagccatcgttcatcggaagtgcttctaaa

SEQ ID NO: 77300 - DNA, 252 bp, Glycine max
  Clone ID: 700963285H1
cacttccaagcctttccatttgcttcgctcgagttattattttgcacagagagagagagaaaggagacagatttgaattgagtggtattccaacgtcgaaagcagagaggagaaacactaaggtttctcctaaagtgctctatttttaattctctctctttctatatatctatgtgactccgcctacatcactcagaccggtggtcatgtccctcatgtgacaattcgggagctgcaaggttttggtcttgt

SEQ ID NO: 77301 - DNA, 245 bp, Glycine max
  Clone ID: 700963290H1
cacaacagaaatcaaaatgttctgaatctgggaaggttgatgagatgaaaacatctgatgttgtcagggttgatccaggactgaagtccaaaatcgcagattttccttcttccttagtgatggagcaagataaagctgctgcatcatatgatagcccactggctgctgcagaaccaaaatattgtttgaccggagagaattgtgaaaatgctaatgaggaaccaaatccttcagaagctgagatc

SEQ ID NO: 77302 - DNA, 245 bp, Glycine max
  Clone ID: 700963291H1
gtttgtttggtggttgcagcatccttggcactggcagtgtttgtgtccataactgtaactggcaggcctggctatgcaggtgctgggctgagccctgcaagatgcctaggtccagcgttgcttcatggaggcccactatggaatgggcattgggttttctggcttgggcctttcttggcctgcataatctattatagtgtctccattaatctaccaaagaaaggtttgaattgggttgatggaga

SEQ ID NO: 77303 - DNA, 275 bp, Glycine max
  Clone ID: 700963333H1
ctagaaacttcctgaaggccgtggaagaggccgtagatgaggccagtagaagatgcggccttggattggtttgtaggtgtaggggccctgggaatttttgccccaccgatgtggaagggtattattctgttcaggtgccggattatgagcctggagtgtattctgatgctcagatcagaaaggccagaagtgaatttggagctgcggaaatgctttcttttctgaagcaattggcattgaatccacatggtggtgatcagagaagcattggtttc

SEQ ID NO: 77304 - DNA, 273 bp, Glycine max
  Clone ID: 700963335H1
cccaattacagtatgcttctacaaatgacatgaggtctcaactctgcttggctgccaaggatccaactggagaaagttgctctagtgacatggtacatttctttgcagaatttagaaaattcattagccatgattattatgcttccctggatcaggaaatgtctttggaacgaatgaactatgagaccggagtaacctctacagcagcattggcttctatgacacctgcaatggagccttgcagtgattcttattggactgatagaatatcca

SEQ ID NO: 77305 - DNA, 265 bp, Glycine max
  Clone ID: 700963385H1
aagtaagcaaagatggctttcacggaatcgtctctcctccttccttcggtttcaggaaccaacaagaacaagaacaaggttccagaagacaaatggtatttagcctacattgtgtattttaccctgggtctcggttaccttctcccatggaacgctttcatcaccgccgttgattacttctcctttctctaccctgacgccagcgttgaccgcatcttcgccgtggtttacatgatagtcgggctggtggggatctccctcataa

SEQ ID NO: 77306 - DNA, 259 bp, Glycine max
  Clone ID: 700963389H1
ctcataaaagagacatgacatttgaggaaaaacaaaaactaagcactaaccttcaaagtttgccttcagagaagcttgatgctattgtacaaatcattaagaagagaaattcagcacttaatcaacatgacgatgaaattgaagtggacattgatagtgtggatgctgagactctctgggagcttgatagatttgttaccaactataagaaaagtttgagcaaaaacaaaaggaggctgaacttgctcgagctagagca

SEQ ID NO: 77307 - DNA, 264 bp, Glycine max
  Clone ID: 700963403H1
tgcgtatctctttctctctccatttttatttatatatttctctccattatttggtgtgcatgctctagacacacacacaccccaccaccaccaacactgagttttagcagaaggatagagagcagaatgattcaaagaactgtgtcctttcccagtttaaggaaattgcttcttcgggctggttgttctaaatctgcttcgtccaagatcggaacttacaattgctttgcttctcagtcctcccctctaccgagccacaaccct

SEQ ID NO: 77308 - DNA, 262 bp, Glycine max
  Clone ID: 700963404H1
gtgatccctctctttcttttactttcgccaaatctgaacaacatgatcaacatcagagatccaagagctttgaggcttacggcgatgtttccaagtctggtgtgtggggcgtccttgctcagaaagccaaagaaattctggaggacgataagtcgtcatccccacaacacaacgacgtcatcaatatcatgccaccagttgtcgacatagacaaactcaaatcgcactcttttaatacctttgctcctcctcctcaggagaa

SEQ ID NO: 77309 - DNA, 261 bp, Glycine max
  Clone ID: 700963405H1
cggagagcttgcacaagatatggcacagcaacatgccatacaacaagattgctgacaggaaaggtcaccagggatggatgaaactagaaggtcaacactttatattccctggtggtggtacgatgtttccagatggagcagagcaatatattgaaaaacttggtcaatacattcctataagtgaaggtgttctgaggactgcgcttgacatggggtgtggggttgctagttttggaggatatatgctatctaaaaatattt

SEQ ID NO: 77310 - DNA, 260 bp, Glycine max
  Clone ID: 700963406H1
gtcatttgatctacaagcttggaggtattgacaagcgtgtgattgagaggttcgagaaggaggctgctgagatgaacaagaggtcattcaagtatgcctgggtgcttgacaagctcaaggctgagcgcgaaagaggaattaccattgatattgctttgtggaagtttgaaaccaccaagtactactgcacagtcatcgatgcccccggacatcgtgactttatcaagaacatgattactggtacctcccaggctgattgt

SEQ ID NO: 77311 - DNA, 258 bp, Glycine max
  Clone ID: 700963412H1
cagactgggcatagcatccacgctttaatcgaccactgcttcttctacttttctttcctcaaggttttggcgggagtcgtcgtcgtcattgaatcagccatgcctcggtactactgtgactactgcgacacctatttgacccacgattctccatctgttagaaagcagcacaatgcaggttacaaacacaaggcaaatgtgaggacctactaccagcaatttgaagaacaacaaacacaaagtttaattgatcaaagg

SEQ ID NO: 77312 - DNA, 260 bp, Glycine max
  Clone ID: 700963413H1
gagtcctccgtccccctcccgccggcgaacccttgaagcccaaacaggacccacacccacactcccagcagcaatcgtacctcaccaacgccgtgttcttcgggctgttcttctcgctggcgtacttcctcctccaccgatggcgcgagaagatccgcacctccactcccctccacgtcgtcacgctctccgagatggctgccatcgtctccctcatcgcctccttcttctacctcatggccttcttcggcattaccttc

SEQ ID NO: 77313 - DNA, 261 bp, Glycine max
  Clone ID: 700963415H1
gattgactttttttcttcttctattctcacacatacccatctactccttccctcatggctgaacaatcttccaactccatttacgatttcactgtcaaggacatcagtggaaatgatgtgagtctgaatgattacagcgggaaggttctactgattgtgaatgtcgcctctcaatgtggtttgacacagacaaattacaaagaattgaatgtattgtacgagaagtacaagaatcaaggatttgaaatcttggcatttccg

SEQ ID NO: 77314 - DNA, 264 bp, Glycine max
  Clone ID: 700963417H1
gttgctagctcctgtttctttcttttttgtcggagaaaatagtgatagtaatgtcgggtgaggagacacagaggaatgtgtttggcgcggaaacggcgtcgtccttggtgaaggagctgagggacaacttcggtaaaggaaccacgcgaagttacgaatggagagtgtcgcaagtgaaggctctattgaaggcggtggttgaaaacgaggaccagatcgtcggtgctctttgttccgacctagccaagcctccgctcgaaaccg

SEQ ID NO: 77315 - DNA, 258 bp, Glycine max
  Clone ID: 700963422H1
ctttgaagagctgactgcagcctataaaagtggagagttacatcctggtgaccttaaaccagcattggcaaagtcgttgaataaaattctggagcctgtaagggaacactttaggaaggacagcaatgctaaagagctattgaaaagggtcaaggcttacagagtcaagtaatatgctgattaaggacttcaggctaatatctattctttgccaatcagccatagaattttcacgttgagattatgcacttttggact

SEQ ID NO: 77316 - DNA, 255 bp, Glycine max
  Clone ID: 700963428H1
agcgctccgtgtgcctacacccaatgtttcagttgttgaccttgttgtgaatgttgagaagaagggtcttactgctgaagatgtgaatgcagcattcagaaaggcagctgaggggccgctcaaaggtgtattggacgtgtgtgatgttccacttgtgtctatcgacttccgctgctctgatgtttcctctactattgactcctccttgactatggtcatgggagatgatatggttaaagtggttgcttggtatga

SEQ ID NO: 77317 - DNA, 257 bp, Glycine max
  Clone ID: 700963436H1
cgccgcattactcctcaactgatctgggaaaataaggcgtctcttcttaccagctgctgctaatgtttttcctgcctgcaattttccatcttccctgcagaaatttccaaaacaaatagttgttggtgatttgtcaacatgaagaagttgttagattttgggaagaaagccctcttttatgttagggtgctttctggatatgaagagcgaagaatacgatcttataggctgcagcttgagcaacgtgtacaacaggc

SEQ ID NO: 77318 - DNA, 256 bp, Glycine max
  Clone ID: 700963438H1
gcagagcagagatctagcgtattctctcgctctttctttcactgtcacagagccacatccatgggcttcccagccaacggcgcctctgcggcccagcccctaaacttcctcatctacggccgcacgggctggattggcggcctcctcggctccctctgccgggcccagggcatctccttccattacggctcgggccgcctcgagaaccgggcctccctcgaaaccgacatagccctcctcaagccctcccacgtct

SEQ ID NO: 77319 - DNA, 256 bp, Glycine max
  Clone ID: 700963440H1
aaaaaaaataaaaatcccacttcctttttcttctttttttgttctttgttttttgtttgataagaaactgcgagaagaaagtaaaaggttcaatttttacccttttttcttcccagaagcgatctctgaagccgacccattttggaattcggaaaacccagtgctgatcgctctctgggtgttcccaaaatgaagcttcggagatcttcgctgtgcgtctttctagggtttctggtgctgttcctttcgccgccgc

SEQ ID NO: 77320 - DNA, 255 bp, Glycine max
  Clone ID: 700963445H1
ctgcaacagtagggtacatggcatccccagctagacaaagagaagatgacatgagaaaaccaccttcagggttccctgattgttccatcaagctgcatgcacatgaagttcggttccttgctgcagcaaggaaactagagtttggcaatggtgttcttttctatgatcgtatctcagttggtgcagatttgtctgatgctattggattcaaaggttgtagagaaattgaagggccttatgtggactatctagaga

SEQ ID NO: 77321 - DNA, 256 bp, Glycine max
  Clone ID: 700963447H1
gctggaggaattggtgttagtgttcacaacattcgtgccacaggaagttacatccgtggcacaaatgggacatcaaatggtattgttccaatgctgcgtgtgttcaacgatactgctcgctatgttgatcaagggggaggcaagaggaaaggtgcatttgctgtgtacctggagccatggcatgctgatatatttgaattcttggatttaaggaaaaaccatggaaaggaagagcatcgagctcgagatttgtttt

SEQ ID NO: 77322 - DNA, 259 bp, Glycine max
  Clone ID: 700963448H1
gaagctagctcaaccgagaagaagcaagggataatcattattagtcttctttctcttttggttactattgattgctccaatcatcgatactatgtctctaaaaatagcagcagaaatttatccaaaatcaccatcagagacagtgaaggagcctttggtggtggtaaaggaatatgatgaagatagacacaaggtcgctgtagagagacttgagaggctttgtgaagttgggcagagtggaaagccttctcttgtcact

SEQ ID NO: 77323 - DNA, 257 bp, Glycine max
  Clone ID: 700963450H1
attgatccttttcctgtcttgttttcatgacataaactatcatcaactgttgctttccattttggctataattccacaaaatgtgccatttattgcaagtgtaatattactagcatttccatatatcagtccatggcctccttaatgctcaatggagctcatcaaaatccaaacctcattagtggcatagctccaaatggccttaactttcacaacaagtgtttattccaaaagggtgtgctgtctcatggtaacaa

SEQ ID NO: 77324 - DNA, 256 bp, Glycine max
  Clone ID: 700963451H1
acatactctagttggaagtggtaaattactcgctaacagggaaggggagttgaacaagaaacagcagtgcctggcgaagaagagaaagaaaacaatcatgagcttcattctgtttccgattctctttgcatttacctttctgtcctcgcccgttctctctgcttcggatctggtcctcgccaaggttgaccgtcgcattgatctgacttcacagattgtgcgcatcactacttcactaaaggtgcagaatacggga

SEQ ID NO: 77325 - DNA, 254 bp, Glycine max
  Clone ID: 700963454H1
atttacaacaacaatggcttctgtgcctcaaccaaaaatctcccttctaaccttattcttcttctcgtccttcaccatcattgcgcatgcaattgttcctcaaaacgaaaccttcaaatttgagaactcaggtgaacttggaccctacatcgttgagtacggtgcagattacagaatgataagcatcttcaactctccattccaagttggtttctacaacaccaccccaaatgccttcactctagctttgcgtg

SEQ ID NO: 77326 - DNA, 253 bp, Glycine max
  Clone ID: 700963462H1
ggagttcatcgacattgttgagaccgtctaccgtggagccaggaagggacgtggtctcgtcatcgctcccaaagattactccaccaagtaccgttactagtttcattcatctgtaacatacaacaaactaaatattatctcttttcttacttctctggtgtggtgctggttgtggttgtatgatcattctgatttctgcttattcacaactctgttacatgaattgcttttgtcatatgctaaagtgttgtta

SEQ ID NO: 77327 - DNA, 253 bp, Glycine max
  Clone ID: 700963468H1
ggaaatagataatatttattacgaaacggaataccgaagagaatggtgcagcagcaagggtaaaccatcgacttgcttcctttttgccagaaaatttactcggactgctgctttaaggcttcttaatatgtctgttctgggagtgttcaattaagagaacaaaaggctctttgtcagagagactgatacaaggaagaaaaaatacacttagcaaaacaaataagaggaagaaaaggaataaagtaaaagcagt

SEQ ID NO: 77328 - DNA, 249 bp, Glycine max
  Clone ID: 700963473H1
ctcaatagatgatcttaatgtcaagtcagtacctatatatgatggcattcacacaaataaagttatgaagagaaagaaacggaaaaaagctgaagaaagtgatttatcatcatatgtgtctaatcatagtatattctcttactacgagaacaaaaaccgtggcgcttgtattgaagattttcgtggtgatgccttgagaggtaatgcagagattaatattgaggagttaaagtttaatgataagctgcc

SEQ ID NO: 77329 - DNA, 249 bp, Glycine max
  Clone ID: 700963475H1
agaagacacagtagtgttgtatccagccccaggcataggccacattgtatccatggttgagcttgctaagcttctccaattacatgctcattcaatcacaattcttctcaccacgggtctccttgaccacccctctatcgacacctacatacaccgaatctccatctctcacccttccatcttcttccaccgcctcccccacacatcactctccaccaccaccaccgtgagcatggccgccaaagcctt

SEQ ID NO: 77330 - DNA, 250 bp, Glycine max
  Clone ID: 700963476H1
ctaactcactcactcacaactcagtgaaagagaatccgaggcgaagagaagagaaaaattaagatggaggggaaggagcaggatgtgtcgctgggagcgaacaagttcccggagagacagccgattgggacggcggcgcagagccaagacgacggcaaggactaccaggagccggcgccggcgccactggttgacccgacggagtttacgtcatggtccttttacagagcagggatagcagagtttgtgg

SEQ ID NO: 77331 - DNA, 252 bp, Glycine max
  Clone ID: 700963478H1
aatggcttcgttatcgctttgcatagccatgacagcacccactccctcagcttctctcattctcactgccccaaaaccatcttcgctctctttgaaccttacccgcacttgctccaccgctcgctctccgcttctccattgctccttcctctcttctccttcccttctctctcccccttcctccatttcaggcttgtcacttggattggatttgacatctaattttgggaccagaagaggaaaaggttctgg

SEQ ID NO: 77332 - DNA, 253 bp, Glycine max
  Clone ID: 700963479H1
ggctctgcaattgcaaattcagaggatgtcgatcttcgagtacaacggaagcgccgtggtggctatggtcggcaagaactgcttcgccattgccagcgaccgaaggctcggcgttcagctccaaactatagccacggattttcaacgcatttccaagattcacgacaagctcttcatcgctctctctggcctcgccaccgatgctcaaacattgtatcagcgtcttgttttccggcacaaactgtaccagctg

SEQ ID NO: 77333 - DNA, 250 bp, Glycine max
  Clone ID: 700963484H1
ttcatccctaacgcgtgcatagcagagtcagagacagagacgcagccatggggcggagacctgcgaggtgttataggcaaattaagaacaagccataccccaagtcacgtttctgccgtggtgttcctgatcccaagatcaggatttatgatgttggtatgaagaagaagggtgttgatgagtttcctttctgtgtccatctggttagttgggagaaggaaaatgtttcaagtgaggccctggaagctgc

SEQ ID NO: 77334 - DNA, 247 bp, Glycine max
  Clone ID: 700963487H1
tctgttattacttttgcttgcatctctctgtgttcaatcttcaaagacttgaattcttcttacttaggttctgaatggctggaatttgctgtggtgttgtcggagaaggtgacactccggctccactcgagccaactactcgcccctccaggcgccggagtttggacatcttacccttaaaatacatcgctgacatggcggtgccgccgtcggatggttcacggaaacgtcccaagctggatctcag

SEQ ID NO: 77335 - DNA, 249 bp, Glycine max
  Clone ID: 700963493H1
ctctgttccgttggcgggtgggtctttcttctctcaaaatggccaccggagtgaccagaaaaatttctgctgcatcagctcgggcccacaccagaagggcgaagaaaaccaattctctaccccttccttcaggaattcttggaacagcactagcagtgttgtttattgggtttctagcatgggcttatcaggttattcaacctccccctcccaagatatgcggcactcctgatggaccacctataacag

SEQ ID NO: 77336 - DNA, 289 bp, Glycine max
  Clone ID: 700963605H1
ggcaatggcatttccgtccgtaacctctgtaactgtggagaacgtgacattccctctcaccgtgaagcctccctgctcccccaacaccttcttcctcgccggcgccggcgtcaggggcctccaaattcatcacgctttcgttaaattcactgcctctgcatttacctccaatacgacgccctttccttcctctccgttaagtggaaaaccaagtctgctcaccagttaacggaatccgaccaattcttctcagatatcgttacaggtccattcgagaaatttatgcagg

SEQ ID NO: 77337 - DNA, 288 bp, Glycine max
  Clone ID: 700963607H1
gctcttgagagcggatcgaagaaacagatgaacaacacattgcatcctctcagtgttctcaagctctccaaaagaatgagcactagcatgagggagtccattctcccaatttgtctcttagatgcaactgcttccccttgcaggtcaccttggagatctttactcatcatgagattcaggttgcaaccaattcttttagccaagaaaatttgattgggaagggtggttatgctgaagtttacaaagggtgtttgccaaatcgtcaattagtggcaattaaacgtttaa

SEQ ID NO: 77338 - DNA, 287 bp, Glycine max
  Clone ID: 700963628H1
gggagaacccaaaggatcctgatgaagttttagtcaagtatgaagcatgccttgaagatggaactcttgtggcaaaatctgatggagtggagttcacagtcaatgatggttatttttgtcctgctttgtcaaaggctgttaaaaccatgaagagggagagaaagtgcttctgacagtgaagccacaatatggatttggtgagaagggtaagccagcacatgatgaagaaggtgcagttccaccaaatgcaacattgcagattactcttgagttagtttcttggaaga

SEQ ID NO: 77339 - DNA, 286 bp, Glycine max
  unsure (1)..(286): unsure at all n locations
  Clone ID: 700963644H1
gctgctagctattagctatggctagaggaaagatccagatcaagaggatagagaacaacaccaaccgccaggtncacttactctaaacgacggaatggccttttcaagaaggccaacgagcttaccgttctctgcgatgccaaggtttctatattatgttctccagcactggaaaactccaccagtacatcagcccctccacctcaacaaagcagttcttcgatcaataccagatgactctgggagttgatctctggaactctcattacgagaatatgcaagagaa

SEQ ID NO: 77340 - DNA, 289 bp, Glycine max
  Clone ID: 700963648H1
tatcatcaatattcttgtcaattgcctctacatgaaagacctgctctaccaattgacccaagagctagtgatggtatgaatggatatctctggttgtacgaaaggaatgtgctcagaaccactgtatcttctcccatcaagggattgcaagacttgagtttaatcaagttttaaatattacttatctcaatcctcgtaaacatagacatattccaaaacctccggatggtgtactaatgccaaaaaagatattaaaagccattgacattaaaccttttcctgtgttatg

SEQ ID NO: 77341 - DNA, 287 bp, Glycine max
  Clone ID: 700963650H1
agagaatccgaggcgaagagaagagaaaaattaagatggaggggaaggagcaggatgtgtcgctgggagcgaacaagttcccggagagacagccgattgggacggcggcgcagagccaagacgacggcaaggactaccaggagccggcgccgcgccactggttgacccgacggagtttacgtcatggtccttttacagagcagggatagcagagtttgtggccacttttctgtttctatacatcactgtcttaaccgtcatgggagtcgccggggctaagtctaagt

SEQ ID NO: 77342 - DNA, 284 bp, Glycine max
  Clone ID: 700963657H1
gggagttcaagaatttggagacaaaaggggttcctttcccaaagaaccaacccatgagaatatactctagcctttggaacgctgaggattgggccacaaggggtgggcttgtgaaaacggattggagcaaggccccattcacagcctcatcagaaacttcaatgccctaacctcttcctccactggccaatcactggacgccacggggctggccaagatccattgggtgcaaaagaattacatgatttacaactattgcactgatattagacgtttcccacaag

SEQ ID NO: 77343 - DNA, 283 bp, Glycine max
  Clone ID: 700963659H1
gaagaagatcaaggagcagtttcataccgagaccttggacaatgttcagaaactcactggcatcacccttgacattgtgagtggtttgtccaacatcctcgagaagttcgggttgaagtttaatcttaaacccgcgtctcgccgtcttctcgcaaggatgggttgcccacttggttctctgctgctgatcgtaagcttttgggtcgtggatggagatcacgtgtcaagcccaatgttgtggttgcccaggatggcactggtcagttcaaaaccgttgccgatg

SEQ ID NO: 77344 - DNA, 287 bp, Glycine max
  Clone ID: 700963662H1
ctctcttctttttactctctctctgtctctctctacgctttctcgttcgagatccctcaagggatccactaactgaaggagaaatggggttgacattcaccaagcttttcagccggcttttcgccaagaaggaaatgcgaattctgatggtggtctcgatgcagctggtaagaccaccatcctgtacaagctcaaacttggagagatcgttaccacaattcccaccattgggttcaatgtggagactgtggaatacaagaacattagtttcactgtctgggatgttg

SEQ ID NO: 77345 - DNA, 282 bp, Glycine max
  Clone ID: 700963687H1
gccactgccataactcactcactagcttcttctctgttctcaccaatggcatcaacaatatcagcaatggccatgatcaacgccaaatgcgtcaacccaaagttccccaatcccaccaagctcgcaccatcaaaaccctcccttcagacaaccttccaaagggcctcatagcctcacccgaaagcactaaactttcccccgcgacagcaatcgcaggagcaatattcacaaccctcggaacctgcgacgccgcattcgctgttcaacaaatagccgacatag

SEQ ID NO: 77346 - DNA, 280 bp, Glycine max
  Clone ID: 700963691H1
ctcactcaatggcttggcactcgttcctcttattagcgacggccattctcgccgttgtgtgctccgccgtgagcggttgctcgccatcggatagggcggcgctgctggccttccggaaggcgctgagcgagccctaccttggcctctcaactcgtggacgggctccaactgctgcctcgactggtacggcatcagctgcgacgccaccaccggccgcgtcaccgacatcaacctccgcggggagtccgaagaccccatcttcgagaaagccggtcgctcc

SEQ ID NO: 77347 - DNA, 281 bp, Glycine max
  Clone ID: 700963692H1
ttcactctcaagcttcaagcatgactcctttttacttcctcctatttgccttcatccttttcctctccataaacttcttgatccaaacaagaaggttcaaaaaccttcctccgggaccattttctttccctataatcggaaacctccacaactcaagcaacccctccaccgcacgttccatgccttatcacaaaaatatggccctattttctccctctggttcggctcccgttttgtcgtcgtcgtttcgtcgccgctcgcggtgcaagaatgcttcacca

SEQ ID NO: 77348 - DNA, 283 bp, Glycine max
  Clone ID: 700963694H1
gtgctcagcaacaccgctgccaacggcgaggagctggtggcggatgctcatttgttacctgccaccgcggttgggcagaaagccggtgacgctattaagaagtatttgttttctgatgcgaaaccgacggtgaagattttgtttgaaggacaaagttggggattcagccatctcctgtggtggcagcgtttagctctagaggacccaactcgatcaccccgcagatccttaagccagatcttatcgcgccaggtgtcaacatcctagccgggtggtccaaggc

SEQ ID NO: 77349 - DNA, 284 bp, Glycine max
  Clone ID: 700963695H1
gtggtacttctttagtccacgagagaggaagtatccaaatggggtgaggcctaatagagcaaccgtgtctgggtattggaaggccactggcacagataaagcaatctatagtgggtctaagcatgtaggggtgaagaaggctttggtttttataagggtaagccaccaaagggtctcaagacagattggattatgcatgagtatagattaattggatcaagaagacaagccaatagacaagttggatccatgaggctagacgactgggtcttgtgtaggatcta

SEQ ID NO: 77350 - DNA, 265 bp, Glycine max
  Clone ID: 700963701H1
gttggcttcatagggactggactccctccttttgttgcattaagagctgacatggatgctcttcctctgcaggaaatggtggagtgggagcacaagagtaaagtacctggaaagatgcatgcatgcggtcatgatgctcatgttgccatgcttctcggtgctgcaaagatcctcaaacggcatgaaaatgagatacgaggaactgttgttcttgtttttcaaccagcagaagaaggaggtggaggggctaagaaaattttagatg

SEQ ID NO: 77351 - DNA, 263 bp, Glycine max
  Clone ID: 700963706H1
cttttcccaatactcattatcatcaccatatctgggtgtcaatgctacaaaaatttcaaattattttgagagaaaacacgtcagcttagaaaccaaatccaatattagacaaacctgttgtatgccacaaatcacaatccaatccctaattttgtatcttgcaaagcccccaacccccacacacacaaaaaaaggggaaagtcacttaaattaaaaccctgagaatgtgaaaattttgaaactcgcatcaaccgactctgacc

SEQ ID NO: 77352 - DNA, 259 bp, Glycine max
  Clone ID: 700963710H1
atagaagcaagattatcttccttttggaatgtgtacttaaatttctctgattaattatttccaggaaaggtatatcgggatatagttggtagtgcttactatgttgctcctgaagttctgcggcgcagatgtgggaaggaaatagatatatggagtgcaggagtcatattgtatatcttacttagtggagtccctccattttgggctgagactgagaagggaatatttgatgccatattggaaggtcacattgattttg

SEQ ID NO: 77353 - DNA, 260 bp, Glycine max
  Clone ID: 700963711H1
taaccctcttctttttgtttttgtataatcccttcaaatttgcattaggtaaaaaagaggctcccgaagttgcaggtgcatggccaatacttggtcacctaccactattgagtggttcagagacacctgatagggttttgggtgctttggctgataagtatggacccatattcaccatcaacaatggtgtcaaaaaggttttggtaatcagcaactgggaaattgctaaggaatgcttcaccaaaaacgacatcgtcgtt

SEQ ID NO: 77354 - DNA, 261 bp, Glycine max
  Clone ID: 700963715H1
gatcgcaaaggacaagcgcggttggatcttcgatcccatagcacccattattgttggatgcaattggaatacggcgtcgtttttggtttggaagtgtttaccgcgtgttcgtttgtgaaacaattctctgaactactgattaaggcagctagtgattatggtgctttgacagcatcagtggcaaatttttagtggagaggaatgaaagaggatagggtcatgctgcattttgatttttgacaggtgtaggctaggggaggc

SEQ ID NO: 77355 - DNA, 261 bp, Glycine max
  Clone ID: 700963723H1
gcatgattagggactccgccgaccattatggattgagaacaaggagtgatggtgatgccatctccatttttggatccaccaacatttggatcgatcatgtttccctctctaactgtgccgatggtcttatcgatatcatccaaggctccactgccatcaccatctcaaattgccacatgaccaaacataatgatgtgtttctctttggtgctagtgactcatacaacggagacaagatcatgcagatcacagtggcattca

SEQ ID NO: 77356 - DNA, 261 bp, Glycine max
  Clone ID: 700963747H1
cgacgacgatgatctcgaagagggtgagatccccgtcgacggcgaagatagcggcgccaccgccacaacgaagcctccggccgccctcgcccgaaacccccaccctctggagaattcctggaccttctggttcgacaacccttcctccaagtccaaacaagccgcatggggcagctccatccgacccatctacactttcgccaccgttgaagagttttggagcatttacaataacattcaccacccgagcaagttgggttt

SEQ ID NO: 77357 - DNA, 259 bp, Glycine max
  Clone ID: 700963755H1
ggtttttcttttggtcctgggtctgagaccgcggtgtcccctaacccattggtcagagaattatctgctcgcggtgtgtggtgtgtggctgctgctgtcacaagagaattttgcacatgacattttgatgagaagacaaatagatggaaaaatgtgctatgatcaattggtgcgctcttgattcattatcaggagatgcacatgcagcacgtcatgctattgttaaggaacctgttgccgatattttgggagcgcatta

SEQ ID NO: 77358 - DNA, 258 bp, Glycine max
  Clone ID: 700963759H1
gaagtatatccctagggaaaaataatttcttcacatttacaatgaagcaatccactctattcctgttcctattcctattccccctcgttcatgctctttcttacgaagctgcttatattagagatggcctcaaatcctattcccagcttgatctccctcactccgtttttggttctgaaagtgtagccttcgattgccatgggaaaggaccatatgttggagtgtctgatggtagaattctcaagtggcaagagacaa

SEQ ID NO: 77359 - DNA, 258 bp, Glycine max
  Clone ID: 700963760H1
gcaccagtttcaccgcacgaatatcttgttgtttggagcgatccgagaaaaactctgtaaacatgttggtttaccaggacctccttacaggtgatgagcttctctctgactccttccgttacaaggaaattgagaatggaatgctgtgggaagttgaggggaagtgggttgttaaaggagcagttgatgtagacattggtgcaaacccttctgctgagggtggaggagaagatgagggagttgatgatgcagctgtta

SEQ ID NO: 77360 - DNA, 257 bp, Glycine max
  Clone ID: 700963792H1
gaaagcagctcgaggacggccgcaccctcgccgactacaacatccagaaggaatcaacccttcacctcgtcctccgtctccgtggtggcatgcagatcttcgttaagaccctcaccggcaagactattaccctagaagtcgaaagctccgacaccatcgacaacgtcaaggctaagattcaggacaaggagggaatccccccagaccagcagaggctgatcttcgccgggaagcagctcgaggacggacgcaccctt

SEQ ID NO: 77361 - DNA, 216 bp, Glycine max
  Clone ID: 700963796H1
gaagaagatacgaaacctcaagtttaatctacctattagatgttgggttaggatattaggattttaatgccttttgaacttgtttttgttatacatctttgaagatattttaaccttgtgagcaacgaattggcattttgtggatttcttatgtgtattagtttcctgccaccttattttctcctgaatttattgtttattgtttagaacaatgtg

SEQ ID NO: 77362 - DNA, 250 bp, Glycine max
  Clone ID: 700963806H1
tggattcgtatgtttatcaggatagaattcaaatgttaaccctttcattgtcttcaatttttctgtatttgatttattaaaacattagttacatattgacgagaaaagatcacaacatttaaatttttgtatgattattaaactcttttcaatttggtctttcttttataataaccacaattttcttattttattaatttctaagttgcatttgttgcaaagtatattattaaatacttataattaaata

SEQ ID NO: 77363 - DNA, 248 bp, Glycine max
  Clone ID: 700963809H1
cttcgcaacacaacaaaaaaagacaacccagagagcgcgtcttaataaacgctcttctctgaaaacccccatttcttttcttctttcttcttctctttcgcttcttcgatcttcgatcttcgtcgctgaaaatgagagagtgcatttcaatccacatcggccaggccgggattcaggttggaaacgcctgctgggagctttactgcctcgaacacggcattcagcctgatgggcagatgccaagtgac

SEQ ID NO: 77364 - DNA, 245 bp, Glycine max
  Clone ID: 700963811H1
gttcaagctttgcttgcaactaagctaattgacgaaattggccattcacttgcaaaagggcatgatttcatcaagaagtctcaggtgagagacaacccttcaggagattttaagagtatgtatcgtcatattactaaagggtcttggacattctcagatcaagaccatggatggcaagtttctgattgcactgcagaaggtttaaagtgttgtcttcttctatcaaagttgtcaccagagattgt

SEQ ID NO: 77365 - DNA, 248 bp, Glycine max
  Clone ID: 700963822H1
atttcatactctattatcggccttcgtttcgttcgttagtttctcagtcgtttgttctgagatcaaccttgcatcagggttagggaatggctgctatcttagctcggaaatcactccttgctcttcgtgcgcgccaattggctgtaagcggtcaagggctgcacagctcccaaaactatggccttcgattaagtgcacactcctactctaccaaaagagaggatgaagaaagggagcaactcgcaaag

SEQ ID NO: 77366 - DNA, 246 bp, Glycine max
  Clone ID: 700963823H1
gcacacgccttgttctttgcaccggaagcactcacttgtatatgtggaccccatctggcgcctattgtgttcatgttcctctatcgcaatttactataacagacctgaaatggaattctgatggcagttgtctacttcttaaggacaaggagtcattctgctgtgcagctgtacccttgttgccagaatctagtgagtacagctcagatgattgatgatcacgagggaatgaaacaaaatgatggt

SEQ ID NO: 77367 - DNA, 245 bp, Glycine max
  Clone ID: 700963828H1
agttgccaaactatttttctctctcctttttttgacttttctttctttctgcaactccaaaatgtcttccataggggcaaaaaatctagcactctcctcagcctttttgctccttttggtcggttttgcaacctcagacatcaaccaagacaaagcagaatgtaccgacaaacttcttggtctagctggttgtcttccctatgttggtggtgaagccaaagtccccgccatggattgttgctctg

SEQ ID NO: 77368 - DNA, 247 bp, Glycine max
  Clone ID: 700963829H1
aaagggattcatcgttcttcttcccaggttatttagaaaagcaaaatggtgaagatttgctgcattggtgctggatatgtggggggtcctactatggcagtcattgcacttaagtgcccatccattgaagtcgctgttgttgatatctctaaatcccgcattgcagcctggaacagcgaccagcttcctatctatgaacctggccttgatggtgttgtgaagcaatgccgtggcaagaacctcttct

SEQ ID NO: 77369 - DNA, 251 bp, Glycine max
  Clone ID: 700963831H1
gcgtttttcctccatttccttcttcgctagattacccagatctacgacgagtctctgctatgaattaattctcatatctcaaaatcattcaccgttttcatttcattctaactaatctttccagaaccctcgaatctcttctttcgaacgtgcaaagatttttgacttgaccgaatgctgttgcggttgaaatcggtgtgagaaatagggtttcgacgatgccttcgcttccctttggactccttctacgc

SEQ ID NO: 77370 - DNA, 252 bp, Glycine max
  Clone ID: 700963836H1
ttaactttcccctttgaaatcctttctcagttctgcgccaactgaaacgcagatcgaactccgccgtagccatcatcaccgatcgaacttcgcaagacagagatcagattctgattccgacacagtaacagtatgagcgtcatcgacattctaacccgagtcgattccatttgcaagaagtacgacaaatacgacgtcgataagcaccgcgatgctaatgtctctggcgacgatgcctttgccagactctac

SEQ ID NO: 77371 - DNA, 243 bp, Glycine max
  Clone ID: 700963843H1
gccatgtgttcaatgggttgatgacaaccttaagcaaagcaaagaagattgttttgctcattcaatggaatacgatattgagactaatcaagttcgagcactcacggtaaagacagatccatggtgctcatgtggaggacttacacctgatggtaccctagttgttgctggtggttttgcagacggagggaaaacctccagatactatggcggtcaacctgattgccaagactgtgactggag

SEQ ID NO: 77372 - DNA, 250 bp, Glycine max
  Clone ID: 700963847H1
tctgcctgcagtctccaacaaaacagagtctataagattcattcatcacataaccgcaaaaccttcgctcgcgttcacaacacaaaccctagaagccaacgtttttcagggttgttagagcacgatggttcagtataattttaagaagatcactgtggtgccaaatgggaaggatgtcgtcgacatcatcctctctcgcacccagcgtcagacaccaaccgttgtgcacaaaggatatgctatttcacgg

SEQ ID NO: 77373 - DNA, 242 bp, Glycine max
  Clone ID: 700963859H1
ggttgatccatgataattcttctgggtaaactttcaatattgagggagtaaagcacttgttaattacttgctgatctctctcttttctcactcttggacacacgcacacagaggtcaggattgtggaatgtgaacgctgtaatacttgatcttaccacagttagtaagttctcatgacatacgagattcactaatcttttttgatacatgaagggcccaaagggctgagattcactagtcta

SEQ ID NO: 77374 - DNA, 246 bp, Glycine max
  Clone ID: 700963861H1
cagcgggataaagtgtatcccgaaggaatacgtgaggcctcaagaagagctcaagagcatagggaacgtgtttgaggaggaaaagaaggaagggctacaggttccgacaattgacttgagagagatagattcggaggacgaggttgttcgagggaaatgtcgtgagaagctgaagaaagcggcggaggagtggggtgtgatgcacttggtgaaccatgggatccccgatgagctgatagagcgggt

SEQ ID NO: 77375 - DNA, 251 bp, Glycine max
  Clone ID: 700963865H1
gaacctaccctcaaatacccggtggagatccacggtgttatcctagcaccggttccgcagttttgcttcctcttcgagaacctaatgtggaggctgaggttctgatttgtggtggagccccgagaggggcttttcggaatactctctcgggtaagtttgttggagcgttgagaacttgcgctcggattaaaataaccgacccgaaagcgaattgggtgatggaaaccatgccgggtgcgagagttatgagt

SEQ ID NO: 77376 - DNA, 250 bp, Glycine max
  Clone ID: 700963867H1
gtttggtgtgagtgaatagggatcagggatgtggaggctgaagatagcagatggaggaaatgatccatacatattcagcacaaacaatttcgttgggaggcagacatgggagtttgatcctgaagcaggcagtccagaggaacgggcccaggttgaagcagctcgtcagcatttctaccacaaccgcttcaaggtcaagccctgcgctgacctcctttggcgttttcaggttctcagagaaaataacttc

SEQ ID NO: 77377 - DNA, 240 bp, Glycine max
  Clone ID: 700963874H1
accacattcaaatccaaatggccctttacattacactaataattggcctcctagtaaacaccctagtactctataaatagcatttgcatgcaccttagtcttcaccaaaatactcctcttggcatcttgtgttgtgtccctcttttaagctatttccttctcttaacacaattggttgtgccaattgccatagtcaccaaccaattaacaaaggtatatatatcatcatatcatcaccaa

SEQ ID NO: 77378 - DNA, 250 bp, Glycine max
  unsure (1)..(250): unsure at all n locations
  Clone ID: 700963882H1
cttcaaggttcaagtataagancccaaaggggcatagatcagctattagaatctcacgcatagtgtctgagacacttaggcttgggatggaggatgtgaggtggtttgtgatgggggatgatgacacggtttttgtggcagaaaatttggtgaaagtgttgcaaaaatatgaccacaatcagttttattacattgggagttcctcggagagtcacttgcaaaacatttatttttcttataatatggctng

SEQ ID NO: 77379 - DNA, 243 bp, Glycine max
  Clone ID: 700963887H1
ctctgtctcagccaacaacacaacaatcaatgtacgctgcatcaaccatgaaatccatgtacaagcctccattgcccagatctccaattcgccttcgaccctctcatgctgttcattcatcaaactctatcgctcttcaaaccccaccaggttccttgaccaaatctcagaaacctgttatctctccaaacatgcgacccgaataccgcaccatttcgtgcgaattacgggctctgaccaaga

SEQ ID NO: 77380 - DNA, 241 bp, Glycine max
  Clone ID: 700963890H1
gagagatttgatagcctcaactcaagtaagggttttctctttgagaaaatcgtatcttacaccttttggtgaccactttgagtgagagaagagaaattaagagagatactcaaattagattcaagagagatggccatcaaccatgaaacttgggctttcattttcggtcttctaggcaacgtgatctcctttatggtgttcctcgctccattaccaactttttaccaaatctacaagaaaa

SEQ ID NO: 77381 - DNA, 250 bp, Glycine max
  Clone ID: 700963896H1
cgatcaaacacaaaatggaaaagaatgtggggattctcgccattgacatctacttccctcccgcttgcgttcagcaggaagcattggagactcatgatggtgccagtaaagggaagtataccattggacttggccaagactgcatgtcattctgtaccgaagtagaagatgtcatctcaatgagtttgacagtggttacttctcttcttgagaagtatgggattgatcctaaacaaatcggtcgtctgga

SEQ ID NO: 77382 - DNA, 249 bp, Glycine max
  unsure (1)..(249): unsure at all n locations
  Clone ID: 700963920H1
cttctctttacacncccctcnctattttgcgttcattctgttttccagttgaagtctttccntagccaatggncactnattgnttgacccgggttcacagtgtccgtgagaggcttgatganaccctcactgncaacaggnacgaaattttggcccttctgtcaaggatcgaagctaagggcaaggggatcctgcaacaccaccaggtcatgctgagtttgaggaaatccctgaggagancatncnaaa

SEQ ID NO: 77383 - DNA, 258 bp, Glycine max
  Clone ID: 700963928H1
ccagagccaaggtaggttaaacactcttcttcatcgtcgtcgcaatgggacgtgtgatccgtgcgcacgtaagggagcaggctcggtcttcaagtcccacacgcaccaccgcaagggccctgcccgcttccggagcctggatttcggagagcgcaacggctacctgaagggtgtcgtcactgacgtcatccacgatcctggccgtggcgcgcctctcgctaaggtcgccttccgccacccgttccgctacaagaagca

SEQ ID NO: 77384 - DNA, 266 bp, Glycine max
  Clone ID: 700963930H1
ccttgctaccaacactgagcttaaccgagcttcgcaaagatgaatcgggaaaagttaatgaagatggccggttcggttagaactggaggaaagggtactgtgagaagaaagaagaaggctgtccacaagacaacaaccacagatgacaaaaggcttcagagcaccctgaagagaataggggtgaatgccatccctgctattgaagaggtcaatatctttaaggatgacgtagttatccagtttctaaatcccaaagttcaagcatc

SEQ ID NO: 77385 - DNA, 252 bp, Glycine max
  Clone ID: 700963943H1
gcttggtttggctaggaaaattaccatctccaaggattctaccactgtcattgctgatgctgcgacaaaggatgagttgcaagccagggttgctcagttaaagaaggagctgtctcagacagactcagtatatgatactgagaaactggctgagaggatagctaaactgtctggtggagttgcagtcatcaaggttggtgctgctacagagactgagcttgaggatcggaagctccgaatagaggatgccaa

SEQ ID NO: 77386 - DNA, 248 bp, Glycine max
  Clone ID: 700963951H1
ctggaacttgtctcaggagcaagaacaacccctttggagtgaaggcattaaggcgtactccagcgaaaccccattggaccttcggacgtaagaacaaggtcagcagtgcttaagcagtttaaggaaatgtgaacgtgcagaaggagccaatgatgaagtaaaagggaagacgaaggactaaagcaccagctggatgcacttcccccttcttcacataatgctgcacgtaacataaagatctttaccat

SEQ ID NO: 77387 - DNA, 242 bp, Glycine max
  Clone ID: 700963986H1
caacttctgctacttcctactccaaccgcacttctgctccgcaattatcatgggcaaggtcaagatcggaatcaacggatttggaagaattggccgtttggtagccagagtggctctgcagagagacgatgttgaactcgttgccgttaacgaccctttcatcaccaccgattacatgacatacatgtttaaatacgacagtgttcatggacactggaagcatcacgatgtcaccgttaagg

SEQ ID NO: 77388 - DNA, 243 bp, Glycine max
  Clone ID: 700963987H1
tcttctgctactgctgctcaacccacacaccaccctgggagcgcagaacctcatgctaccctaccataacggcgccctcctcaaaggaaccattaccgttaacctcttatggtacggcagcttcaccccaatccaacgctccataatcctcgacttcattaactcgttaagttccaccgcgggggccccacttccctccgtagcatcgtggtggaagaccacggacaagtacagggggggatc

SEQ ID NO: 77389 - DNA, 252 bp, Glycine max
  Clone ID: 700963993H1
gattactggtacctcccaggctgattgtgctgtccttatcattgactccaccactggtggttttgaagctggtatttctaaggatggacagactcgtgagcatgctcttcttgctttcacccttggtgtgaagcagatgatctgctgctgtaacaagatggatgccactaccccgaagtactctaaggctaggtatgatgaaattgtgaaggaagtctcttcctacttgaagaaggttggttacaacccaga

SEQ ID NO: 77390 - DNA, 269 bp, Glycine max
  Clone ID: 700964007H1
atttctccatttccattttctctctcacttttcaagaatcgtaagctatgggaaagtcttacccaactgtgagtgctgattaccagaaggccgttgagaaggcgaagaagaagctcagaggcttcatcgctgagaagagatgcgctcctctaatgctccgtttggcatggcactctgctggaacctttgacaagggcacgaagaccggtggacccttcggaaccatcaagcaccctgccgaactggctcacagcgctaacaacggtctt

SEQ ID NO: 77391 - DNA, 269 bp, Glycine max
  Clone ID: 700964009H1
gtgaagtatatccctagggaaaaataatttcttcacatttacaatgaagcaatccactctattcctgttcctattcctattccccctcgttcatgctctttcttacgaagctgcttatattagagatggcctcaaatcctattcccagcttgatctccctcactccgtttttggttctgaaagtgtagccttcgattgccatgggaaaggaccatatgttggagtgtctgatggtagaattctcaagtggcaagagacaaagagagagt

SEQ ID NO: 77392 - DNA, 268 bp, Glycine max
  Clone ID: 700964012H1
gttagactttgatagtttgattagctctaataaggttaaggaccagagaaagagagaaagaaacagaatttggaagaaaaaaagcacaagatgggttattggaagtctaaggttcttcccaagatcaagaaggtttttgagaagaatagcaccaagaaagctgctgctgctgaggccaccaagtcctttgatgagtcaaaggaggaatacaacaaagcctttgaagaaaagaagactgaacttcaaactaaagtagttgaaatatacg

SEQ ID NO: 77393 - DNA, 267 bp, Glycine max
  Clone ID: 700964023H1
attgaattctccagagagaagaagaaacttaatcgatcatcacttcacttcactaatacatcatggcagacgagacccagaacaagtatgagagctctgaggttgaggtccaggatcgtggtgtttttgactttctcggtaagaaaaaggatgaagaagacaagcctcatcctcaggaggaggtcatcgccaccgagtttcaaaaagtcactgtctcagaccaaggagagaacaagcacagcctcttagaaaagcttcaccgatctg

SEQ ID NO: 77394 - DNA, 267 bp, Glycine max
  unsure (1)..(267): unsure at all n locations
  Clone ID: 700964029H1
attctctcacacaaaataatngacaagaagcttgggcaacacgtctcatgatcctgaagtgagaaaggggccatggacaatggaagaagacttaatcttgatcacctatattgccaatcacggggaaggggtttggaactctttggccaaggctgctggacttaaacgtaccggaaagagttgccggctccggtggctaaactacctccgtcctgatgttagaagagggaatattacacccgaggaacagcttttgatcatggaatt

SEQ ID NO: 77395 - DNA, 263 bp, Glycine max
  Clone ID: 700964040H1
cggaaataaaaaaatcccaaagaaattcaatcttcttcatccccaaaccaaagacttgagatctcagattacaccctttcttcctttgttttctcattcctgtcctttctcagacaacaccatctctctctctcttgttccctttttagggtttttgtaatgggtctcggtaacgacgaagaagaggataacaataacaatgataaggttgtggatgacggagatgttggaggaggaaagtctttcggttcagtgtcgtgttc

SEQ ID NO: 77396 - DNA, 263 bp, Glycine max
  Clone ID: 700964041H1
gtttctccctttctctctgtctctctctcgctcttcttctcatccagcaccgagtcacagactcaccgatcttccgattccctttcgtcttggtttatgagctcgaaggagagacccactcttggtggcacgcggattaagacccgcaaacggaatattgctgcgccgctggaccctgcagcattctcggatgcagtggtccagatttatttggataatgctggtgatctggaacttattgctaagagcattgaatcttcaga

SEQ ID NO: 77397 - DNA, 271 bp, Glycine max
  Clone ID: 700964048H1
tctctctctgattcgatcgatttcgattgttgaattcatcacatcacggagccttgtacgttgacaacgatggtgctgccgctatttactgctttcattctctttgcttttattccgaatggattgttagcagttccttccaccgtcccggcattcctttggtcatcacattatgaactggcctctgaaaatatattgaaggaatctgtaaattaccaagtcatttctccgaaggatctagcaaaatctattttatctgaagcaggctggt

SEQ ID NO: 77398 - DNA, 262 bp, Glycine max
  Clone ID: 700964051H1
ggttgacaatgaacatgggagttaaaaaattgcaggagaaggtgaagaaataaagtgcatctttgaagaaaattgaagaaagaaagagtcattgtgcgatttgttattggataatcatgtggaaacaaatggtgcattccaaggaaaggcaaaattgctctttgctcatgctggagacaaatgggatgctgagttttatgcaaaagtcaatgatgatgtctatgtaaatattggttagtttttctttgacttaaaccctgca

SEQ ID NO: 77399 - DNA, 260 bp, Glycine max
  Clone ID: 700964052H1
gctctctcactcacaaacgcacactgaattcaaaaacatcgaaagagagaggcatggccgagcaaaccttcatcatgatcaagccagatggcgttcaaagaggccttattggcgagattattagcagatttgagaggaagggtttttacttgaaagggttgaaactcgttactgtggaccgtccttttgctgagaagcactatgctgatttgtctgcaaagcctttctttagtggtttggtggattacattgtctctggc

SEQ ID NO: 77400 - DNA, 261 bp, Glycine max
  Clone ID: 700964056H1
cccgaagcagccatggggatcgatctcaaggccggaggtaagagcaaaaagaccaaaagaacagcacccaagtccaatgatatctatctcaagctcttggtcaagctttatcgcttccttgttcggagaactggcagcaacttcaatgctgttatacttaagagattgttcatgagcaaggttaacaaacccccattgtctttgtcaaggttgattaagtatacgaaggggaaggaagataagattgcagtggtggtgggg

SEQ ID NO: 77401 - DNA, 261 bp, Glycine max
  Clone ID: 700964058H1
gtggaacgcctgtctgctctaagaactcgtatagttgtaatggctggccaagaaggtcctacaattacaagaacaaaaaggaaaagtgccacccaacatggaggttcaacactggctgatcttcagcaggctcttgaagactacttgcttgtacttttgggattagttgaaaatggaagccatttacaatacaaagtacaatttgcttgggtgaatcaagaggatgaagcagaggaaacaaccatgtctaatgcttggtat

SEQ ID NO: 77402 - DNA, 261 bp, Glycine max
  Clone ID: 700964059H1
agcactcatccacacattctccgtcgccacgacaacaatggctccaaagaaaggtgcgaaaggtggagttgtagcagcaaagaagaaggttcaggagaaggtaacgaaccctttgttcgagaagcgtccgaagcagttcgggatcggaggcgcgctgccgccgaagcgggacctgacgcgcttcgtgaagtggccgaagaacgtccaaatccaacgcaagaagcgcatcctcaagcagaggctcaaggtccctccggctct

SEQ ID NO: 77403 - DNA, 266 bp, Glycine max
  Clone ID: 700964062H1
aaagaatgcttgtccctggcagttgataatcttcctgttcttgatgggaagactccagtccaagtgtaccagagtttctgtgagagcttcaagtcttcattctctccattcatgggctctacgatcatgagcatttccatgggtttaggaccggatggtgagctacgttatccatctcacccccagctgccgagtaatggaaaaactcaaggtgctggggaattccagtgttatgaccaaaacatgctcagctttctcaagcaaca

SEQ ID NO: 77404 - DNA, 261 bp, Glycine max
  unsure (1)..(261): unsure at all n locations
  Clone ID: 700964067H1
atcgcaggcaaaatctgttacgagaaatagttggttaccgtgcagatattattnngtcttcaggaggttcaaagtgatcattatgaagaatttttttctcctgaactggacaaacatggttattatggtctttacaaaaagaaaacaaatgaggtatacaatggaaacattaatacaattgatgggtgtgcaacatttttccgtagagacagattttcacatgtgaaaaaatatgaggttgaatttaataaggctgcacag

SEQ ID NO: 77405 - DNA, 259 bp, Glycine max
  Clone ID: 700964071H1
caaacaacagagtttatttctttttggttccttggttcacgctggctgcaaggcttgtgtttggtgggagcagcttctcaccgtgacgctgctctacgaagacgacgacaacctcgtgtgacaacatcaaataatgggaaaaggaaacatggaactcgagacaaacaaggtctatgactacgaggatgcacgaggggacgttgaagtcccagataccgctcatcagataagcactgattcatggtttcaagtggctttt

SEQ ID NO: 77406 - DNA, 259 bp, Glycine max
  Clone ID: 700964072H1
cacaaacccgtccctcacactctccaaaccctagcggcactacacactagttctatcgctatctccccaagatgtcgagcgccgatcccgagcacagagaagaggaggaggcacccgccgttggcgacgacgaggacaccggagctcacgtcgctccaatcgtcaagctcgaggaggttgctgtcaccaccggcgaggaggacgaagatgcaatcctggatctcaaatcgaagctttaccggttcgacaaggacgggaa

SEQ ID NO: 77407 - DNA, 259 bp, Glycine max
  Clone ID: 700964076H1
gagcgagagaacaagaacataagggaaccacagcggcggtaacagaagaacaagcagagaatgggtcgagtgagaacgaagacggtgaagaaatcctctcggcaggtgatagagcgtcactactcgcgcatgaccctggacttccacacgaacaagaagcttctggaggaagtggcgataatcccgtcgaagaggctaaggaacaagatcgcggggttctcgacgcacctgatgaagcgcatccagaagggccctgtgc

SEQ ID NO: 77408 - DNA, 267 bp, Glycine max
  Clone ID: 700964080H1
gtctgtttacatatatgacctggtgagtggtgcacaagttgcaaaacttgatcatcatgaggcacctgtaagagattgtagttggcacccctattatccaatgatgatcacttcggcttgggatggtgatgttgttaggtgggaatttcctgggagtgatgaagcccctgcttctccaaataaaagagaaggtcgaattcataggagaaatttgctttatctatagttcatgctctttgtacatatgtgtctggatccatactatat

SEQ ID NO: 77409 - DNA, 256 bp, Glycine max
  Clone ID: 700964085H1
ctttctctctctctctactccaactccttgatgccaattttagcatcagcgttgttgcctccattcttcttcttctcttaatgggttgcatttactcgcgagtctgcataggcgacaattgcagaggctcaagcatcaacggagaccccattatcgcccgaaacgacgtcgccgaagtcgcgaatttctccccttcctcttcggatgttgaagaaggcgaaatcagagaccaattgaaccaattgagcatcactcg

SEQ ID NO: 77410 - DNA, 256 bp, Glycine max
  Clone ID: 700964086H1
gccgcgaggtggcagacctctccctctcctccgtgcagtccaacatcgagtccctcatcctcaggatcgcccactccatcctctccggccacggcttctctttcgacgtcccttcccgctccgccgccaaccagctctacgtgcccgagctcgaccgcatcgtcctcaaggacaaatcctcccttcgcccgtttgcgaacatctccactgtgcggaaatccgccatcaccgcccgcatcctgcagctcatccacca

SEQ ID NO: 77411 - DNA, 258 bp, Glycine max
  Clone ID: 700964092H1
ctggcctactgagtgggcaaaggcacgggaagcataagggatcaggaaaatcgaaaagatctgtcaaaatgatgagcaccttacgaatgcctgctttaagaatgtcgagtttctccggattacgtactcttaatcctatggattctctgtcgagaccacgccacacttttccgttgaatacaacttctaggcgcgagagggctaaaagatttgtacctaaagctatgtttgagcgtttcacagagaaggcaatcaaag

SEQ ID NO: 77412 - DNA, 256 bp, Glycine max
  Clone ID: 700964118H1
ttcttatcttcatcctacgccaatagcccaaaaccttgttctctttttgtggttcatttctctcttccagatgccacttgccgttcttcaccctcacgattttctcaggaaaaacccatctaaccagtaccagaccataatccctcactctcccaacatgaatcctaataagtctcatcggacttcccgaaaccgtaagaagcggcccgatccaagcccacaaggcgttgtcagcccagcccggctcacattatcc

SEQ ID NO: 77413 - DNA, 248 bp, Glycine max
  unsure (1)..(248): unsure at all n locations
  Clone ID: 700964153H1
gaaccacacagactttatcatcaccagcaccttccaagagattgctggaagcaaggacactgttggacagtatgagagtcacactgccttcacccttccaggactctaccgtgttgttcacggtattgatccctttgatccaaagttcaacntcgtctctcccggtgccgacatgagcatatacttcccatacactgaaactgancgtaggttaacagagttccaccccganattgaaanacttcngt

SEQ ID NO: 77414 - DNA, 247 bp, Glycine max
  Clone ID: 700964178H1
ggcagaattaccggaatttatggcacaccgatctcatgagatccattcaggccgatactccttattgttgcctcgcgttgtggtgtgcaccatgtgtgtcttaccttcttcgcaaacgagctctctatgatgatatgtcaaggtacacatgttgtgctggctacatgccttgcagtggtaggtgtggagaaagtaaatgtcctgaattttgcctttgcactgaggttttcctctgctttggaaattc

SEQ ID NO: 77415 - DNA, 243 bp, Glycine max
  Clone ID: 700964191H1
cttatttttggttttgttggtgtcatgtgctagaggggaagacccttatagattctacacttggaatgttacatatggagacatttatccacttggtgttaaacaacaggggattttgataaactggcaattcccagggccacaaattgaagctgtgaccaatgacaacttgattatcaatgtttacaacagcttggatgaacctttcctcttatcttggaatggagttctgcagaggagaaa

SEQ ID NO: 77416 - DNA, 249 bp, Glycine max
  Clone ID: 700964196H1
cgtaacagaagggcccggaggcggcggcgcggctgccgacggtgacgccgctgtcgaagtgcaagctaaggctgctgaagctggagcgcataaaggactacctcttgatggaggaggagttcgtggcgaaccaggagaggctgaagccgcaggaggagaaggccgaggaagacagatccaaggtcgatgatctccgaggttctcctatgagcgttggtaacctagaggaactcattgacgagagtcatg

SEQ ID NO: 77417 - DNA, 257 bp, Glycine max
  Clone ID: 700964209H1
gcccggcgagaaaatgagagaaatcctccacatccagggcggccaatgcggcaaccagatcggagccaagttctgggaagtaatctgcgacgagcacggcatcgaccacaccggaaagtacagcggcgactccgaactccaattggaacgcatcaatgtctactacaacgaggccagcggcggaaggtacgttcctcgcgccgtcctcatggatctggagcctggcacgatggactcggtcagatccgggcctttcg

SEQ ID NO: 77418 - DNA, 256 bp, Glycine max
  Clone ID: 700964211H1
ctctgctcgtagggtttctccacctagagggaaatggctcccaaaccgcctagtacgggtctgtttgttggactgaacaagggtcacgtcgtcaccaagaaggaattgcctccacgcccctcagatcgtaaggggaaaacaagcaagagggtgcactttgtgaggaacctcataagagaggtagccggttttgcaccctatgaaaagcgtataactgagttgctgaaggttgggaaggataagagggcactgaagg

SEQ ID NO: 77419 - DNA, 256 bp, Glycine max
  Clone ID: 700964212H1
gaacaaacatggtttcttccaacactgccgagctgctgagagaggagattcctgtgaagcaacaacctctgactttgtctgcagacatcataaccggcctcgtactcgtcgatgttgtcaatggcttctgcaccgttggagctggcaatttggcgccgaaagaaccagatgaacgaatttctcagatggtaaaagaatctctgaggctgtccaaagcattctctgagagaaagtggccaatttttgctttccttga

SEQ ID NO: 77420 - DNA, 257 bp, Glycine max
  Clone ID: 700964213H1
ggaaaaaaaaaggactttccggttacatggtccatcgggtcgaatgatttgaatacgagcgaatccaggtaaatttgcctccgtacccagaacggaaccttcgctaagccttcttggtgtttgcgtcaagctcaccgaggaaaaacgacaatattttatttagttgcctgtgtttcgagacgccaaataaacgacattatcactggcaacccgaaacacactcttcatgccgtttcattcgtcacttcgcgcgtctc

SEQ ID NO: 77421 - DNA, 259 bp, Glycine max
  Clone ID: 700964214H1
cttttgccaactcaacttcgaactcaaatcaagcaatcaatttcaaatccaaaaatggggagctccacaaccttctgtgccttcttcctcgtgtgtacgatcttgtccgtccacgtggcgcaatcctcatcctccaccctcgacctggacacctttttcctccctctcaaatccggctgccgcggatccgtcgccgagtgcagcctcctcgccggcgacgacgacaccgagtttctgatggagtcggagagcaaccggc

SEQ ID NO: 77422 - DNA, 262 bp, Glycine max
  Clone ID: 700964217H1
cactcttattgttttcttaaaatttcttccttgccactgccagtgtgtcaccaccatggccaccgtcacaacccaagcctccgccgcgattttccggccatgtgcctcgaaatcgaggtttctgaccggctcttccggtaaactcaaccgggaagtgactatgaggccaatggggtgccctccttctgcctctttcaaggttgaagccaagaagggagagtggttacctggcttggcctccccaacttacctcaatggcact

SEQ ID NO: 77423 - DNA, 255 bp, Glycine max
  Clone ID: 700964220H1
ccccgccaggttcagagacttttccgattcctggaagaagagaagagaaaacctaaatcacagatccatggcggaagaacaccgatgtgaacctcccgaaggtcaccgactctgcgtcaacaactgcggcttcttcggtagcaccgccacgatgaacctctgctccaaatgctacagcgcgatccgtttgaaggagcaagaagaagcgtcgacgaaatccacaatcgaaaccgcgctctcttctgcctcctcggc

SEQ ID NO: 77424 - DNA, 252 bp, Glycine max
  Clone ID: 700964223H1
gcttctagcgatgctgagttgagaggcaatcagtttcatctggaagagagatatggtaataataataggtactcaaaggatgcagttctcactaagggtgaatgcctctgggagggaatgcttcaaccaaatatctctagcactcattcagtcgtaagcatctttaagagtggtgagaaaactgctgctgaagactggcctgggtttcttgagatcaagggaagggtgcgatgtgatgcatttgagaaattt

SEQ ID NO: 77425 - DNA, 253 bp, Glycine max
  Clone ID: 700964236H1
aaaaaaaaaacccttagccaacacaaccatcatggccacctctgctattcagcaatcagcattcactggtcaaactgctctgaagcagctcaatgagttcgtccgcaagaccggtggcgccggcaaaggtcgcactaacatgcgccgcaccgtcaagagtgctcctcagagcatttggtatggccctgaccgtcccaagtacttgggtccattctcggagcagattccatcatacctgaccggagaattccct

SEQ ID NO: 77426 - DNA, 257 bp, Glycine max
  Clone ID: 700964245H1
tggcaaattagctactgatttcactgctgacacattgggtttcaagacctatgctccagcatatcttagcccacatgcatcagggaaaaacctccttattggagcaaactttgcttcagctgcatctggttatgatgaaaatgctgctactttgaatcacgcgattccgttgtcccaacagttgagttatttcaaggaataccaaggcaagctggccaaggtagctggcagtaaaaaagcagcctcaatcatcaagg

SEQ ID NO: 77427 - DNA, 254 bp, Glycine max
  Clone ID: 700964256H1
cgcaaaagtatttactcttctccaggaggtaccctgttcctctgtatcttcagcaaatgagagttcaataacaatgtctgtgccactgggaaatccatgtgccttcaaggagattacaccttccgtgaaagaggtaatagcacgagatgaaaaaactgaatcttttgtcactgttgaacctgaaaatgggaagttggagatcaatgatggaaaacagactaatggcactagtaaagactccaggttagaggatt

SEQ ID NO: 77428 - DNA, 254 bp, Glycine max
  Clone ID: 700964259H1
gcggctatgaagaaccatccagataagggaggagatcctgaaaagtttaaggagttaggtcaagcatatgaagttttaagtgatcctgagaagaaagaactgtatgaccagtatggtgaagatgcccttaaagaagggatggggggaggaggctcgtttcataatccatttgatatatttgaatcattttttggaggagcaagctttggtggtggtggtagttcccgaggtagaagacagaagcatggtgaaga

SEQ ID NO: 77429 - DNA, 251 bp, Glycine max
  Clone ID: 700964267H1
tgatagcttaagtggcagcagtagttgtttgagcaatcgacaagatgaagtgggagatgaatgttggggtcttaccgagtttgattctggcacatctgtcaattactcttttagtaatttctcctttaagaatctctcccagcttgcatcaatcaactatgatctcaccaagggatggaaagatgacccgccaacgaattctagtgcatagctgtatgtattaacctatgtcaaagtccagaatttggttt

SEQ ID NO: 77430 - DNA, 250 bp, Glycine max
  Clone ID: 700964270H1
atccatcaccctttctttcattctgttgggaaatggaagtcacactttcagcgtgcaagtccattagctcgccttctgttcccgtcgcagctttatttgcggggaaagcaggaactaagagttcgcaatgcagttttttagctggagcaaacaaagtgaggtttcctaggcaagtcggtcaagttagccacgttcgcaaacagcgccaaacgcgtcactgtggtgctctccacgcgacttgcagcggtga

SEQ ID NO: 77431 - DNA, 262 bp, Glycine max
  Clone ID: 700964280H1
caaccttgatccatcaggtagagcagcacttggagtgcatgcatcagcttatggaaaccaggtcaaagctgtagaaccagagaagatcatacccaagatggaagtttctccactaggagttgccatatagagcttgtatgagccatagcaaggactagtagttgccctagaaccagcatataatattattatactagtcatcataaaatgaaaattttgcttgctttgtagtttatccagggaatggtatataaatagataa

SEQ ID NO: 77432 - DNA, 252 bp, Glycine max
  Clone ID: 700964282H1
ggtgacaagagcttccattcaattgcactaaatatctaggagtagtaaatgttattcagtttaatatgaattctcatgatgttttgaaaactctggtcttgcagtttgttgcttcgtcgggagtgttgttcctttagcaatggagaatatttgaaggcaggtttacatgagttggaacaatggtgtcttaaagcaacagaccagtttgctgggtcatcttgggctgaactcaaacacatacgccaagctgtg

SEQ ID NO: 77433 - DNA, 248 bp, Glycine max
  Clone ID: 700964285H1
ggcatggtgtgcactgctagggttgtgtccaaggctgtgatcactgggtacaaagatgggttcaaccagattaagtccttggttgatgttggaggtggcattggagggtctctttctgagattgttagggcttatcctcacatcaatgccatcaactttgacttgcctcatgtggttgccactgctcctaagtatgatggaatcacccatgttggaggtgacatgttcgtgtccattccagatgctga

SEQ ID NO: 77434 - DNA, 248 bp, Glycine max
  Clone ID: 700964286H1
gcctcgccgactcggttgctatcagcgagtgagagtgagtgagtggttctcttgcagcaacaaggtttagtgacaccaaacagacgggaaatgggtcgtggggtcagtgctggtggtggacagagttccttggattatctctttggcagtggggtacctgccagcagtgcaaatggtgctcgcactcaaaatgcaagtgctccttcaccaccggttgataagcaaagtccagcaccagcaccagcacc

SEQ ID NO: 77435 - DNA, 234 bp, Glycine max
  unsure (1)..(234): unsure at all n locations
  Clone ID: 700964291H1
cctcttctaacttctccatttcacacaggaagaagatcagancacatttagaacaaaaaagagagtttgagaaatggggaggggtaagattgagatcaagaggatagagaactcaagcaacaggcaagttacatactcaaagagaaagaatgggatcctaaagaaggccaaggaaatcactgttctatgtgatgctcaagtttcgcttatcatctttgctgcatctggaaagat

SEQ ID NO: 77436 - DNA, 258 bp, Glycine max
  Clone ID: 700964294H1
taaaaataaaagtaaaatagagggagaaatgagaagtgtgaagatggtaaaatgatctcaaactcggaccccgtagaaccagtcacggcaaccgccactgccggcgccgacgacgccaccgtctcaacaaccgcctcttcttccaatgaagatcagcctgcaccgccggcggcaccaaacattgtgatgtcctccaaggatcacgattctctcttcagcggtggcggcatcagctttctctctggaagccgaaatgga

SEQ ID NO: 77437 - DNA, 259 bp, Glycine max
  unsure (1)..(259): unsure at all n locations
  Clone ID: 700964295H1
gangggttgcttctggacgtgatgcagntgctgagggaggtgaggatagaagttataggggtgcagtcgtcgcttaacaatggggtgttcgtggcggagttgagggctaaggtgaaggaacatgcaaacggcaagaaggtcagcattgtggaagtgaagagggcacttaaccaaattataccccatgctgttgactaaagagggggtgcatgcttgaattttcagggcttgactttatggatgaatattccaagtagaa

SEQ ID NO: 77438 - DNA, 261 bp, Glycine max
  Clone ID: 700964321H1
cgacttttcttggtctctacttcgcatttccgttctttgcttttctcgggctacgaaaaacgacgtcgttttcccaattttccccggcgaccgggaaatggtggagccggtggagcttcgcggcgaggagcagctctcgttgctgtcagattccagcaatggtgaccggtcgtggcggttgaacttcgacgggtttcagctatcttcggagcacacggagaagcaagtgaaaccccctcgcggactccatgactgttatgg

SEQ ID NO: 77439 - DNA, 264 bp, Glycine max
  Clone ID: 700964330H1
cttacacttacccacagggaggcgaacagagaaactcagagacccgaaggcagatttcaagatgaagttcaacattgcgaatcccaccaccggttgtcagaagaagctggagatcgatgatgacctgaagctgcgagcattttgggacaagaggatctcacaagaggttgttggtgatgctctgggtgaggaattcaaaggttatgtcttcaaaattactggaggttgcgacaagcaaggatttccaatgaagcaaggagtgtt

SEQ ID NO: 77440 - DNA, 256 bp, Glycine max
  Clone ID: 700964340H1
gtcccgcctttgtaaatacaattgggacactactaggattgggaagaagggtctttacatttttagtttggcaaatagatattgcaactacctttgtataaatctatttctgaagaagcaattacaactttcaagggatgatagcattttgtggcataaggattaaggaggcataaaggaccaattgctttggaatattcactcatgacaaggcacaaggtcatgcgtgtatgccaacacatagtaatgatgtgtg

SEQ ID NO: 77441 - DNA, 259 bp, Glycine max
  Clone ID: 700964351H1
gtactgcgtttcggaagcagacacagatggctcgtacgaagcaaaccgctcgtaagtccacaggaggaaaggctcctaggaagcagcttgcaaccaaggctgcacgtaagtctgcaccaactactggtggtgtgaagaagccccaccgttatcgtcctggtaccgttgctcttcgtgagattaggaaataccagaagagtaccgagcttttgatccggaagctccccttccagaggctggttcgtgaaattgctcagga

SEQ ID NO: 77442 - DNA, 255 bp, Glycine max
  Clone ID: 700964353H1
ggtgtgtcctgttccgttcctaaaagactatcccttttacaaactgaagtgaatcggaggatctgttctgttccataagatggctggacttttgggatataggagccttccacctaaggcaaagaatttggtagttgctgggggtttgacagcttttgtctttggtgcctacttctacaccatgagggctgttggaggcactgatgaactgcaggtagcaattgataagtttgaagctgacaagaacaagaatgc

SEQ ID NO: 77443 - DNA, 254 bp, Glycine max
  Clone ID: 700964404H1
ctcctcactccatctcagtctcatcactctccaaccacaatggctgtcttgggcggcgccgcctccgctcgcatcattccctccgtctcactctccacctcttctcgctccttcttctccttatcatcctcttccaaactcaaatgcttgcgctcctctcctcgcatttcgcacctctttctcaatcagcaaagagcggaggttcgcgtttcgagtggaggatacggaacggtatcggcgccgaagtccgttgc

SEQ ID NO: 77444 - DNA, 252 bp, Glycine max
  Clone ID: 700964408H1
ctatcttgcctctcttcttctgctactgctgctcaacccacacaccaccctgggagcgcagaacctcatgctaccctaccataacggcgccctcctcaaaggaaccattaccgttaacctcttatggtacggcagcttcaccccaatccaacgctccataatcctcgacttcattaactcgttaagttccaccgcgggggccccacttccctccgtagcatcgtggtggaagaccacggacaagtacagggg

SEQ ID NO: 77445 - DNA, 247 bp, Glycine max
  Clone ID: 700964412H1
gttcaggggttgggcctggtgaacccgaagaaggtgttcacgttttacgaccaattacacagttatctggcgtccgcgggtgtcgacggcgttaaggtggacgtgcaatgcatcttagagactctgggtgcaggactcggtggaagggtggaactcacgaggaattaccatcaggcccttgacgcttcgatttctagaaacttccctgacaatgggtgcatcgcctgcatgagccacaacacggacg

SEQ ID NO: 77446 - DNA, 254 bp, Glycine max
  Clone ID: 700964415H1
attcattcaagattcagcaagtgcgttttggaagcagagaccgaaatacttcgagatggcccgtacaaagcaaactgctcgtaagtcaactggaggaaaagctcccaggaagcagcttgcaaccaaggctgcacgtaagtctgcaccaacaactggtggtgtgaagaagcctcatcgttatcgccctggaactgttgctcttcgtgagattaggaaataccagaagagcactgagctcctaatcaggaagcttc

SEQ ID NO: 77447 - DNA, 247 bp, Glycine max
  Clone ID: 700964428H1
ggtgggccatgctcgccactctcggagctctcactgttgagtggctcactggtgttacatggcaagacgccggaaaggtggagctagtagaagggtcatcataccttgggcaaccacttccattctcaatcaccacactgatctggatcgaggtactcgtaattggctacatagagttccagaggaatgcagagctcgacccagagaagaggttgtacccaggtggcagttacttcgacccattggg

SEQ ID NO: 77448 - DNA, 145 bp, Glycine max
  Clone ID: 700964433H1
gtccccggaaagtgagcgtcaaagaacgaaatgacttttgagagtttttagatttgtgtttggtgaagtacttcagataatgtgaattatcttgtgtatccgaatccaacttaatgttacttgctttttacaaaactcaagtgtc

SEQ ID NO: 77449 - DNA, 246 bp, Glycine max
  Clone ID: 700964439H1
gtcaagctcgtggacttacatggttcattcctaacgatgacccaactctgatctccaaacaacaactctttgcaagaattgttggaggactaggtgggagggctgcagaagaaattattttcggtgagcctgaagttacaactggagcagctggtgatttgcagcaaatcaccagtttggcaaaacagatggtgaccacatttggaatgtctgatattggtccttggtcacttatggaaccatcag

SEQ ID NO: 77450 - DNA, 247 bp, Glycine max
  Clone ID: 700964452H1
cacaacattcgtcattcaccgccttgtcttgtcttcttctgtctccgaatcacggaatctctctgaatcgcgggattaagagaggaatatgcaacagaggctaaagttgcagcaacaacaggccctcatgcagcaagctttgcttcaacagcagcagatgtaccaccctggcatgctcgccgctgctatgtctcagatggagcctgttccaagtggaaatgtgcctcctggttttgatacgtctgca

SEQ ID NO: 77451 - DNA, 240 bp, Glycine max
  Clone ID: 700964458H1
atcctggtgaggtaaacagaattagggaattgccacaaaattccaagatagtggctacacatacagacagccctgatgtccttgtttgggatgttgaaagtcaacctaatcgccatgctgtccttggagctacaaactctcgtcctgatttgatattgaccggacaccaagataatgcggaatttgctcttgctatgtgcccaactgaaccctatgttctttcaggaggaaaggacaaaa

SEQ ID NO: 77452 - DNA, 243 bp, Glycine max
  Clone ID: 700964470H1
ctcactccttccccatttcaaatcttcgtctccaattcgcgctcacataaaccctaccctcaatttccattcgcaatttttgttgctgctgagcacggaatcggagatgaaagtgaagatcttgcaatggcatgctattgcttcttggacttgggatgcacaggacgaaacgtgtgggatttgtaggatggcctttgatggatgttgtcctgactgtaaacttcctggagacgactgcccgct

SEQ ID NO: 77453 - DNA, 245 bp, Glycine max
  Clone ID: 700964472H1
ctcagacacacactctcactctctctccctcaccttccataatgcagctcctccggccactgctcgcggcggcgctgctcctcctcgccaccctctccgacgcgcacaacatcaccagcatcctcgcaaagcaccccgagctctccaccttcaaccactacctcaccctcacccacctcgcccccgaaatcaacggcaaaaccaccatcaccgtctgcgccgtcgacaacgccgccatgtcggac

SEQ ID NO: 77454 - DNA, 241 bp, Glycine max
  Clone ID: 700964475H1
gaggagtacaagattgatgtattccaaaatgccagggcttgtctgaggttgagggctgcctgcgagaagctgaagaaggtgcttagtgctaatccggaggcccctttgaacattgagtgcttaatggatgagaaggatgtcagaggctttatcaagcgtgatgagtttgagcaactaagtcttccaattttggaacgggtgaagggacctttggagaaggcacttgcagaggcaggtctta

SEQ ID NO: 77455 - DNA, 239 bp, Glycine max
  Clone ID: 700964476H1
acattgacagcggcacctacctgtacttgtattattttggtattcgtataaatgttttcctctttctctcttctcttctaaatctaattcgaatcttcgccagttaatagaaactcaactttgagtagataatactgctggatgtctcgtctctaattattgtatttggaaaatagttttgagttgaggatctaatcattaccagatttaatatacttggcaaatggggtctgaaggtc

SEQ ID NO: 77456 - DNA, 244 bp, Glycine max
  Clone ID: 700964478H1
ggaggaggtcgcagaagattcccagtctcttcagtggaagatgtgtaaaagctttggaaacagttcaagcaaagtccttgatgttcaatttggaatctctcttgctagtttgaaaatggttgctgcatattcagatggtaatgtaagagtttttgagctctcggatcccttggaactgagaaactggcagcttcaggctgaatttcaaaatgttattgagtcagtgtcttcatttggaaaggct

SEQ ID NO: 77457 - DNA, 241 bp, Glycine max
  Clone ID: 700964488H1
gatgtaggagtgatcatttatggaagaaacacatggagaggaaatggggtaaggtgtttggtgatgctgcttataggcaatggaaatggcatgtagcttccaagaacagagaaaaaatctcctccaaccagcacaatcagaaaggaatatttgctttccttcgtggtggttttctccccttcatatggatcaaagcaaaatcagaaaagggcacagagtcaagtagctcattaccagaaga

SEQ ID NO: 77458 - DNA, 238 bp, Glycine max
  Clone ID: 700964490H1
gctcatccctttagggtgaaagaagaatggtgctttcggaggaggaaatcggtcgtctataccgaataaggaagacggtgatgcagatgctgagggacagaaattttctggttggtgacttcgagatcaacatgtccaagcacgagttcaagtccaagtacggcgaacacatgaagcgcgaggacctcgtcatcaacaaatccaagaaggacaactccggcgaccagatctacgtttt

SEQ ID NO: 77459 - DNA, 240 bp, Glycine max
  unsure (1)..(240): unsure at all n locations
  Clone ID: 700964495H1
ggattngaatcggttcnanaatgttttctaatttgttgataatcantaattntcattatggggtcnttgnttgttcnaggtgaanntgatcaaacaataaagnttgtntgtgtttgctttgtattacngagtnaactcatttnngtagtagcacatagtanggctctttgccntnatggtgttgatgtcaaatacttaagaacacaggnnntggnggcatttccaagtntatngcttggg

SEQ ID NO: 77460 - DNA, 247 bp, Glycine max
  Clone ID: 700964502H1
cacttgttgtttgaggttccctggtcagttaaactctgatctgcgaaagcttgcagtgaacctcattcccttcccgcggctccactttttcatggtgggatttgctcctttgacatctcgtggctctcagcaatacagagccttgagtgttccagagctcacccagcaaatgtgggattccaagaacatgatgtgtgctgctgaccctcgacacggccgctacctcactgcctcagccatgtttaga

SEQ ID NO: 77461 - DNA, 237 bp, Glycine max
  unsure (1)..(237): unsure at all n locations
  Clone ID: 700964506H1
tatattcctgatcctgaggntnngnaaccagangggtctgntgtcatcccaaaagngctcccnanaccccgangccaancaagcctgaaggttgggatgntgaggnanctggtgagtgnncaccccctaccnttgccaaccctgagtacagnggcccatggnangcgtgnaaatcnagaaccccaactataaaggaaatggtaggcaccttgatngatnccccagntttcaggatga

SEQ ID NO: 77462 - DNA, 240 bp, Glycine max
  Clone ID: 700964522H1
ggaattatcagtgtcttctctttcatacatcaagaaacaaaagggtgttgaaataatgggaccctcttgctctaatcgatcaatagatgacggcacacttctattgaactacaaacagtgttccttcaataagaaattgatgaatgggtatttttcttttggagcacagggccttgctgttgaagattccaatagctgcgcaaagtcaaacagcagctacaaacgtttaagttccatagt

SEQ ID NO: 77463 - DNA, 241 bp, Glycine max
  Clone ID: 700964535H1
gaagaatagagagtgatggagtgcgtattcggattggtgggtaatggattcgcgatcgtggtggctgattcatcggcggtgcacagcatcctcgtccacaagtccaacgaggacaagatcatgcttctcgattcccacaaactcatcgccgctagcggcgagcccggagacagggttcaattcactgagtacattcagaaaaacgtcgccttgtatcagttccgtaacggcatccctctca

SEQ ID NO: 77464 - DNA, 239 bp, Glycine max
  Clone ID: 700964541H1
cgagatttaaaacccgaaaatctactattggatgaaaatgagaatttgaaggtttctgactttgggttgagtgcacttgctgaatctaagtgccaagatggattgctccatactacatgtggtacccctgcctatgttgctccggaagtgataaacagaaagggctatgatgggattaaagctgatatatggtcatgtggggtaatcttgtatgttctattggctggtcatcttccatt

SEQ ID NO: 77465 - DNA, 251 bp, Glycine max
  Clone ID: 700964548H1
gcacctcagattcatggaaaaagtaatgatcctagtaatactgagtctgctctaaatgcaagttcaactgtgtctcatgctggtgtaaaagtgacaaaagttgatataattattgttgatgttgactcttcagacccaagctcgggattgacatgccctgctccggattttttggatgagtcttttcttgagaccgtaaaggataaactttcagaggatggtctctttgttgtcaatttggtgtcacggtc

SEQ ID NO: 77466 - DNA, 185 bp, Glycine max
  Clone ID: 700964549H1
gaaccttgacggggattgttactttccaaggaatgttgaaggttttcagagaccacctcaaatccatgtgctaacagttactactttactactatattacatgatgatgatgtagacaacaacaactactatgctactacttcctctaatttgttgcaataaaaacccgcttgcaaattgtctcc

SEQ ID NO: 77467 - DNA, 239 bp, Glycine max
  Clone ID: 700964552H1
gcatggactccgccgggtacacctccgacatcaacgaggattccaaaacgacaggtttaatgggcatgaaccgaggatccctctcgttggtaacacaaatgtcgcttccgaaattttcctactgcatctctggggaggacgctctcggtgtcctcctccttggcgacgggacggacgccccgtcgccactgcagtacacccctttagtgacggcgacaacctcgtcgccgtatttcaac

SEQ ID NO: 77468 - DNA, 306 bp, Glycine max
  unsure (1)..(306): unsure at all n locations
  Clone ID: 700964553H1
gtcgtagcngagggtctctttcntttaggtttttgtacaattgctttaatcctancccaagcatgatcgcgctccgtgtcananacgcctngcacatctancatcancncaagctgagagggtctctncgtgctttgatctgctnannagtctnacgnaagntnttccngcaagccagaagnactntcgagngcgtacanngacgcgtgtagagagagtggatagagagangnganngagannaggccaagtgangnaanatccggaattagggnnctngagnggtaaaaatgtgggaattgccaa

SEQ ID NO: 77469 - DNA, 238 bp, Glycine max
  Clone ID: 700964554H1
caaaaacgaagtactactacaagggaagaaaaacttagctactaaggaaggatcaaagagaatggctcaagcaatggcatcaatggctggcttgcgtggttcctctcaggctgtgttggaaggtagccttcaggtgagtggctccacacgcttgaatgtggggagtggaagcagggtggcctcagtcacacgtgcagggttcacagttagagcacaacaacaacaagtgagtggtgag

SEQ ID NO: 77470 - DNA, 244 bp, Glycine max
  Clone ID: 700964561H1
gattgttcctccgaacagtgaaccctcacctaacaatcagaacccaggatttggtgaaacgatgaacagtgataggaaaattggggttgccttggacttttccaaaggaagcaaaatcgctctgaaatgggctattgacaatcttatcagcaacggtgacactctctacatcgtccacaccaagccttccggaggaagtgaatcaggaaatcttctctggtccaccactggttcacctctgatt

SEQ ID NO: 77471 - DNA, 246 bp, Glycine max
  Clone ID: 700964579H1
ggctatcctctttgttcctaagagggcaccttttgacctctttgacacaaggaagaagcctaacaatattaagctttatgtccgccgtgtctttatcatggacaactgtgaggagttgattcctgagtatttgggctttgtcaagggtattgtggattccgaagatctaccactcaacatttcaagagaaatgttgcaacagaacaagatcttgaaggtcatcagaaagaacttggttaagaagtg

SEQ ID NO: 77472 - DNA, 270 bp, Glycine max
  Clone ID: 700964609H1
cttgttctctgattggcctagccagtagtagccaatttgttggagctggttgggaatggcgtcgaaaccgaaatcaaatggaaattccaaatgcaacaaaggattcgctgacagctatatgctgttgaatcctgaagacgctcatttcttcgatcttgttcatgtgctgtattcccgtaacttgggaaaccgaaaatttgtggacagcaatgctgagggatcttatgagggaagcttccgccaaagatggcttatattcgtctctgtggt

SEQ ID NO: 77473 - DNA, 268 bp, Glycine max
  Clone ID: 700964611H1
ttcacctcaataaacaacccttcctctgcttcagtgccctcccctgccttttcagctaactttttcttttaatatcatatcactcatgtcttacttagagtctcaggtctacaaagagagaaagtttgaagaagaatcagaagaggtcactcttgatgggagtgttgatttccatggacgtcctgcaatcagagccaaatctggcagatgggtggctgcaattatcatcctcttgaaccaagctctggcaactcttgcattttttggg

SEQ ID NO: 77474 - DNA, 268 bp, Glycine max
  Clone ID: 700964614H1
ctgctacttcctactccaaccgcacttctgctccgcaattatcatgggcaaggtcaagatcggaatcaacggatttggaagaattggccgtttggtagccagagtggctctgcagagagacgatgttgaactcgttgccgttaacgaccctttcatcaccaccgattacatgacatacatgtttaaatacgacagtgttcatggacactggaagcatcacgatgtcaccgttaaggacgagaagacccttctcttcggtgacaagcca

SEQ ID NO: 77475 - DNA, 265 bp, Glycine max
  Clone ID: 700964627H1
gaaaaaaaggtgaaatatagagtgaagaagaagaaatagagggttttggtgtttgaatcgtgaaaatgttcagaaaccagtacgacacggacgtgacgacatggagcccggcggggaggctgttccaggtggagtacgcgatggaggcggtgaagcagggctcggcggcgatagggctccgatccaagacccacgtggtcctcgcatgcgtcaacaaggctaactccgaactctcatcgcaccagaagaagatcttcaaggtcga

SEQ ID NO: 77476 - DNA, 264 bp, Glycine max
  Clone ID: 700964636H1
ggaacaccccccacgaagcaccaattatggctctgaatctttgtatctcacctaagtttaaatgggttccttccttagatagtgcttcctattctttgagaccttcacttgggtcttgttttggtaacataaacattgctagtgtgagtctaagtactactagaagtttgagtttgaggaggagtgggagtgttagtgtaagatctagtttagaaactgcggggcccacagtcacagtgggacaggtcactgaggttaacaagg

SEQ ID NO: 77477 - DNA, 267 bp, Glycine max
  Clone ID: 700964638H1
aacatagcatagagtgagaagtgagaagagaaaaatggcaatctccatacccagtagacaacttttcatagatggagagtggaaagtccctcttctcaacaatcggtttccgatcatcaaccccgctactgaagacatcatagggcatattccagccgctactaaggaagatgttgaccttgcggtggatgctgctaaaagagccttttcccataacaaaggcaaagattggtcttcagctcctggctctgttcgtgctcgctatct

SEQ ID NO: 77478 - DNA, 266 bp, Glycine max
  Clone ID: 700964641H1
aaaatgttggagtcactacccacaccactcgtgcagctgagagacatgtgaaaggctaattcagaagaatcttgggagaaccacaccacaaaagctaactgatgtagttggcgaacctaaagcgttataaacctcgcattagtgttccatactttcaattgtaaccattatccattttttaatccatgcaagcatccatcgatactttgctagaaaatttgtttgtactttgcaaacacaaaattcactgacagaactgcaagcaa

SEQ ID NO: 77479 - DNA, 263 bp, Glycine max
  Clone ID: 700964642H1
gcagaggcaatggaggttcaaagtctcagctttgagaataacattttgtgggttggctcttttgtggaggctttggtgcttgacactttccttgccactgccaaatctcttgcttgctttgtcatcttgactggatctctccttacggatgtcaataatttagtgtcaccgatggtggatggaaggtttcctttagaccaactgtgcaagggaaaacatacttttgaagaaaacaaggatgctagtgatacagaggatgatga

SEQ ID NO: 77480 - DNA, 262 bp, Glycine max
  Clone ID: 700964643H1
tcggaacaagcaaactagtcaatctgaaggttatgggtttattgagtttaatagtcgtgctggagctgagagaattctccaaacatataatggggctattatgccgaatggggggcagagtttcaggttgaattgggcaacttttagtgccggtgagaggtcgcgtcaagatgattctcctgattacaccatatttgttggtgacttggctgcagatgttactgattatcttcttcaggagacattcagggctcgttacaac

SEQ ID NO: 77481 - DNA, 262 bp, Glycine max
  Clone ID: 700964645H1
ctttagccgaggtcaggaggagcactagctaagttcacaatttcaaaatggctaggggactaaagaagcatttgaaaaggctcaatgctcctaagcattggatgcttgacaaactgggtggtgcatttgcgcctaaaccctcatctggaccacacaaatcgagggagtgcctccccctcattcttattctgcgaaaccggctgaagtatgctctgacataccgtgaagtcattgctattctgatgcagcgccatgttcttgt

SEQ ID NO: 77482 - DNA, 262 bp, Glycine max
  Clone ID: 700964646H1
ccgaagaggctcagaaaaaagggcaacttcgcaactcgtgaatcgattactgtagaaattgtcgtcgattctatataaaacatattaggcactggctaccattttgaattctggttgagggattgaagtgtgattataggtggaggaggatggcttgtaggggatgctgggaatgccttttgaagcttttgaacttcatattgactcttgctggtctggccatggtgggctacgggatttatctgtttgttgaatacaataa

SEQ ID NO: 77483 - DNA, 265 bp, Glycine max
  Clone ID: 700964647H1
ctctgtttctgtctctgtgtttgcggctgaggattccgaacgagcgaccttcttcgtttctcgcaaagtttaagtcatcatgggtaaggaaaagactcacatcaacattgtcgtcattggacatgtcgactctgggaagtcaactaccactggtcatttgatctacaagcttggaggtattgacaagcgtgtgattgagaggttcgagaaggaggctgctgagatgaacaagaggtcattcaagtatgcctgggtgcttgacaag

SEQ ID NO: 77484 - DNA, 262 bp, Glycine max
  Clone ID: 700964662H1
gaagcaatgaatggtgttagacatcttcttgttcggaaatctatcccaaatggactagtttttgttggagaattgccttatggatctaacagtggtttcagcccaaaaatggatcacctggtgtgtttcctacctggtacacttgcaattggtgccactaaaggccttacaaagaaacaggcaatggaaaacaatatgcttaactttgaagacctagaaaatttgaagctagcagaagatctgactaaaacatgctttgaaa

SEQ ID NO: 77485 - DNA, 262 bp, Glycine max
  Clone ID: 700964671H1
cacgagctagccggaaagggagaggaagacttcgaagttgtgctaatatccagcgaccgcgaccaagcatcctttgactcctactacagcaccatgccttggttagccttacctttcggtgacccagaaatcaagaacctcgttagacactacaacgtgcaagggattccctggttggtgatcataggccctgatggtaaaacaataaccgtacatggcaggagtttgataaacttgtaccaagaaaatgcgtaccctttca

SEQ ID NO: 77486 - DNA, 259 bp, Glycine max
  Clone ID: 700964682H1
gccaaatgcttcatggcacaataggaaaatccaaaaagaatataattttttgaggtttcggtggccaagtttgaaccaccattacaaaagcattgaaggagggtgtacatgtaaaaaatgtaatataaaatttgttgtgaaagcgacctctgaaaaatcttttgagtctgaacctcaagcttttgatccaaaaagcattttggactctgtcaagaattccttggatgctttctacaggttttccagacctcacacagtt

SEQ ID NO: 77487 - DNA, 256 bp, Glycine max
  Clone ID: 700964689H1
cttgtgttgtgtccctcttttaagctatttccttctcttaacacaattggttgtgccaattgccatagtcaccaaccaattaacaaaggtatatatatcatcatatcatcaccaaatgaaaaatattgggttgttttttcttgtggtggtggctacttttgtggtggcagccacagctggtagcttttaccaagactttgaaataacgtggggtggtgagcgtgccaaaatctatgagaatggaaaccttctcaca

SEQ ID NO: 77488 - DNA, 256 bp, Glycine max
  Clone ID: 700964692H1
tagtactctcgttaatttttttgctaattgctaattgggcacaatggaaaagcttcatgctgtgtgcatcccatacccagcacaaggccacataaacccaatgctcaagctagcaaaactccttcatgttagaggcttccacatcacctttgttaacacagaatacaaccacaaacgccttctcaaatcaagaggttctgattccctcaatagtgtcccatcatttcaatttgaaaccatccctgatggtctctct

SEQ ID NO: 77489 - DNA, 264 bp, Glycine max
  Clone ID: 700964714H1
ttccaccaaaattcaaaaatctctcggcatggggtgcgtgtcttcgaatttgctgaaccaagacgaagacttcagcacccaacttggctcctccgcactgggccaccacatcgtgtccctcacctccaccacctacggcctcctcaccctcgaccctccttccacgcctccttcccgctttacccttggatctctcttcccctccgaaccagaggtcatcaactcatgggagctcatgtccggcctcgacaccgacagcttccg

SEQ ID NO: 77490 - DNA, 265 bp, Glycine max
  Clone ID: 700964720H1
tgctgttcaaatacagtggtgcctcagctgctctcactgtagacccttcactacacttgtcaagagcttctagcattgtgatgttgattgcatatgttgtctacattgtctttcaactgtggacacacagggagttatttgaagaagaagatgacggtaaagatggcgaggatggttcagaagaacaagctgtgattggattatggagtggcattgcttggttggttggaatgactgtattcattgctgtgttgtctgaatatgt

SEQ ID NO: 77491 - DNA, 260 bp, Glycine max
  Clone ID: 700964727H1
ttcatttctacatccctggctctgttccgtcgatgacgatggcgtttagggtgcgaaaccctgacctccgctttctcattcttctctctctcttgtccatcacttccgccaaggtcttcttcgaggagcgtttcgatgacggatggggaaatcgttgggttaaatcagattggaaaaaagatgagaacctggctggggagtggaaccacacctctggccaatggaatggagacgctaacgacaaaggtattcaaaccagt

SEQ ID NO: 77492 - DNA, 266 bp, Glycine max
  Clone ID: 700964734H1
atttgtcaaagagtagccatcgccccaacgatcccgtttcccttcacttctctacgcaaagccccttgttttgcatagagctacttaaaatgtcggagggaaatgcggagagaggaaagagaattgccattattggtgtctcaaccttattgttggtggcgatggttgtggctgtcacagttggtgtcaatgttagtgagaatggttccaacaatgaggacacaaaaattgcttcttctgtaaaagccgtccaaacccttttccat

SEQ ID NO: 77493 - DNA, 259 bp, Glycine max
  Clone ID: 700964741H1
atagaatcatatacacatatattaaactgaacgaagttgtcctagaagagaagaaccaatggctgctggcgtgggtttccgcagtcacaaatctttgttaataattcttttgggttttcttggcttgttctcctttacagttgaagcagacacaaagaaataccaatttgatattcaagtaaagaatgtgagtagactatgtcatgcaaaacccattgtaacagtaaatgggaggttcccagggtcaacgatttatgtg

SEQ ID NO: 77494 - DNA, 257 bp, Glycine max
  Clone ID: 700964745H1
atcgttcgcaaatgcctcgcccgcaacgaacagcagtgttccttcgttgagcatcgcaactacaaaattgtatatcgtcgctacgcctctttgtttttcctcgttggagttgacgatgatgagaatgagctggctattttggaatttatacatctcttggttgaaaccatggatcgtcattttggcaatgtgtgcgagctagatattatgttccatttagaaaaggcgcattttatgttggaggaaatggtcatgaa

SEQ ID NO: 77495 - DNA, 259 bp, Glycine max
  Clone ID: 700964746H1
gaatcctgtgccctaacccacatcacacttatcgtcgtccgttcaccgtctttcttcgccggcggctgaggcaccgcatccatctattaatctcgagagagcgaaagaaaaagagagaaaaactggggaagcgaaagagaccgaaagcgaaaggtagagtgagggagatggagagttcggggttaggtccagtggattgcgacgttggatcgattgtttgggttcgaagaaggaacggttcgtggtggccgggtcaaat

SEQ ID NO: 77496 - DNA, 261 bp, Glycine max
  Clone ID: 700964747H1
ggtagctgcaagagatgaaaaaattggcctgcaacattttgtgcccataaggccgttgggttgtggagacactggcagtgttcatttggtggagctcaaaggtacgggtgaactatatgcaatgaaggcaatggaaaagtccgtaatgctaaatcgtaataaggttcaccgatcatgcattgagagagagattatatcattattggatcatccttttcttccaacactatacacctcatttcagactcctacacatgtatg

SEQ ID NO: 77497 - DNA, 260 bp, Glycine max
  Clone ID: 700964752H1
gtaaaccctaacaataatggagttgtggaacgtggtgtttgtgtgttgtgttttatgttacagtttttgtcacactgcggaggctatcgttaagctacgaggcaatgaaacaataccagcattgattttgttcggggattcgatagttgacacaggaagtaacaataacctaataacggggcttaagtgcaattttcctccttatgggagggatttcgagggtgggataccaacaggaagattcagcaatggcaaggtcc

SEQ ID NO: 77498 - DNA, 256 bp, Glycine max
  Clone ID: 700964753H1
tgaatttagcgatcctcgggatgctgatgatgctagatatagcttggatggtcgtgatgttgaaggaagtcgtatcattgtggaatttgccaaggggggtcctcgtggttcccgggaaaacttgggtcggggtctacctcctggatctggacgatgctttaactgtggcattgatggtcattgggcccgagattgcaaagctggggattggaagaacaagtgttaccgttgtggggaaagaggtcatatagaaaag

SEQ ID NO: 77499 - DNA, 260 bp, Glycine max
  Clone ID: 700964754H1
cgccaatatgaccaccgacgacgtcgtcagagcttctcgtcttctcgacaacgagattcgcatcctgcaaagaagagttgcagaggaccaatttggagttggaatcgtacaaggacaagatcaaggagaatcaggagaagattaagctcaataagcagttgccctacctcgttgggaacatcgttgagatattggaaatgaacccagaagacgaagctgaagaagatggtgccatattgatcttgactcacaaaggaagg

SEQ ID NO: 77500 - DNA, 256 bp, Glycine max
  Clone ID: 700964757H1
ggttcagctgtgcctcaaatcaggttgcgcaggttctgctaacactgccatactctttctctcagctgggaatgctctctggcatcatattccaagtcttctatggaataatgggaagttggacagcttatctgattagcattctgtacatcgagtacaggaccagaaaagagaaagagagtgtcagcttcaaaaaccatgtcattcagtggtttgaagtgttggaaggtttactgggtccatactggaaagccat

SEQ ID NO: 77501 - DNA, 256 bp, Glycine max
  Clone ID: 700964759H1
ctcttcgctcccactcccacaagcctagaagacgtatacgcaattcttagagtttttcagattctcggaatcgaagagaagaataatcctgtgagcgaggacacttgtcagaaagtggttgaaaatctagcctcgtcttctcctctcaaggatttgttctataccttgttaaggccattttaaaatgcaatgtcaatggaaacgttttcaaggaaatgccaactcttgttgcagatggtaatgatgcactcactgg

SEQ ID NO: 77502 - DNA, 256 bp, Glycine max
  Clone ID: 700964761H1
caaaaacaaacagcagttgcaacaacaaggcacatttcaacgtttatttatttttgttgaaagaagagaagcaacaaatcaatctcacacttagtgttgttacgatggaatcaccgttcaaaccagagattctgaaggggaaggttgctctaatcactggtggagcctccggaatcggattcgaaatttccacccaattcggtaaacatggagcctctgttgcgctcatgggtcgccgcaaacaagtccttcagtc

SEQ ID NO: 77503 - DNA, 262 bp, Glycine max
  Clone ID: 700964766H1
gggcgccgacgtggttgaacaacagcaacgccgccacgctccgccagcagaatttcctccacctcgcagccggaatccgccgcgacggcggggcagcaaaacgacgacgttcgtgctatggatcggaaccggaccgagagcaactctgaagcggacgatttggcggaatacaaagcagatattttaggtcaccctctctacgaccagctcctatcggcgcacgtctcgtgcttgagaatcgccacgcccgttgaccagcttc

SEQ ID NO: 77504 - DNA, 259 bp, Glycine max
  Clone ID: 700964768H1
ctctctagcttggacgagtgaattagattcatcatcaagatgtcgtctctgatagcagaagatgtgaagagcagatcagaggtgtaccacggggacgaaatgtgccaagtgaagtccaaggagcttctcaaggaaatcgccctccccaacggccttcttcccctcaaggacatggaggagtgcggctacgacagacaaaccggcttcgtctggctcaaacaaaagaagagttacacccacaagttcgacaagatcggaa

SEQ ID NO: 77505 - DNA, 254 bp, Glycine max
  Clone ID: 700964775H1
atcatagcgtagaccttttgttctaaaaccacacctcattccatttccatcttctgccacctgtttctaactccccaacccaagaaatttccttttacccctttcccctctcctcttttcttattcatcaaaattcctctttggtgtcctctccctcggtcaactccgtttactataaatatgaccactcttttcttcctcttcttcaacttcaatactcacctttgaatggattctaattcttcttctccaag

SEQ ID NO: 77506 - DNA, 255 bp, Glycine max
  Clone ID: 700964776H1
catatacattttttagccttttgttagccccaaacacccacacgggcacacccctgcaggtacaaaagggggagttcacaacaaaaagaaaacaatgagaaaaccttgttgtgacaaggaaaacatcaataaaggtgcttggtccaagcaagaagaccaaaagctcattgactacatccaagtccatggtgaaggctgttggcgttccattcctaaagctgctgggctgcatcgttgtggcaaaagctgtaggat

SEQ ID NO: 77507 - DNA, 254 bp, Glycine max
  Clone ID: 700964778H1
atttatttattttaattattatcatctcatctcacccaattcaattcacgtaccttggaatcgattcttagggtttctgactcctttatgtgtttgtctcgcaattgatcatcgcaaccacaatgtccggtcccctcgatcgttttgccagaccttgctttgaggggttttcgggcagtgacgagaagaaggagaggagatctgacttcgagaactccgaggatgaaaggaggaccagaattggatctctcaaa

SEQ ID NO: 77508 - DNA, 260 bp, Glycine max
  Clone ID: 700964780H1
ccgaaagtaacggagggatttccttaacccacaaactctcaaataccctctctctctcaccgaccactatgttgcagagacctagacgccgctgcgagggcactgccatgggcgccatcgttctcgatctccgtcccggtctcggaattggacccttctccctcgggatgcctatatgtgaagcatttgctcagatagagcagcaacctaacatatacgatgtggtgcatgtcaagtattttgatgaggaacccctgaag

SEQ ID NO: 77509 - DNA, 256 bp, Glycine max
  Clone ID: 700964784H1
atgaatttgaaggctacagagttgaggcttggtcttcccggattccaatcgcctgaaagggaaccggatcttttctctttaagctcaccaaagcttgatgagaagccactcttccctttgcttcctactaaagacgggatttgctcgtcggggcagaaagctgttgtttctggcaacaaaagaggttttgctgataccatggatgggttttctcaggggaagtttgctggtaatacagggatgaacgcggtgctat

SEQ ID NO: 77510 - DNA, 222 bp, Glycine max
  Clone ID: 700964788H1
ccagagggcatcctgctaatctgtatgatgtcagaatttgttataatactagctagtactggtattttagcatgttcctgcaaaacagcgacagagattgcaaaattggtaattacaagtccaagccaattagtattcaaaagagtttggtatactcatttctaactaaaacatgattgtccttttaaagacagagagattagtcatattacatattacgtt

SEQ ID NO: 77511 - DNA, 251 bp, Glycine max
  Clone ID: 700964791H1
gttagaagttctctgacaaatcactcaggccacattatttgtatgttatcttgtgtcagtttgcagtatcttgtcacacattcttgaaattgcctgatttcatttatatcatccgttatgcagcctgctcgcgagacggatctgagagtgttcggagttgtgctctactattctctctttatcataacatttttggtttaaccaatgttacttccaatataagtgcagctgtgggtgctgttgtaatgctg

SEQ ID NO: 77512 - DNA, 246 bp, Glycine max
  unsure (1)..(246): unsure at all n locations
  Clone ID: 700964889H1
agctctnttcaccctnttnttnttnttnttcttcttcactttgtaactttcgaatcttcttcnttncaccgcaatggccaccnccacgcttagccccgccgacgccgacaagctctccaacctcaaatcctccgtcgctgcattgagccaaatcagtganaatganaanaatggattcacaagcctcgttgctcgttacctcagtggcgaanaccagcatgttgagtggaggtgttgaagctcaat

SEQ ID NO: 77513 - DNA, 267 bp, Glycine max
  Clone ID: 700964905H1
caagaattgagcacacttgatgaagccaaactgaaggagaaaggaagagccttccatgatatgttcttgaccaagttgtcattgttgcttaaagggacagttgttgcacctcctgataagtttggtgaaacactgcaagacgaacgaattaatggaggtgcatttattggtgctgatggtgttcagttccctcacaagctaatacctaatgcagggatgcgtctttatggtggtgcacaatatcatcgggcaatggctgaatttcgt

SEQ ID NO: 77514 - DNA, 268 bp, Glycine max
  Clone ID: 700964907H1
cgatgtagtgtcggagcagacatcggatagaagttttgggatgagaaacttcaagtacgtaaacactatcaaagcagcggttgagaaagaatgccccttcacagtgtcatgcgctgacattgttgctctttctgccagagatgccattgctttgttgggaggaccaagcattgaaatgaagacagggagaaaggacagcaaagaaagctatgcaatggaggtggaagacttgattccaaaccacaatgattccatgtcctcagtgctg

SEQ ID NO: 77515 - DNA, 272 bp, Glycine max
  Clone ID: 700964911H1
gccgctcgcaagcaaaaagaaagaatcccaggcgaggagaaagatggaggggaaggagcaggatgtgtcgttgggagcgaacaagttccccgagagacagccgattgggacggcggcgcagagccaagacgacggcaaggactaccaggagccggcgccggcgccgctggttgacccgacggagtttacgtcatggtcgttttacagagcagggatagcagagtttgtggccacttttctgtttctctacatcaccgtcttaaccgttatgg

SEQ ID NO: 77516 - DNA, 276 bp, Glycine max
  Clone ID: 700964913H1
aaacgcggctcgccattctcatttctctctccagaagataaaaaacccttttatatttttatatttttatcactagaaaaatcaaacaaataaaattttcattttcattttcttttcttttctcgctcttgttttttcggggaaattgatttcaccgtaataggagccaagaaaaacaaaacagaaaaattccgaacccgtgaactcttttacctgctacaaatgcatttctctctcttttctcacactttttctctgctaaactcgcaaacacga

SEQ ID NO: 77517 - DNA, 269 bp, Glycine max
  unsure (1)..(269): unsure at all n locations
  Clone ID: 700964918H1
cagactttatcatcaccagcaccttccaagagattgctggaagcaaggacactgttggacagtatgagagtcacactgccttcacccttccaggactttaccgtgttgttcacggtattgatccatttgatccaaagttcaacattgtctctcccggtgcagacatgggtatatacttcccatacactgaaactgagcgtaggttaacagaattccactctgacattgaancgcttctttacagctcagtggagaatgaggaacacata

SEQ ID NO: 77518 - DNA, 239 bp, Glycine max
  Clone ID: 700964919H1
tgggaaggggaagagtggagttgaagaggattgagaacaagatcaacaggcaagtgacctttgcaaaacgaaggaacgggcttttgaagaaagcttatgagctttccgttctgtgtgatgccgaggttgctctcatcatcttctccaatagaggaaagcagtacgagttttgcagcggttcaagcatgctcaaaacgctggagaggtaccagaaatgcaactatggagcgcctgaggac

SEQ ID NO: 77519 - DNA, 266 bp, Glycine max
  Clone ID: 700964920H1
tttggaacttgtgctcatcacaatggcattgagtggttggttttgtgaggcaaattgcagtggagggagttttctacaagaacctgtcacggggttggttacaatgaagtttcctgatgatttacggtagcaaatcaaacccccggatgccgcaactggcacgcaatcttggttagattcttcttgcagaagaggggggtgatttagcctcttccaagtgctttcagcagagtcaaggataacagattggttaaggttgggagcaa

SEQ ID NO: 77520 - DNA, 270 bp, Glycine max
  Clone ID: 700964927H1
agggtttctctgtctgcttcttcactttctctcgtttcaatcgaaaccaaaacaaaaacatgggcagaaaattcttcgtcggtggcaactggaaatgcaatgggaccactgaggaggtaaagaagattgttactactttgaatgaggctaaagtccctggagaagatgtcgtagaagttgttgtgagccctccttttgtgttccttcctgttgtaaaaagtttgctgcgccctgatttccatgtttcggcacaaaactgttgggttcgca

SEQ ID NO: 77521 - DNA, 263 bp, Glycine max
  Clone ID: 700964950H1
gttgcttgcaggtccttatcatggaggtgtatggaaagtaagagttgagctgccagatgcttatccttataaatctccttccataggctttatcaataagatctatcacccaaatgttgatgagatgtaaaaatattgtattttttaatattgctgcgaaactctatactttgagtagtttgccttgtgttaattttaagtattgtgtgcgatcatattggattataataatttcaggtcaggatcagtttgtcttgatgtta

SEQ ID NO: 77522 - DNA, 263 bp, Glycine max
  Clone ID: 700964957H1
gacatctcgagtgtgaagtttgtatgactaaacatttgcaggtggtccgataacggcccaataattggtggctcgataggcccaacaacaattgctaagataggtattgattatgaaaatggtggaacatcctaatatagtcaatctcattgaggtgattgatgatccagagtcggatgacttctacatggtacttgaatatgtggaaagcaaatgggtgtgcgagggtacaggtcatccttgtgcattaggtgaagagactg

SEQ ID NO: 77523 - DNA, 259 bp, Glycine max
  Clone ID: 700964972H1
caaaaatgagtgacaaaaacaacatggttatagcctccaaaacagccactggtagttcttcatcatcttcaagaatgtccacaaaaacattctcgggactcggaaacctcgtcaagctccttcccaccggcactgtctttctgttccagttcctcatccctgtcgtaaccaacagcggacactgcaccactcttcacaagtacctcactggctctttccttgtcgtatgcgcattcaactgcgccttcgcctccttcac

SEQ ID NO: 77524 - DNA, 262 bp, Glycine max
  Clone ID: 700964975H1
atttcattttctttacttctttaatggcccaggatttctccaaagctgttgatgacggcctcaagctctccaaacgcatatacttcgggaaggacagggcggtggcacctcctaaacctccgccgccgatgacgcgctccgccaccgcgtttctcccctcggcgccgatggtctacgcggtgatctccgatccagggatcgtggacaaccccgacatcccgagctaccaaccgcacgtgtacggaaggtgtgatcctccagc

SEQ ID NO: 77525 - DNA, 256 bp, Glycine max
  Clone ID: 700964986H1
gtcgctccgcaccagtttcaccgcacgaatatcttgttgtttggagcgatccgagaaaaactctgtaaacatgttggtttaccaggacctccttacaggtgatgagcttctctctgactccttccgttacaaggaaattgagaatggaatgctgtgggaagttgaggggaagtgggttgttaaaggagcagttgatgtagacattggtgcaaacccttctgctgagggtggaggagaagatgagggagttgatgat

SEQ ID NO: 77526 - DNA, 265 bp, Glycine max
  Clone ID: 700964993H1
gttaagaagagtctttggtggagggaagaagggttgaagcaccttgcactgcaaaagaaaaaaacaagaagaaaaacacagcaatggagggtgggaacaacagcagcatcaacagcaaccctgaggagttggcggtggggtgcttgctttcgatcaggacaacgttgggcgacgaattcgaaggccaggtcgtgaccttcgatcgcccctccaacatcctcgtactccaggagccttccaaacctagccctcgtcgaaaccttag

SEQ ID NO: 77527 - DNA, 202 bp, Glycine max
  Clone ID: 700965007H1
ttctaatctcaagttgctgcaaaattatcccaccacaaacattagtcatttgctctatgttgccaacaagtttcgtgtacagtcagtctaatgttgcattttgctcttctatctctagtttctcttcaaattcaatgcctgtaaatgacttttaagtgtgagactcacagcaatgccggtttatttatttgtttttacttat

SEQ ID NO: 77528 - DNA, 244 bp, Glycine max
  Clone ID: 700965022H1
tttcaatcaaagcaaatatacaataatacgatggtcgagtttggaacgagaatgggatccatatggacggtgttgttttgttttgcatcggttttcgcgatcgtttctgcagaacgaagcattgtgaaaatggaagtgccgagattcaatgtcaccagccgagagcctcaacagagtttcctcaccaaagctttgaatttcttatggcaatctggagaatcagggtaccaacacgtgtggccgg

SEQ ID NO: 77529 - DNA, 110 bp, Glycine max
  Clone ID: 700965033H1
gcctaacattaaactaagcaacgctcggttctattttctctttcaccatatccattgtcccttaagtctagggcagagtttctacaatgccttagacacacaatttcgcc

SEQ ID NO: 77530 - DNA, 240 bp, Glycine max
  Clone ID: 700965039H1
ctgacctatcttggaagagttttgaagtttaaaccttcaaacccttttgcctttagattctgattctgagtctctgctgctatatatggcgccacgcgtatttcttgtgttggggatgttgcgatggtgtgccttgttaaggtttcgtctgatccaaagagagaagaagaaatactggaagaagaactacattttcccgataacgagccacttattgtgagagacgggaacagaaggcta

SEQ ID NO: 77531 - DNA, 240 bp, Glycine max
  Clone ID: 700965040H1
ggttcaggtcctttattcggattcacgaaagcgaacgagctatttgtgggaagattggctccctttccagtaataatttctccaatcaatcttgtatacactcttgtttatcatatgatggacctcctatagagtattatgagattgttgaggaagaggctgagattgaggaagagcggacactgaatgatatcagtagaccactccttgtagaagctgagtggcctgacattgagcaga

SEQ ID NO: 77532 - DNA, 239 bp, Glycine max
  Clone ID: 700965041H1
ggccattaaggtgggaggagccaaccacagccatgccactcaagaccttcatgattcaattgctgctggtaactatcctgagtggaaactgttcgttcagacaatagatcctgagcatgaagcaaatttgactttgaccctcttgatgttactaagacttggcctgaggacattatacccttgcagcctgttggtcgcttggtcctgaataaaaacatagataatttctttgctgagaa

SEQ ID NO: 77533 - DNA, 240 bp, Glycine max
  Clone ID: 700965052H1
tgcactacctggcgacgaagaaacgccacttgtgggcgatatttcgggccttgaagggcgcaagagccaccacaccagggatgttcatatcctgagcttggcctttctcttggtctttctcgcttcggtgccgctcagaatttgcagagcactctcaacactgaggatgacttgggtaccacctcacttgggatcctgtatttgtctttcacattcttctccgtggttgcttctttggtg

SEQ ID NO: 77534 - DNA, 237 bp, Glycine max
  Clone ID: 700965074H1
tgctactgctccttggttttttagttgttgtgttgttgtcttcaactccacacagttccctcacttctcttccctttgaccattcaaccttcctcgcctttgcctccgtttccgtgactggatggctggaggtgttattcagcagatattgaggaggaaactccaccctcggtttactaactctcccttgttgtcacccatcgtagcaaaaaaagatgatgctggctctactggcag

SEQ ID NO: 77535 - DNA, 238 bp, Glycine max
  Clone ID: 700965075H1
cgggactttcactagccgcagcagcctcaggaggagaataaggatgtctcacaggaagttcgagcacccaaggcacgggtcactgggatttctccccaggaagcgtgctgctcgtcacagggaaaagtgaaggcattccccaaggatgacccatccaaggcacccaagctcactgcattcttgggttacaaggctggtatgactcacattgttagagaggtcgagaagccaggatcaa

SEQ ID NO: 77536 - DNA, 237 bp, Glycine max
  Clone ID: 700965090H1
cagtttttgtagatgatgatgaggatcttcgtaagtccttagagaaagcgagaagattagctcttaaaaagaaggagggggaaggggcatctggtcctcaagctattgcgttgcttgccactctaatcataataatgagactgatgatcaaaaccctacagctggagagtcacgagaaaacaaggtggtcttcacagagatggaagaatttgtctggggtctccacattgatgaaga

SEQ ID NO: 77537 - DNA, 266 bp, Glycine max
  Clone ID: 700965103H1
gtgaggttaaaacaatgggtgtggagaagttgagcttattatcgacgacgaacctcgccgtgttagctcaagcgaacaacaaatgcagtagcaggaagcacgtgtgttggagatcatccacgacgccgtttcatctgcagcggaagccgatctcatggtctgtgttgtgcggtttcatgctatttgggttgggcctcatttctctcttgacgggccacatggtctctgatctcgaatggtactctcaccgtcgctctctctactct

SEQ ID NO: 77538 - DNA, 263 bp, Glycine max
  Clone ID: 700965106H1
ctcttttgcattctctctgaattcgtatgccatggagtcacccggtaacgagcatgtggtgggtggcgcagaacccaacgacgtcgttacgcccttttcccacagagaagaacctcacaattcccaacccctcaccggcgacggtgccagtcccggaaagatatttataggtggtttagcgagagaaacgaccattgcccaatttatcaagcactttggtaagtatggtgagatcacggattcagttatcatgaaggacagga

SEQ ID NO: 77539 - DNA, 264 bp, Glycine max
  Clone ID: 700965115H1
gcatgctgtatgtggagacagctgatcggcctggattactggttgatcttgtaaagattattactgacattaacattgctgttgaatcaggagaatttgacactgaggggctcttggctaaggcaaagtttcatgtcagctacaacggtaaagcaatcagcaagcctctccagcaggttcttgctaacagcttgagatatttcttgaggcgtccgacaactgaggaatctagtttttgagtggcacttcatggaaagtagtgca

SEQ ID NO: 77540 - DNA, 265 bp, Glycine max
  Clone ID: 700965119H1
tttacctaaccctacaattcgccgatccttccagttggggtttttcgctttcagcgaagagcggtgtatatagaaaccctattccccctatgcaccaggggaattgaatatagaaataagaaaaaggcaaaaaaaaaagaggttgaaaaagttgtatgttaaataggtaattctgttgtttttcgtgtttctggactcaggagctgagctgtttccagggaaaagcatgtacagtatgaactctaaatgcagtgctggggattgc

SEQ ID NO: 77541 - DNA, 265 bp, Glycine max
  Clone ID: 700965124H1
gctgagagggttgttgtttctacaaagagcccaagatcagataagcaatatgtgtgggaagcagaagctgacagtagctcttatgtgataaaagaagaaactgatcctgaaaaggttctgcgtcgtggtacacagattacactctatttaagagaggatgacaagtatgaattctcagagccaagcaggattcagggtttggtgaagaattactcacagtttgtttccttccccatctacacatggcaagaaaagtcaagaactg

SEQ ID NO: 77542 - DNA, 265 bp, Glycine max
  Clone ID: 700965131H1
agctgaatgagagaattgctaaattgtctggtggtgtggctgtgatacaggttggcgcacaaactgagacagagctcaaggaaaagaaattgagagttgaagacgctcttaatgctacaaaggcagctgtagaggaaggtattgttgttggtggtggttgcactcttctgagacttgcatcaaaggtggatgcaatcaaggatagccttgataatgatgaagaaaaagttggagctgatattgtgaaaagagctcttagttaccc

SEQ ID NO: 77543 - DNA, 267 bp, Glycine max
  Clone ID: 700965134H1
caaatcttaaaaatattcagtgaagatcaacctcaatggcatctcttggcgtgcgaccagttcttccccctccattaacttccatctccgacccacctcctcttttcgatggcaccaccaggttgtacatcagttattcttgcccctatgcacaacgtgtgtggatcgctaggaactacaaggggctacaagataagatcaatttggtccctattaaccttcaagacaggccagcttggtataaggagaaagtctaccctgaaaata

SEQ ID NO: 77544 - DNA, 261 bp, Glycine max
  Clone ID: 700965138H1
ggacaacgccaatgataacaagcaaaacatagatgagaaagatgaagatcttgacggcaagaaatgcagttctaattatgaagcgatgcagaaaaacctgctatttgtagaaaataacgagggactgttaaccatagggcttggacaaggaaagcttaagactcatcgaacaggttttaaaccctacaaaagatgttccatggaggccaaggaaaatagggttggagcaagcagcaatcaaggtgaagagcaaggttgtaa

SEQ ID NO: 77545 - DNA, 261 bp, Glycine max
  Clone ID: 700965141H1
cctagccagtagtagccaatttgttggagctggttgggaatggcgtcgaaaccgaaatcaaatggaaattccaaatgcaacaaaggattcgctgacagctatatgctgttgaatcctgaagacgctcatttcttcgatcttgttcatgtgctgtattcccgtaacttgggaaaccgaaaatttgtggacagcaatgctgagggatcttatgagggaagcttccgccaaagatggcttatattcgtctctgtggtgctccag

SEQ ID NO: 77546 - DNA, 259 bp, Glycine max
  Clone ID: 700965142H1
gcggcagaggaggcgagggcggatgccgctgaattgaggaaggttttgggagagacagagtctagggttgagtctctggaaagggaattggcagggttgaagaaggtgaaggctgagagtgaggttagggttagggatttggagaggaagattggagttctggagactaaggaaattgaggaaagaaacaagagaattaggtttgaggaggagactagggataagattgatgaaaaggagagggaaattaagggttaca

SEQ ID NO: 77547 - DNA, 263 bp, Glycine max
  Clone ID: 700965146H1
tttcgctcacacaacacaactcctaccaacaaggtgctctgctcgttcactcctctctcatacagcctctggctcctcctccggtgaaagagggtgagaagaggagttagcaagcaatttttgtttcttttgggagttgggacccctcactcacatggacgcatcaacggctttaatgatcctatccgcaatagcggcctatttaatatggttcaccttcgtcactcgctccctaaaaggtccacgtgtctggcccctattcg

SEQ ID NO: 77548 - DNA, 264 bp, Glycine max
  Clone ID: 700965147H1
ggaaaccgaaatgggcgaggttgggggaaaaaaaattggcgactaccctcgccaaatccttagattttgcctcaccctcctcggcttcttcgccttctaagtttccagtgtctcctatgaagagttgttcttcctctccttgcctgaattccattaaaatgctacctccaaaccctgaatctttgctcctcaaaaaaggggtggataaaaaggcttcctcatcatcctcacccgtgaaatttgcaagttccgtcagttcaccca

SEQ ID NO: 77549 - DNA, 266 bp, Glycine max
  Clone ID: 700965148H1
ccgatcagaaacatcgccgtcggaaggcctgaagaggcgactcaccccgacacgttgaaggcggctttggctgagttcatctcaaccttcatcttcgtgttcgccggctcaggctccggcatcgcctacaacaagctcaccgacaacggcgctgccacccctgccggcctcatctccgcctccatcgcccatgcattcgccctcttcgtcgccgtctccgtcggcgccaacatctccggcggccacgtcaaccccgccgtcacctt

SEQ ID NO: 77550 - DNA, 269 bp, Glycine max
  Clone ID: 700965149H1
cgaccttgaggatttatttaattacaaagatctggacgaggaatttctgagccgtgttactgataacactcggaggtatattgggattttttccaatgcaattgatgaactcatgccggagcccactgaggacttcacagatgatgatcatgacatattgatgactcagagatctgatgaaggagtagaaggcaccgacggttccgatccacgtcagaagatgcctcctgaaatcaagcgttactatgaactttatattaaagcatctt

SEQ ID NO: 77551 - DNA, 264 bp, Glycine max
  Clone ID: 700965162H1
aagaaacttaatcgatcatcacttcacttcactaatacatcatggcagacgagacccagaacaagtatgagagctctgaggttgaggtccaggatcgtggtgtttttgactttctcggtaagaaaaaggatgaagaagacaagcctcatcctcaggaggaggtcatcgccaccgagtttcaaaaagtcactgtctcagaccaaggagagaacaagcacagcctcttagaaaagcttcaccgatctgacagcagctctagctctt

SEQ ID NO: 77552 - DNA, 265 bp, Glycine max
  Clone ID: 700965163H1
ggaagcaaagaaaatcccagaagtgatactaaactcagggaaaaagatgccagtgataggcctaggaaccgcatcaattcctcttccatcacatgaagctctcacctccatccttattgatgcctttgaggttggctacagacactttgatactgcttctctgtatgaaagtgaggagtctctaggcaaagctgtggcaaaggccttagagctaggcctcataaatagcagagaggaattattcatcacatcaaaactatggtcc

SEQ ID NO: 77553 - DNA, 257 bp, Glycine max
  Clone ID: 700965174H1
gctggctgctgctgttttgttcatgatgaaggaagaactagttaggggggttcgtttcttgcttgccaatgatgctgtaaagccaaagcatccgtgattgaagaggccacactagcttgatcaagatttcatgatgtaccatcttgaggtagcaaattagttcaaatggtaggggaattagagtgattcaaacaaaatattaagatatatggctgtaactgtatctttgattattttcatcaggttagtttccatag

SEQ ID NO: 77554 - DNA, 259 bp, Glycine max
  Clone ID: 700965176H1
ctagagtaattgcggaatcagctagaattttctaataatggccaaagacgttgagcaggttacagagcaaggtgaatactccgcgaaggattaccatgacccacctccggcgccgttgatcgacccagatgagctcactaagtggtccttgtacagagccgccatagctgagttcatagcaacactccttttcctttacatcaccgtgttgaccattattggctacaagagacagagtgacaccaaaatccccggtaac

SEQ ID NO: 77555 - DNA, 263 bp, Glycine max
  Clone ID: 700965182H1
agagtggtgagattttgagatccatttgaagttgataatgagccaaagagtattagtagtcctgctgcttgttttgaattatgtgttggttgcagaaggagaaacagctgatggagatttgaccacatttttgtctcttataaatacctgggagaacacccctcctaattgggtgggttcagatccttgtgatgattgggttggaatcaagtgcaagaattcacacattacatcaataacattatcaagcaccggtttggctg

SEQ ID NO: 77556 - DNA, 259 bp, Glycine max
  Clone ID: 700965191H1
cttatcttagctaccccatcacaacaaccacgatactatttctcatactctattaggcaaaaacaccaccaaatgggagaggaaaaggagcagcctaagaatgacaccgagaaaaagcccgaggaggtagcccccaagaaagacgacggacccatccctgtcgtttacaaactcgacttgcattgcgagggatgcgtcaagaagatcaaacgcacctgtcgccacttcgaaggtgtggaaaccgttaaggcggatctat

SEQ ID NO: 77557 - DNA, 251 bp, Glycine max
  Clone ID: 700965209H1
caagattctcacaaacaactcttgagaaagaaagaatggctgccaacacattgatgagttctgccatctcagccttcccatctctcctttcctcctcaaaatccagatttgccgcagcagttcctctttcagctttgttgtcaccaatgcctcttcttctcgcttttccatgagtgctgactggatgcctggccagcctagacccccctaccttgatggttcagcacctggtgactttggattcgaccctc

SEQ ID NO: 77558 - DNA, 248 bp, Glycine max
  Clone ID: 700965210H1
ggctgcagatatccaaaccttaaattcggtcctcgaatctttctgatcattggttgttttttattctttcaaatacattccaaaatctcttggaaattgcgagattcactgcttatcctagcagcagatttgggttctgacccaattattcattttccccaactgggtcttgtggattttttgttggggttttaaatttcgtgttgctgggtttgaaagttatttcctttcttccccgtctggattca

SEQ ID NO: 77559 - DNA, 249 bp, Glycine max
  Clone ID: 700965249H1
caactactacaagtacttccttacaatcaaaaccaacaacaactatggcaagttatcaaaagcactacgatgatcagggtcgcaaggttgacgagtatggcaacgttgagaagcaaaccgacgaatacggcaaccctgttcatgctgctagtgtcacctatgtagccaccagaactgctgctggtggttacagtgatgacattaataagcaacatgataccaccaatgcctacggcgtagacactggta

SEQ ID NO: 77560 - DNA, 243 bp, Glycine max
  Clone ID: 700965251H1
aaaatggccaaatcaatcaaattctttgagttgaacacaggggccaagattccttctcttgggttagggacttggcaagctgaacctggtgttgtagctgaagctctcaccacagccattcagttggatacaggcatattgactgtgctagtgcgtataagaatcaagcagagattggttctgctcttaagaagctttttgatgatggtgtggtgaagcgtgaggacttatggatcacttcca

SEQ ID NO: 77561 - DNA, 98 bp, Glycine max
  unsure (1)..(98): unsure at all n locations
  Clone ID: 700965266H1
gagccgatctacacttgatttggattccaatctggctaggacccattcatcaagtaatcattcacacaattcctannctantgnncnaccatnatnnc

SEQ ID NO: 77562 - DNA, 243 bp, Glycine max
  Clone ID: 700965273H1
gtcgcctgcaggaagagggtgtgaatatcacagccaactcggtccatccaggagtgataatgactcctcttatgagacactcatcttaccttatgcatttcttaaaggtcttcaccttttacatatggaagaacgtcccccagggagcagccacgacatgctatgttgctctccacccaagcgtgaaaggtgtaactgggaagtactttgtggattgcaatcaatgcaaaccaagttcacacg

SEQ ID NO: 77563 - DNA, 240 bp, Glycine max
  Clone ID: 700965275H1
ctccatcatccaaatatagttagaattcacgaggttattggcacaaaaacgaagatatacattgtgatggaatatgtttcaggaggacagctattagacaagatatcctatggagagaagtgaatgcatgtgaggcaagaaaactattccagcaacttattgatgccctgaaatactgccataacaaaggggtttatcatcgagatctcaagccagaaaacttgcttcttgacagcaagg

SEQ ID NO: 77564 - DNA, 241 bp, Glycine max
  Clone ID: 700965277H1
attattttcaggctagaatattccattatggctccatcagcttgattgatgagccatgcaagttcagctcaccttgctgctatgagcattgccaaaaactctggttgcattctatcatatgtccaaatttgagattggctctatggccttctgcagacgccgctcggaaaggcataatggatatatgggatcaagctgatgtcataaagataagtgaggatgagattacatttttgactgg

SEQ ID NO: 77565 - DNA, 244 bp, Glycine max
  Clone ID: 700965279H1
atttgaagttctgttggtgagtgtgagtgagtgtatcaatcggccacacagaaatgggcagtgcttctctgattccagtttcctggttgccttggcggccactttctcctttcaagggaacgtgaaaaccttggtcgcaaaaccatggctgaagaagattcagcaagcaagacccctcatttccgtggttaacaaggctgcctctctatcttcccccgtgacagcacccagcgtcggcgttcgg

SEQ ID NO: 77566 - DNA, 243 bp, Glycine max
  Clone ID: 700965282H1
cgtgactagacactcatctcactcgcgccatcttagggtttctccttttgtttcgcaacatggttgccgctaagaaaactaagaagacccatgagagcatcaacaacaggctcgctcttgtcatgaagagtggcaaattcaccctcggttacaagaccgttctcaaatctcttaggaactccaaaggaaaattgattatcattgctaacaactgcccccctttgagaaagtcagagattgaat

SEQ ID NO: 77567 - DNA, 235 bp, Glycine max
  Clone ID: 700953892H1
cccaaagacccactaatagtaacaattatgctccaaagaccaattcctctcaaattggtcatcataagaacaataccaccaacagcaacatcccagtgattgacatgaagcacatctacggtggtgacgagggaaagagggctgagacgctccggctcgtgtcggaggcgtgccaagaatggggttttttccaggtggtgaaccatggagtgagccatgagttgatgaagggggc

SEQ ID NO: 77568 - DNA, 255 bp, Glycine max
  Clone ID: 700959272H1
attaggctttcacaacacctcagcgtcactgtaccagttggaaatggagacaataacagagaacggatcagatggtgtgagtttggcaagaaatacatccaacaacgcccgtcgagggttgccaatgatccaaacaaacatgaagccaacggattcggaattccaagtgtgccacgacgacagcaccccgccggtcagagcccaaaccattcacgagctccattctctgcagaagaaaaagtcaaccccttccac

SEQ ID NO: 77569 - DNA, 232 bp, Glycine max
  Clone ID: 700961793H1
tgcattaggctttcacaacacctcagcgtcactgtaccagttggaaatggagacaataacagagaacggatcagatggtgtgagtttggcaagaaatacatccaacaacgcccgtcgagggttgccaatgatccaaacaaacatgaagccaacggattcggaattccaagtgtgccacgacgacagcaccccgccggtcatagcccataccattcacgagctccattctctg

SEQ ID NO: 77570 - DNA, 243 bp, Glycine max
  Clone ID: 700961324H1
ggaaagacatttacaaatgaagtaattgaggctgtgacttctatcaatgaaaaacctcttgttttggccctctccaatccaacttcacagtctgagtgtacagctgaagaggcttacgaatggagtgagggtcgtgcgattttcgctagtggaagtccatttgatcctgtagaatacaagggcaaagtgtactattctggccaggccaacaatgcatacatcttccccggctttggtcttggg

SEQ ID NO: 77571 - DNA, 234 bp, Glycine max
  Clone ID: 700905407H1
tgagaaattactaaatgatgagttttacattgggcttagacaaaagagggcaactgggcaggaatattctgaacttttgcacgagttcatgactgctgtcaagcaaaactacggagaaaaagttcttgttcagtttgaagattttgcaaaccacaatgcttttgagttgcttgcaaaatatggcacaactcatcttgttttcaacgatgatattcaggggactgcatctgttgt

SEQ ID NO: 77572 - DNA, 255 bp, Glycine max
  Clone ID: 700956234H1
ccttcagcttgtttgcctattaccattgatgtgggtacaaacaatgagaagctgctgaatgatgaattatacattgggctaaagcaaagacgagcaactgggcaggaatatgctgaacttatgcacgaatttatgacagcagtcaagcatactctatggggataaagttctaattcagtttgacgactttgcagaccactatgcttttgatctgcttgacgtatatagatctacacatctggtctttaatgatga

SEQ ID NO: 77573 - DNA, 261 bp, Glycine max
  Clone ID: 700965158H1
cactcttcttcaatcaagcgaaggtggtctcgattgcaagtgatccacgatacactctacgcttcacaaaaccttcaaacccaattccacagaattcttctgcttcaccatgccaccaaagcctttagactatgggtcaataaatgaaaacgtgaagaagagtcaatatgctgtcagaggtgaattataccttcgagcttctgaacttcagaaagagggcaaaaagattatctttactaatgttggcaacccgcatgcatt

SEQ ID NO: 77574 - DNA, 227 bp, Glycine max
  Clone ID: 700961520H1
ggcagattgtggatcagattcctgggagagcaactggtgcctatagccatagtcagggtgttcagggcttgcgtgatacaatagctgctggaattgaagagcgtgatggttttcctgccaatcctgatgacattttcatgactgatggtgcaagccctgctgtccataatatgatgcaattactcattagatcagaaaatgatggtattctgtgtcccattccacac

SEQ ID NO: 77575 - DNA, 260 bp, Glycine max
  Clone ID: 700956467H1
attgacctcgggcggtttaggcgcttatagtgactcccgcggccttccaggagtgaggaaggaagtggctgagttcatactcaggcgtgatggttatccaactgatccagaactcatatatctcactgatggtgccagcaagggggtgatgcagatattaaatactatcatcagaggtcaagacgatgggattttggttccagtcccacaatacccactctactcagcaacaattgctctgcttggtggtacccttgttc

SEQ ID NO: 77576 - DNA, 164 bp, Glycine max
  Clone ID: 700959696H1
gcaattactcattagatcagaaaatgatggtaatctgtgtcccattccacagtaccctctgtactcagcctcaattgccctccatggtggctgcctggtaccttattatctagatgaagcaactggctgggggttggaaatacctgaactcaagaagcaattgg

SEQ ID NO: 77577 - DNA, 233 bp, Glycine max
  Clone ID: 700958391H1
gatagcccgaattgttgcaaagcaccccaggcttctggttctctctgatgaaatttacgaacacataatttatgcaccagcaactcacacgagctttgcatctttaccaggaatgtgggacagaactcttactgtgaatggattttctaaggcctttgcaatgactggttggcggcttggatatattgctggtccaaaacattttgttgcagcatgtggaaagatccaaagtc

SEQ ID NO: 77578 - DNA, 271 bp, Glycine max
  Clone ID: 700954813H1
gagatttcacaaaggacccaattccttctctagttcaaggtctagaggtcggatctctatggctgttgcagttaatgtatctcggtttgaaggcatacctatggctcctcctgatccaattctcggagtttccgaggcgtttaaggcagacaatagtgatgtcaagctcaatcttggagttggggcatacagaacagaagaactacagccatatgtgcttatgttgttaagaaggtctttgttccgtattttatgtgtcttctgtgatttg

SEQ ID NO: 77579 - DNA, 254 bp, Glycine max
  Clone ID: 700953963H1
attttctattgcagatggcttcgtcggttctctccgcagcttcgcactctgtctcaccctcatgttctctgtccaccacgcacaagggaaagcccatgattagagacaacactttgggattccacagaggacccaattccttctctagttcaaggtctagaggtcggatctctatggctgttgcagttaacgtttctcggtttgaaggcatacctatggcgcctcctgatccaattctaggagtttctgaggca

SEQ ID NO: 77580 - DNA, 261 bp, Glycine max
  Clone ID: 700955412H1
gttcatcgcagactcaacactctctccagacacttccttcatcaaatggcttctcacgacggcatctccgctgcttcttcagattccgtcttcaatcacctcgttcgtgctcccgaagatcctatcctcggggtactgttgcttataacaaagatccaagtccagttaagctcaacttgggagttggtgcttaccgaactgaggaaggaaaacctcttgttttgaatgtagtgaggcgagttgagcagcaactcataaatg

SEQ ID NO: 77581 - DNA, 268 bp, Glycine max
  Clone ID: 700909477H1
gttcgcactctgtctttcccctgtttccgcgtcactgagtcatcgcgattcgcaactcgctcaccggccaattcctccgccgcagctccgtcgccggagcaaggctcatgtcttcttcgtcctcatggttccggagcatcgagcccgctcccaaggatcctatcctcggagtcactgaagctttcctcgccgatcagagtccaaacaaagtcaacgtcggagtgggtgcgtatcgcgatgaccacggaaaacctgtggttttggaatg

SEQ ID NO: 77582 - DNA, 249 bp, Glycine max
  Clone ID: 700964436H1
gggaaatcatattgttaatgttttctcattctcaaaagcatttggaatgatgggatggcgggttggatatatagcatatccctctgaagtaaaagactttgctgaacaacttctcaaagttcaagacaacattcccatctgtgcttcaatattatcacagtatcttgccctgtattcattggaagtggggcctcaatgggttgtagatcaggtaaaaactcttgaaaagaacagagaaattgttttaga

SEQ ID NO: 77583 - DNA, 250 bp, Glycine max
  Clone ID: 700962862H1
aatcaatggcctttctttagggtcacacttgatttggtggaaatggtgtttgccaaaggagatccgaaaattgccgctctgaatgatagactccttgtttcaaaggatctgtggccgtttggggatcaattgaggaacaaatatgaagaaactaggaaactcctacttcaggtggctggacacaaggaaattcttgaaggggacccttacttgaagcaaagactcaggcttcgtcatgctcccattacca

SEQ ID NO: 77584 - DNA, 262 bp, Glycine max
  Clone ID: 700962754H1
aatcaatggcgtttctttagggtcacacttgatttggtggaaatggtgtttgccaaaggagatccgaaaattgccgctctgaatgatagactccttgtgtcaaaggatctgtggccgtttggggatcaattgaggaacaaatatgcagaaactaggaaactcctacttcaggtggctggacacaagggaattcttgaaggggacccttacttgaagcaaagactcaggcatcgtcatgctcccattaccagcctcaatattg

SEQ ID NO: 77585 - DNA, 261 bp, Glycine max
  Clone ID: 700955462H1
tgagaacaatgcaactacagaatcagacattgaagaaactctcaagaaacttgtatttgacttgaagaagtctcctcaggaagtttttgatgcactgaaaaaccagactgttgatttagttcttactgctcatctactcaatcaattcgtagatctttgcttcaaaagcatggacggataaggaattgtttatctcaattgtatgccaaagacattactcctgatgataagcaggagcttgatgaggctctacaaagggag

SEQ ID NO: 77586 - DNA, 249 bp, Glycine max
  Clone ID: 700959358H1
agtaaacctgctgatgaacttataacacttaacccaacaagtgaatatgcacctggtttggaagacaccctcattctcaccatgaagggtattgctgctggcttgcaaaacactggctaaatctgagtttttgtcttctctttggttccacttttattttctgtttcctttatcagaaataacgagtttagctgcatgcaccaaagggtgtttttccctcccctgtacccatgtttccattataagata

SEQ ID NO: 77587 - DNA, 283 bp, Glycine max
  Clone ID: 700963637H1
ctttagagagatagagagatagagagagagagaaagaaattaagaaaaaatggcagcctgcactgtctactcaacacaatctctgagctcaaattgctccatctcaaccccatcaaagacacagctgagtttcttccaccaaaagcaggtacgttctggaggaacagcaacaggggcaacagcagcagcagaagaagctatgtgataacatgtgcagcaggtgactcacagacagtggtgattggtcttgctgcagactcagggtgtgggaagagcacttcat

SEQ ID NO: 77588 - DNA, 265 bp, Glycine max
  Clone ID: 700959747H1
gagcaccttcatgaggaggctgacaagtgtgtttggaggagcagcagagccaccgaagggtggcaaccctgactcaaacacactcatcagtgacaccaccactgtcatatgcttggatgattaccactctttggatagaactggcagaaaggagaagggtgtcactgcccttgaccctagagccaatgattttgatctcatgtatgaacaagttaaagctcttaaggatggaattgctgttgaaaaaccaatctacaaccatgtc

SEQ ID NO: 77589 - DNA, 265 bp, Glycine max
  Clone ID: 700961206H1
agacgacctcaagaaaatcgccgcctacaaggccgtcgagtacgtcgagtccggcatggtcctcggcctcggcaccggctccactgccaagcacgccgtcgaccgcatcggcgagctcctccgccaaggaaaactcaaagacatcgtcggcatccccacctccaccaaaacccacgaccaggccctctccctcggcatccccctctccgatctcgactcccaccccaccgtcgatctcgccatcgacggcgccgacgaggtcgat

SEQ ID NO: 77590 - DNA, 262 bp, Glycine max
  Clone ID: 700951860H1
ctgaaatcgagctctttatttggagaatctctaagagtggcatccaaatcaacactaaaggtttcaaagacaaagaatacttcactcgtgaccagatgtgaaattggtgacagtctggaagaattcctcacaaaagcaacaccagataaggggttgatcaggttgttggtgtccatgggagaagcattaagaacaatttccttcaaagtgaagacggcttcttgtggtggaacacaatgtgttaatactttggggacgagca

SEQ ID NO: 77591 - DNA, 268 bp, Glycine max
  Clone ID: 700909473H1
tgtgattctgtatgatagccgtcactctttacttccaaaaattgaggagggcccaaagacatttgtcaatgccctatctagtaccctgagcaagctccagtccagtaaatctttccggagatttagagaagctgctaggggtgttacgaaacgaattggtaggtctgcatgaattggcagctaaagtggatgaatatgctcgtggtatgatgggtcctctaggtgctactctttttgaagagcttgggttgtactacataggcccagt

SEQ ID NO: 77592 - DNA, 245 bp, Glycine max
  Clone ID: 700962626H1
gcacgatttaacaagcctgacaatgagattgttgaccattacacatatgttatattgggtgatggttgtcaaatggagggaatttcaaatgaagcatgctcacttgccggtcactggggtctagggaagcttattgctttatatgatgacaaccacatttccattgatggggacactgagattgcattcactgagaatgttgatcaacgttttgaggcacttgggtggcatgtaatttgggtgaa

SEQ ID NO: 77593 - DNA, 240 bp, Glycine max
  Clone ID: 700907766H1
caacaagcaggtttctttaccaactgctactcttgatggacccataccacctgtaggagccttgagtagcgctctcagtagattacaatcaaataggcctcttagagaattgagagaggttgccaagggagttcctaaacgaattggaggtcctatgcatgaattggctgcaaaagttgacgagtatgctcgtggcatgatcagtggttctggatcatcactttttgaagagcttggact

SEQ ID NO: 77594 - DNA, 308 bp, Glycine max
  Clone ID: 700954594H1
tccttcccatcattctctggcctcaagtcacattctacatgcaaagcagcagcagccacgtcctcgcgtagaaggggtgcttgtccatccaccaacgttgttcgagccgctgcggttgagacactcgaccaaaccaccgaggtttctctggtggagaaatccgtcaacaccattcggtttttggccattgatgcagttgagaaggccaactctggtcaccctggtctccccatggggtgtgctccaatgggtcacattctctacgatgagataatgaggtacaatcctaagaaccccgttggttcaac

SEQ ID NO: 77595 - DNA, 246 bp, Glycine max
  Clone ID: 700906586H1
actcgagccgaatcggctcgagttcagttgaagaaggaatccatcactgcaatgctagcaaacttggacttcagggatgtgacttcacaaaggatgtcaacaaagcaataatgatcagtgatgcaatggaaacgggaacagttcagataaattccgccccggctcgtgggccagatcattttccctttcagggtataaaggacagtggcattggatctcaagggattaccaacagcataaacatga

SEQ ID NO: 77596 - DNA, 247 bp, Glycine max
  Clone ID: 700956280H1
cttttctaacatggctgctgggactggactctttgcagagattgtggatggagatgtgtacaagtactatgctgatggagaatggaagaaatctgcttctgggaaaagtgttgccatcatcaaccccactaccagaaagactcaatacaaagttcaagcttgttcacaagaggaggttaacaaggtcatggacttggcaaaatctgcccaaaagttatgggcaaagaccccactatggaaacgtgct

SEQ ID NO: 77597 - DNA, 254 bp, Glycine max
  Clone ID: 700957466H1
atggctgctgggactggactctttgcagagattttggatggagatgcgtacaagtactatgctgatggagagtggaagaaatctgcttctgggaaaagtgtttccacatcaaccccactaccagaaagactcaatacaaagttcaagcttgttcacaagaggaggttaataaggtcatggacttagcaaaatctgcacaaaagttatgggcaaagaccccactatggaaacgtgctgcgtcttcacaaagcagt

SEQ ID NO: 77598 - DNA, 239 bp, Glycine max
  Clone ID: 700957672H1
atctatctatccatctatcttttctaacatggctgctgggactggactctttgcagagattttggatggagatgcgtacaagtactatgctgatggagagtggaagaaatctgcttctgggaaaagtgtttccatcatcaaccccactaccagaaagactcaatacaaagttcaagcttgttcacaagaggaggttaataaggtcatggacttagcaaaatctgcacaaaagttatggg

SEQ ID NO: 77599 - DNA, 238 bp, Glycine max
  Clone ID: 700962678H1
gacttggcaaaatctgcccaaaagttatgggcaaagaccccactatggaaacgtgctgaacttcttcacaaggcagctgctatccttaaagagcacaaagcaccaattgcagagtgcctggtgaaagaaatagcaaagccagccaaagatgctgttacagaggttgtaagatctggggatctggtttcttatactgctgaagaaggtgtaaggattctgggagagggaaagttcttgg

SEQ ID NO: 77600 - DNA, 159 bp, Glycine max
  Clone ID: 700957692H1
gctctcaccaacttccgctacttcctactccaaccactttcttgtttcccgcagtcatgggcaaggtcaagatcggaatcaacggatttggaagaattggccgtttggtggccagggtggctctgcagagagacgatgttgaactcgttgccgttaacg

SEQ ID NO: 77601 - DNA, 253 bp, Glycine max
  Clone ID: 700961292H1
cgccaatttcattgaaggcctggtcttggatgctaaggagaaaggagcaacattctgtcaggagtacaaaagagaaggcaatctcatttggcctttgctactggacaatgttaggccagacatgagaattgcatgggaagagccatttggaccggttttaccagtaattaggatcaattcagttgaagaaggaatccatcattgtaatgctagcaactttggacttcagggatgtgtcttcacaaaggatgtc

SEQ ID NO: 77602 - DNA, 269 bp, Glycine max
  Clone ID: 700963585H1
atggcattgcaatttcaaagaaggcaggcatgattcctctgcaaatggagttgggaggaaaagatgcctgcattgtacttgaagatgctgacctggatttggttgctgcaaacattataaagggaggtttttcatacagtggtcagagatgcactgctgttaaggttgtcctggtaatggagtccgctgctgatgctttggttgagaaagtgaaggctaaggtggcaaaactaactgttggaccaccagaggatgactgtgatatcacc

SEQ ID NO: 77603 - DNA, 148 bp, Glycine max
  Clone ID: 700764629H1
gaaggctcaggtggcaaaactaactgttggaccaccagaggatgactgtgatatcaccccggttgtgtcagaatcatccgccaatttcattgaaggcctggtcttggatgctaaggagaaaggagcaacattctgtcaggagtacaaa

SEQ ID NO: 77604 - DNA, 121 bp, Glycine max
  Clone ID: 700961412H1
caagatcggaatcaacggatttgcgaagaattggccgtttggtggccagggtggctctgcagagagacgatgttgaactcgttgccgttaacgatcctttcattaccaccgattacatgac

SEQ ID NO: 77605 - DNA, 141 bp, Glycine max
  Clone ID: 700908925H1
gtcatgggcactgtcaagatcggaatcaacggatttggacgaattggccgtttggtggccagggtggctctgcagagagacgatgttgaactcgttgccgttaacgatcctttcattaccaccgattacatgacatacatg

SEQ ID NO: 77606 - DNA, 224 bp, Glycine max
  Clone ID: 700956948H1
cacacaccgtttgttctattcttaactcaacttctgctacccactctcttcttccaagtccaaccacgctcttctctacagtcatgggcaaggtcaagatcggaatcaacggatttggaagaattggccgtttggttgccagagtcgctctgcaaagagacgatgtggagctcgttgccgttaacgaccctttcattaacaccgattacatgacatacatgttt

SEQ ID NO: 77607 - DNA, 244 bp, Glycine max
  Clone ID: 700958014H1
ctattcttaactcaacttctgctaccactctgttcttccaagtccatccacgcttttctctacagtcatgggcaaggtcaagatcggaatcaacggatttgagagaattggccgtttggttgccagagtcgctctgcaaagagacgatgtggagctcgttgccgttaagggccctgtcattaccaccgattacatgacatacatgattggatacgtcagtgttcacggacactggaagcatcac

SEQ ID NO: 77608 - DNA, 219 bp, Glycine max
  Clone ID: 700903658H1
ctcaacttctgctacccactctcttcttccaagtccaaccacgccgttctctacagtcatgggcaacgtcaagatcggaatcaacggatttggaagaattggccgtttggttgccagagtcgctctgcaaagagacgatgtggagctcgttgccgttaacgaccctttcattaccaccgattacatgacatacatgtttaaatacgacagtgttcacgg

SEQ ID NO: 77609 - DNA, 242 bp, Glycine max
  Clone ID: 700961862H1
actcgagccgattcggctcgagcacccacacaccatccgttctagactcaacttctgctctacccaactcctacaacgcttatctctgcactcatgggcaaggtcaagatcggaatcaacggatttggaagaattggccgtttggttgccagagtcgctctgcaaagagacgatgttgaactcgttgccgttaacgaccctttcattaccaccgattacatgacatacatgtttaaatacga

SEQ ID NO: 77610 - DNA, 262 bp, Glycine max
  Clone ID: 700903141H1
attcttaactcaacttctgctaccctctctcttcttccaagtccaaccacgcttttctctacagtcatgggcaaggtcaagatcggaatcaacggatttggaagaattggccgtttggttgccagagtcgctctgcaaagagacgatgtggagctcgttgccgttaacgaccctttcattaccaccgattacatgacatacatgtttaaatacgacagtgttcacggacactggaagcatcacgatgtcaccgttaaggacg

SEQ ID NO: 77611 - DNA, 255 bp, Glycine max
  unsure (1)..(255): unsure at all n locations
  Clone ID: 700907488H1
caacttctgctcttccaactcctacaacgctattctcagnactcatgggcaaggtcaagatcggaatcaacggatttggaagaattggccgtttggtactcagagtcgctctgcaaagagacgatgttgaactcgttgccgttaacgaccctttcattaccaccgattacatgacataaatgtttaaatacgacagtgttcacggacactggaagcatcacgatgtcaccgttaaggacgagaagacccttctct

SEQ ID NO: 77612 - DNA, 243 bp, Glycine max
  Clone ID: 700963289H1
caccaacttccgctacttcctactccaaccactttcttttttcccgcagtcatgggcaaggtcaagatcggaatcaacggatttggaagaattggccgtttggtggccagggtggctctgcagagagacgatgttgaactcgttgccgttaacgatcctttcattaccaccgattacatgacatacatgtttaaatacgacagtgttcacgggcactggaagcatcacgatgtcaccgttaag

SEQ ID NO: 77613 - DNA, 239 bp, Glycine max
  Clone ID: 700906172H1
ttctgctacttcctactccaaccgcacttctgctccgcaattatcatgggcaaggtcaagatcggaatcaacggatttggaagaattggccgtttggtagccagagtggctctgcagagagacgatgttgaactcgttgccgttaacgaccctttcatcaccaccgattacatgacatacatgtttaaatacgacagtgttcatggacactggaagcatcacgatgtcaccgttaagga

SEQ ID NO: 77614 - DNA, 249 bp, Glycine max
  Clone ID: 700962944H1
caacttctgctacttcctactccaaccgcacttctgctccgcaattatcatgggcaaggtcaagatcggaatcaacggatttggaagaattggccgtttggtagccagagtggctctgcagagagacgatgttgaactcgttgccgttaacgaccctttcatcaccaccgattacatgacatacatgtttaaatacgacagtgttcatggacactggaagcatcacgatgtcaccgttaaggacgagaa

SEQ ID NO: 77615 - DNA, 253 bp, Glycine max
  Clone ID: 700964087H1
acaacttccgctacttcctactccaaccactttcttttttcccgcagtcatgggcaaggtcaagatcggaatcaacggatttggaagaattggccgtttggtggccagggtggctctgcagagagacgatgttgaactcgttgccgttaacgatcctttcattaccaccgattacatgacatacatgtttaaatacgacagtgttcacgggcactggaagcatcacgatgtcaccgttaaggatgagaagacc

SEQ ID NO: 77616 - DNA, 281 bp, Glycine max
  Clone ID: 700959733H1
aacaacttctgctacttcctactccaaccgcacttctgctccgcaattatcatgggcaaggtcaagatcggaatcaacggatttggaagaattggccgtttggtagccagagtggctctgcagagagacgatgttgaactcgttgccgttaacgaccctttcatcaccaccgattacatgacatacatgtttaaatacgacagtgttcatggacactggaagcatcacgatgtcaccgttaaggacgagaagacccttctcttcggtgacaagccagtcac

SEQ ID NO: 77617 - DNA, 258 bp, Glycine max
  Clone ID: 700964742H1
ctcaacttctgctcttccaactcctacaacgcttttctctgcactcatgggcaaggtcaagatcggaatcaacggatttggaagaattggccgtttggttgacagagtcgctctgcaaagagacgatgttgaactcgttgccgttaacgaccctttcattaccaccgattacatgacatacatgtttaaatacgacagtgttcacggacactggaagcatcacgatgtcaccgttaaggacgagaagacccttctctt

SEQ ID NO: 77618 - DNA, 245 bp, Glycine max
  Clone ID: 700953045H1
aaaaatgctatcaaggaggaatcagagggcaagttgaagggaattcttggttacactgaagatgatgtggtctccaccgactttgttggtgataacagatcaagtatttttgatgcaaaggctggaattgcattgaataagaattttgtgaagcttgtctcttggtatgacaacgagtggggatacagttcacgtgtcattgacctgcttgtaatcgttgccaagaagtctttttaataaggtgg

SEQ ID NO: 77619 - DNA, 247 bp, Glycine max
  Clone ID: 700956242H1
taaaaatgctatcaaggaggaatcagagggcaagttgaagggaattcttggttacactgaagatgatgtggtctccactgactttatcggcgtgagcagatcaagtatttttgatgcaaaggctggaattgcattgaataagaactttgtgaagcttgtttcttggtacgacaacgagtggggatacagctcacgtgtcattgatcttcttgtattcgttgccaagaagtctctttaaggtgttact

SEQ ID NO: 77620 - DNA, 266 bp, Glycine max
  Clone ID: 700964732H1
caccaacttccgctacttcctactccaaccactttcttttttcccgcagtcatgggcaaggtcaagatcggaatcaacggatttggaagaattggccgtttggtggccagggtggctctgcagagagacgatgttgaactcgttgccgttaacgatcctttcattaccaccgattacatgacatacatgtttaaatacgacagtgttcacgggcactggaagcatcacgatgtcaccgttaaggatgagaagacccttctcttcgg

SEQ ID NO: 77621 - DNA, 259 bp, Glycine max
  Clone ID: 700952951H1
aaaaatgctatcaaggaggaatcagagggcaagttgaagggaattcttggttacactgaagatgatgtggtctccaccgactttgttggtgataacagatcaagtatttttgatgcaaaggctggaattgcattgaataagaattttgtgaagcttgtctcttggtatgacaacgagtggggatacagttcacgtgtcattgacctgcttgtaatcgttgccaagaagtctttttaattaaggtggttctaacattatg

SEQ ID NO: 77622 - DNA, 252 bp, Glycine max
  Clone ID: 700905876H1
gctccgcaattatcatgggcaaggtcaagatcggaatcaacggatttggaagaattggccgtttggtagccagagtggctctgcagagagacgatgttgaactcgttgccgttaacgaccctttcataccaccgattacatgacatacatgtttaaatacgacagtgttcatggacactggaagcatcacgatgtcaccgttaaggatgagaagacccttctcttcggtgacaagccagtcactatttttgg

SEQ ID NO: 77623 - DNA, 239 bp, Glycine max
  Clone ID: 700953564H1
ccgttaaggacgagaagacccttctcttcggtgacaagccagtcactatttttggacacagaaaccctgaagagatcccatgggggtcaactggagctgacatcattgttgagtccaccggagttttcaccgataaggacaaggccgccgcacatttgaagggtggtgcaaagaaggttattatttctgcccccagtaaggatgcccccaagttggtggtgggtgtcaacgagcacgag

SEQ ID NO: 77624 - DNA, 242 bp, Glycine max
  Clone ID: 700906196H1
gccagagtcgctctgcaaagagacgatgtggagctcgttgccgttaacgaccctttcattaccaccgattacatgacatacatgtttaaatacgacagtgttcacggacactggaagcatcacgatgtcaccgttaaggacgagaagacccttctcttcggtgacaagccagtcactgtttttggacacaggaaccctgaagagatcccatgggggtcaactggagctgatatcattgttga

SEQ ID NO: 77625 - DNA, 280 bp, Glycine max
  Clone ID: 700909405H1
aacaacttctgctacttcctactccaaccgcacttctgctccgcaattatcatgggcaaggtcaagatcggaatcaacggatttggaagaattggccgtttggtagccagagtggctctgcagagagacgatgttgaactcgttgccgttaacgaccctttcatcaccaccgattacatgacatacatgtttaaatacgacagtgttcatggacactggaagcatcacgatgtcaccgttaaggacgagaagacccttctcttcggtgacaagccagtca

SEQ ID NO: 77626 - DNA, 250 bp, Glycine max
  Clone ID: 700962884H1
gcagcactggagctgccaaggctgttggaaaagtccttcctgctttgaacggaaaattgactggtatggcattccgtgttcccaccgtggatgtctctgttgttgacctcacagtgaggctggagaaggaagcctcctacgatgaaattaaaaatgctatcaaggaggaatcagagggcaagttgaagggaattcttggttacactgaagatgatgtggtctccaccgactttgtgggcgatacagatca

SEQ ID NO: 77627 - DNA, 254 bp, Glycine max
  Clone ID: 700907981H1
ggatgtctctgttgttgacctcacagtgaggctggagaaagaagcttcctacgatgaaattaaaaatgctatcaaggaggaatcagagggcaagttgaagggaattcttggttacactgaagatgatgtggtctccactgactttatcggcgatagcagatcaagtatttttgatgcaaaggctaaaattgcattgaataagaactttgtgaagcttgtttcttggtacgacaacgagtgggatacagctcacg

SEQ ID NO: 77628 - DNA, 263 bp, Glycine max
  Clone ID: 700963317H1
caagaccaatggatcaactcctgtgaggggagagttagtggccaagttgaaggtggcaatcaatggtttcggacgcattggtagaaacttccttcgctgctggcacggccgaaaagactcaccccttgaagtcgttgttgtcaacgacagtggtggtgtcaagaatgcttcgcacctgctgaaatatgatcctatgctgggaacctttaaggaaatgttgaaatactagacaattgaaccatcactgttgatggtaatccatc

SEQ ID NO: 77629 - DNA, 265 bp, Glycine max
  Clone ID: 700905151H1
atcattgttgagtccaccggagttttcaccgataaggacaaggccgccgcacatttgaagggtggtgcgaagaaggttattatttctgcccccagtaaggatgcccccatgtttgttgttggtgttaacgagcacgagtacaagccagagcttgatattatttccaatgctagctgcacaaccaactgccttgctccacttgctaaggttattaatgacaggtttggcattgttgagggtttgatgaccactgttcattccatca

SEQ ID NO: 77630 - DNA, 257 bp, Glycine max
  Clone ID: 700957310H1
gttaacgagcacgagtacaagccagagcttgatattatttccaatgctagctgcacaaccaactgccttgctccacttgctaaggttattaatgacaggtttggcattgttgagggtttgatgaccactgttcattccatcactgccacccagaagactgttgatgggccatcagccaaagactggagaggtggaagagctgcttcatttaacatcattcctagcagcactggagctgccaaggctgttggaaaagt

SEQ ID NO: 77631 - DNA, 245 bp, Glycine max
  Clone ID: 700907957H1
caagccagagcttgatattatttccaatgctagctgcacaaccaactgccttgctccacttgctaaggttattaatgacaggtttggcattgctgagggtttgatgaccactgttcattccatcactgccacccagaagactgttgatgggccatctaccaaagactggagaggtggaagagctgcttcatttaacatcattcctagcagcactggagctgccaaggctgttggaaagtccttcc

SEQ ID NO: 77632 - DNA, 260 bp, Glycine max
  Clone ID: 700957321H1
ctaaggttattaatgacaggtttggcattgttgagggtttgatgaccactgttcattccatcactgccacccagaagactgttgatgggccatcagccaaagactggagaggtggaagagctgcttcatttaacatcattcctagcagtactggagctgccaaggctgttggaaaagtccttcctgctttgaacggaaaattgactggtatggcattccgtgttcccaccgtggatgtctctgttgttgacctcacagtg

SEQ ID NO: 77633 - DNA, 304 bp, Glycine max
  Clone ID: 700954591H1
tacactttctatctcatttccaatctcattttcgttcggttcaaacactctcatggcatcagacaagaagattaggatcggcatcaacggatttggaaggattggccgtttggtggccagggttgctcttcagaggaatgacgttgaacttgttgctgtcaacgatcctttcatcaccactgattacatgacatacatgttcaagtacgacaccgttcatgggcagtggaagcattttgatgtgaagctgaaggactctaagacccttctcttcggtgagaagcccgtcaccgttttggattca

SEQ ID NO: 77634 - DNA, 202 bp, Glycine max
  Clone ID: 700960745H1
caaggctctactctactgcttcacattctgctctagaaaattcagtggtgacacacagcttcggctactctctctgtagccaaaccagcccttcaggcaaatgggaaaggcttctctgaattctctggcctctgcagctcatcaggcttccttcccttttctagaaaatcttaagaggatttccactctgccattgccttcc

SEQ ID NO: 77635 - DNA, 246 bp, Glycine max
  Clone ID: 700906879H1
tacaaggctctactctactgcttcaccttctgctctagaaaattcagtggtgatacatggcttcggctactctctctgtagccaaaccagcccttcaggcaaatgggaaaggcttctctgaatctctggcctccgcagctcatcaggcttccttcccttttctagaaaatcttcagaggatttccattctgtcattgccttccagacctatgcagtctaaagcagtggaggatacaagaagggtgt

SEQ ID NO: 77636 - DNA, 275 bp, Glycine max
  Clone ID: 700960223H1
ctagtttcttacaaggctctactctactgcttcaccttctgctctagaaaattcagtggtgatacatggcttcggctactctctctgtagccaaaccagcccttcaggcaaatgtcgaaaggcttctctgaattctctggcctccgcagctcatctggcttccttcccttttctagaaaatcttcagaggatttccattctgtcattgccttccagacctatgcagttggaagcagtggaggatacaagaagggtgtgacagaagcaaaactgaa

SEQ ID NO: 77637 - DNA, 268 bp, Glycine max
  Clone ID: 700906218H1
gtttcttacaagcctctactatactgcttcaccttctgctctagaaaattcagtgctgaaacatggcttcggctactctctctgtagccaaaccagcccttcaggcaaatgggaaaggcttctctgaattctctggcctccgaagctcatcaggcttccttcccttttctagaaaatcttcagaggatttccattctgtcattgccttccaaacctatgcagttggaagcagtggaggatacaagaagggtgtgacagaagcaaaact

SEQ ID NO: 77638 - DNA, 283 bp, Glycine max
  Clone ID: 700962204H1
actgaacaacgaggtccaccactgagacgtttgcagaagaagtgaatgcagcattcagagagagtgcagacaatgagctccagggaatcctctctgtgtgtgatgagccacttgtgtctgttgacttcaggtgcactgatgtgtcctcaaccgttgactcatcgttgaccatggtcatgggagatgacatggttaaggtgattgcttggtatgacaatgagtggggctactcccaaagggttgtggatttggctgacattgttgccaacaagtggaagtgaga

SEQ ID NO: 77639 - DNA, 263 bp, Glycine max
  Clone ID: 700962351H1
ggaaatcaaagttgtttctgaccgcaaccctgccaaccttccttggaaggacttggggatagacttggtgattgaaggaaccggggtgtttgtagacagagaaggtgcagggaaacacattcaagcaggagctaagaaggtgctcatcactgctcctggtaaaggagatatccccacctacgtggttggtgtcaatgagtatgactacagccctgatgaacccatcatcagcaatgcctcttgcaccactaactgccttgcac

SEQ ID NO: 77640 - DNA, 244 bp, Glycine max
  Clone ID: 700954983H1
catggatcaggcaaggtcaagatcggaatcaacggtaagtcttctccatccttcgatctctcttctgttgtttcagatcagcttagttattttttctactattccattttcgctgtttttttctctctcaattttatctaaatcgaaatgtaacaggatttggaagaattggccgtttggttgccagagtcgctctgcaaagagacgatgtggagctcgttgccgttaacgaccctttcattac

SEQ ID NO: 77641 - DNA, 238 bp, Glycine max
  Clone ID: 700961364H1
gaaatcctcttcaaccgcaacaaggacgcgatctcctccgacacggcgtcccgatcgacgtctttatccgtgcgttcacgcacgcgtatggcggatgagctggagcaggtgttcaacaagttcgacgtgaacggcgacggcaagatctcggcgtcggagctgaagaccactccgtgtgcctacacccaatgtttcagttgttgaccttgttgtgaatgttgagaagaagggtcttact

SEQ ID NO: 77642 - DNA, 240 bp, Glycine max
  Clone ID: 700961396H1
gaaatctctcggcaaccgcaacaaggacgcgatctcctccgatacggcgtcccgatcgacgtctttatccgtgcgtgcaggcacttaacatggcggctacgctggagcaggtgttcaacaagttcgacgtgaacggcgacggcaagatctcgcaatctcaatggaatagcgctccgtgtgcctacacccaatgtttcagttgttgaccttgttgtgaatgttgagaagaagggtcttact

SEQ ID NO: 77643 - DNA, 252 bp, Glycine max
  Clone ID: 700963442H1
gtgacacagttcaaccccacttgctcaaaaactcatcttcactcatctcagctcccttttctatcgaggactcttcctagacatcgccactgcactattgcgccacttctgctccgccattatcatgggcaaggtcaagatcggaatcaacggatttggaagaattggccgtttggtagccagagtggctctgcagagagacgatgttgaactcgttgccgttaacgaccctttcatcaccaccgattacat

SEQ ID NO: 77644 - DNA, 258 bp, Glycine max
  Clone ID: 700956835H1
aaatacttgaagccctctgttgcaggattcctaatgcagaaggagcttgattatctagttggggctgtgtcaaaccccaagagaccatttgctgctattgtcggtggatcgaaggtgtcttccaagattggagttattgaatccttgttggagaaagttaatgttctcttgcttggtggaggaatgatctttaccttttacaaggctcagggttattcagttgggtcatctcttgtggaggaagacaagcttagcctt

SEQ ID NO: 77645 - DNA, 256 bp, Glycine max
  Clone ID: 700959058H1
gctaacagcaagactgtgccggcatcaagcatcccagatgggtggatggggttggatattggtcctgattccatcaagacatttggtgaagcattggatacgactcagaccattatttggaatggaccaatgggtgtttttgagtttgataagtttgccacaggaacagaggctatagccaagaaactggcagagctgagtgggaagggagtgacaaccatcattggaggaggtgactccgttgccgctgtggaga

SEQ ID NO: 77646 - DNA, 252 bp, Glycine max
  Clone ID: 700952526H1
gaggaatgatctttaccttttacaaggctcagggttattcagttggttcatctcttgtggaggaagacaagcttagccttgcaactacacttctcgaaaaggccaaggctaaaggggtttctttgttgcttccaactgatgtggtcatagcagacaagtttgctgctgatgctaacagcaagactgtgccagcatcaagcatcccagacgggtggatgggattagatattggtcccgattccatcaagacat

SEQ ID NO: 77647 - DNA, 267 bp, Glycine max
  Clone ID: 700910043H1
ctctttaccagttgccacactacaccgagattccccctaaacccgtttgcgttgttgtttgcgaagaaatggcgactaagaggagcgtgggaacgttgaaggagggtgatttgaaagggaagagggtgttcgtgaggtcgatctgaacgtgcctttggatgacaaccttaacatcaccgatgacactagagtccgtgctgctgttcccaccatcaagtacttaactggtcatggagccaaagtgatcctttctagccacttgggacg

SEQ ID NO: 77648 - DNA, 269 bp, Glycine max
  Clone ID: 700963530H1
aaagggtgtcactaccaaatacagcttggcacctcttgtgccccggctttctgagctcattggtatccaggttgtcaaggctgaagacagtattggtccagaagtagaaaagttggtggcttgtcttccagatggaggtgttcttcttctagaaaatgtgaggttttacaaggaggaagaaaagaatgatcccgagcatgcaaaaaagcttgcctctctggcagatctgtttgtgaatgatgcatttggtactgctcacagggcacatg

SEQ ID NO: 77649 - DNA, 249 bp, Glycine max
  Clone ID: 700958261H1
agttgccacactacaccgagattccccctaaacccgtttgcgttgttgtttgcgaagaaatggcgactaagaggagcgtgggaacgttgaaggagggtgatttgaaagggaagagggtgttcgtgagggtcgatctgaacgtgcctttggatgacaaccttaacatcaccgatgacactagagtccgtgctgctgttcccaccatcaagtacttaactggtcatggagccaaagtgatcctttctagcc

SEQ ID NO: 77650 - DNA, 253 bp, Glycine max
  Clone ID: 700909538H1
tatttccaccaaacccgtttgcgttgttgtttgcgaataaatggcaactaagaggagcgtgggaacgttgaaggagggtgatttgaaggggaagagggtattcgtgagggtcgatctgaacgtgcctttggatgacaaccttaacatcaccgatgacactagagtccgtgctgctgttcccaccatcaagtacttgactggttatggtgctaaagtgatcctttctagccatttgggacgtccaaaaggtgta

SEQ ID NO: 77651 - DNA, 255 bp, Glycine max
  Clone ID: 700962832H1
ctttgcttctagagaatgtgaggttctacaaggaggaagagaagaatgatcctgaatttgcaaagaagttggcttctctagctgatctctatgtgaatgatgcatttggcactgcccacagagctcatgcttctacagaaggagttgccaaatacttgaagccctctgttgcaggattcctaatgcagaaggagcttgattatctagttggggctgtgtcaaaccccaagagaccatttgctgctattgtcggtg

SEQ ID NO: 77652 - DNA, 254 bp, Glycine max
  Clone ID: 700906269H1
cgcgactaagaggagcgtgggaacgttgaaggagggtgatttgaaagggaagagggtgttcgtgagggtcgatctgaacgtgcctttggatgacaaccttaacatcaccgatgacactagagtccgtgctgctgttcccaccatcaagtacttaactggtcatggagccaaagtgatcctttctagccacttgggacgtcctaaaggtgtaacacctaaatacagtttgaagcctcttgtgccaaggctgtctc

SEQ ID NO: 77653 - DNA, 94 bp, Glycine max
  Clone ID: 700958782H1
ccatttgtttttgctttttgagatttcatcatcctgtatttttggtttctgttttcggacttcaatggaaattaatggatgagaactaatgaat

SEQ ID NO: 77654 - DNA, 243 bp, Glycine max
  Clone ID: 700959845H1
gaagaacaagtagttgagaactaagaaggagaagcaaatggcttcctcaatgatctcttccccagctgttaccactgtcaaccgtgccggtgccggcatggttgctccattcactggcctcaagtccatggctggcttccccaccagaaagaccaacaatgacattacctccattgctagcaacggtggaagagtgcaatgcatgcaggtgtggccaccagttggcaagaagaagattgagac

SEQ ID NO: 77655 - DNA, 268 bp, Glycine max
  Clone ID: 700961649H1
gttgagaactaagaaggagaagcaaatggcttcctcaatgatctcttccccagctgttaccactgtcaaccgtgccggtgccggcatggttgctccattcactggcctcaagtccatggctggcttccccaccaggaagaccaacaatgacattacctccattgctagcaacggtggaagagtgcaatgcatgcaggtgtggccaccagttgggcaacaagaagtttgagactctttcctacctgccagaccttgatgatgcacaatt

SEQ ID NO: 77656 - DNA, 261 bp, Glycine max
  Clone ID: 700959008H1
aacaagtagttgagaactaagaaggagaagcaaatggcttcctcaatgatctcttccccagctgttaccactgtcaaccgtgccggtgccggcatggttgctccattcactggcctcaagtccatggctggcttccccaccagaaagaccaacaatgacattacctccattgctagcaacggtggaagagtgcaatgcatgcaggtgtggccaccagttggcaagacgaagtttgagactctttcctacctgccagacctt

SEQ ID NO: 77657 - DNA, 281 bp, Glycine max
  Clone ID: 700963683H1
aattggcaaaggaagtagaataccttcttaggaagggatggattccttgcttggaattcgcgttggagcacggtttcgtgtaccgtgagcacaacaggtcaccaggatactacgatggacgctactggaccatgtggaagctgcctatgtttggttgcactgatgcttctcaggtgttgaaggagcttcaagaggctaagactgcataccccaacggcttcatccgtatcatcggattcgacaacgttcgccaagtgcagtgcatcagcttcatcgcctac

SEQ ID NO: 77658 - DNA, 265 bp, Glycine max
  Clone ID: 700955418H1
gtttgtttgctcacaaccttatttgcaactgacttctttgagatcaaggctgtaaaggagattgagcctgcattgaagaaacaactcatcatttccactgccctgatgactattgggattgcaattgttagttggatgcactcccaacttccttcactatcttcaattttggagttcagaaagatgtcaagaattggcagctattcttgtgtgttgctgttggtctttgggcaggtcttattattggatttgtaactgagtacta

SEQ ID NO: 77659 - DNA, 250 bp, Glycine max
  Clone ID: 700959847H1
gttggattgcactcccaacttccttcactatcttcaattttggagttcagaaagatgtcaagaattggcagctattcttgtgtgttgctgttggtctttgggcaggtcttattattggatttgtaactgagtactatactagcaatgcatatagtccggtgcaagatcgttgcagactcctgcaggactggtgctgcaactaatgttatatttggccttgccttgggatacaagtctgttattattccaa

SEQ ID NO: 77660 - DNA, 249 bp, Glycine max
  Clone ID: 700952058H1
ggagcaacctctttccttttcactgagtataagtacgtgggaatcttcatggtggcttttgccattttgatattcctcttccttggctctgtggaaggattcagcacaagctaccagccttgcacctatgaccaaactaaaatgtgtaagccagctcttgccactgctgttttcagcaccatatctttcctgcttggaggtgtcacatcgcttatttctggattccttggaatgaaaattcaacttatg

SEQ ID NO: 77661 - DNA, 253 bp, Glycine max
  Clone ID: 700904602H1
gactgggtcggtctttttgaggccatcactggttatggtcttggtgggtcttctatggctttgtgtggtagagttggtcgaggtatctatactaaggctgctgatgttggtgctgatcttgtcggaaaggttgaaagagacatccccgaagatgatccaagaaatccagctttgattgctgataatgaccgtgataatgttggggatatcgctggtatgggatctgatctgtttgcggtcatatgccgagtca

SEQ ID NO: 77662 - DNA, 251 bp, Glycine max
  Clone ID: 700953633H1
ctgtgactgcctctgttccgccaagcgcacattttcccaccgttcaggccaccggctgagttaggtttccggcgaggatgggtgctgctctgctgtcggagcttgcgacggagatagtcgtgccagtgtgcgccgtcatcgggatcgtgttctcgctggtgcagtggttcctcgtgtcgcgcgtcaagctcactcccgaccgcaacggaacgacgtcgtcgccgcgcaacaacaaaaacggctacggcgac

SEQ ID NO: 77663 - DNA, 309 bp, Glycine max
  Clone ID: 700954577H1
gaagcaccagcctcaatgtacttcttaagctcatggcggttgagtctcttgtgtttgctcccttggtttgctacacatggtggcctactcttcaagatctaaaggatttgatagaaaaagagtatcgtccatcatttttctacaacgacagaacaaggaaaagccgtccctttaccaatgccttctcgtttttgtgttagtctttaactcatctgtcatgtcaattccattgtttttgaaaccttttcctcccccaccttgaaacaaagtatattttgtctcatgtagttttaagacaattgattaggc

SEQ ID NO: 77664 - DNA, 268 bp, Glycine max
  Clone ID: 700908149H1
ctgccggaaacacgactgccgctattgggaagggatttgccattggttctgctgcccttgtatcactggccctctttggtgcctttgtgagccgagctgctattacaactgttgatgtgttgactccaaaggttttcattggtttgattgtgggtgcaatgcttccttactggttttctgctatgactatgaagagtgtgggaagtgctgctctgaagatggttgaagaagtacgcaggcaattcaacaccattccagggttgatgga

SEQ ID NO: 77665 - DNA, 255 bp, Glycine max
  Clone ID: 700952580H1
ttcttatttttttcctctcttcactttcactctctctctctctctcagccatcatcatgggagcagtgattctcccagatctcggcaccgagattttgattccggtctgcgccatcattggaatagggttcgccctcttccagtgggtcctcgtctccaaggttaagctctccgctgccagagacgcttcccctaacgccgccggcaaaaatggctacaacgattacctcatcgaagaagaggaaggcctcaacg

SEQ ID NO: 77666 - DNA, 258 bp, Glycine max
  Clone ID: 700952567H1
cctcattcttatttttttcctctcttcactttcactctctctctctctctcagccatcatcatgggagcagtgattctcccagatctcggcaccgagattttgattccggtctgcgccatcattggaatagggttcgccctcttccagtgggtcctcgtctccaaggttaagctctccgctgccagagacgcttcccctaacgccgccggcaaaaatggctacaacgattacctcatcgaagaagaggaaggcctcaa

SEQ ID NO: 77667 - DNA, 238 bp, Glycine max
  Clone ID: 700953831H1
cttatttttttcctctcttcactttcactctctctctctctctcagccatcatcatgggagcagtgattctcccagatctcggcaccgagattttgattccggtctgcgccatcattggaatagggttcgccctcttccagtgggtcctcgtctccaaggttaagctctccgctgccagagacgcttcccctaacgccgccggcaaaaatggctacaacgattacctcatcgaagaag

SEQ ID NO: 77668 - DNA, 248 bp, Glycine max
  Clone ID: 700904783H1
tccctcattcttatttttttgctgtcttcactttcactctgtctgtgtctctcagccatcatcatgggagcagtgattctcccagatctcggcaccgagattttgattccggtctgcgccatcattggaataggttcgccctcttccagtgggtcctcgtctccaaggttaagctctccgctgccagagacgcttcccctaacgccgccggcaaaaatggctacaacgattacctcatcgaagaagag

SEQ ID NO: 77669 - DNA, 238 bp, Glycine max
  Clone ID: 700952870H1
ttccctcattcttatttttttcctctcttcactttcactctctctctctctctcagccatcatcatgggagcagtgattctcccagatctcggcaccgagattttgattccggtctgcgccatcattggaatagggttcgccctcttccagtgggtcctcgtctccaaggttaagctctccgctgccagagacgcttcccctaacgccgccggcaaaaatggctacaacgattacctc

SEQ ID NO: 77670 - DNA, 232 bp, Glycine max
  Clone ID: 700961948H1
caatcttatttctatccacacttcacattcactctatctctctctctcagccatcctcatgggaacagtgaacatcccagatctcggcaccgagattttgattccagtctgcgccatcattggaatagggttcgccctcttccagtgggtcctcgtctccaaggttaagctctccgctgccagagacgcttcccctaacgccgccggcaaaaatggctacaacgattacctc

SEQ ID NO: 77671 - DNA, 253 bp, Glycine max
  Clone ID: 700906779H1
attccttccctcattcttatttttttcgtctcttcactttcactctctctctctctctcagtcatcatcatgggagcagtgattctcccagatctcggcaccgagattttgattccggtctgcgccatcattggaatagggttcgccctcttccagtgggtcctcgtctccaaggttaagctctccgctgccagagacgcttccactaacgcctccggcaaaaatggctacaacgattacctcatcgaagaag

SEQ ID NO: 77672 - DNA, 269 bp, Glycine max
  Clone ID: 700906027H1
tgtgtcacatcgcttatttctggattccttggaatgaaaattgcaacttatgccaatgcaagaaccaccctggaggcaagaaagggtgttggaaaggctttcattacggcttttagatctggtgcagttatgggttttctccttgctgcaaatggtcttttggttctttacattgccatcaacttgttcaagatttactatggtgatgactggggtggtctttttgaggccatcactggttatggtcttggtgggtcttctatggcttt

SEQ ID NO: 77673 - DNA, 164 bp, Glycine max
  Clone ID: 700957555H1
cggctcgaggcttggtggtgtcacatcgcttatttgtggattccttggaatgaaaattgcaacttacgccaatgggagaaccaccctggaggcaagaaagggtgttgggaaggctttcattacggcttttagatctggtgcagttatgggttttctccttgctg

SEQ ID NO: 77674 - DNA, 245 bp, Glycine max
  Clone ID: 700953858H1
cgccggtgaggccaggacattggaggagcatctcgccgaggccgccatgggaaatgccttcctcctccagggcggagactgtgctgagagcttcaaggagttcaatgccaacaacatccgtgacaccttccgcatcatcctccagatgagcgtcgtcatgatgttcggcggccaaatgcctgtcatcaaggtggggagaatggcggggcaatttgcaaagcctcgttcggattcgtttgaggagc

SEQ ID NO: 77675 - DNA, 255 bp, Glycine max
  Clone ID: 700958333H1
ttttagaactttaatctcaaaatgtattcaatattcttttgaaaatataattcataaacgattttaaaacaccacctcgccgaggccgccatgggaaatgccttcctcctccagggcggagactgtgccgagagcttcaaggagttcaatgccaacaacatccgtgacaccttccgcatcatcctccagatgagcgtcgtcatgatgttcggcggccaaatgcccgtcatcaaggtggggagaatggcggggcaa

SEQ ID NO: 77676 - DNA, 247 bp, Glycine max
  Clone ID: 700963862H1
ctcgagccgattcggctcgaggaggggataacattaacggagactactttcgacgagaagtcgcggattccggatccgcagaagatgattagggcttattgccaagccgcggccacgctgaatcttctcagagcttttgccaccggtggttatgctgctatgcagagggttactcagtggaatttggacttcacggatcacagcgaacagggagataggtaccgagagcttgctaaccgagttgatg

SEQ ID NO: 77677 - DNA, 249 bp, Glycine max
  Clone ID: 700953162H1
cagatgcgaatgaattggacctagtcctccaaaccctctcttcttttcccccaatcgtcttcgccggcgaggcgaggaatctggaggagaagctcgctcaggctgccatggggaacgcttttctccttcagggcggtgattgcgccgagagcttcaaggaattcactgccaacaacatccgtgacacctaccgtgtcatccttcaaatgggtgtggtcctcatgttcggtggccaaatgcccgttatca

SEQ ID NO: 77678 - DNA, 243 bp, Glycine max
  Clone ID: 700952432H1
tggacatctcatgagtgcttattgttgccttatgaacaatccctcaccaggttggattcaacttctggtctctactatgactgttcagcccatatgctctgggttggggaacgaaccaggcagcttgatggtgcccatgtcgagtttctaagaggagttgctaatcccttgggaattaaggtaagtgacaagatggatccaaatgagcttgttagactcattgagatcttgaatccccaaaac

SEQ ID NO: 77679 - DNA, 260 bp, Glycine max
  Clone ID: 700906275H1
gggagctaaggttacatggtcagagaacagtgtcactgtttctggaccaccacgagatttttctggtcgaaaagtcttgcgaggcattgatgtcaatatgaacaagatgccagatgttgccatgacacttgctgttgttgcactatttgctaatggtcccactgctataagagatgtggcaagttggagagttaaagagactgagaggatgatagcaatctgcacagaactcagaaagctaggagcaacagttgaagaag

SEQ ID NO: 77680 - DNA, 264 bp, Glycine max
  Clone ID: 700905146H1
tgcttccagagaaaggttgggaggttgatctagatgctgttgaagctcttgctgatcagaacacagtggcgttggcgatcataaaccctgggaatccttgtgggaatgtgtacagttaccaccatttggagaagattgctgaaactgcaaaacgggttggaacaattgtgatctctgatgaagtttatggtcaccttgcatttgggagcaagccttttgtaccgatgggagtttttggctctactgttcctgttctcactcttg

SEQ ID NO: 77681 - DNA, 268 bp, Glycine max
  Clone ID: 700961605H1
cttgggattcttgttgacagagatgatcagggcactctgcttcagattttcaccaagcctgttggggacaggccaacgatattcatagagataattcagaggatcgggtgcatggtggaggatgaggaagggaaggtgtaccagaagggtgcatgtgggggttttgggaaaggcaatttttctgagcttttcaaatccattgaagaatatgagaagactttggaagctaaaagaaccgcgtaagcacattggaagaacacaaatactc

SEQ ID NO: 77682 - DNA, 257 bp, Glycine max
  Clone ID: 700906510H1
gttgacagagatgatcagggcactctgcttcagattttcaccaagcctgttggggacaggccaacgatattcatagagataattcagaggatcgggtgcatggtggaggatgaggaagggaaggtgtaccagaagggtgcatgtgggggttttgggaaaggcaatttttctgagcttttcaaatccattgaagaatatgagaagactttggaagctaaaagaaccgcgtaagcacattggaagaacacaaatactcc

SEQ ID NO: 77683 - DNA, 242 bp, Glycine max
  Clone ID: 700965019H1
tgctgatgcgtgtggtggggttggcattcttggcattgcatgggcctttggtggcatgatcttcatccttgtctactgcactgctgggatttcaggaggtcacattaacccagcagtgacatttggctgtttttggctcgcaaggtgtctttgatccgagccatcatgtacatggtggctcagtgcttgggtgctatctgtggagttggtttagttaaggctttccaaaagtcttacttcaa

SEQ ID NO: 77684 - DNA, 243 bp, Glycine max
  Clone ID: 700965020H1
ttaagatcaccaaagtacttgtgagtgtatacccaacacaaactaagatcaacatggactactacacccgcgtttcagaagttgagagggaacctatcatggagtattccacaccacgaccaatatgggcaactaccaccaccctaatgctcaccgtgtcctcaacgagaagattgtttatgaggaggatgtgattggaggatcccgccacaaccacatgcatcaccaccaccctgagactca

SEQ ID NO: 77685 - DNA, 243 bp, Glycine max
  Clone ID: 700965021H1
ggcttggttagtcaagaaccagcactatttgcaacaacaatagctggaaatattttatttggaaaagaagatgcagacatggataaagtcatacaagctgccatggctgcaaatgctcattcttcattcaaggattacctgatggttatcaaactcaggttggagaaggtggcacccaactttcagggggccaaaagcaaagaattgccatagcaagagcagtgctaagaaacccaaaagtat

SEQ ID NO: 77686 - DNA, 241 bp, Glycine max
  Clone ID: 700965024H1
gtagatatctccaaatgagcctcagttggcatttaattctcggattgccttttgtcttaacatgcacaatgaggcagttcgagcactgcgttttccaccaaacacacagaaggaaaaggaaagtgtgagaagaggagagagaggcatcaacaagagcaagaattggctaaacatatcgcagaggaagatgatgatgacttttgataatgatttgctctttttatcttaccagtttgttgtc

SEQ ID NO: 77687 - DNA, 240 bp, Glycine max
  Clone ID: 700965025H1
gtgtaccaagaagaaactggaagaagcatggaatgttttgcataaaatggtggcttctggcattcagcctgatgttgtaacatacaacaccatggcaagggcatatgctcagaatggtgagacaagaaggctgaaaggctaatattgaaaatgccgtacaacatagtgaaacctaatgaacgaacttgtggcatcataataagtggttattgcaaggaaggcaatatgccagaagccttg

SEQ ID NO: 77688 - DNA, 241 bp, Glycine max
  Clone ID: 700965026H1
cttctttgttgcatatcttggaattgtgaggagaaaagagtggcctcatttcttcagatttcatgttgtgatgggaatgttattggagtttaccccagtagagtgatagcggcatccagcggctacagtccctataacctgcagggcaatctccaataacatttttggactgccgtatcatttggttatctatttaccgtcttggagtccataaggtgtgctcttgccggtatgtatgctg

SEQ ID NO: 77689 - DNA, 238 bp, Glycine max
  Clone ID: 700965027H1
atcgttctccctctccctccctctctctctctctctctctctctctctctctctaagctctttcttgttgacactgtgagtctatgttatgtgtggcggacatgaactccaccaccaacactcgaattctcagtcaatggctgcagcagcaccgagtgatggttctgggaagaaggtgagagagccttacaccataaccgagtccagagagagttggactgaggaagcacatgataag

SEQ ID NO: 77690 - DNA, 243 bp, Glycine max
  Clone ID: 700965029H1
tgctgctcctatgatggatttattggatggatttgcccccatcccgccaacagaaaacaatggaccggtttatccatctgtaactgcatttgagagcagctccttgaggttgacattcaatttctcaaaacaaccaggaaacccacaaacaacagttatccaggctacttttatgaatttgtcctccaatacatatacagattttgttttccaggcagcagttcctaagtttcttcagttgca

SEQ ID NO: 77691 - DNA, 252 bp, Glycine max
  Clone ID: 700965031H1
ctcaagggttgctgtttttttcctcgtgacatgatttgatttccaccttcactcaagtttcaattgggaatctgatgtaggctttggaggttcttctacttcccaggatgctttcaatttatcaattatccacaccacagaggattccagtgattgagtgagtggatatgaatatggaaggaccttatgatttatcatgcaatggagaagctggtaacaaaagccttcagatcattaaatactctccttata

SEQ ID NO: 77692 - DNA, 253 bp, Glycine max
  Clone ID: 700965032H1
ccctcaaaccctagccagggtcgcaattcacttgcggctgcagtagagaagcactcttcgttcttcgactgtctacgatctgctttctctgaattgtgaaaatgtcgctcggagaaactgcttgttcatacgcagctctcatccttcatgaagatggaattagtgtaactgctgacaagatcagcaccttgttgaaaactgcaaaggttccagtagactcttattggccaaccttgtttgctaaacttgctga

SEQ ID NO: 77693 - DNA, 245 bp, Glycine max
  Clone ID: 700965034H1
gtttgcgtcatcatcaccaacgttgggggtttaattctctaccttatcatcatcggagatgtgctatctggaaagcaaaatggaggggaagtgcatttgggcattttgcaacagtggtttggaatcactggtggaattcccgggaatttgctttgcttttcaccttggtctttgttatgcttccattggtattgtacaaacgtgtagagtccttgaagtacagctctgcagtgtcaactcttctt

SEQ ID NO: 77694 - DNA, 238 bp, Glycine max
  Clone ID: 700965036H1
ccaaaatgccagggcttgtctgaggttgagggctgcctgcgagaagctgaagaaggtgcttagtgctaatccggaggcccctttgaacattgagtgcttaatggatgagaaggatgtcagaggtttatcaagcgtgatgagtttgagcaactaagtcttccaattttggaacgggtgaagggacctttggagaaggcacttgcagaggcaggtcttacagtcgaaaatgtgcacatgg

SEQ ID NO: 77695 - DNA, 240 bp, Glycine max
  Clone ID: 700965037H1
gcatgtttgttctctcaacgactcctccgcgaaagagtattattcaatattttggttgggttgaatcccggggttgaagcgttgcagacatcacggctattctaagagtgtctcgctccctcttcatgtccgatctgtacgacggaggacgggtagttgcgtaactgccgttaacccttcgccgcacggtgggcgtggtgctttgccttctgaaggtggtagcccttcagacttgctctt

SEQ ID NO: 77696 - DNA, 241 bp, Glycine max
  Clone ID: 700965038H1
aacgcacccttcatctcttccctttcactcattctttgatcccctttttcttcacgccaactctctcttctgggtttctttcattttcagaatctcattatcacctcactgtgattatcttctaattccaaattggtgtttggttgctgagaaactccaagaaaagaaaaatagagcttttccgtgtattgatgatcctctgttcactcagaaaacttttctcttttgtgtgtagagtcta

SEQ ID NO: 77697 - DNA, 242 bp, Glycine max
  Clone ID: 700965042H1
ctcaaccccgaaagtttcctcgttatcaggattcccgatgcgcttgttttgcgcattctgtctcgctcattgttcgtggccatggttcttgctgccttgcctttcttgggaactgttctcaaaggttctatttctcttccagttttgttcccaatgtcgaaactgcagccgcatctgggtctctcgatgtgggactattgaattcgattctacatgatttcgctcatgagggtctcctcaga

SEQ ID NO: 77698 - DNA, 240 bp, Glycine max
  Clone ID: 700965043H1
tgacttttggcccagagcaaaggcatccggaggaagaggcacttcttccaccaccacagaataaagaagcagggaaatctcagctggattctgatgaagtgatactgagcgagttggaagatagaagcctaaggaagtggacatgctccctgcatcagagaggcagaaacgtatcgcgcacttgcaacaaagactgctccaagcagctgcagaaggagcagtgagggttaagagaaggag

SEQ ID NO: 77699 - DNA, 237 bp, Glycine max
  Clone ID: 700965044H1
tctgactcctatagtttcctctgctaattccatatccccgttttccttcactcttgaaccccgattcatttccaccagcacaagaagcatggctgcaatatcaataccttctcacatgaaagcttggacatactctgagtatggaaaatccaaggaagttctcaagtttaatcagagtgtggctttgcctgaggtgaaggaagaccaggtcctcatcaaggtcgctgctgcttccct

SEQ ID NO: 77700 - DNA, 238 bp, Glycine max
  Clone ID: 700965045H1
attccatcatcaatggagaacaccgagggatccggatctgcgacgaacggggtgctggctccgccgcgcaaggtggcattgataaccggaattaccggacaagacggttcgtacctgacggattcctcctggacaaggggtacgaggtgcacggcctgatccgccgctcgtcgaacttcaacacgcagcgcatcgagcacatatacgtggatccccacaacgcccacaatgcccgcat

SEQ ID NO: 77701 - DNA, 245 bp, Glycine max
  Clone ID: 700965046H1
ggatttgtgacaacacaacgctgtaaagtactcctcaattcgaaaacgcagtgttttagcattgttcctcaacacacacacaaaaaaaactcccttgtatattgttgcagctctagctagggttcgcaagtgcgatcgaagaagaacaacgacgatggcgatggctgcagctctgcgtcgcgaaggaaggcgtttgacccaaccaatcaacgccctccactcttctctcaattcctccctcatct

SEQ ID NO: 77702 - DNA, 249 bp, Glycine max
  Clone ID: 700965047H1
ctggttgtttgcactttagattcaaacctgataggcgtcgttgtaaaaggaaaaaaaagttcagtgtttttgtggtctcgtatcagaactcagaagttatcatccttaatatcttcaaacaaggttttcacagcacatcgatacgaggatgttgcggctgtcgattcaacgagtgaggaagttgaactttctcagtccccagatctctgctttgggaaggtcccatttgtcaactgctgctgaaccatc

SEQ ID NO: 77703 - DNA, 253 bp, Glycine max
  Clone ID: 700965048H1
gaaaaatatggagggaaaagaagaggacgtaagagttggagccaacaggtacggagagaggcagccaatagggaccgctgctcaggctaaagactacagagagccaccgtcggcgcctctcttcgaaccggagagttgtcatcgtggtctttctatagggctggcatagcagagtttgtggccactttcttgttcctctacatcacagtgctgactgtgatgggtgtgttcaaatctaagagcaagtgttcca

SEQ ID NO: 77704 - DNA, 248 bp, Glycine max
  Clone ID: 700965049H1
gcaatggcaatggcaattgcaatggttcctcaacctctgctgacccttttcctctttttctccctactctcaattgccaactcttctccttcccaacaccttcagatcgccaatgccgaacgcaggttgatttgacttctcacattattaaggtgtacttgacattgaaggttgaaaatttggggacatctcctgcttcagaagtacatattgccttttcgcccactgaagtagaacatctagcaata

SEQ ID NO: 77705 - DNA, 242 bp, Glycine max
  Clone ID: 700965050H1
aacggatttcatttggttcgaaatgtttatttttcaaggttatgcgcagggtttgaagagttattaaatgactttgaaatatgttattatatttgtggatagtctgaaatagttcagaccaaatagaaagagtggttgttttagtttaaaaataagtaaagataaataaaaatatgtagacaatgtagttactttaaaattagcagtgcgtgacttctaagtccaactttaggggtatctaa

SEQ ID NO: 77706 - DNA, 242 bp, Glycine max
  Clone ID: 700965051H1
cgcaggggagagcttggaaaatggattgctgcagttgctgttgtattacgccttttccttccaagacacttccctgattggctggaattgcctggtgctctgattcttcttatcgttgtagctccttctctaattgcaagcacctttagagacaacattgttggggtggtagtgtgcctcatcattgcatgttatttgctgcaagaacacattcgggcttctggtggtttcagaaactcctt

SEQ ID NO: 77707 - DNA, 240 bp, Glycine max
  Clone ID: 700965053H1
tcggtggtggaagttgcttgaacgctggcttttacactcgcgctagccctcaatatgtaagggaagcggggtgggatggaagggtagtgaatgagtcgtacgaatgggtggagaagatagtgcatttgagccacaattgaagcagtggcagtcatctgtgcgggatggactaatagagataggtgtggtgcctaataatggcttcacttatgaccatattgatgggactaaagtaggggg

SEQ ID NO: 77708 - DNA, 238 bp, Glycine max
  Clone ID: 700965054H1
gttcattggtggaaatccaagttcccgggcagaagtttgtgaacggagttccgttccccgctgtggtgtctcctccacctgcaactgcaagtgcggttcctcttacggactccgtcaaaaccagaaagctttccttgaatcattgctactccaatcgggtgctgtccttttcaggggattcccactctccaccgcttctcacttcaacgacgtcgtcgaagcattcggctacgacgag

SEQ ID NO: 77709 - DNA, 241 bp, Glycine max
  Clone ID: 700965055H1
cacttctgtgtttctctcttcacctacactttcctctttcaattcaattcaattcttctttttggttcagaaactctgtacagttaatcaaaccctacctcacctcaccggttttagctgttatttaatatatagatagaaatccaaggaagaagatgaagcattttgccgtccaaaacgtcgtcgttccatcccacgatgagattagcgttgtttgccccaagccccgccgcctcggcct

SEQ ID NO: 77710 - DNA, 241 bp, Glycine max
  Clone ID: 700965056H1
ctttggtacattctgtaggattctgtcccagaacaagctgagtggtccaatacctgcagcagttgcaaaacttactaacctgcgaactgtggatgtatcgtttaacagtctcactggaaacctcctaagcaattggccaaccttgccaatcttcttaccttcaatttatctcacaacaaccttcagggtgagctgccggctggtggttttttcaacaccatttcgccttcctctgtttctg

SEQ ID NO: 77711 - DNA, 240 bp, Glycine max
  Clone ID: 700965057H1
ttcccgaaccgcgcgcttcactcctcttataaaaaaccccaagctcgacaccttctactacctcgagctcctcgggatcagcgtcggcggctcgccggtgcgcggcctctccgcctcgctctccgcctcgacgcagcgggaaacggcggcgtcatcatcgactcgggcacctccgtgacccggctcacccgacccgcctacattgccctccgagacgccttccgcgtcggggcctcgcat

SEQ ID NO: 77712 - DNA, 240 bp, Glycine max
  Clone ID: 700965058H1
caggaatcacattagctgagtatttcagagatatgggttataatgtcagtatgatggcagattctacatctagatgggcagaagcattgcgtgaaatctctggacgactggcagaaatgcctgcagatagtggatatcctgcataccttgctgcacgtttagcctcgttctatgaacgtgctgggaaggtaaaatgtcttggaggccctgaacgtacaggtagcgtaactattgttggtg

SEQ ID NO: 77713 - DNA, 236 bp, Glycine max
  Clone ID: 700965059H1
ctagaactgaagagcattcacattatagtacaaaaggtgggaataatggcatcctatctggcactgctacttcaaattctagaaactaacttagtatcagcaactgcatgtggcagacatcactttctgatgctaagttagtttctagaactgaagagcattcacattatagtacaaaaggtgggaataatggcatcctatctggcactgctacttcaaattctaaaaatgacctg

SEQ ID NO: 77714 - DNA, 239 bp, Glycine max
  Clone ID: 700965060H1
cagatccatctgtatcttcccgagctcctttgttttcgacaaacctcccttccttgtaaactctcaccctctcttctttttcacccttttctctattccatatcaatcacaaaccctaattcactttctacagattcattcggaaacaccttttccaatttccaacacacaccaaccatgggttacgaagacaatccgtatcgcgacgaggacggagagcccttgatggactacgacga

SEQ ID NO: 77715 - DNA, 243 bp, Glycine max
  Clone ID: 700965061H1
tttctctctctctctgcaacgaaaaatggcttccctcacgtgctcccccacctcgctacagctccgattggccttagccgcccctaaattcccacacaccccgcaactgcgaatgcgcaacttaagctcaaccgagttcgccctctacgcgccgcgcaagacggcgggcccgggcccgggcccaaactcgacggcttctcgggctggtccgacaccgacgccgagcagcggcccaacaacgcc

SEQ ID NO: 77716 - DNA, 248 bp, Glycine max
  Clone ID: 700965062H1
agcacaaccaacacctccacagcctctcctacctcccggagccatggccgccgccgactcctccgccgctccatcgcaccagttgtcgcagagggagacggacatccagatgatgctcgccgccgacgttcacctcggcaccaaaaactgcgactttcagatggaacgctacgtcttcaagcgcagaaccgatggtatttacataattaaccttggcaagacatgggagaagctccagctcgctgcta

SEQ ID NO: 77717 - DNA, 251 bp, Glycine max
  Clone ID: 700965063H1
gacagtgaaaagtagaagcagattttaggattcttgatcctaggtgtttgctccagacctcattagtcaaaggcatgtaaaagtttgaattgacattaatggtgatatttcctaggaatataatttttattgaaggatcaaattagtttaatacttgtactgaaatatatagatattattttgtttatcatgatagctgtctttttactagaattgcagcgtgttttgaaatttttggtataccttcgatt

SEQ ID NO: 77718 - DNA, 248 bp, Glycine max
  Clone ID: 700965064H1
gagagaaagaagagagatttgaattgagtggtattccaacgtcgaaagcagagaggagaaacaataaggtttctcctaaagtgctctgttttgttttctctctctctgtctatatgtgactccgccctcacactctgacctgtggtgtccctcatgtgacaattcgggagctgcaaggtttcggtcttgggttggaatattgggagaacccctccttcgaaaaatcaaggaaaacgaagaagctcgtt

SEQ ID NO: 77719 - DNA, 247 bp, Glycine max
  Clone ID: 700965065H1
agaaaactttaggaaaacctatttaaagaaatcttgctttaaatggatttaatgaaaaaaattgatagagattagagcccaccagcattgtggatctgtttatctgactccatctagtggaataagcttggtgtttttgtttgaaatagaattacctaattactggacactattctttctcattctattctgcctaatgcctatataattatacttataatattcttattcattgttgcagtggttt

SEQ ID NO: 77720 - DNA, 244 bp, Glycine max
  Clone ID: 700965066H1
acatattcttcagttagctcccccaacctatacacttcaccaccacaccacaaccctaccctctctctctgtcatggtcattggaggagccttccctcgtttcgacccaatcaccaaatgtacacccaagaccgctccaaccagaccatcgcctcggacctcgatggcaccctccttgtctcccggagtgccttcccctactacttcctcgtcgccctcgaagccggcagcgtcttccgagccc

SEQ ID NO: 77721 - DNA, 240 bp, Glycine max
  Clone ID: 700965067H1
gttagtgatgcagttaatattggaagtgatgctgttatggacaagggtgagagtagtataatttcaaatatattatcgatggagtttgatgcctgggatgactcgctggcatcacatgaggtttgaccaagttgttgggtgacaacactgacagccagaatggtccgttaaaaaaatctagttctaggaaagttcaaagtaacaatcaatcaagattttcttttgcatggcaggaggaat

SEQ ID NO: 77722 - DNA, 236 bp, Glycine max
  Clone ID: 700965068H1
caagtcagaacacaacacaacacaactaaacaacaatgtcgatcgctttttccttcttcactccactctcttccaaatccgttccatccttttccctctctaccccttctctctgttttcgctcactcccctccgccgccccaccgatcgcttttaccctctctgctcctccgccggaggacctggcggcggatccttcggaggccacggcggtcccggacacggaggacatggtg

SEQ ID NO: 77723 - DNA, 237 bp, Glycine max
  Clone ID: 700965069H1
gttcccttttcaatctataagatgctttcactttatccaataatttattgatgcatctaaaaaagagtttgacgtgacaaccatggcacaaacaaaggctttgttgttgtttgtttgttactgaaaattgtgagaattacttccttgtagtgttgatttgtttagttttaacattaggcattgttcatgattttgataggttcttcttgtgtgttaaaacatagattgcggaagtta

SEQ ID NO: 77724 - DNA, 237 bp, Glycine max
  Clone ID: 700965070H1
tccatcttgactgtggacaaggttggaagaaaagttttattccttgaaggtggtgttcaaatgttgatttgccagattgctactggagtcatgattgctatgaagttcggggtgagtggcaaggctcgttttcctccggagaagccaaccttattttgttctttatatgtgcatttgttgctgcatttgcatggtcttggggtccactagggtggttggtgcctagtgaaatatgcc

SEQ ID NO: 77725 - DNA, 237 bp, Glycine max
  Clone ID: 700965072H1
cttgatcggtggtgtatttggtgtgttgatgttttattaaacttttgtactcttgctttgaaactagttggttagatttgaaattcttctaagatggatacttcttataggactggtgggtcaagtacgagtgcttgctttttgatatggatgacactctttacccattgagcttaggtctcaatttgttttgtcgcaagaacatacaagagtatatgttagaactcttgcatattg

SEQ ID NO: 77726 - DNA, 236 bp, Glycine max
  Clone ID: 700965073H1
tatttttcttcctcagtagtgtcatttacgcttctcttctctgcagcaactatgcctaaccctaaggtcttcttcgacatgaccatcggcggtcaatctgctggccgcatcgtgatggagtctacgccgacgtcactccccgcaccgccgagaacttccgcgcgctttgcaccggcgagaagggcgtagggcggagcggcaagcccctccactacaagggctcgtccttccaccgc

SEQ ID NO: 77727 - DNA, 234 bp, Glycine max
  Clone ID: 700965076H1
aaacactcttcttcatattcttcttcttcttcttgttcttgttctatctgtgacgagcatcatggcctcgagagcagtgctattgttggctatgtgtgtgcttccggccatggttgtgccattcgcccagcaaagaaccctttttgcgtgaagggtcgcgtctactgtgacccttgccgtgctggttttgagacctcagcaaccacctacattgccggtgctgagattatgttg

SEQ ID NO: 77728 - DNA, 238 bp, Glycine max
  Clone ID: 700965077H1
aagaaacccaaaatctcttcggctctctctcttttccatatccatatatatctccaaaccctaccgttaggttccccaattcaacaccccgtgggccgttgcgctgcttctttgttcgtacgtttccgtcgattgcctccgaaacgatgtcgtatcgcccaagcgggaactccaggaccgaggtccgccgcaatcggtacaaggtggcggtggacgcggacgaaggtcggagacgacg

SEQ ID NO: 77729 - DNA, 242 bp, Glycine max
  Clone ID: 700965078H1
ctcgagccgctcgagccgttcggaagcagacacagatggctcgtacgaagcaaaccgctcgtaagtccacaggaggaaaggctcctaggaagcagcttgcaaccaaggctgcacgtaagtctgcaccaactactggtggtgtgaagaagccccaccgttatcgtcctggtaccgttgctcttcgtgagattaggaaataccagaagagtaccgagcttttgatccggaagctccccttccag

SEQ ID NO: 77730 - DNA, 246 bp, Glycine max
  Clone ID: 700965079H1
gggcactgactcacacccacaatagtcgggggcagcttcaaagtacctccacattgtctcctactcttactgttctcttctcttctcatcatttttattttttccaatcaaaccatacaaaacatagcaccgctcttttctctccgaaatccccatctcccttcacttctgagctctggacgagatcccagatctcaccatctttcacgcactcttccatcagattcatcctttcgtttaacgcaa

SEQ ID NO: 77731 - DNA, 248 bp, Glycine max
  Clone ID: 700965080H1
acacaaacacatacattgtagtatcacttttgtctcggaatttgttcttttgagttatggcaagcttaaaggttgcatgtgtggttttgatgtgcatggctgtgatgagtgcaccaatgatggtgcagccgtgtcatgcaatgatgtttctgtgaacctagcaccgtgcctatcttacctgatgcagggtggagatgttccagaatcgtgctgtagcggagtgaggaacattctgggttctgccagca

SEQ ID NO: 77732 - DNA, 244 bp, Glycine max
  Clone ID: 700965081H1
ggcaaagatagtggcagagctccaagctgtgaagcacaacagtggcaagtcctacaatcagttagcggaggagactggactcaccaacgtctatgttgctcagcttctcaggagacaggctcagtcaatccccaaactgcccctctacttcgggcagcgctgcccgacctgccccaagaccttgtttctgagatgatgagaccccctttgaggtcttatgaccctaatctcatccaagacccca

SEQ ID NO: 77733 - DNA, 239 bp, Glycine max
  Clone ID: 700965082H1
cctctgtcttatatcaggagattgattacaccaaggaggctgctaatgcagaattgtttgcaagtaactttaagaacatggattatgtgaaagttcctacaatctactgggattataccacccacagattctgtaaatggagtatgttccagggattaaaataaacaacatactagctttagatcaactgggtgttgtccgcgtaaggttagggttatatgcggtggattcatactttg

SEQ ID NO: 77734 - DNA, 238 bp, Glycine max
  Clone ID: 700965085H1
acttaacagcttcaaaattatcaacttactgtttagcctgtgaactaacacacgcgaacaatgactcatggctggagctcaaagtgtcattaatgccgtagtcctcattagtgacactttagctccagccatgagtcattgttcgcgtgtgtcccttaacagcttcaaaatgtcactaatgaggactacggcattaattagctagttttgttgtcaataggaatttaagtttatttct

SEQ ID NO: 77735 - DNA, 238 bp, Glycine max
  Clone ID: 700965086H1
aacattaaataaagctaaggagaaatattgagaagcaggaagaagcaagttatggcgacgaagcagcttccgcagatcgccattctgggagctggtatctttgtgaagactcagtaccttcgagactctccgagatctctcatcttttcattctgaaatccatttggagccgcactcaggaatcagctacagctgccgtagacatagctcgtaagcattttccccaagtagagactaa

SEQ ID NO: 77736 - DNA, 133 bp, Glycine max
  Clone ID: 700965087H1
ctttcctacaaatccaaaatattagttttagtttacaaaatggctgtggaactcatggggttcccaaaactagacgaacaaaaggccattcaagaagccgcatcagaaggcctcaagggcagaaacacctgat

SEQ ID NO: 77737 - DNA, 239 bp, Glycine max
  Clone ID: 700965088H1
gaaagaaatgtgggagaagttgagaggtaaaaggctaatgtttgttggagattcactaaatagagggcaatggatatctatggtatgtttgttacaatcagtaattcctgctgataagagacaatgtcaccaaatgcccatctcaccattttcagagcagaggagtacaatgcgactgtggaatttctctgggctcctcttcttgctgaatctaattctgatgatcccagtaatcacag

SEQ ID NO: 77738 - DNA, 237 bp, Glycine max
  Clone ID: 700965089H1
ccttcactcaatcaagttttgactttatttggagtttctccaaaatgagccggccaatggaggaagatactgtgggtaagaatgaggaagaggagttcaacactggaccgctgtccgtaccatgatgagtgttaaaaataatactcaggtactgataaattgtcggaacaacaaaaagcttctgggtcgtgtaagggcttttgataggcactgcaacatggttcttgaaaatgtgag

SEQ ID NO: 77739 - DNA, 237 bp, Glycine max
  Clone ID: 700965091H1
ctttcttgcgaaaccgagagagcgaaggggcaaacacaatttttatttatcttcttttttattttttgtagagagagagagagagaaaatgttggggatcttcagcagttcagtggtgtcccgccggaggagctggtggccgctggcagcagaacgccgtcgccgaagacgacggcggggaagctgctgaaccggttcgtggagagcaaggcgtcggcggtgtcgctgcaggtgggg

SEQ ID NO: 77740 - DNA, 235 bp, Glycine max
  Clone ID: 700965092H1
cgctctcccgagggctttgtcggaggattcttacgcctgaacgagtcctctccttgcgtactaggttggtgctcaattaaaaagaatggggggagatgcacagaagaagagaattgccaaattggcgtgtctaccttcttgctggtggccatggtggtggcagtgacagttagcatcaacctcaataacaagggatcaaggctatgattcaaaggaagaaagcaagtccagtgta

SEQ ID NO: 77741 - DNA, 274 bp, Glycine max
  Clone ID: 700965101H1
gtctggatatcacatccaacggcttggcattcatgttgaaatggtttcagatttaaaacaaggtttgtcaaccataagcaatgggaatgtagttgttaatatggtcctgattgagcaggaggtttgggatagagatttaggcttgtcatctcactttgtcaataacacgaggagaattgatcatggggttcctccaaagctgttcattcttgttaattctagtagttcttttaaagctagcgtaaacttgggtgttcataatcctactgtgatc

SEQ ID NO: 77742 - DNA, 270 bp, Glycine max
  Clone ID: 700965102H1
ctctggagaagaaaacccgcgtttccttgggtagtcgaaaggaagcagaatgggatccaaaattcttccaaaatgggcatcgaagccttgcgtaatgggaatcgacgaagctggaagaggccccgttttagggcctatggtctacggttgcttatactgctctcagtcctatctgaagaccctttccacgttgagttttgcagattctaagacactcaaggaagagaagagggaagaattgtttgacactttaaaactcaatgattctat

SEQ ID NO: 77743 - DNA, 265 bp, Glycine max
  Clone ID: 700965104H1
gatgacgaattttacagtgtctatgatggagaagtgtctacaggtcatgcagatgaaattggagaggacagaaagctgtcccttgaccattgtgggattctgccaaataactgtttgccttgcctcacttccaatgcaattgctgttgaaaaaagaaggccaatgagtcctgatacaccaagttcacggagaaagtcactttctaaactctcccccaaatggagagaagggtcttcagatatgactttactttcccccaaggcat

SEQ ID NO: 77744 - DNA, 266 bp, Glycine max
  Clone ID: 700965105H1
ggcaagtaccatttttctcaaccttatcacccttttgcataaaagggccaccccttcttcttcttcccttctcaacttgtactacaatttctggattgaattatcttcaaaatgagagaaatccttcatgttcaagcctggtcaatgtggaaaccaaattggaggcaagttttgggaggtgatgtgtgatgaacatgggattgatgccactggaaattacgtaggtaactttcatcttcaacttgagagggttaacgtgtactaca

SEQ ID NO: 77745 - DNA, 262 bp, Glycine max
  Clone ID: 700965107H1
cagaaattaagctagagctacatagtttttttcttttctcaccttccttctctcccttcagacaagggacgaaaaatcagagagagagagagagagagagagagaaattccaaaaccatgtcgtcccacagtcatctaagtttcgcctttggggttctaggtaacatcgcctccttcgtgtgctttctggcaccactaccgacattttatagagtttgtaagaagaaatcaaccgaaggttccaatcaattccatatgtggc

SEQ ID NO: 77746 - DNA, 265 bp, Glycine max
  Clone ID: 700965108H1
gagaaagagaaatcgagagaaagagtgaggagagaattacagagcattttccaacacgattacatcacagaatcaaaccctctctttctctccgaagctgcgttaatatcttactcgccttagattgttcttctctttcattatactgttctcttttcgatttgagggaacagtacaagagtgtgaggatcggttaacccaactgcacaggtgaggtgtctctttcgtgttccttttttgtgtttttgctttcgatttctccgcg

SEQ ID NO: 77747 - DNA, 265 bp, Glycine max
  Clone ID: 700965109H1
ctttgatttcttttctctttagctgcttcttttgtctctccaaactaacatccagattgctctgttactatcaaaaggccttctttcctcatttcggacgcacgctccccatccatgtctacttgtgtaaaatcccgagatgtttgtattgttggtgttgcacggacgccaataggtggtttacttggcaccctatcatctctttctgccacagagttaggctcaattgctattaagactgctctcaagagagcaaatgttgatc

SEQ ID NO: 77748 - DNA, 261 bp, Glycine max
  Clone ID: 700965110H1
agcctgctgtcgtgagctggacctggaccaaccactggatctactgggccgggcctctcatcggtggtggaatcgctggccttgtttacgaggttgtctttatcagccacacccacgagcagcttcccaccactgactactagagggggggaaatgaaaataaaaaaaaaaaaattgtgtattattgaatttctctggaatcttcttctgtgtatggttttccttccttgtgttttcttcctaattcactttcgagggttg

SEQ ID NO: 77749 - DNA, 275 bp, Glycine max
  Clone ID: 700965111H1
ctcatacacacgttgtcgcgcacacattccttcattccgcagcaacaaacaaacatcttttaccttaaacaacaatggccgatgccgaggatattcaacccctcgtttgcgataatggaaccggaatggtcaaggctggttttgctggagatgatgcaccgagggctgtgttccctagcattgtggggcgtccacgtcacactggggtgatggttgggatggggcagaaggatgcgtatgttggggacgaggctcaatccaagaggggtattttg

SEQ ID NO: 77750 - DNA, 262 bp, Glycine max
  Clone ID: 700965112H1
gattgctagaatggaatttcgatgctcagtcatctcttttaccattctcttctctcttgctcttgcaggagagagccatgtccatgcatcgctacctgaggaagattattgggaagctgtttggccaaacactcccattcccactgcactgcgagagcttctaaagcctctccctgcaggtcttgaaatcgatgaactccctaagcaaattgatgatacacagtacccaaaaacattcttctataaagaagaccttcatcca

SEQ ID NO: 77751 - DNA, 264 bp, Glycine max
  Clone ID: 700965113H1
gcagggagctctgccgcctccaacaaaacagagttcagaacacaaaccctcgaaccgaacgtttttgagggttgatagagcacgatggttcagtacaattttaagaagattaccgtggtgccaaatgggaaggatgtgctcgacattatcctctctcgcacccagcgtcagacaccaaccgttgtgcacaaaggatatgcgatttcacggctgcgccaattctacatgcgcaaagtgaagtatactcagcagaattttcacgac

SEQ ID NO: 77752 - DNA, 265 bp, Glycine max
  Clone ID: 700965114H1
gaaaaagaagcaaaacaaaacataaaaggaaaacccttgcttgcattgcattgcactgcagcacctcctccctaccaaccccctcttgccttgtctccgacccgccctgactcgttgagctcgccggaaactttggccaaaagggtctccgaattcgcccatggcccttgatttccgaccttagagacccttcaagttttcgcctttatcttattcgcttttcccctttctttgggtcctcaatttctgaatactgcaactgaga

SEQ ID NO: 77753 - DNA, 272 bp, Glycine max
  Clone ID: 700965117H1
tatctactcttttctgcatgtttgttctctcaacgactcctccgcgaaagagtattattcaatattttggttgggttgaatcccggggttgaagcgttgcagacatcacggctattctaagagtgtctcgctccctcattcatgtccgatctgtacgacggaggacgggtagttgcgtaactgccgttaacccttcgccgcacggtgggcgtggtgctttgccttctgaaggtggtagcccttcagacttgctcttcctcgctggtggtggt

SEQ ID NO: 77754 - DNA, 267 bp, Glycine max
  Clone ID: 700965118H1
aggagatgcgggcggcccgccgccgaagccgaaggagaaggcggaggaccggtaccgcgacgacgaggacgacgatcccatggagagctttctgatggcgaagaaggatttagggttaactctcgcgtcggacgcgctgcacgctgggtatgattccgatgaggaggtttatgctgccgcgaaagctgtagacgctggtatgattgagtatgattccgatgataaccctattgttattgacaagaagaagattgaacccattcctgc

SEQ ID NO: 77755 - DNA, 264 bp, Glycine max
  Clone ID: 700965120H1
tttctttcactctctcagaaccaaaattttccaaactcctcaactctcatcagatatcaaccatctctctctctccaaactcaaatacctttctgttctgctcttcaatttattcatctctgacaccctcttaattctgcttccagttcctctgagtgatgggtatgatctctcctcactcccacaattcccacattatagtaatcctcatcacctgcttctttcgtcataaattctagatcaaactccactccctgatcctcc

SEQ ID NO: 77756 - DNA, 262 bp, Glycine max
  Clone ID: 700965122H1
tgggaacgatctttatgattctgctacaagactaaggctaccggaccttcctgcttttgctttggaatgtctcccaaatcgcaattcattacttttaagggatttgtatggaataactgaagcatcgaccattttccgtggaaccctccgctatgaaggatttagtgagatcatggggacactgtctaggattggcttatttaacaatgaagctcattcgttgctaatgaatgaacagagacaaactttcagaaaattctta

SEQ ID NO: 77757 - DNA, 264 bp, Glycine max
  Clone ID: 700965123H1
ctttgaaaacgtgcaagcaaaccccacacccccacgcaacaacaatccccatttgttccccagcaaaacaaaaacaccgcgtcttccccgtgcgggaaaaaaaaaagaatcctcaattttccgggaaaacccttcagaatggtttcccgggaaaataccaattggctcttcgattacggcttgatcgacgatattcccgttccggatgccacctttggcgtcaattcctccgccttcacatggccccctaacgccctcgacgct

SEQ ID NO: 77758 - DNA, 262 bp, Glycine max
  Clone ID: 700965125H1
ctctcttttcctaacctcaccggcggtggcgggtggtgttcgtgctgctgtcatgcctagaaggactgcggttatcgtgtcggcggcgacggcggagacgccgaagaagaagggcgagtcgaaagggttcgtggaagagatgaggtttgtggcgatgaggcttcacacgagggaccaggccagggagggcgagaaggaggtcaagcagcccgaggagaaagccgttaccaagtggaacccatccgtcgaagggtacctgaaa

SEQ ID NO: 77759 - DNA, 261 bp, Glycine max
  Clone ID: 700965126H1
gaatcttctttgctttctctcctttgcactttccttctcctcgtgattttttgtttgcatcaaagggagaaactgggagacacagaagatgagagagataattagtattcatattggacaagctggaattcagtgacacctctgttggcattgcacacgatgctttcaacaccttcttcagcgagaccggattcggcaagcatgtgccaagggctttatttgttgatttggaacctagtgttattgatgaagtaagaactg

SEQ ID NO: 77760 - DNA, 260 bp, Glycine max
  Clone ID: 700965127H1
caacaacaacaaaaaaaagccctagaaaagattttggagaagcaattcctcactcctgaaaatctcatcctcttcttttacatttgttttggataaaacattttgctgatattgaatttttattttctcttgttttcgtttcttttcgacattttcttcttcttcttctgcttcggtgttttcagggagatagggataggagtaacaaagggagagtgcaatcagtttggttcttcgcttcgggactcgaatcttcgatg

SEQ ID NO: 77761 - DNA, 262 bp, Glycine max
  Clone ID: 700965128H1
caccttcctctccttctttctttctgcttaaggtctacacaagttctctgcttcttctccccctattgacctttggtcatcacaagcgaaaacccacttctggatcttctggtgtaaaggccattagaagctttagaaattttctaattgagttggtgtatagtgttgaagggggtgaaatctggagcccagtttgttagttgttactcacttcatctgtaagctcataggttgaaccctctttttttggagacttacctgg

SEQ ID NO: 77762 - DNA, 265 bp, Glycine max
  Clone ID: 700965129H1
gccctttctctcgctactcctcctaccccaaacaaaactttcccattacaaattgtggaatgaagaaagaatggcaagacaagtgagtagtagtatagtagtaattgacccatcaaacaaacaagcataacccatgtacttgttattgtagatagatagagtgagtgagtgagcactgtgttgtgtatatagtagtgtgtaaactctccccaacagacagacacgccactcaattatttctgtccatttcttcttcccatattgt

SEQ ID NO: 77763 - DNA, 263 bp, Glycine max
  Clone ID: 700965130H1
ctcgagccgaatcggctcgagatgaaccgtttattgcagattcagtggactttgttgtttctcaggtagaaaccctctctagagaagacttggcctctaggttgtctctgacaactgatgctgcttcagtgggaccacttcttctttcagtttcatttatcactataatggatactaatgactactgtgcaattcctcaacaacttaaagatcaactgggtgaaaggtatcccgaggcaaggcgtgcatatttgaaaacaggg

SEQ ID NO: 77764 - DNA, 271 bp, Glycine max
  Clone ID: 700965132H1
atcactgttcacacatagccatagattccccttttggcagccacaaagcaacaccctttctttttctctctaccctccaacgtgctctcttccctcctccacttcatccaaatctttctcatttcctctccaaattaaaatctcaattaccattacacacactcaacttgagaattttccccaaaaatcccaagagctcgcgccatggtttccccggaaaacagcaattggctgttcgattacccgttgatcgacgacgacgttattcccg

SEQ ID NO: 77765 - DNA, 271 bp, Glycine max
  Clone ID: 700965133H1
caaaatcttcatattcatcaaactcatcaaaatgaatctgtaccactcctccaccaccaccaccaccaccaccatcttcaccgtcatattcctcctccttgcaatattattcactctcacaccccacaaggccaacggtgccacgtgtcaccctgaggaagaagcgggcctgttgggcttcaaatccggtatccgatccgacccgtccggcctgctcagtaactggatatcgggtacggactgctgcacatggaccggagtagaatgccac

SEQ ID NO: 77766 - DNA, 263 bp, Glycine max
  Clone ID: 700965135H1
ccctatggctcgtcactccttgctcttagccctcctcctcttcgccgccgtggccaccgccgcgatggcggtggccgcgtccgacgccgacgacatcctgatccgtcaggtggtgccagatgttggcgaacgaagaggaggacaacctgctgaacgccgagcaccacttcgcgagcttcaacgccaagttcgccaagacctacgccaccaaggaggagcacgatcatcgcttcggcgtcttcaagtccaacctccgcagagcc

SEQ ID NO: 77767 - DNA, 128 bp, Glycine max
  Clone ID: 700965136H1
ctctctctctctctctctctcattcacacgaatcacactctccacagtgcgattcattcaccaatggatcgcaacggtgttctctctcttgcattcatctgcattgtagtcgccggcgtcggaggcca

SEQ ID NO: 77768 - DNA, 262 bp, Glycine max
  Clone ID: 700965137H1
cttcatcctcatacgaataataacaaataaataaaaggagggaaaaagaaaaacaaaaaaaatctaatagttattttgcttccgcaccaacagttttgtgcttgaagcctttccagtgtgcagctgcagctggttcaatgattcaaaattgttaagttctttgttttggagcattcatcattgtccaaattgcaattttttcagaagaatagcaacaatttaggaagtttctgaagcaatagggagtagtggacacagttta

SEQ ID NO: 77769 - DNA, 258 bp, Glycine max
  Clone ID: 700965139H1
ggccaactctggtcaccctggtctccccatggggtgtgctccaatgggtcacattctctacgatgagataatgaggtacaatcctaagaaccccgcttggttcaaccgtgaccgtttcgttctctctgctggacatggctgcatgctccaatatgctctccttcaccttgctggctatgacactgttcaggaacaagaccttaaggaattccgacaatggggaagcagaactcctggacatcctgagaactttgagac

SEQ ID NO: 77770 - DNA, 262 bp, Glycine max
  Clone ID: 700965140H1
aattaagttcatgaattgcttattgctagctatatggtgatcgacaacttcaaattttgagtctgtcactccctcagttaaagctcacatcacattagattactatttgaaaccttcaagctagcgagtctcatatatctgttctttgtctctttactctttgttttcaaggattccttctaacgagcaaaatgtcggctaactgtgagaaaatggtagccatccctccaacgaccaaccaatggccacaggtggatgatca

SEQ ID NO: 77771 - DNA, 260 bp, Glycine max
  Clone ID: 700965143H1
ccccaatggggctttcgcggaagtccaagcttccacatttaaccaactttttcacctctgaaacccgcttttcttgtttcagtggaaatggccgaaactcgagacgccgccgccgatggggtgcccggaactcccgccataagggaaatgagacccgagaccgcgacccatgcgggaatcgggtcgggtgggattcggagggtgaatttccgagcggagattgatacgtcaccgccgtttgggtcggtgaaagaggccgt

SEQ ID NO: 77772 - DNA, 260 bp, Glycine max
  Clone ID: 700965144H1
gcgacaacaacaacagcagtggcatgggtatgctcctggtgttattcccccaagacaaatcctcaacctcaacctcaaacaccgacattaaacccatgttcaacttcccttccccctccaaatctctcttctccaaagcacaatccactatctctatttgcctccttctcctcttcacaacgctcctcctttttactctctccaccctcccaaacgcccttcccagccctcccgctccccctccgagctctaaacccacc

SEQ ID NO: 77773 - DNA, 257 bp, Glycine max
  Clone ID: 700965145H1
cttccctctctctctcactgtctttctctccttttccgtgtttatgcttcaccctttcatagatctgcctgaaaaaaacccctcaattccaaacccttgcgatccgatccaggtcaattaatttctctctctctcgctctctctctagaatgtcttctcaacgcgcagatccagcgtgccggatcttcccggaacccgatgcctccgagatcgaccacttcgaccggttaccggactcgcgcctccttctggttttc

SEQ ID NO: 77774 - DNA, 268 bp, Glycine max
  Clone ID: 700965150H1
ctcgagccgaatcggctcgagcgtcactatcgggagaagtaatcgagcttcagcaatggtgatacgtcaaggctcagaaatcacaagcctacttcaagagatatcaagtcaagttcaagagaagaagagagggagaaaccgattaccgtgccaggattcggttgattaatcaggacaagaacaaatataacactccgaaataccgatttgtggttcgctttagcaacaaggacattgttgcacaaataatatctgctagcattgccgg

SEQ ID NO: 77775 - DNA, 263 bp, Glycine max
  Clone ID: 700965151H1
tcttggcatattgtgccctccctctttctagctatttccctctcttaacacaattaacaaagatatatcatatcatatcaactccaaatgatgaaaaatattgggttgtttcttcttgtggtggtggctacttttgtggtggcagccacagctggtagcttttaccaagactttgaaataacatggggtggtgagcgtgccaaaatctatgaaaatggaaatcttctcaccctctccctagacagagcctctggctctggctt

SEQ ID NO: 77776 - DNA, 259 bp, Glycine max
  Clone ID: 700965153H1
gagcgaatatggaggaggagtggttgaaacttgtgaaaggagagcgagacgaacagcgtctggctgggcttcttctggtaaccaagttctgcaaagctgaggatcagtcctcagtccgtagggtctacgatgcgcttggacctcactttctctatcgcctcctcagaaccgctatggcaagtggaggaggaggcctcaacgataaccgcaacgcctacttaagcttatccatcacgcttcttgccgcattttgtcgtgt

SEQ ID NO: 77777 - DNA, 261 bp, Glycine max
  Clone ID: 700965154H1
caacattccacctagctccccaatcacatcttcaccacaccataaaccttcttaatttctctcttcattttctcctctattgtcataatcatggggaccttccctcgcttcgacccaatcaccacccaagaccggtccaaccagaccgtggcctccgaccttgacggcaccctcctcgtctcccggagcgccttcccctactacctcctcgttgccctcgaagccggcagcgtcctccgcgccctcctcctcctaacctca

SEQ ID NO: 77778 - DNA, 262 bp, Glycine max
  Clone ID: 700965155H1
acaaaatacctataaataacacaccaattaaacattttagcaacataataaagcaaaataattaaccctaaattccacaatacttaaataatcaagtctagcaatgcatcgttactagataattacttgcagaggtgatagtagtggtagaacattcttattgatggtttgatattgttagaggtgagggtttgattcaagaacaacacaccaaatggaggtatgttgaacccttaacacacagaaaacaacccaaaacgag

SEQ ID NO: 77779 - DNA, 261 bp, Glycine max
  Clone ID: 700965156H1
ttccgctactcgcgtcccgttctgcagagcacgctccagctcatgggttgcaaagcgcgtcacgccttcaagatcagccaaagagtgtttgaactcacaaggaaagagaattctactgatgttttgaagccggaagtagaggccctatcagattttgatgttttcaagaggaattttgtaaagagagatggtaaaagtgtaccatttgagttgtacaaaaggcgcacatctgcatttgttcggagagaaatttttctagat

SEQ ID NO: 77780 - DNA, 259 bp, Glycine max
  Clone ID: 700965159H1
gctggctggcaggttagcccagatttatatggtgataacaacacgcggctattcacctactggacgagtgatgcatatcaagctactggctgctacaatcttctttgctctggatttattcaagtcaacagtgaaatagcaatgggtgcaaccatttccccagtttctgcataccgaaactcccaattcgatatcagtatacttatctggaaggtaaaatcccaggaatcttcctggttattaatctgcagatggaaac

SEQ ID NO: 77781 - DNA, 260 bp, Glycine max
  Clone ID: 700965160H1
ctcagaagcgaagaagaagccacagagaactagtctcctactctcacccgcaagaaaaaaatggcatctcacatcgttggatacccccgtatgggtcccaagagagagctcaagttcgctctcgagtctttctgggatggcaagagcagcgccgaggatttgcagaaggtgtcttctgatctcagggcatccatctggaagcagatggctgatgctgggatcaagtacatccccagcaacactttctctcactatgacca

SEQ ID NO: 77782 - DNA, 262 bp, Glycine max
  Clone ID: 700965161H1
gccagccatccaaaccccgctgcgattgtcctcgttctcgttctcgtcctctctcagccgcggaatccgtccccccggaatctgccatggaagatgtatcgaatattatcgacgccggcgtcgaagttccgccagttccggcgactccggtctcgaccgaaggcagcgacagcgacagcgacagaggaggagcacgcgttccagatcctatggcgttaccagatcctggaccccgacagcgacatcgtggcctattggaacc

SEQ ID NO: 77783 - DNA, 65 bp, Glycine max
  Clone ID: 700965164H1
gttgtggtcgttgacctcaaacaatgggagcaaggagaggaaaacgctcagagggtttctggcct

SEQ ID NO: 77784 - DNA, 270 bp, Glycine max
  Clone ID: 700965165H1
caagcctatggtgatcatacctgtataatagcaaaagaacatttggagcctaacttaggtgggctcactgttgagcaggctatccaaaacaagaagttgttcatcttagatcaccatgactatctcattccttatttgaggaaaataaatgcaaataccacaaagacttatgctacaagaaccatatttttcttgaaagatgatggaactttgacaccattggccattgagttaagtaagccacatcctcagggtgaagaatatggtcct

SEQ ID NO: 77785 - DNA, 265 bp, Glycine max
  Clone ID: 700965166H1
cccaaagggataaaagaaaaaacttaatagtacatgggagttgatgatgaacaagagatggaggaggaggaggaggaggagagagaagaagagaaaaagaagcataagcaggctcctccttctctcttccctattagtgtgagaaaggggtttagtggtgaaagagtgaagagagatgagtggagtgaaggggcagtgtcaaccctacttgaggcctatgaggccaaatgggtgctaagaaacagagccaagctcaagggccatg

SEQ ID NO: 77786 - DNA, 262 bp, Glycine max
  Clone ID: 700965167H1
gattctcaaagacagattgagattttacacagagagagagagagagagagagagagagagagagagagagagagatgggaagagctccatgttgtgacaacgcgtgtgttaagagagggccatggtcaccagaagaagacacaaagctgagggtgtacatagagacgcatggcactggagggatctggatcgctcttcctcagagagctggacttgagatatgtggaaagagttgtagattgagatcgctcatctatctcag

SEQ ID NO: 77787 - DNA, 261 bp, Glycine max
  Clone ID: 700965168H1
aggtgattgtgatgagactctaggtgaggtaactgggaacaaaggcaagagctgtggttctgagtctcttggagtggtcatgggagagggatgcaagtagaagcccttttcagctatggctttatcctcctctgacgagttccccaatgaaggggaggacttgtcaaaagggtcatcattcaatggtgtaacagggcttagagcaagtctagggaagtcaagaaggcttggggagaggatctcaggcatgttgtttcttgg

SEQ ID NO: 77788 - DNA, 260 bp, Glycine max
  Clone ID: 700965169H1
aatctggacactgctcagattagaaccctaacctaacccaaccctctctctctctctcttcaattcatggacgccgtcgactcaaccccaaatccacctcccctccctacctacgatccatcagagtatcacaacccgccgcaacatcaatcggaaaccgggcaaaacggtaacggcaccaacctcggaaaaccatcggagaacggcagtcaggtcgctgccgacaacaacggcttgaatcctcagatttcgaagccatt

SEQ ID NO: 77789 - DNA, 260 bp, Glycine max
  Clone ID: 700965170H1
ctgcagtgtgacatgttccagacaacttacgagataaaaatgcctacatccaacttacagtgcctgtcactcggtgaaatttgactggagattatcaagcgtggagaatttcagacaaacttcttacacaagttacaagttcttactctgtgctttcatattgggtcgaatgtatttccatatgaaattctacaactggcgcccaatatagagaagcttgtggtgtatgatggttccttcaaggagattttctgctttgt

SEQ ID NO: 77790 - DNA, 260 bp, Glycine max
  Clone ID: 700965172H1
gacagatgatgatggagatggcgaacgaacacgctgtcgttgcggcactcgcggcgttggtgctactcgcggcgagtgtggcggtggatgctcaggagaactcggacgtgaagacgctggtgaagtacaagcacgggaagaagtactgcgacaaaggatgggaatgtaagggctggtcaatttactgttgtaacctcaccattaccgattatttccagacctaccagttcgagaatctgttctccaagcggaactcgccg

SEQ ID NO: 77791 - DNA, 257 bp, Glycine max
  Clone ID: 700965173H1
cgggttttctcctttgttatcttgatatgtttgggttcccttaaaaatgtacaatgtctccttgttccatagtttccaggagataaatctagtcatgctgaaaatccggcttcacaaccattggaaccaggtgaggctaaaagaggacaaaatccacttcccaaactaaaaatgggagagaagcaacaaaatcacaagatgcctatggttccaacgccaggacctgatgctgatgggcatgccaagatggaaagtaa

SEQ ID NO: 77792 - DNA, 256 bp, Glycine max
  Clone ID: 700965175H1
gatctagtacggttcattaagacggtgcagaaggtggggctttatgccaatcttcggattggaccttatgtatgcgctgagtggaactttggaggaattcctgtatggttgaagtatgttcctggcgtaacttcagaacggataatgagcctttcaaggcggcaatgcaaggtttcacgcagaaaattgtccagatgatgaagagtgagaagttgtttcaatctcagggtggtccaatcattctctctcagattga

SEQ ID NO: 77793 - DNA, 240 bp, Glycine max
  Clone ID: 700965177H1
gagatagtggccgccacaatttcagttcgtgttcgtggaccttggtatacgcatctgactgataacctgtgatatagttgctacgttcatgcgtaatagtactaataataatactaataaatatgcacatttctacataggactgcgtaggcttgtaagctctggatcttaggtttggagagctgtggcagtgtgtgtagtctgcttttgatgtagccaacagagttgcagagaggtgcc

SEQ ID NO: 77794 - DNA, 259 bp, Glycine max
  Clone ID: 700965178H1
gggaaaagaaattctctgtagtaatatgtagcttaaaattattcacctgtaagcttttattgctaactttgagggtggtttttgtatgaaggaatatttcagggaaaaagggcacatatcaagttagaattcatgtttattgtgagaaaatgagaactataaatttggctcatagtgtatccaaccatatatggatggtaagattagaagttagttaatgcttacatggtcacttaaagtcatgtgcatttattttcaa

SEQ ID NO: 77795 - DNA, 261 bp, Glycine max
  Clone ID: 700965179H1
gtagttgcaaattccaggttttcttcctttagcctagcttttactcattatctctctttctctctctctcagaggttctagaaagatccactccgaaatggacggtgcgccacaatccgccggtgccggaggtccggcgccgttccttctgaagacctacgacatggtggacgatgcctccaccaacgacatcgtttcgtggagctctaccaacaacagcttcgtcgtgtggaaccctcccgagttcgctcgcctccttct

SEQ ID NO: 77796 - DNA, 79 bp, Glycine max
  Clone ID: 700965180H1
gctgggaactcggctcgcgcagcgcgcacataatcagagaggtgacatgagtatcgatttcagttgcgccgttgaatgt

SEQ ID NO: 77797 - DNA, 266 bp, Glycine max
  Clone ID: 700965181H1
cttccattgggcaatcaatctactacccctaataatgctgtagttgaaatgcaacaatatggaaaagccattcctggtcaatcatccaatgaagttgcaaaaccaactagtggcagtaatgcacctgtgaacctctctcagaatcttgtaacatatccaaggatgctgccacctggaaacccccaagccttacagatgtcccaaggacttctctctggtgtttcgatggcttcaagaccacaacatatggactcacatcaagccat

SEQ ID NO: 77798 - DNA, 262 bp, Glycine max
  Clone ID: 700965183H1
ggggtacatcaaattctttatttatgagatgaagtacactggggaagctttgggaagagatcttgagaacgtgaggaagtactacgggagtggaaaaacaaaggaagcatcatggagagaatcacagcttaaagggttgcacaattttctcgttgaaaaagaggaagaaattttgagggccctcaagcatgatttggggaagcattacgttgaggcttttagagacgaggttggaacattaatgaagaccttaaacttggca

SEQ ID NO: 77799 - DNA, 259 bp, Glycine max
  Clone ID: 700965184H1
gctattgagtatgaagaaccagccggggatgcatttaaagctaatcatcctgaggcattggtgttcattaacaattgcaatgttattcttagggctgtaatggagaagtgtggggacacagatgattgtatctcaacatctgaggctgcagaattggctgcaaagcttgatgagaaggaaataagtagtttaccaatgcctggacaagttgatttcattaatggtggtcctccatgccagggtttctctgggatgaata

SEQ ID NO: 77800 - DNA, 258 bp, Glycine max
  Clone ID: 700965185H1
tccaagtattgctgggttgggagtaacatatgggatcaatctgaatgtgttgcaagcttcagttatatggaacatatgcaatgcagaaaacaagatgatatcagttgaaaggatccttcaatatacaaatataacaagtgaagcacctcttgtgattgaagacagcagaccacctagcaactggccagaaactggaacaatatgtttcaaaaatttgcagatacgttatgctgaacatctgccatctgtgttgaaaaa

SEQ ID NO: 77801 - DNA, 258 bp, Glycine max
  Clone ID: 700965186H1
gtgatttcagtgagtgatcggtgttcacttgatctcatcataatcgtcagcgtcaattgaagaagatgccgatcagaaacatcgccgtcggaaggcctgaagaggcgactcaccccgacacgttgaaggcggctttggctgagttcatctcaaccttcatcttcgtgttcgccggctcaggctccggcatcgcctacaacaagctcaccgacaacggcgctgccacccctgccggcctcatctccgcctccatcgccc

SEQ ID NO: 77802 - DNA, 259 bp, Glycine max
  unsure (1)..(259): unsure at all n locations
  Clone ID: 700965187H1
gtggaacttcaaacaaacttgagtttccaacacatgtttagtttcacacagcatacgacatgcgngnaaattccacaatacttaaataatcaggtctagcaatgcattgctagtagatcattacttgcagaggtgatagtagtggtagaacattcttattgatggtttgatattgtgagaggtgagggtttgattcaagagcaacacagcaaatggaggtatgttgaacccttaacacacagaaaacaacccaaaacga

SEQ ID NO: 77803 - DNA, 258 bp, Glycine max
  Clone ID: 700965189H1
aggaaggccacctgtgcttccatccaacaaactttctaacacagagaacttcctatacatgctagattcttttggcaatcgatcatataaacctaatcctcggctaactcgagcactggacattatcttcatcctgcatgcagaacatgaaatgaattgctctacatctgctgtacgacacctctcatcaagtggtgttgatgtatatactgctattgccggggctgttggagctctatatggacctcttcatggtgg

SEQ ID NO: 77804 - DNA, 258 bp, Glycine max
  Clone ID: 700965192H1
tgagaagatagttttttctctctccaagttcatggattcttcaaactccaatggagcatcacagaggctcctggacttggctcaacggctccgcctgtacaaacccccaccattccctgaagacatcttggatcagatcatggaagagaagggagataaggttgtctcagaagtgagttacacgaaatcagccaccccaattgctcaaaacacagcaaaaatcggatacaagagagctgctgttttgatctgcatctt

SEQ ID NO: 77805 - DNA, 259 bp, Glycine max
  Clone ID: 700965193H1
tggcagtccaattgtaatttgcaacaagggcatctaaacccagaacccaatcatcttttattgcaaacttttgtgcattggaatttggaggccataaaaaagatgcgatgctacacgcaaacaagtagtacaagtccaataagaaaagcaagatagaaagattggctagttcacacacctcaattaatacaacaacaccctgttgctgatagttattatagagagagttcgatcaattcaagcttgcaagcttaaccat

SEQ ID NO: 77806 - DNA, 246 bp, Glycine max
  Clone ID: 700965194H1
attagcactgagtaacacgcccgaatatggcaccctcaatctccgacgaaatgccaagcaccaccagctctctcctccgccgcaaccgatggctcccctctagcatcaaactgaaaacaagccttttctcagagctctccggcgcggtgtgtgacctaggcacctacatccccatagttctagacttatccttagtgaacaacttggcactcaccaccacactggtctacactgctctctacaaca

SEQ ID NO: 77807 - DNA, 256 bp, Glycine max
  Clone ID: 700965196H1
ctccctcgctctatttctcagtctctgtgtttgcggctgaggattccgaacgagtgaccttcttcgtttctcgcaaagtttaagtaatcatgggtaaggaaaaggttcacatcaacattgtcgtcattggacatgtcgactctgggaagtcaactaccactggtcacttgatctacaagcttggaggtattgacaagcgtgtgattgagaggttcgaaaagggcttccgcgatttacaagaggtcattccagtatg

SEQ ID NO: 77808 - DNA, 257 bp, Glycine max
  Clone ID: 700965201H1
catattcctagttccagaattcagattgattaattcaaaccccatagatcatacataccctctcccaatcctcattgaaccctctctctccatgcttatttagtgccctttttgttttgcatcacccaatcaatcactgaccccttggtcttcattgcccacatatctttttctctcaaagtttgcgactttgtgttgcgaagatgagcggtgcggggtttagggcttcaattccgagcagtgtgaggaggacgatc

SEQ ID NO: 77809 - DNA, 240 bp, Glycine max
  Clone ID: 700965202H1
atataattaagtgtggattgctgtgcaggtcaaggcccttttagttgctcgtccggttgttcccatcttctctctcgtactaatcaaatcacacttttgtgttgtgttgggaaacccaaaccccgttttcggtgagatcgagatcgatcgaacatggatgaggagtacgatgtgatcgtgttgggcacgggtctcaaggagtgcattctcagcggtcttctctccgtcgatggcctcaag

SEQ ID NO: 77810 - DNA, 258 bp, Glycine max
  Clone ID: 700965203H1
caggttgagcataccatgcgacctttcgtggctgcggctgttttgttgttgttgttggtggtggtggtggttgttgatgccaggtttgtggtggagaagagcagtataactgttctgtccccgcataagctgaaggcgacgcgatggcgccatcggtaacttcggtcttccggactacggaggattcatcgttggctctgtggtgtatcccgctaaaggctcacacggatgtgagaacttcgagggcgataagccttc

SEQ ID NO: 77811 - DNA, 250 bp, Glycine max
  Clone ID: 700965204H1
aaagtttcttcctttctctgctctttgtcttctctgacacatttggggccttgttgagtgtgtttttgcaagagggtatggcgaaggacgttgaggttgctgagcgtggctccttctctgggaaggactccaggaccctccaccagcaccactcattgatgctgaggagctcacaaagtggtccttttacagggctcttattgctgagttcattgccactttgctcttcctctacattactgtgctcaca

SEQ ID NO: 77812 - DNA, 241 bp, Glycine max
  Clone ID: 700965205H1
ctgtgctgtgctgccatgggtgtgacacagttgaaccccacttgctcaaaacctcgtcttcactcatctcagctctcttttctatcaaggactcttcctagacatcgccactgcacttttgcgccacttatagaactcaacaagctaggatttcctgttctgttgcaccaaatgaagtgcaggtgccaactgtgaaaacccaggatcccaagagtaagcctgagtgctatggtgtcttctg

SEQ ID NO: 77813 - DNA, 252 bp, Glycine max
  Clone ID: 700965206H1
ctggatttaaggaagttcgaatggttgaaacaaagccagggattgcctttgtggaatatggagatgaaatgcaatccacagtggccatgcagacactacaaggtttcaagataaccccacaaaaccctatgttgataacttatgccaagaaatagacagcggtttctttaacttatgagaaaggcaggaatcacatcttccgcaaagagttgttaatccatttaatgcagtggtgtatcttaattgatatct

SEQ ID NO: 77814 - DNA, 253 bp, Glycine max
  Clone ID: 700965207H1
agagaagctagcgtgctgcgctacaaggagaagcggcgaacgcgcctcttctcgaaaaagatcaggtaccaggtgaggaaagtcaacgcagatcgacggcccagaatgaaggtacgagtcagttcacagttgagtagaggacacttgaagaaatttgatttatgtcagataaagaaaaagaaaagaaaaaggcaaatctgctttatgatttggtgatgataattggataatgaggtgcgtgcgtgggtgcgtc

SEQ ID NO: 77815 - DNA, 246 bp, Glycine max
  Clone ID: 700965208H1
aaaactacgaaatgtagttattttgttgtaaaagaatgatagtggcttctttactatttttgagatttgtcaaataaaaaagaatctagaattgtgtatgagaatgacccattagtcaaacttgtgatataaaggtaaaagataaattatcttattatattgatggggaatgaccatatgaaattgaacatgcaatttcttatttagttaaatattttattttttgagctgattaatttttttctt

SEQ ID NO: 77816 - DNA, 259 bp, Glycine max
  Clone ID: 700965211H1
tcggaattcggttgattgcagcgaatcggctcgagtcgtttttatattcatattttatctgttttcatttcattattttcttcttctcccttcgatttctccagaacagcaagggagaatcaattcctcatcgttgcaattttctttcactctctagattctcatctttcctctcttctaccccttcagaaaaaaccatgtcttcatattatatgtatatctagctcttcattttttcttgctcaagattatgctgtaa

SEQ ID NO: 77817 - DNA, 246 bp, Glycine max
  Clone ID: 700965212H1
gaaaacgatgaggtggccaggttgaggaaggtggtgagggaggtcggggagttgcttggggcgtttaacttgggggatgttattgggttcatgaggcctttggatctgcaagggtttgggaagaagacatgtttgatgtaggcattcataattgcttcaactgcaactgaggaagaaatgcttcaatggtaagtagcgatgtgaaatctattacatagcttttacgaaggtattgatcttattatt

SEQ ID NO: 77818 - DNA, 247 bp, Glycine max
  Clone ID: 700965213H1
gtccagtcatgatttctactctctttactctttagtttttttgttttgtatatattaaggcggcacagcactggcctaagtgggtgtaagtgagtcttgggagtgagtcactcttcctgcagaacccgatctgtagacaatatgggaagcactggtttgctacatttgatatgccttgtcattgctttagtaagtgtgtcgcttgtgcaagcagaagatgcgtataagtatttcacatggacggtga

SEQ ID NO: 77819 - DNA, 247 bp, Glycine max
  Clone ID: 700965214H1
attttacaatcagaaattggagagcagaaagaaagggccttggcagcagcagctaccgaacttgaaagatttttcaagaaggaagacttcagcagaatgaaggtgattgggcaattcaatcttggattttcatttgtaaattggatcaagatttattcattgtggaccagcatgctgctgatgagaagtataattttgagcgtttatcacagtcaaccatcttgaaccaacaacctcttcttaggcc

SEQ ID NO: 77820 - DNA, 254 bp, Glycine max
  Clone ID: 700965215H1
gatagagagagacgcttcgcaaatctcaatcgaatctcagaaaaatgagagaaatcatcagcattcacataggtcaggccgggatccaggtcggaaactcctgctgggaactctactgcctcgaacatggcatccagcccgacggcatgatgccttctgactccaccttcggtgtagcccacgacgccttcaacaccttcttcagcgaaaccggatctggcaagcacgtcccccgtgctgtcttcgtcgacctc

SEQ ID NO: 77821 - DNA, 253 bp, Glycine max
  Clone ID: 700965216H1
acttcccctacccttccgtgatgatgtagatagagaataaaaagagaccagtgtgcagtgagaaagagattgctcacttcttgtgtgggtttgttttgttctttgtgttggaatttgttcatgggtgaagaggagaagaggtgtcaagagagaaggaacaatacatgggagtttatggaaatgagtggttgtattgtggttgctctgcaaattggcgccgtttaagacaccagaattcctgttccatgccttt

SEQ ID NO: 77822 - DNA, 247 bp, Glycine max
  Clone ID: 700965217H1
tactcgtcccgttcgtgccactctcttcaaaatggccgttaccttctcaaatctccacacagaatcaggtctcaagtccctcgacgacttcctctctgggaaggtctacgtttctggggatcagtcacaaaggacgacatcaaagtgtatggtgctgttttggagaagccaggtgactcttttcccaatgctgccaagtggtacgaggttgtctcatctcagcttgctgcaagcttccccggcaatg

SEQ ID NO: 77823 - DNA, 229 bp, Glycine max
  Clone ID: 700965218H1
taaggaagttattgctaatggactaagtgtgaatgtgacgctgatattctctcttgcaagatatgaagctgtaattgatgcatacttggatggtcttgaggcatctgagttaaatgacctctctagagttacaagtgttgcctctttcttcgtcagtagagtggacaccctcattgacaaggcccttgaggaaattggcaccccagtggcccttaatctacgcgggaag

SEQ ID NO: 77824 - DNA, 249 bp, Glycine max
  Clone ID: 700965219H1
gtttcagaatcgcacccaacccaaccccgttttttctcttcactcacttgtcttgtgttgcattcgttaattaccagagctcaactccttcccccaagctttctggcatctcaatgatgacacaagaatcatcagaggtgttgggaaaacatgcaagctcaggttctcatgtgagggggagtagtgaatatattagactggtcatatccgatgaacaaagggtggttgaagctgaaaccttgctgactc

SEQ ID NO: 77825 - DNA, 249 bp, Glycine max
  Clone ID: 700965220H1
aaaacacgcgaaaaacttgccagcacagaacttgtccccaacacagcgcttaaaaagcttatccagaaattctgttccgaaaacggcgttatagtcgtgaatccgattgatcataatcaaacagtaacaaaacaagcgacgcaggcagccccgccgcagcacacgccatgcagtttttgtcatggtttctctccaggaggctcgtgttcggaaccgaggaacagaaaaccaaagcagcgtacgagattc

SEQ ID NO: 77826 - DNA, 247 bp, Glycine max
  Clone ID: 700965221H1
atgtttgtcttcaaacccacctcttctcttctctttctcctcctcagtatttcatactctgcttcttcagttacctcactcaccgtaccgccgcgagggggggccccactcgacctcaccactactcgcaacaacaaaccgatggcgatgatgattccctcacctacctctggcccctccccgcagagttcacttccggcggcgacactctctccgttgaccccgcgctcaccctctccgtcgccgg

SEQ ID NO: 77827 - DNA, 245 bp, Glycine max
  Clone ID: 700965222H1
cttctttgactgttctcccacaccacacccatgaacctcctccagctccttattctcctctttcacgcggcggaagcaagggacagtggcagctcctccacaaaaacatcggcactgtcgccatgcaatgcagcttctccacaacgaccgcgtcatcatcttcgaccgcaccgacttcggactctccaacctaaccctccccgacggaagatgccgcaacaacccaaacgagttggtcgtcaaac

SEQ ID NO: 77828 - DNA, 250 bp, Glycine max
  Clone ID: 700965223H1
ccctaaaccaccaccatcaacgaaaccttcctatctcattttccctccaatttccttctgggttttgcaatttggccaattgggtccccaaagctgtgaccttttcctctgatcaacgcgaaggagagagaaacacccagagagagaaagagaaaaagaaaagttgttgttttcttttgttctttgggggtgttggtttaaaacccggggttgaagcattgcagacatcacggctattcaaggagttcgc

SEQ ID NO: 77829 - DNA, 250 bp, Glycine max
  Clone ID: 700965224H1
agataaaataatgaaggaaccattgaactgattattgggggaaattctagaatctatgaagttactgattcagattacaattgtcatttgttgtttggatatacacctgttcgttcagattcagttgtcggagaacttgtcttatctgatccaactaacattgttctcccagagcttccatatgtggagatgcttgctctgactggaaacacagttgaaggtgacatacttacagctgttgaagtgattc

SEQ ID NO: 77830 - DNA, 247 bp, Glycine max
  Clone ID: 700965225H1
cgaagagatggatacagagttgggtgataaaattggctatgctatacgttttgaggatgtgaccgggccaaataccattataaagtacatgactgatggggtacttctacgtgaaacactcaaagatctgatctagacaagtatcgggttattgtcatggatgaagcccatgaaagatcactaagcacagatgttctttttggaatattgaagaaagttgtagcccaacgtcgtgatttcaagctga

SEQ ID NO: 77831 - DNA, 244 bp, Glycine max
  Clone ID: 700965227H1
agttatcaaacctaagagaatcatattcatacacaatcaacagtagtggtcactcctgttttgcagccatgactagtgttttggtgtttggctattgtttagtaataagcttggttgtagcactagttctgtttctgctcaaccaacaagggctttcttcgtatttggtgattcactcgtggacagtggtaacaatgatttcttggtaaccacagccagagcagacgctccaccctatggcatt

SEQ ID NO: 77832 - DNA, 240 bp, Glycine max
  Clone ID: 700965228H1
aattggtagtgcaagtcaagtccatttcaccacccttcaacactaccacaacaattctgggtattatcccccccacattctgcatccgtccaatctttcagtcgcaaaattttcagtgtttcccactctcccttaaatcattcccacccttctcacactcatggatctgtctgtccagtaacccacacagaaaaaaccctgaagaaaaacaagaccatatcatacatttcatttacagag

SEQ ID NO: 77833 - DNA, 247 bp, Glycine max
  Clone ID: 700965229H1
acgacgaatacgctcaggcactccccgcccgctgcaatgtcagcgtcccttacaagatcagccgatccaccaactgcgactccatcaagttctaaaggagcgggtagctttgccaatttcttccgcggataatgaggcaacgtatgctgtaacacttgttatcgttatcattaaaatgcaagaaagcgagtgtgactcgggttccactcatgtgagcctgttattgtattagtttctgtttcagata

SEQ ID NO: 77834 - DNA, 248 bp, Glycine max
  Clone ID: 700965230H1
agaaatttaagtgaggagctagagaatgatgatgaagtctgctatgtgtgcagtggtggttgtagcacttcttcttctggcggaggtggggcccatggctgaggctgtgacatgcaccccaacagagtgagtccgtgtcttccagcaatcacttccggtgctaaaccttccaatgcttgttgcacgaagctgaagcagcaaaaaccatgcttatgtggctacctcaaaaacgctagcttgaagcagta

SEQ ID NO: 77835 - DNA, 251 bp, Glycine max
  Clone ID: 700965231H1
tttgaaataggactgtcattggttttacaaagtatgttggcttgcaattcactcaatctaaggattgatgaaattaatatggttgagttactacctcatctatgtggtgtggccaggtggcttgggggttgctgtcctaggcaacctgagtcagagcgaggaggatacatcatgcaattttggcaagattacctctgctacattggtagagtttgctaagaaaggttggatctgactggaaaagactgaat

SEQ ID NO: 77836 - DNA, 250 bp, Glycine max
  Clone ID: 700965234H1
caaattcattttaatcctaattctgcacttcttgatcattcgatttttctcctcaagatgcagatattcgtaaaaactttgaccggcaagaccatcacccttgaggtggaatcctccgacaccattgacaacgtaaaagctaagattcaagacaaggaagggatcccacctgaccagcagagacttatctttgcgggtaaacaacttgaggatggtcgcacccttgccgattacaacatccaaaaggaat

SEQ ID NO: 77837 - DNA, 247 bp, Glycine max
  Clone ID: 700965235H1
ccaaactctaacacaaaaccaaaaatatggactgagggttataccggatggtttcttgcatttggtgatgctgtgcctcacagaccagtggaagatcttgcatttgctgtggcacgcttttaccagcgaggtggaacttttcaaaattactatatgtaccatggagggactaattttggccgggcttctgggggaccttttgttgctagtagttatgattatgatgcaccaattgatgagtatggat

SEQ ID NO: 77838 - DNA, 242 bp, Glycine max
  Clone ID: 700965237H1
cggcaggcagtgatagcaaagagaagatcatttcataatcagactcacctaactccgccatggctgctgttccctctactttcgctctaaccaaatctgcattgtccataaacaagctggaccatctctggtcaagatcaaaccatacagcttctctctgaatctaaaccgtctagggaggatggaaacatctttaaccagaaggcctctaacaattcaagccacatatagtgatggtggaa

SEQ ID NO: 77839 - DNA, 246 bp, Glycine max
  Clone ID: 700965238H1
gaaaagattatgagcattatgccaatacatgcttcaaagcttttggagacagagttaagcactggattaccttcaatgagcctcataactttgcactccatggttatgatttaggcattcaagcacaggaagatgttcccttttgggtcatcttctatgtaagaaaggagaatcatccactgagccatacattgttgctcataacattctcttgtcacatgctgctgcctatagaagctaccaact

SEQ ID NO: 77840 - DNA, 246 bp, Glycine max
  Clone ID: 700965241H1
caaacatccatcatcattattattttactccgaacgagttgacaccgattccactcactcaaccatgagccgattcaggcgttttgagctcatagaacaaccacctttcttccactcctgctacttttcccttccttcgtcctccaagactcactctctctcgacctcgacctcttgccacttcccagccacttcgacgctttcgcagatctggtgcacgcgccgtcgttcgcttaccggcgcgtg

SEQ ID NO: 77841 - DNA, 245 bp, Glycine max
  Clone ID: 700965242H1
acttgccttatttttggttttgagattgagctaaaggccaactcaaccatcgaatttgttggtgattgaaagagaaggaagaagaagcaggaaatggaagcagtgagagctggtcgagaaggagcaataggtctaggtcaaggtgatggcgtagcagaggacagcactgagactgaactcaccaaaatccgtctcctcagggcaattgttgaaacccgtgatccctcttccaagatctattgtag

SEQ ID NO: 77842 - DNA, 68 bp, Glycine max
  Clone ID: 700965243H1
tggtaattgtgatcattattcacgagttgtgctgattagtgaaataaagacaactgctttcatttcag

SEQ ID NO: 77843 - DNA, 244 bp, Glycine max
  Clone ID: 700965244H1
acgatttattgctgctattgatgaatccacaaaacccccactccaaatggggttctttattcactatagtgctgatgatatattaaaacaagcaactgaatcaactcttcgatatcagagagggaacctatctccctgctagacggagttcctgttgctatcaaggatgagatagattgtttgccatatcccacaacaggaggtacgacatggctgcacaaagaaaggccttgtagcgatgatg

SEQ ID NO: 77844 - DNA, 241 bp, Glycine max
  Clone ID: 700965245H1
actatcctatcgtagcaaagaaataaagaaagaaaaccctagcttagcttttgaagtttcaagatgctgatcttcgttaagacactcactggtaaggcaatcacccttgaggtggagagttcagtaccatagataatgtaaagtccaagattcacgacaaggaagggatcccaccagaccagcaacgtctgatttttgctggcaagcagcttgatgatggacgtacacttgctgattacaa

SEQ ID NO: 77845 - DNA, 246 bp, Glycine max
  Clone ID: 700965246H1
gtgtaaggcaaaccaacccaaccaaattaccaaagttacaaacttcccaagagaagaaaacaaaaataaaaaataaaaaataaaacgtgtttttgttcactaaacatcaaagaaaaaaaaaatgcttcttaaccacattggcgccggattctactggatcgacccgccacgacccgatccgaaacgtcaaacccgaatagtctcctctagtttaaaccgccggcgggcgtcgccgccgtttccggc

SEQ ID NO: 77846 - DNA, 248 bp, Glycine max
  Clone ID: 700965247H1
gttacggtttgtcttggagcccttttaagaacgggtatcttttgagtggttcgcatgaccataaggtttgcttgtgggatgtgcctgctgctgcctctcaagataaggtgcttgatgcatttcatgtttatgagggtcatgagaatgtggttgaagatgtgtcctggaatttgaaggatgagaatatgtttgggtccggtggagatgactgcaaattgatcatttgggacttgcggacgaacaaaccc

SEQ ID NO: 77847 - DNA, 244 bp, Glycine max
  Clone ID: 700965250H1
attgacacaacacgaaacacacacatgacacagcaacaacagcatagccacaacacaaccaaatgacacccacaaaggaggagagaaagagagacgctactactactactactactactacttcccctctctcgcacagccctgaagctccagaaccccgttttggaattaattcgcttctctttaatctaaattcgttgattctttccgttgacatgttggagggtccaacctttcttgtttc

SEQ ID NO: 77848 - DNA, 244 bp, Glycine max
  Clone ID: 700965252H1
ctaacaccctcagaaccgttccccacttgcttttcaattttctttttttgcccttttcgccgccctcaaagagttcaaggatttatacaattaatagttttttaatttggaatggctggaatttgctgtggagttgttggagaatccggagagacttcttcctcttcaatcgaacccacctcgcgcccctccgctcgccggagtttggaccttttgcctttgagatacatagctgctgacgtgt

SEQ ID NO: 77849 - DNA, 244 bp, Glycine max
  Clone ID: 700965254H1
ccgcgtctcgccgtcttctcggcaaggatgggttgcccacttggttctctgctgctgatcgtaagcttttgagtcgtggatggagatcacgtgtcaagcccaatgttgtggttgcccaggatgcactggtcagttcaaaaccgttgccgatgctattgcttcctacccaaaggataacaaaggtagatacattatctacgttaaggctggtgtctatgacgagtacatcaccgttcccaagagt

SEQ ID NO: 77850 - DNA, 243 bp, Glycine max
  Clone ID: 700965255H1
caccatcatcaattgattcaattcaattacgataagaatgggtaatatctgcgctcgtttgaagttgaagccggcgccgcaaccctctacgaagaagcgttcctcttcccgccgagagaggaggtcgacgacgacgccgccattcgtgagcaggccatcgccgccgcgattctctttaagcagcaccagcaacaacagcaacagcagcagcagcaattcgatcgctctgcatcgcttcggtat

SEQ ID NO: 77851 - DNA, 245 bp, Glycine max
  Clone ID: 700965256H1
gtgaacccagcagaagttggagacattgttgtgggcactgtactggcacctggatcagatagaggaattgagtgcagaatggctgccttttatgcaggtttcccagagacagtgcctcttcgaactgtcaataggcaatgttcatctggacttcaggcggtttctgacgtagctgcttatataaaagctgggttctatgaaattgggattggggctggattggagtctatgacagtagatcgtgt

SEQ ID NO: 77852 - DNA, 245 bp, Glycine max
  unsure (1)..(245): unsure at all n locations
  Clone ID: 700965257H1
ggattcttcatcgagtagcggattgacgttcaagctgcaccctctggtgatcgtaaacatctcggaccactacaccagggtcaagtctcagatgaacccaacccacgcgccaccgcacaacaacaacaacgccaacggtcncgacggcgtcgtttcgccgctctccccgcgggtctatggctgcgtcataggggtccagaagggccgcaccgtggagatcttcaacagcttcgaactcctctacg

SEQ ID NO: 77853 - DNA, 242 bp, Glycine max
  Clone ID: 700965258H1
gtcttgagtaatggcgaaggacatcaacctcagctctcgaacccctctgctcttgctgttatgtttcaccactctcaccgaggctgtatggttaaccatccccagcaagggaaccaagtgcagtccgaggaaatccagacacacgttgtcgttttagcagattactatgttgtagccgatgatgtccagggtcaccaacttcaaactatttccgccaaggtgacatccccttatggaaataa

SEQ ID NO: 77854 - DNA, 242 bp, Glycine max
  Clone ID: 700965259H1
cagaattctccagggaggaactggaattccaaatgtcagatggtttggagtggagggagattacaatgttttagtgatggatctgcttggaccgagtcttgaagatctttttaacttctgcagtagaaagctatcactaaagacagttctcatgcttgctgatcaaatgatcaaccgtgttgagttcattcattcaaaatcgtttctgcatcgggatatcaaaccggataattttctaatgg

SEQ ID NO: 77855 - DNA, 240 bp, Glycine max
  Clone ID: 700965260H1
tgaagattcatcttctaagtctgatgccaaccctgatccagctaaaggtagacgttcaagacctgcaaggaaaagtgagatgcctcctgtaaagaatgaggatttgatacctggggcaactttactgggaaagtgagatctgtccagccatttggtgccttcgttgatattggtgctttcacagatgggcttgttcatatttcgatgttgagtgatagctatgttaaggatgttacaagt

SEQ ID NO: 77856 - DNA, 245 bp, Glycine max
  Clone ID: 700965261H1
attttgcatgttataaacccgatgacgaactcaaggtgtcaagggagcagttaatggaggtggcaaggaaatcaggcaagttcgacgaagcaagtctagagttccagaagaggatgctaatgtcctccggaatcggcgatgaaacctatataccgaaggccgtcatcgcctccaccgagaacaccgcaacgatgaaagagggtcgggccgaggcctccatggtaatgttcggagccctcgacgag

SEQ ID NO: 77857 - DNA, 246 bp, Glycine max
  Clone ID: 700965262H1
atccccccaccgagtcaccaaccatggacgttaagtttggcaccacattaatagttattttctccgtaatgtggctcatgagggtgaatgccattgacccttgtgcctctcaaccggataattcggacctcaacgtgattcccatctacagcaaatgctcaccgttcaaaccacccaaggcagacacatgggacaacagaattataaacatggcctcaaaagacccagtccgagtgaaatacttgt

SEQ ID NO: 77858 - DNA, 247 bp, Glycine max
  unsure (1)..(247): unsure at all n locations
  Clone ID: 700965263H1
aacgaatcgaaaaaagaaagatcatggcgatggcaaacttggctcgacggaagggttacgccgtcgttttgtcgtcgaggtcgtcgctttgtctgacaaggtggagggggttcgcgtccggatctgacgaaaacgacgtcgtggtcatcggcggcggtcccggcggctacgtggcggccattaaagcggcgcagtgnggtctgaaaaccacttgcatcgaaaaacgtggcagtctcggcggtacctg

SEQ ID NO: 77859 - DNA, 247 bp, Glycine max
  Clone ID: 700965264H1
ccttgatagtgtgctcaattataagccaaaagctgggcttctgaagcctgcatttaccattatacgtgatacacaatcaaaatgtttacttctattgatccggggtactcatagcataaaacgacaactgacagctgcaactggtgctgttgtccccttccaccattcagtgttaaatgatggtgggataagcaacttggttttaggatatgcacactgcggtatggttgctgcagctcgttggatt

SEQ ID NO: 77860 - DNA, 256 bp, Glycine max
  Clone ID: 700965265H1
gtctcaatatcgtgcagtttgtgctagtctcttcaatctcttattgctaacgacacctcttcctgttccacgctgcatcagcctcagagcacccgctagggtttcttctgcacacccaaccaaatggcggatcctgagttggaagcaatcagacagagaaggttgcaggagcttatggctagccatggtggcgtgggaaatcaacagaaccctgaacaggagaaagctcaggatgatgcaaagagggaggctgagg

SEQ ID NO: 77861 - DNA, 242 bp, Glycine max
  Clone ID: 700965267H1
gtctgggaccattcgagtgcatgatgacctgcttctggctgcctctgaggctttggctgcacaagtgagccaagagaactttgataagggactcatatacccaccattcaccaacatcagaagatttcagcacacatagctgccaatgttgctgctaaggcttatgaacttggcttggccactcgccttcctcaacctaaagatttagtgaagtttgcagagagctgtatgtataccccagc

SEQ ID NO: 77862 - DNA, 241 bp, Glycine max
  Clone ID: 700965268H1
tgattgccaagcctgctgggtctgattctattgaagggtatggcacaaagcttcagaaagaggtgaatggcaagaaagggtgggtggatcatttgttccacattgtgtggcctccttcctcatcaactacagtttctggccccaaaaccccccttcttacagggaagttaatgaggaatattgcaagcacctaagaggagtggtagacaaattgttcaaaagtatgtcggtagggttgggg

SEQ ID NO: 77863 - DNA, 240 bp, Glycine max
  Clone ID: 700965269H1
ctggatttgtctaataatcatctatcgggagtggttcccgataatggctccttctcattattcactcctatcagttttgcaaacaacatggatctatgtggacctgtcactgggcaccctgtccaggctctcctccattttctcctcctcccccttttgtccctccacctccaatttctgccccagggggtaatggtgccactggagcaatagccggaggtgttgccgctggtggtgctc

SEQ ID NO: 77864 - DNA, 243 bp, Glycine max
  Clone ID: 700965270H1
atgcacagttgctgtggttgacagggggagtccctcaattcttgcactttctaggcaaaagttgacccaacttgcaggaacttctattgatggagttgcaaaaggtggctacagcatttcagacgcctcatcaggtaaccagcctgatgctattttgattggaactggttctgcagctggaacttgctgctgctgctgctgaagatctaacgtatgaacgaacagctgttagcgttgtatctc

SEQ ID NO: 77865 - DNA, 242 bp, Glycine max
  Clone ID: 700965271H1
ggactgtttaaatattcatggaaaacaaaagcaacatgccaggactactacgttcttcaacttctgcaaagcagaaaaggggatcttgctctgtactgatgttgctgctcgtggacttgacaacctgatgtggactggattgtgcagtatgatcctcctgatgaaccaaaggaatatatccacagggttggtagaacagctcgtggggaaggtggaaaaggaaatgctttacttttcctgat

SEQ ID NO: 77866 - DNA, 244 bp, Glycine max
  Clone ID: 700965272H1
ctcttcctcaccgattgctagaatggaatttcgatgctcagtcatctcttttaccattctcttctctcttgctcttgcaggagagagccatgtccatgcatcgctacctgaggaagattattcggaagctgtttggccaaacactcccattcccactgcactgcgagagcttctaaagcctctccctgcaggtgttgaaatcgaacgaatccctaagcaaattgatgatacacagtacccaaaa

SEQ ID NO: 77867 - DNA, 240 bp, Glycine max
  Clone ID: 700965274H1
caaattcgcaagggagctgcacttaacgcaatctagattgctgagatgttgctatgagttctggtttttcaaggatctggtacttaaagattatgattcttttgaaacagttttgtatgtgctagttgtatgtggttattcatttcttttgtgatgtttaactagtccaagtatcttttcaacgatgtggtagcacactagctggaaacagtttttttaaggtcttggtgcgtaatatct

SEQ ID NO: 77868 - DNA, 239 bp, Glycine max
  Clone ID: 700965276H1
gattgtggacacacaggctgattgtaataaccggaagataactgcttttataggaggtcttgatctatgtgatggtcgctatgacacacccgagcatcgtctgtttcgtaatcttgacgatgtatttgatggtgatttccacaatcctacattttctgctggaacaagagttcctagacaaacatggcatgatttgcactgcagagtagatggagctgctgcatatgatgatcttatta

SEQ ID NO: 77869 - DNA, 243 bp, Glycine max
  Clone ID: 700965278H1
atcacaaccagaaaacaaagaaacagaggcagagatatatgattatgaatttctcaacagaaccctctgcctcacgcttaccattctgatctccacttcttcgctgtgcgacgaagtgaaattcgttgctgcaaatagtgagaatttgctgtctttggtcagagttgctccgagtgatcgcttcccctggtgcgacgaagtgaaatttcgttgctgcaaatagtgagaatttgctgtctttgg

SEQ ID NO: 77870 - DNA, 246 bp, Glycine max
  Clone ID: 700965280H1
gtcaacggcatcatcgaagggtttcaacggtttccaacacttgtagcttcggttctggcgtgggaaagttctcttctttgaagatgaagtctcaggttctcagatcttggtcctcttcttctggtttcagggtataaagcttgtctttcatgtaaatagaggattacccaatagggtcaattcgcgcttgagagcttcaactggggctcagatgagctttagactagggaaagttcagaaatggtg

SEQ ID NO: 77871 - DNA, 263 bp, Glycine max
  Clone ID: 700965281H1
attcggaattcggctcgagagagaaggaaagggaaaatgggtaaggatctgagcgaggaacaagtgtcttccatgaaggaagccttctctctattcgacactgacggagacggtcggatcgctccgtcggagctggggatcctgatgaggtctctgggaggtaacccgacgcaggcccaactcaaagccatcgtggctgaagagaacctcacggcccccttcgacttcccccgattcctcgatctaatggccaaacacattaa

SEQ ID NO: 77872 - DNA, 240 bp, Glycine max
  Clone ID: 700965283H1
cgcaaagagaagagatctgcctcctttttatcaaatctatctcttcttcaagaatagttgaaaatggggctgtctttcaccaagttgttcagccgactgtttgccaagaaagagatgcgatactgatggtgggtctcgatgctgcgggtaagaccaccattctgtacaagctcaagcttggagagattgtcaccaccattcccaccattgggtttaatgtggaaactgtggaatataaga

SEQ ID NO: 77873 - DNA, 240 bp, Glycine max
  Clone ID: 700965284H1
caaaaaccagcaactatatacattgccatattctgctactcctcaattcaacacacgcatatatatccatggcatcacctcaaacagacctcagaaagattgctctagaaggcttcgattaatagacaagctctacggtcgaaggggccctgccaacaatgatgcgttccccggccgacgagaaggcttttgggtggttcatcaagtccctaatggcgacatggatcaaaagcctcggaa

SEQ ID NO: 77874 - DNA, 238 bp, Glycine max
  Clone ID: 700965285H1
tgcagctgcttccagtttctctctctaaaactcgcaaaagcgagttactgaaaccctagcctctgtttctgtgtttatttacttcgattctacgcatcgaattcaattctctgtgatctaacccgtgaaatcaatgtgcctctttcggaatcgcagagcgagcaacggtgaccgccatcatcatcgatgaagcgatcgggtcggtggcagaggactctgatcctcgctcttctctttc

SEQ ID NO: 77875 - DNA, 239 bp, Glycine max
  Clone ID: 700965286H1
tctcgagccgaatcggctcgaggttcacttccccttccagaattctgcgtttcacacatctcactttctttatcagtcagtttttggcttctaggttttcagtgatttgttctaaagtttagattgtgttattatcccactacagttcacactctgtaacaatacgtggggaaagcctagtgcttgtggaaattcaacaactgttggagttttcttcattgattgaactttgtgtcgtc

SEQ ID NO: 77876 - DNA, 233 bp, Glycine max
  Clone ID: 700965287H1
ctctcttgtgttagtgagagaaagttctctctgcttctctctcttagactcaaaaccctattgcgcgctttgcaatcgaccccgattatggccaacagtaacctccctcgaagaatcatcaggagacgcagcgttcgctcagtgagccagcacctggagttagtgcgtccccttcggaagacagtatgcggtatttcaatgtgatgatccttggcccaactcagtcgccttat

SEQ ID NO: 77877 - DNA, 238 bp, Glycine max
  Clone ID: 700965289H1
atcggagagtttgagtatgttgatgaccacagggctggtaaaatcgtggttgaattgaacggtagactgaacaagtgtggggttattagtccccgttttgatgtgggcgtcaaagagatgaaggttggactgctaggcttctcccctcaagacagtttgggtatattgtattgactacctctgctggcatcatggatcatgaagaggctaggaggaaaaatgttggtggtaaggtatt

SEQ ID NO: 77878 - DNA, 239 bp, Glycine max
  Clone ID: 700965290H1
agcgcctagggttttccaaggcggcggcggtggcgaggccggtgcagtggttcatcggagaccccgccgcagcaacaacaaccaggcaagaaggcggcggcgaagatagtgagggaaggggtggagttttacagcaatggggatttctacgaaggggagtttcacaagggaagaagcaacgggagtggggtctaccattacttcgtgaatgggaggtacgaaagggattgggtggatgg

SEQ ID NO: 77879 - DNA, 237 bp, Glycine max
  Clone ID: 700965291H1
gattttattttcctcttcaagctccggccatggcgtctggatcctcgggtcgcggcaactctgcctcgaaaggcttcgatttcgcttccgatgacatcctctgctcctacgacgactagccaaccgcgattccagttccaacggcaatcacaccgatccggattttcacaaatcaaggaggatgtttcccactactgcctataatccacctgaagattctttgagccaagatgtgat

SEQ ID NO: 77880 - DNA, 237 bp, Glycine max
  Clone ID: 700965292H1
tacctattcactattccttaaaaaactcgaggagatggcaacaccaagagaactaatcatcaattctcatcttttttgggcttgattttggagggatcagcctctcgtgatcaacatggcttgatctccacaagattatccctttgacacttcaagtactaccaacattgattaaatcagactagtgaaatgtcaaaagaaaaggactcagctgacaatcaagtggatacattttct

SEQ ID NO: 77881 - DNA, 238 bp, Glycine max
  Clone ID: 700965293H1
gaattgctgaagtgaggatctgtgcttcttgctgaagattaatcctcaacaatttgaccatcgatcagctacagacttttacccaaatggaaggacaaataagtgattcattaagtaacaacaatgtttgaagacaaaattaaccaacgagcttcaaaatgtccaacctccagaaatgtatgcattcgatatgcaatgcatttatagagtaccaccagtcattcgtgaaactaatccc

SEQ ID NO: 77882 - DNA, 241 bp, Glycine max
  Clone ID: 700965294H1
tttcaacccaattcgtgcaacagatgtgcaacttcctgctggtgggacttttgtgatagctcattctttggcagagtctcaaaaggctgttactgctgccacaaattataataatagggtgtcgaatgccgtttggcttctattgtgctcgctataaagctagggatggatccaaaagaggcaatttcaaaagtgaacacactgtctgatgttgaagggttatgtgtatcatttgctggta

SEQ ID NO: 77883 - DNA, 244 bp, Glycine max
  Clone ID: 700965295H1
tgcaaaaacacatacagaacagaatctgagaactagaccctctcaaaccggaaccgcaaatgaagcccaagagcattcgcatccgtaacttaccaacgcacctgctgctaatcgctgtttgctgttcacctcttcgtccgcttccaagatcggagaaaattgtgggtcagacaacaaatgcgacgctggactcagctgccaaacatgtcctgccaatggagatacccgaccaagatgttcgcgg

SEQ ID NO: 77884 - DNA, 264 bp, Glycine max
  Clone ID: 700964709H1
ggaaattccacctttgcttgaaggagatgggaagatagaggtatggcgaatcaatggaaatgccaagactgcattgccgaaggaggagattggtaaattttatagtggagattgctacattgtattgtacacctaccattctggtgagcggaaagaagactacttcgtgtgctgttggtttggcaaagacagtgttgaggaggaccaaacaacagctactaggttagccaatacaatgtctacctcattaaagggtagacctgt

SEQ ID NO: 77885 - DNA, 261 bp, Glycine max
  Clone ID: 700964710H1
gattgccactgtggaatgcttctgtctagctgttcatcaggctgtaaatgtgggagctcctgtctcaacaaaccatttcagaaccgtcctgtgaaaaaaatgaaattggtcaagaccgagaaatgtggttctggaattgtggcggatgaagatatcaagcttggggagtttgtcattgaatatgttggagaagtcattgatgacaaaacatgcgaggaaaggctttggaacatgaaacatagtggggaaacaaacttctac

SEQ ID NO: 77886 - DNA, 263 bp, Glycine max
  Clone ID: 700964711H1
caaagttgcaggtgcatggccaatacttggtcacctaccactattgagtggttcagagacacctgatagggttttgggtgctttggctgataagtatggacccatattcaccatcaactatggtgtcaaaaaggctttggtaatcagcaactgggaaattgctaaggaatgcttcaccaaaaacgacatcgtcgtttcgtctcgccccaagcttcttgccattgaactcatgtgctacaaccaagccatgtttgggtttgcac

SEQ ID NO: 77887 - DNA, 262 bp, Glycine max
  Clone ID: 700964712H1
agccgctattctactcgcaagcaaatcagaacaagagaagagaatggcaggagcagaggggctaaacagagaacagtacgtgtaccttgcgaagctgtcggagcaggcggagcggtacgaagagatggtggagttcatgcagaaggtggtggtggggtggacgccggcgtcggagctcacggtggaggagcgcaacctcctctcggtggcctacaagaacgtgatcgggtctctgcgtgccgcgtggcgcatcgtgtcctcc

SEQ ID NO: 77888 - DNA, 261 bp, Glycine max
  Clone ID: 700964713H1
ctcagctgtgcaagttgatgtttctgggaaccgcaaggctgttgttattcatgtcccttacagattaaggaaaggtttccgtaagattcatgtcaggcttgtcagggagcttgagaaaaagtttagtggcaaggatgtaatcttggttgccacccgaaggattttgaggccaccaaagaagggttctgctgctcagcgtcctcgtagtcgcactcttactgctgttcatgaagcaatgctggaggatgttgtattgcctgc

SEQ ID NO: 77889 - DNA, 266 bp, Glycine max
  Clone ID: 700964715H1
aacgaggttttaacgctatcatatcatctgtcctctttcttctctctggatttttctccatcatttcagggctttctttcttctcttttgcctcccatattccattctcctcaaaatatctctacattttcctctctaccccaacaaaattccaaaaatttcccctcctatctccttttcacgtcacttaccacaactgggatgctccactttcttaaggattatttgttaactgagtcctaagtgtaattgagatggacggtgat

SEQ ID NO: 77890 - DNA, 266 bp, Glycine max
  Clone ID: 700964716H1
atggatcttcttgacatcgactccattgccgctgccataaagggttgttccggcgtaatccaccttgcatgtcctaacatcattggtcaagtcgaagatcccgagaaacagatattggaaccggcgataaaaggaacggttaatgtgttgaaggcggcgaaggaagcaggggtggagcgcgtggtggcgacttcatcgatttcgtcgattatgccaagtcctaattggccagctgataagattaagggagaagagtgttggacgga

SEQ ID NO: 77891 - DNA, 266 bp, Glycine max
  Clone ID: 700964717H1
ctcttttctgcatgtttgttctctcaacgactcctccgcgaaagagtattattcaatattttggttgggttgaatcccggggttgaagcgttgcagacatcacggctattctaagagtgtctcgctccctcattcatgtccgatctgtacgacggaggacgggtagttgcgtaactgccgttaacccttcgccgcacggtgggcgtggtgctttgccttctgaaggtggtagcccttcagacttgctcttcctcgctggtggtggt

SEQ ID NO: 77892 - DNA, 267 bp, Glycine max
  Clone ID: 700964719H1
ctctgattctctccatatattatctcaaacccctctcacagaatgggaagtgctggaggaactgactatggtgcatacacttatgagaatcttgagagagagccttactggccatcagagaagcttaagatttccatcactggtgctgggggttttatcgcgtcacacatagctcggcgcctcaagacagaggggcattacattattgcttctgattggaagaaaaatgagcacatgactgaggacatgttctgtgatgaattccat

SEQ ID NO: 77893 - DNA, 263 bp, Glycine max
  Clone ID: 700964721H1
gataattttataaagagcccctaacggttttgttggagtgagatcaaggaaacagagaaaaaatggcatcctcaagagcttgtaccaaacccatcatcttcctctctgccttcaccaagtcaaagttctctcatcaatatcatgtctccttcatcaacaccacctcccacatacccatctacccaaagctctctcagcaacgttccttggtggtcaacaacgtattgaaaacagttgagccgacagaaagctctttgcggagt

SEQ ID NO: 77894 - DNA, 261 bp, Glycine max
  Clone ID: 700964722H1
ggagttttcagtgaatagggaaatgtctttccacaatcgagcatttttgatggggaagagtcctgagggtttgaatgatggtgacatgacaaaggattcttctagaattgagtccaagcgtgctcatcagtggttcatggatgaccctgaagtggatatgtttcccaataagaaacaagccgtagaggctccgaacaatttgttatctggaatgctcaactccaatatttctttgtggggaaattcctcaggatttcactc

SEQ ID NO: 77895 - DNA, 261 bp, Glycine max
  Clone ID: 700964723H1
ctcctgcccactgaagtcgaacccctaatggcttctcaagttcttcttcaacaggcactgtttgcccccaagctaagtttcccttcttcttctcgtaacgtcgcgttaatttctagggttccttccaccccaatttcatggcgttgcactcctctcattgctaagcctagtttcgctgtgagagctgactccaacgtcgaaggcgctggtgaagccaccgaggatgttccttcgtataatgttgatgaagtttcggaaggc

SEQ ID NO: 77896 - DNA, 262 bp, Glycine max
  Clone ID: 700964724H1
gagcatacgaaggtaccaaagacgaggagacaggtgaaagggcttcttttgatctcaacaaggcatattcaagctgtgacctttttcttctaagaacctccagagagcttgaaggagactggttggattatcttgctggtaattacaaggttcctgtggttccagttgggttgcttccaccatccatgcagataagggacgttgaagaggaagacaataaccctgattgggtcagaatcaaggatcggttagacacacaaga

SEQ ID NO: 77897 - DNA, 263 bp, Glycine max
  Clone ID: 700964725H1
ccctcgagccgaatcggctcgagctaagcaaaaccataagagagaaccatgaagcacaagaaccatgccagagacttctctacggagaagctagttttccaacaacaacaacaacaagcagctcctgtgtctggaatttcaagcatcgaagatgagccaagaagaggaattgactccaacaatggccactcattatcagattgtgaagagagcattgtttcctctccagtcattgaccatttacctcaacctcaacctcaaac

SEQ ID NO: 77898 - DNA, 258 bp, Glycine max
  Clone ID: 700964729H1
caagccccaccttcatatggttctagatggcaaaaccaagttcagctgatggtaggactagaagttctgtgcagatctttatagtagttggtctgtgctgtttcttctatattttaggtgcgtggcagagaagtggtttcggaaagggagatagcatagcattggagattactaagactaacacagaatgtaatatagttccaaatttaagttttgattcccaccatggtggagaagttaacgaatttgatgaagctg

SEQ ID NO: 77899 - DNA, 262 bp, Glycine max
  Clone ID: 700964730H1
ctcagtgaaagagaatccgaggcgaagagaagagaaaaattaagatggaggggaaggagcaggatgtgtcgctgggagcgaacaagttcccggagagacagccgattgggacggcggcgcagagccaagacgacggcaaggactaccaggagccggcgccggcgccactggttgacccgacggagtttacgtcatggtccttttacagagcagggatagcagagtttgtggccacttttctgtttctatacatcactgtctt

SEQ ID NO: 77900 - DNA, 263 bp, Glycine max
  Clone ID: 700964731H1
ctctgcgagagagaaagagagaggcggtgatgtcttcaattagattcctatggatcctgatggtgtctttgacggcatcatgcgcgttaagccaaccgcagaagctatcggcgtacgatgttctgatggagtacgggttcccggtgggtcttcttcccaagggagccatagggtattcgctcaacagagacagcggcgagttcgcagtgtatttccaaggagcgtgcagcttcgacatagagtcctacacgctcaagtacaaa

SEQ ID NO: 77901 - DNA, 266 bp, Glycine max
  Clone ID: 700964733H1
aaggggcgtgtggttcgtgttggtctttcagtacgacgggagcgttggaaggagctcattatctggccactggtgagctcgtgagccttagcgagcaacagcttgtggattgcgatcacgtgtgtgatccagaagaatatggagcgtgtgactcaggctgtaatggtgggttgatgaacaacgcatttgagtacatacttcagtctgggggagtacagaaagaaaaggactatccatacaccgggagagatggcacctgcaaattt

SEQ ID NO: 77902 - DNA, 264 bp, Glycine max
  Clone ID: 700964735H1
cgatcaccaaagtttggtgagtgctataaagcaggtcgatgtggtaatttctactgtaggacacctgcagctagctgatcaagataagatcatttctgcaattaaagaagcaggaaatgttaagaagttctatccatctgagtttggaaatgatgtggaccggactcatgcagttgaaccagccaagtctgcatttgcaacaaaggccaaagttcgccgagctattgaggctgaaggaattcccttcacttatgtgtcaagcaa

SEQ ID NO: 77903 - DNA, 262 bp, Glycine max
  Clone ID: 700964736H1
ccacctccaaaaccgtaacacacacaacattctatactcctttcaagcttattagccgcagctagggtttccttctcactctcccagggattgagtaacatctgttcattgatcgtgattggaaggttacaattcggtttatttgatggttgcaacttcgtaccagccgttgaagtgactgtgcatgtccgtgaactgtttttttcagaaattctattgaaattcttaatgggaagaacagttttggcacgccaaaaggatg

SEQ ID NO: 77904 - DNA, 260 bp, Glycine max
  Clone ID: 700964737H1
ttctcattcaccaatggcgttcaccgtcgccagtggcagtggcgtggctataatcccctgcggcaacaccggcaccgccgcactcttccctcaccgaacgagaacaaacctccacgtggcgcgcgcgaagaagcccctcaacggcgacgacgtttccgtttacgctgagctcctcaaagccgaagtttccgttttggaaaataataagcctctcgacgacaacgatgccgctttgaagttcctagagaagatagaccgtc

SEQ ID NO: 77905 - DNA, 261 bp, Glycine max
  Clone ID: 700964738H1
atagactctacagagaggtttgcagaagtattagcacagagaataatgcagtggatcagttaaaacaaatagttcatgcagatagacatttggaatataataaagctgagatgaagcatttagaaatgttcaacatggtaaatactcatcatgcaaccactggttataagtgtttgaagttgaaatggaggaaatttggtcacttggctggtcaagttggtggagcaaaaggtatattttgtgggttgtttggacttgaag

SEQ ID NO: 77906 - DNA, 260 bp, Glycine max
  Clone ID: 700964739H1
caaaaaacaaactaacaccgtctttctcttttctcgcgtgtcgtacggatcgtgcattttccttgaacgcgatcgtcgaatgaaaatgaaaaagaaacgaaaggaaagcgaggccagtggacggtcgaacttgccggatgagatttcgaagtcgcattactcccttgagcggcgttcgcggttgatcaaacggtgcagggaagacggcgtcgtggcgacggtgccgccgtcacgcggcgcgtcgttattcctaacgccgt

SEQ ID NO: 77907 - DNA, 258 bp, Glycine max
  Clone ID: 700964740H1
ctcacttaacttaaaaaacactcactactacttacgcacgcccttactttctctctctaaaacccttctcgttttctctctctaattgcagatcaggccgcaccaaccgttgcggttgtggattcggttggggttcggagtcgccatggcttcggcttcgtcttcgtcctccaagctatgcttcaattctgactgcaaagaattgaagtccgaaagacctaagaaagggtggagactccgcagcggagaactagcaga

SEQ ID NO: 77908 - DNA, 256 bp, Glycine max
  Clone ID: 700964744H1
cacgaccacaacctccaaccgccgtcgaagcttggtcgtcctcccaccgccgtcgcacgagggagcaccccacgccactgtacgtcgtcgcgccaaccatcaggccgccgccgccttgatttttgcagtgattgttactgctgctgctgctgctgttgttgttatggcagttgtggagaaggaaaagcttcaggaagaatctgtaatccgccgcttctaccagattatgcttagttgggactactttgctctcctc

SEQ ID NO: 77909 - DNA, 265 bp, Glycine max
  Clone ID: 700964748H1
tcaagcgtggttttgttgcatccaactccaaggatgaccctgccaaggaagctgccaacttcacatctcaagtcattatcatgaaccaccctggccagattggaaatggatacgcaccggtgcttgattgccacacttctcacattgctgtcaagttttctgaaatcttgaccaagattgacaggcgatctggtaaggagcttgagaaggagcccaaatttttgaagaatggtgatgcaggtatggttaagatgattccaaccaa

SEQ ID NO: 77910 - DNA, 266 bp, Glycine max
  Clone ID: 700964749H1
gttgctacttgctagtatccaatattagcttactactagggtgtttgaaagagatggggaagacaagcaaatggcttagaaacttgttgacaggtaagaaagacaaggaaaaagagaagggaaaatctacaaccaacctgaattgttcttcaaatggaacagaaaactcaaccactccaacttgcacaaccccaaaggagaaaaagagatggagttttagaagatcatcagcctcagccactactgccacaaccacaccaccaaca

SEQ ID NO: 77911 - DNA, 261 bp, Glycine max
  Clone ID: 700964750H1
gaagaaagaagcaaatggcaaactttccagttgttgacatggggaagcttaacaccgaagagagactcgcagccatggagattataaaagatgcctgtgagaactggggtttctttgagttggtgaaccatgggatatccattgagcttatggacacagtggagaagctcacaaaagagcattacaagaagactatggagcaaaggttcaaagaaatggtgaccagcaaaggtcttgagtcagttcagtcagaaatcaatg

SEQ ID NO: 77912 - DNA, 264 bp, Glycine max
  Clone ID: 700964751H1
gaaaaggccgtggtttccgacgagaaatgctaaatcctcctacaggtgaagaccttacagcgttcacagtacacacaccttacagatgcctgtggcggtaacaatacccagttatcagcaccgcatctacgcttcactcatctacatcgccaaggctaagaaaaccaccatggccagcaccagcagcagcaatcctggtggggccttcaccaccctccaagagagggtcactttcgagaaggagataaaaaagagcaagttcat

SEQ ID NO: 77913 - DNA, 255 bp, Glycine max
  Clone ID: 700964755H1
gtcgaatctattagccacaaaacacacacacacatattctcacacaaactgcaactatggctactaccttatgttacaattctcttaacccttcaacaaccgttttctcaagaacccatttctcagttcccttgaataaagagcttccactggatgcttcaccttttgttgttggctataactgtggtgtaggatgcagaacaaggaagcaaaggaagaaagtgatgcatgtgaagtgtgcagtggtggaggctc

SEQ ID NO: 77914 - DNA, 259 bp, Glycine max
  Clone ID: 700964756H1
attattgttattattattattttgtttttccatttcaccactttcttctccctccgatttctccagaacagcaagggagaatcaattcctcatcgctgcaattctcatctttcactctctagattctcatctatctttcttccaacctcttctcttctatacccttcagaaaaaaataaaatagaaaccatagcttcagattattctagctcttcattttttttccttgttcaatattatgctgtaaaattctcaaact

SEQ ID NO: 77915 - DNA, 255 bp, Glycine max
  Clone ID: 700964758H1
ctcttcgctcccactcccacaagcctagaagacgtatacgcaattcttagagtttttcagattctcggaatcgaagagaagaataatcctgtgagcgaggacacttgtcagaaagtggttgaaaatctagcctcgtcttctcctctcaaggatttgttctataccttgttaaggccattttaaaatgcaatgtcaatggaaacgttttcaaggaaatgccaactcttgttgcagatggtcatgatgcactcactg

SEQ ID NO: 77916 - DNA, 256 bp, Glycine max
  Clone ID: 700964760H1
acgactccgaacccgaaccaagcgctgccgatttgttgaaatccgatgaggaattggcccgactcttgcaggcagaggaggaagcgcttatgttgcagcagtatgtggcgagcgaaaatcctcgagaatttgatagtagagtacggccccacgttagtcaagtccgcatgtatgaggatgcaacgcggcaggaggctgctcggaagtccgttcctatggaagagctcgaggagaaagctttggtctctttggccaa

SEQ ID NO: 77917 - DNA, 259 bp, Glycine max
  Clone ID: 700964762H1
ctcttcttccccaccatcacaccaatcaaacctcactctccctttctcccctgaccctctccctgccatggtcatgggagcctttggccacttcgaaccggtctccaaatgcagcaccgagaaccggtctaaccaaaccgtggcctcggacttggacggcaccctcctggtgtcccccagcgcatttccttactacatgctggtcgccatcgaagccggcagcttcctccgtggccttgtcctccttgcctccgtccct

SEQ ID NO: 77918 - DNA, 262 bp, Glycine max
  Clone ID: 700964763H1
tagctcgagccgcaaaacactattttattatcttcttcgtctgttctttgcattgaagaaaatatctttgaattgaagaaaacttgaaatcgaattgtgaaacagaaaataaaccaaaggaaatttttactgattgaattgcagagattggaaaaatggcgttgagtatgactcaacagatcgggaccctagctggtgcgacggtgccggattcctcggccggagaatcgaccgcggcggtgagtgccgccgcggtgtggaa

SEQ ID NO: 77919 - DNA, 233 bp, Glycine max
  unsure (1)..(233): unsure at all n locations
  Clone ID: 700964765H1
ctccaaataaggagactttgtccagacactcatttttaggaccaaatggccttcggggccaatggcttggacctagtgcggaaataaaggttcaatatccaagcagtggtgagctcacacaggccaaggattcaagcccgaatcaggctgggctatatgatcttgtggcaattanagatggcgatcaaggaccagttacatccacaatggactcagttctctctttggatgat

SEQ ID NO: 77920 - DNA, 260 bp, Glycine max
  Clone ID: 700964767H1
cgaggcgaagagaagagaaaaattaagatggaggggaaggagcaggatgtgtcgctgggagcgaacaagttcccggagagacagccgattgggacggcggcgcagagccaagacgacggcaaggactaccaggagccggcgccggcgccactggttgacccgacggagtttacgtcatggtccttttacagagcagggatagcagagtttgtggccacttttctgtttctatacatcactgtcttaaccgtcatgggagt

SEQ ID NO: 77921 - DNA, 256 bp, Glycine max
  Clone ID: 700964769H1
ccagtttcttcttcaacgtcctcttacgagcagatcccaattctccttcccagtttcaaaccctaattccctcattcccatggcctcagaagagcccactgtcgcggtggaacctgctcccgaacctgccaccgccgagcctcccccggaggagaaggaggagcccaaacctgaagccaaggctaagaaaaccaaggaacccaaacctaaaaaggtttccagaccacgcaaccctcccactcatccttcctacgag

SEQ ID NO: 77922 - DNA, 257 bp, Glycine max
  Clone ID: 700964770H1
ttccaatatattccattctctctgtgtatttccctacctctcccttcaagatgcagatcttcgtcaagaccctcaccggcaagaccatcacccttgaggtggaaagctctgacaccatcgacaacgtcaaggccaagatccaggacaaggaaggaatccccccggaccagcaacgtctcattttcgccggaaagcaacttgaggacggccgtacccttgctgactacaacattcagaaggagagtactcttcacctc

SEQ ID NO: 77923 - DNA, 255 bp, Glycine max
  Clone ID: 700964771H1
gccaactttgcttcccataatgcgtagaatgttaacaactgatggtcaagaggttttcgaagaagttttggagattgtatcatatatgacttttttctctccaacaatatcattggatatgtggagtctttggccattgatgatggaagcactggcagattgggcaattgatttctttccaaatattttggttcctttggacaactatatttcaaggggaactgctcatttccttacttgcaaagaacccgacta

SEQ ID NO: 77924 - DNA, 255 bp, Glycine max
  Clone ID: 700964772H1
aattatacataaattttggatttcgcacgtagctagctacagaagacaaaggagccttgagtctcgagatcttgtcagatcggaacgcaaccgcaactgccaccgagattgctttgtgtgttatgggcagggaagttactggcatacaggttatggaaaagaagccaaatggtgccatagcggcttcaaatggcagtttaagtgatagaatgcgtgtttctcccaaaattgcagcaatggttcaagcaatggatc

SEQ ID NO: 77925 - DNA, 253 bp, Glycine max
  Clone ID: 700964773H1
tacttttacaatggagatatggaatagttggtgggttttgcaaattatgcaatttctgggcttttttagtttttggacttcatttgcaaagtttaggactttattctcaagagcttttggctatggccacaaggttgtgaagggtgactgcagtacttggatctttgtgtccttcaatgggttggtcacagttggttctttcatattcttcctcttggtcctttcctgggcttatctatacgcatttcccagt

SEQ ID NO: 77926 - DNA, 252 bp, Glycine max
  Clone ID: 700964777H1
ctttctcttgttcaaccttcccacaaacactgcatgcgtctttgaccacaactgcttcttcaatttccaatctttttggacaccctctattgctattcctcccttggtgttgtttgtgttaaagggtatctctctacttaatataaagttccattgtctcttgaggcaattttcaaccttagttgtgtgttttggagagtttttttgtgttgttttgttgaggttgggtttgtgagtgagagaatggtgggt

SEQ ID NO: 77927 - DNA, 256 bp, Glycine max
  Clone ID: 700964779H1
aaaaacgatctccaacggtcatgaacggcggcgctgaggcctccgtcaatcacaggcgcagacaccaagcagcttccgctaacggcgttaagatagcaaacggggccatggcgaagcgtcctcgacgctctgctacgacgcctcgttcatgaaatggaccgtggcggatgctgtccacgtggcgacgcatcattggatgccgtgcttattcgcattagggcttctcttcttcatggccgtggaatacacgctcctc

SEQ ID NO: 77928 - DNA, 256 bp, Glycine max
  Clone ID: 700964781H1
aagtcaacttaaaaacaaaataattataagatccaaaccatgtgtataagttaacacccatcgacaagaatcttcagcaaatgaacaaagtgttaaaaattttgctagtatatacacttttaacaatactaatgaatcgagttattgatttttcaaccttaaaaagctattttcagttgacttaaagggaaggggggttaattttggtaatttcctcatttaatcctgcatactcgttaaataattagatgtacta

SEQ ID NO: 77929 - DNA, 257 bp, Glycine max
  Clone ID: 700964782H1
atttataggaaaaaaatatagagtgaggaagaaacaaacatggaaaggatatagattatagaatacagaggcaccgacgtagcgacggtcaaggtccacaatccacaatccgcaaccgaataacccactacccacagatttctctctctctctctctgttggattggatcctaatatctgtgttccactttcagaggttgctccttcattcacgcccttgctctcttcaaatctattttcttcctctgctctatcta

SEQ ID NO: 77930 - DNA, 257 bp, Glycine max
  Clone ID: 700964783H1
gttcttttcttctctgtcttcctttaccaaccccaaacatttcttttgtgttaaatttactgattctactcagcaatcagctttcagcaatcagcaatcagcaatcagcatcattacttgtccttgtagccatgtcaatttgtggtctgtttcaaaaaccaatatgtcttactctctttctagtgtttctctgatcttcctgaagtaggtaattggcagttttgttctattctcccagtgatttataatcaaaaagc

SEQ ID NO: 77931 - DNA, 253 bp, Glycine max
  Clone ID: 700964785H1
ttcgtttctcactcacaccaacaacacaacacaagctacagcacggcactactactagcatcaccctccaccattgacgcgtcctttgcttgctccgcacgtcacttcgcgtttttctcagattcactctcgccgtcgcagatcccaaccaccatggatggttacgacgccaccgtcaggctcggcgccatcaacctcaagcacggtcgcgccgccgattttgactccgcctcccccgacgtatccgtctcct

SEQ ID NO: 77932 - DNA, 256 bp, Glycine max
  Clone ID: 700964786H1
ggcaactaagaaagaaagatgaagctgaaggtatatgcggaccgcatgtcccagccatcccgtgcggttctcatattttgcaaagtgaatggaatagattttgaggagatcaaagtcgatttatccaaacgtcagcagttatctcccgaattccgagcggttaaccctttaaggaaagtccctgctattgttgatggaaggttcaagctatttgagagtcatgctattctcatatatcttgcttctgcatttccag

SEQ ID NO: 77933 - DNA, 251 bp, Glycine max
  Clone ID: 700964787H1
ctcctctgtctctctctctccaccattgccatggatccttacaagctccggccatccagcgccttcaattctcccttctggactacaaattctggtgctcctgtttggaacaacaactcctctttaaccgttggagctagaggtccaattctgcttgaggattatcatcttgtggagaagcttgcaaactttgacagggaacgtatcccagaacgtgttgtccatgccaggggagctagtgcaaagggttt

SEQ ID NO: 77934 - DNA, 250 bp, Glycine max
  Clone ID: 700964789H1
attattattgtctgagaaattatcaataaaataaaacagagattgtatttgcatatctttgtaggttttgttagtaaacaaaagaaaaggaaacatgaaggacgcagatgtgtcaaggcagatccagcagatgatcaggttcatccgtcaagaggctgaagagaaagctaatgaaatatctgttgctgctgaagaggaattcaatattgagaaactgcaattgcttgaagctgaaaaaagaaagatcagg

SEQ ID NO: 77935 - DNA, 251 bp, Glycine max
  Clone ID: 700964790H1
ctcactttcttttcaaccagaactatgattaagctttttaaagtaaaggaaaaacagagagaactggcagaaaatgcgagtggcggaccacccgttaagaagcaaagtgccggcgagttgcgtcttcacaaagatataagcgagctgaatctaccaaaatcatgtaccatgcaattccccaatggcaaagatgacctgatgaactttgaagtttcaattcgacctgatgatggatattacttaggtggcac

SEQ ID NO: 77936 - DNA, 251 bp, Glycine max
  Clone ID: 700964792H1
gcattacaaccttaaattctccgagcgagcgagaaacagaaacctatttttattttctctctttatatcactgagagtgatagtgagagtggtagcttttgtatccatgatatgaatatgatgattattgatttgattatgcgtccagattttcagttcaggtaggatcactttgacagtttgacttgtccagcaccaatttctggtattactgttgtctgagttctcaagagttctttcacagaaggtag

SEQ ID NO: 77937 - DNA, 252 bp, Glycine max
  Clone ID: 700964793H1
cttcgaaacacactaaattctccttgctaccactctcattctcaacgatggaagctcctccagaaggttatcgtaggaacgttggtatctgtctcatgaacaatcacaaaaagattttcgcggcttcgaggctcgacattcccaatgcttggcaaatgcctcagggtggtattgatgaaggtgaggatccaagaaatgcagctatcagggagttacgagaagagacaggagttaattcagtagaagtgatcg

SEQ ID NO: 77938 - DNA, 248 bp, Glycine max
  Clone ID: 700964795H1
gtacaatgaagttgttagagtttgtagcttggagaaggacttggaaatgatggaacatggggaccagacagagattggagagcgcggaatcaacctaagtgggggtcagaagcagcgcatacagcttgccagggctgtgtatcaagactctgatatatatcttcttgatgatgtttttagtgctgttgatgcacacactggcactgaaatattcaaggaatgcgtgaggggggctctgaaaggcaaga

SEQ ID NO: 77939 - DNA, 259 bp, Glycine max
  Clone ID: 700964796H1
cttgcttccgtagttcatatggcgtgtgttcaagtcatcacagttattctctttgcattggctctagctaaaatttacccctcaacatgtcaagtggtgcagggaaaagtctcctgcgttgactgcactcacaactatgacttatctgatattaaggtttcggtgaggtgtgatggtgtgaaaaaactggctttggctactacagaaaatgatggctccttcaaggttgatcttcccctagaccacacaaaaccttctt

SEQ ID NO: 77940 - DNA, 261 bp, Glycine max
  Clone ID: 700964801H1
cgtagaaacgtgaaccagaaccagaatggatcttcaacaacgaccactgaaacttcactttattccttacctgtcaccggggcatgtgatccctctctgcggcattgcaacactcttcgcctcacgcgggcagcacgtgacggtgatcaccacctccctactacgcccaaatcctccgcaagtcaagcccctccctccaactccacgtcgttgactttcccgccaaagatgtgggccttcccgacggcgtcgaaatcaagt

SEQ ID NO: 77941 - DNA, 248 bp, Glycine max
  Clone ID: 700964802H1
cagaagaaaactaccgtacccaagcctaccaacaaccacaccctctctacatcatcctacctctgattagctagggccacagcaccttcctcttcacttcgttcttcaggactctacaaatgagcaacgacaaggacacacttcaacgtggctgatctcactatcgctctcaacgaggacaatacaccacaccttgtcaatgctctcaagagcaagatacagagcttggctggacagcattctgatat

SEQ ID NO: 77942 - DNA, 250 bp, Glycine max
  Clone ID: 700964804H1
aagaagtggaaattgaaggatgtaatgagaaagaagttgaaaccaagactacagagttatgcaaccttcttgatatgttgagaagtgcttctggagacaatggtggaggatctagtagtacatcacacgctgattggaaactaaaacaggataatgaagagtttcgtgttatgtatcgtgaaggaccacagggaactcccattcatacattgctagttgaaggctatgtagatgggcctctagatctttc

SEQ ID NO: 77943 - DNA, 257 bp, Glycine max
  Clone ID: 700964806H1
gaaagagatcacatagcagaatggcttctactcaatgtttcttgcaccaccatgctcttaccacccctgccagatccccatcacaacgcatcatggttagcaccaagcctaaccagcttgtttgcaaggcacagaagcaagaggatattgatgtcagcccaatctctcgccggttagctctaaccgtgctcattggtgctgctgctgttggctccaaagtccaacctgctgatgcagcttatggggaagctgccaat

SEQ ID NO: 77944 - DNA, 255 bp, Glycine max
  Clone ID: 700964807H1
caaacacatcacgcacgagcagcagctggcagatctgtctcggcagattcttagggggctggcgtacctgcaccggcggcacatcgtccacagggacatcaagccgtcgaatctgcttataaactcgcggaagcaggtgaagatcgctgacttcggggtgggtcggatactgaatcagacgatggatccgtgcaattcgtcggtggggacgatcgcctacatgagtccggagaggatcaatacggacataaacga

SEQ ID NO: 77945 - DNA, 257 bp, Glycine max
  Clone ID: 700964808H1
gttttcaaaggctatcactaaatctcattcttcatctgcagctatttggattgctgattattgttaactgatattggtgcttttctttgagaaagtgtgtacactttttggataagagaaaacaagagaggtgacattggaagctaactcagagagaggcaaagatgttgggaattttcaagcagaagttggttaatgcacccaaggagctgaacagtccagcttctttgagttcatgcattaagcctaagctaagt

SEQ ID NO: 77946 - DNA, 259 bp, Glycine max
  Clone ID: 700964809H1
agagagcacaaagaaactgccatggacgctctgaggaaacaagccagcaagctcagagagcaagttgccaaacagcaacaggctgtaataaagcagttcagtagtagtggttatgagagttcagatgttgtggtcatcgatgaggtcgaaatgcagagacatcaccagctggaaaagttgtatagggccacacgttcagggaaggacttccagaaggaaattgttaaagcagcagaaacatttacagctataggttata

SEQ ID NO: 77947 - DNA, 257 bp, Glycine max
  Clone ID: 700964810H1
attttgttgaaattgctgtttcttcctctgagctccaactttcacctcagccaaatacacaacaaaatggggtttcagaagataagggtgggcaaccccatcgtcgaaatggatggggatgaaatgacccgagtgatttggaaactgataaaagataagcttactttcccttatttggagctggacattaagtactttgaccttggccttcttcatcgcgatgccactaatgatagagctactactgaaagcgctga

SEQ ID NO: 77948 - DNA, 258 bp, Glycine max
  Clone ID: 700964811H1
cgacaaaagcctttcacagtgagatagccctacaaatgtttcgtgaatctttgtttgctctctttctactttctgcattctcctcctcactcctacctttaaccactgctcaagattacgttctcgacacggacggtcacgcggttgaaaatcacggtacatactatttgctgccagcgaaatcaggaagcggcggtggtggaatagaggcagccgcaactggcaaagaaagttgcgctctcactgtagtgcaatctc

SEQ ID NO: 77949 - DNA, 256 bp, Glycine max
  Clone ID: 700964812H1
cagttgattccttctagaaaggtggctacgaataccaatccacatgagactgtagttgttgagcatcctgctcacattcttgcatattactctcttgcagggcagagatcagattttccagacactgttgtgcctttggacactgccacatgcgttgatacctagaggccagagctgtgtacacataccagttttcttttgtttttcttctcccctttcatatgctgtttctatgttcctgctctatttgcagttc

SEQ ID NO: 77950 - DNA, 256 bp, Glycine max
  Clone ID: 700964813H1
gtcaatccacgcctaattgagcgccttcaagtgttccctccaaagagcaagctagatcccacagtgtatggtgatcaaactagtacaacaaccaaagaacacttagagatcaaccttggtggactctctgtggaacaggcactgagtggtaacagatcgttcacattagatcaccatgatgcattcatcgcatatctgaggaagatcaatgacgttcccactgcaaagtctcatgccacaacgaccatccttttct

SEQ ID NO: 77951 - DNA, 255 bp, Glycine max
  Clone ID: 700964814H1
gtttggttttcgggacggaacaagaacaaaacgaaaagatgaacagctacagctactatgggtaccaagagaagaacaccttgacaagctgtgaggagacgaggatggaatcagtgatttgccccaaacctcgccgattgggtctcataaaccactcttccatcaacacagaagtcagaccctcgaggcaccccatcatcaggaaattctctgttcttttttctttttggtttttcaagcaaatcggttacaaaa

SEQ ID NO: 77952 - DNA, 261 bp, Glycine max
  Clone ID: 700964815H1
gttaattaagatgaaggaggacaatgggatagaggaactgtggagggaagtgagggatttgagtttgggaaacggcggaagagtacagagactagagtctccaccaaccccagttcagttcctgagagacttcatcacaccaaacaagcaatgcataatctccaacgccattacgcactggcccgcactctcttcctggaccaacccttcccacgtctcccaatccctctccggcgccaccgtctccgtccacctcacccc

SEQ ID NO: 77953 - DNA, 254 bp, Glycine max
  Clone ID: 700964819H1
tgatgatgaagcgtcggttccttttggttctcttggttctgtacgtcacagtggagcagagtaagctactccaccacgtagaagcagatggtgggtttgtaaaaacaagaggagtgcagcttatgctgaatgggagtccctactatgctagtggcttcaatgcctattggcttatgcaccttgcctctgatccttcccacagaaacaaaatctcatcggtatttcaacaggcttcaaatcatggactcaacatt

SEQ ID NO: 77954 - DNA, 253 bp, Glycine max
  Clone ID: 700964820H1
agatcactcgtgctttggcatcaactgtttcatgccgtcactttttatcctggcagctgttgcttttcttgcgtttttggttggtttggcattactcttccggacccggaggttctataagcaagttgtgcttagaagattaaaacatcatgcaagatgatggagattgcatttgcctgcatttcaacactaggcaaaggctgaggaaaccagtcttgttttctctggtctgtttggcataaatacagttaat

SEQ ID NO: 77955 - DNA, 253 bp, Glycine max
  Clone ID: 700964821H1
atcagatctgacctcattcacagaacacaaaccacattcgcccccacaatcaaccacccggatcggttacatgtttcgcgagcgcgtgccgttcctcctcgtgggcgtggccatcgccaccgccttcttccagctcctcccatctccatccactgtggcggctcctcacgagtcgttccttgagaccgactcggctctgcagactcggcgggtgctgttggaagggtcgacggcgattcaggagaagacggga

SEQ ID NO: 77956 - DNA, 231 bp, Glycine max
  Clone ID: 700964823H1
cgcaagggaagtcggcaaaacggacccgcaacctcgggaaaaggactggctctgagggctgggcacgggggtcccagtcccgaacccgtcggctgtcggtggactgctcgagctgcttccgcggcgagagcgggtcgtcgcgtgccggtcgggggacggattgggaacgggcccttcggggcctctaccccgggcgtcgaacactcaactcagaactggtacggacaaggg

SEQ ID NO: 77957 - DNA, 256 bp, Glycine max
  Clone ID: 700964824H1
cagcaacagtcacaacaagccttaacgagacagagagtgaagttggtatgagggaagaagacaaggagttgcaacaacaagatcactccatgttcaacatcaagagcttcctctggcatggaggctctgtttgggacgcatggttcagctgtgcttcaaatcaagtggctcaagtgctgttgacactgccctattctttctctcaactgggcatgctatcaggaatcttgcttcagattttctatggaatcttggg

SEQ ID NO: 77958 - DNA, 254 bp, Glycine max
  Clone ID: 700964825H1
agaacataccgaagttactggaccaaatatttgaactttgacctccctattttgcaacgttgcaatctccaggcgtacccaaaatttaaatattattactctacctggcaggttttatttgatcaatttgcatgcttcagtcgattctttattgttctttggcgattcatcctgtaaagcccttcatagatgcatagaatttccgacatatatctttttagaagcttagctaaattgtagtgacattgagatga

SEQ ID NO: 77959 - DNA, 254 bp, Glycine max
  Clone ID: 700964827H1
actccaagcaaggtccacaaagctgttgatgcatgcaagaatgttcttagaggcctgcatagcaacaaaactactgagagggaattggacagggctaaacggacccttcttatgagacatgaagctgaaattaagtcaaatgcctactggttaggattattagctcatttacaagcttcttctgttccaaggaaggacatatcatgtatcaaggatctaacatttctacatgaagttgccactactgaggatat

SEQ ID NO: 77960 - DNA, 162 bp, Glycine max
  Clone ID: 700964829H1
cacatcatctagctagctagctagctagcaaacagcaacgttaaaaaaccaaccacaaccagattggcgtgagcccattgtccgggttcagtgcttatccgaaaactgcgaagattcaatccctgaaacgtacatcaagccttctactgatagaccatccat

SEQ ID NO: 77961 - DNA, 257 bp, Glycine max
  Clone ID: 700964830H1
agaggaggagcgatctgaggtgaggagattaaaagagcaatgctagcacagggattcgaggacgaagagaaatggctcgccgaggggatcgccggcattcagcacaacgcactctcactgcatcgcgcagtggacgataacaatctcagagacgctctcaaatactccgcgcagatgctatccgagcttcgaacttgcaggctctcacctcacaaatactaccaactttatatgagagccttcgatgagctcaggag

SEQ ID NO: 77962 - DNA, 262 bp, Glycine max
  Clone ID: 700964831H1
cagacgaaaccaaaacaaagggtcctaaaaagaaatcccattcaaaaccaaaagacaagatggatcatcttaatgggaagagtgcacatggaaagaaaggcgcagttggtgggaggaaaattgcaagggaattgaatgatttacaaagggaaaatgagtctgtcacagccagcaataatcttactcataaatgcatcattaactcagaaaggaaaaatatcgatatgactgagatggctcatctttgcggtaccaaacagcg

SEQ ID NO: 77963 - DNA, 261 bp, Glycine max
  Clone ID: 700964832H1
cgtccccacaccagaaaccggcacggaacactatgacactgccttggcatatccagtgcagtcaccaggcgtgctaggaaaccaaccagacattgtcatggacagcttggctgtacatggccttggcctagtgcacccaaagaaggttttcaatttctacaacgagctccatgctcacttagcttcttgtggagtacatgtagtgaaggttgatgtgcagaacattactgagacccttggtgcgggacatggtggccgagt

SEQ ID NO: 77964 - DNA, 255 bp, Glycine max
  Clone ID: 700964833H1
atactttggcttggctttctgaattttggtttttcagtgctgagagctgaacaagaagatggggggtggaaatcaagaggcagtcaagcagctgcagaccctgatggaaaatgtggatgatgagcagctgaagaatacattccagattatgcaccacggttatcagacggaaacgttaatacggtttctcaaagctagggactggagtgttgccaaagcgcataaaacgtcaattgattgtttgaactggagggt

SEQ ID NO: 77965 - DNA, 191 bp, Glycine max
  Clone ID: 700964834H1
cggcaccttatcaacatcctttacctcttaatttttgtcatcagttcaaaactactactcttcagaaaaaggttacaaaacccagcaccaagtccaccatctcttccaataatcggaaacctccatcagctgaagaaacagccacttcaccgagccttgtacgacctctcacagaaatatggccctaataa

SEQ ID NO: 77966 - DNA, 177 bp, Glycine max
  Clone ID: 700964835H1
cactggtccattatctatcgttaatggaagtggaagtagcacttccattttccattttgcatttcccagtagagtacgcaaagccaaatccacagggaacacgttcattcaattgcaattatccatattaattaataataattcacaaactgtgcgtggccagcactccaataccct

SEQ ID NO: 77967 - DNA, 251 bp, Glycine max
  Clone ID: 700964837H1
ggacttatttgtacttcattagcttctacttaattactgttttgctgcttttgaacttgattattgcttttgtattggaggcattctttgccgaaatggaacttgagtcatcagaaacttgtgaaggaaatggcaaggaagttgaaggagataaatatcgaaagcgatctactggcacaaaaacacgaagccagagggttgatgctcttcttcatcatatgctgagtgctgaattgtgtcaaaatgagcct

SEQ ID NO: 77968 - DNA, 158 bp, Glycine max
  Clone ID: 700964838H1
gaaattgccaagttcggcgtctatgtcaccgctcatgtacactttcgccgacaatcccagcaacctccgcaagttcatgggacatgaagcaaatcagagagtttgattgggaagtatggtgtggaagcttttgggagcacgccctctctgctcatatt

SEQ ID NO: 77969 - DNA, 251 bp, Glycine max
  Clone ID: 700964839H1
atcaacactaataacagcaaactaaaggtgaagttcgccagaaacaagatgggaaggaaccattttcagcagcaacactgtgctgatgggagcatgtggatggagagtcagggtcagcaacagagctatgccttccaagaagagtcttggagccctgataacaactatggccacaaccacaagcaattcccaggcatgcacatgaacatgaacaacaacaacaacaacaaaaggcttggtgcttttgctgc

SEQ ID NO: 77970 - DNA, 253 bp, Glycine max
  Clone ID: 700964840H1
cagacggcgacaagcatatcttcttccctcatgaagcttcccccaagcgaccacgctgtccattctttgccaccctcaatctctgtcctttggcgacctccatccatccatgaacttctccgacaacctccttcgacattggagtaacacaataagatggaccagcaaaaccacaacaacactccagatggttcaggagaggtgcctttgaagcgtaaacgtggtcgtccacggaaatacccaaagccagatt

SEQ ID NO: 77971 - DNA, 254 bp, Glycine max
  Clone ID: 700964841H1
cgaaagttttgaatctctgtggatgtgttaaagctgcatctgacactgcgttacaggcaattgggcactactgcaatcagttacagtttttgaaccttgggtggtgtgaaaacgtcagtgatgttggagtgatgagtttagcatatggctgccctgatcttagaacacttgacttatgtggttgtgtccttacaacagatgacagtgcaattgtcttggcaaacagatgtcctcatctgaggtcccttgggctg

SEQ ID NO: 77972 - DNA, 241 bp, Glycine max
  Clone ID: 700964843H1
gttttaataggtataggcttgcaaaggtgttgttgattgagccataagtgctttaagtaatgaataccaagacattggtttaccttgccacacaaaaaactaccaccccaggcaaaataatagtaaaaaaaagagaaggcttggagccaagaaaataaacacaaagcacaagtcatggaaagaataatggttggaagtgcaagaaaggttgctttcaacctgttggtcactttcggcattg

SEQ ID NO: 77973 - DNA, 252 bp, Glycine max
  Clone ID: 700964844H1
ttttcttgaaagatgatggcaccttaaagccattggccatcgaattaagtttgccacatcctaggggagatgagtttggtgccgttagtagagtcgtcttgcccgcagaccaaggtgctgaaagtacaatttggctaattgccaaggcatatgttgttgtcaatgactcctgctatcatcaactcatgagccactggttaaacactcatgctgtgattgaaccacttgtcatagcaacaaacaggcatctta

SEQ ID NO: 77974 - DNA, 257 bp, Glycine max
  Clone ID: 700964847H1
cagctgcgatcctctgcttcgatggccaccgtgcaactccaatccccaacccttgttcgctcctcagcacttccttccgccaccttctcccctccgatcgcagtctccggccgcagcaactccgccgcgctgccgcgctactccggcctccggctccgacccgccgctgagaccagtttcccgactcacgccagctcgagaaccgcttctcgcggcggacgtgtcaagtgcgacgcacgagacaccgctgttgaagt

SEQ ID NO: 77975 - DNA, 257 bp, Glycine max
  Clone ID: 700964848H1
atgaggtgtgcatgctttttaaatggtagagaggaagtttgtagtgtgggcagatgataggggatatgaattacggagaatctgaaactttgataatgttatgacagaagtgatgaacataataaggtatttaatgataatgacagctttgtgactttagttaagtcgtcgtttaagagacttcaatagccatttccgtcggtccatcttaaaccaaagaaaggtgcctttgacggagtttcttttgctatcataaa

SEQ ID NO: 77976 - DNA, 254 bp, Glycine max
  Clone ID: 700964849H1
cgtagtgtgcaaaagaaaactcaagctcccagattctgttccaatgcatcccgtaccaatttcccccatcaaagttgggcacattgatgatgtccaagagctaagaaaaaccaagccaaggacaattcctcaaagatttgtacgagacttgacagaaagaccaacactcactacacctcttcccccaccacatagtgacatgccagtcattgatttctctaagcttagcaaagggaacaaagaggaagtcctca

SEQ ID NO: 77977 - DNA, 248 bp, Glycine max
  Clone ID: 700964851H1
gaagaaatcactgtgtgtgattcaattgcatcggtttcttcaattccagcaccggtgcgtgcatctgatttatataaccttgtttgttcactcttatttttatgttatggctatttcatatttgaggtcagcatcataagcagttgttgtttcggaaacacaagatgaattctggtgggtacgctgttgaggttacgggtctctcgccaaaagccacggacaaggatgttcgtgacttctttgcttta

SEQ ID NO: 77978 - DNA, 250 bp, Glycine max
  Clone ID: 700964852H1
atgacattgaaatcttgaagatggttcaaaatggcgaaggaaaatgcaagaggaaaaccttatctgggattgaagagaaaacaatcattcaagatgaaatagcatgccaaaaggaacacgatcctttcaacaaagaatctgtgcaactcggcgctgttccagaagtcgcctttgtcccagtgattgacaagcaagttaatgcatcttgggaaaaagcggtacaaaataatcaacttgcagcttctaaaga

SEQ ID NO: 77979 - DNA, 247 bp, Glycine max
  Clone ID: 700964853H1
attggttgcagtgttgggcaaccatgactacaggggtgatgttgaagctcaattgaatccaatccttcagaaaattgatcctagatggatctgccaaagatcatttattgttgatactggtaaggtgacttctcggaatctcaatagaggttttatcctgaatagtaagttaagtagccttctaatcttaaaactccccagaaattgctgagttcttcttcattgattcaacaccttttgtggacaa

SEQ ID NO: 77980 - DNA, 248 bp, Glycine max
  Clone ID: 700964854H1
accacttttatatctatcctcttcctcctcttatctctcctcaccccgaccctcatttcctcttcccctgtccaagaccctgaatttgtggtccaagaagttcacaggaaaatcaatgcttctgtagctagaaggaatttggggtacttgtactgcgcaacagggaaccccattgatgattgctggaggtgcgacccaaactgggagaagaaccgccagaggctagcggattgtgcgattggtttcgg

SEQ ID NO: 77981 - DNA, 248 bp, Glycine max
  Clone ID: 700964855H1
agattcagtaactaatcattgaaagtagacttatgcatcataggctcactatataagaccatgcacccgagtcctagaatgcacagaagcacaacattgatcactataacataataactaatggagctggtgacgatgtcaagaacaagagtggtcctcatgaccctcaccctggtggtggtgacagttctgaacaacacagagagtgcagaaagtgctcgcactttctatgtgttcggggactctct

SEQ ID NO: 77982 - DNA, 251 bp, Glycine max
  Clone ID: 700964856H1
accaattctaattcctaactaatcgatttctctgcttctactcagtagttcgttcaattcaccggtttgttcaactcaaatcgtgcaatccttctttcaagctcgcgatttcctcttctggaattctcaagatcttgataatggcaaccactgcctgtttcatcactgttagcagaaatgacattcctacacatgaagctgaagttggagtagctgctaaaagggaagatgctgctcaactgcatcaattt

SEQ ID NO: 77983 - DNA, 247 bp, Glycine max
  Clone ID: 700964858H1
aaaggatcgaaatggaaatagacgggaatagagtggtaatcctaggaggtggcgttgcgggatccgtcgtcgctaaatctcttcaattccatgcccatgtcacactcgttgatccgaaggaatattttgagattacatgggcgagtttgaggtcaatggttgagccatcttttgcagagaggtcagtgatcaatcacagagatcactttaccaatggcgacatcgttacgtccaatgccgtcaatgt

SEQ ID NO: 77984 - DNA, 250 bp, Glycine max
  Clone ID: 700964859H1
tttgtacctcagttccaggttaacaccaaacaacacatatagtgcagattcataagcttccaaccatggaggatccaaatcaagctccagaagcgtcttctcagaagaaaatgggaagagggaagattgaaatcaaacggatcgagaacaccaccaataggcaagtcaccttctgcaagcgccgcaacggtttgctgaaaaaagcttatgaattatcagttctgtgtgatgctgaagttgcccttgttgt

SEQ ID NO: 77985 - DNA, 250 bp, Glycine max
  Clone ID: 700964860H1
tcaagtttcaagcacttgttcgtggaggaacagttagacactctgacgttggatctgaaatccaagagaagtgcaacatattgaaccctctggatggcaagcttgtcaagccaattgctatatccatgaaaattaccaagctgtctgcaaatgctttcattcgtaagcttctcacttcatcaaccagaacaatggtgctgcagctgcaacatgttcctggtgatccaaattctgtcctaagttggttgga

SEQ ID NO: 77986 - DNA, 252 bp, Glycine max
  Clone ID: 700964862H1
gacacaacatatcttgagtactgagtttccgaagcgcttacgacgatcaaattcacgttttgttccgaatgcagcattgtcgttgaacttcaggatgtccagtccagcttcaaaagcctcttggacacctgaattccacagaatatttgttgatttatgccttggagaaatgctgaagaatgagcccgggtcaatgcgaattactaaggctggttggaggaacattgttggattcttttatgcgaagacagg

SEQ ID NO: 77987 - DNA, 254 bp, Glycine max
  Clone ID: 700964863H1
ttttcacttccaaccagagaaaaactggatgaacgatcctaacggtcctatgtactacaagggatggtatcacttcttctaccaatacaacccgaacggtgcagtttggggtgacatagtttggagacacgcagtgtcaagggacatgatccactggcttcaccttccactagcaatggtggcagatcaatggtatgacatgcaaggtgtgtggacaggctcagccacgatcttaccaaacggtgaaatcatca

SEQ ID NO: 77988 - DNA, 152 bp, Glycine max
  Clone ID: 700964866H1
aaattgcagaaatcctacgggttgtagtttgtagttctccgtggtaacggatattttctgttgaattcaagctttttgagcacattgaacaatttgttggctgggttgtagccctttttggcaactaaataccaacggagctgaccattttt

SEQ ID NO: 77989 - DNA, 247 bp, Glycine max
  Clone ID: 700964867H1
agtggccgcaacctcgccgcgcaggaactgtggtccgagcttgaccctttctctgacctccttggcttcgataccaccaccaccacaaccaaccaaccaccccttccagacaaaaaagtggtgtcatcatgtgagaagaagaagaagaaaagtgtgagtgcagaaaagaagagtggtgggcgagctcggaagaacgtgtacagaggaatcaggcaaaggccgtggggcaagtgggccgcggaaataa

SEQ ID NO: 77990 - DNA, 249 bp, Glycine max
  Clone ID: 700964869H1
cgaggaaatgaaataattactctaattttgtaattcattgtttggttctgcttcacaggaatggtagatttgaggtgaaaaggttccacattggtcaggttcagatctcacaatggggaagtcaccaggaaaatggatcaaaactgtactgtttgggaaaaagtcatccaaatcaaatacttcaaaaggcagagagaagcttgttaatcaagaagaaggagttgtagttacctccaaggtgctagaaac

SEQ ID NO: 77991 - DNA, 246 bp, Glycine max
  Clone ID: 700964870H1
ctcgtgcttcccgaggttgttgcttcgtaatttgtccgtcaagggaggaggcggataaggccgtcaatgcgtgtcacaataaaaggacgttacccggggcatctagtccattacaagtgaagtatgcagatggggacttggaaagattagaacacaaactcttcattggcatgcttccaaagaatgtttctgaagttgaaatatctgctcttttctccaagtatggaactataaaggatttacaaa

SEQ ID NO: 77992 - DNA, 247 bp, Glycine max
  Clone ID: 700964872H1
ttccttctctccgtgcttccccgcacgtgccaacagtgaaaaacaatggagtcagatctcgagcaacagccgcaggtgaattcctcgggtttaactcggtaccgatcggcgccgagttcttatttctcgaacatcattgaccgcgagttctacgagcacgtcttcaaccgtccctcgagtcccgaaacggagcgagtgttctcacgcttcatgaacagcttaaacagtgaagaagaagattcgctcc

SEQ ID NO: 77993 - DNA, 249 bp, Glycine max
  Clone ID: 700964873H1
cgctctgttggttgtattgttcttaattttgcttccattggtcttgtaccgtcgcgtagagtcgttgaagttcagttctgcaatatcaactcttcttgctgtggcatttgttacatatgtaccgtgttagcaacagttgctattgttgaaggaagaacacagtcccctagactgattccttgtttggaccaacatacctctttttttgatctgttcactgcagtgccggtcgcagtcacagcctacaca

SEQ ID NO: 77994 - DNA, 247 bp, Glycine max
  Clone ID: 700964874H1
acgatcctcgatggcggcggcgtcgcggaggctccgggacctgcagtccgaggccgggaacaagatctgcgttgactgctcccagaagaacccgcagtgggcctccgtctcctacggcgtcttcatgtgcctcgaatgctccggcaagcaccgtggcctcggcgtccacatctccttcgtccgatcggtcaccatggactcctggtccgacatccagatcaagaaaatggaagccggcggcaacgac

SEQ ID NO: 77995 - DNA, 247 bp, Glycine max
  Clone ID: 700964876H1
tgaacatcaatggactcgcaagacaatcactcatcaatgcaggtggcattattgagcaatcatttctgcctgggccatttgctgtggagatgtcttcggcagtttacaaggggtgggttttcactgatcaagcccttcctgcggatcttatcaagagaggaatggcagtggaggatccatcctctccctatggccttcgccttgtgacagatgactacccttatgctgttgatggactagagatatg

SEQ ID NO: 77996 - DNA, 246 bp, Glycine max
  Clone ID: 700964877H1
cggttgctttgcttgctatcttgttggaggactttgtgttcaagagaagatggtaactagaattgtggatcttcgttcagacacagttacaaagccaactgaagcaatgagagctgctatggcaagtgctgaagttgatgacgatgttctaggctatgatccaactgcttttcgcttagaaacagagatggcaaagacaatgggcaaagaagctgctctttttgttccatctggcactatggggaa

SEQ ID NO: 77997 - DNA, 251 bp, Glycine max
  Clone ID: 700964878H1
caagagacctacactagttatcttaaagaaccaaataaaacatttgaggttttatggcacagccaaattccaacatgaaggtttggttcttttgctttcttcttcttagcatgactgcaatcaaccatggcaaactagacgataaaaatatacaaaaagaaatgcatgggccgagcgagcataaactttccgatcagaataatgacaaacctgttgctgccaacccctacaatcgtggctgctccataata

SEQ ID NO: 77998 - DNA, 250 bp, Glycine max
  Clone ID: 700964879H1
atcttgaaagtgctatagagcagaacatggtggtgaaacaaaatttacgtggtttgccgttgtatgttggtaagaatgataaactttggaaatgtgtaaatcctttaggtggtactcgtaagcagcattcaaaagaaacatgggatcaaattggaaagttttcaacaactcctgctggaagatcagcactaatgggtacacagtccaagtatgaagcaggcattgtgattaagagtatgtgctttaaaga

SEQ ID NO: 77999 - DNA, 192 bp, Glycine max
  Clone ID: 700964882H1
actcatatgattcttctttaaaattacactacaacaatgtgcaaaagacaaggcgatttgcgtaattgtcaaccaccacaccaaccaagccgcgtcgttctttttagtcactgataagaacaaacttccaccgtccgcggccacagcaacgctgtcttccgccgtcactctcgccgctaaacccctctcact

SEQ ID NO: 78000 - DNA, 145 bp, Glycine max
  Clone ID: 700964884H1
gagaagaagggggttaccgtgtttgtttcttcaccgaacgaacaagcatgtggtagcttaaagccctagtttcaatgcgaacatcctataatcttgttcttcttcgctctcgcttccgcagctctcacaatttccacgcataccg

SEQ ID NO: 78001 - DNA, 247 bp, Glycine max
  Clone ID: 700964885H1
ggttgatgaacattttcagttgttcagtttagtttgattcttttccatcatttgttagtatctttatctgatatgattctgcaacagaaaccacgagaacattccgcccgaaaaaaagtactccttctggaagtaagggagctcaaccttagaaaacacattgatgccacgttgggtagtggaaatctgagggaagcagtaaagctacctcctggggacgacttaaatgagtggctagctgtcaaca

SEQ ID NO: 78002 - DNA, 244 bp, Glycine max
  Clone ID: 700964886H1
gtgttgctaagccctggtcttctgtttcaattgccagggaagagcaaagtggtggagtttgggaacatgcaaaccagggcagtgtctatcttggtccacacaatcatcttctttggtctcattaccatctttcttgttgctattggctaaatgcttggaaactggcgagccagtggccattaagaaggttttactggacaaaagatataagaatcgtgagctacagttaatgcacttgatggat

SEQ ID NO: 78003 - DNA, 244 bp, Glycine max
  Clone ID: 700964888H1
gttgctcaaccaaaaatacatagagtggccaagctttagtagtacgctgaggactgcgattctgactcttatacttgttgcaatgcttattgttgcattatcatctgttgattcggctctcagctatctattggctttagctcttcggaaaagaccataaccgtgtggtgtgcctatgtcaccatgtgtaagcagttgatttctgatgcttgtaatttgtttagctctatcctcatatacgtgt

SEQ ID NO: 78004 - DNA, 244 bp, Glycine max
  Clone ID: 700964890H1
acgccattgaattcttcttccatttctcttttttctgcatacccatttcgtttttcttcccaaatggccctttcttgctccaaagttttaagcttttatctctcgcccgttgtgggtggtggtgatgttccgaaaaagctcactttttcttcttttttgggtctttctaagggtgttggtggaagcaggagctcgagggtgtgtgctgcttcaaatgcacccgcaccactcgctggggtcatat

SEQ ID NO: 78005 - DNA, 246 bp, Glycine max
  Clone ID: 700964891H1
atcaatttttctctcaaccggcccaatttagcataagcccagcatggccaccgcaaccagcagcagccacctcgtccttcatggggacgcgcctcctggaggcccactccggggcggggcgggtgcaggcccggttcgggtttggcaagaagaaagccgccgccccgaagaaagtttccagggggtcgggctctagctccgataggcccctgtggtatccgggcgccaaggcgcccgagtacctgg

SEQ ID NO: 78006 - DNA, 246 bp, Glycine max
  Clone ID: 700964892H1
gaagaaacaacctcaaaatccctttcttgtgtcgattagattactttcacaccagagtcgttcgagtacttcaccttctttctctctaagcgcaaaacctcgtactgtttttggcggttaaggatgtcggggaaaggagcgaaggggttgatcacaggcaaaacctccgccgccaacaaagacaaggacaagaagaaacccatctcgcgttcttctcgtgccggccttcagttcccagttggtcgt

SEQ ID NO: 78007 - DNA, 247 bp, Glycine max
  Clone ID: 700964893H1
aggatattgtaggctagcaaggctgaactaatcaccaacatgtcccattcactttcaagtactaatgtgcaggaacaggaaggaatgcagaacccatttgaattcagtgaagacaagatcctggatgatgtttacagaacccatttcgattgttttgagaagtgcgatgtgacatctctgcaaacggttgcttcaaatgttatcaaccactcgatcgatatctcagagaaggtcattagtaagggtg

SEQ ID NO: 78008 - DNA, 248 bp, Glycine max
  Clone ID: 700964894H1
agatcctctgtactctcgaagctttcatcgttcaacatattctcaccatctcagtcatgggcctgctatcttgttttaggtctaccgtcctgagaaaatgttccaaaggaagctctggcatgtcaagattcctgtatacgaacaattttcaacgaaacttgatttcgtctggtggcaatgaatcgtattatgggtattttaacaggagatcatacacttcactttatatgggaactggaactgtgggt

SEQ ID NO: 78009 - DNA, 249 bp, Glycine max
  Clone ID: 700964895H1
attaattgcaagaatggcacttcgttgcttggtgatgtccctttctgttctcttcactcttggtcttgcgagagaaagccatgccagagacgaagatttttggcatgctgtttggccaaacactcccattccaagttcattgcgagatcttctaaagcctggccctgcaagtgttgaaatcgatgatcaacctatgcaaattgaagaaacacagtacccgaaaaccttcttctataaagaagaacttca

SEQ ID NO: 78010 - DNA, 68 bp, Glycine max
  Clone ID: 700964896H1
cacacactctcatagctgtagcggcgacactaagatcggagaaagaatggcggaaacgacgtccgttg

SEQ ID NO: 78011 - DNA, 270 bp, Glycine max
  Clone ID: 700964901H1
gagagtgagagagtgagtgagatagagagagacgcttcgcaaatctcaatcgaatctcagaaaaatgagagaaatcatcagcattcacataggtcaggccgggatccaggtcggaaactcctgctgggaactctactgcctcgaacatggcatccagcccgacggcatgatgccttctgactccaccttcggtgtagcccacgacgccttcaacaccttcttcagcgaaaccggatctggcaagcacgtcccccgtgctgtcttcgtcga

SEQ ID NO: 78012 - DNA, 269 bp, Glycine max
  Clone ID: 700964902H1
ctcactttctctatcttcaaccagccaaaaaaaaaaaaaaaaaccccaaaaccaaaccctaattccccgaaatttgattcctttcaggaaatttctcccaaaatccaggcctcctgcagacccataccgttttccttctcctttcaaatcctcggccacaaattttgggatctttctgggcctccgaatcatggaaaaggaagagaaggaaccccaggttcagaaaagtgggggcgaaagcgaagacgctgaacccatagggctcgttc

SEQ ID NO: 78013 - DNA, 271 bp, Glycine max
  Clone ID: 700964903H1
atcctctcctctcaaaccaattcccacttttcctctcttcgcctcccctcaggaatcaatgtccataatcaccccacgccgtcatcctcaaacgacacccttccgctagcaaaacgactgcggtttggtcgtcgtcttccccgaggcatgctcttgggatattattattcatcatcgtaatcacaccctacagagacgttgactttgtgctttttctgggaggggaacaaatggaccaagctcttctggacgacataattaatcgccttct

SEQ ID NO: 78014 - DNA, 91 bp, Glycine max
  Clone ID: 700964904H1
gttaacagttcatcactgtttgatgattgccagctctggaactgtagatgaggggccagtttgatatcaattggtgaatgcaggtttgaat

SEQ ID NO: 78015 - DNA, 266 bp, Glycine max
  Clone ID: 700964906H1
cgaacctttaatgatgtttagcacagatggcactggaacccttacgtcaccatctaaccagttgtgggatgataaggatcttgaattgcaggctgatgtggatcgctttgtggaggatggatctctagatgaaaatgttgagtcttttttgtcccatgatgacacggaccctagagatactgttggccgttgtatggatgtaagcaaaggcttcacattttctgatgtaaattctgtacgggcaagcacaagcaaagtttcctgtt

SEQ ID NO: 78016 - DNA, 265 bp, Glycine max
  Clone ID: 700964908H1
aaaagtagctctagtatatggtcaaatgaatgaaccgcccggagctcgtatgagagttggtttaactgccctgactatggcggaatattttcgagatgtcaatgaacaagatgtacttctatttatcgacaatatctttcgcttcgtccaagcaggatctgaagtatctgccttattgggtcgaatgccttctgctgtgggttatcaacccactcttagtactgaaatgggttctttacaagaaagaatcacttctaccaaagag

SEQ ID NO: 78017 - DNA, 270 bp, Glycine max
  Clone ID: 700964909H1
ggaatttgctagggagactttggcaggtgtcaacccatatagcatccaattggttaaggaatggcctttaacaagtaaactagacccgcaaatctatggtccacaggaatcaacaataactagggaagtcattgagccacaaattatcacttatggaacaattgaagaggcccttaaagaaaagaagttgttcatgctggattaccatgatttattcttaccatatgtaagcaaagtgagaaaaattaagggcaccacattatatggatc

SEQ ID NO: 78018 - DNA, 270 bp, Glycine max
  Clone ID: 700964910H1
aaggaaaccccaacccaataatcatactcgtacttgggatgatattggatcgtctcaacctcaattttctacaatattaaataaacaatcaccttcattttttttttctcctcttcatttctgatctcatccccatggatccctttgatttaatacgcgaagggtttggttgaggctgactggacatgcgctgttactacttttaaagtctgtttatgctgtagttattttgtccatattttagttaataatgaacttatccaagaaagg

SEQ ID NO: 78019 - DNA, 271 bp, Glycine max
  Clone ID: 700964912H1
agtcgttgcacaagtgagagaggttgaaggcggcgtgagaatgttggacatcaacctattcagagaggagaagggccacaaccctgaactcatacgcgaatcccaacgccgtcgtttcgccagcgtcgaaatcgtcgacgaggtcatcaatctcgacaaagaatggcgaaaacgtcaattcgagttggaaaatctccgcaaggaattcaacaagatcaacaaggaagtctccaaactcaagcgtgctggggaggatgcttctaagttcatt

SEQ ID NO: 78020 - DNA, 276 bp, Glycine max
  Clone ID: 700964914H1
atcagtgcgagtactgactttgtgttattagatgagacaactttaatcaatatcattaagcatccagatctgacagtaacgtctgaagagaaagtccttaatgcaattctaatgtttggcatgaatgcaaaacagttgtttgggtgggaagtggtggatcagttaatggaaaattcaaaaccagaactcctttttggtgagaggcttcagttaatctatgacttgttgccatttgtgcgatttccactactacaatattccttacttgagaagttg

SEQ ID NO: 78021 - DNA, 276 bp, Glycine max
  Clone ID: 700964915H1
tgaaattgcctctttcaagaagcatctgagtgcttattatttgtaatatatatagtcactcaagcttctaggatttgtgccagctacatgaaaatgggaagcaacttcaggtttttgagtctttgcctcttggcattgattgcatcaacccatgctcaacttcagcttggtttttatgccaagagttgcccaaacgctgagcaaatcgttttgaaatttgtccatgaccatatccacaatgctccatcactagcagctgcattgataagaatgcac

SEQ ID NO: 78022 - DNA, 279 bp, Glycine max
  Clone ID: 700964916H1
aaaaaatgaatttgaagacttgccattttcttcggaagttctagctgacacttggcacgtgcaaatgggtcactctaagtgggttgatcttgctatcatgtttgccatgattgttctgtatcgagttctattcttggccatcagtaagtgcaaggagaaatcaaaacaagttagtgttggcattaaacccgaaactaaaattttctccagaatcaacatcagtgaactccaaatgaggggaattgatgatcataatgctgtctaagcagtagttcgact

SEQ ID NO: 78023 - DNA, 270 bp, Glycine max
  Clone ID: 700964917H1
caaagcaagaaaaaatggggtccgcaaaatttgctttgatattaacaattgttattatctcaatgtgtagcatttccttggcacaaaattcgcccaaagatttccttgacgcgcacaatgcagctcgtgcagaggttggtgttgagccactcgcatgggacgacaccgtcgcagcctacgctcagcaatatgcggactcgaggatcaaagagtgccaagtagtgcactctcaggggccttatggggagaacctggtggccagtcccggcg

SEQ ID NO: 78024 - DNA, 265 bp, Glycine max
  Clone ID: 700964921H1
caaggagtaggaggcgaagagcagcaaggtcatgtcggttgaaatcgaggatatccgcgatgctgaagagtccaaagctgttgatgagttccgtcaagctcttgtcttggacgagctactccctgagaagcacgatgattatcacatgttgctcagattcttgaaggccaggaaatttgaacttgagaaatctaagcaaatgtggtctgacatgcttcaatggaggaaggaatttggtgctgacaccatcagtgaggattttgaa

SEQ ID NO: 78025 - DNA, 267 bp, Glycine max
  Clone ID: 700964922H1
caaaaacatttccctgctacttcatcttcttcttcttcttcttcatcaccggtggttctgttcattcttccttgcaccttcttctttgaagatcgaaattgtgtttttgaaaaaatgggagttccagagaaagaccctctttcccaattgagtttgcctcctggttttcggttttaccccaccgacgaggagctcctcgttcagtatctatgccgcaaggtcgctggccaccatttctctcttccaatcattgctgaaattgatttg

SEQ ID NO: 78026 - DNA, 264 bp, Glycine max
  Clone ID: 700964923H1
tgaatattagtggttaaggttgttggaggagctctaacaagagatatggagacacaaaattggttcgagagattgaagcctttcgcagctgtggtatcaatacagtttggatatgcagctatggatgttctatccaaggctgcaatgaacaaagggatgagcaattatgtgttcgtcgtttatcgccatgctgttgcattctttgttatggcccctttggcatggttttctgacaagacagtaaggccaaagatgacattctca

SEQ ID NO: 78027 - DNA, 263 bp, Glycine max
  Clone ID: 700964924H1
tggagttcatgctttcatactgctttctagtactactttctgctgttggtgtaaaggcttgcatgtaggccacatggcaaacaatgtgacaatcatatgagatcaatttcacatgggcttgtttgttgtggagattttattttggataaataaaaaataaaggagaattgagggaaaaaaaaaaaaaaaaaaaaaaaaaaaaaaaaaaaaaaaaaaaaaaaaaaaagggggggccccccaataaaaaccccccgccccccggg

SEQ ID NO: 78028 - DNA, 224 bp, Glycine max
  Clone ID: 700964925H1
gtccatttccgcgaggagagagaaagtgcaagactcggcatagagaggtgagcgtttgtttagtttgtgatgtggtagctttgaagatctagttcactgttgcacatatgagtgtgtaactaatcgaagacgagggacgagtacggatgacgtcactcagtagggaattggtgttcttgatcttgcagtctctcgatgaggagaagttcaaggagactgtgcac

SEQ ID NO: 78029 - DNA, 267 bp, Glycine max
  Clone ID: 700964926H1
cagaaatttaagtgaggagctagagaatgatgatgaagtctgctatgtgtgcagtggtggttgtagcacttcttcttctggcggaggtggggcccatggctgaggctgtgacatgcaccccaacagagttgagtccgtgtcttccagcaatcacttccggtgctaaaccttccaatgcttgttgcacgaagctgaagcagcaaaaaccatgcttatgtggctacctcaaaaacgctagcttgaagcagtatgttaactctcctaatg

SEQ ID NO: 78030 - DNA, 272 bp, Glycine max
  Clone ID: 700964928H1
ggtgtttttaggctttgcttttgctttggggctttcattaatggtcttattttttttaataaattgaccctttcttctgatattcaggcggaagtggtgctcttggtgcagggctcagtaaattcagcactgctgctgccattgaagaaccaattaaaccaccacttaaagttgaacacacccagctcttaattgatggaaaatttgttgatgctgctactggcaaaacttttccaacgttggaccccaggacaggagatgtgatttctcat

SEQ ID NO: 78031 - DNA, 274 bp, Glycine max
  Clone ID: 700964929H1
gtgcctcaccgcacggatacttgctgaaccgcgtcgccgagtacgccaccgccgcggctgctgctaccactcctccctctcctcctcctccggggaagaaggagctcggcggcggcgggaagatcaccgatgaattcaccgggcagggcgcgatcgggcaggtctgccaggtcattggtgccgtcgtcgatgtcagattcgacgagggtttgcctccgatcatgaccgcgctggaggttctggatcactcgtcgaggcttgtgttggaggtggc

SEQ ID NO: 78032 - DNA, 275 bp, Glycine max
  Clone ID: 700964930H1
tagccatagaatttcacattttatcttttgcattgagcaactaactcactcgcgccatggctgctaccatcatcaccacatgcaagctctcactgcttttgagtcttctctcagtttcacttttgctgggtgtgaggtctgatacccttcagaatgtaggcgcaattccccccacatgcaagcgcatagagtgtcccagctatgatgtcattcacgtaggcaacggctacgaaatccgtcgctataattcacccgtttggatttcaaacagcccc

SEQ ID NO: 78033 - DNA, 277 bp, Glycine max
  Clone ID: 700964931H1
acggaaaagagcatttacctatttatataacagatcgtatggtaggccataaattaggagaattttcacctactctaaatttccgaggacatgcgaaaaatgataatagatctcgtcgttaacgttaattttaacataaatttttaaatcgtaatttataactaaatattacaaaatggaattcttattaaaatgaaattcaaatcatttcttttataaaaaagaaaaaaattctttaattaaatatttaatgaaattaaatatttaaattaataaa

SEQ ID NO: 78034 - DNA, 279 bp, Glycine max
  Clone ID: 700964932H1
gaaaatggcttagaataatgttttggtggcattgttggtgaaggactcagagtaagagttattgaagccgcagtgagtcagtgatctttcgctctagcctttgtcctcaaacactgaccgtggagtagtgaagaggcaagaaattgaaggggatgttgatgatgagaaaaagactagcatgctgcacaagggaaaggaaatttagcatcgatcatgatgagcaagagaggattatgacatataatggccttgagagttgcatgctgaacaaccagtctt

SEQ ID NO: 78035 - DNA, 267 bp, Glycine max
  Clone ID: 700964933H1
ctcaaatactcaactcattagcccttatcttgcccttattccacttcatgattctgatcctaaaactagggagaaaactcaagagaactgaattgtctctaaacataccccgaggaccatggaaactgcctattataggaaatttacaccagcttgttacatcgacaccacaccgaaaattaagagacctggccaaaatatacggacccatgatgcatctccaacttggggagatcttcacaatcgttgtttcctcagcagagtatg

SEQ ID NO: 78036 - DNA, 264 bp, Glycine max
  Clone ID: 700964934H1
ctcactacaacgagccatgggtgtccaaaacaagggagctcctcatagagagctccaaagtttgtctcttcgccatcttcttcgtggcaggaaaattctaattgtagacgacaatggtgtgaaccgtgcagtagcagctggtgcattgaaaaagtatggagcagatgtggtttgtgttagcagtggaaaagatgccatctcttccttgaagccaccccatcagtttgatgcctgtttcatggatattcaaatgccagagatgga

SEQ ID NO: 78037 - DNA, 261 bp, Glycine max
  Clone ID: 700964935H1
cccaattttctagggttttattcattttccgatggcttctgcagatgttgagtaccgttgctttgtcggtgggctcgcttgggccactgacgaccatgccctcgagagagccttctctcagtacggcgaaatcgttgaaacgaaggtctgtttgttgcaggcatcacatctgatctcacacgattcggattcggaattttctcgatcccgtactgatctgtgatctctgatctgtttgcgttacttgatcttatgatactt

SEQ ID NO: 78038 - DNA, 263 bp, Glycine max
  Clone ID: 700964936H1
gcaaaaagtcatggtgacagcataagtgttgagacttgtcctcattacttagctttcacgtctgaagagataccaaatggggatactcgttttaagtgttccccacccattcgtgatgcatacaacaaagacaaattatgggaggctgtattagagggacacattgacctattaagtactgatcattcaccaactgtgcctgaactcaagcttatggaggagggtgacttcttaaaagcttgggggggcatatcatctttgca

SEQ ID NO: 78039 - DNA, 261 bp, Glycine max
  Clone ID: 700964937H1
ccgcgttgccattgctgaagctggtgcaatacctctccttgtcagtctcttgtctgtgcctgactcccgcactcaagaacatgctgtgacagcgctcctgaatctttccatatacgaaaataacaaaggaagtattgtttcttcaggagcagttccaggtatagttcatgtgctgaagaagggaagcatggaagctcgggaaaatgcagctgcaacacttttcagcctttcagttatagatgaaaacaaggttacaattgg

SEQ ID NO: 78040 - DNA, 260 bp, Glycine max
  Clone ID: 700964938H1
ggcctgcatatgctgtggagtatgattatttacctgctcatcaatgtgctaggtctctaatgacaaagaaaatacaaggattgttcttctctggtcagataaatggaactacaggctatgaagaagctgcggcccagggtattatttctggtatcaatgctgctagacatgcagacggtaagccagttattgttcttgagagggagagcagttatataggaacattaattgatgatctagtaaccaaggacctgcgagag

SEQ ID NO: 78041 - DNA, 257 bp, Glycine max
  Clone ID: 700964939H1
gttgcattatcacaaacacctcgtccctcacaatgcatctagcaatggcggccaacgctgtcgtttcaccgtcgccgttccgacctcagccctttctccggtcatccttctccggcgtctccgtcaagctcactccccaatccataacgctttcacgctccaagcccctcaccgtcttcgccgccaccaagaaggccgtcgccgtcctcaaggggacctccgccgtcgaaggcgtcgccactctcatccaagaagac

SEQ ID NO: 78042 - DNA, 265 bp, Glycine max
  Clone ID: 700964941H1
tgaaattgcgcaagacttcaagaccgatttgaggttccagagtcacgctgttcttgcgcttcaggaagctgcggaggcttacttggtgggtttgtttgaggacaccaacttgtgtgcgattcacgccaagagggtgaccatcatgccaaaggacattcaactcgcacgccgcatccgtggagaacgtgcttaggctaataataagagtaataacgtagttgctgctgctttttttcgttttgcaatacatttcttgttttagggt

SEQ ID NO: 78043 - DNA, 266 bp, Glycine max
  Clone ID: 700964942H1
cttatctcacccttctttgactgttctcccacaccacacccatgatccctcctcctgctccttattctcctctttcacgcggcggaagccaacggacagtggcagctcctccacaaaaacatcggcactgtcgccatgcacatgcagcttctccacaacgaccgcgtcatcatcttcgaccgcaccgacttcggactctccaacctaaccctccccgacggaagatgccgcaacaacccaaacgagttggtcgtcaaacgcgactg

SEQ ID NO: 78044 - DNA, 266 bp, Glycine max
  Clone ID: 700964943H1
ctagtaagctcttttaaagttctggcccgaaccctttctttcgtcacaatcacaacttggtaaaggtactccgtgcaagaaagatgaagctcgagttcgcaaatgtgctacttctgtgccttgtccttagctcttctttcttggaaatctcaatggctggttctcctttctgtgactcaaagtgcgcgcagaggtgtgccaaagctggggttcaggacagatgcttgaggttttgcgggatctgctgcgagaagtgcaactgtgtc

SEQ ID NO: 78045 - DNA, 100 bp, Glycine max
  Clone ID: 700964944H1
cacgcacacgcacacttgtcattctcaaaacacgcccaaattcgaatcaaattagggttagggtttccaactcccctcgaattatccctgtaatgcagtt

SEQ ID NO: 78046 - DNA, 270 bp, Glycine max
  Clone ID: 700964945H1
aaccaatctattcaaattttgcaaccttttcacaattcaaacataggaaccttggaattttgctgtttttttttatcaatgtctcataccttgcaattttcatttcttttcaagtgcattcaattctccaatgaaggtagagaagatgaacagagttaggcctcgtggctttcaaattctatgctcttctgagcattccagtttcaaagatgaagatgatgctgaaaatggagggtctgatacttctttgtttggttgttttgttttgct

SEQ ID NO: 78047 - DNA, 270 bp, Glycine max
  Clone ID: 700964946H1
cttcagtcaatgtctctgtatccatatttcaggttggtaaaaacgctgcaataatattctattttcaaagggaaacccaaaaactgaagcgcgaggaagctaaaagtagcaacgagggatgagagaacaagaggattggaggattacgacagcgctgttaacgttgttgttggtgtttgtttcttcttttccggcgttgagctacggagttgttcctcctcgtactctgctcaataagctgtctcagggcagttatctcaccactcagga

SEQ ID NO: 78048 - DNA, 271 bp, Glycine max
  Clone ID: 700964947H1
gtgggttagccgtggtagtcaacgcagacctaatagcagaagcactccattcaggatgtgcattcttcaacagagccaccaccccggaagcatgagggcaggccatcgacgttcccgacatcaaattgtattcagtatttaaaaccacatttgggccaattcgggccgcgggcacatccggaatccaagcggccaaaatggacgagccaggggccacgacgtcgggcttcaatacccacgggcactccgaagacgggcctctggaactgta

SEQ ID NO: 78049 - DNA, 273 bp, Glycine max
  Clone ID: 700964948H1
gtggtgccttatcgctgtggttttcatcgtcttccttctcttatatttcttttgtttttttgccttcgccgaacgccgaaacaatggccggcaaaggagagggtcctgctatcggaatcgatctcggaaccacctactcttgtgtcggtgtgtggcaacatgaccgagttgaaatcatcgccaacgaccaagggatcagaacgacgccgtcttacgtcggcttcactgataccgagcgtctcatcggtgatgcggctaagaaccaagtcgcca

SEQ ID NO: 78050 - DNA, 264 bp, Glycine max
  Clone ID: 700964949H1
gaggagaaaattgaatacaatgatcttgtaaagtcagttcccgatgggaactcttcaaataatgaagaacacaccaatatccagacagttcagccagataaacaaaaggatgtgccccccaaaaatggatctaaatcgaattcaaaagatcgtggagatcccaatgatccttgtgtcagactaaagcgtgattgtgttggaattatggctgcattcaaactcaaagatcgctctcatcatattgttattgtggccaacacacat

SEQ ID NO: 78051 - DNA, 261 bp, Glycine max
  Clone ID: 700964951H1
gctgcgactctctttccttccctctttttccgaatctgaatcgaaatggcttcggagactgagacgtttgcttttcaggccgagatcaaccagctcctcagtctaatcatcaacaccttccacagaacatacgaggggtttcttcgtgagctcatcagcgatgcctctgatgctttggacaagattcggtttgagagtgttacagacaagagcgagcttgatgctcgcggggagttgttcattcacattattcctgacaag

SEQ ID NO: 78052 - DNA, 259 bp, Glycine max
  Clone ID: 700964952H1
gacaaaaacacgttcagaaccgcttcatcaataacatgccgaccgaaactctgtagtaagaggacattttctgcatcagacacacacatagatagaaaatacaacaaaaatgttggtgtccatgtccgtgtgcggccaagatgagattgagttgtcaagagatggcagccactacagtctctcaactggaatactaccttcccttggagccaaaagtaaccgcagactcaagctcaaacccttcattatatctccctat

SEQ ID NO: 78053 - DNA, 258 bp, Glycine max
  Clone ID: 700964954H1
gactcacttataggtctctcttctctttcttctcctttctttctgcggcgaaggagggcgcagaccacgccagcagttgtaggcgcccaggcggcgctagggtggcagcaacagccgcaaggcgggtttggcctcaacggaatcatacgcatggtcgttttctggtacttcgcttccaaattgctttcccccaaaaaccctaccgaaccttccgctctcatctccaatctctttcagaacgcacagcctctggatatg

SEQ ID NO: 78054 - DNA, 260 bp, Glycine max
  Clone ID: 700964955H1
cgcgtcgctgctccgtaccagtttcactgcataaatttgagagaaaactctgcaaacatgttggtttatcaggacctccttacaggtgatgagcttctctcggactccttccgttacaatgaaattgagaatggaatgctgtgggaagttgaggggaagtgggttgttaagggagcagttgatgttgacattggtgcaaacccttctgctgagggtggagaagatgagggagtcgatgacgcagctgttaaggttgttga

SEQ ID NO: 78055 - DNA, 263 bp, Glycine max
  Clone ID: 700964956H1
ggctgccacaaagcatgtaaccaatacgaatgccgtgaccttcggttatgatcttggaataaccggaggagtgacttctatggaaccatttctcatcaaattctttcccggtgtttataaacaaatgcaagatgatgttggccatagaagccaatattgcaaattagacaacgagctccttacactcttcacctcttccttgtatcttgctgcattagtagcttctttctttgcttccaccactacaaggattctgggacgca

SEQ ID NO: 78056 - DNA, 264 bp, Glycine max
  Clone ID: 700964958H1
tgtggtttttttttctttcttttctctctctctctctctgtgaaatggagccgtttgcttagagctgcttcttctgatctttgaatcttgatctagatatctagatacagaattggaaatggattcaaatgggagcctacgtgctaacacctgggcaaggtcgtcgtccttgacctctcctgcaagtggtttatcctcagatcctctttctttcccaggttttggtttgcagcataatcaacaaaaatgggatgttccctcaaa

SEQ ID NO: 78057 - DNA, 267 bp, Glycine max
  Clone ID: 700964959H1
tgtgaatgttacttgacttcagctgacaaagcctcaaacatcttaaaggtttatgaagtactttgttcttcgctgtcgatctataatggaaaatgtttgatcaacatttcatatgttatcctacattcctacctctagagagaaagaaaaaagaaaagaaaaagtataataggatttataatgtaaaagaaagagagatataaaaaaaaaaatgagagatgtttgtgaaatgttttcaatgaaaagtgatttatggattattactct

SEQ ID NO: 78058 - DNA, 268 bp, Glycine max
  Clone ID: 700964960H1
ctttgatttcggttccgaagggacaaccaacgaccaccctctcttctgactcacttctcgaaccttccaaacatggaacgcatcgttggcggcaagtacaagctcggccgcaagatcggaagtggatccttcggcgaaatctacctcgcgacgcatattaataccttcgagatcgtcgccgtcaagatcgagaatagtaaaacaaaacatccacaactgctttacgaggcaaagctatacaatattcttcaaggaggaagtggcattc

SEQ ID NO: 78059 - DNA, 267 bp, Glycine max
  Clone ID: 700964961H1
ctatgatgttcacttcacatataacaggatcaatatgagaaggttatatcaagcagctgaggctgcagaaaagttggtaactgattttctttttccatctacatccagaaagagacacattaaaaccacttctctgcttcccatatctggtacttttaacgaggagcaaattagttcaatcaaaatgattcttggttgcaaaggtgcaccaccctatatgattcatgggcccccaggtacgggaaagacaaggacaatggtagaagc

SEQ ID NO: 78060 - DNA, 272 bp, Glycine max
  Clone ID: 700964962H1
gttcttctctctctctctctctctctctcgtgaatcatcacttcgttttccccgctttcaacaccgctcatcttctcttctcttttctctgctaatcatggcaaccttgtctactaatcattgcacattacaaactgcaagcaaaaatccatccattgttgccaccatagtgaagtgtccttcttctttaaggtctgtgaagagcgtttccagatctttcggcttgaagtcggcctcttcatttagagtcactgccatggcttcttacaagg

SEQ ID NO: 78061 - DNA, 258 bp, Glycine max
  Clone ID: 700964963H1
ctccgccgccgcacaaccaccacctcctccgttcggatctccggcggacctactatccctactcctactctactctatttacacggaagaacaaaaaactatccccctcccccaaaaaaaaccccaaagcggctcggttagggtttagttttgtaccatttcgtgtaatctaatttttcatccgtaaaaatctaattttgaggcggcgagatggcggagattcaggtgcagcatcagagtccggtgtcggcggctcct

SEQ ID NO: 78062 - DNA, 269 bp, Glycine max
  Clone ID: 700964964H1
tgaagattccacaacagtgggaggcggatccaaaaagagagagtggaaaagatggcgcggttgatcacagtggtgtggtgcgcggtggcggtgctattatgcgccgcggccggtgcgtcgtgggtggaggaggcggcgaacccgatacgaatggtgtctggcgtggaggcggaggtggttcgggtgatcggggagtgccggcgtgcgttgaagtttgctaggttcgtgagcaggttcgggaagagttaccaaagcgaggaagagatgaa

SEQ ID NO: 78063 - DNA, 263 bp, Glycine max
  Clone ID: 700964965H1
tggaatgcttcttcaacattaagaccttctttggcagatgtcttaatgttgaagaagcattccaatgcatagcaaagaatgccctgaaaagtggagaagaagaagaattgtaagttcttaaatctgggcatctctttcatatatgtgaactgaccaactgaactcactaagacataaatacaataagctacatctctcagatttatgagattgcgttcattggttgagggagtgtagtttggttttgtcagagttctaattca

SEQ ID NO: 78064 - DNA, 260 bp, Glycine max
  Clone ID: 700964966H1
cttttctcttctttcttcttcttccatctctttttttctgcttaagcgtctacaaaagttctcttcttcttctcctcctattgaactttggtcatcacacgagaaaacccacgtctggatcttctggtgtaaaggccattagaagccttttagaaattttcaaattgagttggtgtatagtgttgaagggggtgaaatttggagcccagtttgttacttcatttgaaaggtcatagtttgaaccctctttttctggagat

SEQ ID NO: 78065 - DNA, 260 bp, Glycine max
  Clone ID: 700964967H1
ggaaattcaaggaagctctgaaagattttcagcaggtcaagaaaatgtgtccatatgatcctgatgcaacaaagaaattgaaggaatgtgaaaaagcagtaatgaaacttaaatttgaagaagcgattgctgcaccagagtctgaaaggcgttcaatagctgaatccatagatttccgaacaatagatgttgagccacaatattcaggagcaagaatagagggggatgctgttactttggattttgtgaaaaaaatgata

SEQ ID NO: 78066 - DNA, 258 bp, Glycine max
  Clone ID: 700964968H1
aatgggttcttctttgtggactttgtgtctaattttggcttcactagcctcttctgcattctgtgcctttccacggaggccagtggatgttccattcggcagaaactacgttcccacttgggcttttgatcacatcaaatacttcaatggaggttctgagattcaacttcatcttgacaagtacactggtactggcttccagtccaaagggtcatacttgtttggtcacttcagcatgaacataaagatggttcctgg

SEQ ID NO: 78067 - DNA, 254 bp, Glycine max
  Clone ID: 700964969H1
gaagcaatggcttggctttaaagctgctggcactgtggagcttggtcatatagttacgtcccctgttattcgaactgcaacttcaattgttcctttgggatggaatgatggactaggagcaaaaaatggagaacctctgaaagttgatattactggttttgggttgcatttatgtacacttgttcatgctcaagtgaatggtaactggtgctcaactactgttgaatcatttccttctccaccaaactattctt

SEQ ID NO: 78068 - DNA, 256 bp, Glycine max
  Clone ID: 700964970H1
tgacctcggatggggtgaacaagtccccaagacacccgagatctcatccatgctttctgctgctcctttggacggtgaatctcagtttgtgcagggtgctgctgatcagaatcagaagaagaacaacctgctggatatggcatctgtgcaagatgattctgcaaaaactctttctgaggagcttgcagacattgaatcccagctgaagttctttgagaccccttcttttcttgatgaagcctgggctgatgctgca

SEQ ID NO: 78069 - DNA, 258 bp, Glycine max
  Clone ID: 700964971H1
gttttgagtatgctaatctttttcacactgttacagacttggtacagtgcttatgtttcttctatagtgactggtctgcctaatcgcccacatttgatctttgttgacggccattgtgcggtatgcatgatcagttttgtttatttgtttcatttaatttcaacattctaatgctgttggtttgcattctaagaaagcatagaaagtgtaaagcatgcagtatctattgtgatgttggtttgcatacattttacctct

SEQ ID NO: 78070 - DNA, 260 bp, Glycine max
  Clone ID: 700964973H1
cagaaccatatttttcttgaaaagtgatggaactttgacgccattggccattgagttaagtaagccgcatcctcaaggtgaagaatatggtcctgttagcgaagtctacgtgccttcgagcgaaggagtttgaagcttatatttggttattggcaaaggcttatgttgttgtaaatgactcgtgctaccatcaactcgttagccattggctaaacactcatgcggttgttgagccattcgtcatagcaacaaataggcat

SEQ ID NO: 78071 - DNA, 260 bp, Glycine max
  Clone ID: 700964974H1
cacacatcattttctacgactggaatgctctaaacattcttaatattcccacactatacggaccatgttctcttcctcaacttccttctttctttgccttctcctcttctctgtaaccttttgtcatgttttgggggataaagtatttacaggaacatatggagtaaactacggtaggatagcagacaatctaccttctcctgagagtgtggttactcttctgaaagctgcaaagattaggaacatcagaatatatgatg

SEQ ID NO: 78072 - DNA, 263 bp, Glycine max
  Clone ID: 700964976H1
ctcaacccgcctcaatattcctaaactcatacgagcttgtgatgaacaacagcattggaaagaactgacctatttgtatatacaatatgatgagtttgataatgctgcaactaccatcatgaaccattcacctgaagcatgggatcacatgcaattcaaagatgttgttgttaaagttgctaatgtggagttgtattacaaggctgttcacttctacttggaagagcatccagatcttatcaatgatgttctgaacgtccttg

SEQ ID NO: 78073 - DNA, 251 bp, Glycine max
  Clone ID: 700964977H1
gttgaattagacgaacgccagttacagtttccgggttgttcaataaggagaatgagtgctggagagtgattcaacttgtgctcctgaacctcacaaaatgtctggccaaaatcgctctatattttctgccaaatcgggatttgtcatccctaaaaacgagttgtcagggtcactggtgcctattttccgatgggctaaaaagcatggggtcactgttggtgccaccaatgaagaaagttcaaaacaaattg

SEQ ID NO: 78074 - DNA, 266 bp, Glycine max
  Clone ID: 700964978H1
ttcacaccctcaccaaatggaaaaggaggcaaggaatttgcaacgttgaaaatcctcacccccctcctttcacatttttggtgtcgacatgatccgctagcactaattggaatattaggagtaaacccttcgaggggggaaaaccaaaccaattcaaccaaatgcataccatgcctcctaaaggcaccctaactttaatattccttcaccatgatgtcctttctttcaacaacagagaacacacgttaatcacaccctctccccac

SEQ ID NO: 78075 - DNA, 266 bp, Glycine max
  Clone ID: 700964979H1
ccccaagcagcatgaagattaaggtggttgctccacctgagagaaagtacagtgtctggattggtggctctatcttggcttctctcagcactttccaacagatgtggattgcaaaggctgagtacgatgaggctggtccttcaattgtacacaggaaatgcttctaaatgctgcacagcctacagggtagcttggtgaaagaaattaaaatacggcgttctcgttttatatgatgaaaaaatgtgttgttaaatcagataactgag

SEQ ID NO: 78076 - DNA, 260 bp, Glycine max
  Clone ID: 700964980H1
caactataaatcaaaagctcagagaacccatcccgccgccgccgtgtgctccgaccgccacctccattcgccgtgtactctcactcccttaataattattgatttcttctcttactttttgctctcgctggagttgagtgtgatggtataggttaataggaaagaaaaactaagtgaggaaaggtgaaaaaagaattaattagagtggaagagtgtggttattttctgatttgagaagcaaataccaaagagtgaagaac

SEQ ID NO: 78077 - DNA, 261 bp, Glycine max
  Clone ID: 700964981H1
ggcccacaacctcatcgttcactacggcctccaccgccgcatgcaggtcaaccgccccttccccgcggcggaggccgacatcggccgcttccacgccgacgactacgtcgacttcctctccaccgtctcgccgcaaatcctctccgagaattcccactcccactaccgtcagctcaagcgcttcaacgtcggcgaggactgccccgtcttcgacggcctcttcgacttctgccgcgcctccgccggcggctccatcggcgt

SEQ ID NO: 78078 - DNA, 259 bp, Glycine max
  Clone ID: 700964982H1
cttttcatgccggcggcatttccccggaataccaacactccaacttcacccacccgcaagaccaacgtcgccgcgccggtgccgcgattgggtaacctatgcaagccgtcaaaaaccgccgattccaatttctagtaacatcgacgagagggccttatgttttgatatcttgtggagatggctttctagacttatctccttttacttgctatctctcaatctcgctgctgcagcctctgattacccagctccctctact

SEQ ID NO: 78079 - DNA, 255 bp, Glycine max
  Clone ID: 700964983H1
tttttacttcccctatggctcgtcactccttgctcttagccctcctcctcttcgccgccgtggccaccgccgcgatggcggtggccgcgtccgacgccgacgacatcctgatccgtcaggtggtgccagattctggcgaagcgaagaggaggacaacctgctgaacgccgagcaccacttcgcgagcttcaaggccaagttcgccaagacctacgccaccaaggaggagcacgatcatcgcttcggcgtcttcaa

SEQ ID NO: 78080 - DNA, 257 bp, Glycine max
  Clone ID: 700964984H1
cggctcgagcactcgcaagcaaaaagaaagaatcccaggcgaggagaaagatggaggggaaggagcaggatgtgtcgttgggagcgaacaagttccccgagagacagccgattgggacggcggcgcagagccaagacgacggcaaggactaccaggagccggcgccggcgccgctggttgacccgacggagtttacgtcatggtcgttttacagagcagggatagcagagtttgtggccacttttctgtttctctac

SEQ ID NO: 78081 - DNA, 254 bp, Glycine max
  Clone ID: 700964985H1
gcttcagtgtagtctgtaatcatgtcaggcaagtatatcatttctgctattcttggatcatttggagttgcatgggtttgtgattattatgtttcagacaaaaagctatttggaggttctacccctggaactattacaaacaatgagtgggcagaagagactgacaaaaaattgcaggcatggcctcgtactgccggtccaccagtggtcatgaatcccataagtcgccaaaatttcattgtcaagtctcgcgc

SEQ ID NO: 78082 - DNA, 257 bp, Glycine max
  Clone ID: 700964987H1
ctcgagccgctcgagccgttcggaagcagacacagatggctcgtacgaagcaaaccgctcgtacgtccacaagcggaaaggctcctaggaagcagcttgcaaccaaggctgcacgtaagtctgcaccaactactggtggtgtgaagaagccccaccgttatcgtcctggtaccgttgctcttcgtgagattaggaaataccagacgagtaccgagcttttgatccggaagctccccttccagaggctggttcgtgaa

SEQ ID NO: 78083 - DNA, 124 bp, Glycine max
  Clone ID: 700964988H1
cgataattgtgatcattattcacgagttgtgctgattagtgaaataaagtcaactgctttcatttcaaaaaaaaaaaaaaaaaaaaaaaaaaaaaaaaaaaaaaaaaaaaaaaaaaaaaaagag

SEQ ID NO: 78084 - DNA, 258 bp, Glycine max
  Clone ID: 700964990H1
gagaaagcacagttttcgtgccctccttcgtttcctgtgggagcaaagtctttaatacacacaatgctggacccaaatcctgaacgtcgtataaccattgagcagataaggaatgatgagtggtttcaaaaggaatatgttccggtcagtctcatcgagtatgaagatgtaaatctggatgatgtaaatgctgcatttgacaatgatgaggatcagaggactaaccagcaatgtgagaatgacgacatgggtcctcta

SEQ ID NO: 78085 - DNA, 260 bp, Glycine max
  Clone ID: 700964991H1
caataacatagcatagagtgagaagtgagaagagaaaaatggcaatctccatacccagtagacaacttttcatagatggagagtggaaagtccctcttctcaacaatcggtttccgatcatcaaccccgctactgaagacatcatagggcatattccagccgctactaaggaagatgttgaccttgcggtggatgctgctaaaagagccttttcccataacaaaggcaaagattggtcttcagctcctggctctgttcgt

SEQ ID NO: 78086 - DNA, 260 bp, Glycine max
  Clone ID: 700964992H1
caaaaaccctttcgcttattttattatcgttttcctttctcccgagtgttctcctttcttgcttccttctccggccatctttatcctgatggcgtcgtctctgggaattgcttgcggtggaaacaacgccaaattagggatcccaaagcagcggtgtggttcggttcttcagccgccgtgctccctcgctatggggcgctcgacggcgagggtggggaggatcacgatggcgatggccacggccacggcggtgatgacca

SEQ ID NO: 78087 - DNA, 71 bp, Glycine max
  Clone ID: 700964994H1
cgagaacaaaaaaaaaaaaaaaaaaaaaatccggaattcgtcttcacggaaaaagtgaaacccaaatacga

SEQ ID NO: 78088 - DNA, 261 bp, Glycine max
  Clone ID: 700964995H1
cttccaaccccaagaagggttcttcatttttgtcgtgcatttctttgtggtggccgggttaaacttcaattaataattatttggagtccaaaccttggcagctggcatcaataccggccaccaacaaagaaaaaaactaaacaatattatggcgaactgtcagcaatattattttcttttgctttctctggcaatttttattcctaccctgaatgccaattccttagagaaagatgagtattggcagagccatgtctatga

SEQ ID NO: 78089 - DNA, 253 bp, Glycine max
  Clone ID: 700965001H1
gaactggagaaggcattacagaagtctgccttagtgggtttattgcttttgatgttcctcctccaaagggtccattgtggattcttggcgatgttttcatgagggcatatcacaccgtctttgactatggaatctccaagttggctttgccgaagcagtctaattacgctttctggaggattttctttgtaaatttgttaagcgtgttgtaaataagctgttataattgtagctctggttactttttgaaacc

SEQ ID NO: 78090 - DNA, 262 bp, Glycine max
  Clone ID: 700965002H1
gtcgaggtaggatgcagaggcgcggagaagacgtggttcaccctctcaaggtctctttggaggacctttatcttggaacttccaagaagctctccctctccagaaatgttatatgctccaagtgcagtggcaagggttctagtctggtgcttcgatgaagtgtgctggttgtcaaggaactggtatgaaggtttctataagacatcttggcccatccatgattcagcagatgcagcatgcctgcaatgaatgtaagggtact

SEQ ID NO: 78091 - DNA, 241 bp, Glycine max
  Clone ID: 700965003H1
ccgccaccgccgacgggtcgttccggtgcagagcaacttcgagccgttcacctacggttacaagtacaacactactctctcacagtcacagtctcatatgagccagagtgtatcttctccgtcgcgatggaagttggacttgtgccggacgggaacacgatgtcggagatatcgaactgcagctacagcaaagtggcaccggtgacggtgacggcgcagttctcggcggcggatagggagg

SEQ ID NO: 78092 - DNA, 243 bp, Glycine max
  Clone ID: 700965004H1
ctcatacaaattctccacacgatacttctgggctgttgatggagagggtagatgagggtccccttgatgatcaatatgcttcggctatcagaaactgtgatcctgagggtcctctgatgctctagtctcaaagatgattccagcatctgacaagggcagattttttgcttttggtcgtgtattctctggcagagtttcaactggtttgaaggtgaggattatgggaccaaattatgtccctgg

SEQ ID NO: 78093 - DNA, 243 bp, Glycine max
  Clone ID: 700965005H1
atcagcccaaggaagctgattttccaaagcaaaatgtccccgaggtggcacctgaagccaaaaagagagcagcagaatcaaagtcaagaggggatgaggcttttaaaagaaatgactatcatatgctatagattcttatacccaagcaattgatctgaaccccactgatgctactttgctatccaatagaagtctttgttggattaagttgggtcaagctgagcatgctttagctgatgcaaa

SEQ ID NO: 78094 - DNA, 244 bp, Glycine max
  Clone ID: 700965006H1
gctcgaggcgacgatgatctgtatcgacaattctgaatggatgcgtaacggagattactctccttctcgatttcaagctcaagcagacgctgtcaatctcatatgcggtgctaaaacgcagtctaatccggaaaatacagtgggagttctcacaatggctgggaaaggcgttcgtgttttggttacccctaccagtgatctgggcaagatcttagcctgcatgcatggactagatataggtggt

SEQ ID NO: 78095 - DNA, 241 bp, Glycine max
  Clone ID: 700965008H1
gtttgtaagagtagaagagctgtatattgattcaatttcttgtttttccttcagaactcataagaattgagcaagtattgattttgattactaatgctgtggtgggttttggtcaaaatttcagatcttaatggaaaactcagaccacgacgaacccgaaaagatcaggcctcatctcacctctgtctcttcccgcactcctcgaaactccatcaactctcctaccaacaacaaaactgct

SEQ ID NO: 78096 - DNA, 241 bp, Glycine max
  Clone ID: 700965009H1
gtctcatcgaataatttcagatctcgtcgatctgagctcaaaacaatggcgaaaccaaggtactctcgtcttccacctcgcaagtcatcgtcgtcttccacgctgattctgactctgttcctggtcttcaccttcctcgttctaattctcctggctctcggcatcctctccattcctagctcctcgcgtggaaatttgcccaaacctaacgatctcgcatccattgctcgcaacacaatcc

SEQ ID NO: 78097 - DNA, 241 bp, Glycine max
  Clone ID: 700965010H1
gaaaacagatctcaactacaatactggctatcttagtgttgatgaaggtgctgaaagtgttgtaaggttggctctgctacctaatggaggtccttctggtctattcttttctcgaagtgaagtgcaccattctgatccaaagactgttgtgtacttgaagaggataaataataagcatggtttcatgataagacatgtatcaaatttgtacctagcacaacaagaaaataagccacatgtc

SEQ ID NO: 78098 - DNA, 238 bp, Glycine max
  Clone ID: 700965011H1
tgatagtagaaatggataaaatgtctgctccttcatcaagggagcgtgcacaacgcctctatgaaaagaacctggagttggagagtaagcgtcggaggtcggctcaggtgcgtgtcccatcagtcctaatgcttggcaacagatgcgtgagaattatgaagcaataattcttgaggatcgagctttctctgagcagcacaatattgaatatgctctttggcagttgcattataagcag

SEQ ID NO: 78099 - DNA, 233 bp, Glycine max
  Clone ID: 700965012H1
gttttgtggaagaaagagaggaggaagggaggacaaaattgactaaaaacaaacgggggaagctagatgagacgaggggtagagaagaagatgacttgtaagacaggagaaatataaagagagaagagaggaaattggcgtggcgtggcgtgatcggggcacagtctgaatctgaaatccatcttcaaaatctcaattcaatataggagggagctgtgccctgccctgacgtt

SEQ ID NO: 78100 - DNA, 242 bp, Glycine max
  Clone ID: 700965014H1
tcaagacaaaatgactgcaaaggaaagtgcaacctggcttgccatcatcaaccaagaggaagccttggctagagagctttaccctgactattgccctccattttcctctgctggaggtaatggatcttggtgatcaatgattgcagcgagtatgatgttgatggggccgaagaagagctgaactttgatgtggaggaccggaagcctgaccatcttcttccatcaaacctcgggatggagag

SEQ ID NO: 78101 - DNA, 249 bp, Glycine max
  Clone ID: 700965015H1
gtggcttatgacaatatgagcccctccgtcttcctcctgtggcttgtcattatttctgtcctcgcccactctgccctagcttcaatccctctagcttatttcttagactgtgggggcaccaaagaggtacggtagacaatctcacatacattcctgatgaaagttacatcaaggtgggcaaaaccaccaccatcaacaagccagacttgttgccaatactctcaacattgcgatactttcccgacacgt

SEQ ID NO: 78102 - DNA, 255 bp, Glycine max
  Clone ID: 700965016H1
ggagattgtcagagcatcaggtaagtttgaacttctagaccgtttgctcccaaaacttcgcagagctggtcacagagtcctccttttctcacaaatgactcgacttatggacactctcgaagtctatttgcgacttcatgattttaagtatcttagacttgatggctcaacaaaaactgaggaaagaggcaatcttctacgaaaatttaatgctcctgactccccgtacttcatgtttcttttgagcacccgtgc

SEQ ID NO: 78103 - DNA, 251 bp, Glycine max
  Clone ID: 700965017H1
gggtattctttttcaattgtttctaaggatgaaattcctacagacgaatatgctttggaacttaatggcgttaccataaaagaaacagcaaaattaggccctcgcccagagaagcctattgaaatatataatttgagagctgtccattttgccgaaaggttagagaaattgttgccattttggatcttgatgttcttttctatccttgtccaagaaatggcccaaatttccgtcaaaaggttctagagatg

SEQ ID NO: 78104 - DNA, 246 bp, Glycine max
  Clone ID: 700965018H1
cgtgtctcaagtcggcagctcgcagtcgcagagtttcccattcctggtttcctcaccctcgtgtcgatcgttctagggttagggttaggtccctattcaattcgcttcaatttctgcaagagacgccctcccgagagacgccatgggaggtgacagtgccgttgaggaatccgaaggggtcaacgtcaacatcaacgttcgctgctccaacggttccaagttttccgttcagattgccgtcgattc

SEQ ID NO: 78105 - DNA, 247 bp, Glycine max
  Clone ID: 700964389H1
taaccattgaagaagtgcaatttcgtcctctaacactcttccagatcatggctagctcactgcttgtgagggttgccagctgcatggttgtggtgtggatgtttagttttgggcacataattcccttggcagaagctgaaattccatgtggcagggtgcaaatcactggggctccatgcatagggtacctaaggggtcctggtggaggtgtccctgcaccatgctgcaatggggttaagagcataaa

SEQ ID NO: 78106 - DNA, 242 bp, Glycine max
  Clone ID: 700964390H1
accaattctagttttttgttctcactacttcttcatacactcacaaaacaataatagattaatatcctaatatcgtattcatattcctgagaaagtgtttgtgtctctctatctatatggcagccttcatcctcatctccaagtccaagcttcaatccacagtacttgttcttgtcctaaacctatctttcttcttcctcttctgtctccttctaaaggcttattatctccaccctcctaac

SEQ ID NO: 78107 - DNA, 255 bp, Glycine max
  Clone ID: 700964391H1
cttcggcaacagcgagcacttcaacaattgggaatgatccagcacaatgcttggagaccccagagaggattgcctgaaagatccgtttctgttcttcgtgcttggctcttcgaacacttcctccatccttatcctaaggattcggacaagcacatgctagcaaaacaaacagggctaactaggagccaggtttcaaattggtttataaatgctcgagttcggctttggaagccaatggtggaggaaatgtacatg

SEQ ID NO: 78108 - DNA, 250 bp, Glycine max
  Clone ID: 700964392H1
cgacgcgcccacgtcatctctgagttccacgcgtcctacaaagacctcttccacgagctcgaagccaacctggccgaagctggcaaagccagcttcggggacgccaacgaccaagccgccttcaacttcttggcacgctccctcttcaactccaaccccgccgacaccaaacttggccgcgacggccctaaaatcgttcagaaatgggtcctatttcagctcgacccaatcctccgcttggggctccctc

SEQ ID NO: 78109 - DNA, 211 bp, Glycine max
  Clone ID: 700964393H1
aatcaatcaaggcgtttttaattaaaaaaagaagaagaagacattttagaaagaaagaaagagaagagaagagaagaatccctcttgtaaattctcatttccccgtatttgtaggggccattttgattttgatcccaacccacgttaattgttggtccttttttcgatgttcatgaaagaaaagcattgaattgaatcattccacacaaca

SEQ ID NO: 78110 - DNA, 248 bp, Glycine max
  Clone ID: 700964394H1
acaaaaccctgaagaaagacacagccattgtttgtttactttccattgattgagcgaaagcgttgttttttctgcgatcattttccattgggtggaagaaagtctcaacctttagtcgaaagagcaaggatctgagtgagtgagcgatcatgtgtggtggtgcgattatctccgacttcattccagcgggtcccgccggcggggcgcacgcgtgaccgccgacatcctgtgggcgaatttgaggaagc

SEQ ID NO: 78111 - DNA, 259 bp, Glycine max
  Clone ID: 700964395H1
gcggaatcagctagaattttctaataatggccaaagacgttgagcaggttacagagcaaggtgaatactccgcgaaggattaccatgacccacctccggcgccgttgatcgacccagatgagctcactaagtggtccttgtacagagccgccatagctgagttcatagcaacactccttttcctttacatcaccgtgttgaccattattggctacaagagacagagtgacaccaaaatccccggtaacaccgagtgcga

SEQ ID NO: 78112 - DNA, 262 bp, Glycine max
  Clone ID: 700964396H1
agagaatctagagagagagagagagggtttttattttattttaataagattgtgttgtgtttggttctttatttgttgtttactttgaagtggggtgtgtggggagagaaagttgggtttctctcgcttgtatctggaaaaagtctcgattttttcaagtggggtttgagggatttagggtttgggttgttgggtcgtgagtggaatcagcaaccatgaatatgatgcgaaggttgaagagcattgcttctgggaggacttc

SEQ ID NO: 78113 - DNA, 263 bp, Glycine max
  Clone ID: 700964401H1
cttttccctcgttgaaatgaaaatgggttcttctttgtggactttgtgtctaattttggcttcactagcctcttctgcattctgtgcctttccacggaggccagtggatgttccattcggcagaaactacgttcccacttgggcttttgatcacatcaaatacttcaatggaggttctgagattcaacttcatcttgacaagtacactggtactggcttccagtccaaagggtcatacttgtttggtcacttcagcatgaaca

SEQ ID NO: 78114 - DNA, 259 bp, Glycine max
  Clone ID: 700964402H1
cggctcgaggatcttggaactgtgacgagatgccacattgattaacaacaacaacaataacaacattagatctcaagttggagtctttgtttggagacacccattatggggggtgtgagtctgagggaatcatggtgtttctgcaaaggggtgagtaagtctgagagaatgaaagctgctatttttacagggaaggctcaggccatggccacaatcgccgccaccgccgcgcctaatggggcttccggcaccgggtttt

SEQ ID NO: 78115 - DNA, 254 bp, Glycine max
  Clone ID: 700964403H1
gacgacgttttagctcttgtttccggacttgaatttgcgttgtggacttgtggtttgtatgagtagtttcagcgtgagttcgagagaaagggaaggtgtagcgcttgctgagtttggaggcttgtagaatctaaacgtactatgctgacgtggcatcggaaactgcacggggcttctttcagagttgtgtgttgaaggatgttctcagttaacatgatcgcattgattttttgaatgaatgtagatttggtgtt

SEQ ID NO: 78116 - DNA, 250 bp, Glycine max
  Clone ID: 700964406H1
cgcaaggcttgtacaattaaacgcctttgcttcaaatttcataccacttgagttcttgcttcagcctttgagctgctgctgctacatattaattaggcacaccggaaaataaacttgatggtcttgctcattttgatgaattgtatttttctttctttcttttaccgtaaattttttaaaaacatttaatcttgaattgtaatcttgcactaactgcagtggggtggaatatacttgcatagaattgtgt

SEQ ID NO: 78117 - DNA, 249 bp, Glycine max
  Clone ID: 700964407H1
ctggtacacattgggccctctgcttcctccaagaatcaattcaagcatggctgtgcttgttagtgttctcaaagggggcaaagagacctacgaggacttctttatgggaacggctcacttcaaagacatagcattggcacatattttggcacttgagaacaagaaagcagcaggaaggcacttgtgtgtggaatctattcgtcactttagtgatcttgtggacaaggttgctgagttataccctgaata

SEQ ID NO: 78118 - DNA, 250 bp, Glycine max
  Clone ID: 700964409H1
attgaacaaaatgccaccaatcatattggcagcacaaacgatgcagacaaggaagatatctatcagttgggtattattctacttgaagttatcactggcaaacaaattacatcctcgagtgaaatagaggagctgaaggaagagctggagaatggttcatcagaagcaacatcagtaattagaagcgcaattgatccttcactgaggggaacttatgcatatgaatcaatgacaactgcagttcagatca

SEQ ID NO: 78119 - DNA, 245 bp, Glycine max
  Clone ID: 700964410H1
caaattcaacgctgcggttttcttgttccttcttcttcctcgatttttgtttgcatctgaatatatacatttttttgtctgatttatgctttcgttttacgaatcatgacgcaattacaatctaataccgttgtgttcattcgcagattcttgacgctactcacgacttttgacagaagatggcttcaagattctggactcagggtggaagtgattccgaggaggaggagagtgattatggtgag

SEQ ID NO: 78120 - DNA, 246 bp, Glycine max
  Clone ID: 700964411H1
ttcatctacgagcctccgcagcagggttcggaggacaatctcgtctttttcagggacccagaagaggagaagtttgttgaagctattgcggtggggttggggatgaggaaggttgggtttattttcacgcagacgattactcaggataagaaggattacactttgtcgaatagggaggtgcttcaggctgtggagtaccatgccgagagtgggttgaaggagtgggctactgcggtggttaagctt

SEQ ID NO: 78121 - DNA, 251 bp, Glycine max
  Clone ID: 700964414H1
aaaaacacctcacgaaagcgtcattggattcaatgcgagagagacaagtccagaaaagtaaaattaaatagcaacacatcaccgaacagaaggcaatgggtggagagagagaaatggcgaatggtgaatggtgaatggtgaatgaccccacagaaggaataaaacaggctgtggtagagctgtaaacgttccatttcaccactctttatgatatgatatattttctccgaaagcatagctttgagcaaaca

SEQ ID NO: 78122 - DNA, 257 bp, Glycine max
  Clone ID: 700964416H1
cgagtgtgttgttggatggatgttcattctccaacttgataccgcgttcgctcactctctactcaacttcaattaatcaaatccctcactttctctctcttgtcttcaaatctcaattctattttggaaaatcagaatcaaagacagttaaaaatacagaacaaacatctcactcaacatcaacacttcagatctacgtttccactctcacaacaacagaaaaggaaagaaaaaccgattctacagcgacaacaagg

SEQ ID NO: 78123 - DNA, 261 bp, Glycine max
  Clone ID: 700964417H1
gcgcaaccggtccacccaaacatactatttgtttctcagtttaaccagtacgctagctgaagatgggaagttccttcttgctgcacgcaaatgcagacgtccaacctgcacagattatatcatctctcttgacgcagatgatatgtcaaagggaagcaactcctatgttgggaaactaagatcaaactttcttggaacaaagttcacaatctatgatagccagctgcctcatacaggagcaaagattatgaaaagtcgctc

SEQ ID NO: 78124 - DNA, 257 bp, Glycine max
  Clone ID: 700964418H1
ggtccttcttccgccgccccaaggagatcgagaccgccgacaaagttcccgacttcgtcgacaccttctacaatctagtcaccgacatctacgagtggggctggggccagtccttccacttctccccctccatccccggtaagtcccaccgcgaggccacgcgcctccacgaggagatggccgtcgatctcatcgaggccaagcccggcaacaaaatcctggacgtgggctgcggcgtgggcgggcccatgcgggca

SEQ ID NO: 78125 - DNA, 250 bp, Glycine max
  Clone ID: 700964419H1
ctgctcacaatggtgactgtgaagcctgatgcttgcattgtggatttctttaatgaggttgcttcttcttcccccccttttttttttgtgggggtggtgaggtggggggtatattggtgtcagatttgcttacataactaggtattgctatcgtctgtagggtgagcactcacatcccaacaattggcctccttggtttggaaggcctgtttatacacttttcctgactgaatgtgacatgacttttggg

SEQ ID NO: 78126 - DNA, 248 bp, Glycine max
  Clone ID: 700964421H1
gcaactcccggtggttgagaaaccctaaccaccgttgaaacgccgttgtttcactcccaaacctcgctattcacgcgcgtttcccgccaccgttccgaagagaagtgatttccacacagtataaaatatgtaaatcttcttcaatcccgaaattgggagattcgtgaatcaattttcgtcagctcgtaataatttatagtcgttgctggttaaaggcctaaggaatgcagtccatggtctgtacattt

SEQ ID NO: 78127 - DNA, 248 bp, Glycine max
  Clone ID: 700964422H1
cgtatgtgactgttgcgactcgatcttctacgtcgttctcttcttctcgcgtcgtttgtgcgtccgtcttttctctcacctgaaaatgtcttgctgcggtggtaactctggttgcggaatcgcctgctagtgcggcaatggctgtggaggttgcacgatgtacccagacttgagctacttcgagtcaaccaccaccgagaccttggccattggagcggcaccagttctggctcaattcgagagtgctg

SEQ ID NO: 78128 - DNA, 246 bp, Glycine max
  Clone ID: 700964423H1
aaacactctctctctctctctctctctctctctctctttctctctttctttctttcttttttttctctgatgcgtttctacaaaaacacaaccttttaactgttttatcttcttctttgcttgctccttatttcttccttcgccgaatcctagaatgtcctcgtcggggttccctggcggcggtggtgcgtcggagtttttcgccggggtatgtggtttcggcggcagatccattccggcgaccag

SEQ ID NO: 78129 - DNA, 248 bp, Glycine max
  Clone ID: 700964424H1
agaagctcctccagtgccacctgcaccgcccatagtggccatgctgccatcccctggcatgggccacctaatcccaatggtcgagttcgccaagcgagcggtgcgctaccataacctggccgtcaccttcgtcatccccactgacggcccaccttctaaagcccaaaaggccgtcttccaggccctcccggactccatttcccacaccttcctccctccggtcaatctctccgactttccaccgggca

SEQ ID NO: 78130 - DNA, 244 bp, Glycine max
  Clone ID: 700964426H1
ccgtcactcgccgcatgcagcattttgcttcctcaaaattctcttcattctaacttccattttcgcaaagttaggaatcactattcctctccgcttcagttcctgtgatttccggtgaatcggagaattcggaactgtagtgtgattctactgctgcctcttctcgcttttccgaaatgcttctcctcagccctgttactcccggtcaggtctcgttccttctcgggatcattccagtcgttgt

SEQ ID NO: 78131 - DNA, 245 bp, Glycine max
  Clone ID: 700964427H1
ccattactaacttcctctctctttgtaacttgtaagcatggagtcctcaaagatctatgcttacctcttcctttgcatgctcttcctctcctccgccactcccattctcggttgtggctactgtggcaaaccccccaaaaagcacaagcctggtaaaacaccaaagacacccacagtacccgttgttaagccaccagtcacaatccctcccattgttaagccaccagtcacaatccctcccattg

SEQ ID NO: 78132 - DNA, 246 bp, Glycine max
  Clone ID: 700964430H1
ggagagatcgcacgggagttgcccggggtctctctctcgtgtggtgtgtggtgtatgctgtgctctcctgttcgttatgcctgctattattacctatctgtcgctccactccgtattacgaccctggatcagagggatacatcagaggattcgctccaactcctatcgggtaaggtattatctgtcaatgtagattggacagggttaggatattcaatttgacataattacagctacaatcagcga

SEQ ID NO: 78133 - DNA, 254 bp, Glycine max
  Clone ID: 700964432H1
gtcggcctcgacgatcctgacaaggccgccgtcctcaaatggctctcctccggcgcccggacgccgcgcaacgccttttccatcgccctcatcaatggccaaatccacgagctcaccgtcaaccttctctccccgcgaaacgttgtcttggacaaaatccacacagggaacgggttccccaccttaacggaggaggaacaaaccgaagccctagagcttcttcccaagtacggtccctttcttgagtccttgaa

SEQ ID NO: 78134 - DNA, 253 bp, Glycine max
  Clone ID: 700964434H1
aattgttgtaactttttgattcctaaattctctaaaattcgaaattctaatttcgttaggggaaagagattgtttgtgtgtgagtgagtatagctggaaaaggcgagggtcctgctatcggaatcgatttgggaacgacgtactcttgcgtcggcgtgtggcaacacgatcgtgttgaaatcatagccaacgatcagggtaacagaactaccccatcctacgtggctttcaccgacacagagaggttgatcgg

SEQ ID NO: 78135 - DNA, 251 bp, Glycine max
  Clone ID: 700964435H1
ctcattcacacattcacagttatactctctctctctttgtcgcttggatcactgatctcatctcaattttcagatatgtcgacatctgataagccagaagtggtggaaaggggtagcaaggatgaaaaacacaaggaagatgatcaagaggaggggaagggtggattcattgagaaggtgaaggatttcattcatgacattggtgagaagattgaggaagctattgggtttgggaagccaactgctgacgt

SEQ ID NO: 78136 - DNA, 249 bp, Glycine max
  Clone ID: 700964437H1
aaaatcttcatattcatcaaatttatcaaaatgaatctgtaccactcctccaccaccaccaccacctccaccatcttcaccgtcatattcctcctccttgcaatattattcactctcacaccccactaggccaactgtgccacgtgtcaccctgaggaagaagcgggcctgttgggcttcaaatccggtatccgatccgacccgtccggcctgctcagtaactggatatcgggtacggactgctgcaca

SEQ ID NO: 78137 - DNA, 245 bp, Glycine max
  Clone ID: 700964438H1
atcagactcttgagaatcagaaggtttcatctgacgagaggcagaatgagttacaaggccttctatgtggttgcttgcaggttatcatacagaagttaggatcatctgaaccaacaaagtatcatttcatgcagtatgctgaccaaataatgggtttatttttgagagtgtttgcttctcgaagtgcaacagctcatgaggaggctatgcttgccattggagctttggcctatgcaactggtgct

SEQ ID NO: 78138 - DNA, 247 bp, Glycine max
  Clone ID: 700964440H1
gccatttcaatccccagtttcttcttcaacgtcctcttacgagcagatcccaattctccttcccagtttcaaaccctaattccctcattcccatggcctcagaagagcccactgtcgcggtggaacccgctcccgaacctgccaccgccgagcctcccccggaggagaaggaggagcccaaacctgaagccaaggctaagaaaaccaaggaacccaaacctaaaaaggtttccagaccacgcaaccc

SEQ ID NO: 78139 - DNA, 246 bp, Glycine max
  Clone ID: 700964441H1
gtcactttcgccattgtcattccatgccttgaggctggcattgctgagtttgatgactttctcaaagcccaagctgatgaagcacaaaaaattgctcttgaggcctatgtcccagtgccagaagatgtcaccgacgaactcaatttccatgttcatttgtcattagaaaactccacaaggagggaactaaggcaaaggaagggtagatcaggaaaaaaatgtgttgccagcaaccctattgacact

SEQ ID NO: 78140 - DNA, 242 bp, Glycine max
  Clone ID: 700964442H1
aaaatcatggccaccacagccaccgaacctctcccttcctccgctgaaatgcctcctgccccgcctcctccgaagcaaccgccgcaaccggtggcggcggcgtcagcagtgaagcctgaggctccattgtccgattcgaaagcttcggcggaggcgaacgtaatagtggtcccgagctactctcgttggttctcgtgggattcgattgacgaatgcgaggtgcgtcacctccccgagttctt

SEQ ID NO: 78141 - DNA, 240 bp, Glycine max
  Clone ID: 700964443H1
ggaacaattcaagcacctacaaacgtttgtaaccttaagggggcagaccaatggttaaaggttcaacatgttaactctttcaccctgtcagggaaaggagtttgtgatggtcaaggaccaactgcttggagacaaaatgattgtacaacaaacaagaactgcacgatactttgcatgaatatcggttttaatttcctcaataattcaattgtccgtgaccttacttccaaggatagcaaa

SEQ ID NO: 78142 - DNA, 244 bp, Glycine max
  Clone ID: 700964444H1
tctacctcttaacaataatcagatagaaaaacatagccaaacaactcagcaatgaaattcacttccttaccagcaacgagatacacaacggagagcgcgaaaacgatcatggagggaataaacacaaccatccagtaataatcagcaatctcctggtccgtaagataaaaagcgccagggaacagatccgaatcgggaccacctttcatacctaactgtatggattgaagccttcgatcgacgc

SEQ ID NO: 78143 - DNA, 246 bp, Glycine max
  Clone ID: 700964445H1
gtccagcacgccggcaacattttgccccgattgtacctcctctgtacgttaggatcagtatacatcaaatccaaggaagctcctgcaaaggatgttcttaaggatcttgtggagatgtgccgtggcattcagcaccctgttcgcggactctttctcagaagttacctttctcaagttagcagggacaaattgccagatattggttcagagtacgaaggggatgcagatactgtagcagatgctgta

SEQ ID NO: 78144 - DNA, 246 bp, Glycine max
  Clone ID: 700964446H1
tttctgagaaaataattgtcttgctccttactgttgatgccattgagggagctgatattatggtaagatctgccaagaggtcaatggtggatgagctggaagcaatgcttgatgtggtagatccccagcctggtggaagatcagcatcactctcctccttcaaaagaaggacatttgatatgcctgatggagtcatccggaaggaaattgaagaaggggttgcacaggttgtgcaaatgcttgaag

SEQ ID NO: 78145 - DNA, 252 bp, Glycine max
  Clone ID: 700964449H1
gcggctcgtgatgatttgggtaaaggtgctattgacaaagaagtggtggagaaggtgtgggaccgaattgctcctggtttagcttcccaatttgactcaccttattcagttccaactatcgcaccacgtcctttgcttattgttaatggtaagacccttgtatatattgtacattaaacattttcaaaatgaatcaggctatcttattcatatacaacggcatatattgacaattcaggtaaccactctgct

SEQ ID NO: 78146 - DNA, 248 bp, Glycine max
  Clone ID: 700964450H1
gtgtgggtttcctagggaatccattctcattctcacagatgatatggaggagagaaacccacaaaaattcccgacgaaatataacattctgaaggccatgaggtggctaattgagggtagccagtcgggggattcattggtgttccagttctcaggacatggttgtcaggaactggatacgaatggggatttcgatgagcttgatgagcgtgacgaagcaatatgtccggttgattgggaaaagcagg

SEQ ID NO: 78147 - DNA, 250 bp, Glycine max
  Clone ID: 700964451H1
atcgagtgtgggaggccattacaaaggcttttgcaagccaaatgaagtctgctttcactggatcaagttttgttaaagagatttttacaatgggatatccaaagctttactccatgatagagaatctacttgaaagaatttcacatgacacagatatcaaaggagtgttaacagctatcaatttgtctggaaaagagcagataatttcagctgtcgaaatattccagaatgcatttttggctcattgctt

SEQ ID NO: 78148 - DNA, 247 bp, Glycine max
  Clone ID: 700964453H1
aaacgacacaatttttttctcctctctctctaaattcaattatggcgtttaagaaaacgctagcccagcggcttctcaacatcacaaaaatctccaattaccgcatttcctcctccgtagtcctatccccgaacccgacaaaacctgacattgctccggatcccggagacagccgcaggttcctccacaagagggcctccgtgctcccgccggagctccgcccgccgctgcccgccggcagcctcct

SEQ ID NO: 78149 - DNA, 248 bp, Glycine max
  Clone ID: 700964454H1
ctccgccttcttttatctctctctccactcccatatcgaaacaaagtcgttttgagttccgccgaaggtaccgataggtatgcagcagctatggatttggcatccaatctcggtggcaagattgacaaagccgaagttctctctgccgttcagaagtatgagaagtatcatgtttgctatggaggtcaagaggcagagagaaaagctaattataccgatatggttaataaatactatgatcttgttac

SEQ ID NO: 78150 - DNA, 244 bp, Glycine max
  Clone ID: 700964455H1
ttttcccttcatcgtcttcctcttgaaggtattgaagttgttttgttatgtgtttgccagagggagagagagagccatggcactagaggcagtggtatttccacaatcacaagacccttttggtggtagtggttacggatcagtgaataataaggacttctacaactgcaccttgttggctgctacttcacccaactcatggggggactatgagcaacacatcaacatcaacaaagaagaagaa

SEQ ID NO: 78151 - DNA, 244 bp, Glycine max
  Clone ID: 700964456H1
cgtgtccatagttgcaagttatctaagcccagtttgtgtttcactcacacaccgtttccggcaacaacattatatattcacgcccctcacatcacttcttccatttctgagatccgcaccttctcttcactttcagatggttctgtctctgtagcttggaatcagacgaaaggagaatttgctgggggggagagtttcaattttcaaatcttgtcggtgattcatttggtattgtattgcactc

SEQ ID NO: 78152 - DNA, 241 bp, Glycine max
  Clone ID: 700964457H1
ggtggtcaggatcctggcaaacaacatgcatacttaaagaagtctgaatcaggacacttgcataaatctgcttactctgattcaggtaagaatggtgggagtatgtcagacatcaacaatccatctttggataggcatgctgagctacaaaagtgtgctgttcctcccaataactcatacttcaagggatcacctacctcagcttttagtggtggaggtggcgtgccttctcagtactcgc

SEQ ID NO: 78153 - DNA, 241 bp, Glycine max
  Clone ID: 700964459H1
cttaatttgcgcttcccattttcttcttcctttcccccaaaagttaattaaacattaattcccgtccgttactgtaatagttacgatattaatctaattttggtggggtgagagatgttgatcaatgtgaagcaatccaccatggttcggccggcggaggagacgccgcggagggcgttgtggaactccaacgtggatttggtggtgccgaacttccacacgccgagcgtgtatttctaca

SEQ ID NO: 78154 - DNA, 242 bp, Glycine max
  Clone ID: 700964460H1
accgcgcaaggtaacgaacgtagctgagcaaaagcaagcagtaacaatgccattgtcaacggtcgtttcccccttttgttcttcctcagccaccttcctatccacagttatcgcgcgctcttcactccctccaaaacgcaacgtctccccttccccattttccactctctctcgcagaggcattgctctgctttccttcctctccctctccctctccctctcagcaccagcctccgccattg

SEQ ID NO: 78155 - DNA, 245 bp, Glycine max
  Clone ID: 700964461H1
atcgtgcattttccttgaacgcgatcgtcgaatgaaaatgaaaaagaaacgaaaggaaagcgaggccagtggacggtcgaacttgccggatgagatttcgaagtcgcattactcccttgagcggcgttcgcggttgatcaaacggtgcagggaagacggcgtcgtggcgacggtgccgccgtcacgcggcgcgtcgttattcctaacgccgtcgcggggcttgaagcggaagataggttgcatcg

SEQ ID NO: 78156 - DNA, 245 bp, Glycine max
  Clone ID: 700964462H1
caggacaaggagggaatccccccagaccagcaacgtctcatcttcgccggaaagcaacttgaggacgggcgcaccctcgccgactacaacatccagaaggaatcaacccttcacctcgtcctccgtctccgtggtggcatgcagatcttcgttaagaccctcaccggcaagactataaccctagaagtcgagagctccgacaccatcgacaacgtcaaggctaagatccaggacaaggagggtat

SEQ ID NO: 78157 - DNA, 249 bp, Glycine max
  Clone ID: 700964463H1
ctgacgatatgtgatttgccagagttaaagtgtttttttgcagtgtgaactgttgaagacattttcacatgtagaaccaaatactaaaaatcaaatctgtattgaaaagcttacaccgagtgctcggtgctgcaaattgggtgtaagcttttcaatacagatttgcagcacctgacactcggtgaaaatgaactgaagatgattccgcatggagaatttccaggaaacgtcttgcacaatttaaaagct

SEQ ID NO: 78158 - DNA, 276 bp, Glycine max
  Clone ID: 700964464H1
acgcaaaatcggaatccagctcgagaacaacttgttttcctcatctagatggtggtacgtggtctgtctctggtgaaagcggcaaatggtccttcacatccggccctcttgagaagaacgtgtatgaacccctatatgaagaagcaggatggggtcctactggattctctgttgatcttatagcagcacaagcagttagatcactccatattgcaaaggaggcggatgaagcaaggattatcttctaaaggaatgctgaatgaagtcttgtttgtg

SEQ ID NO: 78159 - DNA, 254 bp, Glycine max
  Clone ID: 700964465H1
aactgacaatttgtcaccatactttaactttactacttacttgcccaattaactatgtcatcgtcatatgccaaaaagcttcccactttaaagttaaccataaagaataactctctgtgaaagaaaaaaagcagcaaccaaattgatcttcggtctgggctgcaattgaaatgctgaagctctacgaggcttataagtgaacccttggtcgttcatgacatacaggcaattcagaatttgtcgctacttgctaa

SEQ ID NO: 78160 - DNA, 247 bp, Glycine max
  Clone ID: 700964467H1
aaaagaacaccaaccttggtgcctatttattatactagaagaaagaagggtagaatggattatcattcacaatacagtagtgctagtgaatcaggttggactcattatttggaccaatcctctcttcctgaaaattactaccagaggagaggtggtgttgtggagtgtgatgaaggaaaaggagcaagaatggaagagtactctgaggaagatttgtccatggtctctgatgcttcttctggacctc

SEQ ID NO: 78161 - DNA, 239 bp, Glycine max
  Clone ID: 700964468H1
cagatcgccaatgccgaacgcaggattgatttgacttctcacattattaaggtggtacttgacattgaaggttgaaaatttggggacatctcctgcttcagaagtacatattgccttttcgcccactgaagtaggacatctagcaataatcaaagctgctgcaacttctgggaagagggagaaggaaacttatggtcctctagatgtcagatctgctgagctacctgatggaccaaatg

SEQ ID NO: 78162 - DNA, 244 bp, Glycine max
  Clone ID: 700964469H1
ggagtaccctggaagccttactccttttgtgacggtaacatgtatagttgcagccatgggtgggttaatcttcggttacgatatcggaatttcaggtggggtgacatccatggatccgttatctgctcaagtttttcccgtcggtgttccggaagaagaattccgacaaaacggtgaaccagtactgtcaatacgacagccagacactgacgatgttcacgtcgtcgctgtatctcgccgcgtt

SEQ ID NO: 78163 - DNA, 243 bp, Glycine max
  unsure (1)..(243): unsure at all n locations
  Clone ID: 700964471H1
aanacacctctctttctctctcttccaaaacctaattttcattttttctcttcaaacaaattttcaaaatgcgtgagatccttcacatccagggtggccaatgcggcaaccagatcggcgccaagttctgggaggtggtttgcgcggagcacgggatcgaccccactggaaggtacggtggggactcagagcttcagctcgagaggatcaatgtctactacaacgaagccagctgcggccggt

SEQ ID NO: 78164 - DNA, 240 bp, Glycine max
  Clone ID: 700964473H1
cttgtgcaatttggccactatgaacacagggcttgctgcaggtgcagccttgcttgcactcttggctatcaccttctccttgttgagccctcaaaccctgttttctccgcctgagattccgggctcgaaggaccaccttcacgctgctcggttactccatgtcaccggagccgtcgggccggagagtcttgtcttcgacgctgacggcggagggccctacaccggcgtcgccgatggccg

SEQ ID NO: 78165 - DNA, 235 bp, Glycine max
  Clone ID: 700964474H1
atacgttttcctcactcctctgtatcccattcctctgccatatcctgaaatacgttttcacaacactcacctttgccatatacagaacaatcatcaattttctgaaatgagccagcgtgtccccaactgcgatgtggacgacaataacaacattcccacaaccacaaaaatccctcttcttcccaatttcaatttcatatcccatgaagttcctatgttgggctaccaagctgct

SEQ ID NO: 78166 - DNA, 240 bp, Glycine max
  Clone ID: 700964477H1
caaaatcttaacttaggaataagtaaccccaataaaaaaattactccaatagggcaaaacaccaaatgggagaggaaaaagagcagcctaagaatgaaaccgagaagaagcccgaggaggccgccgcagcccccaagaaagacgacggacccatccctgtcgtttacaaactcgacttgcattgcgagggatgcgtcaagaagatcaaacgcacatgtcgccacttccaaggtgtggaaa

SEQ ID NO: 78167 - DNA, 243 bp, Glycine max
  Clone ID: 700964479H1
tatttatatgggataagaataacataaatagtctccgtggggtgatcgattctgacgaacagtgccctctacttgttcctctgcgaatgtgacaaacaccaaccaacgaggattcgaaatcacagaggcaaaggaagatctcacaatgttcaatgttatcggtatctcgatgttgacgatggattcggtggcgtacaggggattgctctacacattcttcatactcaattttgtattggtctg

SEQ ID NO: 78168 - DNA, 247 bp, Glycine max
  Clone ID: 700964480H1
tctcgagccgaatcggctctagatttcgagagtccttgcgtaaatatgccattgctcatcaatttgcctttaaatataagagaaatgatagtcatcgtgtaactgttaaatgcaaggcagaaggttgtccttggagaatacatgcatcaaggctgtcaactactcagttgatatgtatcaagaaaatgaattcaactcataactgtgaaggggcttttgcaacaacagggcatcaagcaactaggag

SEQ ID NO: 78169 - DNA, 243 bp, Glycine max
  unsure (1)..(243): unsure at all n locations
  Clone ID: 700964481H1
agaagatggagatgtatcagatctggagcaggagaatagcgttgggagcgttcgcgtttgatctgcttttcctatcggcctcagcagacgacgtcgttgtgctctctgaagataacttcgaggaggaagttggtcaggacagaggagctctcgttgagttctatgctccttggtgtggacactgcaaaaagcttgctccagaatatgaaaagcttggtagcagcttcaagaaagccanatctg

SEQ ID NO: 78170 - DNA, 245 bp, Glycine max
  Clone ID: 700964483H1
ctttctctctgcgttcttcttcaatgcaactctattctgttcggtagacacaacatcactctgaagaacgtcgcacgcaccacccttctctctcttcaacaactcagctctcagaacagatacagtttccactgagtaaatcgcaatgcaggtaactgagacgaggactgttcaagttaagcagctttcagatctagctggtgtgagagagattcacgagttcttctccttttctggagaaatcg

SEQ ID NO: 78171 - DNA, 241 bp, Glycine max
  Clone ID: 700964484H1
agaaaactggttctttttttcgcgttgcgttttcttggtgtctctgtcgattcttcttctgaattttaatacttaggaagtttagttttctctcttggcttctccggttggagtttccggcgaccttgtcggagattttgttgtttatttttcacaccacttgtgaaacttctcaagaaaaagaaaaaggatgtttcttgttgattggttctatggaattttggcgacccttggcctgtgg

SEQ ID NO: 78172 - DNA, 243 bp, Glycine max
  Clone ID: 700964485H1
ccaactaaccaaaccagctatggcggcgatgcagaggccactcaagagaaccattgcaatcgccaagctacgcgcgtgcttttcctctctccgacccgccgccgccgccgacatcgtcgtctctcctccgccgcagctcccgccgttcgatcaccagccgcacccttacaacggtcccttcgccgatgaagtcctcgccaagcgcaaaacgttcctcggtccttccgtcttccactactataa

SEQ ID NO: 78173 - DNA, 239 bp, Glycine max
  Clone ID: 700964487H1
cgctctgttacctggcatcgcatcaatggcgaatcactcaagcagcttcggcggtcgcagtggagttcgagtggtggtcgccggcgaccgctccaccggaaaatcgagcctgatagccgccatagcgacggagtcattcgccgaggccgttccgccggtccttccgcccaccctcctggcccctgatttgtaccccgacaccgttcctctcaccgtcgttgacacaccttccagcttgg

SEQ ID NO: 78174 - DNA, 66 bp, Glycine max
  Clone ID: 700964489H1
gaacaaactatattatgccatgccggtgcttttacgagaaacttactaagccttccttgaccagtt

SEQ ID NO: 78175 - DNA, 179 bp, Glycine max
  Clone ID: 700964491H1
ccacaaagacaattttccatttaccattcttatgcaatcccaccctccaatcccacatttgtgcatttgttccattccaatttcgaacttcccatgtacaatatccacctagcatagctataacatacacatcatttatgcatcagcaacatcattcacatatctatacacaagatcga

SEQ ID NO: 78176 - DNA, 239 bp, Glycine max
  Clone ID: 700964492H1
atttctctcttctcttctcgcgtctcactctccaccgatacagtttcggactctctctctctccgattaccgcacaacaccgtatcgccgttcagggtttcttcgctcctctttggatcttcctcccttcgcgtcgttcgctttgattcgttaattttttttcttgcttctcctgtcttggctcgagatccgggccaagcacagaagaatccgattctgatttgcatttcgtactcact

SEQ ID NO: 78177 - DNA, 242 bp, Glycine max
  Clone ID: 700964493H1
agtcatcaacgaaacccccgtgatcttcgcgcctcactgcttcttaacattcattattcacacgtaacagcctcaacctcaacctccaaactcacttcatttttggccgcaaaaaacccaaatcaccctctcaacgatgcaagtttcatcctcatggttcggaacaatagtactttccaaccgctactcacgcaaccgctccctccctctggaaccgtgttccaccacaaccacatcatcgg

SEQ ID NO: 78178 - DNA, 243 bp, Glycine max
  Clone ID: 700964494H1
gttgccttggggaatgaaacgaagagatctcttgttgcggcgttattggaggagagaagatgatggaacttatgttattctttaccattccgtgtttcacaagaagtgccctccccagaaaggctatgtgcgtgcttgtcttaaaagtggagggtatgttatatcaccagtgaacaaaggaaagcaatcagttgtaaagcatatgcttgctattgattggaaatgctggagatcatatcttaa

SEQ ID NO: 78179 - DNA, 247 bp, Glycine max
  Clone ID: 700964496H1
cacggacccaacagagtctcggtctcgcgccgccgcgccacgccgtaaacgatgctagatggttgggtgtgtgctttccttttggagctttattgttctgtggaggtaattgatgcaagtgctggtgatgctgatccgcgctatagggtttgtataacacagtgtcaggaaactggatgcgttgcgcaaagatgctttccaaactgtaaattttcttctgatggagaatttattgatcgcccatggt

SEQ ID NO: 78180 - DNA, 253 bp, Glycine max
  Clone ID: 700964501H1
attaccctaaaacatcctccatctacaacacacactcttactcttactaatccaacctcctttgcccctcatgcactaccattaacattaccctctcttttttttctccctcacgaaccttcatttcttctcccgccatggatccttgccctttcgtgaggctcacagtcggcaacctcgccctcaaaattcccgttgcttctaaacccgcgctctccgttgttcatccttcttcttctccttgtttctgcaa

SEQ ID NO: 78181 - DNA, 243 bp, Glycine max
  Clone ID: 700964503H1
gtgcaacaaggtctgtggaattgataggaagtttggaaagtattgataaggcagaaaaactaatgaatgctgtgattgcagaggctgatgctgggggttctccttcacttgtagctcgaggcctctcccctgctcaagctactgtgggatctgaacaaattcagatacaagttccaaatgaaaaggttggattaatcatagggagcagtggggagacaattaaaagcctgcagaccaaatccg

SEQ ID NO: 78182 - DNA, 241 bp, Glycine max
  Clone ID: 700964504H1
ataattgttgttgttgtggcggcggcggtcgtggtggtgatagtgatatttggaatttgaggattgagtggggggcgtgaaaaatggctgccaggagtgatcaccaaacggttcctctttcagttctcctgaggcgtgaattggcgaacgagaaaattgagaaacctgagattgctcatggtcaagcatgccagagcaagaaaggggaggatttaacactgctcaagacggaatgccagag

SEQ ID NO: 78183 - DNA, 239 bp, Glycine max
  Clone ID: 700964505H1
gtcacttccaaaaggtgttgacatccattggtaacttttgtatctgctcaattgctgtgggcatgttgattgagctcgttgtcatgtaccctatccagaagaggtcttacagagatggtattgacaacttgttggtgcttctcattggaggaatcccaattgccatgccaactgtgctgtctgttaccatggctattgggtctcaccgcttgtcccaacaaggagccatcacgaagagg

SEQ ID NO: 78184 - DNA, 239 bp, Glycine max
  Clone ID: 700964507H1
taagaatccactctcgattgctaccattccaaattcaagcttcttacgagagattcgttcattgcttcttctttttttcctttcattttatacggcatacagcaccagactttccttcatgggcatggcaatttttccataaaaattcgttttttatttcctctctttttttaattttttatttgggtcttttcgatcactttgattgaaagacctttttcttcttggttagtttttgt

SEQ ID NO: 78185 - DNA, 217 bp, Glycine max
  Clone ID: 700964508H1
gtgcaattcacatttttgtacatccttatcagcatttcaacttcaacagtaacttaattacaggagagagagaaaactatgatatttaacacattgcagtttgatagaaggtggattgaagaatatacaccttaattgatttttctctctcctgtaattaagttactgttgaagttgaaatgctgataaggatgtgcaattcacatttttgtacaat

SEQ ID NO: 78186 - DNA, 239 bp, Glycine max
  Clone ID: 700964509H1
attattattattattgagtagtgcgatctagtaggaatgttgctaacacgaattgttacgaattcaaaaacagacaatcaaattaattgtattaacatccaggtagagagcggataataactatctgcaataaattttagaatccttacattttgtgcagcttggtatgataactgttcgtactaaactactaattatcatcatccttttgttttactcttttcattttgttccgtgag

SEQ ID NO: 78187 - DNA, 156 bp, Glycine max
  Clone ID: 700964510H1
ctaacctacctctttttcttctctctcaacaacttcaccttcttcctcctcgatcatgtctcacttcaagggcaagtaccatgatgagcttatcgccaatgctgcgtacattggcactcctggaaagggtattcttgctgctgatgacgtcaacag

SEQ ID NO: 78188 - DNA, 240 bp, Glycine max
  Clone ID: 700964511H1
tgaatatgaatcatggagagaaagcttggggcataatgcacatggttggaagataaagtactataagggtttgggtacaagtactcctcaggaagggagagagtactttcaagatcttgataagcataagaaagactttgtttgggatgatgagcaagatggaggtgcaattgagatggcattcagtaagaaaaaagctgaggataggaagatctggattcgtaattttgagcctggcac

SEQ ID NO: 78189 - DNA, 242 bp, Glycine max
  Clone ID: 700964512H1
gagctaaactcatatgtggcattgagaaaaacgtacatgaataccattggaaataaaaaacttgaactttttgacaatggagcaggagcaagtgtatctacagctgaagaaaatgttcaactggcatcagaaatgtcaaatcaagaacttatcaatgctgggacgaagacaatggatgaaactgatcaggctattgagagatctaagcaggttgtacatcaaacaattgaagttggcaccca

SEQ ID NO: 78190 - DNA, 239 bp, Glycine max
  Clone ID: 700964515H1
catatataaattttggatttcgcacgtagctagctacagaagacaaaggggccttgagtctcgagatcttgtcagatcggaacgcaaccgccaccgagtccgttttgtttgtgggtgtcgtgcgcgagattaattcattggcgtcacttagcttgggccacaagatgctttcaagcgttatgggaagggaagttactggcatacaggttatggaaaagaagccaaatggtgccataggg

SEQ ID NO: 78191 - DNA, 249 bp, Glycine max
  Clone ID: 700964517H1
aatatattcattttttgcaagagaaggtgcacaagtatgaaggttcatttcaagggtggagtaacgagccagaaagattgatgccatggagaaataatgacaagccagcagaaagttttcaacctcgtggcaccgataatgggtcaagtccatcaccaacaattcctgggagtacccagaatgtagaatctggcttgagcacagcaactacctccaagacaatggatcatcaggctggaaaaatgaaca

SEQ ID NO: 78192 - DNA, 244 bp, Glycine max
  Clone ID: 700964518H1
cctaagaaccctttctggttcaaccgcgatcgcttcgttctctctgctgggcacgggtgcatgcttcagtacgcgcttctgcacctcgctgggttcgatagcgtcaaggaagaggatttgagggaatttcgccaatgggggagcagaactccgggacaccctgagaattttgagactccgggaattgaagttacaacaggtcctcttggtcaggggattgccaatgctgttggtttggcccttg

SEQ ID NO: 78193 - DNA, 149 bp, Glycine max
  Clone ID: 700964520H1
cttttccggcactcacactgttgtcaattcaatcgttcatgctcgcattgcattttcgccttgctttcgtctgcttccatcgtgctaacatagggttgcttctcttctctctgtactctggtcgagcctgtcggcatgtcgagcgctgg

SEQ ID NO: 78194 - DNA, 240 bp, Glycine max
  Clone ID: 700964521H1
ctatcttctctcggagccgctattatccccagacgccaccgccgcagcaccagaagaagaagaagagtgatggctgagtacgacctaactccgcggatggcgccgaatctcgacaggcaccttgtgttccctctcctggagttcctgcaggagcggcagctctacgacgacgaccacatcctgaaggcgaagatcgaccttctcaacaacaccaacatggttgactacgctatggacatc

SEQ ID NO: 78195 - DNA, 239 bp, Glycine max
  Clone ID: 700964523H1
gcgttgcttgcttgagtgatttgactcgtgtcgagtgtattgtatttagtttaagcgtggctgatcgagtgagtatcagaatcaattcaattttgagctagtcatgaagatccactgcgacgtgtgtaacaagcaccaggcctctttcttctgcaccgccgacgaagctgccctatgcgacggctgcgaccaccgcgtccaccacgccaacaagctcgcctccaaacaccaacgcttct

SEQ ID NO: 78196 - DNA, 242 bp, Glycine max
  Clone ID: 700964524H1
atggatctgcttgccatcgcctccattgccgctgccatagagggttgttccggcgcaatccgccttgcatgtgctaacatcattagtcaagtctacgatcccgagagacagatattggaatcggcgataaaatggccggttaatgtgttgaaggtggcgaaggaagcagtcgtagagcgcgtctgtatcgacttcatcgattacgtcgattataccacgtcctaattggtcagctgataaga

SEQ ID NO: 78197 - DNA, 241 bp, Glycine max
  Clone ID: 700964525H1
atattttgctagtcattataacttccttcacatttggtttcattgagaaagttgtttcaaatccaagttctcgtccatatgcggcaattttcaactttggtgactctctaagtgacaccggcaatttccttgcatctggtgccattttattcccagttatcggaaagcttccttatggtcaaaccttttttaaacgtgcaaccggtcgttgctcagatggacgactaatgattgattttat

SEQ ID NO: 78198 - DNA, 239 bp, Glycine max
  Clone ID: 700964526H1
gacatctctaagctagctgcaacacaactctgcaatttttgtgagtatttggatgatgaattctcgtgtcgttcgaagtgtttcagaatgttttatcaaaccgttgggccaagctacagagtcacacctaatatgtcatttaacaccatgggatattgctatgatgtctttgcactacatccagaaaggtctactcttcaagaagcctgcaacacttgttgatccacaagatttcatgg

SEQ ID NO: 78199 - DNA, 240 bp, Glycine max
  Clone ID: 700964527H1
gaagaacgaatcgaaaaaagagagatcatggcgatggcaaacttggctcgacggaagggttacgccgtcgttttgtcgtcgaggtcgtcgctttgtctgacaaggtggagggggttcgcgtccggatctgacgaaaacgacgtcgtggtcatcggcggcggtcccggcggctacgtggcggccattaaagcggcgcactgggtctgaaaaccacttgcatcgggaaacgtggcactctcg

SEQ ID NO: 78200 - DNA, 243 bp, Glycine max
  Clone ID: 700964528H1
aaaaaacaaaaccatttgatccaacagacacactccctctctctcttgatcattctctctcagtgctctcgatctccatctgcaacttccttgtctgacagatcctgtgttccggagaaaggaaaggaaaggaaagatgtcggggcaaacgcagcgtctgaacgtggtccccaccgtgacgatgctgggagtggtgaaggcccgattggtcggcgccacgcgcggccacgcctacctgaagaa

SEQ ID NO: 78201 - DNA, 236 bp, Glycine max
  Clone ID: 700964529H1
cttttgttatgcctcatggctgcaactgcaaccgcaaaaaccaacaatgacaacaaccctgaaataacaagggaggaaatccaaactgccatagccaaagcagtggaattaagggcccttcatactgcattaacacaaggaagtagtccaggcacaaacaatgctagatttccgtcaccttccccggcttctcacttctctgcccaagactaccctgttttcacagcaagttatga

SEQ ID NO: 78202 - DNA, 244 bp, Glycine max
  Clone ID: 700964530H1
attcaaacaaaacaacttatgatagtaaaagggtagaattcgaaaaaaaaaaattgcagatattacaaagaagaagaaatgctcgattaactcgtaaatcacattcttttttaaaatttttcatgaaaaggatatacagagatatatttctatatatcagttgtattccgaggatcaatatacaactttttcttgaattaacaaaaaatttttaaataaatccatttacgataatgaagcaaat

SEQ ID NO: 78203 - DNA, 245 bp, Glycine max
  Clone ID: 700964531H1
gcaccacttcaggcgtggacatgcccggagcagattaccagctcacgaagcttctcggcctgaggccctccgtgaagcgcctcatgatgtatcagcagggctgcttcgccggcgggaccgtactccgcctcgcgaaggacctcgccgagaacaacaagggtgcgagggtgctcgttgtctgctccgagataaccgccgtgacgttccgcggcccctcggacacgcacctcgactcgctcgtggga

SEQ ID NO: 78204 - DNA, 246 bp, Glycine max
  Clone ID: 700964533H1
gcatattgaagagcaaggaagaaagtggagaagataagggtctaaattgggaagatgcaaaaaagatgccaataacttcaagggtcattcaggagactctaagagttgcttcaattttgtcttttactttcagagaagcagtagaggatgttgaataccaagggtatcttattccaaaagggtggaaagtgctacctctatttaggaacatacaccacagtccagacaacttcaaggagccagaaa

SEQ ID NO: 78205 - DNA, 236 bp, Glycine max
  Clone ID: 700964534H1
gtgctgctcttctgcttcatccttagaccggagctttgagtctcagtctcttcttctgtgttgtttgcaaaacatgttttcttttttgtttacctgagtgaaggaagacatagacatacctagttgttattgctgttttttgttgttattgttattgaatttagatggagccttcactcctactttcttcaccttcatcatccacccctttacccgtcttcctctcaaacacactt

SEQ ID NO: 78206 - DNA, 238 bp, Glycine max
  Clone ID: 700964536H1
cttcttctcttgcggctagggtttcagcgcagttgcttctacatttaaggaagatgggtaaggaaatggttcacatcagtattgtggtcattggccatgtcgactctgggacatccactaccactggtcacctgatttacaagcttgcaggcattgacaagcgcgttattgagaggtttgacaaggtagctgctgagatgagcatgaggtctttcaagtatgcctgggtgctggacaa

SEQ ID NO: 78207 - DNA, 238 bp, Glycine max
  Clone ID: 700964537H1
ttctgaattgcactgacccgagctcccatgcctttgttagagataacaaatgcgcaactatccttccggtattcactgacaatcccaatgccacaccatcatgctaatggaggagggtcttggatttccttccgcagccttagaattagaaacttgaatgtcattaaggctgtagccaccttggatgctaaacctcgcttggatttggatgcacctcacccgcctggctttttgctcg

SEQ ID NO: 78208 - DNA, 238 bp, Glycine max
  Clone ID: 700964538H1
attgcgcttcacaaattctcagtctacgacttgggtgttggatttcattaagttgtgataaacatgggaaaagactcaaagccaaaggagtcgggaggcaagggaaaggggaaacaggctgcaagtggaagtgatgagaatgcttctaagggaaaaggaaaaggtgggaaaggtggagatgggcttggtacttgcacctatgtcaaagctaggcatatcctatgtgagaaacaaggta

SEQ ID NO: 78209 - DNA, 236 bp, Glycine max
  Clone ID: 700964539H1
aaaaaaaaaaaacagaacaacacagaaactcaaaaccaaaataaaattattatggatcacattcataggttacgttgttttgggacaatacccaaaattccttttctattgctactttccctgcttctcttcagtttcgttaacgcatccttcgacctcgctactatacccttcaacgacggctattctccgctcttcggagctagcaacgttgttcgctccgaggatggatacgg

SEQ ID NO: 78210 - DNA, 229 bp, Glycine max
  Clone ID: 700964542H1
gtgattgacgtcaaccgcagaccatctccacttcttatctccggtctccgacgaactctccttggaatttgtagtgcagaggtgctgccttttacactaccaggttttgtggattgtagtgtctgcggttatgcgctgcgggttctgcgactagtgttaacgatgatcgtcactgcgctcatcactgcgatacttgcgggactttgcattggcccaatcaacggcaggc

SEQ ID NO: 78211 - DNA, 203 bp, Glycine max
  Clone ID: 700964545H1
gagctattgtagtatgtacaaataactattgttaattgtaatgcatgaagaaactgaattcacttaatagcttgtagatttcaaaggctatttcatatctgtatattatgctatatctatacaggtatgcaacatactctgcaatgcattatagtgtcagactggaatttcagcaagtatttactcacaaaacgatctcgtta

SEQ ID NO: 78212 - DNA, 243 bp, Glycine max
  Clone ID: 700964546H1
cggctcgagcttggttgagagtgagtttggaacttgaaagaaactagaatggccactttagacgaacgcccttctgcgaaaaggtggcttcctctcgaagctaaccctgacgtcatgaaccagttcctttggggtcttggccttccagtggatgaggcagagtgcggtgatgtgtttggcttagatgaagagcttctggaaatggttcccaagccagttctcgccgtgctttttctttatcca

SEQ ID NO: 78213 - DNA, 249 bp, Glycine max
  Clone ID: 700964547H1
gcacatcttttccttagacatggaaagggaatcctccaatcacaaggaaggttattaaggaaaatgaggtttatgccatcttccttgtcatcaaattctcatcggcctgctgactgcccttgttgactcaaggcataagaaggcttttaaggttaaaaactgcattactgacattgatcctgagcgggaaaaagaagaaaaagagaaggctgaaagtcaaaatatccgtgctaatgtgcttcttaaccg

SEQ ID NO: 78214 - DNA, 240 bp, Glycine max
  Clone ID: 700964550H1
aaaaaacttgtcttttaagttttaactctaagccatggctcttcccctgttcctcctctgcttcatgctctgcatttcactcacacaccaaacgattctgttacccctaacacactcaatttcgaaaacccatttcaacagtacccaccagcttctcaaatctacctccactcgctcagcctcacgcttccaccgccaaactcatcataactccgtagtctctctcccactttcttcagg

SEQ ID NO: 78215 - DNA, 241 bp, Glycine max
  Clone ID: 700964551H1
gcagcgcattatagcacaccacacaaaaaagcaaaacagagagaacaactgttactcacacacgccatgggtaaatgaatggtttttgagcaacagcagttaaaagagaaaagggattcagcgaagatgacatcggttggtgtggcaccaacttcgggtttgagagaagccagtgggcatggagcagcagctgcggatagattgccagaggagatgaacgatatgaaaattagggatgata

SEQ ID NO: 78216 - DNA, 235 bp, Glycine max
  Clone ID: 700964555H1
gtaagaagcaatgaagttaattttgagaatttatgcatgaattttgtcttggtgttacttaatcagagttacatttgattatatataaggtaaaaattgaaatattattttgttgcagcttcttcgcacaaagtatagttgcgccaaattatccaattgtactagtagaactgaaaggattcttaaagaaagtggaagtcaaggaattttattgtacgactttgtgattgtgagc

SEQ ID NO: 78217 - DNA, 238 bp, Glycine max
  Clone ID: 700964556H1
tcgatgttgatcgtatagctgccggattaccttgtggtagtgaagggtttctattaatgtatgctcggtggaaaaagctggaaagggacctgtataacgaacgcaaggagcgctttgacatcacccaaattcctgatgtctatgattcatgcaaatatgatctcttgcataatgcccatcttaatctagaaggattggatgagcttttcaaggttgctcaggcacttgctgatggtgt

SEQ ID NO: 78218 - DNA, 239 bp, Glycine max
  Clone ID: 700964557H1
gccccatatcacaaaccacattaaaaaaagactaccacgtattcttctctctccgtctctctctctctctctctctcttcacagtgccaatggcggatccaatcgcgaaggttctgatcgcgtttgcgctcttagcttccctcttgctgtgttcgcacgcttcctccgacgttcccttcatcgttgctcacaagaaggcctccctcaacagactcaagtccggcgccgaaagggtctcc

SEQ ID NO: 78219 - DNA, 235 bp, Glycine max
  Clone ID: 700964558H1
ctcatttctcgtcttcactgagaacaatccttcttcgtgcatgctcctcgtttctatctaaaggggcgaaagagtagattataagggggtaagtgagaaagagagtaaaaacaaaattaaaacatgactatggaagagggcagggtcgagaacgaggactacacacaagatggtactgtcaacattaaagggaaacctattcttagatccaaaagtggtggttggaaagcttgct

SEQ ID NO: 78220 - DNA, 239 bp, Glycine max
  Clone ID: 700964559H1
ttgcttttcgacaaaaccgttacccttcgtcgtcttatacctgattcttcatctccgttcgagggtcaacacttgaagatcttagctcgtggcaatggccgattctccaccgagaaggaattcaaggtccccttccccatggagggctgagtcaaggtctaggtcaaggtctagatctaggcctaggtctaggtcccggtcaagatcttttgagaaacaaaggccaagatcccggtcga

SEQ ID NO: 78221 - DNA, 238 bp, Glycine max
  Clone ID: 700964560H1
aattaacaaacctgggggaagaatttgataattatcacaccaaatattacagtatataatacaataggaccttcctgctgaaatatatactgtaatatttggtgtgataattaacaaacctgggggaagaatttgataaaaaaaaaaaaaaaaaaaaaaaaaaacaaaaaaaaaaaaaaaggggggccctccaaaaaggagccgaggaccccgggaattatttccgggccgggttttg

SEQ ID NO: 78222 - DNA, 247 bp, Glycine max
  Clone ID: 700964562H1
agcctctatccctttctattggcaacgagtgcggaaaaaaggtatggtgactatcttgtggactacttgaccgacttggagcatcataacctgatccttctaaacaagttaccacagaggttgccagccaagcccctcgttttagtcttcaagtcttcaattatttttaaggacttgaatggtatgttttctttctctttagcatttcttgattaatactacaatgttatttacttagtttattttg

SEQ ID NO: 78223 - DNA, 248 bp, Glycine max
  Clone ID: 700964563H1
ctctaacggtgaaacgtatggggcagcaatatggcagatccccgagctatatggcgagttaaattcacctcagctagagagaattacctcacttgacacagattctggcaagattaaatgtattctatggtggccatctggaagacatgataaattgatcagcatcaatgaggaaaacctgtacttgtggaatttagacgtttcacagaaaattgcactggtacaatcgcaagattccgctggtatgc

SEQ ID NO: 78224 - DNA, 245 bp, Glycine max
  Clone ID: 700964565H1
tgtttgagaaacaccaaaggcttcaccctccaagtccttaccggttgttggttcatggagttctcctcattcatgatcatgtcagtgtcaggagcaagctacatgtttagtctttactcaagggatatcaagtcagttttggggtatgaccaatccaccctcaatttcttaagcttcttcaaagacttggggtccaacataggcatcatttcaggcctaatcaacgaggtaacacccccttgggt

SEQ ID NO: 78225 - DNA, 243 bp, Glycine max
  Clone ID: 700964566H1
attcagttcataatttcttccaacaaattatatttttcttacaaaaaaaatggcaggtgaggtggtgaagaaggaagagtctctcaacctgaaagtcactaacaagagccatgttcaatcagaggagaaaattggaagaaaagagtaccaattggtcacttttgatcttccctacttggccttttactacaaccagaagctcttgttttacaagggtgaagatttcgagggcatggtccaaaa

SEQ ID NO: 78226 - DNA, 240 bp, Glycine max
  Clone ID: 700964567H1
cctagtaatgccgccgatggggaggaagcgaaaggtagcacccaaatcttctctatccaccgagccacctctcaagcagcaacaaccaaaacccgaaaatccccctcaagaatacgaagaagtcgaagaggaagttgaggaacaagaggtagaggaagaggtcgaagaggaagaagaagtagaagaggtggacgaagaagaacatgacgaggtagaagaagaggaagaagatgacgacgt

SEQ ID NO: 78227 - DNA, 237 bp, Glycine max
  Clone ID: 700964568H1
gccgaaaatagaatctgaaattcaagaagagggtggatcagaggcaaacccacttaacaaaaatgatcatgtagatggatatgtaagagagaaggacatggaaaaggcacttgaacaccaggcccaacttattgaccaatatgaagcaatggagaaggctcaaagagactgggaggagaaatttagagagaataacagcacaacaccagattcgtgtgatccggggaatctctcaga

SEQ ID NO: 78228 - DNA, 235 bp, Glycine max
  Clone ID: 700964570H1
ctggactctgacgttccaccagtccccgctcccgcccgcaaccaactggtggctgcaatgctggccgttgaaaatgacgcttctctcacccaacacgacaagacccgaaaacgtcaatagcttttgactggataggctcccgcatacgacgacgacgacgacgaacaagagaataaatcatccttatcggatattctctccagatctctcaactgatccatctgtatccagttac

SEQ ID NO: 78229 - DNA, 234 bp, Glycine max
  Clone ID: 700964571H1
tgtttataaaggagttccaaaggattacaccggcgaagatgttactgttgataacttttttgctgctttacttggaaataagtcagcactgactggtggcagtgggaaggttgtggacagtggtcctgatgatcatatatttgtatactatactgaccatggaggtcctggggtgctcgggatgcctgctggtccttacttatacgcggatgatctgattgaagtcttgaagaa

SEQ ID NO: 78230 - DNA, 225 bp, Glycine max
  Clone ID: 700964572H1
gctgtatttcaccgccgtagatgcgcattttccagtaaccggtgaccttccaacgcggcgtgaggcgctgggataccggaatggtagtgtatgacgaaagcggcctcgaaggaggtacgcgattcagattgcgataacacttcacgcgacctacctaggaggctcgtctcctcgatgttctctgcgctacagcggcgtcacgttcggagaacgtcgtgatacact

SEQ ID NO: 78231 - DNA, 236 bp, Glycine max
  Clone ID: 700964573H1
ctctctctttcgatctgggtactaaccctaacccgcttcgaaccgtggcttcctcaggctcgcagaacctctctcgaagaaaaccttcttcttcttcgtcttcgtcttctcaacaaacacccgggtcgacccggatcgtttaccgagaatctcggatcccatcggaatccgatttcccgatctggcagcagaactggttcatcgcattgctcttcgtcatggctctcggattcttc

SEQ ID NO: 78232 - DNA, 238 bp, Glycine max
  Clone ID: 700964574H1
gtagttcttcatcatagtcttaaacattaaaccttagcaaaactcaacaatgctagacatcaaaggctacctcgtactcttcttcctatggttcatatcaaccattctgatacgttccatcttcaagaaaccacagcgtctaagactcccaccgggtcctccaatttcaatacccttgctgggacacgcgccatatctccgttcactgctccaccaagcattgtacaagctatcactg

SEQ ID NO: 78233 - DNA, 237 bp, Glycine max
  Clone ID: 700964575H1
gggatgcttcagattgggcaaccaatggaggcaaatatagagtatattacaagtatgcaccctatgttgctgagttctctgacctggtcctgcatggttgtgcagttgatcccattgagcatgtggccaagtgtgacagtgccctaggttctgaagaagttccctctggtgtcacccaagtacaaataaccaaaatgagaaacttcaggttgaggcacatgacatattcttactgct

SEQ ID NO: 78234 - DNA, 238 bp, Glycine max
  Clone ID: 700964576H1
gcagcttggagatctgaacaaactcatgcatctggaaattatgggactcctcaaggtaatggtgggcaagttggttatggtgttggctatgggggtgctcagtctcgacaagcccaacagcagtaattttggtagatgaatctcttgctggatcttaaacttcaacttgaggatccctggcttttaaaagtcttaaatcatgaggtcacaatgaattcttccagcagcaatggagtgg

SEQ ID NO: 78235 - DNA, 242 bp, Glycine max
  Clone ID: 700964577H1
ggctaatctctcactcttgttcttcggtctcctcctattctccgctgccgtagccaccgtcgaacgaatcgacgatgaagacaaccttctgatccgtcaagtggtgccggacgcggaggaccaccacctgctcaacgcggagcaccacttctccgccttcaagacaaagttcgccaagacctacgccacgcaggaggagcacgaccaccgcttccgtatcttcaagaacaacttgctccgcg

SEQ ID NO: 78236 - DNA, 244 bp, Glycine max
  Clone ID: 700964578H1
caccgctcgctttcttaactagagccctctccgttgagggtttctccaggtgtggtttgatttacagtttctgatgctgaagaaataaaaaagcttgaaggcttttgctcttctgtgtgaaaaatgttggaaagtggtgcgaaattcccaggaataatagatctcaacagaaataataacaactactatgatttctctcaaggcttttaccataagcttggggagggtaccaatatgtcaattg

SEQ ID NO: 78237 - DNA, 247 bp, Glycine max
  Clone ID: 700964580H1
cttcgtagtttgatgatggcttccacacacaagcacacatcaatacgatgatccccgtgtcctgtttctgcgtttcaacttcttcctttcaggagcaatttgcagccgagccaggaaagcgaggagcattattctgaatcgaagattaaagaggttaaggatgcaatcgagcccttatctggacgaagcttgaagtactgcactgataattgtctgaggagatatctggaagctcgtaattggaatg

SEQ ID NO: 78238 - DNA, 243 bp, Glycine max
  Clone ID: 700964581H1
caccaacttcgtccccggaaagtgagcgtcaaagaacgaaatgacttttgagagtttttagatttgtgtttggtgaagtacttcagataatgtgaattatcttgtgtatccgaatccaacttaatgttacttgctttttacaaaactcaagtgtcaatttgttctctcattttatacttctaagcttttgacgccacattgaatttgaactctaattgaactaaaaaatgtttcccttcaaaa

SEQ ID NO: 78239 - DNA, 237 bp, Glycine max
  Clone ID: 700964582H1
ttttgacctgagttaatgatcattaatgctgttttgaaattctacttttccattacttttcttgattagttattcctctttatgcagcttctttactccttgggatgaatgatgttagatctgacagggcaagaaggcaaagatcagatagccctttctcctttcctcgccaaaaacgttcagtaaggccccgcttgtacctttccattgattcagattcagagtaaaggtcatacc

SEQ ID NO: 78240 - DNA, 92 bp, Glycine max
  unsure (1)..(92): unsure at all n locations
  Clone ID: 700964583H1
ctttccctaacctccttcttcttcactactaatcttcacaaccatatcatccccaaaacaaatgaaaatccacgtatttngaagatccgacg

SEQ ID NO: 78241 - DNA, 235 bp, Glycine max
  Clone ID: 700964584H1
ctaatccaccccaacccaaccctattgaattgaattgggggaagaagaacatagaaagaagaagaaaaatctgcacaattgttgtaattgaacgatgtctgctgcggtgtgcggaagcaagagatctttgttcgaagagcttcccccttccccgccagtatccaagaggctccgctgttcctcctcccctattcgcctctctctcccttctctcatcgagcaccttcgccctctc

SEQ ID NO: 78242 - DNA, 234 bp, Glycine max
  Clone ID: 700964586H1
aaaccccgttttcagtgacatcgagatcgatcgaacatggatgaggagtacgatgtgatcgtgttgggcacgggtctcaaggagtgcattctcagcggtcttctctccgtcgatggcctcaaggttctgcacatggacaggaatgactattacggaggagaatccacttcgctcaatcttattcagctttggaagagattcaggggagatgacaagcctcctccacatttggga

SEQ ID NO: 78243 - DNA, 222 bp, Glycine max
  Clone ID: 700964587H1
gtccttcgcttggaaccgcagtgtctgagacgatcaatgcactagtagccgccgcgagttcgatctccggcaatctaactaaaacggcggcgtatagcgagaactgcgagcatggagcatgagaacgcgagcaagggggtcgaattagtgaacgagatagccagcatctccgagtacaggcctccgattagaaatcagtactgcaacttggcgcggaggctg

SEQ ID NO: 78244 - DNA, 232 bp, Glycine max
  Clone ID: 700964589H1
ctgttctcgcgatttcggaagggtcgtgtttccctgcttcagtttcagcttcggcttcgagaagcgtcgattgggtccttaagctgttccttctctgtttctgacaaactgtataactcctatcaaacatgagcggtcgcttttctcgcacaatttatgtcggcaacctgccctctgatataagagagtcagaaattgaagatctattctacaagtatggccgtataatgga

SEQ ID NO: 78245 - DNA, 237 bp, Glycine max
  Clone ID: 700964591H1
cacagacaaatgccttttctccttcaccagtgtttggtcaatcatcagccaatcctttctctagcacagcacctaattctaacccttttgcgcaaaagagttcacctttttcttctggatttggaacttcggctgctcctgccttcagttcatcagcttttggttcttcaacgtcagcagcagcaccttctctttttggctcatcgccatctccatttggagctaactcttcttcaa

SEQ ID NO: 78246 - DNA, 201 bp, Glycine max
  Clone ID: 700964592H1
agtgaccagactgggccaccttgtgaatgctggcagtatctgaagccgtgcacagatctaccttgagtcgctcccgcactaggtgcaccagattctcgacccgctcttgggtcccaccctgctctgactaggtgatcaagctcacgtcggtccagcatcaaacccgggtccagtacaggacgctgttcagggccttcgtcg

SEQ ID NO: 78247 - DNA, 240 bp, Glycine max
  Clone ID: 700964593H1
atccaatgattgttgcttgtcactgtgagggaaggggatggaagttttgggcagattctaatttgaaaggaaaattctgggggcgttctatccagttagatcctgtgggtgtcctcactctacagtttgaggatggtgcaacatttcagtggagcaaggtcaccacttcgatttacaatatcatactaggtaaaatttattgtgaccactacggtaccatgcacatcaagggcagtggca

SEQ ID NO: 78248 - DNA, 248 bp, Glycine max
  Clone ID: 700964595H1
ctcactctttcttcccaccttcctctccttctttctttctgcttaaggtctacacaagttctctgcttcttctccccctattgacctttggtcatcacaagcgaaaacccacttctggatcttctggtgtaaaggccattagaagctctagaaattttctaattgagttggtgtatagtgttgaagggggtgaaatctggagcccagtttgttagttgttactcacttcatctgtaagctcataggtt

SEQ ID NO: 78249 - DNA, 251 bp, Glycine max
  Clone ID: 700964596H1
ctgcttcattgcattattgcagataagatcaaccctactcccttcagattcgggccaagatggcatcacttcatgctaatgtgacatcagttgtttgcaagagtggcaaccatgcttctcaatcgaaatttccaagctcttcattcttgcctgggtttgatgttgttggtcgtgcttcaaatgcttggaagaaagaacttgtcccatcttccatttccttggtgcctagagccacactaacatttgatccc

SEQ ID NO: 78250 - DNA, 278 bp, Glycine max
  Clone ID: 700964601H1
gggactgataggagtaggcttgtattttttgatcggaggagtgagtgtgagttggaggatttgcttcgagcttcggcggagatgttagggaagggtagtttagggacggtttatagggcggtgcttgatgatgggtgcacggtggcggtgaagaggctcaaggatgcgaacccttgcgcgaggcatgagtttgagcagtacatggatgtgattgggaagcttaagcatcctaatgttgtgagactcaaagcttattactatgccaaggaggaaaagct

SEQ ID NO: 78251 - DNA, 260 bp, Glycine max
  Clone ID: 700964602H1
cttttaattggtataggcgatgtaccgtctgctaaactttctctgaggtgcaaccacaaatgcataaataccctgacactattttcgcagatccagcaaatgatcccattgtccctgtgactgtggctccaaaacattatttattcaattctaaacatccagatatgaaacatatgcatggtgaaaattggaacaacactgtacttgtagatggtaatgctggtgccaagttccaagtaggaatagcaacgttcccaagt

SEQ ID NO: 78252 - DNA, 264 bp, Glycine max
  Clone ID: 700964603H1
atctatcgagacggtttaacacttagcatctgctgagggtaccttggtagacaccacactacccataatatggtcgaaaacaacaacccaagggtttttggttcttctatgtttctatgtttgcttgtgttgatgatttggaacaagattgttgttgttgttccacaagccgaggctcgagcattttttgtttttggtgattcgctagttgacaatggcaacaataactacctattcaccactgctcgtgccgactcatatcct

SEQ ID NO: 78253 - DNA, 273 bp, Glycine max
  Clone ID: 700964604H1
caagaaccctaatcccaatcagccatgcagcaaggagactacacctccgctccatctccatattatcaattccctcatctccaaaaccccaatcccaatcccaatcccaatcccgatccacacccaaacaacccttacgcttctgcacctcccttcacccccaattacgctccctccgattacaccccttacccttcctaccctcaaaatcccgatccttctccacccactgctccttcctttcctccctcttcttccaaccctaatttaccc

SEQ ID NO: 78254 - DNA, 270 bp, Glycine max
  Clone ID: 700964605H1
gttgctttcagctaactgatagttgtgtgcaattatttgaattcaagaatgtctcaacccgactcgttggtggctgagattgaggtgaaaacctctgctgatcacttttacgacaccttgaagggtaagaaacagcatcgtattcatgatgttgcccctcatcatatccataaggtggaagttcatgaaggtgagtgggataaatctggcaatatcaaggtgcttacattcgctgatggggacactgttgagaccttaaaggagagagtt

SEQ ID NO: 78255 - DNA, 272 bp, Glycine max
  Clone ID: 700964606H1
tggctatgctgggggaggacggtcgcggctacgaactggcacggaagcttgacacgtgcggcgtgtggcgaacctggctcggcgacgccacctacgccaacttcgcacccttcctctcttccccttccgcctgggactccttcacctccaccactcacatccctctccaactcagagtccgcgccctcctcttcgacaaagccaccgcttccctctccccaaaccctaatccctctctctctatccaacgcctcaaccctagttacctccaa

SEQ ID NO: 78256 - DNA, 271 bp, Glycine max
  Clone ID: 700964607H1
acggactttagttccatccccataattgatattagtccccttttggctaaggcagatgatccaaaaatggctgaggatcctggtgtgcttgaggttgttaaacaattggataaggcttgtacagaggcagggttcttctacgtgaaaggacatggttttcctgagactctccttaaagaagttagagatgtaacgcgcagattctttgaactttcatatgaagaaaaggcgaagatcaaaatgactccagctgctgggttcagaggttatc

SEQ ID NO: 78257 - DNA, 268 bp, Glycine max
  Clone ID: 700964610H1
ggtaaatagtagtagggaatacgcatgcccttggttcctctacaaaatcaaaagggtttatctgagaaacctagacagtagacacggcagatgttgtccttggtcttctccacaaccacggatattccaaaacccagttacctgtctttgtggcaataggttaacttcagtgttgttatgccaaatctgacaacgttcactgaaatctgtgagtgaataaatggttcctaattttctcattgcaaggttaactgcatcattatcatcg

SEQ ID NO: 78258 - DNA, 266 bp, Glycine max
  Clone ID: 700964612H1
agagacaccactacacatcagcatattccttacagagagaacaagaatttgactggaactgctaggtatgctagtatgcatactcatctaggaattgagcaaagccgtagggatgatttagaatcacttggatatgttcttatgtactttttaagaggaagtctaccttggcagggattgaaagctggtactaagaagcagaagtatgagaagattagtgagaagaaagtttctacttctattgagtctctctgtcgtggctatcc

SEQ ID NO: 78259 - DNA, 266 bp, Glycine max
  Clone ID: 700964613H1
aaacacatcacgcaggagcagcagctggcagatctgtctcggcagattcttagggggctggcgtacctgcaccggcggcacatcgtccacagggacatcaagccgtcgaatctgcttataaactcgcggaagcaggtgaagatcgctgacttcggggtgggtcggatactgaatcagacgatggatccgtgcaattcgtcggtggggacgaacgcctacatgagtccggagaggatcaatacggacataaacgacgggcaatacga

SEQ ID NO: 78260 - DNA, 267 bp, Glycine max
  Clone ID: 700964615H1
cttcttctcttgcggctagggttttagcgcagttcttctagatataaggaagatgggtaaggaaaaggttcacatcagtattgtggtcattggccatgtcgactctgggaaatccactaccactggtcacctgatttacaagcttggaggcattgacaagcgtgttattgagaggtttgagaaggaagctgctgagatgaacaagaggtctttcaagtatgcctgggtgctggacaaacttaaggctgagcgtgaaagaggaatcac

SEQ ID NO: 78261 - DNA, 282 bp, Glycine max
  Clone ID: 700964616H1
tcggctcgagaacagaatctactctctttttttctaccttagattccttctccaacaatggctctcgccgtttccactacttcttcctcttcagcagctgctgcagcttctagctccttcttctctcgtctcggatcttcctccgacgcaaaagctcctcaaatcggttcgtttcggtttccggagaggtcgcttgtttcgtctgttgttgtcaatgtaactcaacgacgctccttggtgaggccactcaacgccgaaccgcaacggaacgattctattgtt

SEQ ID NO: 78262 - DNA, 269 bp, Glycine max
  Clone ID: 700964618H1
attttcatagcattttcagaggaaaatggcgggtacggtttcgacttgtttcttcttcgtgtttcttctttctctccttcttccttttcagatctccgctgaggaatcctcggagaaggagttcgtactcacattggatcactctaactttcacgacactgtcagcaagcacgatttcatcctcgtcgattcctacgccccatggtgtggtcactgtaagaagcttgctccggagtatgagaaagctgcttctatcttgagtagtcatg

SEQ ID NO: 78263 - DNA, 265 bp, Glycine max
  Clone ID: 700964619H1
gaggaattcatttgaattagggttactctttttcttcgtttcatcatggacgctcagagagctctactcgacgaactcatgggtgcagcgcgcaacttgacggaggaagagaggaaggggtacaaggaagtgagttgggacgataaggaagtgtgtggattctacatggtgcgcttttgccctcacgatctctttgtcaacacgcgcagtgatctcggaccttgccccagaatacatgacccgaagttgaaagaaagttttgaga

SEQ ID NO: 78264 - DNA, 264 bp, Glycine max
  Clone ID: 700964620H1
ccgatggccgcatgtatacattccgttgctgtttttcagtggagtagattatattgatgctcctacaccatatatgatgggactctattcgggtgttgatacttctgctctggcaattgatggggttgttgttgtggaccttgagtataatcgtatcactacctcagaggaaattcctcctattcctgagccagaattcagccttttgcgtggtgagataatgaagctattatatcccaatgtaattggaattgatgagatgaa

SEQ ID NO: 78265 - DNA, 268 bp, Glycine max
  unsure (1)..(268): unsure at all n locations
  Clone ID: 700964621H1
cttatggacaaaggatgggtttcctctcaatctcttcttcctcccacacccgacaatcatccgnttcctctcctcggattccccgtcaaactcagccgccccaccatggaactccaccatgataaccgcaaacttgtcgctgaagtcgacttcttctctcatactccgccacccaacctcgtcaagaaggaacttgatcaaacacctcttcacattaatactggtttacaactccttactgctaacaccaggagtgaccaatctaccg

SEQ ID NO: 78266 - DNA, 270 bp, Glycine max
  Clone ID: 700964622H1
gtgctctctccaccctctattatattataaacattttgccatgacataactaaaaacttcaaaaggcagggtcatcttcagcttctctcactttgatgcaacctttaaattagtccaatttcaattattcaaagacagtcccacccacttcccatctttctctcttcttttctgtgcagttgaggaaaaaaaactatgctccaatccaacaacaagcaaagaagcttctcctcacttttcttctttatcttttctctctaagccttttgt

SEQ ID NO: 78267 - DNA, 270 bp, Glycine max
  Clone ID: 700964623H1
gtatgtaacatgtacagtcatacaagtggtgtaaataatttattcatagcctaagagcttgtatctcaattggggtgtgacatttatgacggaagtttgatcctccgccaagctaccccttcttgtaccaaggtatatatattgaaaaaatcaatctacataaaatgtaatatatcattattttactcctccaaaaaaaaaaaaaaaaaaaaaaaaaaaaaaaaaaaaaaaaaaaaagaaaaaaaaaaaaaaaaaaaggggggggccccc

SEQ ID NO: 78268 - DNA, 269 bp, Glycine max
  Clone ID: 700964624H1
aaacttgtagcctctcatggaggctgataatggaactacactcaatgtgttgatgaaagcatggactaaaaacgagcttagagagtggaagccctgtgccaacgcaagtcttcctgaaacagaattgccaaagtcaaatgggttccttataattgaagcaaatggtggattgaatcagcaacgcttgtcgatatgtgatgcagttgctgtggctggactactaaatgcaactcttcttattcctatatttcatttaaatagtgtatggc

SEQ ID NO: 78269 - DNA, 267 bp, Glycine max
  Clone ID: 700964625H1
ggagtgctggctatttttcatttgctttgtgggatgctcgtacaagagagctactgaaagttttcaattcagatggacagattgagaatcggttggatgtgtcctcaattcaagacttttcagtggagcttatttcaagttcaaggaaagacaaaacacaaagttccattgggttctttcagcgttcacgtaatgccataatgggggcagcagatgctgttcgtcgagttgcagcaaagggaggctttggggatgataaccggagaa

SEQ ID NO: 78270 - DNA, 265 bp, Glycine max
  Clone ID: 700964626H1
gtaagattaaacaccaaaaagatccagattctcctggtcttactatgaactatgaagggagcttgaagtgatgttcggataaaaggtttaggtagtggccaaccttaacaaatcaaaagaagttagcaattgataaaaaaaactcacagatgcatcatcaacttgctctacctaccaccttattttcggccttgtgaggaacaaagggtctaaataaatagccttgtataacgactctaattaactcaccctttttgtcaaaact

SEQ ID NO: 78271 - DNA, 263 bp, Glycine max
  Clone ID: 700964628H1
cttgaaagcgagaacacccttgtttgttttagctcctaagttggaagcttgtagattgattttcactgccaagcaaaagaaagtgagggaatctaacccttaattgaacacaatgagttcattttacatgtctctgaacccttcaatttctcaatcgtgttacaaacccaagcaatttttcaatttggagagagagagtactttggtgggaagaagtcctgttattcagattagatgccggagggttgtgagtgcgtgtctta

SEQ ID NO: 78272 - DNA, 267 bp, Glycine max
  Clone ID: 700964629H1
ccttctgaggttaaagcaaaaaacaaagagagagagagagagaaaatgatgaagccatcgatgctcagatctctccactccgccgccacccgcggcgcctctcatctcttccgccgtgggtacgcctccgagccggtgccggagcgcaaggtagccgttctcggcgccgccggcgaggatcgggcagcctctctcccttctcatgaagctcaatcccctcgtttcgagcctctccctttacgatatcgccggaactcccggcgtcgc

SEQ ID NO: 78273 - DNA, 266 bp, Glycine max
  Clone ID: 700964630H1
gggagttcctaaggattacgttggtgaagatgttactgttgacaacttttttgctgctatacttggaaataagtcagctcttactggtggcagtgggaaggttgtggatagtggccccaatgatcatatatttatatactactctgatcatggcggtccgggagtgctagggatgcctactaatccatacatgtatgcatccgatctgattgaagtcttgaagaagaagcatgcttctggaacttataaaagcctagtattttatc

SEQ ID NO: 78274 - DNA, 270 bp, Glycine max
  Clone ID: 700964631H1
gacgagtttcatgcttacgtgcatggaaggttaccatacgagaaactgaagcctgatccagtattaaggaaccttctgctttccatgcctcagcgtaaaataatattcaccaatgcagatcatgcacatgcagttaaagttctcaacagattgggtttggaagattgttttgagggcatcatatgctttgaaacgcttaatcctcccaaacaaatcaattgcatggatgtaccaaatgataatcatgtgctcacagatttaacagaaaat

SEQ ID NO: 78275 - DNA, 272 bp, Glycine max
  Clone ID: 700964632H1
gctcatcacagccgatcttacatcaattattgttcaattgatctctactgctggtagtcttctcccctctgttaggcacaccctcacaaacgcaaatcccttggttggccagcttgaccagcttcatgggattaacctcccttttgaatcagaaccaagtagtggtattaggccacaaaataacagtggaaataaactgtttgatcagtccattcagaatgatctaccaaataaattggaaatggagcaaaactacaatatggaagagcatg

SEQ ID NO: 78276 - DNA, 274 bp, Glycine max
  Clone ID: 700964633H1
ggcctagccagctagcgcttcttctctcgcattccgtggagatctagtgctgccaaacctcgctgaaaattagggtttcgtttcggaggtagacgaagatgttcggaagggcaccgaagaaaagcgacagcaccaggtactacgaaatcctcggcgtttcgaagaacgcttcgccggatgatttaaagaaggcttacaagaaagccgccattaagaaccaccctgacaaaggcggtgatcctgagaagttcaaagagcttgctcaagcctatga

SEQ ID NO: 78277 - DNA, 264 bp, Glycine max
  Clone ID: 700964635H1
aacgggcgtgtggttcgtgttggtctttcagtacgacggcagactatggaggacgtcattatctggccactggcgagctcgtgagccttagcgagcaacagcttgtggattgcgatcacgtgtgtgatccagaagaatatggagcgtgtgactcagactgtcatggtgggttgattaacaacgcatttgagtacatacttcagtctgtgggagtacagaaagatgaggactatccatacaccgggagagatggcacctgcaaat

SEQ ID NO: 78278 - DNA, 261 bp, Glycine max
  Clone ID: 700964637H1
cagctatctagcttgttctcttttattttttttcggttcaccggcggcatggggaactgcaacgcctgcgttcgagtcgatgacgtggcagactcaaaccgcggcaaaaagaataagaaaaccaaaccgaacccctacgcggaggaagagatacgctccggcgttccgatccgtgtgctgaaggacgtgacgtcacggagcctcatcggcgacaagtacgtgataggccgggagctaggtcgtggcgagttctggataacg

SEQ ID NO: 78279 - DNA, 264 bp, Glycine max
  Clone ID: 700964639H1
ctggatctattgaagaagagtgccgcagttgcagagatcacgagatagttctcaacaaatgagaacacttttacagtaggagggtcttttgctgttgaccctctgacacaggtcaaagcaaggctcaacaatcatggaaagctcggggccctcctgcagcacgagatcataccaaagtcagtgtttactgtttctggtgagattgacaccaaggccctggataaaaatcccaggtttggattggcaattgcgctcaaaccttga

SEQ ID NO: 78280 - DNA, 264 bp, Glycine max
  Clone ID: 700964640H1
gttccatggagcaaaggagctgtttttgtctgaccattatgatgttcagagtgctcacacaattgaagggaagtgtgttgtgcactcttttaagaactataccaagcttgagaatgtaggtgctgaggattactatactaggtttgagtacaaggctgctactggggctttcacgcctgaccgtgttgctgtgtattgcaagtgcgagatgccttataacccagatgacctcatggtgcagtgtgaggggtgcaaggattggta

SEQ ID NO: 78281 - DNA, 255 bp, Glycine max
  Clone ID: 700964644H1
gacaagcagctcaagaaaaatctgcaaagaataaaacaagaggaggaaatgcaacttacttgttgatataaacttcagacagagcgagttgttgtaaagctagccttgttgcagccatggccacccacgcggctctagcttctacaaggatccccactaacaccaagttcccatccaaggcttcacactctttcccaacccaatgcgcctcaaagagacttgaggtgacagaattctctgggctaagatccactt

SEQ ID NO: 78282 - DNA, 267 bp, Glycine max
  Clone ID: 700964648H1
gagaaagatagagagaataacagcacctctttctctctgtctctctcccctcgttgatcccaaatctactagggattctcattcgatgcgattcggccggaagctttcgttttgcggatttttttaattattatttttcctggctatcaggaaagttgaaaaaaagatggaccatgacaagactggatgccaagctcccccagaaggtcctatattgtgcatcaacaactgcggattttttggaagtgcagctaccttgagcatgtg

SEQ ID NO: 78283 - DNA, 273 bp, Glycine max
  Clone ID: 700964649H1
gaagcaggaacaagcagcaatggcgccgaatgtacacacgcaaggttagcagaaaccccgaattgataaggggaattggaaagtactcgaggtcgcagatgtaccacaagaggggcatttgggctatcaaggccaaaaatggtggcgttttacctcgccacgaccctagacccaaacctgaaacacccgctgaaaaaccacccaaattttaccctgctgatgatatcaagaagccccttgtcaacaagcacacacccaaacccgctaagctca

SEQ ID NO: 78284 - DNA, 265 bp, Glycine max
  Clone ID: 700964650H1
caacctcgatgctcgccaatcctctctcctcgctctcctcaacctcgctgttcgcaacgaacgaaacaaggtcaaaatagtgacagatggtgctatgcctccactggtggagctcctcaagatgcaaaatagcggtatacgagaattagctacagctgcaatcttgacactctcagctgccacatccaacaagcccattattgctgcttctggagccggacctctccttgttcaaattctcaaatctggaagtgttcaaggaaaa

SEQ ID NO: 78285 - DNA, 262 bp, Glycine max
  Clone ID: 700964651H1
gaggacttcgacatgccgacggcggaggcaatgggcgaggacttcgacttcgccggcgccaccggcggcgacctcgacggcagcagcagcaaccccatcttgaaggtcggcgaggagaaggagattggaaaagagggtttgaagaagacactacttaaagaaggtgaaggatgggacactcctgaagttggtgacgaagttcaagttcactatactgggacgttgcttgatggcactaagtttgattccagcagagataggg

SEQ ID NO: 78286 - DNA, 167 bp, Glycine max
  Clone ID: 700964653H1
ccataatcatttagctattaagagaatatgtttttaatgaccaaattgtcctcaacctcaaatatacttcctcctcttcatactgcaaacacaaccaacttcttcaaccacaaccacaaccactttgtgcattaaaacccccacccctctcagttccacacaacata

SEQ ID NO: 78287 - DNA, 263 bp, Glycine max
  Clone ID: 700964654H1
cggcaactcacaaaattggaggtaaaggagatagcagacataatgttgaatgaggtgtttgatagactgaaagccaaggaaattgatctctcagtaacagaaagatttagggagagggtggttgacgaaggatataatccgagttatggggctaggcctctaagaagagctataatgcgacttttggaggacagcatggctgagaagatgcttgctagagagattaaagagggtgactcagttatagttgatgctgactccga

SEQ ID NO: 78288 - DNA, 262 bp, Glycine max
  Clone ID: 700964655H1
gcttttccctcgttgaaatgaaaatgggttcttctttgtggactttgtgtctaattttggcttcactagcctcttctgcattctgtgcctttccacggaggccagtggatgttccattcggcagaaactacgttcccacttgggcttttgatcacatcaaatacttcaatggaggttctgagattcaacttcatcttgacaagtacactggtactggcttccagtccaaagggtcatacttgtttggtcacttcagcatgaa

SEQ ID NO: 78289 - DNA, 262 bp, Glycine max
  Clone ID: 700964656H1
ctggatattttgtgggctaaaagttgcgaggggttgcaatgggtaaaatcagtagagcgtgaagaaaaagtgggctcaatagtatgttcaaatgtatatcacttcagtgtcaatggttgcaacctgtatgatgattttttttcaacaggtttcgtgcagcttgatcatgtgaaaactttaagcctaagggacaataatttcacattccttcctgatagcattcgagaattgcaatttttaagaaaacttgatgtgagtggtt

SEQ ID NO: 78290 - DNA, 262 bp, Glycine max
  Clone ID: 700964657H1
gtgaattatcgattccaatattgaaatttttggatatatacgaaaaaatacggaccatctcatcatctacgttttgccaattgagaaatcctaatcctattattcgatttgaacccatcaccaatagaatacctagattatagatatgaaagaatatttttggtaaaagtaattattgataatttgtaataaaagactcgactcttactacaaatccattttcgaaacttatcttatatatctcctcacaaaaatttaattt

SEQ ID NO: 78291 - DNA, 261 bp, Glycine max
  Clone ID: 700964658H1
caccgtacaacatattttggaagtagagatcatggagaagaaaaaagatacaattataaagacagatccttaaatgcagctgcctacaaggatttgataaattcatacttgaagaatattaatactagaccaaccaatgaagaaccagctattgctgaccagtggaagcaaacggaaacaccaagcagcattgggcaaaagacagaaactgaggtgctccgcaaagaggaggcggaagaagaatctgaaatggatatgctg

SEQ ID NO: 78292 - DNA, 244 bp, Glycine max
  Clone ID: 700964659H1
ctctctccctctccctctccctccaaattttccttcattctcacgcgccgccgtggtttccgccggcggctactccctatccaccgcgcatccatcccgcttccctctcctcgcttttctcacaaaacaaaaaaaattaaaaatttctccgaagactgtgtattatcgttatcgatcactgagttaggttttgctgttcttcctagggttttattgtgtccaataacaagaggagggggaagag

SEQ ID NO: 78293 - DNA, 260 bp, Glycine max
  unsure (1)..(260): unsure at all n locations
  Clone ID: 700964660H1
gaaatttccaaattctcaattgtttcttccattcttgttgttgttgttcttcgcgataactccctttcgcggttcagggcagcaaacggattggaacatcgaagagactcaacatggaaatggggttcgccgcagagttcttctgagtttcaaagagaagccctcaggaagtaacgttacctttgaatgtactccttcgggtccttgtgtgccctgtctnctatctgagaaggttccttttttttttaaacccctcaaat

SEQ ID NO: 78294 - DNA, 257 bp, Glycine max
  Clone ID: 700964661H1
cccaatctcaaagttcctacaaaccccagaaggtggatgaaggtgaagatggatggcagactgttggtagaaagccttcaaggcatccacataaggttcaaaaggacaactggaacagctataaacgacctgctgatgagcaagaatactctaatgaggttgaagttggtgctgatgtggagccctcagaagatgaacttgctgatctgtcaagagcttgtgaaaaactctgggctcttgatttaaatcgtttggta

SEQ ID NO: 78295 - DNA, 264 bp, Glycine max
  Clone ID: 700964663H1
gaagaaatcaaccgaaggttccaatcaattccatatgtggctgcactcttcagtgcaatgctttggatcttttatgcctatgtgaagaccggagaaacgcttcttatcaccatcaatgcattcggttgcgtgattgagacaatttaccttgccgtatttatcacttactgcccgaagaaagctaggatgtcgacattgaggatgattgttttgttaaattttgggggattttgcacaattgtcctcttaacccacctactagca

SEQ ID NO: 78296 - DNA, 278 bp, Glycine max
  Clone ID: 700964664H1
attcagctcgataaaaacacaaaaagacccacagagaggaacatggcatgtccagcaatggcaaatgggaacggctcattgaagaacttgaagctaaatgacaccaagggaaagaccatcacttgcaaagctgccgtggtatatggtcctggagagccctttgtggtggaaaacattcttgttcatcctcctcagaaaatggaggttcgaatcaagatcctctacacttccatttgtcacaccgatcttagcgcatggcgaggcgtgaacgaggctca

SEQ ID NO: 78297 - DNA, 268 bp, Glycine max
  Clone ID: 700964665H1
tttgctattacctctttttccaaactctaaaaatttttagttccacaaaaccagaccataatggcagcagcctcggcctcatccaccatgatatcaacaccagccttatctccaagcacaagcatccaaaagcaccatcatttgaagccatccaacgtgtgctttcaaggccttagacccctcacaaggttcacaaccagagtgagcagcaccaccaaaagggttattccaaagggtggtgtcggtgttagagctgaactcaactcag

SEQ ID NO: 78298 - DNA, 258 bp, Glycine max
  unsure (1)..(258): unsure at all n locations
  Clone ID: 700964667H1
gggatgcttcaggttgggcaagcaatggtggcaaatatagagcacattgaacgtggggtccctgnggtgctgagttctctgacctggtcctgcatggttgtgcagttgatcccattgagcatgtggccaagtgtgacagtgccctaggttctgaagaatttccctctggtgtcacccaagtacagatgaccaaaatgagaaacttcaggttgaggcacatgacatattcttactgctatgacactgttagatacaaag

SEQ ID NO: 78299 - DNA, 262 bp, Glycine max
  Clone ID: 700964668H1
cgcttttgtcaaagagtatattgctgaaagcaagcctcttgggggtttaatatttttgcttccccgaatgttcagttttgagaacaaagatggtatgggaagtaatcatcaagatgagagtaaagaaccgctgaagaatgtattggatgaacttgaaaaaatacttatacatgccaacttaccttatcctgtgtattttgcattcgaggatgatagcattgatgctgtgttaactgatatcaagaagaatgatgtcactggt

SEQ ID NO: 78300 - DNA, 259 bp, Glycine max
  Clone ID: 700964669H1
gataattcagtggctcaccatatcaaatttaaaaaggataagatccgtgaatcgttgaaagttctcgagaatttaattcctggtgcgaaaggaaaggagccactgttagtcattgatggcactattgagtacttgaaaattttgatgtcccaaactggtgctcttggggtgaaatatcactaagtagtactcacagtcacagccactgatgttacagtatattggttgaaggacaattcatggtgaaaagatgtagctc

SEQ ID NO: 78301 - DNA, 257 bp, Glycine max
  Clone ID: 700964670H1
tgatcagtgcagagctggactcatgaccctttccatgtgatgagacgtgacaatcagaactgaagatagagactgaggaaaaccagtagctagtggttgagagtcaagagtgatggatatctccgacatcaagtcaccagcagaaggctcccaacaagggacaccaggggattcactgcgtagaaagaagctagccatatacctcatgtgagtctgaggatagaaggatggcctcaggtcgtgggtacacagcagga

SEQ ID NO: 78302 - DNA, 260 bp, Glycine max
  Clone ID: 700964672H1
gaatgattaacggtaacggaagaaacgagatctcgtcgtttcagtcgttatctgctcagctctggagagcggtgacacgtgcgaggaaattcaacgacccggccaaaacgtcgacgtttcggatggcggtgaattgccgccaccgtctggagccgaagatggacgcgttctacttcggcaatgcgattcagagcatcccgacggtcgcgaccgtcggagacattctctcgcgcgatctgcgcttctgcgcagatcttctg

SEQ ID NO: 78303 - DNA, 259 bp, Glycine max
  Clone ID: 700964673H1
atgagaatgatctgaaatagcttttgggggaccagggagtgactaacattctggatttgcattctttccccagtttactagttatttcctaaatatcaatgcttgttattccgtgtgtcaattttcttgggcaatagcagtgtttgtttgttctctatatcatacatttgacttcatttgtactaggaagaagaattgagaaaaggggaattggaagcagatgcagataggatgatgagagagtacagagctcaactag

SEQ ID NO: 78304 - DNA, 261 bp, Glycine max
  Clone ID: 700964674H1
attcaaacacaacacaacacaaagtgtcacaaacacacactccaaaactcagatctcgcctcacctctcttgttctcgttcccccaccccactccctcattttccttcctctacccccatttttctctaaccacccctcacacacttcacttacacatagagagagagaaagttcggtgcttttgtatagaatcatcaccccattaccctgcattcaccatttcatgcattgattctatctgggatctctctcaaaagaaa

SEQ ID NO: 78305 - DNA, 258 bp, Glycine max
  Clone ID: 700964675H1
ttttcctctttcgcagctcaaactcaaatccccatctattctctctccgtacttgatgtcagttttgttctcaatcattcgatctactcttagactggtcaggacagtagcacataatcttcttctataacatcgaccggggtcgtcctctcgataaatgctacctctgcgtccacaatcacaggttggagcaccaaaaacatcgctgtctcttgtttcctcagactccctcctgtctcctgatgaacctaggtcaaa

SEQ ID NO: 78306 - DNA, 258 bp, Glycine max
  Clone ID: 700964676H1
ggagaagaagaagggtgagctaaagtcaattttccttcctttcctttccactagtcacataatcccgctagtggacatggccagactcttcgccttgcacgacgtcgacgtcaccatcatcaccaccgcacataacgccaccgttttccaaaagtccatcgatttagatgcgagtcgcggtcgccccatcagaacgcacgttgtcaacttccccgccgcacaagtgggtctccccgttgggatcgaagccttcaacgt

SEQ ID NO: 78307 - DNA, 240 bp, Glycine max
  Clone ID: 700964677H1
cacaaataatgatattagtcctgctgttataccttcttcggtgagcattttggaagcccggagttgtcgaatatgtggaacgcaagttgaagctggatcttgtgatccttctgcggtggctgtaggatcgatattgggctccgtatctaatcttcgtaaagatttatcgctcctttcagctccctctaaaactggaaggagtgtgcaatgggactctgacatgtcatcactgccgtgtgg

SEQ ID NO: 78308 - DNA, 257 bp, Glycine max
  Clone ID: 700964678H1
ctcttctcacttccttgtcttcctctctctcaccctttgaaattctctcacttctattttagattctcaattcgttattgtttttggttcacttggttcatattcaagcccaattttggtgtctcacttattggttttccaattggagtgattaaaaagttgattttgggaaatgggtatgtgaagtttggttttttgatttctgggtcttgaaattgaggtaaaaaagttgtcaaattggagagaaaattcggggt

SEQ ID NO: 78309 - DNA, 262 bp, Glycine max
  Clone ID: 700964679H1
gatcaactttgtttaggaattttacacttcaagaaagaaatttcatccttctctgtagataattccatgacttgatagttgatacttattgatcaccagtctgctgactaagaaatgccctggacagcctttttgtaaagccacatcattaccaaaaaccttcctctcaacctctctgaactttacacaggaagttcttttccaagccattttttcttgattgggttaactaaatttcaaataaaaatgataattcctacaa

SEQ ID NO: 78310 - DNA, 264 bp, Glycine max
  Clone ID: 700964680H1
ctcgagccgctcgagccgtaccaatcactacataaactcttcatacttcacaacacaacacaacacacacaaatcttctttcaaggtttttttttttttttttaaaaaatttctcatcgtatctgaaacaacgaatgatccatggccccttcattcgacacaagtcctcatacggtatgcgtaatggatgcttcgggccacttgggcttaagcctggtccaaagactcctccaaaggggctacaccgttcatgcctccgttcaa

SEQ ID NO: 78311 - DNA, 282 bp, Glycine max
  Clone ID: 700964681H1
gctcaggttcggctctgaggctttaattggtataggcgtgccaaggtcttgttaattttgagcgttaagtgctgcaactaatcagatcccaagaccttggcctaccttgccatacagaaaaaaaaaaagcaaaaataaaagccaaggtttggagccaacaaaaataaacacaaagcacaagtcatgcaaagaataatggttggaagtgcaccaaaggttgctttcaccctcttggccactttcgccattgtcattccatgccttgaggctggcattgctgag

SEQ ID NO: 78312 - DNA, 258 bp, Glycine max
  Clone ID: 700964683H1
gaaagggtgagagagaaagaagaaggaaaggaaagatggatggttctgggcagcagcagttccagctcacccgcttaggtcggatctattttctgccactcttcactttcctccttcggtttcgtcagaagccacttggaactccaacacctttccatcatcccaagtaacacacaacacaacacaacacaacacaacacagcaacaccaacttcctctttctttcttttctcaaacacataaaaccataactagttc

SEQ ID NO: 78313 - DNA, 99 bp, Glycine max
  Clone ID: 700964684H1
gcagagcaaagcagcagtaatgaagcgattattgattagtacaaagcacaagagaaaaacaagggattttggggggcccctcatcacccctggggcttt

SEQ ID NO: 78314 - DNA, 259 bp, Glycine max
  Clone ID: 700964686H1
gcggtcgttgacggcaaagagagacacaaacgtaatctgtgagtttggaacattgattcgttgtttcctctgcaaaatcaaatcctcattgtgattgttgatgaacaattgaagtatccctccgatttgaagattccggtgacggcgagccatggccaccggcggcgacggtgacacttccaaacaagagctcttccagctcatcaaacgcttcggagcttacgtcactttcaagatctccaatctcttccctctctct

SEQ ID NO: 78315 - DNA, 256 bp, Glycine max
  Clone ID: 700964687H1
ccaggtggaacatgttagagctgagaggaatttgctggctgaagttgccagtcattgcattgtgaaactttactactcatttcaggatgctgagtacttgtatttaattatggagtatctgcctgggggtgatattatgactttgctgatgagggaagacacgttaagtgaaaatgttgctagattttacattgcacaaagtgttctggccatagaatctattcacaaacacaactacattcacagagatattaaa

SEQ ID NO: 78316 - DNA, 252 bp, Glycine max
  Clone ID: 700964691H1
tacaaacatggcaatgaagaagttcttgtgggttgttctgtccctttctttggtccttggagtggccaatagctttgattttcacgacaaggatttggagtccgaggaaagcctgtgggacttgtacgagagatggaggagtcaccacacggtttcgcgaaccttggtgacaagcacaagcggtttaacgtgttcaaagcgaatgtgatgcatgtccataacaccaacaaaatggataagccttacaagctg

SEQ ID NO: 78317 - DNA, 253 bp, Glycine max
  Clone ID: 700964693H1
gctatctgcttcctcgtagtacttcattgagagagacatggacactgtactaagtactacgctgctactcatgttggcatgctccatcgtgcatgttcttcgttcactacaagcaagaatgagaagaaaatcaaactacaatcttccaccaggaccctctcttctcaccatcattagaaactctaaacaactctataaaaagccacagcagacaatggccaagcttgccaaaacctatggccccataatgcgt

SEQ ID NO: 78318 - DNA, 260 bp, Glycine max
  Clone ID: 700964695H1
tatctctcttcgttttgttcttccttgcgctcctcctcgttcgttcgttctccctcgcgtagatcggcaatggcggagaccgagacgtttgctttccaggctgagatcaaccagctcctcagtctcatcatcaacaccttctactccaacaaggaaatcttccttcgtgaactcatcagcaacgcctctgatgctttggacaagattagatttgagagtttgacggacaagagcaagctcgatgctcagccagagttgtt

SEQ ID NO: 78319 - DNA, 259 bp, Glycine max
  Clone ID: 700964696H1
ccaagcttctctgttaaaaaaaaatttaggcgtctaaagggccaaagcttagaaagttgaagctttttttgttgaggtgaaagtgaaatggttggcaaggataatctgagggctgaggacttgaacttgtgctttaagaagcttatgatggtggccgggagtgggaacagtgagaaaggggtgaacttgaaggttggggtgatcaccgagtggaaggatattcctgtggagcttctgatgcaaattctgtcccttgtgg

SEQ ID NO: 78320 - DNA, 270 bp, Glycine max
  Clone ID: 700964702H1
gcacggtggggctgataaatttacccctgacaaggggactgactggttgaccttgaattcaggctcaactccaaacccttacggtctccctgttggctgtgaatatttcctagtgacagtagccatgttacctgataccaccattcattcatcctctccttcctgatcctgcttcatccctggcagattagacgtgatggaagaatttaattgtacataaactacattcaaaatccaaatgctcttttcttatggtcggttaaccatttg

SEQ ID NO: 78321 - DNA, 272 bp, Glycine max
  Clone ID: 700964703H1
caagacacaaacataacaacataagaagagagagaaagagaaaacagagaaaaagaatgaatgaataaaataatcattcactctgtttctattcttctttctaccatagcataactatgatatgaacaccatataataattaacaacaataatttaataatactctcttcattgtaaattccatcttcacttcacttctcttctctgttctgtggagtatttaatcatttcgtaacaacatactttagttttcattctctcaaatttttttt

SEQ ID NO: 78322 - DNA, 266 bp, Glycine max
  Clone ID: 700964704H1
caggtattggcaaacagaaacaccctttctagcatagggatttgatctctccaccttggtgaaagccttgtgacccataaggcttttacagaaggtgggattttgactagctgggtgtttggctgttgagtttatggagggccaagttccttgttgaacagtgtttgtgttgcctttatctgcagcttttaattgaaccaatcctaccctctttgtttccatatgaaaagatcggttttttgtgattcctccgctcattgttgttg

SEQ ID NO: 78323 - DNA, 265 bp, Glycine max
  unsure (1)..(265): unsure at all n locations
  Clone ID: 700964705H1
tcttcatttgccaccaaaacattttctgtcaactggtttagatgtaccagtcattcaagagcggtgtgaattactggataaatatttgaagaaactcatgcaactaccaacagtttcggaatcaattgaagtatgggactttctcagtgttgattctcagacgtacatattctcaaattctttttctatcatggaaacattatcagttggcttgaatgccaaaccatttcagaagactanaaacacttcgaacttctctgcacct

SEQ ID NO: 78324 - DNA, 264 bp, Glycine max
  Clone ID: 700964706H1
aaaattaggagtagggttttgctaccaaaacttagcaaaacagacagcgatcagccttatcagcttagaagtcatcattttgaatacttctaactgaaaaaatgtaaatagtataggaaaaataggttttcccgcaaatatgtgtttgccattaaagaaattaagggttcttttccccttgttttctgttttttctttcttttttctatgtactgatgagagaaagaattagctagataaagtagtatgtgtatgactaaggca

SEQ ID NO: 78325 - DNA, 265 bp, Glycine max
  Clone ID: 700964708H1
accaccacaacagaaacaacaacaagcagcaccttcttcgctccaacgtcggaaccctcagccttagggttttcgcagtgtctggaaactccgcgttcaaaatgaacctcagcgagtacctcgtcactctggagaaacccctcggcatccgattcgcgctaacttctgatggcagaatcatcgtccactctctcaccaaagggggaaatgcggagaggtccaggataattatggtgggcgacacattgaagaaagctggcgattc

SEQ ID NO: 78326 - DNA, 257 bp, Glycine max
  Clone ID: 700964089H1
ctaaaatggccactctttcctcctacgaccacttcatcttcactgccttagctttcttcatatctggcctaattttcttcctcaaacagtaatccaaatccaaaaagttcaacctccctccaggaccccccgggtggcctattgttgggaacctcttccaagttgctcgttctgggaaacctttctttgagtatgtgaacgatgtgagactcaaatatggctcaatcttcaccctcaagatgggaacaaggaccatg

SEQ ID NO: 78327 - DNA, 256 bp, Glycine max
  Clone ID: 700964090H1
gcaaaatccctccttcgttccgctccgcaatcgcaaaccctaacctccgtaacccctcttcactcttccgtccccaaccccatcacttcccaaacaaacaccaacaacctcgaaaaccctctaagcaacaacaaaaaccttcttctcttcctctcttcaaatccccaaacctcgaagacgccaaaaaactcttcaactccatcgccaactcttcctccgacccccgcttccccaactccctcctccactcctacgc

SEQ ID NO: 78328 - DNA, 253 bp, Glycine max
  Clone ID: 700964091H1
ggaagaaacgtcttctgatcttcgaaactcagcagaagagagcagcagagctgaagtgccagtaactgcaaatgcacaacaaaatgcaggagttgcattgaacgaacggatgttgcagaccattaataggaatacacaaacccaatacaatactacgatggacctgagaaatgtagctgatgattctgcagtagaatcttcaagtggtaccaggagagaaagggatggaggtttagttccagtatggtctcca

SEQ ID NO: 78329 - DNA, 259 bp, Glycine max
  Clone ID: 700964093H1
attcatatctctctctctctcccccaagaaattcaacagagttttgattaacttgaaattgttcaacaagaaatggagaattcattgggaaagtacggaaaagagcttaatctcgaggctacagagttgaggttggggttgcctggaagcgatgagcctgagaaacgttctgctgttagaagcaacaagagatcttcaccagaagcaagtgaagaagagtgcataagcaagggcaacatgaattcttctgatggttctg

SEQ ID NO: 78330 - DNA, 262 bp, Glycine max
  Clone ID: 700964095H1
atcattcaaaagtttttgaaatgttgtcaccccttcttctatttctatgcctaactcttcttttgtttttgttgtccttcttcaaataccgtaaaaccttcaagaatccaccacttccaccaggtcctagaggacttcccataatagggaatcttcatcaactagatagtccttctcttcatgagcagctatggcatctctcaaagaaatatggtcctttattttcccttcaatttggattaaggccagccatagttgtttc

SEQ ID NO: 78331 - DNA, 261 bp, Glycine max
  Clone ID: 700964096H1
acaaagtatagagtgaaagaatgggtgagaaaagcaagattttgatcataggaggcaccggctacatcggcaaacatatagtggaagcaagcgcaaaggctggaaatcccacttttgctttggtgagggaatccacactctctgacccctccaaggcacaactcatccacaattttgaggctttgggcgttaatttggtccgcggggatctgtacgatcatgagaagttggtgaaagctatcaagcaagtagatgtcgtca

SEQ ID NO: 78332 - DNA, 230 bp, Glycine max
  Clone ID: 700964101H1
caactgtattggaggtgtactttgcttgtaacaaaaatgaggagctggctgccaactaccttttagatcacatgcatgagtttgatgaataattagatctcctttacaatttgtcaaaatatttgttttatgtttccttttgaatggtctttgttatgtaatgaaggtaatatttgataatgacaagtctcgaatggacaaggaatattttaatcaccgcattgttgcac

SEQ ID NO: 78333 - DNA, 258 bp, Glycine max
  Clone ID: 700964103H1
tacaagcacttgtgagagggtacttggtgcggaagcaagcagcagcaaccctgcatagtatgcaggctctaattagagctcaagcaacagtaaggtctaagaaatctcacggactcagcagcacaaagaatgaagcacatttgtttcaaacacaagcacgaagatccatggagagatttgatgacataaagagtgagtacatagctcccatccacagcagaaggctatcatcttcttttgatgccacaatgaataatg

SEQ ID NO: 78334 - DNA, 257 bp, Glycine max
  Clone ID: 700964104H1
cacaagccaagtgaaagtgagaaagaataaaaatcagagagcataatgtcagggatcattcacaagattggggagacccttcatgtgggagggcacaagaaggaggaggagcataagggtgagcaccatgctggagaatacaaaggggagcaccatggtgaacacagtagtgagtacaaaggagagcatcatggtgaacacaaagctggagagtaccatggtgagcacaagccagagcacaaagaggggttcctaga

SEQ ID NO: 78335 - DNA, 255 bp, Glycine max
  Clone ID: 700964105H1
gagagagagagagagaggcacttggaatccaaaaatgagagaaatcatcagcattcacataggtcaggccgggatccaggttggcaactcctgctgggaactctactgcctggaacatggcatccagcccgatggcatgatgccaagtgactcctccttcggtgtagcccacgacgccttcaacaccttcttcagcgagaccggatccggcaagcacgtccctcgcgccgtcttcgtcgatctcgagcccaccgt

SEQ ID NO: 78336 - DNA, 255 bp, Glycine max
  Clone ID: 700964107H1
ctgaactaacaaagcaaccctatgtcgaaggtggtttgtgtcaccggagccagcggcgccatcggatcatgggtggtcctactcctcctccagcgtggttacaccgtccatgccaccgtccaagatatcaaggatgaaaatgagacgaaacatttggaggaaatggaaggagcaaagagtcatctccatttttttgaaatggatcttcttgacatcgactccattgccgctgccataaagggttgttccggcgta

SEQ ID NO: 78337 - DNA, 254 bp, Glycine max
  Clone ID: 700964108H1
gttgtgcctaaagatgttaatgcagctgtgggaattatcaagaccaagcgcactattcaatttgttgactggtgccccactggtttcaagtgtggaatcaattaccagcctccaactgttgttcctggcggtgatcttgccaaggttcagagggctgtgtgcatgatctccaattccaccagtgttgttgaggtcttctctcgcatcgaccacaaatttgacctcatgtatgccaagagggcttttgttcattg

SEQ ID NO: 78338 - DNA, 252 bp, Glycine max
  Clone ID: 700964110H1
gcatttaccatttacaaatgtcttctccactggaaatcatttgaggctgaaagaacaagtgtatttgatcgtcttatccagatgattggttctgcaattgagaatcaagatgacaatgatcttatggcctattggctgtcaaatttgtctacactattgtttttgctccagcaaagtctaaaatctggtggtgcagctgatgcaactcctgtaaagaaaccgccaaatccgacatccctctttggaagaatg

SEQ ID NO: 78339 - DNA, 237 bp, Glycine max
  Clone ID: 700964114H1
tgtacgttcaggatttctgcacgtcggtgtgtgggttccactacttcacgtttccctcgttggttgggtatactcttccgtacgcttgggtgggtaactcggcaaagttctgccctggacagtgtgcttatccgttttcggtgcccgcgtatatccctaaccggaaaccgtttaagtccccaaacggcgacgttggggttgacggcatgataagtgtgattggacacgagatggctg

SEQ ID NO: 78340 - DNA, 243 bp, Glycine max
  Clone ID: 700964115H1
gtaaaaggagggaagagtgggagcaacgggtgagtgaaaagtgtgagaaaatgtctaaccctcaagaccagaaaccatggaaagcggaatacgcgaagtctgggagatcttcatgcaggacgtgcaagagccccattgccagcgaaacgctgcgtctcgggaagatggttcaatccaccaaattcgatggcctcgtgcccatgtggaaccatgctgcttgcgtattgaagatagccatcagat

SEQ ID NO: 78341 - DNA, 258 bp, Glycine max
  Clone ID: 700964116H1
aaatgcttggacatgaaaaatggcactgcatttgctggcatagcatccatcaatgcccatcctcagtgcagcaattgcttggacatgaaaaatggcactgctcagaaggaaccccgggcttctttcatctcagagctagtcattgaccactcagcgacaggtggtgtgaaacgggaacaagaatgtgtgatgtgcctttcagaggagatgtctgttctgttcatgccatgtgctcatcaggttgtttgcaaaacatgt

SEQ ID NO: 78342 - DNA, 255 bp, Glycine max
  Clone ID: 700964117H1
agataatatcatttccgttctcaaaatcataacagtacttcgcgtgccctagctcactccgtcgctcctcacccttccggcagtgcttggtcgtggccgtcacggttcaaacttcaaaagttataattggttcagcttgatcaggaaggagggtcatctgcagttcaaaaggtgtgaaagcaaagaagatgcagcatagaaaattgacttctggaaggccttctggaactgatggctctgattactcctaccgta

SEQ ID NO: 78343 - DNA, 254 bp, Glycine max
  Clone ID: 700964119H1
aaagaaaagaagaagaggttttgatcggatgcgatgagcacacaggggcaagtgattattgatgaggcggttctggatgacataatccggcgcttaacggaggtccgactggcccgacccggcaagcaggttcagctctccgagtctgagatcaagcaactctgcgtcgcttccagagacatcttcattaaccagcccaatttgcttgaactcgaagcccccatcaagatttgtggtgacattcatgggcagta

SEQ ID NO: 78344 - DNA, 254 bp, Glycine max
  Clone ID: 700964120H1
ctcaaatccaaaccctaaaataccaccgccgttctcatctctcttcccagccctcacctcaacgctgcatcttcacgtcgtctcacgaggtgcatatagtagagagggaaaatgagtcgaggaggcgcagtagcagcagcgaagggaaagaagaagggtgctacattcaccattgactgtgcaaagccagtggaagataagatcatggacattgcttctctcgaaaagtttcttcaagagaggatcaaggttgg

SEQ ID NO: 78345 - DNA, 249 bp, Glycine max
  Clone ID: 700964121H1
gtggttttctgattccatttgggaaagttttgacttttcatggttcaatccctcctcagttgttgttgttgttgtagatgagtttgaggaaatctagttccctgtaagtgtctgtgaaattagtctcagaaggtttgtttttggggacctccctttttggctttgagacttgttctcagtttgtggataaagtgatttgtaaggtgtttctagttttcttcttctgaagggtaaaagatggataaagat

SEQ ID NO: 78346 - DNA, 251 bp, Glycine max
  Clone ID: 700964122H1
gcgaaaacccacttctggatcttctggtgtaaaggccattagaagctttagaaattttctaattgagttggtgtatagtgttgaagggggtgaaatctggagcccagtttgttagttgttactcacttcatctgtaagctcataggttgaaccctctttttttggagacttacctgggaaaagatgatgatgtttgaagatatggggttttgtggcgatttggatatgttatgtgtctctcttggagaggg

SEQ ID NO: 78347 - DNA, 240 bp, Glycine max
  Clone ID: 700964123H1
gccgaagaaggtattgacgtcgatgatgataatgaaattggtgaaaacattactgcttctcctttgtgtgaaactcttctgttatgcagtgattggtgctcctcaaacttgtcctgctaacaatgaggataaatgcggcgattcagatgaatggaaaggggagttcttccctgacattcccaaaattaaatatgagggtccgtcaagtaagaatgtgctttcatttaaatggtataatgc

SEQ ID NO: 78348 - DNA, 252 bp, Glycine max
  Clone ID: 700964124H1
agcgcactccttcgagagatagttcaaacatggaggacgtggaagaaaactcagatcttttagacatcggcctggacaagggaacctcaaatccttcattgatgctttctttaccgcatgtacttgtggcgaccatttcttcattcctttttggataccatcttggagttgttaatgaaccacttgagagcatttctgtggatcttggtttccgtggaaatacattggcagaaggtctggtggtgagcatat

SEQ ID NO: 78349 - DNA, 253 bp, Glycine max
  Clone ID: 700964126H1
tatcttttggtttcctgaatccatttctttctacggttatcttatcttattggctaccatcttccctatcttcctcaactgggttctgcgtattgttttaagtttaggcttgtttcattttagtatttgattgctaattttatatttctgtattcatttgtttatttatttatttattactttgtttcattcacgattctagatgagctctaaggttagtgagggggttatttcctttatgttagatttaatc

SEQ ID NO: 78350 - DNA, 250 bp, Glycine max
  Clone ID: 700964127H1
aaagggatcgccggcggcaccctccgaagacggagatacacccactcacaaccactttcccggaaaataaccaccgaccacaatttcttggaatttattttgcggtgagggagctcgtctcgtgtgtcgtttagggctagaaatggggtttaagtgggtgcactgatgtcattgttcttgcttgagattcgtcaacttgcagaaatcgaggcaatggctgcatctaagaaactgataacaagagaagagt

SEQ ID NO: 78351 - DNA, 65 bp, Glycine max
  Clone ID: 700964131H1
caagtttgaccctctctgagttaccttacgttccgttccctttcctccatgatgcttccacacac

SEQ ID NO: 78352 - DNA, 259 bp, Glycine max
  Clone ID: 700964132H1
ttctctcaaaattttgataagaaagtcttgaccttgaagagagagagagggagaaagaacctactattcttcttcttcttcttcctgcatagctaattaatttccatggaggacttcaacaactacaacaaatcaaggtctcatggaaataatgggcaaatgatgcagcagatggagaggtactatggaggagcaccaccacaaccaacaaggccttatgatctcaggtcatacagtgtttcttcatatacacaagctc

SEQ ID NO: 78353 - DNA, 171 bp, Glycine max
  Clone ID: 700964134H1
gtcgccggaaagtgagcgtcaaagaacgagatgacttttgagagtttttagatttgtgtttggtgaagtacttcagataatgtgaattatcgtgtgtatccgaatccaacttaatgtgacttgctttttacaaaactcaagtgtcaaaaaagagaaagaatagagaagggg

SEQ ID NO: 78354 - DNA, 242 bp, Glycine max
  Clone ID: 700964137H1
ctgtacttcacaagtcacattaattattaggaaataatcgaattagagctgtagctatgagtgcgacagaaggtctaatgagaggaatggaagtgattgacacaggagctgccctaagtgttccagtaggtggagcaactctaggacgaattttcaacgtgcttggagagcccattgataatttaggtcctgtagatactcgcacaacatctcccattcatagatctgcgcctgcctttata

SEQ ID NO: 78355 - DNA, 249 bp, Glycine max
  Clone ID: 700964138H1
gtttcgaaacgcaatgtccactctgcttcactccgctcccacttcttctccttccttctctcggatcatcactcctcgtttcgctttcgctccaatcactcgcatctctctccgaaacggcgtccgtagcaaggcgatcgaagcagtgaagttggagaatggaaggccgagcgcgaggtagttcgtagtcagcggaagcgtaaacgcaattccgagttacgtcgtggcgccaaacgcgcgtgttcagga

SEQ ID NO: 78356 - DNA, 247 bp, Glycine max
  Clone ID: 700964139H1
gtcaagctcgtggacttacatggttcattcctaacgatgagccaactctgatctccaaacaacaactctttgcaagaattgttggcggactaggtgggagggctgcagaagaaattatggtcggtgagcctgaagttacaactggcgcagctggtgatttgcagcaaatcaccagtttggcaaaacagatggtgaccacatttggaatgtctgatattggtccttggtcacttatggaaccatcagc

SEQ ID NO: 78357 - DNA, 244 bp, Glycine max
  Clone ID: 700964140H1
gccatttcaatccccagtttcttcttcaacgtcctcttacgagcagatcccaattctccttcccagtttcaaaccctaattccctcattcccatacgctcagaagagcccactgtcgcggtggaacccgctcccgaacctgccaccgccgagcctcccccggtagagaaggaggagcccatacctgaagccaaggctaagaaaaccaaggaacccatacctaaaaaggttaccagatcacgcaa

SEQ ID NO: 78358 - DNA, 251 bp, Glycine max
  Clone ID: 700964141H1
ctcgagccgtgattgttgtgactcgttcttcttcgtcgttatcttcttcttttgttctttgtgtgtttgttgtttctctcacctgaaaatgtcttgcttcggtggtaactgtggttgcggaagcgcctgcaagtgcggcaacggctgcggaggctgcaagatgtacccagacttgagctacaccgagtcaaccaccaccgagaccttggtcatgggagtggcaccagttaaggctcaattcgagagtgctg

SEQ ID NO: 78359 - DNA, 243 bp, Glycine max
  Clone ID: 700964142H1
gagagtcctttggaggttgctcatgcgttttctctgtaaaaataaaaaagtaatagatttttctcattttttgtcttcggttcttctgtgccttgtccgagtcttctttaccggtcaaatcagagactctgttgatgagagaagagatttcatcaatcaccggaatgtgaaaacattaggaaaattaatttcaatcaaagcaagtatacaataatacgatggtcgagtttgggacgagaatgg

SEQ ID NO: 78360 - DNA, 246 bp, Glycine max
  Clone ID: 700964143H1
acaattttgactagaataagtgcagcacagagagaagtgcgaatcagagtgagaaagagaggcatggctgctgcaggtccagaaaacgtccctcctttcatcgccgctcagcttagccacctcctctcccacttcggtcttacagtcaaggttgaacaaatgtggtcgagtgacaaatacaactcaacccccctcgatcgcttcaccctcctcatcccctactgcttagacttcatcaaatgtatg

SEQ ID NO: 78361 - DNA, 250 bp, Glycine max
  Clone ID: 700964144H1
aaaattttcaaagtcgaagcgagaacttgccatttcgagggttttagggttagggttttctcaaattgcaagaacatgggtttcaacattcaaccctatgggattcagtccatgctcaaggaaggccataagcacctttctggcctcgatgaagcggttctcaagaacatcgacgcctgcaaacaactttccactatcactcgaacttccctcggtcccaatgggatgaataagatggttataaatcact

SEQ ID NO: 78362 - DNA, 243 bp, Glycine max
  Clone ID: 700964145H1
ctttctccgatggctaatccctcactcttgttcttcagtctcctcctattatccggcagcgtagccgccgccgaacggatcgacgatgaagacgaccttctgatccgtcaagtggtgccggatgcggaggaccacccgctgctcaacgcggagcaccacttctccgccttcaagacaaagttcggcaagacctacgccacgcaggaggagcacgaccaccgcttccgtatcttcaagaacaac

SEQ ID NO: 78363 - DNA, 243 bp, Glycine max
  Clone ID: 700964146H1
agcagctatggcatctctcaaagaaatatggtcctttatgttcccttcaatttggattaaggccagccatagttgtttcctctccaaaattggccaaagaggtaatgaaagacaatgaccttgagtgctgtggacgacctaaattactaggccaacagaaactaacctataatgggttagacatgggattttcctcatacgatagttattggagagaaatcagaaaaatttgtgttgtccatg

SEQ ID NO: 78364 - DNA, 253 bp, Glycine max
  Clone ID: 700964147H1
ttgccatggaagcaagattgcttccccatatgctccgagtcaagccctttgtaccacacaagcaacaaacccgagcctcttaccccagaggaagaaaaagaccttcaacttgccatccagagattccatgagctttgccataagtgtgtgcaagtcaacattcctttgttggttgatgcagaacacacttctgttcaacctgctattgactacttcacatactcctctgccatcttgcacaacaaaggtgaca

SEQ ID NO: 78365 - DNA, 256 bp, Glycine max
  Clone ID: 700964148H1
gttcagacggagaaagtgagaatggagttggaggagcagcgagtgaggcaatcaagaatgttgatagcggcgattcaagaagccgtggcgaagaaattgaaggagaaggacgaggagattcagcgcgtggggaagctgaattgggttctgcaggaacgagttaagaacctctgcgtggagaatcagatttcgaaggagttagcacaaacaaacgaagccacggcaaataatcttcgaaacaatctagaacaagttc

SEQ ID NO: 78366 - DNA, 252 bp, Glycine max
  Clone ID: 700964149H1
tcataagctttacttaattagcaaatccaaatatggcactttcttcttcatcatcttcaacatccatatttgctttagctttgttcactcttttgcttataggaagttcttcagctcaactctctgagaacttctatgatagtaaatgtcccaaggttttctatgccgtaaaatccgttcttcaatctgctttggctaaagaacctcgccagggagcatctatcgttcgcctcttctttcatgactgctttg

SEQ ID NO: 78367 - DNA, 251 bp, Glycine max
  Clone ID: 700964150H1
tgaaaatgagagaaatcttgcacatccagggagggcaatgcgggaaccagatcggagcgaagttctgggaggtgatatgcgacgagcacggcatcgaccacaccggaaagtacagtggcgactctgaactccaattggaacgcatcaatgtttattacaacgaagcgagtggcggaaggtacgttccacgcgccgtcctcatggatctagagcccggcaccatggactccgtcagatccggcccctacggc

SEQ ID NO: 78368 - DNA, 245 bp, Glycine max
  Clone ID: 700964151H1
ttggcatattgtgccctccctctttctagctatttccctctcttaacacaattaacaaagatatatcatatcatatcaactccaaatgatgaaaaatattgggttgtttcttcttgtggtggtggctacttttgtggtggcagccacagctggtagcttttaccaagactttgaaataacatggggtggtgagcgtgccaaaatctatgagaatggaaatcttctcaccctctccctagacagag

SEQ ID NO: 78369 - DNA, 248 bp, Glycine max
  Clone ID: 700964152H1
tgggtattttgagaatctacgggacaattctttctcctctaatgcttggtatcatgctcttcatattcctgatgttgatgtgatactggatgagcaaaatctccatcttgccaaagtcttatctcagactgacagaagcttggtgtacacagtttcgaatcctggttcagaattttcactttgtgattgttcctggtctaggctggggaacctctgtaaacatgtcatcaaggtggcaactttctgta

SEQ ID NO: 78370 - DNA, 248 bp, Glycine max
  Clone ID: 700964154H1
agcagtttctgataatacatgtcttcagcgtaaaaggaaggctgttcttcaggaagttactaatgtttgccgtgaaaatgcatacaagggttgtttcaactcaactaaaattcaggctaagaaaagcaagctggctaaggctggtcaaattaatgtgtccaaagtggctccttctgttactgttgactccaaagcaaaggaaacagcattgcaatcggaagatactatgtgctcaattaatttggaaa

SEQ ID NO: 78371 - DNA, 248 bp, Glycine max
  Clone ID: 700964155H1
acagagagtccccagctcagctcaggtcaactctctagttgtttgttgcattgttcattttctaggcttagtcattagatagaaagagaaggaaaaaagggctattatggcaggaggaggagctccagctaaagcagatgagccacagccacatccaccaaaggatcagttaccaaatatttcttactgcattactagtcctcctccatggcctgaggccatacttcttggttttcaacattttcttg

SEQ ID NO: 78372 - DNA, 244 bp, Glycine max
  Clone ID: 700964156H1
gtttggaacaacaactcctctttaaccgttggagctagaggtccaattctgcttgaggattatcatcttgtggagaagcttgcaaactttgacagggaacgtatcccagaacgtgttgtccatgccatgggagctagtgcaaagggtttctttgaggtcacacatgacatttctcacctgacatgtgcagatttccttcgagcccctggagttcagacgcctgtaattgttcgtttctcaactg

SEQ ID NO: 78373 - DNA, 248 bp, Glycine max
  Clone ID: 700964157H1
aagaaatttaagtgaggagctagagaatgatgatgaagtctgctatgtgtgcagtggtggttgtagcacttcttcttctggcggaggtggggcccatggctgaggctgtgacatgcaccccaacagagttgagtccgtgtcttccagcaatcacttccggtgctaaaccttccaatgcttgttgcacgaagctgaagcagcaaaaaccatgcttatgtggctacctcaaaaacgctagcttgaagcag

SEQ ID NO: 78374 - DNA, 247 bp, Glycine max
  Clone ID: 700964158H1
gccttggggaatccagagttctttaatatggtttttcccttgttgtttgatctatgcaattcagagcccctaaagtccgggcaagcacctttggccagtgatgctgctggatagttgaacagtgttgaagagatttctgttccacataacaaaatagttgactgtttaacctcttgtatccatgtggcacatataaatgatattcttgaaaagcaaaagggcttagcacacatgtatacagcattct

SEQ ID NO: 78375 - DNA, 245 bp, Glycine max
  Clone ID: 700964159H1
cagcggaataacgaagcctcctcgttcttcttcttccgccctttctctctctagaaccgtacggtcgtttctttctctctcctcaaccggagacagcgtcgccttcttttctgaatctcgcggtgttgttagttctgcggcggttgtagttccggcggcgatgggacagcaatcgttgatctacagcttcgtcgctcgcggcaccgtgatcctagcggagtacaccgagttcaccggaaacttca

SEQ ID NO: 78376 - DNA, 200 bp, Glycine max
  Clone ID: 700964160H1
acgaaatcttcacctttgcaccatttgcgtaaatttcgtcattaaaaataaattagcaggattggatgaaatcgaaaaataaaaattatgagctgaaattttgtgggagaaaatactaatatgtgagttttgagaagaagaaaaaaatagatgggaaaatattgtgcagaaagaaagagtgaaattgttctagatcgcga

SEQ ID NO: 78377 - DNA, 213 bp, Glycine max
  Clone ID: 700964161H1
gtcatattggtttattgcaaggtcggtggcaacccaaccctacccttgtctcctttctcatatgctatatatcagcctcctccacctagcacttgctccaattcactaccaccaaacacaacacaacacagcataccgtgtttcattttctctcacacacaaacctccttcgttttcattgacttctcaggaggtataactactatttgtcgc

SEQ ID NO: 78378 - DNA, 227 bp, Glycine max
  Clone ID: 700964162H1
cttcattctcctcggagctttgctcgttattcttctttttcttttctttctttcgtttcgttcggaaaacgcgtaggctgtgccgtcgtttttagtgggtggatgggaacgacgtcgtgtgagtacgtgagctgggaggaggtgtttatgtcgaacgacaaggggaggagggaggttcattacttgcttaaacgacgaggcggtggctcggatctggccgttttggg

SEQ ID NO: 78379 - DNA, 250 bp, Glycine max
  Clone ID: 700964163H1
gaatttggctggtgttgtgagtggaatccagctatgacgaagttaactggatggaagcgagaggaggtgctggataaaatgcttttgggagagctttttggcacccatatggctgcttgtcgcctaaagaatcaagaagcttttgttaatttgggtgttgtacttaataaagccatgactggtttggaaacagagaaggttccttttggtttctttgctcggaatggccaatatgtggaatgcctgcttt

SEQ ID NO: 78380 - DNA, 255 bp, Glycine max
  Clone ID: 700964164H1
atactctcctaccacggtcataattaccccataaagaaggacctgcaatgtgaaactgacaggttaactcatttctacacattcattctcaggccagatgccacatacagtgtcctggttgataatagagagagagattctggaagcatgtatacagattgggatattcttcctccacgaaaaatcaaagatgtcaaggccaaaaagcctgcagactgggaggaaagagaatacattgaagaccctgatgatgtc

SEQ ID NO: 78381 - DNA, 247 bp, Glycine max
  Clone ID: 700964165H1
gggagagtgcaatcagtttgtttcttcgcttcgtgactcgaatctgcgatgcctctctgtttgttcttctctgccgccgctttttctggtctgaaatgatggtttctgttagagtgcctcttttctcgattctccgcatactatcatcattgtaagggaaagcgatttgcgttttgacataatgtcgccaaaatatcagagtctccacaatcgccccatcaatcagtggtaggtgacagagctgaaa

SEQ ID NO: 78382 - DNA, 247 bp, Glycine max
  Clone ID: 700964166H1
ctccaaaccctagcggcactacacactagttctatcgctatctccccaagatgtcgagcgccgatcccgagcacagagaagaggaggaggcacccgccgttggcgacgacgaggacaccggagctcacgtcgctccaatcgtcaagctcgaggaggttgctgtcaccaccggcgaggaggacgaagatgcaatcctggatctcaaatcgaagctttaccggttcgacaaggacgggaaccagtggaa

SEQ ID NO: 78383 - DNA, 247 bp, Glycine max
  Clone ID: 700964167H1
aaacaacattggcatcatcactactcaccagcacttgtttcagtttcgctctcgtgtctctgcacacttagccaccctcaccaccaccatgttttcctctagaggcaacatggctatggcttcaccctcctcaatcttctctgtttatgcttccatgacagcctccatcatgctcctgcgttcagtaaccaacgacctcattcctcaaccatttcgtggctacctcaccaacgccttccgctacttc

SEQ ID NO: 78384 - DNA, 246 bp, Glycine max
  Clone ID: 700964168H1
atgtcctccttgttttaggggggtaagggaaagaaaacatttccattgtttctcagatctgcgaaacctcgtagcccccgaacatgggaaactgctgcgccacgccgtccacggacgaaacggcgaacaagaagggcaaaaagggaaaaaaggaaaaccccttcgcgatcgattacggttttaacgccgccgccgccgccaacgggtcgaagctcaccgttctgaagtccccgacgggccgcgaga

SEQ ID NO: 78385 - DNA, 244 bp, Glycine max
  Clone ID: 700964169H1
agcctccacagcactactgttatatatggattcgatgcttcttcgatcttttcctaatattaacaacgcttcttctctcgccaccactggttcttatttgccaaatgcttcatggcacaataggaaaatccaaaaagaatataattttttgaggtttcggtggccaagtttgaaccaccattacaaaagcattgaaggagggtgtacatgtaaaatgtgtaatataaaatttgttgtgaaagcg

SEQ ID NO: 78386 - DNA, 245 bp, Glycine max
  Clone ID: 700964170H1
cacacaccccaccaccaccaacactgagttttagcagaaggatagagagcagaatgattcaaagaactgtgtcctttcccagtttaaggaaattgcttcttcgggctggttgttctaaatctgcttcgtccaagatcggaacttacaattgctttgcttctcagtcctcccctctaccgagccacaaccctagttaccgtgatgacgagtatgctgatgtggactgggacagtcttggatttgga

SEQ ID NO: 78387 - DNA, 245 bp, Glycine max
  Clone ID: 700964171H1
gggtctaagaaaccaaatatccccctacctaaatgggtatctcagattggtgaatctcaacccagtattttcttcacagataggtcaggacagcattataaagaatgcctgtccatggcagttgataatcttcctgttcttgatgggaagactccagtccaagtgtaccagagtttctgtgagagcttcaagtcttcattctctccattcatgggctctacaatcacgagcatttccatgggttt

SEQ ID NO: 78388 - DNA, 244 bp, Glycine max
  Clone ID: 700964172H1
caaccttcacgactctgttgttgtgcacggcggcggcgaaggagagcgtgtacgagatactccccaagtacgggctcccgagtggtctgttaccggataccgtcaccgactacaaactcgacgaggatggccaattcgtcgtcgttttgccgaagccctgctacatacagttcgattacttggtttactacgagagcaagatctccggcaagctcagctatggctccatcaccaatctcaaggg

SEQ ID NO: 78389 - DNA, 247 bp, Glycine max
  Clone ID: 700964174H1
gtgattgtgttgggagatgtcgtgtttctcagacccgaacaggaaattgaaactatgttgtttcgcacgtttgaggtggttaattagggctataaaggactgcaaaagcccatcagctttcatccatcaccatcattcattcaattttatcattctggggccttcactaatggaaaatttgggatttttttggaaaaaaaaaacaagaaaagaaaattcaagagtttggttcaattgtaatctgctt

SEQ ID NO: 78390 - DNA, 244 bp, Glycine max
  Clone ID: 700964175H1
gaggaattcaatgtcaacaaaagtagtatgccctggcttgctgtcccatacgaggacaggacaaggcatgaccttcgaagaatctttgatgtaaagggcattcctgctttggttctcattggaccagatggcaaagtcattagtgtgaatgggaagttaatggtctcctcatacggtgcagaagctttcccgttcaccgaatcacggataagagacctcgaagcagctcttagaaaggaaggag

SEQ ID NO: 78391 - DNA, 245 bp, Glycine max
  Clone ID: 700964176H1
agttacgcaagtacatactttccgtctcaattcaatttcccataaactttctttgaggttctatcgcttcgttaaattctcttgtcttcttctgcccccttttccacttcaattaggtatatcgccgattcgattaccaatttgcttaaactcaatcaagcttcgcagcgtcaatcattctattagaggtgatcataatccatgtaattctcgtacttcatccctagttatattttgtatcaaaa

SEQ ID NO: 78392 - DNA, 247 bp, Glycine max
  Clone ID: 700964177H1
cagcattcccatattagaatcctcatcttatcatttgtactctcccccacccacttaatttatcgtatctctttgcagtgaagtctgagcgttgcacacaaagatatttaccaatataatataaggctgtaatttgtaagcaaagaaaatggtgaagatatgtggaattggagccgggtacgtagggggtccaacaatggctgtgattgccctcaaatgcccctcaattgaagtggctgtggttgac

SEQ ID NO: 78393 - DNA, 247 bp, Glycine max
  Clone ID: 700964179H1
gcagacaaaatgaagagttttttgttgtggcgtgtggccattgtggaaaaaaatagaccctatgttgcaatgttgttcattcagtttgtgtatgctggaatggccttgctttccaaggctgcaatttccaagggaatgagcccttatgtgtttgttgtttatagacaagcctttgcatcagttgctctatctccatttgctttctttgacagcaagcaaccagctcctttgtcatgcaacttgttgt

SEQ ID NO: 78394 - DNA, 253 bp, Glycine max
  Clone ID: 700964180H1
ttggttttaattggtataggcttgccaaggtcttgttgattgagcgttaagtgctttaactaatcaatcccaagaccttggtttaccttgccacacaaaaaaatatataaaaaggcaaaataataataaaaaaaagagaaggcttggagccaagaaaataaacacaaagcacaagtcatggaaagaataatggttggaagtgcaacaaaggttgctttcaacctcttggtcactttcgccattgtcattccat

SEQ ID NO: 78395 - DNA, 248 bp, Glycine max
  Clone ID: 700964181H1
tgtcgctctgtgtctgtctctgggtttgcggctgaggattccgaacgagcgaccttcgtcgtttctcgcaaagttgaagtcatcatgggtaaggaaaagactcacatcaacattgtcgtcattggacatgtcgactctgggaagtcaactaccactggtcatttgatctacaagcttggaggtattgacaagcgtgtgattgagaggttcgagaaggatgctgctgagatgaacaagaggtcattcaa

SEQ ID NO: 78396 - DNA, 245 bp, Glycine max
  Clone ID: 700964182H1
gaagcatattcaaatacaatcaacagtggtcactcctgttttgctgctatgactagtgttttggtgtttggcttttgtgtaacagtaagcttggttctagcacttggttctgtttctgctcaaccaacacgggctttcttcgttttcggtgattcgctcgtcgacagtggtaacaatgacttcttggcaaccacagccagagcagacgctccaccctatggcattgactacccaacacacagacc

SEQ ID NO: 78397 - DNA, 218 bp, Glycine max
  Clone ID: 700964185H1
attgtttcgtccaaccccaagaatggttcttcaattgtctagttgcgttcgttgtggtggacgggttagacttcaattagataattattgggagtccaaaccttcgcagctgggatcgataccggccaccaacagagagaaagagtaatcaagtgtatggcgaactgtcagcaatattagttgcgtgtgctttctctggcaatttgtatgcctagcct

SEQ ID NO: 78398 - DNA, 242 bp, Glycine max
  Clone ID: 700964188H1
gtcggaacccaagatacgtgatgtgctgatcagctgcgccgaagacacacaccaaggttttgtgggccatctctttaaatctctcacagatctcggattctccgtgaaggtagtctcaggagaccatcgggatcttaaggaagaggaaattgaatgcttcagggttttcattattgttttttcccatcactatgcaacttcttcatctcgcttggataaacttaccgagatcataaataagt

SEQ ID NO: 78399 - DNA, 242 bp, Glycine max
  Clone ID: 700964189H1
atctctgtctaccttaccttacctcacctcacaagggacaaagataaaaaatgaagatcattgagaaaattcacgcagcctcggctgatccaaacagggtggtgttctcatttgagttcttcccgcccaagactgaggatggggtggacaatctgtttgagaggatggaccgcatggtggtgcacaacccctcgttttgcgacatcacttggggtgctggagggacaacggctgatcttaca

SEQ ID NO: 78400 - DNA, 242 bp, Glycine max
  Clone ID: 700964190H1
ctcacttttcattcttcgatcatacacttagttgcttccaattaagatggttctgctagagaagctctgggatgatgttgtggctggccctcaacctgagcgtggccttggcaagctcagaaaactcaccaccctcaaaactattgatgaaggagaaagtagcaagctgcagaagacgttgtcgatgccgtcgacaccaacaaccccgatgactccgacgactccaacgacaccgggatcgg

SEQ ID NO: 78401 - DNA, 244 bp, Glycine max
  Clone ID: 700964192H1
gttggttattggatctctcactagttttagagagagagagagattcagaggaagagaaaaacgtgtggttatgtgattgtggaagagagaactgagacggcattgccaattctcccttgatctatgaaactgaccctgcaatctgaggccacaatcggtagagattgtttcattttcataacaaaaaaaaaaagaacatttcagctctaagcctctaaccttatgagttttgagctggtttggt

SEQ ID NO: 78402 - DNA, 245 bp, Glycine max
  Clone ID: 700964193H1
gactcactctggcagcggcactctcggtggctataatctttctgtggtgagttgtcaagatgtacacatcaaggaagaaaatccacaaggataaggatgctgagccaactgaatttgaggaatcagtcggacaggcattgtttgatctggaaaataccaacaatgagctgaaaagtgatctgaaagatttatacataaactcagctgtccaaattgatgtttctgggaaccgcaaggctgtggtt

SEQ ID NO: 78403 - DNA, 244 bp, Glycine max
  Clone ID: 700964194H1
gtgctccttctccattttctatctatcgtcaacgttagtgctttgtttaggtgaactaattcggagaccttgcaagacttcatcaatggctgtcaaagtttatattgtgtactactccatgtatgggcatgttgagaaactagcagaagaaataaagaaaggggcttcctctgtggaaggtgttgaggccaagttatggcaggtacctgagacactgctggatgaggtgcttggtaagatgagt

SEQ ID NO: 78404 - DNA, 247 bp, Glycine max
  Clone ID: 700964195H1
gaaaaagaactcaagtaccttggaaatggcgatgccaattcccatgtttgtaaagtatgttttgaatctccaactacagtaattctgctttcatgccgacatttttgtttgtgtaaatcttgttcacttgcttgttttgagggtccaatatgccgcacaagtattactgataggatttttgcttttacataacagagggctttatcccattgaattaatatactccatgctattacgggtgcaattc

SEQ ID NO: 78405 - DNA, 264 bp, Glycine max
  Clone ID: 700964201H1
attctatagaaagtgcttttagtgttgttagtgggttaagtttccatggattcagtactagtgcatgttatatcttgtcccaatgcttcagccacaactggtggaaatctctggcggagtaaacattccactgagaaaatatactctacaagttcttgtgcatcaaaagctttgcaaaacaaaaggaaaattcaaatggaatacaatcttttgaggttccaacaaccaactttgaatcatcattacaagtctactgagagaggg

SEQ ID NO: 78406 - DNA, 260 bp, Glycine max
  Clone ID: 700964202H1
cgctaaccaaaccaaagctctctcaatggcttcggagcaacacgacgccgttttccgcgaagaagacatggacgacgacgacgacgagtctcaggaggacgaagagtacgaagaagacgacgacgaagaaaacgtgccctctccctccaccgctctcgctgtcaccgtcgccgtccccggttccgccgtctccaacggcggcggtggctctccaatttcgaagcccaccgccaccgccaccaccgccaccatcgtcctcg

SEQ ID NO: 78407 - DNA, 254 bp, Glycine max
  Clone ID: 700964203H1
ctgggactagctttactaaaccaagcaaggaacatgatttcatcgggagataatccgatgaaagctcttgaattatctcttcaagcaatgaaattgtttgagagagctgctgcttatgggaaaccaagtttggatttggccatgtgtttacatgttactgcagcaatatattgcagtttgggacatttcagtgaagcgattccaattatagagcgctcaattgagattcccactattgaggaagaccaccaaca

SEQ ID NO: 78408 - DNA, 254 bp, Glycine max
  Clone ID: 700964204H1
actccctcctcttcacacattttcttagctctctccaacaatccctctcgttcacactttcagattgtgtgaagatgggggctggtggccgaactgctgttcctcctgccaacaggaagtcagaggctgaccctttgaagcgggtaccatttgaaaaacctcagtttagtctcagccagattaagaaggccattccacctcactgtttccagcgctctgttctccgctcattctcctatgttgtttatgacctc

SEQ ID NO: 78409 - DNA, 253 bp, Glycine max
  Clone ID: 700964205H1
caccgtggaaggtggagcgtgaggctgtttccggtaacctctcccggcggcgctgagtggtgatcaaggcaatgggtcagacgctgagttgcgtgcaacagcacgaggaccatggtgtgctcttccctgcacttgcaagtggagaattggaggttgttgaggccatggtggaggaagaccccactgtgttggaacacaccattggctgtgacaggctttctcctctgcatgtcgctgctgccaatggtcggat

SEQ ID NO: 78410 - DNA, 253 bp, Glycine max
  Clone ID: 700964206H1
cggctttaatgatcctatcagcaatagcggcctatttaatatggttcaccttggtcactcgctccctcaaaggtccacgtgtctggcccctattgggcagcctccctggcctcatccaatacgccaaccgcatgcacgactggatcgctgacaacctccgcgcgtgcggcggcacgtaccagacctgcatctgcgccctccccttcctcgcccgaaaacagtgcctggtgactgtcacgtgcgaccccaaaaa

SEQ ID NO: 78411 - DNA, 249 bp, Glycine max
  Clone ID: 700964207H1
gagatcggattgaattgaatgggtggaaagtgaaagagtaagacaccacaaagtgtaacttgagtgattatatctgatgagtgcagaaagaagggaggattgttggtgatcgatcatcgatcatcgatcatcgatcatcgatggcgtctgctagccttggaagtggtggggtgggcagttccaggtctgttaatggtggcttcaggggttcttccagttccgtcgattggcttggcagagagatgcttg

SEQ ID NO: 78412 - DNA, 255 bp, Glycine max
  Clone ID: 700964208H1
caaccaccaaattaatccatatatagagagagttaggaaaacaatggaagccatttctcctaagcatcttatgacatcccttgtaataattatagcttctagtttgaccgcacactgtggctgtgccaagagagggggtgaaagaccatacaaagaagccaacacactgttcataagaacatcttgcagctccacaacatatccaagactctgctacagctccttagtgaagcatgcagacttgatccaaacaaa

SEQ ID NO: 78413 - DNA, 260 bp, Glycine max
  Clone ID: 700964215H1
ggtacattgagacttgaaaatgtgttaacattctttgcaggagttctactagagaagcagatagttgttgtctgttctaatttgggaatcctatctgcttcagttttatcagttattccgctaatccagccttaccggtggcaaagcctgttaatgccagttttaccaaatgacatgcttgagtttttagatgcacctgtcccttatgtagtcggtatgcagaacaagaccagtgaagttcagtcaaagtttaccaatgt

SEQ ID NO: 78414 - DNA, 262 bp, Glycine max
  Clone ID: 700964216H1
aaacctcagtttctacctttgattacacgttgaaactttggtctaatttcgcgttcccgccgacccacttctctctctatctgtatctctccctctctttctctagaaaaagaggaaaaaaaaaagaagaaaaaaagactttgaatgaaaacttgcttgattgaggctcttttaaaaccaaaccaaactcataatctctcattatctttgattatggtcttcttcttctgaaggaagataagaagttcagaacaagaacgca

SEQ ID NO: 78415 - DNA, 257 bp, Glycine max
  Clone ID: 700964218H1
ccagcacatgatggactcagtatagccaacttctctatctgcttcattaaatcctattcctatttcctagtactataaaaggtcgcattagcacggcaggttccctagctcaccaaagaaccaaaccaaaccaaagcatgccatcattcatggctttcctttcagatccttatttctttgcagctttgtctgcatctttgactcttttggtggtccaacttctgttcagaaaactgaacaaaaggcatagtagaaag

SEQ ID NO: 78416 - DNA, 250 bp, Glycine max
  Clone ID: 700964221H1
gcaagccgtagtgtcgggctccatcccgtcctactcactcgagtcgcggctcggtgacacccgtcgggccgccaccatccgccacgaggtggtgcagagactgacttcccgatccctgtcaggtttacctctggaaggtttcaactacgactcgatattggggcagtgctgcgagatgccgatagggttcgtgcagatccccgtgggagtagcggggccattattgttggatggaaaagaattcaccgtg

SEQ ID NO: 78417 - DNA, 251 bp, Glycine max
  Clone ID: 700964222H1
gacaccaattccctcccactccctctctattttcctctccacactccacattccgccatggacgacagcttgtacgacgagttcggcaactacatcggccccgagatcgagtccgaccgcgactccgaccgcgactccgacgccgatgacaaccccgacgaccaatccgacgccgtaggagccgcccactccgatggagaggacccgagcaacgggtggatgacgacaatctccgacgagctggagaacca

SEQ ID NO: 78418 - DNA, 252 bp, Glycine max
  Clone ID: 700964224H1
cgcttccatcccacggatgaggagttggtgatgtactatctgaagcggaagatttgtgggaagaggctgaagctcgacgtgattcatgaaaccgatgtgtataagtgggatcccgaggatttgcctgggcaatctatattgaaaacgggagataggcaatggttctttttctgtcacagagataggaaatatcctaatggtggaaggtctaaccgagcaaccagacgtgggtattggaaagcaacaggaaag

SEQ ID NO: 78419 - DNA, 256 bp, Glycine max
  Clone ID: 700964225H1
cctctttcttcctcttcctcagtagtgcgattttcgattctcttctctgcaactatgcctaaccctaaggtcttcttcgacatgaccatcggcggtcaacctgccggccgcatcgtgatggagctctacgccgacgtgactccgagcaccgccgagaacttccgcgcgctctgcaccggcgagaagggcgccgggcggagcggcaagcccctccactacaaaggctcgtccttccaccgcgtgatcccgaacttca

SEQ ID NO: 78420 - DNA, 255 bp, Glycine max
  Clone ID: 700964226H1
ctttctctagtcctgttatttctcagcgcgtaaagcatggctttcttggtggagaaaaccacgagtggtcgcgagtacaaggtcaaggacctttcccaggccgacttcggccgcctcgagatcgagctggccgaggttgagatgcccggcctcatggcctgtcggaccgagttcggcccctcccagcccttcaagggggcccgcatcaccggctccctccacatgaccatccagaccgccgttctcattgagacc

SEQ ID NO: 78421 - DNA, 87 bp, Glycine max
  Clone ID: 700964227H1
gtcctcaatttctaattctctctctctttttttatagtgcaaaatgctttttcctttgtcttatgatgcttgaatttgggtttcacc

SEQ ID NO: 78422 - DNA, 257 bp, Glycine max
  Clone ID: 700964228H1
ggtgcattttacataaagaacttcttgcaagttgagttctatctcaagtctctaactctcgaagacattccaaaccacggaaccatccacttcgtatgcaactcctgggtttacaattcaaaaaactacaagactcatcgcattttctttgccaacaatacatatcttccaagcgagacaccagctccacttttgaagtacagagaagaagaattgaagaatgtaagaggggatggaactggagagcgcaaggcatg

SEQ ID NO: 78423 - DNA, 256 bp, Glycine max
  Clone ID: 700964229H1
gctcgatctcgtgagcatggctttgcggcttttggtatcgcgggttgcaagacgacagattaaaagtgtgtttgctacaagctatttttctgtcaataagcttggagatcgtgcaggaaatagacttttgggtgctcaagagagatttcaatctagctaccttggcagtattgctcgtcgagcacgtgatgcagatgaagccgctgaagttgcttatctcaaagaactttaccatcagactgatcctgaggctgtg

SEQ ID NO: 78424 - DNA, 255 bp, Glycine max
  Clone ID: 700964230H1
gtgtcacaagtcataactcgttagagagagtttgtgtgtgtttttgtgtgtcaccttggtgcatacaacacaagatggaggaccaaaatggtagtggtaagttgagccaagggcttcgcaaggtgaagccttaccttgctatattgtcccttcagtttggctactcagggatgtatatcatcactatggtttctttcaagcatggcatgagtcattggatactctcagtgtaccgtcatgtagttgctgctatta

SEQ ID NO: 78425 - DNA, 259 bp, Glycine max
  Clone ID: 700964231H1
attccgtgtgccgccgttaccgccggtggagaggatgggggtgctggacggtagcggcgtgatgacggaggattccaaggtgggggagttagatcccggtttcgaggaagattctctaaacgacaccttttcgagcgtttcaggtggtgggggtgtgagggagaaggtggagaagtataaaatgtgtgatgtgagaatggtggattatgtgccgtgtttggataacgtgaaaacgatgaagaaatacatggagagtttg

SEQ ID NO: 78426 - DNA, 256 bp, Glycine max
  Clone ID: 700964232H1
cggccttgctatgagtatgaaaggcgtgaagggatccaggcttgtcctcagtgcaataccagatataaacgtatcaaaggtagtcccagggttgaaggcgatgaagaggaagatgacactgatgacttggacaatgagtttgattatggggatgttgatgctctgggcccacaaccaatgtcggaatccttgtattctggacgccctaatactgggcgaggtgctgataacggatcttgcatggcgacaaacttgg

SEQ ID NO: 78427 - DNA, 262 bp, Glycine max
  Clone ID: 700964233H1
caacaacaacagcaacaacaacaacaacagcaacaatttcaacaacagcaacagcagcagcagccgcaacagcagttgtttttgtttactaacgatagaacccccgctagttatagtaccaattgggcggatcttcatcctgattcccagaagattctccttcagatcgaggagcggatattggagtttagggatgaaagccagagactagatcagtgtagtcgtctttatgattcttcagtttccaacgatggatttgagc

SEQ ID NO: 78428 - DNA, 256 bp, Glycine max
  Clone ID: 700964234H1
cgcacgcagaccataagcttctcaactgctagactaagtttgttaataaaatgaagatttctgtagcaaatgtgactgggtgtggggtttgccagtttgtgtatggattttaagagtaatccaggatgaggcatctccgttattctgtgccggtataattaagccagcactccggcttggtcttgtagccagagtctgattctggctagaatagtagtttgctgaggctttcagaagcagtcaagaatcaagatag

SEQ ID NO: 78429 - DNA, 252 bp, Glycine max
  Clone ID: 700964235H1
cccttttcagtttataccaaataaatgatgttacaagcttcttttttgcgcttgatctctttcttctttctcatcgcactccctcttggaagaagctctaccaccttgaatgtaccaaaggacataatcaaccaaacatgccaaaaatgtgccaaccaatccatcatcttgagctacaacctatgctccacttctcttccggcggttccggtgagtcactccgcaaatctcgaagggttggcgttggttgca

SEQ ID NO: 78430 - DNA, 253 bp, Glycine max
  Clone ID: 700964237H1
gtcgccgccagatctcagacgagactcagtcacactttctctctttctcttccacaatgcagctcctcccggcggtgctcgcggcggcgctgctcctcctcgccactctctccgacgcccacaacatcacaaccatcctctcaaagcaccctgagttctccagcttcaaccactacctgaccctgacccacctggccccggaaatcaacggcaaaaccaccatcaccgtctgcgccgtggacaacgccgccat

SEQ ID NO: 78431 - DNA, 251 bp, Glycine max
  Clone ID: 700964238H1
aaaaaaagtgttccaattccccaagaattcgaacacgagattagttcctagctctctctgttcgagttctttggaccttggattcgttgcctctccgcaatgctgctatcgtgagttctgtgattctatttgatggtgagatcgtggagttcttaacatgggaacttcggagaaatagatttgtgcagtaaattggctttgaacttgacgactcagcaatactctgaatttgtgtaaaatctgctcgtgca

SEQ ID NO: 78432 - DNA, 252 bp, Glycine max
  Clone ID: 700964239H1
cgaaaaagtaacaaaatcgtaagacacagacgcataagtgaaccactgaaaccctaaacgcatcagcctcagccgtcgttgccgtcgagcaagtgaggtcgcaccgccgtcgcaggaccaccacccgggcgccgtcacaatttggcctcaaagtcacaagcaaattcataagcaaaaccctagcaagcagtgagtgaaagagtaaagtttggacgatgagggaggaagagatggagaagcttcgaggagtgg

SEQ ID NO: 78433 - DNA, 252 bp, Glycine max
  Clone ID: 700964240H1
ctcttctccattgcctccctcgtcttaccatcctggttataggctgaaaagggaaggggggagagagagtgtttgcggcaatggaggaaccgagcaaactgaagcgtgccatgattgattccttggctggggcaatttctggtggaatatcacggactgttacatcgccccttgatgttattaagattcgattccaggtccagctagagcccacatcttcatgggcattactacgcaaggatttggcttcag

SEQ ID NO: 78434 - DNA, 253 bp, Glycine max
  Clone ID: 700964241H1
atttacttgtcaatctgggcgatcctgagcgacctgtatgtaaggttggagattttggcctatccagaattaaacgcaacacacttgtttccggtggtgtcagaggaacccttccatggatggcgcctgaattactagatggtaacagttgtagggtatctgagaaggttgatattttctcatttggcattgcaatgtgggaaatgttgaccggggaagaaccatatgctaacatgcactgcggggctatcat

SEQ ID NO: 78435 - DNA, 252 bp, Glycine max
  Clone ID: 700964242H1
gtggttttcccatgatgtcacgttttatgcatgcgccttctcccgttctgtcttcttcgcatcctcatttgggagttggccacaagagagagcgtgaagatgacactggcgctggtgcgagtggaggtgttgctattgcagcagcttcttcacaaacgcaaacacaagagattgacagtgctggcggcgacaggaggaggagatacaggggagtgaggcagaggccgtgggggaaatgggcggcagagattc

SEQ ID NO: 78436 - DNA, 254 bp, Glycine max
  Clone ID: 700964243H1
cagggaacatatgtatacacacatgtagtgagagagaaaaaaaaagggtggtttttggtttctcttttggttcctttcttatatgccatatttgcatctgatgcagcaattcctctgtaacggttattatttttgtgaaggggttggagagaaacactgatcagtgactactgcttggttgctactactgaaaatggattacagcaatgacaacaaggagccatgggattggcatagggaggattattgtctct

SEQ ID NO: 78437 - DNA, 256 bp, Glycine max
  Clone ID: 700964244H1
gaagaaacttaatcgatcatcacttcacttcactaatacatcatggcagacgagacccagaacaagtatgagagctctgaggttgaggtccaggatcgtggtgtttttgactttctcggtaagaaaaaggatgaagaagacaagcctcatcctcaggaggaggtcatcgccaccgagtttcaaaaagtcactgtctcagaccaaggagagaacaagcacagcctcttagaaaagcttcaccgatctgacagcagct

SEQ ID NO: 78438 - DNA, 255 bp, Glycine max
  Clone ID: 700964246H1
cgcgtgcgtgcctctccggcgaggccgtaacaatccactcacaacaagcttttaaatttctccttcgtttcgcttccaatggcatcaaatagccattcaccatctctcgagatattagttcgaggaccagaggatttctcgctctggaccggaccccccttcgcgaacgatcaaccaagcgtcaagctcgagagagtgaactgcatcaatgcgacattcagcgacgacggatccaatctcatggtgacgaaatcg

SEQ ID NO: 78439 - DNA, 259 bp, Glycine max
  Clone ID: 700964247H1
aattaattcatttttctgaatagccattcccagaatccaaacatggtcttttgaggttttggtccccgatcaccatgattcttttcagtttcacctccatcgttttaatcgcgtttggggcgacgctgttccagacggggcatgcgacgaagctatggagaagaatcgaagactggttccacgtgtaccagttcttcaaagtcccagaactcaacgacacgacgcagcacaaccacctatacaggaaggtctccctcta

SEQ ID NO: 78440 - DNA, 250 bp, Glycine max
  Clone ID: 700964248H1
cctacttactgattccaaccatatactactaaaatggcttccttccgtgtgcatctcttatcattcttcttcattgctttgtcacttttatccattagcaatgtccaagccagtagacaacttctggcacccacaatgcccaatatgggaaattatcctcctcgcgtgatatatcctccattccccccagtaacagactggccagagtataggttgccagcacccttaattcgcacacttccatccttct

SEQ ID NO: 78441 - DNA, 256 bp, Glycine max
  Clone ID: 700964249H1
cagaataaatcctaacccttaatttttaattggagaggatcctcccccggtgggtgacatgaacgacttgaggaagaagagaaaagccgcaggggcagagtgagagccgaaacttctcatggaatcgcaaacggatctgcagaaccgacccggaatcttcattatcggatcctccaacgtcggcaaacgcaccctcctatcccgattgacctctgttgatgttgatgatgcttttgattcggcttctcaagtgaat

SEQ ID NO: 78442 - DNA, 253 bp, Glycine max
  Clone ID: 700964250H1
ctcagtctctgtgtttgcggctgaggattccgaacgagtgaccttcttcgtttctcgcaaagtttaagtaatcatgggtaaggaaaaggttcacatcaacattgtcgtcattggacatgtcgactctgggaagtcaactaccactggtcacttgatctacaagcttggaggtattgacaagcgtgtgattgagaggttcgagaaggaggctgccgagatgaacaagaggtcattcaagtatgcctgggtgctc

SEQ ID NO: 78443 - DNA, 252 bp, Glycine max
  Clone ID: 700964253H1
gaaggacacggttcgaggctggacccggcggcatggcccaacaagcgaaccagcaatacgcacagcaacagcaccaacaacaacaacaagcctacatgatgatgccgccgcagcctcagccccctcagatgtgggccccatcggcccagcctccgtcccaatcggtagctcctccgcaacccaccagcgccgatgaggtccgtaccctctggatcggcgatttgcagtactggatggacgaaaattatctct

SEQ ID NO: 78444 - DNA, 249 bp, Glycine max
  Clone ID: 700964254H1
agcagtgcgaagagaaagaaagagaagaagcgcttatcgaactcggacggaagcactgagttaactcagagcgagtgaaagtgttgctgcgtgatgtctggtggtatcgcccgtggacgcctcaccgaggagcgcaagtcgtggcggaagaaccatccccatggttttgttgcgaagcggagacgctgcccgatggaaccgtgaacttgatggtgtggcattgcactattcccgggaagactgggactg

SEQ ID NO: 78445 - DNA, 250 bp, Glycine max
  Clone ID: 700964255H1
ctctaacgttttctctctttttggtcagagggagagtggggtgtgtgtgtttttgttgggatttgtgaggaatccattgaaggaggaagagtgggagatttatgtcgtcttggttttatttggaagtagtgattggagctttgttgaagctcgggttcggttacgcttgtatttgctgcatgctactctggctggtgttgaattctgctgtttcgatgagtttgaggtcaaaaaggacatgttatggagc

SEQ ID NO: 78446 - DNA, 252 bp, Glycine max
  Clone ID: 700964257H1
gaaaaatatggagggaaaagaagaggacgtaagagttggagccaacaggtacggagagaggcagccaatagggaccgctgctcaggctaaagactacagagagccaccgtcggcgcctctcttcgaaccgggagagttgtcatcgtggtctttctatagggctggcatagcagagtttgtggccactttcttgttcctctacatcacagtgctgactgtgatgggtgtgttcaaatctaacagcaagtgttc

SEQ ID NO: 78447 - DNA, 256 bp, Glycine max
  Clone ID: 700964258H1
cgctttactaggcttgaatatgaatatcttcagcagtttgtattcaagcctagtaaagcttttatcctcaaagcaggtactgagctacgtacacccatgcacgataatatacgataatgacgaacacaacataacaaccgcaacaactgttcaaacgtttcacaacttctgctacttcctactccaaccgcacttctgctccgcaattatcatgggcaaggtcaagatcggaatcaacggatttggaagaattggc

SEQ ID NO: 78448 - DNA, 256 bp, Glycine max
  Clone ID: 700964260H1
ctgaaacagctgaacatgcagcagaaagagagaccaaagctaaaagggaggagcaggacaagctcagggaaagagaacgggagctgcgcaaaagaaaggaaagagaagaacaggaaatggaaagggtgcgactaaaaattcggagaaaggaggcagttacttcttttcaagctttacttgtggagacaatcaaagaccctctggcatcatggacggaatctaagcctaaattagaaaaggatcctcaaagacgtgt

SEQ ID NO: 78449 - DNA, 256 bp, Glycine max
  Clone ID: 700964261H1
gagaaaacagaagaaaacaaaatggaagacacagtttctgcgttgaggtctttgatggtttctcactctccgccgctggccgccttagtggtgccctctgaagattatcacctgagcgaatatgtgtctgcacgagagaagcgccgcgaattcgtttccggcttcactggaagtgccggcttggcacttataacaaagaaagaagcactgctgtggacggatggacggtattttttggaggctgagaaagaactta

SEQ ID NO: 78450 - DNA, 257 bp, Glycine max
  Clone ID: 700964262H1
gggaaaaagaaaaataaaatgggttccgataataccaacttggagttcttgaaggagatcggtttgggctcctccaacattggttcttacattaatggccaatggaaagccactggttcttctgtcacttctgttaatccttctaacaatcagagcatagctcaagtgactgaagcgactttgcaagattatgaggagggattgcaagcttgcagtgaagcagccaagacatggatgactattccggcaccgaagag

SEQ ID NO: 78451 - DNA, 262 bp, Glycine max
  Clone ID: 700964263H1
cagaatgatcaatcattttcccctagatttaagaagattggcaattcttcatctcatgatattgcgaatgctcctgcaaacacattcaatgtaggatatgatagagatagaattgccccagctgataaggagcaacaggattttgggcaaaataatcagttgaaagctcggaaaaaatcacaaggtaaacaagaggtaaaagcattgcaggagttttatggtagctggtctccttcatcaactacatgtggacaatttcaga

SEQ ID NO: 78452 - DNA, 240 bp, Glycine max
  Clone ID: 700964264H1
cttttcctgaaaatatgcaggtagaatgattgatgtcttgttcattattgcctcacttttgtgtggaatgaggagaaggatttaaatggtagcttcaccaaatatactaaacttatctacctgcaaaagaaattgcctggggtttagatcaatttttagttagtgttctgctcaacaattgatatggcctctttgtagacttcaacttcctaactggtggtagtttatcgctgattgttt

SEQ ID NO: 78453 - DNA, 258 bp, Glycine max
  Clone ID: 700964265H1
tatggttgttagtacctatcaggctgctagtggtgcgggtgctgctgcaatggaagagcttcagctgcaaactcgtgaggtgttggaaggaaaaccgcccacttgtaaaatatttaaccgacagtatgcttttaatctattctcgcataatgcgtctgttctttcaaatggatataatgaagaagaaatgaaaatggtcaaggagaccaggaaaatctggaataataaggacgttaaagtaactgccacatgcatacg

SEQ ID NO: 78454 - DNA, 254 bp, Glycine max
  Clone ID: 700964266H1
ctcgttgttcttcgctttcctgttttcaatttcgattctttcgttaatttaataagatgtttgggagggcaccgaagaagagcgataatacgaggtactacgaaatcctcggcgtctccaagaacgcttcgcaggatgatctgaagaaggcttacaagaaagccgccattaagaatcaccccgacaagggcggtgatcccgagaagtttaaagagctggcgcaagcttatgaggttctgagtgaccctgagaag

SEQ ID NO: 78455 - DNA, 251 bp, Glycine max
  Clone ID: 700964268H1
ggatcaaacgccatttttctctcttcactcttcacctctaaacaaaataaagaaacacaacactcactcccacctctaaacaaaataaagaaacacaacactcactcccacctctgtccctcttcttcttcttcttcttctttttttctttctcttcccatttcagttttcacctatgtgacttgctccatctttatgcaaaccgttaaagttaaacttgctctctgactagcttctcttctctctctatt

SEQ ID NO: 78456 - DNA, 251 bp, Glycine max
  Clone ID: 700964269H1
caattttacactccctccctcctcccatacccatcatcttataatacacaaaggttttgaatatcacaatacatgacaattcacaacaacaaaatgacttcaattgccaccaatagcactgttgtcgccactagaatgctagttgtgatcactttagtccttgcactagtatgttgtgtcacatccgcgcaatcaccggcagcagcaccagccccggagagcaacgggtgcttgatggcactaacaaacat

SEQ ID NO: 78457 - DNA, 247 bp, Glycine max
  Clone ID: 700964271H1
ttcttagcacacttgttgctgtttgtggttctttcacatttggcacttgtgtgggatattcagcacccactcaagcggctatcagagcagatcttaatctatctcttgctgagttttccatgtttggttcattagtgaccattggtgcaatgcttggagctataacaagcgggcggattacagatttcattggccggaacggggctatgaggatttcaacaggattctgcattactggatggttagc

SEQ ID NO: 78458 - DNA, 71 bp, Glycine max
  Clone ID: 700964272H1
ccgtttctgccatttataaatataataaattaagaaccaaaaaaaaagagaaagaagagaaaaaaaaagaa

SEQ ID NO: 78459 - DNA, 250 bp, Glycine max
  Clone ID: 700964273H1
atcattttttcacatgtcttcaacattttcaaatcttattatctctaccttgatgcaaaacccagccgcccatgctgcagcaagtttctcgctttgcatagggccaaaatgtagcagcgaaacttgctgcagcatgggctgctgggttttgctgctacattttggccctatgcaaatccagaaacttcagcaaattcccctaggtgctcccaaggacgttttacaaatagacaaattggttcccctccaa

SEQ ID NO: 78460 - DNA, 252 bp, Glycine max
  Clone ID: 700964274H1
ctcccttatttttaattgctgtaacagtagtagtatttattttgagctttccatttttctctctttttcaactttcaattcaagcagctttggaaaaaccaaccagccaacgggtttttttcacctcctgaaatttgtgttggtttggtaatataggccttggagtggaaattcaatatttgtatggcagccagagaaggtattagttctggggttacagtgataggtgcagaagctccatcagcttaccat

SEQ ID NO: 78461 - DNA, 252 bp, Glycine max
  Clone ID: 700964275H1
gcagaaagcaagctcatcctagagttttaaaaatggcagcagcctcctccatggctctctcttccccatccttggctggcaaggccgtgaagctgggcccatcagcccccgaagtcgggagggtcagcatgaggaagaccgtcaccaagcaggcctcctccggaagcccatggtacggcccagaccgcgtcaagtacttgggcccattctctggcgagcccccgtcctacctcactggcgagttcccaggtg

SEQ ID NO: 78462 - DNA, 253 bp, Glycine max
  Clone ID: 700964276H1
caaaaaccctaggtagagagctcttcctccctttctcacagcaatggccgccgcagcacgccctctcgtcaccgtgcaggccctcgacggtgacatggcaaccgatgcctccgccaccgttcccatccctgacgtcatgaaggcctctatccgccccgacatcgtcaatttcgtacactcgaacatctccaagaacagccgccagccatacgccgtcagtcgtcgcgctggtcaccagacctccgccgaatcc

SEQ ID NO: 78463 - DNA, 257 bp, Glycine max
  Clone ID: 700964277H1
aggtaagactaggttgttcttttcatgcgctcatatagtatctaagcaagaggcacgctaccaccgtcaaacccttctccttgttaccattctaatggcttggttttttcacatcacactttctttgtgttgtgtgtcgcgcgcgctcgcgtgttgtgtgtgagtttgtgaagtgagttggaggtatagacaacggtttgagatggctgtggtgagtcctatggctgcaacaacacaaaggatgggttcagtgaggt

SEQ ID NO: 78464 - DNA, 257 bp, Glycine max
  Clone ID: 700964278H1
gagagagagagggtttttattttaacgttttttgttgctattcctttacagctcaacctgcatttctctctcacacactcgcatctcagatcgaattcgaggtcactgactgattctgcgctgttgatgtttcatatcaactagatagctacatggtggagagagacatttttctcatatgacttctattaaccatattattattgagcagtgctgctatgggcatttgtcttttgaaatggcaatggccgtggctt

SEQ ID NO: 78465 - DNA, 248 bp, Glycine max
  Clone ID: 700964279H1
ctcaacacacacacaaaaaaaactcccttgtatattgttgcagctctagctagggtttcgcaagtgcgatcgaagaagaacaacgacgatggcgatggctgcagctctgcgtcgcgaaggaaggcgtttgacccaaccaatcaacgccctccactcttctctcaattcctccctcatctctcaagaccaagcccctcatggcgcgcgctccatttccactcaagttgtgaggcaccgaatgaagagtg

SEQ ID NO: 78466 - DNA, 256 bp, Glycine max
  Clone ID: 700964281H1
atttcttatacagaaaagcattgtctgcagcacccaaacgaaacgacagtgaccaaaacagcaaaacgacattacagagagagagcgacgatgccggaagaaacgacgtcgatcgactacgtgatggaggcggcatctgggccccacttctccggcctgagacttgacggccgtatgccgtcctccgccaccgccgccgccgcgtcctcctctgccgattctaccctaacccccgatttcctccccaatcaaccct

SEQ ID NO: 78467 - DNA, 252 bp, Glycine max
  Clone ID: 700964283H1
ggctaaccaaccctgacactccttcttctccgcttcctcttcgatcatcgcttcagaatgccgccgaagttcgacccctcccagatcgtcgacgtcttcgtacgcgtcaccggcggtgaggtcggcgcggcgagttccctcgccccgaagatcggtcccctcggtctctcccccaagaagatcggagaagatatcgccaaggaaaccgccaaggactggaagggcctccgcgtcaccgtcaagctcaccgtg

SEQ ID NO: 78468 - DNA, 250 bp, Glycine max
  Clone ID: 700964284H1
catctttttccttttcccaagcaattgtactttttaggggcatacacgtaaagcagttggtttctggagtagttagagttacatgtgttttgcaggcacatggcaacacatgaaatggatcccgatgttgttcgctggggtcttcatctcctagatgtctgcacactttctcaccatggttcccctagtattgtaactcaatatgatcctgatttaagtcgagttgaatatgttaccgaagcttttgtca

SEQ ID NO: 78469 - DNA, 249 bp, Glycine max
  Clone ID: 700964287H1
aagattggaggtattggaactgtgccagtgggacgtgttgagaccggtgtcttgaagcctggaatggtggtgacttttgcaccaactggactgacaactgaagtcaagtctgtggagatgcaccatgaatctcttacagaggcacatcctggtgacaatgtgggattcaatgttaagaatgttgctgttaaggatttgaagcgtggttatgttgcctcaaactcaaaggatgaccctgcaaaggaggct

SEQ ID NO: 78470 - DNA, 250 bp, Glycine max
  Clone ID: 700964288H1
aatttctctctcctctctctctctacaaatccttctttctttcttctcttcgctgctcactgtagccatggctttcagagtaggaggagcgggagggggaaatgcctcttctggcatgggtgttgctgagcatagtgtaaacaccttcctggaattgcagaggaagaaagttcatcgctatgtgatttttaaaattgatgagaaacagaaagaggttatcgttgaaaaaactggaggccctgctgagagc

SEQ ID NO: 78471 - DNA, 251 bp, Glycine max
  Clone ID: 700964289H1
taaccattgaagaagtgcaatttcgtcctctaacactcttccaaatcatggctagctcactgcttgtgagggttgccagctgcatggttgtggtgtggatgtttagttttgggcacataattcccttggcagatgttgaaattccatgtggcagggtgcaaatcactgtggctccatgcatagggtacctaaggggtcctggtggaggtgtccctgcaccatgctgcaatgaggttaagagcataaacaac

SEQ ID NO: 78472 - DNA, 253 bp, Glycine max
  Clone ID: 700964290H1
caaagagagagaggaagaggaaggtggaaaagccctagtgtgtgttctgctgagagtccgatacacatctaggaaacgctatctatggctttttacggaggcgcgaaacgcgtttgtgtatccataaggcactattgttcgaattcagcgtcagagaaggtgaatctgataaagcagctgagagagagaacaagcgcagctatgaaggacgtgaaagcggctctggtggattcgaattgggacatagaggaag

SEQ ID NO: 78473 - DNA, 255 bp, Glycine max
  Clone ID: 700964292H1
atcaaatgtatataattcaaaatgagtacacatataaacaggttaaagtttcactatgaccacgaggacctcccctcagcctgatcagtcacttatgacaccaacgtttggtttgatttgcccacctaccttgtaccatgtcaagcatagtcctagaaaaggagcatcaatcaaatcagtcttctgttaagtgttaatggttgaaactcaagcatttcaattctatcctcttgaacttcaagccttcttttcatt

SEQ ID NO: 78474 - DNA, 257 bp, Glycine max
  Clone ID: 700964293H1
accccccctctcatacactctctaatccaaagagaacaccaccctttttcctcattctcttcctcactaaaacatcactctttttttcatttcaccaaacaaaacagtaacaccacacagccatgacagacagggtgtacccatcggccaagcccgccgcggttaacggcgccgcctccaacccatctttcccggcgactaaggctcaactttacggcgccacacgccccacctaccgccctcagccccaccaccgg

SEQ ID NO: 78475 - DNA, 263 bp, Glycine max
  Clone ID: 700964296H1
gaactttgacgccattggccattgagttaagtaagccacatcctcagggtgaagcatatggtcctgttagtgaagtctacgtgccttcgagtgaaggagttgaagcttacatttggttactggcaaaggcttacgttgttgtgaatgatgcttgctaccatcaaatcattagccattggctaaacactcatgcggttgtggagccattcgtcatagcgacaaacaggcatctgagcgtggttcaccctatttacaaacttctg

SEQ ID NO: 78476 - DNA, 272 bp, Glycine max
  Clone ID: 700964301H1
attccttttctctttctccggcgacgatctcagattccggccactcctctcgccggcgagcccttactcttccctcctccgtcgagccctctccgattcgaatcgttcccagcctcgcaccaccatgaatcccgaatacgattatttgttcaagcttttgctgattggagattctggtgtaggcaagtcatgtcttctcctgaggtttgctgatgattcataccttgacagctatatcagtaccattggagtggactttagaatccgcactg

SEQ ID NO: 78477 - DNA, 192 bp, Glycine max
  Clone ID: 700964302H1
accaccaccacttctctccctccgccgtcgccgcctccgtgccgcccaagcccgttgccgaagctgaggacttcgccaaccccttcgaagacgacgacggtagcgccacgtagaagcgcaaggagtgcgacgagatcggtgagggagccgcctcgtacggattcaacaacaagagatctaaggcgactccgt

SEQ ID NO: 78478 - DNA, 263 bp, Glycine max
  Clone ID: 700964303H1
atatatttgtcattttaaactataaccatcttgtgctgcaggatgttgtgaatgatagaatcaaacattgcttaaagcatgtggctggagatgcagatgagtgttcagtttgttctgggactggtaaatgcaggctctattaatttgtgaaactagattgttttggatgctattaaatgaggctggaagtcgaggaatctgtaaattgggttgcaactgttctgaagttgttattacgacgcacttgaactttgcttcatgtt

SEQ ID NO: 78479 - DNA, 248 bp, Glycine max
  Clone ID: 700964304H1
tggagagtagtgcaataactcattgtacgttcctagtgtgtgggagacaaagaaagatggctaagtggtgtgttttggtgttggttcttgctctggctctggccacaagtgccagagatgttcccgatcccaaggatgctggtctcaaggaccagaagaacttcatcagctatggtggagttggtgcttattcggggattggtagcaatgggctaccttttggaggagttggtgccggaataggtggt

SEQ ID NO: 78480 - DNA, 267 bp, Glycine max
  Clone ID: 700964305H1
aaaagcagaacgcaacatcatcaacatcacagaggtagagagtaagacgccggcaatgtccgctgtgagagttcaagtttcggcgtgtgcggtttccgccaccgtcaaccaccttcgcctccgccaaaacgccgtcgtttccttcaggaagaagaagcctctcactctcagagtggtctcaatgtcttccgttcctccttcccaacccttcgaaatcgccgttaaagcttccgtcaccacacccaacaggctcggcgactgcccttt

SEQ ID NO: 78481 - DNA, 266 bp, Glycine max
  Clone ID: 700964306H1
gctccagatacaattgggacactactacgattgggaagaagggtctttacatttatagtttggcaaatagatattgcaactacctttgtataattctatttctgaagaagcaattacaatttacaagggatggtgccatttacggcataaggattaaggagggataaagggaccaattgctttggaatatccactcattacaatgcatgtatgacaacacatagtaatatgatgtgtgtttttattcagtgggcaactggcagatc

SEQ ID NO: 78482 - DNA, 261 bp, Glycine max
  Clone ID: 700964308H1
ctacaagagaagaaaaaaaaaaagagagaaaagaaaaaatttgttttataactttttaacttattgttcacttcttcttcttcttcttcttcaatatcttggttctttgatattattctattgagcaaaaaatgggagttccagagagagaccctcttgcacaattgagtttgcctcctgggtttaggttttaccccacagatgaggagcttttggttcagtacctttgccgcaaggttgctggccatcatttctctcttc

SEQ ID NO: 78483 - DNA, 261 bp, Glycine max
  Clone ID: 700964309H1
gaatgatttacaatcaaaatcctctgaaattcaatgtgcaaatgaagctctcattctaaaagtagaatcacaattacaagaagcattgcagaggcatactgagaaggaatccgaaaccaaagaattgaatgagaagctgaatacactagaaggccaaataaagcttttcgaagaacatgcacgtgaagcagttgcaacttctggaactcataaagctgaactggagcagagtctcataaaattaaagcatcttgaaattgt

SEQ ID NO: 78484 - DNA, 265 bp, Glycine max
  Clone ID: 700964312H1
ctagcaatggaggcgattaggaacagtaggattcttatatttggaggaactggttacatagggaagtatatggtgaaggcaagcgtcacgttaggccatccaacttttgtctacactcgccctcttgatgcacaaactccttcctctaaggcacagctttgcaaggagttcaactctatgggggtcacacttgtccatggagaacttgagcatgaccagattctggcagtgattaaacaagtagacattgtgatatgttctcttc

SEQ ID NO: 78485 - DNA, 264 bp, Glycine max
  Clone ID: 700964313H1
tttggagtgaaaaagatatagaagaaaaattaagtgtatgtttacaattgtccaaaatatatcacaaattaatgcaagtctaataagtagaaaggattaaacgcttgaggagtggttgacattatcactaccatagaaaaagactttattgtgatttcttatttgatgaccaaatatagtgagtatgaagtaactatttcaagcgagcatccttggataaaagaaggtcatccactttccgggcattgcatagctcatcagcac

SEQ ID NO: 78486 - DNA, 266 bp, Glycine max
  Clone ID: 700964314H1
cattaaccgctttcccttttggcagcacttgagaattgagaactccacgagatcctttcttttcctcagccaaagcacaaaaccaaaacagaaaccttttgatataatttctgttattcacttccttttagacaccacactaatccagattagacattgtacaaatgggttctctgttgttcttgcttttggttattgttcttccattgtgttattgtgttgactgcacttgctctaatggaaactgcaaggtaaatgatgagtgc

SEQ ID NO: 78487 - DNA, 269 bp, Glycine max
  Clone ID: 700964315H1
caagaagcagcagagttcgccgctgctccgcaaccttaccctatcaattttcgtccttgttttggtaattgcagcgaagaatggggaagcgtaaggagcggattcagaacccggaacccttcgatccgtacggcgccgaccccgcgaaaacgaagaagcgctcgaaggcgccgaagcggcaccagcaggaggagcagttcatcgctcccaaactcagctccaagatcatgaagcaggcgctaatccagcagaaggaggaggagaaggag

SEQ ID NO: 78488 - DNA, 166 bp, Glycine max
  Clone ID: 700964316H1
gggctgcttcataatcgaatcgaaacgaagctgcagaatggaggacgtgccgttgccggcgctctttgagcaagcccgcaagatccacaactcagccaccgccaccgcctccgccgccgaccaggtacgctttagtcttctcattctgtctctttttttttttttt

SEQ ID NO: 78489 - DNA, 261 bp, Glycine max
  Clone ID: 700964318H1
cgcgagcgacaaccagactcaagaagaaaacgtgttgtgttagtgttacccctttctctttttctctctttcttgaatttggcgcgtgcgtttcgattcttcttccgaatcagagggattctggatttcttgttgaagatgcgacgctcttctgcatccaaaaagtcgggtcaatccaattccactcccaacgccgccgatctcttccgctctgcttcaagtaaggcaagctccaaggaatcagaacgaattgatagtcta

SEQ ID NO: 78490 - DNA, 263 bp, Glycine max
  Clone ID: 700964319H1
tataaaccctagtaatcgcgtttctcggagttagacagagacggttcgctttccagtgacaggcaatagctgcaagcaactcaatctcagagcttaagcaatggcggcgaagaagcatgacgccggagacaccgagaagagaaagcgactcagtactgaaactcacgaggctcccaaggcttcgaagctcgttgcctcaaagaagcacaaaccagactccgttgctaaagacaacgaagacaagaagacggctcctcttaccg

SEQ ID NO: 78491 - DNA, 261 bp, Glycine max
  Clone ID: 700964320H1
gagaaaaagagatttagggtcttaagggtttcattctgcggcatcagacatgggaggaggcaatgggcaaaaggcaaagatggcacgcgagaagaacctcgagaagcagaaggccgcctcaaagggaagccagctggattcaaacaagaaagcaatgtcgattcagtgcaaggtgtgcatgcaaacatttatgtgcaccacatcggaagtgaagtgtacggagcatgctgaagccaaacaccctaaatctgatgtttatgc

SEQ ID NO: 78492 - DNA, 258 bp, Glycine max
  Clone ID: 700964322H1
cttgtgttgtgtccctcttttaagctatttccttctcttaacacaattggttgtgccaattgccatagtcaccaaccaattaacaaaggtatatatatcatcatatcatcaccaaatgaaaaatattgggttgttttttcttgtggtggtggctacttttgtggtggcagccacagctggtagcttttaccaagactttgaaataacgtggggtggtgagcgtgccaaaatctatgagaatggaaaccttctcacact

SEQ ID NO: 78493 - DNA, 259 bp, Glycine max
  Clone ID: 700964323H1
ggctaagacagagcactgtctgagtgaaacatccattcttttcctccacctcgtgattcccaaacattctcttcttattcccagctccacgcgctcgtttctatattctcatcactcgcgctcttcttcttcttcttctccctccattagggttttcttaatgctgaatgtggcttccctcgccgcacattgacccttgacacaccacaatgtccggccctctcgaccgtttcgcaagaccctgttttgaaggtttctc

SEQ ID NO: 78494 - DNA, 260 bp, Glycine max
  Clone ID: 700964324H1
gtcctcttttctctgtttctccctttctctctgtctctctctcgctcttcttctcatccagcaccgagtcacagactcaccgatcttccgattccctttcgtcttggtttatgagctcgaaggagagacccactcttggtggcacgcggattaagacccgcaaacggaatattgctgcgccgctggaccctgcagcattctcggatgcagtggtccagatttatttggataatgctggtgatctggaacttattgctaag

SEQ ID NO: 78495 - DNA, 258 bp, Glycine max
  Clone ID: 700964325H1
ggttatcatttctccatttccattttctctctcacttttcaagaatcgtaagctatgggaaagtcttacccaactgtgagtgctgattaccagaaggccgttgagaaggcgaagaagaagctcagaggcttcatcgctgagaagagatgcgctcctctaatgctccgtttggcatggcactctgctggaacctttgacaagggcacgaagaccggtggacccttcggaaccatcaagcaccctgccgaactggctcac

SEQ ID NO: 78496 - DNA, 257 bp, Glycine max
  Clone ID: 700964326H1
aagggtcagaagaatgatgcttgccgctattttgaggaatgaagttggatggttcgatgaggaggagcacaactcaagccttgttgcagctcgccttgccacagatgcagctgatgtcaagtctgccattgctgagaggatatcagtgattctacagaacatgacatcgctccttacttctttcatagttgctttcatagttgaatggagggtttccttgctcatcttggcaactttccctctccttgttctagcca

SEQ ID NO: 78497 - DNA, 237 bp, Glycine max
  Clone ID: 700964327H1
gggattcggctcgagctttgttgggaggatcagggagaagagggagatggttgatgttcgcagcagcagcagcagcagcaaccactaccaatggtggggccatggaggagttgctttcacagctccaatctcatctccagaaggctcttgctggtggaggacccgaggcagtgaagaggaacacgagtaggaacgagtgtctgccccgtgagagaatcgatcgcctccttgatcccg

SEQ ID NO: 78498 - DNA, 263 bp, Glycine max
  Clone ID: 700964329H1
atatactctctcttcaatgcttgtgttttgaacacttcatacttacttccattactatgatttggtgcatagaaagcctctaaatatggcagccacaagcacggataagttggaggcaggaacggtttcaagttatgacaggaaaagtgaaatcaaggcatttgatgattcaaagactggtgtccaaggactggtagaaaatggtgtaacaaaagttccacttatgttctattgtgaaaactctaatctcaatgatggcataa

SEQ ID NO: 78499 - DNA, 267 bp, Glycine max
  Clone ID: 700964331H1
gggttcttgagtttgactctagattttgacaaattcaaagtgtgcatgcactgatgcaacccccttcccctttttctacattaaaaaactatgaatgagatttttcttgcgatcatcattgcttgaattgaatcatattaggtttacattctgaattcgattagatttagcatttagggcctattaggtgttggtgtgattgtttgtaccttctggtggtggagcttgttggaaattggagatgagtcagaggggtttaatatatag

SEQ ID NO: 78500 - DNA, 271 bp, Glycine max
  Clone ID: 700964332H1
tttagagtagagtagagcatcgcgttatgttatcatttgatgaacaaacctctacaaacaacgtaacatggagaatatccatatacagcacagcctatggatcaaatcacattcaaatttagataaatactaaaatcaaatatgaccgaccgtctactgaaacataggaagcaagaatttccattcctaggttggttctctattataaatatacacatctatgctaggtatgtcggtcatctaaataacaggccggtcttttaagtgtccg

SEQ ID NO: 78501 - DNA, 264 bp, Glycine max
  Clone ID: 700964333H1
ctcaatattcgagaaaccgccacgtggcttctggaagcagcaagtttggtctagaaagatcccaaggagtcggtccgaacgaggatccacccccttccttgacgaacacagagacgtgtgttttggattctatttgtgccgtggtttgagatttagatgcgaatagatatataccctgtcttgtgccgtgtcccctttaagccaattgcaatcaaacaaagtttcggttattggtgttcatttttcttcctcgatctttctcta

SEQ ID NO: 78502 - DNA, 262 bp, Glycine max
  Clone ID: 700964334H1
gtaaagctatgggatgtggaacttgggaaactcatctacagcttggatggacacaggcatcctgtatattctgttgctttcagtcccaatggcgattatctagttagtgggtctcttgacagatccatgcacatatggtcattgagggacggcaagattgtcaaaacatacacaggcaatgggggcatttttgaggtctgctggaataaggagggtgacaagattgctgcatgttttgctaataatacagtttgcgttttgg

SEQ ID NO: 78503 - DNA, 254 bp, Glycine max
  Clone ID: 700964335H1
gcaaaaacatcctacgcttgacatgccagtgatcgactacgacttggcacttcttttccaaccagtgctggtgcttggaatcagcattggagttgccttcaatgtgatttttgctgattggatgatcacagtcttgttactaataattttcgtaggaattgcaaccaaggcattcttaaaaggagttgagacatggaaaaaagagaccattatcaagaaggaaactgctagacaatcacaatttaatggcactg

SEQ ID NO: 78504 - DNA, 256 bp, Glycine max
  Clone ID: 700964336H1
ctgcgctcttcagccaccataccatagatccttcattctctgcaacgatcaaacccaaaaaacactgcacctcttcttctggttttcctcgttttgagtttaaattcacagtattttgaggaaacaaattaaagggtaatcgctcgcttaatccaccgagctcaattcccacatccccacaaaagaatcaacaaaatcagatttggtgaagaagagagtgtgatttgatgattatgaattgaagtttgaggtggag

SEQ ID NO: 78505 - DNA, 258 bp, Glycine max
  Clone ID: 700964337H1
ctcgagccgcgcaaaaatggcacctgcaacactgtctctgtctctcctcctcctgttctcagtcagcatcgccgtaaccgttagatcgagcgactacgactacgattgtgtgtacactgcatacgttagaaccggttcggtgttgaagggcggaacggactctaagatcgggctgaagctgtacgacaagtacggctactacatctacattaaaaacctcgaagcatggggcggcttgatgggcaagggctacgacta

SEQ ID NO: 78506 - DNA, 255 bp, Glycine max
  Clone ID: 700964338H1
ttccatttgactcttgttctgaacgacttttcaagagaatcaaaccatggcagtgaaagtatacggtccccactgtgcttccaccaagcgggtgctggtttgtctggttgagaacgaagtcgaatttgaggttgtccctgttgatgtcactaagggggagcataaggatcctgagtacctcaaactacagccatttggagttgttcctgtcatcaaagatggagattataccttatatgaatctcgtgctataat

SEQ ID NO: 78507 - DNA, 248 bp, Glycine max
  Clone ID: 700964339H1
ctgacccttcttcttcttcttcatctacattagtagttcttgttattcattattcttcatactcacacagcttcttctgggggcaaaaggggtcatttttcagatccgaggttgagctcctctacccatcatgatggagctcggatacctgaatcagggtcagccttctagaggaacaacaccacttgtcactcttccattgttgctttcaacacttgtgttcttctccactttcacacatgccttct

SEQ ID NO: 78508 - DNA, 254 bp, Glycine max
  Clone ID: 700964341H1
gacagatgatgatggagatggcgaacgaaacgctgtcgttgcgggactcgcggcgttggtgctactcgcggcgagtgtggcggtggatgctcaggagaactcggacgtgaagacgctggtgaagtacaagcacgggaagaagtactgcgacaaaggatgggaatgtaagggctggtcgatttactgttgtgacctcaccattaccgattatttccagacctaccagttcgagaatctgttctccaagcggaact

SEQ ID NO: 78509 - DNA, 253 bp, Glycine max
  Clone ID: 700964342H1
tgaaagttggagtgttttctcgtttgctgtgctcagctccttatggagctctcactctctccaacttcacatcgagttccttccacaattcccactttggattccgctaaactatcatccactaaggccaccaagtcacaacaacctttgttcttaagattttccaaacacttccgctcaattgggttgcaccatcacagtcacagatgctgctcaaatgctgttcccgagagaccccagagacccagttcca

SEQ ID NO: 78510 - DNA, 255 bp, Glycine max
  Clone ID: 700964343H1
ctcgagccgattcggctcgagaatggaacaagctgggaagcaaagaattatggtggcgtctcagagtcaaaaccccattgagcaaatccaagcgcgcttcaaggacttggaaactggattccgcctctggctctccaagcagtccctccccgtcgaggccgccgtcgtcaccaccaccagcgccgcccagggcgccgccatcgggccttcatgggcaccctcaccgccgacgcctcctccaccttccccacccct

SEQ ID NO: 78511 - DNA, 261 bp, Glycine max
  Clone ID: 700964345H1
gaaagattttgatttggtgatgaaggttggagcatttcactgagttatataaaaggcgtggcttgtgggctgtgtagaactcaaatcgatcaaataaatggctactgaacatgaagacgatttcaaggatgagaagaatccccgccccctcgacgaggatgacatcgcccttctcaaaacctatggtttggggccttattccacaagcataaaaaaagtcgagaaggaaatcaaagacatggcaaaaaaggtcaatgattt

SEQ ID NO: 78512 - DNA, 258 bp, Glycine max
  Clone ID: 700964346H1
ggaaagtgatcgttttctaaagcaagtcacttttcatctccttcggcttgcagtcttccgagatgaaaacatcaggcaaagggcagttgttggtcttcaaatacttgtgaggagttcgtttcgttactttatgcatacagctagattgagagtcatgttgattgtcacattatcagagctaatgtctgatgtgcaagtgactcagatgagatctgatggaagcttagaagaaagtggtgaagcacggagacttaggaa

SEQ ID NO: 78513 - DNA, 279 bp, Glycine max
  unsure (1)..(279): unsure at all n locations
  Clone ID: 700964347H1
tcgggatccggctcgagcacctggtggtggacccttcggaggtgtgattggtgccttccgccacatgattcacctcnagggcttcttttctctttacaagggtttagtaccctccattatcagcatggcaccttcaggtgctgtctgctatggtattgatgatgttttagagtcagcatatctgcattcacctgaaggaatgaaaagaatccaacacatgaaagaagacggtgaagagctgaatgcactggaacaactggaattgggtcctgtcagaac

SEQ ID NO: 78514 - DNA, 266 bp, Glycine max
  Clone ID: 700964348H1
cgcaacaataagaaagaatcccaggcgaggagaaagatggaggggaaggagcaggatgtgtcgttgggagcgaacaagttccccgagagacagccgattgggacggcggcgcagagccaagacgacggcaaggactaccaggagccggcgccggcgccgctggttgacccgacggagtttacgtcatggtcgttttacagagcagggatagcagagtttgtggccacttttctgtttctctacatcaccgtcttaaccgttatggg

SEQ ID NO: 78515 - DNA, 256 bp, Glycine max
  Clone ID: 700964349H1
tcttcaaagacttgaattcttcttacttaggttctgaatggctggaatttgctgtggtgttgtcggagaaggtgacactccggctccactcgagccaactactcgcccctccaggcgccggagtttggacatcttacccttaagatacatcgctgacatggcggtgccgccgtcggatggttcacggaaacgtcccaagctggatctcagggaccgcgataacgtagttcaaaattgcgacgaatccactggacac

SEQ ID NO: 78516 - DNA, 255 bp, Glycine max
  Clone ID: 700964350H1
tagaggttgaagcagcggcttcttagtgagtgcttttctgagattcaatggcgttcattggtgcagtcaaattcttgctgcagtacttagttctattatgcctcctcaactatctacctctttctcaaggtaagcagaactggaatgaagggtacccatttataagaagagcaagttcattgggttataatgggaaaagtggagggtatgattatataatagtggggggtggaacagcagggtgtccattggctg

SEQ ID NO: 78517 - DNA, 256 bp, Glycine max
  Clone ID: 700964352H1
tgcacgcaaatatatatgtgtatgaatctgcacttcatttcaaatcccaacaaaaaaccaaagtaatctaacaaagtaagcacaatgagggagatattgcacgtgcaaggtgggcaatgcgggaaccaaatcggttccaagttctgggaagtgatatgcgacgagcatggcatcgaccccaccggaaagtacaccggcgacgaggcctccgatctccaactggagaggatcaacgtctactacaatgaagcctccg

SEQ ID NO: 78518 - DNA, 255 bp, Glycine max
  Clone ID: 700964354H1
atcttctatctctctcactaactcatactctgtttgctctgtttcagtgtttctctcccctgctatctctaaattgaacgtgttttctgctacttttgcgcgtgtgcattcctcttcccttcaaagctagcactttacccaccaccacaacaaccccttttgctcccacgtgcacagagtcaaacccaaagctctttttttctctccaaacccacaacaacaaaaacagagcttctctgttttctccattcccaa

SEQ ID NO: 78519 - DNA, 251 bp, Glycine max
  Clone ID: 700964355H1
tgtagctgttggaactctggcgtttcttggagcctttttcccttattacactgtcaacgaggagggagtttcaataatcttgaaggttattgcttccttactttcacctacagcctttgctttgggttcgatcaactttgctgattatgagcgtgctcatgttggactccgttggagcaacatatggcgggaatcatctggagtgaactttttggcatgtcttctgatgatgatacttgatacactgctat

SEQ ID NO: 78520 - DNA, 251 bp, Glycine max
  Clone ID: 700964356H1
ccgagatacgagcaggtggtggttgtggtgaggagggtgggaataatattactctgtctgggttgctgaattttactgatggcttgtggtcttgttgtggaagtgagaggatttttgtgtttaccaccaaccacattgagaagcttgacccggctctgctgcggagtgggagaatggatatgcatattttcatgagttactgttcgttcccggcgctgaagattctgctgaagaattacttggggtgtgaa

SEQ ID NO: 78521 - DNA, 253 bp, Glycine max
  Clone ID: 700964357H1
aaaaattggaacctgcctctcttaaagtttgtatttttttgagtgggtgggttgattgagagtactgtgcaagctttggaactttgtcccaacctgctacttcaatggctactgaagaggttaacaaacctcaatcacttcctccataccctgagatgatagtgaaagcacttgaagcactgaatgagccaaatggatcgaacaagtcagcaatatcaaagtacatagaaaccacctacggtgagttgccaga

SEQ ID NO: 78522 - DNA, 252 bp, Glycine max
  Clone ID: 700964358H1
tcttcttcgttgcgctttttcccaaaaccaattgcatcactctcgtccgttaccgccgctgccctagaccaccgcaagcgacgtcgcacaccgccttcatccgttagggcaaaaatgagtcgaggaagtggaggtggatacgatcgtcacatcactattttctcccctgaaggacgtctctttcaagtggagtatgctttcaaggctgtgaaggctgcaggaatcacctcgattggtgtccgaggaaaggat

SEQ ID NO: 78523 - DNA, 259 bp, Glycine max
  Clone ID: 700964359H1
ccctcattttcattgcgcaaagaagtaaaaccccaacttccctttcgtctctgccctcacctgcagaacagaacgcgtcgtctcatttctctccgcatcgccgtcgcaacaacaccgccgagaagataacctcttcaatcggaaaatgaacgctgataacggttccagagacgccaaactcgacaaccaacacgcaaaagacaaagaaaaggaggaactcaccgagaatatgaacaagttgcatattgaaggatcttcg

SEQ ID NO: 78524 - DNA, 251 bp, Glycine max
  Clone ID: 700964360H1
tgcggttcaagcgcagggtcgatggtggtgccagtgccgagttgcagactgctcttgtcagctacaggaagaggttcccttggtcccttttgcgccctttccttcaggttgacttggtttccacaattcacatcgctgatgaagagtattttctggccctccaaaaggaactcgagagctatgattgtgtcctttacgaaatggtagctagcagggaaagtttagaaaatagaagaaatgctactaataca

SEQ ID NO: 78525 - DNA, 258 bp, Glycine max
  Clone ID: 700964361H1
atacaccacaccacacctggctttctctttatcattcgttccttcctttcttcgcattgacaaaccctaacatagcatcatcctaaggcacatgcttctccccctgaatactttgtcctccaggggaacacaacttataaagacgatctatatttaaggaagaggacagggatgcgtcggtggctttgttgcacatgtcaggtggaagagtcttacccatcggatgaaaatgagcacctgaaaagcccaaggaattat

SEQ ID NO: 78526 - DNA, 254 bp, Glycine max
  Clone ID: 700964362H1
gcggagagagagtttaggccttagtgagaaggataacgccatttggttttggcttggaatacgtcatccactatcaatcaactgggctttgaaatggtgaaggagaccgaatactatgacgtgctgggtgtcagccctacggcatccgaagccgagattaagaaagcttattacattaaggcacggcaagtgcatccagataaaaacccaaatgaccctcttgctgcacaaaattttcaggttttaggtgaggc

SEQ ID NO: 78527 - DNA, 262 bp, Glycine max
  Clone ID: 700964363H1
gaacagtgtgactaacactatatggtgacaagatttccctcatgccacttctgttgattttgcatcacttctcccaaaaattggcaatgctgacattcatcaaggctcaaactgtggggacaagttcaaattttgggaggacagatggatgggctgggaggtttcgttgattgcaagataccctaggttgtatgttatatcttcacaacaaaaccatatcatacaacacatgggggtcttccgagataaagggtgggaatgg

SEQ ID NO: 78528 - DNA, 113 bp, Glycine max
  Clone ID: 700964364H1
atctctctctatctctttgtctctcatccagatcttgcaaaaaggtagaggcacaatggaagagagggctccgactcaaggggaagagtccgtgtaattggagaagtgggggt

SEQ ID NO: 78529 - DNA, 257 bp, Glycine max
  Clone ID: 700964367H1
ctctctgttcccttcttctgtctcatgcacacaccactgtaccttgttctcaccgaaaccttcaactaggaatcgatcgagagtgtcttgtgttgctagtgcaagaggctgcgatatagatagatacgttcgtgcgtacgtaggaagggtacgtacgcggtagtacacaagacacgacgccgttttgcactctgttcttatttccgatcatgagggcgcacaagaagggtgttaccgtggggatcactgttgctgct

SEQ ID NO: 78530 - DNA, 254 bp, Glycine max
  Clone ID: 700964368H1
tgtaattcctgagtttccatttcaggtgtggagtttgagacctcgtgaccgtggcatgctggggaaaggagtttcagtagggacttttttctgcactagttgttggaacaatggagatgagctatctgttgtgtgcttgaagaacctaaatcgtgtgctgccagcaatgccacgcctccaccaaatacatgcacttatagagcattatggtcctactgttttctttcgtcctgaggaagtatacttgccctctt

SEQ ID NO: 78531 - DNA, 254 bp, Glycine max
  Clone ID: 700964369H1
ctagaagcaataagatgaaaatgaaagtgcttgttttgtttgttgctacagttttggtagcatatgaatgccatggctcagactaccagaagttccctctccaaatgaaaactgggtttggtgggcaatacagcaatgaggtggcatgtgccagttggaggcttggcgtggaagcaaacaacgtagtcaagtggcaaactgttcctgcagcttgcggagagtacatagctgactacgttctaggagaccaatat

SEQ ID NO: 78532 - DNA, 250 bp, Glycine max
  Clone ID: 700964370H1
gacagaaattgttgtccctgactggcgtgggcgtctgtgtatgaatgtgtttgtgagaaaatggaagctgcgatgggactgatgcggaggattcctccgaaacacacagaaacagctctgtcagcgcttctgagccttatgcctgacaactcctccgatctcctctctcaagtcgatcagcccctccaggttctgtgcgatgtggaatgcggcaaggagttcattttgtgcgaatacaatagagatgccg

SEQ ID NO: 78533 - DNA, 251 bp, Glycine max
  Clone ID: 700964371H1
atttgtagctgttgaaaatgtcaaaagttctgatataactgacaacggatcactttctactgatctgagcaaagatacgacgcttacatccattgttggggatgatcctgtatcgacggcagattcagagaagcaatgcaatgtaaaacaggttgctgaacctgaactgaataatgatgccccaagtgctgcaagtgtgagttggaagtggaacgaggaggatattgatgccccatcaattcttgaagcat

SEQ ID NO: 78534 - DNA, 253 bp, Glycine max
  Clone ID: 700964372H1
ctagcaaatgggttctcaccaacaagaaccatggctattggagaatgggaaaccaagggttttgaccaaggagaccaggcatggccgttctgcacacagaatgtcctccacctctttgcgcaagaaatctagccgaactcttgtctcaaaggttccatgtgccactctcagaaactttctttcaaatttgcaagaggttattcttggcaccaagctttccattctcatccctgctattccagctgccatcgtt

SEQ ID NO: 78535 - DNA, 250 bp, Glycine max
  Clone ID: 700964373H1
ccgggaaagtgtcctccagggtatggtgctagtgctaatgatcattacgtggagccagggtacgtgaaccagggttatcctctgcagccacctctaccgtactacatgcacccgcacgctcctcctccgcagatgttcagcgatgaaaaccccaatgcatgttcaatcatgtgatgatcggtgattaattttcggtgtacacttacacacgtacgggatacggatacggaatacgcatggtgtaatttgt

SEQ ID NO: 78536 - DNA, 214 bp, Glycine max
  Clone ID: 700964374H1
agcgcatctcagttcttcacttttatacgctaatctcatgtacagattatacatttaagatgcagaactttgctatcgtaatagtataataagtactacccaattccaaatatcccatgggaacccatattagatttggtatactatatactatacgatacaatctatatggctccatagataagggtgcatgttttcagtatgtgcagagcgt

SEQ ID NO: 78537 - DNA, 254 bp, Glycine max
  Clone ID: 700964376H1
gcgaaggtgctttcttagttgtgctgctaacgacaatccatggaaatgataagctccaaattcttcttcttcttcttttcaactctctgtcttctctacggattttccaacgccaccgatattcactattgcgataagaaagctgactatgatgttgaggtcaaaggggttgaaatatctcctgatcccatcgcacgaggccagcctgctacattcagcattgctgcaactacaggtaaagctttatctggagg

SEQ ID NO: 78538 - DNA, 257 bp, Glycine max
  Clone ID: 700964377H1
atctcgcccaactcttagaaggaatcccagacgttttgtataccagatacctttacatctatctttacaaaagaatttctcaactgcatcaaaaccaggggtttcctcagcttctgggtctccgggcaagccacctgagtctaatggcactctatcaaagtttttcattggaagtgtagctttaggtgctgcttttctggcagcttatcagactggttatttggatcaatatcttaagaaggagcattatagtgttc

SEQ ID NO: 78539 - DNA, 256 bp, Glycine max
  Clone ID: 700964378H1
tttggatctgtattcaacaagttagggaaggagcttggagaacctgtagactttgaacttccagattggtttaataaatcaaagccaatgcagtacacctatataaaacgcaatatatatctcactaagaaggtcaagagatcccgatttgatgatgatggcatattctgttcatgtactccttcccctggatctactagtgtatgtggtagagattgccactgtggaatgcttctgtctagctgttcatcaggct

SEQ ID NO: 78540 - DNA, 251 bp, Glycine max
  Clone ID: 700964379H1
cagcattcccatattagaatcctcatcttatcatttgtactctcccccacccagttaatttatcgtatctctttgcagtgaagtctgagcgttgcacacaaagatatttaccaatataatataaggctgtaatttgtaagcaaagaaaatggtgaagatatgtggaattggagccgggtacgtagggggtccaacaatggctgtgattgccctcaaatgcccctcaattgaagtggctgtggttgacatct

SEQ ID NO: 78541 - DNA, 263 bp, Glycine max
  Clone ID: 700964380H1
caaccacacacactctctctcccctctctgcaccaaaaccacttctccggcgacatctccggtcaggttccggcaacctcatcggcgaatcggcatgccaacacaatgaatgcggaacctccgctgccgccggcgctcctcatgtcggtttcctgcctctccgactacgacctcctctgtggcgaggacacctccggagtcctctccggagagtcgccggagtgctcctcatccgacatcggctcctcagcacttccgccgtc

SEQ ID NO: 78542 - DNA, 250 bp, Glycine max
  Clone ID: 700964381H1
agctcaggattcggctcgggattaatcttatatacatatatataaagacatagataatagtcatgtagatataattatttcgttatattttccttgcatgggctgttaagatgtctcgcacgtgctcacagtgcggcaacaacggccacaactcacggacatgcaccgacggtggcgccgccgggtctccgagggagaacggcatcatgctgttcggcgtaagagtcatgacggaagctaactcctcctt

SEQ ID NO: 78543 - DNA, 257 bp, Glycine max
  Clone ID: 700964382H1
gacgacaacgaacccgacgatttcgacgacgacgaagctgaaaacggttacgacgacgaaaacaacatcgccgcgtatcctcggatcccgaagaagcgcaaggtagtcggcactgcagcggcaggaggttcttacgagttcgcgccacgtgtcaatttctcctacggaaactcccgcggttcgggttcgggcaaggagtggaacgagcacgagactttcgtactgttagaagtttggggagacaagttcctccagct

SEQ ID NO: 78544 - DNA, 252 bp, Glycine max
  Clone ID: 700964384H1
gctcgttcccagggatggacgtgtcaaaatcagagccatcaagacacggcttcttgcagagtgaaggaaatacttatgcatataaataaatttgtggggtgtaatacttgtattataggttaattttgttactgctttttaaattatggagacaatttataattgtgcttgtattttatattaagagaaatttaaaagcttgtgaggtcagttgtcccaaaattcaccaagtacctaatcttatttgtgttg

SEQ ID NO: 78545 - DNA, 251 bp, Glycine max
  Clone ID: 700964385H1
accaccacctgttgcatcattggagcatggtgaaggtgctcatcatgaaggagaggccaaggagaagaaaggtatattagaaaagataaaagagaagcttcctggttatcactccaagacagaggaggaaaaggaaaaggaaaaggagagtggtgctcattgatatttaagattgagacaaggcttttttgttggttggagatgcatgattgtggtgtgctttgttttcatttcatcatatgacagccttg

SEQ ID NO: 78546 - DNA, 251 bp, Glycine max
  Clone ID: 700964388H1
gtaaaaagtgcagaacatctcaaaatttcaagtagcagtatacctcctacctaccttttgtgtctgctctttaatgattctatctccttttctcatagactaatcatgttgaaatatatcacactggctagctacactacttaaattgtatttgatgtaaagattcagcaaatacattttgaatttcaatattctctgattgcttcttgtgtccctgaatgtctcattgaggatgacctggttttgtctct

SEQ ID NO: 78547 - DNA, 255 bp, Glycine max
  Clone ID: 700963778H1
ctaaactagaaagtgatcgaacagcatgttcaagcttttggttagtagagcagctagggtttcaactccacacaaccacaatgcttttgcttctttcgctttctctaggtatgctcattcattaccatttgcaactgtagaagcagaagagatatcaggctctagggctgctgaagttttgaacctggtgcaaggtaaatgggtaggatcttcaaattggaatacagttgtagatcctttaaatggagactcatt

SEQ ID NO: 78548 - DNA, 250 bp, Glycine max
  Clone ID: 700963779H1
cgaacaaagaagggagaggaaacataggagattatcatttccgccattttgcttggaggaacacataatcgagcatatgtcttctcccttgaaaattagtgaaccaatagcatccactcatacaaatgataatgaggtgaaccaatagcatccactacaagtagaagctaacaatcaagaaaatgaacatgaagaaccagttgtcgggagaagtaggacagaaacttcagttgtttggacatgatttgat

SEQ ID NO: 78549 - DNA, 78 bp, Glycine max
  Clone ID: 700963780H1
tgttaaacagcacaacgagccactctgaagccgctcacgttatccacaacactctcaaccctccttaaaccctaacca

SEQ ID NO: 78550 - DNA, 231 bp, Glycine max
  Clone ID: 700963781H1
atttgaaacaatgttacagaattatggcgcttttcttgagaaggatggagcagggattagaggtaaaataaagatcactggatttgaaaatggagatatagatctttcaaaatcattatggacctatcaggttgggcttcaagggtgagtttttaaaattttacagtgaagagattgaaaattcagaagggtagagttgaccctgatgccatcccatccaatttacagggt

SEQ ID NO: 78551 - DNA, 260 bp, Glycine max
  Clone ID: 700963782H1
agagaacaaagcacttagtgctattcaataattacgaaaaaccaacagcgagtgttgtttttgtttggtccaggctggaccagggaatgaatagagatgagaggctttcggttgaagagaactgagttaagcggcgaaccaaacgcagaatcggcggcagaaattgccaccggaagcacgtcgaagacgggtgaaccaaacacaaaattccatccaccacttctcttggtcaatccccaactcaaatctggtgaagaaaa

SEQ ID NO: 78552 - DNA, 260 bp, Glycine max
  Clone ID: 700963783H1
caatcatccatggccgaggaaccccaaaaaccagcctccgctgaagaagtggtgcctgttcctgcggacacgccaccaactacccaatctgaagctgaagctgaagttgaagcaaatgcagaaagcatcgaacaagtggtggcggaagcagagaaggcccagagtggtgtagaagacaagatttcccaatctgaagctgaagctgaagctgaagttgaagcaaatgcaaaaagcatcgaagaagtggtggcggaagcaga

SEQ ID NO: 78553 - DNA, 259 bp, Glycine max
  Clone ID: 700963784H1
ccacaatcaaacctcttctttcaggtccaattcactcgcttattctcttctttccatacacatgcagacacaaaattcgaacaagttcaggactggcatggacttctttcaccgcgcgaaggcggtgcgcctccgcagccaccacgacaagtacctcctcgcggaggacgacgaggattcggtgacgcaggaccgcaaaggctcctcgaaaagcgcgcggtggacggtacaatacgtggctgaatacgatcacataatt

SEQ ID NO: 78554 - DNA, 94 bp, Glycine max
  Clone ID: 700963785H1
ataactttcaaactcaacaacaagggatttcctttttccccttctggattcaagtcccaagtatttgcttaaattggggtattttttttatatc

SEQ ID NO: 78555 - DNA, 254 bp, Glycine max
  Clone ID: 700963786H1
tttacaccttcctttcttactctgctcatcttcttggccatcctaggtagttagtagtttttggaggatgaggttgttgtgtttgtgtttaacgttgttgctgtttctggctagtgtggcaatggcagaagaagattcagatcataataagcactccctaaaagccacgtcacacgcgcagatccagtgcacaatgtgttcctcttgtaacaacccttgcaaccaagttccatctccgccaccaccttcaccac

SEQ ID NO: 78556 - DNA, 258 bp, Glycine max
  Clone ID: 700963787H1
atcagattgctcgaagagtttggaaagattactatgcccaggtggatgcagtggtgtacttggttgatgcttatgacaaggaaagatttgctgagtcaaaaaaagagctggatgctctactctctgatgaatctttagcgaatgtccctttccttgtccttgggaataagatagatattccatatgctgcctctgaagaagaactgcgttaccatttgggcctgactaacttcaccacaggcaagggtaaggtaaatt

SEQ ID NO: 78557 - DNA, 257 bp, Glycine max
  Clone ID: 700963789H1
cggctcgagttctttggcaacacacccaaatgcaataatattcccattaggttcctcagcacaagccttttatgggcaccagcctcagcaaaacaacccagttttccataataacatacctaacagaacggtgacccactgctcagtggacccattagatacttctttgtgccaaaatcttgccatgcagttatctccgctagatgtgtttaatgaaggtggctctcagtttccattagcattcttagaggatgatc

SEQ ID NO: 78558 - DNA, 256 bp, Glycine max
  Clone ID: 700963790H1
taagaaaaggcacaaaaactggtgtagctactgccctagaagaggagcttcatagtgcaagatctacatttgagcaagctcggtttaatctggttactgccttgtcaaatgttgaagcaaagaagagatttgaatttttggaagcagtcagtgggaccatggatgcacatcttcgttacttcaaacaggggtatgaattgttgcaccaaatggagccatatattaaccaggtcttgacttatgctcaacaatcaag

SEQ ID NO: 78559 - DNA, 257 bp, Glycine max
  Clone ID: 700963793H1
tgaatctgaacatgatgtgcctgtacgcattggaggttatcaagtctccagacctggtgctgacattgccggtcgtgctactattgcttcgcatcgcagtgcaacgatggttgctgctgacataacgcgtgcgatgcatgtaggctccgaatgtcctcttcgctcgtcctactcgcaaagactaatcaattactacagtaatgtctcgcttggggtatgctcccccccatggccctacggctggtgacttagtccgt

SEQ ID NO: 78560 - DNA, 256 bp, Glycine max
  Clone ID: 700963795H1
atggaatttcgatgctcagtcatctcttttaccattctcttctctcttgctcttgcaggagagagccatgtccatgcatcgctacctgaggaagattattgggaagctgtttggccaaacactcccattcccactgcactgcgagagcttctaaagcctcgccctgcaggtgttgaaatcgatgaactccctaagcaaattgatgatacacagtacccaaaaacattcttctataaagaagaccttcatccaggca

SEQ ID NO: 78561 - DNA, 256 bp, Glycine max
  Clone ID: 700963802H1
atttattaaaaagaaaccgagaagaccgccttagctgcattcacgccatggactcactttaaccttctctcacactcaccgctgccaccaccgccttccaccatggactccgttccgtttcgcgatggtaacatacacaccattctcgactcccgttatcttcactctccactggatgttaatcatagtttgcacactcattcctcgtcgattcggaggctttctcaagaaagggagttagagggccacactggct

SEQ ID NO: 78562 - DNA, 255 bp, Glycine max
  Clone ID: 700963803H1
atttgtcatcccctccttttcttcactactatcacatatatatatatatatgcccccttgccctctctttcccttcaacccattccatcttctctctaactctctctctctctcaaaaatctctctcaaatcagaaaaatctctcgctctctctaaaattcgaaataacctaaaacaaatagatatggaaagcaatacaccagtaatagcaaagaaagtgttgagcataatacgtgtggccttcttcatgctgag

SEQ ID NO: 78563 - DNA, 254 bp, Glycine max
  Clone ID: 700963804H1
taaaaaatgaaatgaatcatttcatattgatagtattgctatgcttagtgtgcgactcgttagttttttagaacggttccaatttaacaaatttataaaccggttcatcgtataaatgaattaaaaaagaactaataaccaacgcatcgcttcggattatctagatctaaagaactagtcaaaacaaaaaataatataaaaaaagatatattatagcaactgaactattgtgaagcataaaagaacaaaaatct

SEQ ID NO: 78564 - DNA, 80 bp, Glycine max
  Clone ID: 700963805H1
tgtgtggtagaaagttaagaagtagcaaagatgtatccattcgggcacaagggggaaaagataaaggggactatggtggt

SEQ ID NO: 78565 - DNA, 246 bp, Glycine max
  Clone ID: 700963807H1
ggaacggtggagatggaggctagcatcatggatggtccaaaacgacgatgcggcgccgtttcgggtcttaccaccgttaagaacccgatctcgctcgctcgtttggttatggacaaatccccacattcctatctcgccttctccggagccgaagaaattgctaggcaacagggtgtggaggttgtggacaacgagtactttatcacacctgataatgttggcatgctcaagctggccaaggaagca

SEQ ID NO: 78566 - DNA, 246 bp, Glycine max
  Clone ID: 700963808H1
ggaggatccctgtgctagctcgatcaaagatcaaagatggaggagcggactcgcagcattctgattttgatgaccttgctttccatctccattgctggcggcaatgcaggtggcttgcagcatcataagggtaggcatggtaagcatggtcgtcatatgtctgctcgtaatgtgacttacgacggtaagtcactgttcattaacggaaggcgcgagatccttttttccggctccgtccattacaca

SEQ ID NO: 78567 - DNA, 244 bp, Glycine max
  Clone ID: 700963810H1
cttccctggcggcttccaccgcagctatgtcagaaatgcttggaaaccccgtgagcctgagaggcgccaccaggtctgctccatcaccgtctacacctgttactttcaagaccgttgcgcttttctccaagaagaaggcagcaccacctcctccaaagaaaaagcctgctgctgtatcccccgccaatgaggaactcgccaagtggtatggtcctgacagaaggatcttcttgcctgagggtct

SEQ ID NO: 78568 - DNA, 242 bp, Glycine max
  Clone ID: 700963812H1
ctcagttcatgaatagatgggcaaagctggctcgaggagaagaacttaaccctaatgaaattccttttctcgatcgaacactactcaaatttccacaccagccatcatcccaacgcgttgatcaaccagagttgaagcctgtactacaattagagcaaaagaagaatgcaagatggagcggtgcattgttaaaactcaagtcaagccaagtggagaggctaaagaagaaggctaatgatgaa

SEQ ID NO: 78569 - DNA, 246 bp, Glycine max
  Clone ID: 700963813H1
tagggtttctccttcgagtgagggaaatggctcccaaaccgcctagtacgggtctgtttgttggactgaacaagggtcacgtcgtcaccaagaaggaattgcccccacgcccctcagatcgtaaggggaaaacaagcaagagggtgcactttgtgaggaacctcataagagaggttgctggttttgcacccgatgaaaagcgtataactgagttgctgaaggttgggaaggataagagggcactga

SEQ ID NO: 78570 - DNA, 246 bp, Glycine max
  Clone ID: 700963814H1
gcacactatcaacaacatcctccgcatctgcacagagaccccaatgtcttgattgtcagatacaagcttcctcatgctcttcaatacaaaattattgtcaggtgatattcttggtcgcacagttcacaagtttcaccaatatggaacttagaaaatagccaacggccatagatcaccaaaggaagcatgttgatgttgatggtttcttggtaagataacttgccgtcatacgggcaggacacattc

SEQ ID NO: 78571 - DNA, 251 bp, Glycine max
  Clone ID: 700963815H1
aatcaacccttcacctcgtcctccgtctccgtggtggcatgcagatcttcgttaagaccctcaccggcaagactattaccctagaagtcgaaagctccgacaccatcgacaacgtcaaggctaagattcaggacaaggagggaatccccccagaccagcagaggctgatcttcgccgggaagcagctcgaggacggacgcacccttgctgactacaacatccagaaggagtcaactctccacttggtgttg

SEQ ID NO: 78572 - DNA, 252 bp, Glycine max
  Clone ID: 700963816H1
aaaaaaaaatgggggcttcacaatcacaggaagagctacaatcacaacaacagtttcaacaacaccaacacccaaatgaactcaccagaagggaatcattgttgttgtctcctgcagctagtaacaacacaaaacaattcagcaacagcagcaaaggtagtagataatgtcacagctgccaacagcaccaacaccaactgtttcatgttgaatgcgagagcactctcaatcacctgggcagaaaatccagac

SEQ ID NO: 78573 - DNA, 258 bp, Glycine max
  Clone ID: 700963817H1
gggcaatgaagatctctaattatgcaaatgtagctctgttgatattaaagatttatgccactgtaaggagtgggtcaatagctattgcagcatcaactctagattctctacttgatctaatggctggtggtatactttggttcactcacctctcaatgaagaacataaatatttataaatacccaattggaaagctaagagtgcagccagttggaataattatttttgcagcaatcatggcaacacttggctttcagg

SEQ ID NO: 78574 - DNA, 252 bp, Glycine max
  Clone ID: 700963818H1
cctagtttcaattctgtccaatttccaaaaccaaaacaagccacacaagttcatggcaactcccaataacagactctctcttgccatggagagaactgggcaatgggttttctctcaagacataccaactgatgttatagtggaagttggagaaacaactttctctctgcacaagttcatgctagtggcaaaaagcaactacataagaaaactgatattggaatcagatgagagcgaactcaccagaatcga

SEQ ID NO: 78575 - DNA, 254 bp, Glycine max
  Clone ID: 700963819H1
aaaaaatgttttgaaaacagacaagtttctcgaggaagcgatccaaagcccaatgaatgaatggttatcgttttgaagaagcttttgatggcagtgctctgagactgaatcattgaaactagattcaatttattcgctcctttcttcaccaaaattgaattgaatggatgctatcagaaagcaagcctccaagcttcgagaacaggtcgctcgccagcagcaggctgttctgaagcagtttgggggtggcggtt

SEQ ID NO: 78576 - DNA, 253 bp, Glycine max
  Clone ID: 700963820H1
tttgtgtttttgtagatagaagccatcagtcatggataggcttctatcatcgtcttcacccccttcttttacatttctcactcgattcgaatctgcaactgcaagattcaatttctctccgtcaacacgttctcactctcacttgaagcggctctcctcaatttgttgccagcatgcaaatccatctcctttttcctcttccactccctttctcgcttcttccaaccaccccattaattttccatccttttcc

SEQ ID NO: 78577 - DNA, 252 bp, Glycine max
  Clone ID: 700963821H1
ctttgagggaatttgacaaaaaagtagccactgccccaacgatcacatttcccttgacttctctacctgaagctccttgtttcgcataggaggtagttgaaatgtccgagggaaatgcagggaaaggaaagaaaatcgccatcattggtgtctcaaccttattgttggtggctatggttgtggcggtcacaattggggtcaatctcaatgagaatggttccaacaatgatatagaggacaacaagaaagatc

SEQ ID NO: 78578 - DNA, 245 bp, Glycine max
  Clone ID: 700963825H1
tgtattttttctgtgtgagggacagaaaatacccaactggtcaaaggactaatagggccactggtgttggctactggaaggcaacaggcaaggagagagagatatataaggcaaaggcactgattggaatgaagaaaactcttgttttctacaaaggaagagctccaagtggtgaaaaaactagctgggtcatgcatgaatacagattagaagatgaacattctgtgcacaatccacccaaaaag

SEQ ID NO: 78579 - DNA, 243 bp, Glycine max
  Clone ID: 700963826H1
gatacatcagaggattcgctccaacccctatcgagtaaggtattatctgtcaatttacattcgaaagggttaggctattgaattttaaataattacagataaaataatcgatagctttgattttaaaaattaatcataatcatcggttaggttgcaacataatacttaattcgcttaattttttaactgcgcctcagagtattcataacatattctattaaattaataagctggtgatgtaat

SEQ ID NO: 78580 - DNA, 249 bp, Glycine max
  Clone ID: 700963830H1
caagtcgctaatcctagttccttcaactcctcgctggcaacaacagcagtactaccattagccgcgtttttcaaaagtgattttcgagaattagcgatgggaattgaaagaggaggcttcaagggattcaggagcgcctggagcgtgccgcccaagccgtgcgattcctgcaagctggcctcggcggcgcttttctgccgccccgattccgcgtttctctgcatcgcctgcgattccaacattcactgc

SEQ ID NO: 78581 - DNA, 252 bp, Glycine max
  unsure (1)..(252): unsure at all n locations
  Clone ID: 700963832H1
gcctcatgctatatgccggttcntgnttaaatgtttcaaagctttaggggagtatattgaaacattttaacacgaacccgccgcgaatggctgctactgctccttggttttttagttgttgtgttgttgtcttcaactccacacagttccctcacttctcttccctttgaccattcaaccttcctcgcctttgcctccgtttccgtgactgagatggctggaggtgttattcagcagatattgaggaggaaa

SEQ ID NO: 78582 - DNA, 253 bp, Glycine max
  Clone ID: 700963833H1
ccacattcaaatccaaatggccctttacattacactaataattggcctcctagtaaacaccctagtactctataaatagcatttgcatgcaccttagtcttcaccaaaatactcctcttggcatcttgtgttgtgtccctcttttaagctatttccttctcttaacacaattggttgtgccaattgccatagtcaccaaccaattaacaaaggtatatatatcatcatatcatcaccaaatgaaaaatattgg

SEQ ID NO: 78583 - DNA, 252 bp, Glycine max
  Clone ID: 700963834H1
gcatgtacaaagttactttgacattatcaatttatgaatgcaaacagttatctcatggtaccaccctgtggccagggcaaaagccttagaggggttatataactacaaatgatcatatataacggtcatcctagttatgtgtgtgctaagttccacatctcatattcgttgtgggtaaatgttatgacatggaaacttcctagtttttaaaaaaaaaaaaaacaaaaaaaaaagaaagaaagacaaactagc

SEQ ID NO: 78584 - DNA, 253 bp, Glycine max
  Clone ID: 700963835H1
ttacattaaacactgcaaaattcgtaggaaccgcacaattgagatagttgcaaccagcaagtcaccaccatggcacttgttgaagcctctgcttctctttcaatctcttctgttgctcgtcttttcactccaccaaaatgctctcccaccgctcactttcctcatcggaattttgttgcaactcgaccatcattcatcgctggttccccactcttgattcggagaaatcatggaaggaaagctgcatgcaaag

SEQ ID NO: 78585 - DNA, 250 bp, Glycine max
  Clone ID: 700963837H1
cacacacgtaacttcatctgggtttcaggaaaaaagaaaaaggaaaacaatgggttccgataatcaccagaacttggagttcttgaaggagatcggtttgggctcttccaacattggctcttacattaatggccagtggaaagccactggttcttctgtcacttctgttaatccttctaacaatcagagtatagctcaagtgaccgaagcaaccttgcaagattttgaggaggggttgcgagcttgcagt

SEQ ID NO: 78586 - DNA, 247 bp, Glycine max
  Clone ID: 700963838H1
ctactccactcgctctctctctctcgctccgtcgccgttttaccaggacacgccaaccctctcttccaaactaactaatctctctatcttcttctcttcgcgtaggcgtcgtcccccgcaacgacgtcgtttcatggttacgctattgttgttgtgctgattctctctccgaaaatcttctgagggcttctcggcgatgagtggagtaatacattctctggtgtttgattccgcgtttccatttttc

SEQ ID NO: 78587 - DNA, 245 bp, Glycine max
  Clone ID: 700963839H1
ggttgggatcttattcaactgctgaagcagcagcaagagcctatgatgctgcacttctatgcctcaaaggctcctcagccaatctcaacttcccttcttcaagctcctcctcacaacactatatcatccctcaagacactgccatgatgtccccaaaatcaatccaaagagttgctgctgctgctgccaacaatttcttggacaataatgctattgctattaataatgctaccaccccaccttct

SEQ ID NO: 78588 - DNA, 244 bp, Glycine max
  Clone ID: 700963840H1
gaaaagagtgcgagtgatgaaattgaatccaaatacctaagcggtggacgaggcctacctgagccactgcttcgcccccgccggcgaggtggtctccatcaaaatcatccgcaacgagctcacgggccagcccgagggctacggcttcgtcgagttcgtctcccacgccacagcggaaagggttctccagacctacaacgccaccgaccagaccttcaggctcaattgggcctccttcggcatc

SEQ ID NO: 78589 - DNA, 240 bp, Glycine max
  Clone ID: 700963841H1
ctttctcactccctcactccctccgttgacgtttttgttttctttatctctgtgttctgaagaagttttagggtttcgttttgtttctctcttcggccacttcaggctatggattcatttgagccagctggaaatgggaaggagtcactgccaccaccacctcctgttgttccctctgatattgtacctctcaaagcagaggaggtgctctgtacccctaccgagcataataagaaaaag

SEQ ID NO: 78590 - DNA, 79 bp, Glycine max
  Clone ID: 700963842H1
gaaaaaaaaaaaaaaccggaccaacccggaacctcaaacccaaaataaattttttagggatcacattcatgggttacgt

SEQ ID NO: 78591 - DNA, 244 bp, Glycine max
  Clone ID: 700963846H1
ctgggaggagtagcgattcggcggttgaagatgcgaaggaaggcaccacactaagtaaggttgcgtgaatggaaagcattttagagagtgtcatgggggcacaaaaaaagttttatttttgttgatagagggttttactcgattgaaacgtcgctgcttctgctcgctcttaaggacccaactgagcatactgctattgacaacttaatggttcaacagcttgatggaactgttaacgaatgag

SEQ ID NO: 78592 - DNA, 249 bp, Glycine max
  Clone ID: 700963848H1
taaattctctcatttgtaatgtgatcatttaatttaatgaaagtataaaatacttcaaatgcttccaattctgtggtaataacaaatcaacagcattgcatgtaatgattagaagcaattttgtcatgttagaaattctcaaatcttgtgtcatttcgtgttttcttttgtagtatacttttacttaaacttggtagcaattatatttcagacatcttgtgtctgatcatactctctttgtatataaat

SEQ ID NO: 78593 - DNA, 251 bp, Glycine max
  Clone ID: 700963849H1
gtttagttttgttagtagaggggatcgaatccaagattttttcctcaaagcttctcccttaatcatccaacatatcttatatcttttcttttttatgtaaattaataaattaatttataataaacatttatggatgcaggagatattgagtccatgccatttattcaggcattaggacaattctcatacagagtaggtgctggcaacttttgcttagttcatgtcagccttgttcctgttttgaatgttgt

SEQ ID NO: 78594 - DNA, 250 bp, Glycine max
  Clone ID: 700963850H1
cgcagacgccccagatcagatcctctctcttcaattcaacttcaagccaagccaagcaacatggctcaacaacaggaggacgaaatggagtatgttgctgatgataatgaaatggcggaagtagaagatgacatgtatttccgtggtagagtgtttggtgattcagagtccgaatcagatgacgatgatgaatatgactccatggaaaatcggatgacagatacctctgctgcagaagccaggaaaggaa

SEQ ID NO: 78595 - DNA, 251 bp, Glycine max
  Clone ID: 700963852H1
cacaaattttatgtgattagtcgcggtatttaaaataaaaaatgaaagtagacaaataaaaaaggaaaggagatgtttgaataaaaataattccccttcaagttcttattttttgagaggacaggacaatatgaatgttttattatgctctatcaacacattaaaaagattatatgatatatctgctgtggaagtaggtcaacatttctattggcaaatagggagtttccaagtacatgcccaagtactta

SEQ ID NO: 78596 - DNA, 249 bp, Glycine max
  Clone ID: 700963853H1
gttgagttatctcttatgaatttatctggaagcttgtctcttataatttttccaacgtgccttgttcccatcctcacggtcatgggattgaaagttgaaagaaataagcattggattgggtatgagtgagtcggagaatagagagatagatggcgaaatcggggaataagaatatgggatcaaccgcaaaagttcacccttccaatgatcccgaactggatcccgattcttacgccctggagaagttca

SEQ ID NO: 78597 - DNA, 244 bp, Glycine max
  Clone ID: 700963854H1
ctgggacttcaggctatacaaatccaatatggcattcctcacaagagcacatttaatcggcaatttttgacaagtgaagtttcaagaatcaattatttaggatatagactttatcgtgctctgcctttcctttatgaattaagatgtgttcttgactggtcatgcacaactacgtccctcaccatgtatgactggctaaagctggaggacataaatgcaagtttgtaccttgtcaaatgtgatt

SEQ ID NO: 78598 - DNA, 244 bp, Glycine max
  unsure (1)..(244): unsure at all n locations
  Clone ID: 700963855H1
aacgataacactttctctccgattcttagcatccaatcagaggttccatttctcttccttctttcgcatcgaagttccaatcggtaaattgcttctctctttcgtcaatcttcattccttctctctgaacaataactgtaataacgctcatgctgcgtgaaccagggttagggctttttctcgttgtcgntccgttactccttttgcggttttttggtcttgacttcgatcctcttcgcgatcg

SEQ ID NO: 78599 - DNA, 245 bp, Glycine max
  Clone ID: 700963856H1
gctctgtcttatatcaggagattgattacaccaaggaggctgctaatgcagaattgtttgcaagtaactttaagaacatggattatgtgaaagttcctacaatctactgggattataccacaccacagattctataaatggagtatgttccagggattaaaataaacaaaatacaagctttagatcaactgggtgttgaccgcaaaaggttagggagatatgcggtggagtcatacttggaacaa

SEQ ID NO: 78600 - DNA, 241 bp, Glycine max
  Clone ID: 700963857H1
gtactggaccgttgggttgttcttcgagaccctctctgactcgccgggttgactcgctcgagtttgggggtttctgattcacccggggacggatctcaattttgtctcagactgttctttctaatttaagttaccatctttagctgcattcgtgtcacgctcctttgaatgcccgtcacctcaggaaaagcaaagggcatcatattactatgaaggcactaattcttgttggagggtttgg

SEQ ID NO: 78601 - DNA, 240 bp, Glycine max
  Clone ID: 700963858H1
gcattttcagtcttgtggaacagtaaacagagtcaccattcgaactgataagtttggccaacccaagggttatgcctatgttgagttccttgaggtggaggctgttcaggaggcccttttgctgaatgaatctgaacttcatgggcgccaattaaaggtaacggctaaaaggaccaacataccagggatgaaacagtatcgtccccgtcggaccatcaatccttacatgggggggtttcg

SEQ ID NO: 78602 - DNA, 243 bp, Glycine max
  Clone ID: 700963860H1
gtaaaactccacctaagatgcttgtaattttaaacccacgatcaggtcggggtcgttcaagtaaagttttccatggcattgtggaacccatattcaagcttgctgggtttagattggaggtagtcaaaacaacatctgctggtcatgcgagaaatcttgcatcaagtgtagacatcagctcttgccctgatggaattatctgtgttggtggtgatgggataatcaatgaggtcagcacactat

SEQ ID NO: 78603 - DNA, 247 bp, Glycine max
  Clone ID: 700963863H1
gaacctaccctcaaatacccggtggagatccacggtgttatcctagcaccggttccgcagttttgcttcctcttcgagaacctaatgtggaggctgaggttctgatttgtggtggagccccgagaggggcttttcggaatactctctcgggtaagtttgttggagcgttgagaacttgcgctcggattaaaataaccgacccgaaagcgaattgggtgatggaaaccatgccgggtgcgagagttat

SEQ ID NO: 78604 - DNA, 250 bp, Glycine max
  unsure (1)..(250): unsure at all n locations
  Clone ID: 700963864H1
gcctcatgctatatgccggcccgtgtttaaatgtttcaaagctttaggggactatattgaaacattaccacacgtngacgcttngaatggctgctactgctccatggtgccagaatgggaatattcatacattgattacaactgtctcaaagcacctctgaaaaacatttccaagtttagagagctaaacgagtcaccaccaatggcatccacatcgctaggtctccgaagagaagttaacactctatag

SEQ ID NO: 78605 - DNA, 248 bp, Glycine max
  Clone ID: 700963866H1
caaaacacaaatgcagattgtttcctaggcgtcttaaattctatcttcgagcttgcctctgccaactacatttgaattttgcgcaacctcattcttatttgttatattaaattaaattgatccaggggaaatcagaaatactctgattgacttatatatggatcttattaattgaaacgaaattgagttgtctgtagcgacgatgagttgcttttcgtgctttgtttctcgtgggaaagatgtgagaa

SEQ ID NO: 78606 - DNA, 246 bp, Glycine max
  Clone ID: 700963868H1
ctgatagtattcattgatatcttttacactgtgtatggtgcatttgaattggaatgtagttgcagtaagactttttaccgctgcatgtaatgtcaatgtgcaatctctaattgcttaaaattgaatcagtgctgtaactttttcttttatggccaggggataaggtggttggattgttataaattgctctttttaaggtttaggaagacattttgtgcaaggttctgaaaggtcatagtcaaataa

SEQ ID NO: 78607 - DNA, 247 bp, Glycine max
  Clone ID: 700963869H1
ttcagtacataatatatcaaggttctcaagctcctatagggtcgttaaactgtggtaagaaaattggacttggtaatgttgttcacatgtctgtttactaatgcgagcccaaataaccttaatagagtcacataaacatcgccaaacttaaattattattgtcaatggtcatgtagaacagccaagcaaaatattatacaacaagtctgttagtttaataactcattggcatcgtaatcaagattat

SEQ ID NO: 78608 - DNA, 243 bp, Glycine max
  Clone ID: 700963870H1
cgcagttctctcttctcttctcactccgcagaagagagagcattatccaatacctagcgttagcgttagcgtactctcccaatcccaatcccctctctctctttatcccttcttttcttcttcttcttcttctattccctctccctccgctttttctcttcatcgttgtggttcggcgtcgctgaatccgtcacgttgttgtttgtgtcgaatcggacggcgaagattgcatcgcgacgtatt

SEQ ID NO: 78609 - DNA, 243 bp, Glycine max
  Clone ID: 700963871H1
cactcggaaatttctggcgatctctgcgttttcccctattttttctgaatctaacaacaaacattcctctggcaacaatcaatactattaataagagttccttccttcactctcacccaagccaaagaaaggaacaagaacaagaccaacaaagtaacgtgaaagagaaagagatggaggaaattgttccagtggtggatttccagaggctttcagaggaagaggagcgcaagaagctgagaa

SEQ ID NO: 78610 - DNA, 242 bp, Glycine max
  Clone ID: 700963872H1
agcaaaccgagagcgtgcaataatatatataagaagaaaccccacattttatattgtttcagcgaagaaggaagaaattggtgttctttaatgtgaaagggttggaacggtttttgattttaaccctgcaaagagccttcctttgcggtttttcttcttgagaagaagaaggctctttgttgttgttgattttgaagaaggaaagaaggaaggaagaaaatgatgaggctatggatttctta

SEQ ID NO: 78611 - DNA, 241 bp, Glycine max
  Clone ID: 700963873H1
gagaggagagagaaagtagcagatcctccatggcctccaccaaggaacgtgaaaacttcgtctacgtcgccaagctcgccgaacaagccgaacgctatgaagaaatggtggaagcaatgaagaatgtggcgaactaaacgtggaattgacggtagaggagcggaaccttctgtcggttgggtacaagaacgtggtgggtgctcgtagggcttcgtggaggattctttcctcgattgaacag

SEQ ID NO: 78612 - DNA, 240 bp, Glycine max
  Clone ID: 700963875H1
attccaagtatcgaaacatttggaatttgtatcacggttggtttggaagaatggcacttttctttgcagcattgaatatagtgttggggatgcgagctgcgggggcagggaatgattggaaggcaggctatggattccttcttagcattgtacttgtggcagttatcgttctggaagtgttggcgtatttgaaaaggtcagaaaagcgttctcttcctcagactttccaaatggacccag

SEQ ID NO: 78613 - DNA, 241 bp, Glycine max
  Clone ID: 700963876H1
gaaaaaacctgaagtatactactagggaagcatcagattttcatgctcctcctttcattaaattaaagtgcagaacagtttctaggtatggaaactctttcatatgggtcagcaccatgctgccaagttgtgaactcaaagtggaaattagttgaaaagagtttgagttcacgtcaatcaagagtttcctctataggaaaacttggagtttattacacaggtactatttctgcatgtgcgc

SEQ ID NO: 78614 - DNA, 243 bp, Glycine max
  Clone ID: 700963877H1
caacaatggcttctgtgcctcaaccaaaaatctcccttctaaccttattcttcttctcgtccttcaccatcattgcgcatgcaattgttcctcaaaacgaaaccttcaaatttgagaactcaggtgaacttggaccctacatcgttgagtacggtgcagattacagaatgataagcatcttcaactcaccattccaagttggtttctacaacaccaccccaaatgccttcactctagctttgc

SEQ ID NO: 78615 - DNA, 243 bp, Glycine max
  Clone ID: 700963878H1
ctcataccgcataacctaacctttcctcattctcctctccgttctctctttctccggtcacccgccggcgacagaggcacacagaacggggttgagaagctgcgctgcgtttagcgtgttacgtgaataatgcggcagacaaaaacagattgtgctgttgcgacaatcgcaatcgtgcgtgtaaggcgaataatgcgttaagtgatggtgaagacgagagatacagcagcgtcaatgacggac

SEQ ID NO: 78616 - DNA, 247 bp, Glycine max
  Clone ID: 700963879H1
cttggtcctcccgtcaaccggatggaccaggctacactctcgatgaccacagtatcagctgggccaattggaagttccacataggttttgatgtacgagctggtgcggtaatttcaactgcatcaatttacgaccctgagctgcataaatcacgttcagtactatacagagggtacatttctgaactattcgtgccatatcaagacccaactgaggaatggtactacaagactttctttgatgctgg

SEQ ID NO: 78617 - DNA, 247 bp, Glycine max
  Clone ID: 700963880H1
gttatttttctttttttctcatttgcactgcaaattgcaatggcttccaacaaggttattgccaccatcatggtgctttctctccttgcctactcaacatcattcaccaatgcatgtggcacatgccacccaaaacctaccccttctcctcctcctccatcaggaaagtgccctaaggacacattgaagctaggggtgtgtgcagatattctaggtcttgttactgttgttgttggctcccctgtct

SEQ ID NO: 78618 - DNA, 251 bp, Glycine max
  Clone ID: 700963881H1
gtttttcaaaaatgggtttggcctgtcatatcgcgaagattcatagtgaggcgtcagttgagaaaaatgccagagagctaaaagagtacattgaggaaatttattggggttcaaataaacgtgttatgcttcttggacatagcaaaggaggagtagatgcagcagctgctttatctttgtattggtctgatttgaaagataaagttgctgggttggcattagcacaaagtccctatggtggaactcctata

SEQ ID NO: 78619 - DNA, 244 bp, Glycine max
  Clone ID: 700963883H1
gccacatcttctctttctcttcccatggcattctgactcatacccaaatcattgattgtttgtctatcgaatcggtgagaaaatggcagtggagctgatggggttcccccaaatgggcgaacagaaggcaattgaagaagcagccgccgaaggcctcaagggcatggaacacctcctctgtctcctctcccatcgaccttcccacctccgcactcaccacaccgacgccaccgtttccaacttc

SEQ ID NO: 78620 - DNA, 248 bp, Glycine max
  Clone ID: 700963884H1
cctcagcctcagcctctatttattttctattcatttccattttctctcgagtatcctctgctttcatcatgtggagacttcgtcgagcttcttttcgtctcagtacgaggcgaggagttaacgcgggagctagccgtgcttctgctgtcaaattagtggcaaccactagtgtggaatatgaggctggtatccctcagtctcgtcaaatcacttattgtagatttctgtcggctggcatgggtcgtgtg

SEQ ID NO: 78621 - DNA, 245 bp, Glycine max
  Clone ID: 700963885H1
caaccagttctgctgttggggtgtattcctcttcaacagatccagttcatgtgccctctcctgattctagatcaccaggtgttgttggagccattaggcgtgaagttgggtttgttggtgttcggcgacagtcttcagacaacaaagcaaagcaatcatttgctcctagtagccctcatgttgtgggtaaagatggtacatctgcagattcttttcaatcagttggggctgtctcaaagactgaa

SEQ ID NO: 78622 - DNA, 215 bp, Glycine max
  Clone ID: 700963886H1
cctctcaagtggagcattcaggttgttagagcgtccattgagctttcaatctgtggctggattttgatctctctgagtttaaaatggatccaaaaggaagcttatgtgctacaaggtcctcttccttaacctctcctgggaatggactacaaacaaatttgtcgtcagatcctccctctttctatggggtcaggattgaatcacctttcgaagaa

SEQ ID NO: 78623 - DNA, 243 bp, Glycine max
  Clone ID: 700963888H1
gaagaagatacgaaacctcaagtttaatctacctattagatgttgggttaggatattaggattttaatgccttttgaacttgtttttgttatacatctttgaagatattttaaccttgtgagcaacgaattggcattttgtggatttcttatgtgtattagtttcctgccaccttattttctcctgaatttattgtttattgtttagaacaatgtgaaaaaaaaaaaaaaaaaaagggcggcc

SEQ ID NO: 78624 - DNA, 241 bp, Glycine max
  Clone ID: 700963889H1
gattgaacagatgcagatcttcgtgaaaactttgaccggtaagaccatcacccttgaggtggagtcctccgacaccatcgataacgtgaaagctaagattcaagacaaggaagggatcccacctgaccagcagagacttatctttgcgggtaaacagcttgaggatggtcgaacccttgccgactacaacatccaaaaggaatccactctccacctcgtgcttcgcctcaggggtggcatg

SEQ ID NO: 78625 - DNA, 240 bp, Glycine max
  Clone ID: 700963892H1
caaagatgacaggtgggatgtttggaaggaaggggcaaaagataaaggggacagtggtgttgatgccaaagaatgtgttggacttcaacgccataacctccgtcggaaaaggcagtgctaaggacaccgccaccgatttcttgggcaaaggcttggacgcattaggtcatgcagttgatgctctcactgccttcgctggccatagcatctccttgcagcttatcagtgctactcagactg

SEQ ID NO: 78626 - DNA, 244 bp, Glycine max
  Clone ID: 700963893H1
tcaccctgaacatgacaaaactgttcgttttggagagtatcagaactcgggacctggtgcagaccccaaagggcgtgctactataactaagcaactaagtgaaacggaggttaaaccttacataacacttgcgatgattgaaggctccaaatggctacttcctcctccaactcccaaggtttaattaattaccacatttttgtctggcttgaggaataatgcaccccatgttttagtggatggt

SEQ ID NO: 78627 - DNA, 247 bp, Glycine max
  Clone ID: 700963894H1
cacgagttacgcacagtcccggtgccgccaccaccaccattggtttcagtcaactaatggcaaccactctcactccaatccaaaccctcaaattctgttctcccaatcccaaacctctcttcactcccaaacctctcttctctcccaaacctccttccatctccacacctcacaccttccgcgccgataaactctctctctccgtctccgccgccacctcctcctccaacggtcctccctctcctcc

SEQ ID NO: 78628 - DNA, 263 bp, Glycine max
  Clone ID: 700963901H1
caacaatatacgaacgtgctggaagaattgaggggcgaaaaggctctattacacaaattccaattctaaccatgcctaatgatgatattacgcatccaactcctgatcttacaggatatattactgagggacagatatatatcgacagacagttgtataacaggcagatatatcctccaatcaatgtccttccatcattgtctcgtttgatgaagagtgccattggtgagggaatgacacgaaaggatcattctgatgtgtcc

SEQ ID NO: 78629 - DNA, 85 bp, Glycine max
  Clone ID: 700963902H1
ttaggaggtgtcagagcctgcagtgagcatgatagagcaatctcaagttgctcccccacaagattccctggattcaaccattctc

SEQ ID NO: 78630 - DNA, 256 bp, Glycine max
  Clone ID: 700963903H1
ataatttcaggaggaactgaatcaatcactactactcttacatgggcagtatgtttgatattgagaaatcctattgtattggaaaaagttatagcagaacttgacttccaagttggaaaagagagatgtataactgagtctgatataagtaagttaacataccttcaagctgtggtcaaagaaactttaagattataccctccaggtcctctctcagcacctcgtgaattcatagaggattgcactttaggtggct

SEQ ID NO: 78631 - DNA, 94 bp, Glycine max
  Clone ID: 700963904H1
caaagtagtactacttggtttcaatcaaaacaaaaactcacactttggtggccacagcaacaataacaatggcagcctcactacatgctgcagc

SEQ ID NO: 78632 - DNA, 253 bp, Glycine max
  Clone ID: 700963905H1
cacacacacagagacatttttctttcttagaagcgtccaccacacggaacctcgcaattccttcacacccaccataataataatatcttcattgttcttttcttctttgttaccattaaaaacacacacacacacacaacaacactctgaaactaacaacaacaataaaagaccatgtcggtcaaggagtgcgagcaccacaaggggaagaagaggaagatcttccggcaagtgttctggtgcttagtggtgt

SEQ ID NO: 78633 - DNA, 249 bp, Glycine max
  Clone ID: 700963907H1
gaagaatcttagttgcaatatagttgtgcagttgttgaaatgggggctcctttatcagcatggcctttggagaactttggaacatacaagtatctattgtatgggccgtttgtgggaaaagtcctgtatgaatggttctatggtgaagaacactcctactacaacctcagctggtgccttcatttgctcatacttagtggtctcagaggcctaattcatgtgctttggggttcctacagccacatgttt

SEQ ID NO: 78634 - DNA, 253 bp, Glycine max
  Clone ID: 700963908H1
cggtactactccaagtatgattatggaaagctaaaaaatctgatagagtacggcaagttcaatccaccaaagttcgaccttagtcgcatacccaaatcattgcctctgtggatggcctatggtggagatgatgcattggcagatataactgatttccagcacacactcaaagaattgccatccacaccggaagtggtttatcttgaaaactatggtcatgttgacttcatattaagcttgccagcagaacaag

SEQ ID NO: 78635 - DNA, 254 bp, Glycine max
  Clone ID: 700963909H1
ctttctcattattttctctcctattgataaagaaacagagagagcgagaaaaaaatgcctgcggtaggaggtattagcaacggagggggcaaggagtaccctggaagcctcactccttttgtgacggtaacatgtatagttgcagccatgggtgggttaatcttcggttacgatatcggaatttcaggtggggtgacatccatggatccgtttctgctcaagtttttcccgtcggtgttccggaagaagaattc

SEQ ID NO: 78636 - DNA, 257 bp, Glycine max
  Clone ID: 700963910H1
tgtaggtatgtccctagaaaagatgtagcaattgacaatgtggtaacaagggtcttgtttcttttgatatgaataaaagcgtctcttctgtgtttcttccccatgaaaaagagccaccgtacgcatcaagtaagatcctaagaagatttcacatgttcagtttgggaacgaagtttgttaattaatttgtgtcgttccatttcaatgatgggagaaaaagggagctacgaagcaaaatatacaccaagagattgtgc

SEQ ID NO: 78637 - DNA, 257 bp, Glycine max
  Clone ID: 700963911H1
ctatgaagcaattgtttacattttccgtcaaccaaaatgctacatacgaaaccagagattcgtaattgcacattctcttttgttgtctccagctcatagaatattataaactcagattcattcagaatttcagattcacctttttcttttcttctctaccttctttttcctctgacagctttttgcagaaagttgtgatttttccttgaaagatggcatctttgagcatgatccagatcagaactgggaattgtgca

SEQ ID NO: 78638 - DNA, 259 bp, Glycine max
  Clone ID: 700963912H1
ataaaaaaaaaacccttagccaacacaaccatcatggccacctctgctattcagcaatcagcattcactggtcaaactgctctgaagcagctcaatgagttcgtccgcaagaccggtggcgccggcaaaggtcgcactaacatgcgccgcaccgtcaagagtgctcctcagggcatttggtatggccctgaccgtcccaagtacttgggtccatcctcggagcagattccatcatacctgaccggagaattccctggtg

SEQ ID NO: 78639 - DNA, 262 bp, Glycine max
  Clone ID: 700963913H1
tgaacttttaaaaatgactgggataaacttaagaattcaattattgaaattgaataagtaaacaatttaattggattggtcgaatggtatcaaaaaatggagtactaactcccatttcttatttattattgaattaaccgatcaacttgctttgttatcgaacatttctttttgatttcaaaaattttccggaaaaaatttgaatctatttttatatgcgaatcaatcctactacttctggtcccgaagtttctgcgcttga

SEQ ID NO: 78640 - DNA, 264 bp, Glycine max
  Clone ID: 700963914H1
aaccaacctcactctctctttctctctgtattctggtaattcatcaattgattcaaaatgcagaggctcaaactgcaactagtgctattcctctcaatctcaacttgtcacactgttttctccttcactgatgggttgttgccaaatgggaacttcgagcagggcccaaagccatcacaattgaaggggtccgtagtgacaggccacgatgccataccgaattggacaatttcggggttcgttgaatacataaaatcaggacaa

SEQ ID NO: 78641 - DNA, 238 bp, Glycine max
  Clone ID: 700963915H1
gctagtttagttatctactcttttctgcatgtttgttctctcaacgactcctccgcgaaagagtattattcaatattttggttgggttgaatcccggggttgaagcgttgcagacatcacggctattctaagagtgtctcgctccctcattcatgtccgatctgtacgacggaggacgggtagttgcgtaactgccgttaacccttcgccgcacggtgggcgtggtgctttgccttct

SEQ ID NO: 78642 - DNA, 268 bp, Glycine max
  unsure (1)..(268): unsure at all n locations
  Clone ID: 700963916H1
ctctctctgttcatatatataacgcccattgtaattgtacatggaaggaggagtacctgacgccgatatctttganctcagagaatgcctctccctctcatggaagaatccctatgtccttcgcctcgctttctcagctggaatcggtggccttctttttggctatgacaccggagtgatatctggagctcttttgtatataagggatgaattcccagctgtagataggaagacttggcttcaggaatctatagtgagtacagcaatt

SEQ ID NO: 78643 - DNA, 274 bp, Glycine max
  Clone ID: 700963917H1
gtaagctcggtacttcagtcaaccaaccccttcactctctctctctctctcttgcaatggctgccattgttttcatccacattgcatcattggtctctctttttgttgcaacaagtgcaagaatccctggagtttacaccggtggcccctggcagagtgctcatgccaccttctacggtggcagtgatgcttctggaacaatgggtggtgcttgtgggtacggaaacctgtacagccagggctacggagttaacaccgcggcgctgagcactgc

SEQ ID NO: 78644 - DNA, 89 bp, Glycine max
  Clone ID: 700963918H1
ggaagaatcgacaaaagaaagatcatggcgatggcaaacttggctcgacggaagggttacgccgtcgttttgtcgtcgaggtcgtcgct

SEQ ID NO: 78645 - DNA, 86 bp, Glycine max
  Clone ID: 700963919H1
cccccactttcaagccatattcttcttcagcttcggccttagttcccgaacttgatattcaacccgacactccccagaaccctaat

SEQ ID NO: 78646 - DNA, 245 bp, Glycine max
  Clone ID: 700963921H1
ggacaattatcttgacgaagcaatgaaaatgaggaatcttctggaggagttccatgcgaatcatggccttcgccctccaagcattcttggagtgagggagcatgtttttacaggaagtgtctcttccttggcttggttcatgtcaaatcaagaaactagctttgtaaccttggcccaacgagttttagcaaatcctctcaaagttcgcatgcactatggacacccagatgtatttgaccgaatat

SEQ ID NO: 78647 - DNA, 250 bp, Glycine max
  Clone ID: 700963922H1
atgaggcatcactgtcccatttgttacgagtacctttttgattcattgaaagatgtcattgttatgaaatgtggtcacacaatgcaccatgaatgttacctggagatgataaaaaatgacaaatattgttgtcccatatgctccaagtcagtgattgacatgtctaagacatggaagagaattgatgaagagattgaagcaaccgtcatgcctcaagattatcgaaacaggaaggtttggatactatgta

SEQ ID NO: 78648 - DNA, 251 bp, Glycine max
  Clone ID: 700963924H1
gggatctagaaaccaatgtcttccaaaatgtctctggagaagttgccatcagcactcactgcattgatgttgaagggcaaaatgtgcaaaacaatcaataggagcatgatgatgcaaaactctttcaggtgtatcaagttgataatcaattctactatcaaaatgatgaaatccagatatattgacaaacttatcccttccaactcagttgaatgaagcctccagagtgtgcgcagaactgcacagattga

SEQ ID NO: 78649 - DNA, 252 bp, Glycine max
  Clone ID: 700963925H1
ccggaacataaggcgggcaagagagtttgtttcttctctcttcaatggaaggcggcgaacaggttctcccttcggccaccaccgtcgccgccgccggctatcccaacgtctctcctcctccgctcgctgatcctgtcggtgcttccgatctcgctgctgctgcctcggacgacgttgttgcggaacctgaaattcacgcgctgatttcagacgaagagcacgatcacgatcacgatcacgagcatgagcatg

SEQ ID NO: 78650 - DNA, 253 bp, Glycine max
  Clone ID: 700963926H1
gaaagggacgccaaagcgaaaccctaaccctaacggagagatggcggacacttggcatcgatattcgggacggagaaggacagggtgaactgtccgttctacttcaagatcggcgcgtgcaggcacggcgaccggtgctcccggcttcacacgaagcccacaattagcccaacgttggttctgtcgaacatgtaccagaggcccgacatgaacatgaacatcatcaccaaccccgatcagccccagccccaat

SEQ ID NO: 78651 - DNA, 256 bp, Glycine max
  Clone ID: 700963927H1
ggttatcatttctccatttccattttctctctcacttttcaagaatcgtaagctatgggaaagtcttacccaactgtgagtgctgattaccagaaggccgttgagaaggcgaagaagaagctcagaggctccatcgctgagaagagatgcgctcctctaatgctccgtttggcatggcactctgctggaacctttgacaagggcacgaagaccggtggacccttcggaaccatcaagcaccctgccgaactggctc

SEQ ID NO: 78652 - DNA, 261 bp, Glycine max
  Clone ID: 700963929H1
gcattgcagtttcctgtgatgcccacatgcaaagctaccatggatttgtctgctactgcaacatctgcctcacccgtctttgttgctgctccagcagagaaaggccattttcttttagactttctcatgggaggtgtttcagcagctgtctccaaaactgctgctgctcccattgaacgtgttaagcttttgatccagaaccaggatgagatgatcaaaactggtaggctttctgagccctacaaaggtattggtgattgt

SEQ ID NO: 78653 - DNA, 266 bp, Glycine max
  Clone ID: 700963931H1
aaaagcatcattagaagtggtacacaaacatgggccatgctcccaactaaatgatcatgatggcaaagctcagtctacaacaccacacagtgacattctgaaccaagacaaagaaagggtgaagtacattaactcaaggctctctaagaacttgggccaagatagtagtgttgaggaattggactcagctaccctaccagccaaatctggtagccttattgggtctggaaattactttgtggttgtgggtcttgggacacccaaga

SEQ ID NO: 78654 - DNA, 269 bp, Glycine max
  Clone ID: 700963932H1
tgtttcccatgaacataacattctcaattgtaggatttggctacgttggcaccatcgtgtaaacctcgttgagccaaatttctcaagttacttaagtttcatcaatgttgtgtccatatttttctagtttctcctaaaaaaaaatacatcaaaagaggctgatttcttcaagcaacaaactctgtaccaaatcatctacagctagtttagctcaaataattttcaattcggaaagaaaaaaaaagtcctttccaaaatttcattgtcat

SEQ ID NO: 78655 - DNA, 255 bp, Glycine max
  Clone ID: 700963933H1
gctatttctaggtttcgttttatttggctttgattttcttctgcaaccttatctactgcaaagctttgattactgagtctaacttaccctgccacagtttgccttgtttacctgagctctgtttttaactggtctttgatcaaggatggccataaaggcaattgagttgttgaaaggaagcggaaaccatgaagagatatttgaagttcttgcagcagtggctgcatctttgggggatgtaatagatgatgtgaa

SEQ ID NO: 78656 - DNA, 250 bp, Glycine max
  unsure (1)..(250): unsure at all n locations
  Clone ID: 700963934H1
ctctcacacaactcccaactcccaattcacaaaaccgtcactatttaccaacccacttcacttcccccactcaacaacagtcgattccattccacaatgcattttcccccactttcccagcaaccaaacagcacataattccttcccantcgagcctctttctctgtcatgtaccgcttgtcgcagatttcatcgtacaccgcctctatagtcggaaacaccgttcgactcatcgcgaaccgctccctgc

SEQ ID NO: 78657 - DNA, 193 bp, Glycine max
  Clone ID: 700963935H1
cactcataacacaaagcacaaagcaaagctcatccttgagttaaaaaatggtagcagcttcttccatggctctctcatccccatccttggctggcaaggccgtgaagctgggcccatcagccccagaagtgggaagggtgaccatgacgtagaccgtcaccaaccaggtctcctcaggtagcccatgcatacg

SEQ ID NO: 78658 - DNA, 247 bp, Glycine max
  Clone ID: 700963936H1
cttcattaccctcgtaactcgtaacggcttcataccggacctttccttttctgtttttctctcaacttcaaagttagaatcttttgttcactcactgagccatgcatggcgccgagttcgacgccgcgtttgggttcccatctgagtttccctacgagtttgactcggtcgggactgtcccggttgattccggttcgaccgggactgataatagcgacgattaggtcttcttcgccggcttgactcg

SEQ ID NO: 78659 - DNA, 244 bp, Glycine max
  Clone ID: 700963937H1
ggttgattggtcccattgattccgaagagaaaagaaaagatgtttgagccacaacagctatacactcgcgcgaagaccgaggaattcgacctcgaatcaggagaaaccctctacccagggctgagcgtcggcgagaaccagctccgatggggtttcatccgcaaggtctacggcatcctttccgagcagatcgtcctcaccatcctcgtctccgacatcagcgtattctatactccaatcaatg

SEQ ID NO: 78660 - DNA, 77 bp, Glycine max
  Clone ID: 700963938H1
ctgaaaagggttatcaaggtgcagcaaaagttgcaggcttagatggacaaattacctaaggccaggcatccagagcg

SEQ ID NO: 78661 - DNA, 247 bp, Glycine max
  Clone ID: 700963939H1
agcattgtaactgctacatgttcacgctgagccttcttcttcttcttcttcttactccgccttctctctccgacgatctcggattcgattttccggcgaagaagctgataagagaccttaacctttttccttctgaagatgtcaacatcgttcctcgccactccaattctcacgccaacaaaatcgtcgagaaaccgcttaggttcccaaacttagtgccttcagactccggcatttccctcgacga

SEQ ID NO: 78662 - DNA, 250 bp, Glycine max
  Clone ID: 700963941H1
gttttcggagcaacacagatatttagcaaatgaggaatcccatggtagaatgaatagccagtggaaatcacagcattctcgtaggatgccaaaaaatatgcaggccaatagaccggcagagaaatcccatgggactgatgctgtgatgtgggcacctgttaaacctcagagcaagagtgagatcgtggatgaattgagtgagataagtaaaattgaggcagttaatcctctaaagagtgagcagcaggtg

SEQ ID NO: 78663 - DNA, 251 bp, Glycine max
  Clone ID: 700963942H1
cacaaagagatgatagctattgggaccatgaacgtagttggttctttcacctcttgctacctcacaactggaccattttcgcgttcagctgtgaactataacgctggatgcaagacagcagcatccaacatcataatgtcaattgcagtaatgttgacattgttattcctaacaccattgttccattacactcccctggtggtgctatcagccattattgtatctgcaatgcttggcctcatagattatga

SEQ ID NO: 78664 - DNA, 251 bp, Glycine max
  Clone ID: 700963944H1
tgctactagcatcttcttccatcaccactttcatataaattaatgttctctagtggtgcttcccaatcaatatcctttagttttgtctcaattcctttctttctcattcaccaatccatacttcattttgttaatttcttaatccaacaccaccaagatgccaactgacacatcatcagtttccggcggcgaaatcgtgtgtgtgaccggtgccggcggtttcatagcctcttggcttgtcaaacatctct

SEQ ID NO: 78665 - DNA, 255 bp, Glycine max
  Clone ID: 700963945H1
ctgatgcacttaggtatttggtgttcggctgctgttttctcctagttgcttctgctgttttatggaaagatgtcttatcagttaactggcgaggtttgctctagttctctctgtctcattttcgtatactctttaatattgatgcatctgttaaagctaggcagacatctaagtcctctattatctaatgaatttatttgacatgataatgtctgcttgtgtttaaggaccagctggtcagcagactggattcag

SEQ ID NO: 78666 - DNA, 264 bp, Glycine max
  Clone ID: 700963947H1
ctcaaagccaaaccaaattttctctctttcacttatttattgactccccaaaagcttttcaaatatctctgttcctctctcacgtaccttctccctatctttcactccacttcttaacaccacaaaacagaacaaccgccgagcaaacaacaagaaaaatggtgttgttgtccaaagcaacaacagaacaatactcctacattaagaactgcatgccaaccaaattttcctcaacaattcccatagtgaacctctccaaacctg

SEQ ID NO: 78667 - DNA, 261 bp, Glycine max
  Clone ID: 700963948H1
tgtgagaacaagataaagaggcgcaagatgagtggtagggtttctgggaaggtgaagtggttcaatgatcagaaggggtttggattcataagccctgacgatggcagcgacgatctcttcgttcaccaatctcagatcaaatctgacggtttccgaagcctcgccgaaggagagtccgttgagttcgccattgaatctgaatctgacggacgcgcgaaggctgttgatgtcactggccccgacggcgccacgtccagggaa

SEQ ID NO: 78668 - DNA, 255 bp, Glycine max
  Clone ID: 700963949H1
ttttaatctttcaatctctcagactttgttattatattcttgagagtgagcataattaatggctaccaagcattcactaatgtctctctttcacagaacttcatcaatgaggtgagcacaacccgttaaacatgtccgatgagcagatattggaccaaatttactcaacccatgtccacagtcacacaaagtttgatgtagactctcttttcattcttgttgagaacacccttaggcgttcaactctcattgttg

SEQ ID NO: 78669 - DNA, 250 bp, Glycine max
  Clone ID: 700963950H1
tacgcttctcttctctgcagcaactatgcctaaccctaaggtcttcttcgacatgaccatcggcggtcaatctgctggccgcatcgtgatggagctctacgccgacgtcactccccgcaccgccgagaacttccgcgcgctttgcaccggcgagaagggcgtagggcggagcggcaagcccctccactacaagggctcgtccttccaccgcgtgatcccgagtttcatgtgtcagggtggcgacttcacc

SEQ ID NO: 78670 - DNA, 245 bp, Glycine max
  Clone ID: 700963952H1
acaaaacccgaccctgatacaatgcagccactggatgaaggttttggcgcaattgttcagtcttgcaggcgactcaggcgcctatccctctcggggcaattgaccgaccaggttttcctttacataggaatgtacgctgagaagcttgaaatgctgtccattgcatttgctggggcgagcgacaagggaatgctctatgtgttgaatggatgcaagaagcttaggaagcttgagattagagactg

SEQ ID NO: 78671 - DNA, 245 bp, Glycine max
  Clone ID: 700963953H1
cctttatctgttggatagagcttcttgccttgtgttctacgttctgcattcttctcagcccgtaatctagctcctgtttgcagaaacaaggacctgtcatcaagatggtgaagttcacaactcacaggcttcggcacataatggactgcaaacacaatattcgtaacatgtctgttattgcacacgtcaatcatggccagtctaccctcactgattctcttgtggctgcttctggtaatatcata

SEQ ID NO: 78672 - DNA, 244 bp, Glycine max
  Clone ID: 700963954H1
acaaaacccgaccctgatacaatgcagccactggatgaaggttttggcgcaattgttcagtcttgcaggcgactcaggcgggtatccctctcgggggacgtgaccgaccaagagtggctctacatagggacgaaggctgactcgctgccgataacgacccttgcatcagcagcggttacatgacatacatgtttctatacgacagtgttcatggacactggaagcatcacgatgtcaccgttaa

SEQ ID NO: 78673 - DNA, 246 bp, Glycine max
  Clone ID: 700963955H1
gaagtgacatttctagagcaacaactgattatggcttccgaccaagcagcaacaacagtccctttggattgttgggaggacaacgagaaaaaacgtgtagtcttggcggaagcaagtggagacttcatagatgttctctttagtttcctcactcttccattgggaactatcgtccggcttgggatcaattttcaactatcagtagagatgggtagcatcaagaaactgtacgagagtgtgcaaaat

SEQ ID NO: 78674 - DNA, 246 bp, Glycine max
  Clone ID: 700963956H1
tggtcctggaatctggaaaatcatggttggacttggtgtgagtgtaagtctcaaggttggacatgtgtgtagttgcagcaatggttttggcacggtgactatggaagctcaaaaacaaaaactctctccctccaaaacccgcaggaaatcctcctacggaacttctagaaggtccgttctgaagaaatccttcagccaagagcaagtcaccttcacctctcctctctccgccgaccccctcgtcgc

SEQ ID NO: 78675 - DNA, 248 bp, Glycine max
  Clone ID: 700963959H1
cagaaatttaagtgaggagctagagaatgatgatgaagtctgctatgtgtgcagtggtggttgtagcacttcttcttctggcggaggtggggcccatggctgaggctgtgacatgcaccccaacagagttgagtccgtgtcttccagcaatcacttccggtgctaaaccttccaatgcttgttgcacgaagctgaagcagcaaaaaccatgcttatgtggctacctcaaaaacgctagcttgaagcag

SEQ ID NO: 78676 - DNA, 252 bp, Glycine max
  Clone ID: 700963960H1
gcattaaactacatagaaaaataaaaccaaacctttcttcctactactcccattcccacatttcgacaacatggacgaggccttcgacatgccgacggcggaggcaatgggcgaggacttcgacttcgccggcgccaccggcggcgacctcgacggcagcagcagcaaccccatcttgaacgtcggcgaggagcagggtgttcacaaagctggtgtgtagcatggtgtacacaaaccaggtgacggatgggg

SEQ ID NO: 78677 - DNA, 256 bp, Glycine max
  Clone ID: 700963961H1
ccttggtggagaaagtaaagttggagattcaggatttcttcaagcttccaatgtcagagaagaaaaagttttggcagagtccacaacatatggagggttttggacaagcatttgttgtgagtgaagaccaaaaacttgattgggctgaccttttctttatgactactcttccaaaacatttaagaataccccacttatttccacagctccctcttcctttcagggacgccttagaaatttactcacaggaacttaa

SEQ ID NO: 78678 - DNA, 258 bp, Glycine max
  Clone ID: 700963962H1
acaaagttcccgttttcaaaattgaagcttttgggtctctgaggtttgatctctgcacaagaaccttgttttctcatctgggtgtgttgcttttgcctctgctggctcgatatggctgtggaaaaccaaagggaagatgggggttgtgatcgttttcctgtgggtatgcgtgttcttgctgtggatgacgacccaatttgcctcaaggtgttggagaatctccttcgcaaatgccagtatcatgttactacaactaat

SEQ ID NO: 78679 - DNA, 261 bp, Glycine max
  Clone ID: 700963963H1
caaggttacaaccaactgattgtagcagtgaagcagatcgggaaatcaacgttggaatgttgcatccatcaggtggtagtgcttgttctggctctgaactaatacatgcttcttcatcaaggagctcaaaatcagcttccaacaattcatcatcaaatggggatagcaaggcatctatattgactctggaaggttctcatgatgattccactgggaagaaagaattgtgcaatggagagccaattgaaacttctcctgcag

SEQ ID NO: 78680 - DNA, 261 bp, Glycine max
  Clone ID: 700963964H1
ccggcagaaagcaagctcatcctagagttttaaaaatggcagcagcctcctccatggctctctcttccccatccttggctggcaaggccgtgaagctgggcccatcagcccccgaagtcgggagggtcagcatgaggaagaccgtcaccaagcaggcctcgtccggaagcccatggtacggcccagatcgcgtcaagtacttgggcgcattctctggcgagctcccgtcctacctcactggcgaattcccaggtgactacg

SEQ ID NO: 78681 - DNA, 248 bp, Glycine max
  Clone ID: 700963965H1
acttgctccctcagaagcgaagaagaagccacagagaaccagtctcctactctctctcacccacaagaaaaatggcatctcacatcgttggatacccccgcatgggtcccaagagagagctcaagttcgctctcgagtctttctgggatggcaagaacagcgccgaagatttgcagaaggtggctgctgatctcaggtcatccatctggaaacagatggctggtgctgggatcaagtacatccccaac

SEQ ID NO: 78682 - DNA, 248 bp, Glycine max
  Clone ID: 700963966H1
agacgatccgaagaatattaccctctttcatctctctctataacattattcataagttcagtttgatcttatgtcaatgaaggatttttagacaaaacccagattcacaggaaaaacccttaaagcggagaataaaaggcaacgacttttcatctctacgcaagtgattatggcggttgttgagaatgttggggccaaaatcggttcttcgagccagagtttggagaacggtgtagtgtcagcggatt

SEQ ID NO: 78683 - DNA, 242 bp, Glycine max
  Clone ID: 700963968H1
gaatatccatgtgtcccatgtgaaacgccgtaacattcctaactacatatttcctggtggtgtccgacctaccttcccatcaaaagtaactgccgagaataaacaaagttccaaatcaagggttcctggccatggtcaagctgaaaagcctcaaggaggtaaaacagttgtagttggagcagatgatgtaaggaagagaaagagatcagaggacataatggataataacccaaggaattcca

SEQ ID NO: 78684 - DNA, 241 bp, Glycine max
  Clone ID: 700963969H1
ggatcttcaagattccctatgattcaggtgccccaaatgcaaggaactcatatccctgttgcacatatgtctggatctacagcttttcatgggatggccagagcaaatcctccagggtttgggcttcctggacaaggacatcccatgccaatgccgcgagctcctatgtttcctttttcaggaggacaaatgccaaatgttgacccacaagttaagcaaagcactggtggccgtgactcaa

SEQ ID NO: 78685 - DNA, 243 bp, Glycine max
  Clone ID: 700963970H1
ggaagcatgacacccagttcttttgaagctgcacttcgtcagaaggagggtgaacttgcttcatacatgtcacgcttggcatcactggaatctattcgcgattctcttgctgatgagttggtcaaaatgacagaacagtgtgagaagttgcgtggggaggctgctgtattacctggcttacgatcagagctagaagcactaaggaggaggcactctgctgctttggaattgatgggcgaacgt

SEQ ID NO: 78686 - DNA, 244 bp, Glycine max
  Clone ID: 700963971H1
tataaattcaagaaagcataagagtctgaaaattgcttctcatcttaagaatcagtgtactgcccgaaaggatgaaaatgaggaacacaataacaacgtgttagaggaaaagactttgcacgtcatcaagatggaaagtgaaaacaaaactttgcaatctgatcaaaatgcaagctatgatgatgaatcatacctccctcagttgtcatcaccaaagtcttcagtatcctcaatttctaaatcc

SEQ ID NO: 78687 - DNA, 244 bp, Glycine max
  Clone ID: 700963972H1
ggacaacaccattgctatggggagcagaatgagtaagaccgatgacaatcttctttcaatggctcacaccttcaataaaggggatgagggctataagctgctgggccacaattatggcaagggagatgaaagtatcatatcaatgggtcatccctttgacaagggacatggatatttcatatcaatgggtcaatcatatgataagggagatgtccattttatatctctgagcacctcagatacc

SEQ ID NO: 78688 - DNA, 247 bp, Glycine max
  Clone ID: 700963973H1
tgacacaccaaatcaaagacacctgagccattcaattcccctcctttattgctttcaagtttcaacactaattttattatctgaaaaaatggctttcaaagtttcgtttttccttgcacttgttctagtttccaatatcctcctccttgatacaacagctgctggacgcagcattggcgaaaactccaactcagaggaaaagaaagagcctgagttcttgttcaagcatgaaggtggggtgtatatt

SEQ ID NO: 78689 - DNA, 247 bp, Glycine max
  Clone ID: 700963974H1
attcaaatccaaatggccctttacattacactaataattggcctcctagtaaacaccctagtactctataaatagcatttgcatgcaccttagtcttcaccaaaatactcctcttggcatcttgtgttgtgtccctcttttaagctatttccttctcttaacacaattggttgtgccaattgccatagtcaccaaccaattaacaaaggtatatatatcatcatatcatcaccaaatgaaaaatatt

SEQ ID NO: 78690 - DNA, 249 bp, Glycine max
  Clone ID: 700963975H1
gtaagacgaaaagcaacaacgaagaccattgcccctgccatcaaaattttgattctctgattccactttgtgggatcagagggtcaccattgtcgttttctttctcaccctttcagagagggagaggaaaatggaagggtggctctatctcattcgggccaatcggtttggtcagcattattcacgtaagaggtacttcatcctcaaaggcaatgtcctccgaagcttcaagatcaaacccacttctca

SEQ ID NO: 78691 - DNA, 252 bp, Glycine max
  Clone ID: 700963976H1
cagaaagcaagctcatcctagagttttaaaactggcagcagcctcctccatggctctctcttccccatccttggctggcaaggccgtgaagctgggcccatcagcccccgaagtcgggagggtcagcatgaggaagaccgtcaccaagcaggcctcctccggaagcccatggtacggcccagaccgcgtcaagtacttgggcccattctctggcgagcccccgtcctacctcactggcgagttcccaggtga

SEQ ID NO: 78692 - DNA, 254 bp, Glycine max
  Clone ID: 700963977H1
gtgcttcacaatttttcaattttcgtattggtgcttggaacagatcttcctttggaatagtttggttgacttgaataaaccaagctaaagccaaatatcgaacctcataatttcctctctgatttctattcctggatttgttgttttgttttctggcttcatcacttgctaatttggttcctttctttcgttttctacatcgactgttttccaatctttccctttgtttttggcctttctaatggttcggagca

SEQ ID NO: 78693 - DNA, 257 bp, Glycine max
  Clone ID: 700963978H1
tctcgagccgaatcggctcgaggctctctactgctacaggaaacgatccaggatgttccgcagccaccaaggcatgcatataaggcatccagtacggcgacagttccttctcagttggctacttcagccgcgagcgcctcaccgtgaccgccaccgacgtcgtcgacaacttcctcttcggctgcggccagaacaaccagggcctcttcggcggctccgcggcctcattggcctcggccgccaccccatctccttcg

SEQ ID NO: 78694 - DNA, 259 bp, Glycine max
  Clone ID: 700963979H1
cgcaagcaaaaagaaagaatcccaggcgaggagaaagatggaggggaaggagcaggatgtgtcgttgggagcgaacaagttccccgagagacagccgattgggacggcggcgcagagccaagacgacggcaaggactaccaggagccggcgccggcgccgctggttgacccgacggagtttacgtcatggtcgttttacagagcagggatagcagagtttgtggccacttttctgtttctctacatcaccgtcttaacc

SEQ ID NO: 78695 - DNA, 248 bp, Glycine max
  Clone ID: 700963981H1
agaatccacacaaactcagggtagggcagagagagagagagagagagagagagagagagagaatgggagggtgggctatcgcggtgcatggtggcgctggtgtcgaccctaatctcccactcgagcgccaagaagaagcgaaacaacttctcacgcgctgtctcaatcttggaatctctgctctaaattctaatcttcccgacatagatgtcgtcgaacttgtggtgagggaattggacacggatccg

SEQ ID NO: 78696 - DNA, 245 bp, Glycine max
  Clone ID: 700963982H1
gtttatcattcttcaagataagctgagagagggagaagagccagataaatattattttcaaatgtataactatgtagatgattatgataaaggggatagtggtgtctctgttgaagagctcataaagaaagcaaatgaaaagtactggcaaccaggagaagaccgatttgtaaataatcgttttgaagggccagtaaagttatatgagcagatatttggtcctaatggacctcaaaccatagagg

SEQ ID NO: 78697 - DNA, 242 bp, Glycine max
  Clone ID: 700963983H1
ctttccaacaattagcaaaacatttgttaaacgatggaagtaatgtgtggtgccaaagttggcaatatggtccataaggccaagccttatgtgttaactgtggggttgcaatttgggatggctgggacatacctcttcaccatggccagtttgaaccatggaatgagccgtttggtgttcattgtgtatcgcaatgccattgctgcattggcccttgcgccctttgccttgatctttgaaag

SEQ ID NO: 78698 - DNA, 242 bp, Glycine max
  Clone ID: 700963984H1
gaaacgtggaaggtcacgaaaaacaaaggtaactcccatccaaattcactgcattgtctttgacatctttgaattacataaaactcactacattgtctttgacatctttgaattccatcaaactcgctgcattgtcttttgttgaatttcttcttcctcacagcctaccaaccacataattaaccagaaatccaataccccatcaacaccccgaagatctaaaagaataaagcatgtggcag

SEQ ID NO: 78699 - DNA, 240 bp, Glycine max
  Clone ID: 700963985H1
caaaatcagaactaccaaagcttccatctgatttgcagagcgttttttttttttttttttccttcccaagggaccaacaggggcaaccaaggacactgtagaaagaggaaaggggtcctgtcctttcggcccttgattttcctgggggggattaaaggttgtggcgtcccgggatcgttcttccctgtggcggaaacatgttggacggccgtccctgcgttgtcccgaggatgtttcccg

SEQ ID NO: 78700 - DNA, 243 bp, Glycine max
  Clone ID: 700963988H1
agaagacgttactctctctctctctctctctctctctctctcatgaacgacgcacttcccatgtttcctcggttctatagatgaggattgaagctctgaatctcgctttcgccgaatctcgtcttctgtgttcagatttcgctattctccgtttggattgatgaaaaaaaaagccttttctcttcccgatatttttttctcgtcggatttggaattcgatcttcacctcatccactcgtaatc

SEQ ID NO: 78701 - DNA, 244 bp, Glycine max
  Clone ID: 700963989H1
ggatatagttcaccatgatgatgttgcccccagaagacctggttgtgagaacaactttgttttggtaaaagtccccacttggattgatggtgtggaaaacagtgagtacgttggtgttggtgcaagatttggccctacattggaatcaaaagaaaaacgggccaatctttctagagttgtcatggctgatccgcctgattgctgtacaaagcctaagaataagctcaccaacgagatcattttg

SEQ ID NO: 78702 - DNA, 245 bp, Glycine max
  Clone ID: 700963990H1
ctcgagccgattcggctcgaggtgcaccttaactatagcttcgcaatgacaaccttgatcgactgtgtaggataggtgggaactgatgacacagaacgaccaatcctgaaagaccactctttcgtctaaggatgcctaaccgccgcaccgaaaattcgggggggggcgggacactgcgaggtgggtagtttatctggggcggatgcctcctaaagagtaacggaggtgtgcgaaggtaggctcaa

SEQ ID NO: 78703 - DNA, 247 bp, Glycine max
  Clone ID: 700963991H1
tctcgctaatggtgttgcccagcatgctgagcagagaagggcagaaattgaaaaggagaaaatagagaagtcaacggctgccacagcttcttaagcttctgaatgtacattattactgttgcttttttaattctcaagttctcagttacccattctttaggaaaatcagagggttgcctatatttgaggcatttgtcggctttctggtcaccagttgttggtctttgatcatgaagagtttgcagta

SEQ ID NO: 78704 - DNA, 252 bp, Glycine max
  Clone ID: 700963992H1
cacaagccaagtgaaagtgagataaaataaaaatcaaagagcataatgtcagggatcattcacaagattggggagacccttcatgtgggagggcacaagaaggaggaggagcataagggtgagcaccatgctggagaatacaaaggggagcaccatggtgaacacagtagtgagtacaaaggagagcatcatggtgaacacaaagctggagagtaccatggtgagcacaagccagagcacaaagaggggttc

SEQ ID NO: 78705 - DNA, 254 bp, Glycine max
  unsure (1)..(254): unsure at all n locations
  Clone ID: 700963994H1
attctgctgggcctgggcttgctcttcgtccgctggtggtggcggcgctggtccaccaccggcggcggcccgaagaacctccctccaggccctcccgggtggcccatcgttggtaacctcttccaagtgatnctgcagcgccgtcacttcatctacgtgatccgcgatttacgtaaaaaatacggcccaatcttcagcatgcagatgggccagcgcacgctgatcatcgtgagcagcgcgcactaatccacgag

SEQ ID NO: 78706 - DNA, 258 bp, Glycine max
  Clone ID: 700963996H1
acaaagtatagagtgaaagaatgggtgagaaaagcaagattttgatcataggaggcaccggctacatcggcaaacatatagtggaagcaagcgcaaaggctggaaatcccacttttgctttggtgagggaatccacactctctgacccctccaaggcacaactcatccacaattttgaggctttgggcgttaaatttggccggggggtttctgtacgatcatgagaagttggtgaaagctatcaagcaagtagatgtc

SEQ ID NO: 78707 - DNA, 275 bp, Glycine max
  Clone ID: 700964001H1
gatgactggggggggtatcactatgcaatcgacgccgggaagctcaggatacttggatttgtatccagagcggaagatgtcctttttcaaaaatccttacattctcggactggctgctgtcgccggcatcggtggtctcctcttcggctacgacactggtgtgatatcaggggctcttttatacattaaggatgattttgaggaggttagaaacagcaatcttctccaggaaacaatagtcagcatggctattgccggggcaatcgtgggagcag

SEQ ID NO: 78708 - DNA, 257 bp, Glycine max
  Clone ID: 700964002H1
caaaccacaccaacatcacagccacaacaactaccagtgcaacgtcatcgtcatccgcgacggtatcagtgactcaagcattggggagccgggacctgcaggacgttgacacggcagcgctgtcgcgtcccttggatgagtacctcagagctggctccttggccccggcgagcagaagaagaagaagtacgtcgatctcggctgcatcatcgtcagccgcaagatcttcaagtggaccctcggcacaatcctcttcg

SEQ ID NO: 78709 - DNA, 288 bp, Glycine max
  Clone ID: 700964003H1
gcgtacggaagcacgattccacgagccctaaggcggtgcagtacgtgagaaacgaccgtggcactcccatgattctagacaacaactactacagaaacatattagacagcaagggtctcttgatagtggatcaccaactagccaatgacaagaggaccaagccttatgtgaagaaaatggccaagagccaagactatttcttcaaggagttctctagagccattaccttgctctcagagaacaaccctctcactggcacaaagggtgaggtcagaaagcagtgcaatg

SEQ ID NO: 78710 - DNA, 267 bp, Glycine max
  Clone ID: 700964005H1
gagaagggtcacggtgacttgaaagacaagccatggtggcctaagttgaacactcttcaagatctgattcacatttgctgcattattatatggactgcttcagcactccatgcagctgtgaatttcggacaatacccttatggcggtttcatcctaaatcgtccaactctaaccagaagattgctcccagagccaggaaccaaagaatatggtgaacttaccagtaatcatcaaaaggcttatttgagaacaattacaggaaagact

SEQ ID NO: 78711 - DNA, 266 bp, Glycine max
  Clone ID: 700964006H1
aatctctctctctccaatggccaaagacctcgaaacggagattcaaagtgggttgcctcacaaggactaccacgacccaccccccgccccattctacgaccccgccgagctccgaaagtggtccttcttccgagccctcatcgccgagttcgtcgccaccctcctcttcctctacgtcaccatcctcaccgtcatcggctacaaccaccagacagccaccgccgccgagccctgcagcggcgtcggcgtcctcggcatcgcttggg

SEQ ID NO: 78712 - DNA, 268 bp, Glycine max
  Clone ID: 700964008H1
cataaattcaatgctctcatcgttttccctcataaaccgctttctcgtgttgtaacacactcatcactcatcatattcattcacacttcccactttccaatatggaatgctgcataatcgccaggctcaagacccaacctttatggttcgcgctgctcttcgttgtcggattgttaacgattctcaaattggctttcgttgttttcagatgggtctacgtcaatttcctccgaccaccgaagaatctcaaaaagtacggatcttgggc

SEQ ID NO: 78713 - DNA, 90 bp, Glycine max
  Clone ID: 700964010H1
cacagcctctcttggttgatgacaccaagagacagcacaaagacccttcgtttcaatcccacaacacactcattcttcattcttccacac

SEQ ID NO: 78714 - DNA, 267 bp, Glycine max
  Clone ID: 700964011H1
acgacacactatcctgttcttttctattgcccttttccttcactttactccttgcatccaattctctcgcgaaattaataaaggaactttaactttcgcgagcgacacaaacgcaatcaaatcaaatcatagattgatttggcaaccccaattcccttttgattattttttttttttatgaattaaagcaatgggtttggttgcttagtgtttttttggacgcacgaaagatgattccttggggtggcctcagttgctgtttgagtg

SEQ ID NO: 78715 - DNA, 270 bp, Glycine max
  Clone ID: 700964014H1
agatggtggaaagataatgtggatctgattcaaaccacacgattccacgaccttattttggagccgcggtggcggtagcggtggccggcgattgtagcggcgtaggagcaagaaatggttttatgttgtgaggaagattgttaagctgtgggaatatgtcattgagaagcatagtccgtgaactcaaggagatgagagatggaataggaagcacatcaaagcggggtgcagaaagcaagcatcggctcagtcggacaaagtcacatgtag

SEQ ID NO: 78716 - DNA, 245 bp, Glycine max
  Clone ID: 700964015H1
cttttgaagtacagagaagaagaattgaagaatgtaagaggggatggaactggagagcgcaaggaatgggataggatctatgattatgatgtctacaatgacttgggcaacccggatagcggtgataaatatgcacgccccgttcttggtggttcagccttaccttaccctcgcagaggaagaaccggaagaggaaaaactagaaaagatcccaacagtgagaagccgagcgattttgtttacct

SEQ ID NO: 78717 - DNA, 273 bp, Glycine max
  Clone ID: 700964016H1
gctgaatcaagatggatgctactacaccaaagtactccaaggccaggtatgatgaaattgtgaaggaagtttcttcctatttgaagaaagtaggatacaaccctgacaagattccttttgttcctatatctggttttgagggagacaacatgattgagaggtccacaaaccttgactggtacaagggtcctactctgctagatgcacttgaccagatctctgagcccaagaggccttctgacaagcccctcaggctaccccttcaggatgtgt

SEQ ID NO: 78718 - DNA, 292 bp, Glycine max
  Clone ID: 700964017H1
gcgtacgtacactgctcgttcggatagatggaagcagaggcagaaggtgaagaaggtgcgaagtagagcatttacaaggcggcgagaagcataaagcgaagagagaacagtttgtacaacgcactgagatccatctaccaagactccatcttcgtctccgagatctctcttctatggcctcagctccctctcctcgccaacctccgctgcggcctctggtactcccgccccgccgccttccactccacctgctacttcaagtccaccgacggccacaccaacaactgctcct

SEQ ID NO: 78719 - DNA, 266 bp, Glycine max
  Clone ID: 700964018H1
cgtgtgaatcttttggtgctgctcaagagcactgcaaagtttgatataatggagtttttcttcaccgtgttaattattctgagtgtgattacacccggattgagcagcacaacaactagtttcaatgtgttgcagtatggagcagttggaaatggacaaaccaatgattccccagcctttctaaaggcgtggaaagccgcatgccagagcaactcacatatatctcgcctcatcataccagcaaaacggacattcttgctgaagcc

SEQ ID NO: 78720 - DNA, 266 bp, Glycine max
  Clone ID: 700964019H1
gtctgatacacactctctctccgtcgaaatggccgcttcttcttcctcttccgacgagcctcctcgctctgtcttcctcggcgtcgacgtcggcaccggcagcgctcctgcaggtctatttgacgaggaaggaaagctccttggttcatctagcagcccaatacagatatggaaagatggtgcctgtgttgagcaatcctctacagatatatggcttgcagtttgtgcagctgtaaaagcagcttgttctaaagctaaagttgcat

SEQ ID NO: 78721 - DNA, 264 bp, Glycine max
  Clone ID: 700964020H1
cactttcctaatttttcacagtattcgatgctgtagagcacaatatagtttatctacacactcttactccgatttttgtcctacccttttcgctattttatctcttttctccgaagaagaggaagaaggggtttctttgaatgatccccagaatcgcgtttgtgctttgattcaacgagcaatgggtgttttgtagattctagtttttgatcttatttttgctgatcaaatttttatttgttgttgatttttgaggtattgggg

SEQ ID NO: 78722 - DNA, 264 bp, Glycine max
  Clone ID: 700964021H1
gataataacaagtattctttttccttgaaggcatacatggtggagttgtatcaggatacccttatagatctgttgttaccaaagaatggaaagcctttaaaattggatatcaagaaggattcaacgggaatggtagttgtggaaaatgtgacagttatgtctatttctacaattgaagaattgaatagtataatacaaagaggatctgaacggcgacatatatcaggaacccaaatgaatgatgaaagttcaagatctcatctc

SEQ ID NO: 78723 - DNA, 266 bp, Glycine max
  Clone ID: 700964022H1
ctctctcagaatccaaaccctaggaaatttccccttcagacgataccctagatttcctctcacaaatctctctcagcttccccattctcgggattcggcgtccagatcacagatcccgttcaattttttttccgcatcccccgatcgggtttggattctgaagaaagttcaattccgcacaaattcgagacaattgctgctgtcgaggctcgcgttgcgcatgggtaagattctgagagaaaccgcgaggccgttctcgaattgtt

SEQ ID NO: 78724 - DNA, 265 bp, Glycine max
  Clone ID: 700964024H1
gggagttcaagaatttggagacaaaaggggttcctttcccaaagaaccaacccatgagaatatactctagcctttggaacgctgaggattgggccacaaggggtgggcttgtgaaaacggattggagcaaggccccattcacagcctcatacagaaacttcaatgccctaacctcttcctccactggccaatcactggacgccacggggctggccaagatccattgggtgcaaagaattacatgatttacaactattgcactgat

SEQ ID NO: 78725 - DNA, 265 bp, Glycine max
  Clone ID: 700964025H1
atacaacgttgcttttgttttgttttgttttgtctctctctaatcattccaatggccaaagaaggacccaactgggacgggttgctcaaatggagcattgctcattccgatgggactcgccccactcgcaatttaagtgaggaggatcggagatggtttatggaagcgatgcagtcacagaccattgatgttgtaaaacgtatgaaagagatcacacttgtgatgcaaactccagaacaagtcttgaaagaccaaggagttaccc

SEQ ID NO: 78726 - DNA, 266 bp, Glycine max
  Clone ID: 700964026H1
aaaaacaccaaattacatagaatttttaggcgtaaccaaagtacgtaccaaaccatggcattgacaagtcaattgagaaaccttcttgcagctctagaggctgaggaagcagcccaaaaatccaaaggtaaagtgaacacatacaccaaccatggcgatgggtttcagaacatcactggcactaagaccaacagtggtgcatattctggtgatggtaacactcatcacgccaccaacaactacggtggtggtcctgctataaataa

SEQ ID NO: 78727 - DNA, 264 bp, Glycine max
  Clone ID: 700964027H1
caaagtgtgtgtgtgcaagagtcattggatgatgatcagtctaacattgctgctgcatggtgctaatgttttgcaaatgaaagcattagatcttttagatgggaaaaatgtctgtgaagctctggtggcagaatcaccttccaatcaagccactaatagaagccatggggttgatttccagtgtgctgatgaggttgtcaaaacagctgacatagttaaacaaactgacttagattttgaaactatggaagtgtctgcaaatgc

SEQ ID NO: 78728 - DNA, 265 bp, Glycine max
  Clone ID: 700964028H1
aaaagaaaactcaagctcccagattctgttccaatgcctcccgtaccaatttcccccatcaaagttgggcacattgatgatgtccaagagctaagaaaaaccaagccaaggacaattcctcaaagatttgtacgagacttgacagaaagaccaacactcactacacctcttcccccaccacatagtgacatgccagtcattgatttctctaagcttagcaaagggaacaaagaggaagtcctcactgaacttttcaatcttgcaa

SEQ ID NO: 78729 - DNA, 270 bp, Glycine max
  Clone ID: 700964030H1
aaaaataaaaaatggggataggggtactatttgttgggtttttcttgctatcttgtgttgtgtgtgtgaagggtgtggagccaaaagcctcacccacttgtacatttccggcagtttacaactttggggactcaaactcagacactggaggcatatcagcttcatttgtgccaattcctgcaccttatggcgagggcttctttcacaagccttctggaagggactgtgatggccgtctcattgtagatttcatagctgagaagctaaact

SEQ ID NO: 78730 - DNA, 270 bp, Glycine max
  Clone ID: 700964031H1
cctctttgctagttttgattagatctacaacaagaaattaaagaaatggctttcagggcagcgagaaatgtaggattgaggttgggaggaggaaggcgatcaattgctactgccagcgctaaaaagcatgatgattgggcgactctgaaggcagagttagcaccggtgtacatggtgtgcggaatggtggcaatggctgtggcaattggatcacacactgcgtttcaacaactggcgcgttctccaactgttcatataaacaagaagaga

SEQ ID NO: 78731 - DNA, 272 bp, Glycine max
  Clone ID: 700964033H1
gctcggcccggtccatctcggtcgaagcgcttcgaccgagcgacaccttcccccggcggcacaactctgccaccccggaggagcagagcaagatggcagagtcgtgtggcttcgagtagcctcgactccctcgtggacgccaccgtgcctaagtcgatacgccttaaggatatgaagttcgggaaattcgatgcagggcttacagagaaccagatgatagagcacatgaaggacttggcctcaaagaacaaggttttcaagtcctacattgg

SEQ ID NO: 78732 - DNA, 99 bp, Glycine max
  Clone ID: 700964034H1
atattgtatacttaggatggcattctcatggcccaaacccttcagcaagtgatcttgagtttgcaacaaatccccattacaaattattagggtcacact

SEQ ID NO: 78733 - DNA, 265 bp, Glycine max
  Clone ID: 700964035H1
gagtaacaagcctttaacttccattaaacagaacagacaactctcttactcttacctgttaccactttttttttttttttttccgggttctctaaacttaacaccactttttgcatcatcatcatgctttcacttcccatttcctaatccctctttcctttgttgccacaaatttccattaatttcccttcacgctgaaaccagctacagaaacacctgtttcaaaggaaaaaactcccgggttaaaggaaaccacaacaacact

SEQ ID NO: 78734 - DNA, 263 bp, Glycine max
  Clone ID: 700964036H1
gatcactggggcaaatcctacaattcctggaatgtttccaaatatgtttccgttggctacaagtcagatgcagcaatttagtgctctccctgtcatgccagtgcaggctatgactcaacaggctacacgacatgctaggcgggtgtatgttggaggcctccctcctacagctaatgagcagtctgttgcaactttcttcagtcaagttatggctaagattgggggaaacactgctggcccaggtgatgctgtggtcaatgttt

SEQ ID NO: 78735 - DNA, 262 bp, Glycine max
  Clone ID: 700964037H1
atttttgctacttggaatggagttcttgaggacatgagtgatgtaaaggaattggttcctgagctattttacctacctgaggtcctcacaacttacgatttttttgattttggcacaacacaaatgggaggaaagcttgatactgtaaagcttcctgcttgggctgaaaatccaattgattttattcacaagaccggaaggctctagagagcgagtatgtatctgctcatttgcatgagtggattgcctcataatttgggta

SEQ ID NO: 78736 - DNA, 264 bp, Glycine max
  Clone ID: 700964038H1
cccaattcttccccctccacccacccagcatatccctctattcctatttattagcacccctcacattaccttgtgtcaccaactactttgactcctttaccataccattacaataattatcaaacctaaccagtaaaaatggtgaccgtggaggaaatccgcaacgctcagcgttcccatggacccgccaccatcttggccttcggcaccgccacgccgtccaactgcgtctcccaagccgattaccctgactactacttccgc

SEQ ID NO: 78737 - DNA, 264 bp, Glycine max
  Clone ID: 700964039H1
ctcaatttttctctcaaccggcccaatttagcataagcccagcatggccaccgcaacagcagcagccacctcgtccttcatggggacgcgcctcctggaggcccactccggggcggggcgggtgcaggcccggttcgggtttggcaagaagaaagccgccgccccgaagaaagtttccagggggtcgggctctagctccgataggcccctgtggtatccgggcgccaaggcgcccgagtacctggatgggagcctagtcggaga

SEQ ID NO: 78738 - DNA, 265 bp, Glycine max
  Clone ID: 700964042H1
aacaaaaacaccaattctccaccctctcattgaaaaaaaaacaaccaaacaaaaaaaatcaatcattttattttatttttctacgaaaatggttgatttacattggaaatcaaagatgcctagttccaaaacaccaaaactctctctctccgacaacaagtccttaccctctttgcaactacccttccgcaccacagatatctctcccgccgctccttccgtttggcccgcttacgactactatctccgtcttcctcaactcaga

SEQ ID NO: 78739 - DNA, 262 bp, Glycine max
  Clone ID: 700964043H1
gttttcattttctaatttctctctctcccacttcaccaatcaaacctctttttttctcaacaaaaatacacccttcttcatggcgagtgaagctgagatcgaatacgaagaggcgagtgaagctgagatcaaatatgatgaggaatacgtttggaattctcgaggcttgaagctttttgcatgccgatggcttccagcgaatggaagtccaaaagcgttaatcttcctctgccatggctacgccatggaatgcagcatcacc

SEQ ID NO: 78740 - DNA, 263 bp, Glycine max
  Clone ID: 700964044H1
aatcttcacaccatatttgcattcgctctttctaatctatccccatgatctgctaatgcatcaaatatttgcaagtcattgatatgaaatcactgaagaagatgctgcccattcatgcattttcttaaccaattgaagtttatagcacacagtacatctgcatgaaagattcttattcaaggactcaaatttctgtggagtaacaggtacgttttttttttcttttttgtaagaggagtggtcatggatgccaatgatgacag

SEQ ID NO: 78741 - DNA, 263 bp, Glycine max
  Clone ID: 700964045H1
cacacctttctcctttcgtgaagacaccttgccaatggcagcatcactatcacactgctaaagtcttggtctctgcctctggcaatacccaaattgaccaaaatcccgactctggacttcttcaacgccctactcctccagacccactcgatgacgctcgtcaggctcggtagagatcgtcagattggaaggctgcaaagacatatcaagatagtaaagtcatttataatggtagggttgaaggttttaattctggaggcctg

SEQ ID NO: 78742 - DNA, 262 bp, Glycine max
  Clone ID: 700964046H1
agagcgagagagagagagaaacaaagcagcacccatttggatcctctcttctcttctttgatctccgttaccctttttgttttctcaacagagagagagagagagaatctttcgaagttcgtttgcgtgtgttgtgtggtcagtcaccgatggcagcaccacctgcgagggcacgtgccgattacgattacctcatcaagcttcttcttattggcgatacggtgtgggaaagagttgtctgcttttgcgatttctgatggtt

SEQ ID NO: 78743 - DNA, 267 bp, Glycine max
  Clone ID: 700964047H1
gttgagttagctttcactttcagtgtgagatcttcgtctcttctcttgcttccttcttcaattcatctccgaaccgcgtttctatttttgactctctctctctactcagtaagaatgtatactaatattggtatgccaccgggggtacctcagcatcatcctcaacctccaacgagctcacaacctaatctgttcgggaatgcattcaattctgctggttctggactcattcgaggtgcattgggtgcgtatggagaaaaaatatta

SEQ ID NO: 78744 - DNA, 267 bp, Glycine max
  Clone ID: 700964049H1
gtgattaatcaagtccgacaacgggttttacaacaagccttacagggagctctaggaactctaaagagttgcttgaacaacgagttacatttacgtactgtcagtgctaatattggcatgtttgggacgatgaaagaaaaaataactgattagtctttctattataaaatagagtataggcattatttttttcttctaaaaaaataaaattaagaaattttcatggtaaccattcgtgcagatgaaattagtaaaattatccgtgaa

SEQ ID NO: 78745 - DNA, 263 bp, Glycine max
  Clone ID: 700964050H1
aggaaaacatattggctgaagttatttttgacgcgtgaaataggcgccggcgttcatcgttgaaaagcgaaaatggatatacctcgtctgaaacttggaacccaaggcctggaggtttccaagttgggatttggttgtgcggggcttagtggagtgtttgacggccctgttcctgacgaggttgtcatctctctaatcaagtatgcattcagtaatggaatcactttctttgatacttccgatttttacggtccctacactaa

SEQ ID NO: 78746 - DNA, 264 bp, Glycine max
  Clone ID: 700964053H1
cctcgagccgattcggctcgagaatatgggttcttcttcccctccacacactagcaagagcccaaagctagagcgatacaacagctacatccggagactcaacagcaccaagctcctcaacgcctcctccaaactcctcttccgcgccactctcttggtccgcactcatcctcgtcttcctcttcaccttcaactaccctcccctctccgccaccgactccacccaccgccacctccacgcccactcccactacttcctctcct

SEQ ID NO: 78747 - DNA, 257 bp, Glycine max
  Clone ID: 700964054H1
cgcctccattatcagtcctttttcaggcgtggtttttacctaaccctacaattcgccgatccttccagttagggtttttcgctctcagcgaaaacggtgtatatagaaaccctatctattcctccgatgcaccaggggaattgaatatatataataagaaaaaggcaaaaaaaagaggtgaaaaaaatttgtctggtaaattgttaattctgttgttttgcgtgtttctggactcaggtaatttctagagcttatct

SEQ ID NO: 78748 - DNA, 260 bp, Glycine max
  Clone ID: 700964055H1
tttcgcttattttattatcgttttcctttctcccgagtgttctcctttcttgcttccttctccggccatctttatcctgatggcgtcgtctctgggaattgcttgcggtggaaacaacgccaaattagggatcccaaagcagcggtgtggttcggttcttcagccgccgtgctccctcgctatggggcgctcgacggcgagggtgcggaggatcacggcggcgatggccacggccacggcggtgatgaccacggccacgg

SEQ ID NO: 78749 - DNA, 260 bp, Glycine max
  Clone ID: 700964057H1
cacgttatcgtctcttcctcaaactctgaacctaccgtgcagcgcagagctatgctggcatacccaccgtgacgaaattaacctctctacgtaacagcacacagcgatttccccaaatcatcgaaaccctaactcgcgattcccaatcgaaaccctaactcgggatggcgattttgctgggcgaaattcttcaatcgctggagctgtggctgaagctgatcaagaacccgcagccgcagccctacgtaaaccctaatctg

SEQ ID NO: 78750 - DNA, 263 bp, Glycine max
  Clone ID: 700964060H1
cacaaattttatgtgattagtcgcggtatttaaaataaaaaatgaaagtagacaaataaaaaaggaaaggagatgtttgaataaaaataattccccttcaagttcttattttttgagaggacaggacaatatgaatgttttattatgctctatcaacacattaaaaagattatatgatatatctgctgtggaagtaggtcaacatttctattggcaaatagggagtttccaagtacatgcccaagtacttattacttcttggg

SEQ ID NO: 78751 - DNA, 263 bp, Glycine max
  Clone ID: 700964061H1
gtttcgctgtttgaaattttcagattccatggccaaaagctccttcaagcttgaacatcccttggaaagaagacaggctgagtctgctcgcattagagacaagtatcctgatagaatacctgtgattgttgagaaagcggaaagaagtgacatcccagacatcgataagaagaagtaccttgtcccagcggatttgactgttggtcagtttgtttatgttgtccgtaaaaggattaaggtcagtgcggagaaggctatttttg

SEQ ID NO: 78752 - DNA, 265 bp, Glycine max
  Clone ID: 700964063H1
atttggtgacaagctctggcttgaaaccaggaagttatggctcattgtggggccctctatattcagccgcctcgcgtcgttcaccatgaatgttgtcacccaagccttcgccggtcacttgggtgatgtcgaactcgctgccatttctatcgccaacaacgttcttgttggcttcaatttcggcctccttttggggatggcgagcgcgttggagacactgtgcgggcaagcgtttggggcgaagagataccacttgttggggata

SEQ ID NO: 78753 - DNA, 269 bp, Glycine max
  Clone ID: 700964064H1
atcctctttaccttccactttttcctcctctcaaattcacatccccccccgaccctttaagtaaacaccaaaaacacacatacacactcacgcatattgacaccctttgcacattcttcttcttcttcatctctttctctctctgaagcaagtgtgcagagcaattaataaatctagttttgggtcaccccgtgaccgtgatgatcataaggttattgtcttttgagtgatgggtttgtgttcttcggtccccagaaacgctagcgcag

SEQ ID NO: 78754 - DNA, 278 bp, Glycine max
  Clone ID: 700964065H1
tcgaagagatagccagcagcaagcagaaggatccccccggaccagcaacgtctcatcttcgccggaaagcagctcgaggacggccgcaccctcgccgactacaacatccagaaggaatcaacccttcacctcgtcctccgtctccgtggtggcatgcagatcttcgttaagaccctcaccggcaagactattaccctagaagtcgaaagctccgacaccatcgacaacgtcaaggctaagattcaggacaaggagggaatccccccagaccagcagag

SEQ ID NO: 78755 - DNA, 261 bp, Glycine max
  Clone ID: 700964066H1
caaccatcatggccacctctgctattcagcaatcagcattcactggtcaaactgctctgaagcagctcaatgagttcgtccgcaagaccggtggcgccggcaaaggtcgcactaacatgcgccgcaccgtcaagagtgctcctcagagcatttggtatggccctgaccgtcccaagtacttgggtccattctcggagcagattccatcatacctgaccggagaattccctggtgactacggatgggacactgctggattat

SEQ ID NO: 78756 - DNA, 256 bp, Glycine max
  Clone ID: 700964068H1
tctgcctttccttttccagggagctcattgacaatggctgaaacaaagtgggtcatgaaggacaaaagatggtctctccatggaatgacagctctagtcacaggaggcacccgaggcatagggcatgccattgttgaagagttagctgagtttggagcaactgttcatatatgtgcacgtaatcaagatgatattgataaatgtttagaagagtggaaaaacaagggacttaatgtgactggttcagtatgtgatt

SEQ ID NO: 78757 - DNA, 257 bp, Glycine max
  Clone ID: 700964070H1
ctccttttgtattacacactgactgtccacattactggcggtatcatcttccaggtgagacagaggaagaattttcaaccagattagccaataatttggagcagttgattctgaaagagggaccagagactattgctgcatttattgctgaacctgtaatgggggcaggaggtgtaatacctccaccatcaacttattttgagaaggtccaagccgttgtcaagaagtatgacattctttttattgcagatgaggta

SEQ ID NO: 78758 - DNA, 257 bp, Glycine max
  Clone ID: 700964074H1
acttgaactatcgggtcttcttcttggctctctctgtttagggtacgcaacctctgtctccttttcctccatactctctttttcttaattgtttttctttcaacttcatatcataattgtgttcatatgctaacttttcatactttttcgtcacttttctatagtttatttggtcaaattaatgggaatatccttatatgctcttgttttgaattttgttgtgcaaactgtgtctgagttttttatttcttggagga

SEQ ID NO: 78759 - DNA, 258 bp, Glycine max
  Clone ID: 700964075H1
ctcgagccgcttgcatcatgagttggatcagtctccgacaatatccgacgtttcagatcggtatcggcattctcccctttcatcgttgcatttgtcaccgacgctcctttcttcgccggagagagagttgaactctcagcctcagccaccaccttctcggaaacactgggagattcctgacttgttgacaccaattggcgaacaccaaatttttcagttccacagaggaaacaatgggaaattccggttctttcagta

SEQ ID NO: 78760 - DNA, 260 bp, Glycine max
  Clone ID: 700964077H1
ggaattatagggtccaccaagattgagttgaacaactctattatttttttaactattggatatgctattaagatccattttgcacatcaactagagagtttttttattattttcttatataaatttaaattgtgctacaagtgaagagttggaaacaaaagatggcaggtttgggaatatggatgggtttcgttagcctgtgtcttctgtctgtatcagtatcaggtctgctccaacgcctagagcaccctgtcaaagct

SEQ ID NO: 78761 - DNA, 263 bp, Glycine max
  Clone ID: 700964078H1
ccttctcgctttctttcttcccaccttttctctgtttcttcttcttcttccattagttcctgctgaaagtcctaacacaacaccacccttcttcatcttcttatgtttttgacttgtggccaccactgtgacccatttctgtatcttctggcaaggttctatccgtttcttcttttggatcacccttttcactgttcgactccttcttgctatctgcttcgtcaatctgattattcatgggtgaaaagctaatttgttcactt

SEQ ID NO: 78762 - DNA, 228 bp, Glycine max
  Clone ID: 700964079H1
cttaatttatatgaatgttgtcacagaggcctttcttttccttatgatgttgctcttgttcctaccaaagcagcaacattaaaattaaaacatggcatcttcaccggacaccagcaaaaccataaagctggtgcgtaacaacagctacctccgcagactcaacatatccttcaaaatcctcttcctcctccacgccctccttctcctttacactctttccacacaaca

SEQ ID NO: 78763 - DNA, 272 bp, Glycine max
  Clone ID: 700964081H1
cattgttgttggagcgagccacaccaacatcacagccacaacaacaaccaatgcaacttcatcatcatcagcagccgatagcagtgtctcaaccattgggatgcaaggacaacaaggagcagctcctcagttgagggggaagagacaaggaatagtgctgtagatggatgaatgaatgaatgtcccttcatgctaactagaaaactttcacgtgatgtgttccccatcaatgttgttggtgtgggggcacctgacacagtgatgggggttgg

SEQ ID NO: 78764 - DNA, 257 bp, Glycine max
  Clone ID: 700964082H1
caagccacagcaacatcacagccataacaacaaccaatgcagcttcatcatcatcagcagccgatagcagtgtctcaaccattgggatgctaggacaacaaggagcagctcctcagttgagggggaagagacaaggaatagtgctgtagatggatgaatgaatgagatgtcccttcatgctaactagaggactttcacgtgatgtgttccccatcaatgttgttggtgtgggggcaccctgacacagtgatgtgggt

SEQ ID NO: 78765 - DNA, 256 bp, Glycine max
  Clone ID: 700964083H1
tgtgaaacggacatactggtttgacatttataagaacgttgataaaattccattggtgaagtgtccagtgctagtaattcatggaactgctgacgaggttgttgattgctctcatggcaagcagttgtgggagctatgtcaacagaaatatgaacctttgtggctcaaaggaggaaatcactgtaatttagaactctatcccgaataccttcgacatctcagaaaattcatatcctcggtagaaaagccgccatca

SEQ ID NO: 78766 - DNA, 256 bp, Glycine max
  Clone ID: 700964084H1
aaaaaacagatggccaaatacttggaagtagtgttgcatctatttctatccaacttttgaggaaaggtggtccagatgcagtttgtcagcatctatgcagtttgcagaaggggtcaatatgcatagttaatgcagctagtgaaagagacatgactgtattttcacttggaatgatcaaggcagaattgatgggaaaacgtttcttgtgtcgcactgctgctagttttgtttctgcccttatgggaatcatctctaa

SEQ ID NO: 78767 - DNA, 258 bp, Glycine max
  Clone ID: 700964088H1
cagacacaacacaacaaggttgcaaagtgaagaaggattaagccatgaaagctctaattttaatcctcacgctatgcatcattgctgtcaccttctcatcacaagcagcaacctccatagtcactcaaccccaacccaacgaatttttcaagctcaaccaaaccaagccacagaatgatggtagttcctgtagttacacggtgagcataaaaacaagctgcagttctccctcctacaccagagattacatcggtcttg

SEQ ID NO: 78768 - DNA, 247 bp, Glycine max
  Clone ID: 700963474H1
gaattgaaccaactcgaaaatagttcggaactcgattcaataatcagctcgttgaatttggttcatgaaccaaatgagctgaatttgagctcgttaaataaatgacccaaacttgagctgctaatagttcaactcatttgattcatgaattggctcaatatatatatatatataattgattgggtattctattattttatatatatctagggcagggtagtttttatttatgcagactttggttata

SEQ ID NO: 78769 - DNA, 248 bp, Glycine max
  Clone ID: 700963477H1
gtagttcttcatcatagtcttaaacattaaaccttagcaaaactcaacaatgctagacatcaaaggctacctcgtactcttcttcctatggttcatatcaaccattctgatacgttccatcttcaagaaaccacagcgtctaagactcccaccgggtcctccaatttcaatacccttgctgggacacgcgccatatctccgttcactgctccaccaagcattgtacaagctatcactgcgctatggac

SEQ ID NO: 78770 - DNA, 253 bp, Glycine max
  Clone ID: 700963481H1
cataaattgattgaataacgaaatcttcaatgaccggccattttctccggacacccctcacactcaagatcgctgctttcttcttcatcgcagtcaccttcttctacttcggcaagcactggtccgatggctaccagcagctcgtcttcttcacccagcgatccgacccggattcgaactcgaacccgtttgtttccacgtccccgaataacgccaagtccttcaacgtctccgccctaattgagaacaacac

SEQ ID NO: 78771 - DNA, 252 bp, Glycine max
  Clone ID: 700963482H1
caacaacagagaacacgagtttgcagccataaaaaaaccccacacattcagacattgttgtgttgtgtaatgctatctccgatggctctctctgcgcatatttgccgtttccccgccacacgcgctgacacttctttgccggagagtctcaccagaatccggtgccggaaacctctctccgtccgatgctccggcgattccacttccggctctgtgggttcggagttcgatccgaaggtgtttcggaagaac

SEQ ID NO: 78772 - DNA, 250 bp, Glycine max
  Clone ID: 700963483H1
caaaaagttctgttctttttcccacccaattcagttttctcaaatggctcgtacgaagcaaacggctcgcaagtccaccggcggcaaggcgccacgtaagcagctggccaccaaggcggctcgtaagtctgctccggctaccggcggcgtgaagaagccgcacagattccgtccgggaaccgtagcgctccgcgagatccggaagtaccagaagagcacggaacttctgatccggaagctcccgttccag

SEQ ID NO: 78773 - DNA, 139 bp, Glycine max
  Clone ID: 700963485H1
gaaaaaacctgaagtatactactagggaagcatcagattttcatgctcctcctttcattaaattaaagaacagtttctaggtatggaaactctttcatatgggtcagcaccatgctgccaagttacgtgaatctcaaag

SEQ ID NO: 78774 - DNA, 247 bp, Glycine max
  Clone ID: 700963488H1
ggatatgctcgattcgagggtgacgagggatagcagatctgaatctcatcttcccaaaaccctctttcttctttttctcctctgatctcatttcaaacctaaccctaaccacaacagaggaagatgttgacgaaattcgagacgaagagtaacagagtgaagggcctgagtttccacccgaagcggcaactaaagctggcgagtctccacagcggcgtcatccagctctgggactaccgcatgggaa

SEQ ID NO: 78775 - DNA, 244 bp, Glycine max
  Clone ID: 700963489H1
cagcttttgttctagcacttcgctgtctgaggttctggattctcagtgtttgcggacgcagcatcatcttttagggaagaatggatcatcaagggcatagccagaacccatctatgggggttgttggtagtggagctcaattagcatatggttctaacccatatcagccaggccaaataactgggccaccggggtctgttgtgacatcagttgggaccattcaatccaccggtcaacctgctgg

SEQ ID NO: 78776 - DNA, 240 bp, Glycine max
  Clone ID: 700963490H1
gtgagagacaagttgaataaagttcccgactccaaggttcagcaactttattcaacttgtctctcacattctgcaacaatcgtggaaggtcatcatcccatttgtagaatgtgagagacaagttgaataaagctgctgaaccttggagtcgggaagaaaaggaccactgtctggaagaaacagaaaaatcattcaagctctctggagagattctccgtttgattttatcatgataataga

SEQ ID NO: 78777 - DNA, 247 bp, Glycine max
  Clone ID: 700963491H1
ctaagaatcaccacagcaagagcaagaaaaaaaaggaaaaaaaaaaaagactttctcttgaatcatcatgaccatgaaagattccattgttctatattcagctttgggaagaggacaccttgtttcaatggtggaactaggtaaactcatactaagccaccacccttcactttccatcaccattcttttcctatccccttcccccaaccaagacacccccacctcccccaccgccttcacctgggac

SEQ ID NO: 78778 - DNA, 246 bp, Glycine max
  Clone ID: 700963492H1
attactttttggtagtagcaacaagcaaagggaggaaagaaggaaagaaagagagagaatcttcattcatttttttctgctcattttctgtgtacacctttatcgtttctctcactaactttggagtctgctttactccacactccacaacaaacatcgtctgcattccctttcccttctcttttcaccccccttttttttttctctcttcttcttttttctttttctggtgggggcacctcattt

SEQ ID NO: 78779 - DNA, 249 bp, Glycine max
  Clone ID: 700963494H1
ggattgtggagtgaagagacgtgagagtgtgagagaggaagatgatgaagtgatgatagtaacaccattgggggctggaaacgaagtgggtcgttcatgcgtgtacatgtcctataagggtaaatccatattgttcgattgtggaatacacctaggtttttcaggcatgtccgccttgccctatttcgacgagattgacccttccaccctcgatgttcttctcatcactcactttcacttggatcatgc

SEQ ID NO: 78780 - DNA, 249 bp, Glycine max
  Clone ID: 700963495H1
ggaagaacgaagcctcctcgttcttcttcttctgcgctttctctctccctctctagaaccgtaaccgtcgtttctttctttctctctcctcaaccagagataaagagtcaccttcttatttttctgaatctcgcggcgttgttctttctgctgctgcggctgtggttccggcggcgatgggacagcaatcgttgatctacagcttcgtcgctcgaggcaccgttatcctcgcggagtacaccgagttca

SEQ ID NO: 78781 - DNA, 252 bp, Glycine max
  Clone ID: 700963496H1
gtaggaccagtagattcagcttacaaggctatcaatctcatcgtgaaggaaactgtaaaagtacttgagtactcactaagtacagttacagaatgcactgatgcaattgcaactacacgtgttgtaattcgtagagagaataagcaatcaccaactcctgctttgaatggaaacgtaatttatccaacatttagtggaaccggagaaggggtggatgttgttacttcaagtgtagaggcttatcttactgca

SEQ ID NO: 78782 - DNA, 280 bp, Glycine max
  Clone ID: 700963501H1
accttattgctcccatcaccttttcacctggtttagatgcagaagctcttagaaaagctttccaaggatgggggaccgatgagaaaaccgttattgcaatactgggtcatagaaatgttcatcagaggcaacaaatcagaaaggtttatgaggaaatttaccaagaggacctcattaaacgcctggagtctgagctctctggtgactttgagagagctgtgtaccgttggatgctggaacctgcagatcgtgatgctgttttggccaatgttgccatcaa

SEQ ID NO: 78783 - DNA, 282 bp, Glycine max
  Clone ID: 700963502H1
agattctggttcatttttatttgtatgaatcgaacacacgtgagtatgtctgatcacgaagaccatgcagactacgcagacaatgaatcctttgcaaagcgtacgttcagggataggtccaaggaggcattgtccaaacaagccgttaagttagccaaacaagctgaagagcatgaaaggttcatcaacaaggtgactcatcttttgggggttcttggctttggttggttttgcttcatctttggggcaaggcgacaagccgttcccttggtatattgtttg

SEQ ID NO: 78784 - DNA, 192 bp, Glycine max
  Clone ID: 700963504H1
aaaaaaccgaagcaaagcaagcaaagcaagccaatcaagactcaccttcgtgttccaatcagaggatatacacagagaattacgagttggttgaacaaaaataaaagtacttgtagtgatggtagtgccaataatgaatcttcttcaagtggaatagttggagaaagggataatcatcttgatcatgaaatt

SEQ ID NO: 78785 - DNA, 73 bp, Glycine max
  Clone ID: 700963506H1
gcacatctgcagagggacttcagaatcttaaatgcctgctaaaacaacaaagcacttttgcatgcaaacaaac

SEQ ID NO: 78786 - DNA, 279 bp, Glycine max
  Clone ID: 700963507H1
aaagaacaacatgaactttctaaccttcgttactgttctactcttcatactaccagcaacctcatcttcccagtatttggggaacaaccttctcactcatcgcaagatattcctaaaaaaagacaacattattacctcgtacgctgtcatctttgacggtggtagcacaggaacccgtgtgcatgtcttccattttgaccagaatttggatctccttcccattggtgatagtcttgagcttaataaaaagatcacacccggtttaagtgcttacgagga

SEQ ID NO: 78787 - DNA, 276 bp, Glycine max
  Clone ID: 700963509H1
caatcttctgagagtgtttggttgaaagtagcaaagatgtcacctttcgggcaacacggtcaaaagataaaggggactatggtggttatgcagaagaatgtgttggatacacaacagcatcaccagtgttggagggatcgttgaccaaggcttaggcttcataggcagtgcagtcgatgcacttactcttgtagccaccaaaatctccatccagttgattagtgctaccaaggctgatggtgggaaaggaaaattagaaagagtacagatttaaga

SEQ ID NO: 78788 - DNA, 273 bp, Glycine max
  Clone ID: 700963511H1
cagaacaacgtgtcctattgtacctggaattatgcccattaataattacaagggctttatccgcatgactgggttttgcaaaacaaagataccagctgacattatggctgctttagagcctatcaaggacaatgaagaagctgtcaaggcttatggaattcacctgggaactgaaatgtgcaaaaagattttagctcatggaattaagacattgcatcttcatacactagatatggagaaatctgcattggcaatactaatgaaccttggcct

SEQ ID NO: 78789 - DNA, 272 bp, Glycine max
  Clone ID: 700963512H1
aacgtttgtctctagcagcgaaaacggaggagtcccatgtgcctttcttactggacctgcaattgtttgagcccaagttcgtcttcgagcccaaaacgattcagagaatggaactctgggttatgtctaatctcaaatggagactccgctctgtcacccccttcgattatcttcattatttcatctccaagcttccttcttcctcttcttcccaatccttgaatcactttttctccacttcctccaacctcattctcagcaccactcgtgtg

SEQ ID NO: 78790 - DNA, 273 bp, Glycine max
  Clone ID: 700963513H1
cattcattcctattccttctttctcttccaattccaaatcacaacccttcactttccctctctagaatcttcttctccattcaattcctactccttttttcctctctgtccctctctctctccctctctcatggcttccgatctcgaagcaaaagccacagaagccttcgtcgaagaccacttcgaactcgccgtggaccttctctctcaggccattcatctcgaacccaacaaagccgaattctacgccgaccgcgcccaagccaacatcaa

SEQ ID NO: 78791 - DNA, 271 bp, Glycine max
  Clone ID: 700963514H1
attcaacagtgaactcataccatcaacagacagaactttcaaaaagcttgttatatgtcacatctattgtgtgtcaattgtcaactctctactatgctaaataaaataaaggacaacttgtgctttgcttcagctctgtctgtaatttcttgttttataataatggagcagatgttctttgccacttcaacattgcatgtccgcctcatgcaatgggatgatgataacttggttgagcaagctgttaatcgatgcaaccagatttgggaat

SEQ ID NO: 78792 - DNA, 274 bp, Glycine max
  Clone ID: 700963515H1
agaaagccaacaaacattaaagatgctacagcatactcttttactcttgaagaagacaccacaaattatggtacgtatgagaaaggtggtattgtgacgcaggtcaaacaaccaaaggtattgaactttaagccactcaaggaagcaatcactgatcctggtgattttcttctgagtgatttttcgaagtttgatcgcccacctctccttcacttagcattccaggctttggataaattcatttctgagttaggtcgcttccctgttgctggtt

SEQ ID NO: 78793 - DNA, 273 bp, Glycine max
  Clone ID: 700963516H1
tcaaagttcagctaatggaaatacaaaacaggttattaattgtacatggaagcatcctgatgcacggacagtgtatctaacctgcaacatgctggtcaggaagagatccttgttaatgtttctgaaacctttggggcctaaatacatgttgataaagccaagtattcgtaatgttttgagaatctagcacttactgtgcctgaaatcctctgaagatccaacttctcgtttccgcttgtttgatggatctcaaaatttatatgaaagagcaag

SEQ ID NO: 78794 - DNA, 281 bp, Glycine max
  Clone ID: 700963518H1
aacactctcatagctgtagcggcgacactaagatcggagaaagaatggcgaaaacgacgtcgttgctgctctttacactgctcatcttcggaaccctagctctcatccaggcgaagaaatcgaaggaggatttgaaggaggtgacccacaaggtttactttgatgttgagattaatggaaaagaagcaggtcgtattgtaatgggtcttcatgggaacgctgttccaaaaactgcagaaaacttccgagcactttgcacaggggaaaagggaactggtaaa

SEQ ID NO: 78795 - DNA, 275 bp, Glycine max
  Clone ID: 700963519H1
aggcgttggcgacagatgaaccacggcggcgctccggcgaccggagggggagaaggtgttcaaggggagcgaggtgttcggtgacacgtcaccaaattacttgaagaccattttggccctggcgttgtggctcggaaccattcatttcaacgtcgcgttggtgctcttcgcaatcttcttcctctctctccacaaagcacttttgcttttcggtttgcttttcgtgctcatggcaactcctgttgacgaaaacagcaaattcggtcgaaaactat

SEQ ID NO: 78796 - DNA, 72 bp, Glycine max
  Clone ID: 700963520H1
attccaatatattccattctgtctgtgtatttccctacctctgccttcaagatgcagatcttcgtcaagacc

SEQ ID NO: 78797 - DNA, 279 bp, Glycine max
  Clone ID: 700963521H1
catgaaacacaattcaatgaagatcaacagttagaacaacttataaatggacaaatatgctttaaaatttacccatttgaaaatgagatatcagccgaaaggaaaataataatgcctggttctttcaatccattacatgatgggcatctgaagcttatggatgttgctactcgcatttgtggtgatgggcatccttgctttgaaatatcggcagtcaatgcagacaaacctccattatcagtgtctcagatcaaagatcgcatcaagcaacttgaaaaa

SEQ ID NO: 78798 - DNA, 276 bp, Glycine max
  Clone ID: 700963522H1
aaaattagttcattctctttgcgcagttccctacctctcctttcaagatgcagatcttcgtcaagaccctcaccggaaagaccatcacccttgaggtggaaagctctgacaccatcgacaacgtcaaggccaagatccaggacaaggaaggaattcccccggatcagcaacgtctcatcttcgccggaaagcagctcgaggacggccgtaccctcgccgactacaacatccagaacgagtcaacccttcaccttgtgcttcgtctccgtggtggca

SEQ ID NO: 78799 - DNA, 258 bp, Glycine max
  Clone ID: 700963524H1
agcttatgttgttgtaaatgactcgtgctaccatcaactcgttagccattggctaaacactcatgcggttgttgagccattcgtcacagcaacaaataggcatctgagtgtggttcaccctatttacaaacttttgtttcctcactatcgtggacaccatgaacactaattcacttgcccgcaaatccttggtcaatgcagacggtactatagagaaaacatttttgtggggtaggtacgctttcgaaatgtctgctg

SEQ ID NO: 78800 - DNA, 272 bp, Glycine max
  Clone ID: 700963525H1
atggactagacttgaaactttcagcaaaagaaaaggaagcaacacatgcaaatagggttcttttacttcttcatgccaacaagaatgagcaggcacgagaacttgtttctgcattaccagacatgtttccagaaagtgtcataccaatatttctgcaagctgccctcttggttagagagaacaaagctggaagggctgaggaaatactagcacagtttgctagtaagttccctgataagtccaaagttgttcacttagcccgggctcaggta

SEQ ID NO: 78801 - DNA, 267 bp, Glycine max
  Clone ID: 700963526H1
agaaccaggcaggtgctctggttcaagtctatacagatggaactgtttcagttacccatgggggtgtcgaaatggggcaaggtttgcacaccaaagttgcccaaattgctgcttcagctttccatatccctcttagttctgtctttacatcagatactagtactgacaaggttcctaatgcttctccaacagcagcttctgcaagttctgatatgtatggagcagcggttttggatgcatgtgagcaaataatggaacgcatggaac

SEQ ID NO: 78802 - DNA, 269 bp, Glycine max
  Clone ID: 700963527H1
agggcttcgtcggaggattgtcacgcctgaacgagcccttttccatttcagccttgagcagctcctgttcttgtcaagttggtgtgaattaggagctgcttaattcaaagaatggggggagatgcacagaagagaaacgtcatcattggcgtctctactttcttgttggtggccatggtggtagcagtcacagtcaatgtcaacttcaacaacaacggatcaagcagtgattcaaaggaagaaagcaaatcccatgtagcttcctcgat

SEQ ID NO: 78803 - DNA, 269 bp, Glycine max
  Clone ID: 700963528H1
attttgctttgttgtgttctcttcggaagcggaatcgatcaatccctcacctcattgctgagatctgcaaactggctatggactacgaaccctacgacagtagcggaactgatgatgaccttccaccaacccatcaacagagaatttccaggggaggaggaggacgtctggctgggaatgggagatctgctgttgcttcaattccttacacaaggatgtacggtgaaattgatatggagacccaaattcatcagcttgagcaagaagca

SEQ ID NO: 78804 - DNA, 273 bp, Glycine max
  Clone ID: 700963531H1
caaagaaattgtgacggccctcaagcatgatttggggaagcattacgtggaggcttttagagacgagcttggaacattaatgaagaccttaaacttggcaaccaagtctttgaaaaattggatggcggggaaagaggcaaagctgccacgaatagcactgctctcaagtgcagaaatagttcctgagccacttggtcttgttctcataatctcatcatggaactttccctttggactttccttggagccactgatcggagcagtagctgctgg

SEQ ID NO: 78805 - DNA, 267 bp, Glycine max
  Clone ID: 700963532H1
cattccattctctctgtgtacatccctacctctcccttcaagatgcagatcttcgtcaagaccctcaccggcaagaccatcacccttgaggtggaaagctctgacaccatcgacaacgtcaaggccaagatccaggacaaggaaggaatccccccggaccagcaacgtctcattttcgccggaaagcaacttgaggacggccgtacccttgctgactacaacattcagaacgagagtactcttcacctcgtcctccgtatccgtggt

SEQ ID NO: 78806 - DNA, 266 bp, Glycine max
  Clone ID: 700963533H1
caaacagcgtacgtgacacatttcctcaagtcagtttaaacttcatgggcggacatctatggttttgaatccagaacattacctcatgcattatggtttccttgatggtgctgcaatgtggtgcattggcttccaaaaagtggagcagggattcacaattttaggagatcttgtcctaaaagacaagatacttgcacatgacttagctaatcaacgaattggatgggccgattatgattgttccttgtctgtgaacgtctctctgg

SEQ ID NO: 78807 - DNA, 257 bp, Glycine max
  Clone ID: 700963534H1
aaagatccaagtgctgttgctgtaattgaaagcgcatcagatggtcagtgcaagatcattggagaaatttctgcacgtaagttatggaaatgtgattacttatccgcagcatgggctttagcgaatctctccgcgggacagtttgttatgggagttgaagataatgtcaccccaaggtcactgcatgagttcagtttagattcaccatctggagacattgacttagttaatagtgggggttcaaggaaaccaaggaa

SEQ ID NO: 78808 - DNA, 107 bp, Glycine max
  Clone ID: 700963536H1
agctcatttattgcgccttccttcatctgacacccctgaacagttgccaccatatccattattcccacctggcctcattcctggaatggttagaaagatgcagattg

SEQ ID NO: 78809 - DNA, 276 bp, Glycine max
  Clone ID: 700963537H1
tgccagcagatgctgctgcaccacatattgttaaagaagctgtacaagcaaagggacttagagatgatacaacctgcattgtagttgatacattacctcaggagaaaccacctgtttctgcgccacaaacaaagaggccagtaaagggaatgctcaagtccatgtttcgtaaaaaatcttctgaatcatcttcttatattgacaaagagtacatggagccagatgtagtagaagaattgtacgacgaaggatctgccatgctttcagagaggttag

SEQ ID NO: 78810 - DNA, 275 bp, Glycine max
  Clone ID: 700963538H1
aaatcaaaagcaaagaagtgaagagagagagaaagagatcattctagagacagagagaaaaattagcttcagtagatattagtggtgggtttgggtttcaagagaggagacatgcctaacttgaacccaacacttcaagtacttgcttcttcatacccttaccagatcccaaaggttacatgaagccatttctctttttaaatcttcccaacaccgagttcaattcttcacaagttgactgtaatcactcaatggctcattcttcttatccctac

SEQ ID NO: 78811 - DNA, 272 bp, Glycine max
  Clone ID: 700963539H1
agcaaacgcaagagcaagagcaagagcgaaacgccagagaagatggaaggagaagagggttctcagcagccacagttggtgctcgcggacaagctattccttctccggcaacccgatgtgcaagacattgacaaggttcgctacaaagaggatgtcttcactcatgtcaaggaaaacgatatggtccctctgtacgaaaccctagtcgctgattccgtgttggacttggatcgtgcgcttttggactctatgcgcgctaaaattgacgacga

SEQ ID NO: 78812 - DNA, 270 bp, Glycine max
  Clone ID: 700963540H1
tgcaattgaagttgaagtcttgcgcttctctcttcaactccaaacacaagacatcatcatccatggctgcatccgtctccactgtcggagctgtcaacagagctcttttgaacctgaatgggtctggacctggggtttcagctcccagttcatccttctttgggagcagcttgaagaaggttactggctcaagggtccccaacacaaagacttcctctggaagcttcaagattgttgctgcacaacagaacaaagagattgaagacaccc

SEQ ID NO: 78813 - DNA, 129 bp, Glycine max
  Clone ID: 700963541H1
taattcccttgtgctgcaattattttgatatttctgctgcgatcattcagtataatcaagtcattcagcgtatattcagttatctagtacattgtcattcagtatacataatcattctttgtacataac

SEQ ID NO: 78814 - DNA, 267 bp, Glycine max
  Clone ID: 700963542H1
tgtctatatcttcaaaggaactttcgatggaagagctggggttgagtgctgtcccatcagaagtatgggaatcaggggaggtcataaaacttaatctatcgagaaacctccatccaggagttgcctgttgagctttcttcttgtgtttccctccagacattgattttatctaagaatcaaattaaagattggccaggttcaattcttaaatcactttcgagcctttcatgtttgaagctggataacaatcccctcagacagatacct

SEQ ID NO: 78815 - DNA, 267 bp, Glycine max
  Clone ID: 700963543H1
taccaacctatgaagacaaagatgctgactggatgctcgttggtgacgtaccgtgggaaatgttcgtggaatcatgcaagcgcctgcgtataatgaaaggatctgaggcaatcgggctagcaccaagagcagtggaaaagtgcaagaacagaagctagagtcaaatttgtaaattccactttcgacaacaatctgctctatctgttgctcttgggcgtccacggaaagcattaatgctaatttctcgagcaaggggtagtctaatat

SEQ ID NO: 78816 - DNA, 268 bp, Glycine max
  Clone ID: 700963544H1
cacaataaacacaacacccctaaaatagtgttattaaccaattaactatgattctgtaaaaaaaattaactatgatttattacataatactataataaggtcgagtataaaatataatttaaatgagaaaaaattgataagttattcgtttgttttttttttgtaccaaagttattcgtttcttatttctccaaagaaactacattaacaacaaaaaataatcagtaacaatgagttatacatagattaatatgcactttttgctttc

SEQ ID NO: 78817 - DNA, 269 bp, Glycine max
  Clone ID: 700963545H1
aatcaggtctactcattagtcatggatagcagcaagaagggagccctcatgagtaatgaaagcgcaaaagatttatcagtcatggttctgaaacagcatcagtacaagaagaaccaaccaaagttaagttctaccccgcaagagagacgtgatcaatcccactgccttatctgtaggggaaacaacagttgtcaaacagttcatgcaagaacaaaactgatgaatactttgattggaaaagggaagccacatgaagctcaggccgtctt

SEQ ID NO: 78818 - DNA, 267 bp, Glycine max
  Clone ID: 700963547H1
ttcaccacaccaccacaacaattatcaaacctaaccagtaaaaatggtgaccgtggaggaaatccgcaacgctcagcgttcccatggacccgccaccatcttggccttcggcaccgccacgccgtccaactgcgtctcccaagccgattaccctgactactacttccgcattaccaacagcccacacatgactgatctcaaacaaaagttcaagcgcatgtgcgaaaagtccacgacaaagaagcgatacatgcacctgacggagga

SEQ ID NO: 78819 - DNA, 266 bp, Glycine max
  Clone ID: 700963548H1
attggatcttaccctcttgtttgctagtattctcattcttctgtctctgcttcttctccttctgaactaagagatggggttgtctttcaccaagctttttagccggctctttgctaagaaagagatgcgtactctcatggtaggtcttgatgctgctggtaagactaccatcttgtacaagctcaagctgggagaaattgtcacaaccattcccacaattggattcaatgtggagactgcggaacataagaatattagcttctact

SEQ ID NO: 78820 - DNA, 271 bp, Glycine max
  Clone ID: 700963549H1
aggctcgagggataagctgtggcctatgctgcaaaagcttggggtcaccatgaaatctgaggagaaggacctcatgggtaaagcattgatgaagcgtgtcatgcaaacctggcttccagcaagtagtgctctattggaaatgatgatatttcatctaccctctccatcaacagcccagaagcatcgtgtggagaacttgtatgagggtcctcttgatgatcaatatgcttctgctatcagaaattgtgatcctgaaggtcctctgatgctc

SEQ ID NO: 78821 - DNA, 272 bp, Glycine max
  Clone ID: 700963550H1
atttcactttgccattactaccctgcatgccctgaaccagatttaactttgggaaccacaaagcattctgataattgtttcctcacagtgcttctccaggatcatattggtggcctgcaggttctttaccagaacatgtggattgatataaccccagaacctggggctcttgttgttaacattggtgatcttctacagcttataacaaatgacagattcaagagcgtagaacatagagtacaggcaaatctcataggtccaagaatatctgt

SEQ ID NO: 78822 - DNA, 271 bp, Glycine max
  Clone ID: 700963551H1
agaacattgagaagagtcttgttgaagcttttgagcccatcgggatcagcgactggaactctatcttctggatcacacatcccggtggtcccgcgatcctcgatcaagtcgaggagaagctccggctcaagccggagaaactccagtccacccggcatgtgctgagtgagtacggaaacatgtcaagcgagtgtgttttgttcattctggatgaaatgaggaacaagtctaaggaggaagggaagagtaccactggagaagggctagagtg

SEQ ID NO: 78823 - DNA, 66 bp, Glycine max
  Clone ID: 700963552H1
aggacgacaaaaagcgaagaaaaacgcggtttttgttcccctgctctatctgactctgtctctctt

SEQ ID NO: 78824 - DNA, 271 bp, Glycine max
  Clone ID: 700963553H1
tacgagcacaaggttgagtttcaatgtagttttcttaaatacgaataagttggaaaaataaatacaaagtggtgtcccgtgtccatttggagcaaggtatcataaatgcttagcaaagtgcataaacgctcctacaaatcatttcagaaataaagcagtatggatattggatgatatataaagtactatgtaatatgcagtgaaggtataacaaatgtcaaatagcaattattcttgcgtacttttaaatacactatatggatggatgttt

SEQ ID NO: 78825 - DNA, 270 bp, Glycine max
  Clone ID: 700963555H1
gctatggcttccttatccaatatcttgcttatgttttgtttgttgaatcttctagcattcccagtttcagttcattcagctggtgaagttccaattaatgtgaccaagcacttttctttctaccaacttcagcttcagcaacaaccccagattagtccatgatatgaagctcctaggcagtgccaagttctcaaatgaaaagggtgctcttcaaatcccaaatgaatcagaagaagacataagacaccaagctggaagaggcatctattc

SEQ ID NO: 78826 - DNA, 270 bp, Glycine max
  Clone ID: 700963556H1
cgaattctctaaaagagatctttttctgctctttgaagaaagaagggtctttgcttgattttggagatgtctctgctctcagatctcatcaaccttaacctctccgataccaccgagaaggtgatcgcagagtacatatggatcggtggatcaggaatggacctgaggagcaaagcaaggactctcccaggaccagttagcgacccttcagagcttcccaagtggaactatgatggttccagcacaggtcaagctcctggtgaagacagt

SEQ ID NO: 78827 - DNA, 266 bp, Glycine max
  Clone ID: 700963557H1
aggcaagcaaggtttctgtttcagtttcagagggagaaatgggtcgttgccgagctgcgtcgcgccccggtgacgatgaccccaagtacagatcaaagagaaaaagggctgctctgaatgtagaaaattcagaaactttacctactggccaaggagtaactaatagcaaggtatctccttatcactgcaattattgtaacaaagacatttcggggaagattcgcatcaagtgtgctgtttgtcaagactttgacctctgcatagag

SEQ ID NO: 78828 - DNA, 263 bp, Glycine max
  Clone ID: 700963558H1
aatctgtactcaagttcaagtgcttccatctgccgttagctgaatatttagttgagcagagcaatgatgaacatcgtgccttttgtccttagttttcaaacaagaaaaggagactgacctcttgtgttcttttctgcactgggtaaaatacaactgggagtattgcattctcttcctcttctgtttaatttcttaactagcatattttttatgttaaattttattgttggctaaggctagagcatctgtatctatcaaaaaca

SEQ ID NO: 78829 - DNA, 264 bp, Glycine max
  Clone ID: 700963559H1
attttgaagtaatcgatggagtttcagtctctttccagattctaccttcttctttccttaaccattctcttccttgcaccctttcacgctcaagctaaaattaaagtcacttactgcgataagaaggcagactatcctgtgaaggtgtctggagttgaaatatcaccagaccctgtggagagtggcaagcctgctacctttaagatctcggctacttctagtaaagctatttatggtggagaagttgtaattggagtttcatac

SEQ ID NO: 78830 - DNA, 265 bp, Glycine max
  Clone ID: 700963561H1
atttcatgccaatttgttcggacacaaaaccaagtttttcttcctttgggaagatattgaagagatacaagtgcttcctccatcattggcaacattagggagccctacattggtcatagttctgcgaagaggccgaggtctcgacgcaacgcatggtgcaaagacctcaagatgaagaagggagacttagatttcattttcaatcttttgtttcatttagtgctgcctccagagcaacaaaggccttgtggagaacaagaatact

SEQ ID NO: 78831 - DNA, 143 bp, Glycine max
  Clone ID: 700963562H1
cgttggagctgtcggtatgggtgtgggtgggaaaacgcttgggcaggaatagaggaatattcagcatttacagcttgtattgtaaaaatttcatgttgtgtaattcaatattctcaatgtacatcaatacacatcatgctttt

SEQ ID NO: 78832 - DNA, 163 bp, Glycine max
  Clone ID: 700963563H1
cagcaagtagtagctcttgacccttctttccaccttttctggtccctccctccagaaatggcttctaattccattcttcttctttgtatctttcttgtggttgccactaaggttttttcctatgatgaagatctcaagacagtggttcctgcacctgctccac

SEQ ID NO: 78833 - DNA, 137 bp, Glycine max
  Clone ID: 700963564H1
gtgatttcagtgagtgatcggtgttcacttgatctcatcataatcgtcagcgtcaattgaagaagatgccgatcagaaacatcgccgtcggaaggcctgaagaggcgactcaccccgacacgttgaaggcggctttg

SEQ ID NO: 78834 - DNA, 265 bp, Glycine max
  Clone ID: 700963566H1
attctgactccgtgccctaacttcttcttcctcctcctcctctgacattgcagcaaggcacacacctcaggctccaacccatttcacgagggatcggattcgctcgccatcatggggaagaagaagaacagagtttcctcgaaggtgtggtgtcattactgcgatcgcgaattcgacgacgacaagatcttggtgcagcaccagaaagccaagcactttaagtgccatgtctgccacaagaagctctctaccgctggcggcatgg

SEQ ID NO: 78835 - DNA, 272 bp, Glycine max
  Clone ID: 700963567H1
aaacactcaagtaatcatccagtgcaagaagtgttacatcacagaaaggttttgagtttttacaagccagaagatgtttcaagcctctatgtgggtctatttgcttctaaatttccacgctcaattctccaagcttttcaagcagcagagatagatacttcaactgattcaaaagggtacaagaattctgagttcaacaattgcaattcttggtgtttttgaagtggctgacacaagataatggctcttcaccaccgcttgttgcttgtcga

SEQ ID NO: 78836 - DNA, 201 bp, Glycine max
  Clone ID: 700963568H1
atttgcttggtaaacgcaacagcgatagaactctagacatagaatagtaaacggtgttagcttcgatagattaaacgaacacagagcgagcgaaagtacgaatctgaaaaacaatggcggcgaactacgacacccacgccgtggcttccgatctgatcgacttcctcaacgcttctccaacggctttccacgccgtcgacg

SEQ ID NO: 78837 - DNA, 272 bp, Glycine max
  Clone ID: 700963569H1
caaaacgctcaagcttcacaagtctccggccaaggaatttttctctctatgcctcgtttctgattgtgccggagatgcatttggggaagcaccgtgtggagcagatgaggttgcttcctctcactctccaggaggaggcgagttccacaattccttcaacatttttttgttttctaattaactttgacttactttcattaaattaaccacatttacgttttaacaagcacatcttaaactgtcacattatctaattgaaagtggaatcaaaa

SEQ ID NO: 78838 - DNA, 266 bp, Glycine max
  Clone ID: 700963571H1
aattctgatacagcaatttccattgctgaggagatggtggaacatctggaactcacaaatgaggatgtatctgtcattgcagagctaataaatgacatgattgctaagcttgtccccaacttgaaacccttaagtgagaaactctcatccggaacagatcaattgtacaggccttcttcggaagttcagaatggtgaacaattcaactgccactggccattacaatcaagtgattacgatatgaagcctgtgtttaaggatctagt

SEQ ID NO: 78839 - DNA, 265 bp, Glycine max
  Clone ID: 700963572H1
acacatcggcggaaagagcagcatccagtggctggacacggagggccacctcccgcacttgagtgctccttcatacctggctcgccagcttgagattgcgctttcccagtagcgcgtggggaggcgcgtgctagtcctggcgcgtgggtctgcttgttaatttaagtaatttaactctactagtactagtactaccagtacaggagaagaataggcagggtcctagaaaaacaagtgtacgaaaggctctgaaagtggacacctg

SEQ ID NO: 78840 - DNA, 265 bp, Glycine max
  Clone ID: 700963573H1
caacaacacaaacctatgcttaaaacttaaaattatccatcttcaacttcacaatggtgcgtgtcaaagaagctctcgttgtcaccccttccgagcccacaccgaataccgttctctcactctcagctcttgactcccaactcttcttgcgcttcaccatcgagtatctttttatttacaggcccggcccgggcctggacccaacttccaccgcggctcgtttaaaagctgcattagccaaagcgcttgttccttattatccatt

SEQ ID NO: 78841 - DNA, 264 bp, Glycine max
  Clone ID: 700963574H1
acgatacgtaataagttctatcattgaggaagtttcctgtgcatcgtctccgaaaatgaacgacgcagatgtctcaaagcaaatccagcagatggtgcagttcatccgccacggaagctgaggaaaaggccaacgagatctctgtctccgccgaagaggaattcaatatcgagaagctgcagttggtcgaagccgacaagaagaagatcaggcaagaatacgaacgcaaagagcgccaagttgaaattcgcaagaagattgagt

SEQ ID NO: 78842 - DNA, 259 bp, Glycine max
  Clone ID: 700963575H1
gttgaggcaagggatgagctgcacagaatgttgaatgaggatgaacttagagatgctgttttgcttgtttttgccaacaagcaagatcttcctaatgcaatgaatgctgcagaaataactgacaagcttggacttcattcactccgtcaacgccactggtatatccagagcacttgtgcaacttctggagagggtctctatgagggtttggactggctttctaacaacattgccagcaaagcatgagacatttgaaaaa

SEQ ID NO: 78843 - DNA, 186 bp, Glycine max
  Clone ID: 700963576H1
tagcagcgtaaccagaaagacaagaggtgtcactccaccggagcaaaggaacacataacataacccacttctccttttctctctctctctctctcactatagggtttctgttagggttccgctctgttaagccacactggacagacacagaggagaacgttacaacaacaatgatttccacacaac

SEQ ID NO: 78844 - DNA, 266 bp, Glycine max
  Clone ID: 700963577H1
actcgagccgattcggctcgagcaagcaaagaagccattgagggacaccagaagttttgtgcaaaatccttgggaacagtaatatggttttgccatttcaaagctgggaaagaacattcaagtactttcaagttcctttgtcaataagcaagaccaatacactgtggaaggagtgcagaatcttggagacaaagcagtgatgtgtcataggctaaatttcagaactgcagtattttactgccatgaagtccgtgaaacaacagctt

SEQ ID NO: 78845 - DNA, 258 bp, Glycine max
  Clone ID: 700963579H1
atagaattctgtatgatatttacgtttacggcgtgtgataaaaagatactatatagaactaaaggagattcccgtttcagttacattcaattcaacgattgaccaaaagagaattcaaaaaataacatttagatcacccaaattccaatatttctatgaaacaataattaaatctaacgaatttatttcgattgattgtatccatatggggtaataacaaaagggggaggagagcttaaaaaaacaagataacaaata

SEQ ID NO: 78846 - DNA, 266 bp, Glycine max
  Clone ID: 700963580H1
agaaagcttgttgtttacattcctcaagtatgtgaagttggctacaaggattcatcagtcttgcgtttcttcaccaccgtgactggttatctggagaaaggaaagttagcagacatagaaggaatgaagacaaaagtattgatctgggtgaaagcaacaaccattttgtcagagggatcgaagctctatgtgacagctggcatgaagaaaacaaggagtacggaagcgtacgaggttacaagagatggtgtatgcatagataagtt

SEQ ID NO: 78847 - DNA, 262 bp, Glycine max
  Clone ID: 700963581H1
attttatccaattgaaattttaaaaatgactgggataaacttaagaattcaattattgaaattgaataagtaaacaatttaattggattggtcgaatggtatcaaaaaaatggagtactaactcccatttcttatttattattgaattaaccgatcaacttgctttgttatcgaacatttctttttgacttcaaaaattttccggaaaaaatttgaatctatttttatatgcgaatcaatcctactacttctggtcctgagg

SEQ ID NO: 78848 - DNA, 269 bp, Glycine max
  Clone ID: 700963582H1
caaccaaaccagtttggtgccttgaacaattccaattctcacaattcagcagcatttgagagtatcaacatgcagaacccgaagaggtttgctgcacaattgctaccagactttgtggcctaaacaagacattgaagaggggatagatcatagttggtgacattggttatatgggtctctcatattttcttctaatccatgtgcttgtttcttgggagtagtgacaaaatcttagtgtaaagaaagaaggaattttactctagtatagg

SEQ ID NO: 78849 - DNA, 99 bp, Glycine max
  Clone ID: 700963583H1
gttctaattcatttctgaaatagaactccgttattctctctctgtctctcttgtttcatcgatgggtggcacagttgttgctgaagtagccacaaagag

SEQ ID NO: 78850 - DNA, 269 bp, Glycine max
  Clone ID: 700963584H1
ataattttaatagctttcctttgccaatatgtaagttgtaactcaacgtcattgtaggtttttatattttgtattttttatggaaatgtcaaagataactcataaattttggttgacagccacaacatacatatcaactttcttgagttggcctggattaatcctttgcaattttaagattttgttgtattcactcacatgcattttagaattgctacactttgaaacgcacaatacagtttcaataatagttttatgacatctcatat

SEQ ID NO: 78851 - DNA, 266 bp, Glycine max
  Clone ID: 700963586H1
cgcaaaaccaaaccacatattaacttgtttgctctaagtcatggctctgatcttgcacgcaaccaaagcacacaagaatgctttcaagactctgattgcggcagagtacagtggcgtccaagtggaattggcccctaatttcgagatgggtgtctctaatagaactcctgaattccttaaaatgaatcccataggaaaggttcctgtcttggaaacgcccgatggtccagtctttgagagcaatgccattgctcgttacgttgctc

SEQ ID NO: 78852 - DNA, 262 bp, Glycine max
  Clone ID: 700963587H1
tggtaagagtcccctctcgctcgcttctattcgttccaccattccttcgtcctactcctctattttatttactatcatccattcccaacacacaatacccttctgggtacctcaaaaaacatttattttttcgtttttgtttgggtcccattagattatatttcattgggtcttcgttaattgaaagaccttgttggttcttacttgttttatggatttctaacccttgttcctgtgatataccaattcaagtaaagcagca

SEQ ID NO: 78853 - DNA, 260 bp, Glycine max
  Clone ID: 700963589H1
agcggttgatcacagtggtgtggtgcgcggtggcggtgctactgtgcgccgcggcgggcgcgtcgtgggtggaggaggcggcgaacccgatacgaatggtggcgggggtggaggcagaggaggttcgggtgatacggcagtgccggcgcgcgctgaagtttgctaggttcatgagcaggttcgggaagagttaccgaagcgaggaagagatgagggagaggtacgagatattctcgcaaaacctcaggttcatccgctcc

SEQ ID NO: 78854 - DNA, 259 bp, Glycine max
  Clone ID: 700963590H1
attcactctttctctctcccatccctttctctatgctcaaatatatatacaataaaactctacaactggccaaaaaaatcagcttttgctccctgacatattagtatacaatacatagtttttatgtgttgtgtagcactttagattactacttactagagtgaaaagcgagaggcagaagagaggaagggagacatatggaggaggtgtttgtagcaatgaaactggttttttcagttgctgtagtggggattctaag

SEQ ID NO: 78855 - DNA, 260 bp, Glycine max
  Clone ID: 700963591H1
agtaattgttcggctctcgcaaatacgagaaggaacaaaacaccgcggaagcaaccatggccgaagcagaacacaacgatcccacctcgccggagcgcgaggtccaaaccaaaagcaacaagaagaaactccgcaagaggaaaaggcctcacaagaccgagcagaaacgagatgaggacaagaacgatgctaacattgatagtgcccaaacacaaaccgaagatgaagaagaagaacaaaaagaagaagacacaaacaac

SEQ ID NO: 78856 - DNA, 261 bp, Glycine max
  Clone ID: 700963592H1
actttcaacccaatccaatcctcgcacacatgcatgctgtatctgccaaagttggggccaagtcataactacatttccattgttacgattctttctttccatcccaaccacttacacagcgtctgatccaatttctttctctcaccatggatcatcgcaaaccattgttacccacttcctctgacgatgctccaaatccacgcactcggaaggaccttgttctaatgatttgcggtttgtttttgctctcttcccttgttg

SEQ ID NO: 78857 - DNA, 260 bp, Glycine max
  Clone ID: 700963593H1
attctagctctttcagctttgacttttgttggaaactaaggcctaatcaaaatggtgaagttcacagctgaagagctacgtcgtattatggactataagcataatatccgtaatatgtctgtcattgctcatgttgatcacggaaaatcaaccctcactgattctcttgtggctgctgctggtattattgctcaagaagttgccggtgatgtccgtatgactgatacccgtgcagatgaagctgagcgtggcattaccat

SEQ ID NO: 78858 - DNA, 263 bp, Glycine max
  Clone ID: 700963594H1
agcacctgacttgatataaagacggagagggtttctagttaggtttaagcgtcgagcctctgttctgttcatttgcatttccatttttcacactctctctgcccatgaaccatgtggacacttcgtcgagcttctcttcgtctcagtacgagccaaggacttaacgcgggagctacccgtgcttcggctgtcaaattagtgccaatcactgttgaagaaaatgaggctggtatccctcagtctcgtcaaatcactcacagtag

SEQ ID NO: 78859 - DNA, 262 bp, Glycine max
  Clone ID: 700963595H1
gtgagtgatcggtgttcacttgatctcatcataatcgtcagcgtcaattgaagaagatgccgatcagaaacatcgccgtcggaacgcctgaagaggcgactcaccccgacacgttgaaggcggctttggctgagttcatctcaaccttcatcttcgtgttcgccggctcaggctccggcatcgcctacaacaagctcaccgacaacggcgctgccacccctgccggcctcatctccgcctccatcgcccatgcattcgccct

SEQ ID NO: 78860 - DNA, 265 bp, Glycine max
  Clone ID: 700963596H1
atacgaccagtagattcagcttacaacgctatcaatctcatcgtgaaggaaactgtaaaagtacttgagtactcactaagtacagttacagaaggcactgatgcaattgcaactacacgtgttgtaattcgtagagagaataagcaatcaccaactcctgctttgaatggaaacgtaatttatccaacatttagtggaaccggagaacgggtggatgttgttacttcaagtgtagaggcttatcttactgcactaaacaaaatgc

SEQ ID NO: 78861 - DNA, 283 bp, Glycine max
  Clone ID: 700963601H1
accgattccactcactcaaccatgtcgccgattcacgcgttttgagctcatagaacaaccacctttctaccactcctgctactctttcccttccttcgtcctccaagactcactctctctcgacctcgacctcttgccacttcccagccacttcgacgtttcgcagatctggtgcacgcgccgtcgttcgcttaccggcgcgtggagaggcatctcgagaatgagttgcgtttgcagagcctctctgaccgtgtggcggactggagtcgcggttcaccgtgtg

SEQ ID NO: 78862 - DNA, 291 bp, Glycine max
  Clone ID: 700963602H1
caaagaagaaaaaatgggttcctctttgtggacttgtctgattttgttatcacttgcttctgcttccttcgccgccaacccaagaacaccaattgatgtgccatttggcagaaactatgtgcctacttgggcctttgatcacatcaaatacctcaaggtggttctgagattcagcttcatcttgataagtacactggtactggcttccaatccaaaggatcctacctgtttggtcacttcagcatgtacataaaattggttcctggtgattcagctggcacagtcactgct

SEQ ID NO: 78863 - DNA, 291 bp, Glycine max
  Clone ID: 700963603H1
ctcgagccgcttcaacacagtcggcaaaatctttcaccaccaacacacagccatggcaggctctcaccttctttctcactcaccctcccttcccaaaacctataactactccttaaaccaaaaccctttatcccaaaatcttttttttccacccctagattcaatagctccacaaaatcgcgtgttctcagagctgttctctcccaaaacgctgcaaaaaccgcggtagaggacacaaagaacgctcattttcagcattgtttcaccaaatccgaagatgggtatctgtac

SEQ ID NO: 78864 - DNA, 279 bp, Glycine max
  Clone ID: 700963604H1
agactacgtcattacggtcccaaacaaagaacaaccctttctagcaagtaaacccaagttcccttctctcttcacggttacattgctctctctctctctacacatatatttctctctctctctctacacgttcgatctctcgcttctgaatctcaacgatggtgctcgatgcgactattatctatatagacaattcagaatgtatgcgtaacggggatcactctccttctcgatttcaagcacacacagacgctgtcaatcttatgtgcggtgataaaa

SEQ ID NO: 78865 - DNA, 283 bp, Glycine max
  Clone ID: 700963606H1
cgttacacaaactatcatggccacggcaacagcagctgccacctcgtcctttatggggacgcgtctcctggaggctcactccggagcggggcgagtgcacgcccgattcggcttcggcaagaaaaaggctcccgccccaaagaaagcctccagggatcgggccgagacaccgacagacccctttggtatccgggcgccaaagcgcccgaatacctcgatgggagtcttgtcggagactacgggttcgatccgtttgggctagggaagcccgcggagtacctgc

SEQ ID NO: 78866 - DNA, 285 bp, Glycine max
  Clone ID: 700963608H1
attctactcactcacacacacacacactctctttccatgggtccgtttcgtaaacccttccttgcatttctctcggttgttctatttctgggtctctatgaggcagcagcagaacagactcagactcacaagagtacttacattgtacacgtgggaaatcggagatgcccgagagcttcgagcaccacgctgtgtggtatgagtcgtcactgaagaccgtgtctgactcggcggagatgatttacacctacgacaacgccatccacggctacgcgacgagattaa

SEQ ID NO: 78867 - DNA, 289 bp, Glycine max
  Clone ID: 700963609H1
cacaaggaccatccttttcttgaaagatgatggcaccttaaagccattggccatcgaattaagtttgccacatcctaggggagatgagtttggtgccgttagtagagtcgtcttgcccgcagaccaaggtgctgaaagtacaatttggctaattgcaaggcatatgttgttgtcaatgactcctgctatcatcaactcatgagccactggttaaatactcatgctgtgattgaaccatttgtcatagcaacaaacaggcatcttagtgtgctccaccctatttataaac

SEQ ID NO: 78868 - DNA, 284 bp, Glycine max
  Clone ID: 700963610H1
tttgattttggtggctatgagaaggccatgaaggaaactgccaaggatttggatgagatttttggtgagtggttagaggagcacaaacaaaatagggcttttggtgagaacaacgttgatggaattcaagacttcgtggacgtcatgctttcctgtttgatggaaaaacaatttatggcatagatgcggataccatcatcaaatccaatttactgacaataatttcaggaggaactgaatcaatcactactactcttacatgggcagtatgtttgatattgaga

SEQ ID NO: 78869 - DNA, 283 bp, Glycine max
  Clone ID: 700963611H1
cgaaaaataaaaccacataaacaggcgagcgtatgtagcagagcgaaagccacccaccagctcagatcagcagcagcagcagcagcaccccctatttctccgttctctttgtttttacactctttctatgcaatttcctcccccctaaatttcagcttttattcttgtccctatctttctagtccattcttttgttagaacactctgattacccatttcaggacttcttcacttttcctcatcattcctctctgtattttacatttcatcttaaaggatctgt

SEQ ID NO: 78870 - DNA, 289 bp, Glycine max
  Clone ID: 700963612H1
cttggagtggtacttcttcagcgcgctggatcgcaagtacggaaacggctccaggaccaaccgcgccaccgagaggggctactggaagaccaccggaaaagaccgtcccgtcacccacggcgaccgcaccgtcggaatgaagaagacgcttgtttccacagtggccgtgccccacagggccgtcgcaccaactgggtaatgcacgagtataagatgctcgacgatgaattggcacgttccggcacagtgctggatgtgtttgttgtgtgtaggattttcgagaagagtg

SEQ ID NO: 78871 - DNA, 288 bp, Glycine max
  Clone ID: 700963613H1
gtgtttctgaagggttacctgtcactaagcgatcaggagatgatagtgaaaagatgcagggagttgggggtgggaagtggaggattctaccagcctggttacggggaagacaccaaaatgcatttgaaaatgatgtgcctcggaaagaactgggtcctcagtccggtcaatacggagaccgacgcccatttgacggagcaaagccaccgcaaattcctcccgagttccacagccatgtccacagtgcactcaaggattccaatgccctccttccctccatctcccctg

SEQ ID NO: 78872 - DNA, 290 bp, Glycine max
  Clone ID: 700963614H1
ttctccaaacactctagaatttgcatgcactgttcttcatacaatggcattacgcgagcttcttatgatggggatattgctgctggtatgtcttgctaaggtttcatctgatgttaacatgcaaaaggaagaagatgaagaacttcgctttcctatcaccctcttatcgtgagagacgggaacagaaggctaatgcaagacatagattgcggaggattgtgcaagacaaggtgcagtgcccattcgaggccaaacgtgtgcaacagggcttgtggcacgtgttgtgtgag

SEQ ID NO: 78873 - DNA, 292 bp, Glycine max
  Clone ID: 700963615H1
attgaagcacaagagaagagaagagaagagaggagagggggggagaaggggttgcagagagagagagagagagatgtcatcatcttcagacctggacaggcaaatagagcagttgaagaggtgtgagcctcttaaggagtctgaagtgaaggtcgttgcctcaaagccatggaaatccttgtcgaagagagcaacgttcaaagggtcgacgcccctgtcaccatatgtggtgatattcacggtcagttttatgacatgaaggagcttttcaaagtaggaggggattgcccca

SEQ ID NO: 78874 - DNA, 290 bp, Glycine max
  Clone ID: 700963616H1
ctcagtttctctccataaagaggctgtttaccttcggttctctcagccaaacctgaaaagacccttttgttaaaatcccattagggtttcaactactgtgctcttgaaggcagctcagggaattgcattgaaggttgcagcgttgaaacgcatacatgtgaaatctgaaactggcttacaaactctccaacggggtcagtttaaaaacccccaatggcccaaatgctgttcttgacactctcaaggactatggattctccaaaactgaggttgcaaaacttgtggagaag

SEQ ID NO: 78875 - DNA, 293 bp, Glycine max
  Clone ID: 700963617H1
tagagctgctgcgttgctaaaacgcaccggtttgttcctgttctcgttcaaaagaaaactgacacaagtgaggcttggtgcataaacatcaatggcagaaaaaccccaaccggttcgggttctctactgcggcgtgtgcagtttgccccccgaatacgcgaattcggatccgatttcgagaaatgcaaaccctggttgatccaaaacgtccctgacctataccctgatcttctcaaagagaaggaagctgataaagttgctgacaaactacaaagtacgggtatatctggagc

SEQ ID NO: 78876 - DNA, 290 bp, Glycine max
  Clone ID: 700963618H1
aaaccaccaagccctaaaaaagcattatcctccttctttgttctttgcttttctcttttctcttttcctctgaaaacacaccctctttacagatcctgttatttctctctctctctctccacaatttcttttctttcttgctttgtagctaccaaacaatttgctcaatatttctaaaggtttcagctttagatctgagggagctaaggttgtttgaagcaatggagacaccccatgtctcttgatctttcacatgagatgaaagtttcttgctttcttcttctttgacc

SEQ ID NO: 78877 - DNA, 286 bp, Glycine max
  Clone ID: 700963619H1
ctgcaccgtaacgtcgtcgctcatgatgacgctacggtgcgccggcgaattgaggactggtagagtgcgccaaggctgtttcctctcggaaactttgacgacgcgatgatcaccatgggaagctctccgcggtttcccatgtacgaaaacgacttggctggggcagacccgttgcgattcggagtgggaaagcgaacaagttcgacggaaagatctccgcgtttccggggagagagggaaacggcagcgtcgatttggaggtcgttttggccccggcgaccatggc

SEQ ID NO: 78878 - DNA, 288 bp, Glycine max
  Clone ID: 700963620H1
gtgaggtctcttatatcattgtattctgaagtgggaagaagtgcagactctttgtcccagtactttggggaggatccagctagatgcccttttgaacaagtgacgcaaatccttgttgtctttgtcaagatgttcaacaagtcaagggaggagatgaaaggcaggcagatgctgaaaaaaagaaattagagaaagaagcattgaaggaaaggacagcaaataactcgctttcaaaaaaagatggcgttcgatagatgcctaaacaagcaagccgcatggttactttca

SEQ ID NO: 78879 - DNA, 287 bp, Glycine max
  Clone ID: 700963621H1
attctcactatagagcccaaactccattccttttctttcttttttagtcacaagtgtagtgttgcattgagaaattaactaagactaattaaccaattagcaccaatggcgtcgaagaagaacacggttgtttttgaggactacttccctgcaagatggagaaactgggcactgaggggttcatgaaggagctgacaaacggatttcagttgctgatggacagagagaagaaggtgataacgtttgagagcttgaagaagaactctgcattgcttgggttggaaggg

SEQ ID NO: 78880 - DNA, 287 bp, Glycine max
  Clone ID: 700963622H1
atcggtgttcacttgatccttcataagtcgtcatcatcatcatcatcatcaccgttgattgaagaagatgccgatcagaaacatcgccatcggaaggcctgaagaggctactcaccccgacacgttgaaggcggggttggctgagttcatctcaccttgatcttcgtgttcgccggttcaggttccggcatcgcctacaacaagctcaccgacaacggcgccgccactcccgccggcctcatctccgcttccatcgcccatgctttcgccctcttcgtcgccgtctc

SEQ ID NO: 78881 - DNA, 190 bp, Glycine max
  Clone ID: 700963623H1
gattagttagctacgtgtcagggagtagttgtgtgcatcgaatgttcctatgaatggaacgcgtgctttaagtaaacgctgtagcagtcaaagtgggaatggatatcgattgggatggatttgcgaagttactgatctccgattaagatcataggtgtgctcaaatgctacgtcgcactattcgacgatg

SEQ ID NO: 78882 - DNA, 249 bp, Glycine max
  Clone ID: 700963624H1
agtaccctccttaatatgccttctctagttgggggaaaccatcagcagttttctgcccagcagcaaaatccccttttgcagcagtctggtattggacttggggtccagtccacaagtctcgttggtatttcttctgcttcactacagcagttaccaatcctgtccattccccctctagtcaacagccattgatgccaggtgtttctatagatgcagatgttggcaattctaagattgacgaacagcagc

SEQ ID NO: 78883 - DNA, 287 bp, Glycine max
  Clone ID: 700963625H1
attttgatgatgttgataatctatggcttgaacctctatcctggcagggaataggatgtacaaaaatcacaaaagcaagaaatgaaggttccatcaatgggaattcagaatcaagatcatatcttgaaaagaagcttgtgttttgttttggttctatgttgcatcccaaatgttacttccttttagggacgatacttactctctacatctgagatacagcaggcataagagatagctacacgaatggtcattcagtatgggagtggacctgatgacagtcctgcaat

SEQ ID NO: 78884 - DNA, 284 bp, Glycine max
  Clone ID: 700963626H1
gtttggcagaaagctgtttttgtgtaccagaactaatttcctcttcatttgctttaatcaggaaggacagtcgttatactgaaagagacgcagcggtggttgtaaggcagatgctcaaggttgcagctgagtgtcatttacatggtttggtacacgggacatgaaaccagagaattttctttttaaatcaaccaaagaagattcacctttaaaggccactgattttggtttgtcagatttcataaaacctggaaaaaagtttcatgatattgttggcagtgctt

SEQ ID NO: 78885 - DNA, 285 bp, Glycine max
  Clone ID: 700963627H1
attcacccgcacaacaaagtaaattacagtgcaggggctcaattatggagaaagcaattcaaagacagatagttctgcttgaacatcttcaacccatttcttcaagttcaaatttttcctctcaaacccatcaatctacggatctctcagcttcttatgttttgctgggaattcttcgcatggtcaaacaggtggatcagatgatgacgtggtgattgtagctgcatatcgtactgccatctgcaaagcaaagcgtgggggctttaaggatacccttccagatga

SEQ ID NO: 78886 - DNA, 289 bp, Glycine max
  Clone ID: 700963629H1
attccattttccaattcaaaaccctaactccgttcgaagcaccaaatcgtgatggcaccaaaggcagagaagaagccagcagagaagaagcctgtggaggagaagaaatcgacggtgggagacaaggctccggcggagaagaagccaaaggccggaagaagcttccgaagagggaggcgccggcggagaaggtaagaagaagaagagaaacaagaagagcgtggagacatacaagatctacatcttcaaggttctgaagcaggttcaccctgacattggtatctcaagc

SEQ ID NO: 78887 - DNA, 203 bp, Glycine max
  Clone ID: 700963630H1
acaattttcagcttggaaaatttttccatcctcagatttcggtgttgtcaatcttgtaaaagagcatatgttgtaggacccttcggagtctgttagtgtaaattttatcatgcttgagttattattggcttcacacataaattgcgtgtaactgtaaccctggctgagagccataaattcgaataaatcttttagttgctgcc

SEQ ID NO: 78888 - DNA, 289 bp, Glycine max
  Clone ID: 700963631H1
caacactttccacttgtctccgaattagttatcttgagaaacattattcccattgctatatattatggctagcatgaaggttacatgggtggttgtgatcatgtgcatggccgtggtgggtgcaccgatgatggcgcaaccatgacatgcaatgagtgacggtgaacatggcacagtgcctatcctacctgatgcagggaggaacaccttcaacactttgctgcagcggagtcaagaacattcttggctctgctgtcaccaccgttgacaaacaaactgtgtgcaactg

SEQ ID NO: 78889 - DNA, 249 bp, Glycine max
  Clone ID: 700963632H1
cccctgcttctgtcaactgcaatggttcctcaacctctgctaacccttttcctctttctctcccttctctcaattgtcaactcctctccttcccaacaccttcagatcgccaatgctgaacgcaggattgacttgacttctcacattattaaggtcgcttgacgttgcagggtgaaaattcggggaaatcttggacttcagctatgcgtgtcgcgcgatctatcgctcaggtggtatttctagcaatag

SEQ ID NO: 78890 - DNA, 284 bp, Glycine max
  Clone ID: 700963635H1
gcaaaatgctcctgtatcccttcctatggaaaccttcaagagttatgttctcaaggatcccatcggagttgttgcattaattactccatggaactatcctctattgatggctacatggaaagttgctcctgctctagctgctggttgtacacaatattgaagccatctgaattggcatctgtgacctgtttggagctggctgaaatatgcagagaagttggccttcctccaggggtattaaacattgttactggattaggcaatgaagctggtgctcctttgtc

SEQ ID NO: 78891 - DNA, 285 bp, Glycine max
  Clone ID: 700963636H1
aaaaaatttaaaattaaaaaaaagtgctctttttgtgaattttgagccatttgccaccgacagatttcgatcttctccgtgccaaagttgtaatcttttcgaattttggcgaggtgggtcgatctgatttcgctcgaataattgcgggttcattttgatctgaaaaaggaaaagagaaaaaaagattgggttatttctgattcaagattttgtccttttttgaaatggtctatttccatagctcaatctctctctgcaagttcgttgatcaatcatctttcatgg

SEQ ID NO: 78892 - DNA, 278 bp, Glycine max
  Clone ID: 700963638H1
tccacatctccagaagctgatatggacaatgaagagagaataatctacacttatcagaatgcttttcatggagttgcagccaagttaactgaaggagaagctaagaagctagaggctgaagaaggtgttgtggccatattccctgatacaagtatgagctacacaccacaagaagtccaatattccttggtcttgaaccagcaaaaagcactaacatgtggtcagagaagctagctggccatgatgttatagtgggagtggtagacactgggatttgg

SEQ ID NO: 78893 - DNA, 282 bp, Glycine max
  Clone ID: 700963639H1
cacagatcaacatttttttttttggtgggtagcagtgaggataaaaaatggctatggccacagctgtcgtgtgtcctcagaacatcaccggagccatcgtgagctcacctagcaagaccaagaagagagtggtacacgggagaggcataaatcatttgggggactgaaggctaacaatggtgttgtctctttggggattcctatgagcactgagaagtgctttgctaaggttgtgagctcagtgaaagcagctaacatcaaatgggaaaggaaaaggagggg

SEQ ID NO: 78894 - DNA, 285 bp, Glycine max
  Clone ID: 700963640H1
gtcgtttccccgatcccggcgaatcgaactccaacggttctagaaatcggcgaagaccaactgcgactagcgccaatgcggagttcgaattccgaatcctaagacggaaactggaatcgctggttccgcgatcctccgtctccggcgccgggatgactccgcaggtcgcgttgtagctcgcgactgatctcgccgaagcagaggttcgccgtctccagcttccggccggaattgcgtccctgaattgttccgtttttttatttgttgttttcgagagttgaaatt

SEQ ID NO: 78895 - DNA, 280 bp, Glycine max
  unsure (1)..(280): unsure at all n locations
  Clone ID: 700963641H1
attagttttgggccaaatttcgaacaccaaggaaaaaaatgatcttgctgactcaacaagtgcacccacttctcaccttttcctctacctataagtcttattctccattgcacccccatgttcaactcaagtcaggggctggtgnggttacccatgttcccaagtgcccattatgcccttttgcaaaggaaggtcttacaggatgatgaggatagggagcaggtgttcctcttctgctgcagcacaggctccgttgccatctgacccagataaggaaaat

SEQ ID NO: 78896 - DNA, 284 bp, Glycine max
  Clone ID: 700963642H1
gcagaatcttggagacaaagcagtgatgtgtcataggctaaatttcagaactgcagtattttactgccatgaagtccgtgaaacaacagctttcatggttccattggtggctggtgatggaaccaaaactcaggcacttgctatttgccatcaaatacttctggaatgaatcatcaaatgcttcatcaacttatgggagttgatcctggaactaaccctgtttgccatttccttggaagcaaggccattttatgggtacccaatttatctgtggacactgccta

SEQ ID NO: 78897 - DNA, 282 bp, Glycine max
  Clone ID: 700963643H1
gtttgaaagcaaaagggttgaggaacagaatgaggcaaaggcagctacaactgaaacagtagagagtgtgaaagttgataatgatagctcaatagttgatgacaagaaggaagagaaaactgactcaaaggtggaagaaatctctagagctttaatgaacctgttagagaaacattggcatctaaatttgaagaggaaactgttgaacctggagcggataaggtagagaaagaacaaactgtggagcctgagaaaactgaggaggttcaagccaccaaggaa

SEQ ID NO: 78898 - DNA, 284 bp, Glycine max
  Clone ID: 700963646H1
aagagagtgactgatgttctctcttttccgtatggtattactttctctgatgagctagcatctataattctgtttgaaccagatactcctgaggaaaagggtactttattctcatattggtagtagaggacgttatgatcctgtatggatattgcattttcaattcatagtctctcaaaggcttatgtagcgcctgtggaagttgctggttcagggtggcttgcgattgcatttgttagcttgactacccagaccataggataagaagattagcgtatggcact

SEQ ID NO: 78899 - DNA, 286 bp, Glycine max
  Clone ID: 700963649H1
cagttccatcaatgaataccggtgaagcaccggctctgaaggcagagcaagaaaaaactactctacaaaatcctcctcttcaagatcagatgctggatccagaatactcggtagctcaacaagctcaacattcagcttcaaagtcaccagctgcattttatcagattctgagagtggagatgccaagttaaatacttcatcaaaggttactgatcatgagacgaacaaaacaatttctgagcaccttgattccaacaaaacaaagggaagaaaaccggttgaccgt

SEQ ID NO: 78900 - DNA, 284 bp, Glycine max
  Clone ID: 700963651H1
aatacgtgcatacatagctatctatttatctatagcaagtacgtcaagagacacgtggtacccttgctagagtgccattctgtggtttctttctatctttctttctgcatcacatcacaatttgccttgcctcgtgtcctttttcttctttctctccaaaaatctcacacacacaggtatctagcaaatgggttctcaccaacaagaaccatggctattggagaatgggaaaccaagggttttgaccaaggcagacaggcatggccgttctgcacacagaatgt

SEQ ID NO: 78901 - DNA, 285 bp, Glycine max
  Clone ID: 700963652H1
gattaaagcaagtgtagagcattggagctctgctgtagcaagaacttggaagccgattgaacccagcatctggttgtaatatggagcaaagcactatggccatagttatcgcaaatgttggatggcattctctgtatcattggaatcgcaaaattctgattccctagtatgtgctttccttcccttcccccccccccccctcctttgctaggggttttggaatttggggctttcctaatatccaaatttcagttttaggaacaacaatggatcttggttttagtt

SEQ ID NO: 78902 - DNA, 217 bp, Glycine max
  Clone ID: 700963654H1
ggagtacagcgccacgggtgctccagtctatcgcggagtcctgcatggacgtagtctcgtcatcgctccccaagcttactccaccacgtaacgttaccagtttcctccatctgatacataccacacactctctattatcgctactcttactccctagtgagatgccggatgtggtagcatgatcaatctgagtgctgccaaatcacaacgctgggac

SEQ ID NO: 78903 - DNA, 274 bp, Glycine max
  Clone ID: 700963655H1
tctctctctgcttcacttgcttgaagcaatggccaaagccttggcatcagtgctgctgtttctcctcgtagctgtgagtaatgtgtttgctgtagagcttgaacttgaaactcttccaccctcttagcctcaccctcaccctgttcactccccacaccagcacctcttcacccaccagcagatgctcctcacccacaccaccagcaccaccaccagcaccctccatcaccagcaccagcagcagcacctgttccttcaccttctcaccacaatt

SEQ ID NO: 78904 - DNA, 284 bp, Glycine max
  Clone ID: 700963656H1
cttcttcccaaccactactactcactcactgcagatctcaattgcatcgctgtccatggctaccatcgttagcatcaaggcccgccagatcttcgacagtcgtggcaatccaactgtcgaggtggatttgacttgctccgatggtacttttccagagctgctgttccaagtggtgcatccactgggatttatgaggcccttgaattgagagatggaggatctgactaccttggaaagggtgtatcaaaggctgttgacaatgtgaacaccgtcattggccctgc

SEQ ID NO: 78905 - DNA, 283 bp, Glycine max
  Clone ID: 700963658H1
aaaaagtttgctgcgccctgatttccatgtttctgcacaaaactgttgggttcgcaaaggtggtgcttataccggtgaggttagtgctgaaatgcttgttaatttgggaattccttgggttattattggtcactctgaacggaggcagctttaaatgaatcaaacgagtttgtgggagataaagttgcctatgcacttcaacaaggtctaaaagttattgcatgcattggggagactctcgaacagcgtgaagctggtacaacaacggctgttgtttctgagc

SEQ ID NO: 78906 - DNA, 282 bp, Glycine max
  Clone ID: 700963660H1
cttaagtataagtctgaagaaggggtgagagtgttgttgctggtttcggatgataaaacttcgcacgataaggttttcctcaagacggctggtgtgatggggactcatgatgaggaaaccaggaagttttttaagcattcttctgttatggtgttctgtcgcctcggtatgccagcagcaagatgagcttcttgaagcaacaggagataggattctttgtgagctagttttcagtggagtcaaatgtgaaatgccctgtattttgtggcctaagctctaaac

SEQ ID NO: 78907 - DNA, 281 bp, Glycine max
  Clone ID: 700963661H1
agagggagtaacccctccaagcttcaattatctacattatccacattcctagctagctttatccacatctacaaaatagtccttagatttccctctctctttcttttgtataactgtgtcatatcttagatctcctttcacttccttcaaaaacaaaatcatgggtctgagagacattggtgcttcactgcctcctgggtttcggttttatccgagtgatgaggaattggtctgccattacctctacaaaaagatcgcaaatgaggaagttctgaagggta

SEQ ID NO: 78908 - DNA, 289 bp, Glycine max
  Clone ID: 700963663H1
gaaataccaagatgtacacatgtgcaatttttggtaccccaaaatgcttggagtatgcatgtatgtgaatttagccgaggagatgtgtgtgatgtaagtaacaaatacaccttggaagtacgtgtaaataatctaggtaacaaagctgccttgttgtatatgggtgcattttttcggttaataggatgtcttccgcaagtgaacgttcgtaaggaaacatgcgcataagcttgctctaaatttacattgatgtttgtatttatgggaggaggttatatgccatttttgc

SEQ ID NO: 78909 - DNA, 288 bp, Glycine max
  Clone ID: 700963664H1
agcaaatgcaatactactaaggcaaactaaagaaccaaacacaaatcctctcatttaccttgtctctctgccttcaaaattttcaaacaagaaaagaaaggaattctgctccaatataattacctctatatctattccacaatctcagattctgtcctagctcacaatggttacattcttcagaaatttggctttcagctatgcttttcttgcaatttttctctcagcaggtattggagtttttctaggtgttgaatctttcggaatcaactatggccaagtggccaa

SEQ ID NO: 78910 - DNA, 282 bp, Glycine max
  Clone ID: 700963666H1
taaacccctctctcttatcgaagaagctgagcgcaaagcagcagaaaatgggtcttgtgatgcaatgctcaagctatggcacttgtatttctatttgtatctctcatcgtttcccccaaacctctctatcttttcacggtgagttccttgctccttcaatcaactaaccgaacattacacttaattcgtatttctttccagttccagctcaccactggaaccgattcaagagtgcacgaaggaatcagaggatgatggttctttgtagcgtggacgaccgaa

SEQ ID NO: 78911 - DNA, 282 bp, Glycine max
  Clone ID: 700963668H1
tatctctcctctatccttcgtgcccacagtcaataatgtctcttccaactccatcgctcccccttctccgttgcatccattttcacgattccaatccattaaaaatagaaagccaaaaccccatcatattcctagaatcacatgcagtgaaaccaaaacaatccaacaccaaaccctaattcccagggagaacctccacatattgtaggacataggaggaacgttctacttggcctaggagggctttgtggtgctgttactcttaacaacacaacccttttg

SEQ ID NO: 78912 - DNA, 282 bp, Glycine max
  Clone ID: 700963669H1
accaacgcggccagtcccactcgctcccaacaacaagccacccaaagcccaagaacaccctcgtcaaggcccagtcccaggcccacctctttctccgacaacccctccacctcctacagcagcaacagcgcaccctacagcggctccacggctatcgcctctcctccgacaccaccatctcaagcttctcctccctcacctccctccgtgacactctccccgaaaaccctcacatctatgacttctccgaaatctgtgccgccaccaacaacttcctcgcca

SEQ ID NO: 78913 - DNA, 278 bp, Glycine max
  Clone ID: 700963670H1
ccaaaccaaagcatgccatcattcatggctttcctttcacatccttatttctttgcagctttgtctgcatctttgactcttttggtggtccaacttctgttcagaaaactgaacaaaaggcatagtagaaagaagtaccaccctgttctggcaccatcttcaatcagatgctcaacttcaacaggctgcaccattatatgactgatcttgctgccaagcacaggacttacaggctgctcaaccctttcagatatgaggtttacaccactgagccaact

SEQ ID NO: 78914 - DNA, 275 bp, Glycine max
  Clone ID: 700963671H1
ctgagctttgattagtgtggcctagttgttgttttctcgatgagaaaggcatcttccactatgcattgcgcacttctgcgcttttgggttcccttgttgctgcttgctagcttcagctatgctccttctgtttcggccacaactgaatttcagggaatgaagtgaacacagatgggaaggtgataaatgaagagttagcaaaaccaagtctaaaaggacatgatgaagaagcaaagttcaaaggattttttccaaaaccaattcctatagttaaa

SEQ ID NO: 78915 - DNA, 278 bp, Glycine max
  Clone ID: 700963672H1
gtcaagctccttttactccccgcaacaaaacatttcctagttgcagattttttcttcttcaaaaatttgtttatctttatcctaatttgatttggctttaaggttttccattatagcggttttctttttattatttgttgttattatatgacgtaatttcaatccttttcataatgactccataatggcgattagtgaagtttctgagctgtgtgaacgatttagtataaagtatacgatgcatcgtttctggttctggatgttcatgttcgagcaaa

SEQ ID NO: 78916 - DNA, 277 bp, Glycine max
  Clone ID: 700963674H1
attcaattcaacttccaaccattatttaatccgcaactataaattcaagtcagagtcctaccgaaaaaaaaaaggtggcgaatcggaatcgagttacaatgaaatcaaatgatgttacacgttggttatgttcgatactattttgcaagttttagtttgtgttcaatttgaaggatgtgtgggatccaagactaagaaaacggacgaggcatacgtcactcttttgtacggggatgaattcttgttgggtgttcgagttctgggcaaatcaatacgg

SEQ ID NO: 78917 - DNA, 279 bp, Glycine max
  Clone ID: 700963675H1
gtgagagaagaaaagtggaataaattcacccttgatgtgtaaatttgactgtttttagtgctttgtgatcaatgtagccgacaacttgtagaataaggcctttgttgttgttgttgttgttgtagtgctttgtgagtgttaatttatagcctatagcacagatgaagatttgttgtgtattatttaagtatgcttaactattttcatttcttgtttcaacaaatcaaacattgacaatcaaatagaggttagagaagctactattttccattcaacctt

SEQ ID NO: 78918 - DNA, 277 bp, Glycine max
  Clone ID: 700963676H1
attttctctacaccaagtctcatgcctcaaagtttctgcgtttaactcggctgctatatcttttctcagctctcctttgatatgtttaagctctgatttggaccttattgaggatatctttggttagggcgagtgattgtctaagaactcctcattctccttctccacaaaatttgtcctcctaaaagaggattgtcccacttctaccaatatcatagcatctgatccatatgaaagtcaaaaaggggtctcacctattgtcgactgtagagtgtaa

SEQ ID NO: 78919 - DNA, 223 bp, Glycine max
  Clone ID: 700963677H1
ttcatcaccaaagcgttcaatccagacgcagggcgagatacgcactgacggtacctatacctgacgatgtgacatacgtatatcttctaactagccaggtccgtagtacctggtctgccgcggtagccctgatccgaagatcgtgaatcatgatgatcgtatgcagtagacgggtgcacatggagttcgctcctaaggccatctcgccagtagggcgtgctca

SEQ ID NO: 78920 - DNA, 278 bp, Glycine max
  Clone ID: 700963678H1
atcattaaccaataaccaataaatacattaatcaccatggggaagtactttgctgttgttgctctctttgtctcagctttgtgcttctcctctatcttggctcgtaagacacctgcccttgataaattcttcgttgagggcaagatttctgtgacccttgccacttcgcatttgagtccaggctcagtttccccttggaaggtgttaaggtaagcctgcaatgtctgaggagtgagaatgataccgtgacatatgtgaaggagggcaaaactgatgca

SEQ ID NO: 78921 - DNA, 283 bp, Glycine max
  Clone ID: 700963679H1
tggaatgtagagtggagcttcttcccttgttgctgttgttgttgatgttggtgaacgatcaatgttggaaatggagaaggatgttgattccaagctgaagattcacgggaattcctcatctaccaatggtgctgggaatgtacgaggatcaaaagctttacttttagggcaccccaggagaattacactatccaggactttgaattggagcatatctatggtgttggctcttattctaaggttgtgagggcaacgacgatggacactggaattgtgtacgcat

SEQ ID NO: 78922 - DNA, 283 bp, Glycine max
  Clone ID: 700963681H1
gcaagctcatcctagagttttaaaaatggcagcagcctcctccatggctctctcttccccatccttggctggcaaggccgtgaagctgggcccatcagcccccgaagtcgggagggtcagcatgaggaagaccgtcaccaagcaggcctctccggaagcccatggtacggcccagaccgcgtcaagtacttgggcccattctctggcgagcccccgtcctacctcactggcgagttcccaggtgactacggctgggacactgctgggctttcggccgaaccag

SEQ ID NO: 78923 - DNA, 245 bp, Glycine max
  Clone ID: 700963682H1
gtttgtagggaagacaatatgaaactgctattattttaaagctctaaatgttcaatccaactaaatgcccgatgattggtgtttcttttttaaaaaaaaaaaaaaaaaaaaaaaaaaaaaaaaaaaaaaagtaaaaaaaaacaaaaaaaaaagggggggggcccccaaaaaggagccctccccggcgggatatatcgcgggggggggtagggaggggggcacatttttcccaagaaggggccctt

SEQ ID NO: 78924 - DNA, 281 bp, Glycine max
  Clone ID: 700963684H1
cccgtttcgccttcgatcaaagggaagaacaaacattcaattcatggcggctgcaaagcttcaagctttatggaatcacccagctgggcctaaaaccattcacttctgggcacctacctttaagtggggcatcagcattgccaacattctgatttctcaaaaccacctgagaaactttcctatcctcagcaaatagcggtcacagctactggaattatctggtctcgttacagcactgtaatcaccccaaaaaattggtacctgtttagtgtaaacattgc

SEQ ID NO: 78925 - DNA, 280 bp, Glycine max
  Clone ID: 700963686H1
gttgcacacggcgcaaaggggaacaagaagaagaagatggtgtccttgaagcttcagaagcggctcgccgctagcgtcctaaagtgtggcagaggcaaggtctggctcgatccaaatgaagtcaatgaaatctccatggccaattctgacaaaacataagaaagttggttaaggatgggtttattatcaggaagccaactaagattcactctcgctctcgtgctcgtcgaatgaaggaggccaagaggaagggacgtcactctggctatggtaagcgtaa

SEQ ID NO: 78926 - DNA, 282 bp, Glycine max
  Clone ID: 700963688H1
gccaaagcatggcttctctctcttgctccgccaacgaccttgccccactcttcaacgacaccgccgccgccaactacctctgcgcccaattcgattccatttctagaaagctcgccgaaacaacctacgccgtcgacaacacctaccttctgttttcagcgtatcttgtcttcgccatgcagctcggcttcgccatgctctgcgccggctccgtcagagccaaaaacaccatgaacatcatgctcaccaacgtcctcgacgccgccgccggcggtctctcct

SEQ ID NO: 78927 - DNA, 278 bp, Glycine max
  Clone ID: 700963689H1
cgcatgatagaggcatgacatttgaggaagaacaataactaagcactaaccttcaaagttttccttcagagaagcttgatgctattgtacaaatcattaagaagagaaattcagcacttcacaccatgacgacgacattgaagtggcattgatagtgtggatgctgagactcgctgggagcttgatagatttgttaccaactataagaaaagtttgagcaaaaacaaaaggaaggctgaacttgctcgagctagagcagaagctttgcagcagaatgc

SEQ ID NO: 78928 - DNA, 280 bp, Glycine max
  Clone ID: 700963690H1
aaaaccgtgaccgtgtgtagaaccgacccgtataagaggtcaaatgatatcattggtaataaccaagtgatatgcaaggttgaggttgaaagtgaatgctcaattgtagacactgatttgacaatcttagctagcatgcttgtggataaggagtggatgagaggaagcaaattgaggaagccattgagaaagaccaaggtgtgagtgatttctttgtgtatggtgtcaatttgacatttctagacttggaagacaccaatgtgtatgacttgcaattgaa

SEQ ID NO: 78929 - DNA, 291 bp, Glycine max
  Clone ID: 700963696H1
acgtatttgcctcgtagtaatgcaagtttgagcgacagatccaaccttttcggctgaaagagcttcccttcatctcttccacatttcaatattgtcttttcttcttttatgtcatcaaaacacaaaaaagcatagtcaaaagctatcacttatacgcttatagttgttccaacacacaaagtgtgtgtgagtgtgagagagagacaaagagagtagtgatgggtggttgtgaagtagagtttgaggcagatcagtgcaagataccaaaactacccttgttgaaccctccaa

SEQ ID NO: 78930 - DNA, 250 bp, Glycine max
  Clone ID: 700963702H1
cgctcttgttcctccatttgtcttgcaaactttctgtcgcacaaataactctaaactaagcacttccatacacaaattttctctcccagaagaaatattttcatttcatttcgagtaaaagtaaaacacagttcctgatccatggcatctcgccgccgcatgttgttgaaggtcataatcctcggagacagcggggttggtaaaacatcactgatgaatcagtatgtgaatcgtaaatttagtaatcagt

SEQ ID NO: 78931 - DNA, 261 bp, Glycine max
  Clone ID: 700963704H1
gaagcaataagatgaaaatgaaagtgcttgttttgtttgttgctacagttttggtagcatatgaatgccatggctcagactaccagaagttccctctccaaatgaaaactgggtttggtgggcaatacagcaatgaggtggcatgtgccagttggaggcttggcgtggaagcaaacaacgtagtcaagtggcaaactgttcctgcagcttgcggagagtacatagctgactacgttctaggagaccaatatagatcagatt

SEQ ID NO: 78932 - DNA, 262 bp, Glycine max
  Clone ID: 700963705H1
aaggacacgggcattgaagatcctgaggttggaccagctattgcctttgctatcagagagcagctttatgagattgcaattcaaagtgtggtttcagcaagagaaagcagaatgagcaagaagggtcgtcgaggggctgaatatactccagtcagtaaaggaggtgcagcagcagtggacttggtcaagttgtttggtccgaaatctagtgtagttcggaaaagaaaggagtgggacgtatatgaacctattgtggacctac

SEQ ID NO: 78933 - DNA, 263 bp, Glycine max
  Clone ID: 700963707H1
cggctcgaggtatatattgatatatgtgtgtatttcctttgggcttgaaactcaaaactataataatgggttcttcttctcctccggacactagcaagagcataaagctagagcgatacaacagctacatcaggagactcaacagcaccaaactcctcaacgcctcctccaaactcctcttccgtgccactatcttagtcgcactcatcctcgtcttcctcttcaccttcaactaccctcccctcgccccagacttcacctcc

SEQ ID NO: 78934 - DNA, 262 bp, Glycine max
  Clone ID: 700963708H1
caccactttatatacccacgcaatagaagggagtgctactctcttcgccgctctctctctccttctcgctctttcagctttgacttttgttggaaactaaggcctaatcaaaatggtgaagttcacagctgaagagctacgtcgtattatggactataagcataatatccgtaatatgtctgtcattgctcatgttgatcacggaaaatcaaccctcactgattctcttgtggctgctgctggtattattgctcaagaagtt

SEQ ID NO: 78935 - DNA, 259 bp, Glycine max
  Clone ID: 700963709H1
ccttgagctaataattttgcacttatattcctgcctttacttggattctgtcgcaaaaggcaaatacatagcatcttgagcagttgagcaattgagctatcatacaaaagcaagcgaagagatcagttatgatgagcaattccaaacaaaagaagaaattgaaggcacacaagaaaaaggatgaatggttgaaggacatgaggggtaacctaagtttgctggctaccgtaattgcaactatgacctttcagagtgctat

SEQ ID NO: 78936 - DNA, 261 bp, Glycine max
  Clone ID: 700963712H1
ccctccttctatctttctgtgcttcaattctctcttccacagatgggcgttgccgttctttaccctcaagattctctcccacacaaaccatctactcattaccagaccataatccctcactttcccagcatgaaccccaagtctcatcggacttcccgaaaccgtaagaagcggcccgttcccggcccagctcggcccacaacatcctcgaaatcccaagtcaacaacaagccgccgcagcagcttgtcatgggtcaggtc

SEQ ID NO: 78937 - DNA, 260 bp, Glycine max
  Clone ID: 700963713H1
taaacatgagttttcagaactggtaaagcgggggtctacagcagaggacttaggtgcaggtcatgctgaagctgcaagggttcaaggtcttggttttgcaagagaaccacgcccttgggaagaatccggttcttctaagctttcacttagtgacacaccagctgaggtggaaaatgtatctatgccaaatcaaccagcaccaaagactgaagatgattcagaagatgaaagtagaagaaagagaagacgtgaggagagga

SEQ ID NO: 78938 - DNA, 254 bp, Glycine max
  Clone ID: 700963714H1
gaaaaatggcaacaatcatcgccggcaccccaactacatcaatcactcgcacaggtcatgtgctcaaacgacctgttggggcctcatcctctaccgttcttggtaagttttctccttaagagaaatgatattatgatttaaggctttagggagataataatatgatttctttctatttctagaataaaagagtaattaatctcttcccatttctgattgatttccttgtgctcaaaacgatgcatactcatgtt

SEQ ID NO: 78939 - DNA, 52 bp, Glycine max
  Clone ID: 700963716H1
gctgtaacaagatggatgctactacaccaaagtactccaaggccaagtatga

SEQ ID NO: 78940 - DNA, 261 bp, Glycine max
  Clone ID: 700963717H1
gcggttagcttcttcattcaatcctggtgcatctcagaaagacgtcccctgtactgtgcaatgttcaaccctttggcaacagtcatcactgcattgataagtgcaactttcctagaggaataggtgtacgttggaagtttggtaggggctgttggagttattgccggtttatatgttgtgctttggggtaaagccaaagagtttgctgagattaaaccagaggcaccacaatcatcaaacttactagatgatgagataagt

SEQ ID NO: 78941 - DNA, 261 bp, Glycine max
  Clone ID: 700963718H1
ggaaaagggtgtcatctttttagggtttccttgtgattcttgagactttaccttttctgggtttctttctcatgactctctttcttctttcttgtgcttagagataaaggggtgtttttgtttttttgaaatttgtttccttttaactggtggggttttagtgcagtctgtttttgttcagataaagtttgtattttttttggtttttggtttttgttttaatgtttttcagggctttttctctctctcactagagttgac

SEQ ID NO: 78942 - DNA, 251 bp, Glycine max
  Clone ID: 700963721H1
caaggttgaaccatgctcatttgctcaaccttctagggtattgcgaagaaggtgaagagaggcttcttgtgtatgagttcatggctcacggatctttgcaccaacacttgcatggaacaaaccaagtgttgagagagcaactagattggataagaagggtcacaattgcagttcaagcggcacgtggaatcgaatacttgcatggatatgcttgccctccagtgattcatagagacatcaagtcctcaaac

SEQ ID NO: 78943 - DNA, 184 bp, Glycine max
  Clone ID: 700963722H1
cttattccctcccaaacattaatctctttcgatttttctcctaaagctgcttcctttcgctttttttctctactgggtacgcctccacctctccctttcttttccctctttttggctcaattctcgttcttccgttctgatctcaaacacctaactttatgtttctccaattgttttcaccagt

SEQ ID NO: 78944 - DNA, 260 bp, Glycine max
  Clone ID: 700963725H1
aaaaaaaaagaagagaaaaacaaaatgggcagggtttggacttcgatgatagcattgttgctttgcctgatgacatcatcggttcggggcgaggacccttacatttactacacatggaacgtgacctacggcaccattgccccattgggtgtcccccaacagggtatcctcatcaatggtcagtttcccggccccgaaatcaactccaccagcaacaacaacgtggtcatcaatgtcttcaacaacctcgatgagcctct

SEQ ID NO: 78945 - DNA, 259 bp, Glycine max
  Clone ID: 700963726H1
ctatcttcttcaccttgctctcaccttctgggtaatgtttgaaacttggtgttagctgagctgtttgacaaaaatgaatattgcacaagttacagcatggcagcctgggatttgtgtgaaaaatatgtctcagttgcaccggcttcaatctaaaccatgtgttataccaaagagttttggtcctctcacttgtgttctactgagcttaagagcaagacaatcgtttagctcgaaatgttggcccattatacaatctcgg

SEQ ID NO: 78946 - DNA, 259 bp, Glycine max
  Clone ID: 700963727H1
gtgaattcttatacttatctatgtagtattcttttgattatcttttactcatataatacttccaagaattccatcaaagctaaatctttcaaggtaatttaaggtatttaaatctgtgattgcagttcattggaatttttcaagaaacaattgtgcaagaactggttggggagctggtaagtacacattgattttgaatgctgatgacaaattgtaatgttttataattagggaactaaaaacaaggttaacagaacga

SEQ ID NO: 78947 - DNA, 258 bp, Glycine max
  Clone ID: 700963728H1
cggctcgctaaccccagctacttctccctcatccactcacaaaatgtgccaggccctctccgccccatcgcctccgtgtacggctcttctctccttccttttcttcctcctcacggtggtgggcccggtctcggtctcggcatggcggccgtggccccagaaaaacaatatgaacaccaccgattacgccttcggggactccaagaaatacgaggggtcctcggagttcgtgaagctgaggtaccacatgggaccggt

SEQ ID NO: 78948 - DNA, 262 bp, Glycine max
  Clone ID: 700963729H1
cgctcttgtccttttgccacgcttaagatcacccaagagagaacctaagacacacaacacaacacacagagagagtttgaggaagaaatcatcatggcttcagcagcatctgggtttgtgctgtctcttaatgttgcagcttccaccacaaactcaagggtggtcttgttcaacacaaagaaccacgcttctaggcttcttgtgagggcttcagacgagcctgcagcggcggcacccgcaaccaccacccctccagctgaag

SEQ ID NO: 78949 - DNA, 259 bp, Glycine max
  Clone ID: 700963731H1
ggaattgatgatgggaacttcctcaatgtttggtcctaaacacaccactcttgattttctaggattggggatggctgccggtggcactgctggtggaggcttatctgcacttatcacatctattgggggtggtttggatgtaactgcagcctttggcaatggagatttttctggcaaagatattggaagtagctcttgatatgatatcttttggtagtaagcaagaactgcacttatcagggcaaaagtatatgatggg

SEQ ID NO: 78950 - DNA, 81 bp, Glycine max
  Clone ID: 700963732H1
gtagccaatcagtgtttgggctctttttcttttagacccaccctttctcttctcttccctttcaacttcaactcaacaggc

SEQ ID NO: 78951 - DNA, 261 bp, Glycine max
  Clone ID: 700963733H1
aaatcacatagctagttgtttaaagtaagagagaagaaagaagcaaatggcaaactttccagttgttgacatggggaagcttaacaccgaagagagacctgcagccatggagattataaaagatgcctgtgagaactggggtttctttgagttggtgaaccatgggatatccattgagcttatggacacagtggagaagctcacaaaagagcattacaagaagactatggagcaaaggttcaaagaaatggtgaccagcaa

SEQ ID NO: 78952 - DNA, 261 bp, Glycine max
  Clone ID: 700963734H1
aaaataggaagcaacaacagcaacagcagcagctatagaccctagggaaatgatacaggaagatcaaggacagtgttcttctcaagcgatcaataactaccaccaagcctatcaagagcagcttctccttcagcaacagatgcaacaacaacaacaaaacaatgatatctttggtggaggaggaggattgaacatgtaccctggtgctgaagtttctccaatcatgaatcatcatcatcaaccatggtctatgactatgcc

SEQ ID NO: 78953 - DNA, 260 bp, Glycine max
  Clone ID: 700963735H1
atccacttatctgaaattctgaacagtacagttcttgcgttgtttcggaggatcaattgtttgattaagcaaaaaacttaatagtagttaaaagcaaatggggaatcttttttgttgtgtgcaagttgatcaatcaacagtggctataagagaaggatttggacgatttgagaaggtacttcagccaggatgccattgcatgccatggttccttggaaaacaacttgctggtcatctctctcttcggctacagcaactgg

SEQ ID NO: 78954 - DNA, 260 bp, Glycine max
  Clone ID: 700963736H1
atcttgctctatatcaaggcataataatgtttggtctgaggccacttcctcggaatctgttgaaatgctattaaaatctgttggacaggaggaatttatccctagagaaactgttatacaggagtctgatgcctgtgatgaactggtatgcttagctaagcaaatggagcccgatccaaaacctgatggtagaaatgaatttaaaaataatattactgatttacagcctacaggttttattgatgagaacttggctggat

SEQ ID NO: 78955 - DNA, 260 bp, Glycine max
  Clone ID: 700963737H1
caaatttgtagttgaacaacgatggtgctgccgctatttgctgctttcattctcttttttgcttttattccgaatggattgttagcagttccttccaccgtccccgcattctattggtcatcacattatgaactggcctctgaaaatggattgaaggaatctgtaaattaccaagtcatttctccaaaagatctagcaaaatctgttttttctgaagcaggctggtcaaattttctgtgcaaaggaaagaaacttcatga

SEQ ID NO: 78956 - DNA, 258 bp, Glycine max
  Clone ID: 700963738H1
gccataaagaagtttaatgttgcgaagaatgcccttgcacaagttgcatggaactttgttaatgatgggctgaggacatcgctctgcctgcaatttaagccacatcatattgcggcaggtgccattttccttgctgccaagttcttgaaagtgaagcttccatcagatggtgagaaggtttggtggcaagaatttgatgtcaccccacgtcaattagaggaagttagcaatcaaatgttggtaatctacgagcagaat

SEQ ID NO: 78957 - DNA, 259 bp, Glycine max
  Clone ID: 700963739H1
tcctcactcaagggttagggatgcgtcggaacagccctgcatactacagtcctccgcggcgaggatacggcggtggtggccgaggaggaggaggaggaggaggaggaggagggtccggcaggagggggttcggtggaggcaggcgcagggacagcaatgggagcctcttggttcgtaacattcccctcgattgcagacccgaggagcttcgcgtccctttcgagcgatttggacctgttcgtgacgtttacatacccaa

SEQ ID NO: 78958 - DNA, 257 bp, Glycine max
  Clone ID: 700963740H1
atccacttatctgaaattctgaacagtacagttcttgcgttgtttcggaggatcaattgtttgattaagcaaaaaacttaatagtagttaaaagcaaatggggaatcttttttgttgtgtgcaagttgatcaatcaacagtggctataagagaaggatttggacgatttgagaaggtacttcagccaggatgccattgcatgccatggttccttggaaaacaacttgctggtcatctctctcttcggctacagcaac

SEQ ID NO: 78959 - DNA, 259 bp, Glycine max
  Clone ID: 700963741H1
gcaggaacttatgatgagaagagattgtttggtgttaccacccttgatgttgttagggcaaaaactttctatgctgggaaagccaatgttccagttgctggtgttaatgtacctgttgtgggcggccatgcaggcattactattctgccactattttctcaagccacaccaaaagccaatcttgatgatgatgtcattaaggctcttacaaagaggacacaagatggaggaacagaagttgtagaagctaaggctggaa

SEQ ID NO: 78960 - DNA, 258 bp, Glycine max
  Clone ID: 700963743H1
gacagcgaacagagtttgagtgagtagtatggatcccgacggcgtggtcgcggcggaggcgcttatggcgtcgggtcggagttcggagaagctgagccttccatcactccaatccaaaatgaagtgcgatcccgaaggctacgaatcggagctactccttctctacaaccaattcaattcctcgctcgaactctttcagaaacaagccgccatgaacttcacctccatctccggcatcggcagcgaccccaccgtcgc

SEQ ID NO: 78961 - DNA, 256 bp, Glycine max
  Clone ID: 700963744H1
gcgctccgtttggttacagaatacaaacaaacaaatagaaaacccaaaataaccgagaaaagaaaattagatagagagaagaagaaagcgtatctggaattttcgtttcgttggtgtgtcgtgtgcgtgtggaggttcttttctttgagactttccttcaaattctagattgcttccctttcttttctttcccttataaccaccaacctctccctttcccccttttcatttcttcctcgattttccatttccataa

SEQ ID NO: 78962 - DNA, 259 bp, Glycine max
  Clone ID: 700963745H1
gcagagaggactttttcgctatgatgttaccgcctgtgaaaccaaggtgattcctggtgaatatggtttcgttgcccagcttaacgagggtcgtcacctcaagaagaggccaactgagttccgagttgataaggtccttcaaccctttgatgaaaacaaattcaactttaccaaagtcgggcaagaagaggtcctcttccaatttgaagctagcgaggatggacaagtccagttctttccaaatgctccagttgatgtt

SEQ ID NO: 78963 - DNA, 245 bp, Glycine max
  Clone ID: 700963746H1
aatggtttgagcaaaagccgaaaacctctgttgaagccttgccagatgagtgtctctttgagatctttaggaggttgccttctggggaagacaggagtgcatgtgcctgtgtttccaagcgatggcttatgcttctaagcagtatttgcaaaaatgaaatctgtgttaacaaaaatgccactgtagagaccattgaaaaggagggtgatgatgtagaatttggaggtgagggatatctctctcga

SEQ ID NO: 78964 - DNA, 262 bp, Glycine max
  Clone ID: 700963749H1
ctgaattctgaaaaaactggaacatgtcttcaactactgtggtaggctctatttctacaacagcagctttgacacccttgttgccatcatcacgtacaagtagaagcacatttggcgccaattccacctccacaagcttccccgctactccactctcctccaatctcctcttcttcaagctcaatcacacttcttcttcttcttccaaacgaacctcaaccttccatggcttcaagcgcttttcacccgtcatggagtggca

SEQ ID NO: 78965 - DNA, 258 bp, Glycine max
  Clone ID: 700963750H1
caaagacaccgatttaggggttaaaaaatatcgattaacctctgatatttctcttagctgcagtctgcagtgagaatcggaaaatctccgaacccgctacttcctatcctttcaaaagagtgtgactgtaatagtgagctaaacaacatcggcagctagatcgtcgaagaaaacgaaaaagaaaagctttgaaaatggctcaggagtcactctcagaaacccccgatatctcgcccccttcgtctactgcacaatcgc

SEQ ID NO: 78966 - DNA, 261 bp, Glycine max
  Clone ID: 700963751H1
taccactattcaattctctatatttaacctctttccctcattctcttctttcactttcacttcctcatggcatcaacaaagagcatgttcatgtccttcgccatcctcctcctcctcgctctcttctccgccaccgtgtccgctcagggctctccaacaccggctccggatgctggagcagctggatcagtctcgagctctgcctccgtcatcggtgctgcggttgtgttgtccatgcttgccatcttcaagcactgagtg

SEQ ID NO: 78967 - DNA, 261 bp, Glycine max
  Clone ID: 700963752H1
ttcaattccaactcctctgatcaaaatcctaggctcgttcttgaatccctaattcgatctcctcctcctcctccgaagaataaaaggaggatcgatgtgggcagcatcttgcctggcgtcgtgctgcgcggcctgcgcatgcgacgcctgcaggaccgtcgtttcgggaatcagccgtcgttccgcccggatcgcctactgcggcctcttcgccttctcccttgtcgtcgcctggatcctccgcgaggtcgccgctcctct

SEQ ID NO: 78968 - DNA, 258 bp, Glycine max
  Clone ID: 700963753H1
gtggctgtattgtttgatgatggagctaaatgtgatatcactgccttggaaagagagaagcttttaccactgactggtaattttcctgaagattcgcagtttccgtactatccagggcagagagtaaaggttaagtcctccagtgcttctaaatcaactagatggctatgtgacacttggagagacaatcatgatgaaggaactgtttgtgctgtggaagcaggcttggtgtatgttaattggatttctcatgttcta

SEQ ID NO: 78969 - DNA, 262 bp, Glycine max
  Clone ID: 700963754H1
ttcatatcatatcattcacattcatctctcttcttccatccatcatcgaagatataacaacattcgcgcgctcttcgtattttccttcttcaatccgcgcgacaccaaaaccctagatccggcgcaatcatcgggagagagaaagtttttgactttgagacaatattgctagagagaggaccggtggtgggcttggcaagaaatggatcctggtcgctatgctctgcatcaaggctgggataataacagcgctcttgaggga

SEQ ID NO: 78970 - DNA, 258 bp, Glycine max
  Clone ID: 700963756H1
gcgcaagtgaggaacaagcaagtgcttctaaaggactatgttaccggttttcccaaagaatccgacatgaatattgtcgaaagtaccataacattgaagcttccacaaggttccaatgatgtcttgctcaaaaatttgtacttgtcttgtgatccgtatatgaggaatctcatgaacaagcccgaaggccctcccaatagtcgtgcttacactcctggctctccattaataggatatggtgtgtctaaagtcctggaa

SEQ ID NO: 78971 - DNA, 258 bp, Glycine max
  Clone ID: 700963757H1
tggctctgttctaccatggccttaaccagacagaacttgcacttcgccatatgtcccgtgcttttctattattaagtttgtcatcggggccagatcatcctgatgttgcagcaacatttatcaatgttgcaatgatgtatcaggatataggaaagatgaacacagctcttcgttatctgcaagtagctttaaagaagaatgaaaggcttcttggcgaggaacatattcaaactgctgtttgttatcatgctctggcta

SEQ ID NO: 78972 - DNA, 255 bp, Glycine max
  Clone ID: 700963758H1
gcagaaattggctactacggcgagaaagaatggtacttcttttctcctcgggatcggaaatacccgaacggttcacggccgaaccgtgccgccggaagcggctattggaaagccaccggcgccgataaggcgatcggaaaaccgaaagcgctagggatcaagaaagctctggttttttacgccggaaaagcccccaaaggagtgaaacccaattggatcatgcacgaatatcgcctcgccaatgttgaccgatct

SEQ ID NO: 78973 - DNA, 257 bp, Glycine max
  Clone ID: 700963761H1
ggtacttagcattccaatcgaggaaggtaattcattaagtgtactgatgggaaaggaaaatggtgagattgtagaaacagatagtgaagagattgttgagattgagatggatgtcaacaaaatgcatgaccttccagttgaggaagatggtacaaagagtgtactgaaggacagaatgaatgcatatatacgctcagatgtgagacatgctctagaaacaatagagagggttatttcagtggttagagaatgtggat

SEQ ID NO: 78974 - DNA, 259 bp, Glycine max
  Clone ID: 700963762H1
ggacaggtaaggaaatttcttgttgagttacgtgcttacttaaacacgaataaacctcaattcaaagaaatcatatcttctaccaagacattcactggggaagcagaagtccttttgaaggaagctattcaagaacagatggaactctttttactacaggaacaggtagaaaaaaattgattaatcatttaataactttataatttcactttcaaattcttataattagtatcttttaatatctttttatttcatttga

SEQ ID NO: 78975 - DNA, 258 bp, Glycine max
  Clone ID: 700963763H1
cagctaattggtatttaattagacaaccaaagccgcaagagtcagtcagcaaggaagatggcaacaaccttcaagtactttacttccatcctcttcctcaccctcgtcatcaaagggtcatgtgatgactgttccttgaacaacatcaatattggcacatcaagaactgggagagaaatccagggccagcctgagtggaacgtgaccgtgatcaacaattgcaactgtgaacagagtcagataaagttgtcttgcaaa

SEQ ID NO: 78976 - DNA, 261 bp, Glycine max
  Clone ID: 700963764H1
aggatttggcaaaaagtagccatcgccccaacgatcccatttcccttgacttctctacgtgaagatccttgtgtcacatagagatagttaaaatgtccgagggaaatgcagggaaaggaaagagaatcgccatcattggcgtctcaaccttattgttggtggctatggttgtggcggtcacaattggggtcaatctcaatgagaatggttccaacaatgatatagaggacaacaagaaaaatcatgttgcttcttccataa

SEQ ID NO: 78977 - DNA, 259 bp, Glycine max
  Clone ID: 700963765H1
attaaattgccaacagatatactgagccaaattagccccttaccagccctcaaggaaatcttccgcactgatggtgaaaatgttcttcaatttccaccacctcatgtagccaaagttagtaagtctgggtggatgactgatgaggaatttgctagagaggtgattgctggtgtaaacccaaatgtgatccgtcgtcttcaagaattcccaccaaagagcacacttgatcccacactctatggtgatcaaaccagtacca

SEQ ID NO: 78978 - DNA, 256 bp, Glycine max
  Clone ID: 700963766H1
ggtgtttgctgtagattcacaatcatctggttatggactatgaagcagacactctcactcatacgtttattattgtatacataagctccaagatttataatttataatatcttagtatatgtcatatgtgccaattaaggttttagactgcattgtttcgtcatgatccttgacattgcagcctaaattgttgttgaagaccaattttaaaaccttgttgccaatacttgtttgttactaagcccctctggaacaa

SEQ ID NO: 78979 - DNA, 258 bp, Glycine max
  Clone ID: 700963767H1
gtgaggaactggagagaacctgagcttacatggacaaagttgtgcatgtgaaaactaatttttaattttgctgcctaatttcttgatcttttgcaggctcaagagagatgttcacattttcataatattcatgttttgattatcttatttgttccatgagttaactgatgtctggctgtctgagtttaatgtgacttgtgcaggttttgaagcatatgctaccaaggagcattcaaaacatttgtgttgcaatactga

SEQ ID NO: 78980 - DNA, 257 bp, Glycine max
  Clone ID: 700963768H1
gcggcgaggaggatatggacgacgacgacgagatccagtcgcatccttcgccggcgagcggatcccctccgtcgtcgccgaggtcgaacggtcggataacggtgacggtcgcggctccggcgccgcaggcagccaccaccgccgaatagtctggcattagcgcttccgattcagcagccggcgaaggggaacggcggaggaggaggaggaggaggaggcggtggagagagggatgattgctggagcgaaggcgcgac

SEQ ID NO: 78981 - DNA, 256 bp, Glycine max
  Clone ID: 700963769H1
gaattttcgtggaacctattgtgttgagctgcgattgcatgtgggaatcgatttctgcagattaatcttggaagtttgatgtgattgcttggttttggtttgaagtggttttaatggggaatatactgaatctaaacaattcaaagactagacggaatgattcccatggggtcttgcaaggtgaatcctgcaagagacagaggttgtcaccaaactcttgtgaggacaacccaagactgattccgtcccttcctga

SEQ ID NO: 78982 - DNA, 258 bp, Glycine max
  Clone ID: 700963770H1
atgataaggtgctcaagcttgggtgcacaccatccattgacactcaaataccttaacatcccaaaaaagtcaaacctcccattcgtgaatttgaccagcaattccttccttcttccatctcttccccctaaagcacacaacaaccctcttcaaatcccttcacagaagcttgcaaaacccttaaactctacaccaccctcatcgatcatggcttcaactaccacagaagacgacagcgaagtaacctacgacctttcc

SEQ ID NO: 78983 - DNA, 257 bp, Glycine max
  Clone ID: 700963771H1
ctggttttggaattcgacgatggagcagaagaggagcagtagcaagatgtacaacctgtttgtgaagcacttggacgggaaaaccctaaccctcctattcccctctccgatcctctacgcgagttccatcagggatcgcctcttccaactcaccggaatccccgcccaccaccagcgccttgttaccggctgccgccacctcaacgacgacaaatctgccatccaatgcctcccggaggacggcaacatgttcccct

SEQ ID NO: 78984 - DNA, 258 bp, Glycine max
  Clone ID: 700963772H1
gagctagtttagttatctactcttttctgcatgtttgttctctcaacgactcctccgcgaaagagtattattcaatattttggttgggttgaatcccggggttgaagcgttgcagacatcacggctattctaagagtgtctcgctccctcattcatgtccgatctgtacgacggaggacgggtagttgcgtaactgccgttaacccttcgccgcacggtgggcgtggtgctttgccttctgaaggtggtagcccttca

SEQ ID NO: 78985 - DNA, 109 bp, Glycine max
  Clone ID: 700963773H1
caaacactagcaaagggaaggaaaagtaccttccccaataacccttctctccgatttggcttctctcatcggagggaaacaatcaataaaagataaaaaaaacccacaa

SEQ ID NO: 78986 - DNA, 255 bp, Glycine max
  Clone ID: 700963774H1
aagagatgatgatgatgatgttgtcgtcgtcatatgttacatgttccaattacctcggtggcaatcagtgaacaacgccaaatcttaaacttgttcttttgtttctcttttgtactactagttctgaacatggagctgttgtctctgagactcaccccttcaccttctgcttcgacttcatcgcttcctgcagcacttgctcactgctccaagctatgtgagtttcaaccgcggaagaagaagaaggtgtgtttc

SEQ ID NO: 78987 - DNA, 253 bp, Glycine max
  Clone ID: 700963775H1
gattcaatgtgttcagaagttcgacgtctgtggcgcagtcgaatgatgaagtccgagtcattgaggagtccgttgagctgtataataataataagaaggaacaaaataagcaactcgagcgggacgcaatattcagaaagcaacacaacattcatgtctctggttatagcgtgccgtctccgcttcaaagctttgatgagttgaaatcaagatataactgtccttcatatttgttgcgcaatctgaaggaact

SEQ ID NO: 78988 - DNA, 254 bp, Glycine max
  Clone ID: 700963776H1
ggaaaaggaaaaatccaaaatatattcttcctaatgactcatgcggtgttctctgaactttcctctttctttgtctgtttcctctttccttccacccatcttcctttataaattctgcatctctcagtctcataataataaatcatctctctccaaaaccaactcttcttcttcttactccactcttctcacttccactatcgccatggcctcccactcaaaccaaccaggtcccggagctgaagggctaggag

SEQ ID NO: 78989 - DNA, 245 bp, Glycine max
  Clone ID: 700963182H1
gcaaactcatccgaacattactattattggagaagaggttgctgccaagaagatgacactgaaggatgtcactgactacattgttaatatcatttctaaaagagctgaggataattataactatggggtcattcttatccctgaaggtctaattgatttcattcccgaggtccaacaccttattgcagaactcaatgaaattctggcccatgatactgtggatgagggagggctatggaagaaga

SEQ ID NO: 78990 - DNA, 215 bp, Glycine max
  Clone ID: 700963183H1
aagggtacgggaattatccggtttatccgagaaaaactccacagaaagagttactaggattatattattattatataatatgaaaagtttcttttttcttttttgaatttatttatcgtcaaaggagtttgttttctatttttgttcaggagacaacgttttcatgtatatttatgtcagacatgtgcctctggttattctaggccctctctgtt

SEQ ID NO: 78991 - DNA, 240 bp, Glycine max
  Clone ID: 700963184H1
aagacaacgataaatcctgcggcgggacagtaccaactgacgcacatcatttcctctctctacggatcttaccgccgacgcgcagggcggtgccaccgtcacttcgatctccctctcatactgagaaggtaaagtcgttaagcatggccgtagccctggtataaagagttgtgaaagcttggctctttctggaggttgaagaagcttgtgatatcaggtgagatctccgatgtagcagca

SEQ ID NO: 78992 - DNA, 241 bp, Glycine max
  Clone ID: 700963185H1
tcgatttgtaataccatgaagtttttttcagcaatagagtttctaagttcatttcttgtgctgatgttcttctaccctttttgccactcactcgacaacagaataaccataaaccaccccattagagacggcgacgttttggtctccaacggtttaggaaactttgcgctcggtttcttcagcccgcgaaactccacaaaccgttacgttcggatttggtacaacaaaatctcggaacaaa

SEQ ID NO: 78993 - DNA, 240 bp, Glycine max
  Clone ID: 700963186H1
agcttcctcttgtttacgctgggaacgcgagtaactcttctgtagggtatctatgtttgcaagattctctgattcctgagaaagtttcagggaaaattgttatatgtgagagaggtgggaatccgagagtggaaaagggtttggtggttaagcttgctggaggtgctggaatgatattggcgaatagtgaagcctacggagaagagttagttgctgactctcatcttcttcctgctgcgc

SEQ ID NO: 78994 - DNA, 238 bp, Glycine max
  Clone ID: 700963187H1
gaataaaagaaccttcaactggtaaatattttacagatgtccaaaagaataaaagaaccttcctttgatctgctgtcattctttcaacaatctcccaaaaccaagatatgtgaatatctgtatctttatagccattatactcagtatgtgctttccaatcttcaacagaaacggtatcttcactcccatgcagcatccaatccagatcttcgaggtctaaactttggaagaagtactg

SEQ ID NO: 78995 - DNA, 239 bp, Glycine max
  Clone ID: 700963188H1
gccgccgttgccggcggtttatatgccattctttcatcctcaacctctgctagctctgagatggaagtgccgtttggcaacgcacggcgtgagagcaaagaacgtgacgatggtggctccgggtctcatcctcgcgagggtgccaccacggtcagtcgttggaagaaacctgagattggttgggtgaagctgaacgtggatggttcacgcgacccatacaaaagttcctccgctggttg

SEQ ID NO: 78996 - DNA, 235 bp, Glycine max
  Clone ID: 700963189H1
aagtgaacagagaaataaatggagaatgcggaagagcagcagcagcaaaacgaggaggttttgtcggttgaacttccgggtccttccggttggaataaactgttcttccctaagaaagtgggaacaccaagaaaaagtgagattgtattcattgctccaactggggaggagatcaataccataaaacaattggagcagtacctataggcacatcctggcaatcctgtcatttcag

SEQ ID NO: 78997 - DNA, 150 bp, Glycine max
  Clone ID: 700963190H1
agtaagtggaatcggtcgagatattataggattaaatatatttcaactataaaattaagaggttaaaatatgaattattgaaactaaaaattttacgtttaaactatagggactacaaaatataaatcatgaaactatagaaaacaaaat

SEQ ID NO: 78998 - DNA, 235 bp, Glycine max
  Clone ID: 700963191H1
cgctctgtttctgtctctgtgtttgcggctgaggattccgaacgagcgaccttcttcgtttctcgcaaagtttaagtcatcatgggtaaggaaaagactcacatcaacattgtcgtcattggacatgtcgacactgggaagtcaactaccactggtcatttgatctacaagcttggaggtattgacaagcgtgtgattgagaggttcgagaaggaggctgctgagatgaacaaga

SEQ ID NO: 78999 - DNA, 236 bp, Glycine max
  Clone ID: 700963194H1
acccaattcccttcgtcgttttcgattaagagagcaatggcacgtaccaagcaaaccgctcgcaagtccaccggaggaaaggctccgaggaagcaattggcaaccaaagccgctcgcaagtcagccccggcgaccggcggagtgaagaagccccaccgcttcaggccaggaacggtggctctgagggagattcgaaagtaccagaagagcaccgaacttctgatccgaaaactccc

SEQ ID NO: 79000 - DNA, 236 bp, Glycine max
  Clone ID: 700963195H1
cacagaaatgggtgaaaacaaggaagaagaaaagaaagaagagaccacagaggaaaagaaggaaaaagagcctccagagatagtgctcaaggttgatatgcactgtgaagcttgtgcaaggaaagttgcaaaagcattgaaaggatttgaaggagtggaggaggtgactgcagatagcaaggcaagcaaagtggtagtgaaaggaaaggcagcagaccccataaaggtgtgtgaga

SEQ ID NO: 79001 - DNA, 237 bp, Glycine max
  Clone ID: 700963196H1
cttactcacagatatatttttttttttgtctccatcattttctcgacagctttcagtttgtgtggttcatctttcttcttctccttccctcccccctctgtaacaccccgcttctctgaatccctttctgttaatcatctgtctttcaagctaagattttcgggtttgtctattaattcaccaagaagcaaacttagaaggatttttcgaaagccaggtgttttcagaaacgagatc

SEQ ID NO: 79002 - DNA, 170 bp, Glycine max
  Clone ID: 700963201H1
aaaatggctggaaaagaaaaagacattaagggtcaaaactttggtcattcctcttctcccccactctgtatctctcactcagccacattaaacactaaagtcgcttgctgtgtactcactttaatttataccttcttaataagtcgcgatccagagcttagcatttaaat

SEQ ID NO: 79003 - DNA, 262 bp, Glycine max
  Clone ID: 700963202H1
ctgcgattattcagtataattaagttattcagcgtatattcagttatttagtacattgttattcagtatacataattattctttgtatatatatagttattctgtagtttacatagtaattctgtatagtataaatggttttttctgttttctatacagttattttgctgcgatttgtatactgattaaattaatgcatgttctgtttaagttcttacctgtatacttgaaatgcttattgagaacctacagtaaacagaag

SEQ ID NO: 79004 - DNA, 262 bp, Glycine max
  Clone ID: 700963203H1
tgagaaaaaaatatgggattctcaattccctaaaccagttgatgtgtgtcagacatatgccttgtgtggtgcaaatgctatttgcgatttcaatggaaaagctaaacactgtggatgcttgagtggattcaaagccaactctgctggttcaatttgtgctcgaactacccgtctagattgtaataagggaggtatagataaatttcagaagtataagggaatgaaattgcctgacacatcttcatcttggtatgataggact

SEQ ID NO: 79005 - DNA, 255 bp, Glycine max
  Clone ID: 700963204H1
caatgccgaagatctcgggggtggtgaaactcgacgtgtcgaagggggaggagcggagggactgcacggtggggtgcaggatgtacggcgagggttgctacggcggagaaccgttcttcgtggcgagggaagaagggggcgaggaagatgatgggtacttggtgagttacgtgcacgatgagaggaagggggagtcgaggtttttggtgatggacgcgaagtcgccggagctagatgttgtggcggcggtgaggc

SEQ ID NO: 79006 - DNA, 255 bp, Glycine max
  Clone ID: 700963205H1
cagaacctcttctctccgttcacgccttccacaacaaccaacaaggcagggtttcgttcttgtaactcgaattggcgtcgagtgaagtgaagggcttcaaaaaccagagggaaactatgagcaatctcagaaccctatgtagacctcagacggtgttctctttcattagtttccaacaccaatttcgttctagggtttcctttcgaaaccctaattgcaagccccgtttgccatcgccgtttctgtattctacaa

SEQ ID NO: 79007 - DNA, 254 bp, Glycine max
  Clone ID: 700963207H1
gcttgttgcacgaagctgaagcagcaaaaaccatgcttatgtggctacctcaaaaacgctagcttgaagcagtatgttaactctcctaatgcccgaaaaaccgttgcttcttgtgggattccctttccaacttgttaattaattaagccttcttataattaaagtgtgggatatatatatatatatagataaacagtttaatttatacacactttgatcctacaaagcatcttgacacaagcattcaataggat

SEQ ID NO: 79008 - DNA, 253 bp, Glycine max
  Clone ID: 700963208H1
tgaaagacaagccatggtggcctaagttgaacactcttcaagatctgattcacatttgctgcattattatatggactgcttcagcactccatgcagctgtgaatttcggacaatacccttatggcggtttcatcctaaatcgtccaactctaaccagaagattgctcccagagccaggaaccaaagaatatggtgtccttaccagtaatcatcaaaaggcttatttgagaacaattacaggaaagactgaggc

SEQ ID NO: 79009 - DNA, 252 bp, Glycine max
  Clone ID: 700963209H1
gctatttcttacctcttggcatggccattcaaatgtcttcttttgtctttgtttctcttacaattttattttgcttctcttccttggagaagagttttgcctttcaaacaacaaaggaggccacagaaagcaacaatcttcatcaatatactcatcttgttcacctcagctcactccttccttcatcttcctgcagctcttctgccaaaggtcccaaaagaaaagcatcattagaagtggtacacaaacatg

SEQ ID NO: 79010 - DNA, 247 bp, Glycine max
  Clone ID: 700963210H1
gaaagccgtcgctatcctagtctcttcttcccctctacccatttcagtttcaggatggaatctcaggtgaagcacgcccttgttgtcaaagttatgggtcgtactgggtctagggggcaggtgactcaggttagagtgaagtttttggatgatcaaaaccgacacatcatgaggaacgtgaagggacccgtgagagaaggagacattctcaccctacttgagtctgaaagagaagcaagaaggttgc

SEQ ID NO: 79011 - DNA, 246 bp, Glycine max
  Clone ID: 700963211H1
gtgccactgcatggttgatggatactgaaatgactgatcatgatgatcgtgttgtgccactgcacacattgaagctattagcgaccatgcaatatgtcctctgtacgagcttggaaaaaagtccccagacaaacgctataattggtcgcattgactgcaagtctggtcatggagctggtcgtccaacacagaaaatgatcgatgaagctgctgaccggtacgttttatggctaaagtgttggaagt

SEQ ID NO: 79012 - DNA, 198 bp, Glycine max
  Clone ID: 700963212H1
ctttattatacacagacaatcgcacaccgtatcccctgttttgagtttccgagagtcagaacatggcctgcgccgaaaacagagaatggaagttcctgttttcctctgcctcttctcattgacgcttgttgcagcgcattgctgaattggaatcgggtctccgggcagacatccgtggtctacgcctgcgacgatgcg

SEQ ID NO: 79013 - DNA, 250 bp, Glycine max
  Clone ID: 700963213H1
tttgtcagctttttcttgcttccatagttcatggcgtgtgttcaagtcattacagtacttctctttgcattggctcttgcagaaattgacccctcaacatgccaaatggtgcagggcagagtcttctgcgttgactgcactcacaactaggacttatctgatattaaggtttcagtgaggtgtgctggtgtggaaaaactggctttggcaactacagaaaatgatggctccttcaaagtctatcttccct

SEQ ID NO: 79014 - DNA, 255 bp, Glycine max
  Clone ID: 700963215H1
aataaaataaaaataacagagcaattatgaaatagcttttgtgtttggtgaggttatgcgccatttctcccttgctaccaacaacagagtttccatcctctatatttcttcaatcttctctcccttctacttctagggtttcgcttctgcaacggacgaccttcttcaactcatcaaagttgactttgtgagccaattcaatcaggcttgagaaggtatcctagtgttgtttgttcaccttcatctccatgatgg

SEQ ID NO: 79015 - DNA, 260 bp, Glycine max
  Clone ID: 700963216H1
ctccgagccgcgagcgagcagtttcaaagagaggatttgggattgggaaggcgagggattgcgctgcgtctcttcctcttctctttcgattcatccctcattcataatcttccaatccaacaacctcagcctcacactcacacatacacacatctgaacgcgtatcgtccctcccatggcttcaaagcgcatcctcaaggagctcaaggacttgcagaaagacccaccaacttcttgcagcgctggtccagtagctgagg

SEQ ID NO: 79016 - DNA, 269 bp, Glycine max
  Clone ID: 700963217H1
gacccactgaacgctctcatcaccttcacgtggctccccttcggcttcatcctctccatcataagggtctacttcaacctccctctcccagaactcattgtccgctacacctacgagatgctcggcatcaacctcgtcatccgcggccaccgccctcctccgccttcccccggcacccccggcaacctctacgtctgcaaccaccgcaccgctctcgaccccatcgtcatcgccattgccctcggccgcaaggtctcctgcgtcaccta

SEQ ID NO: 79017 - DNA, 85 bp, Glycine max
  Clone ID: 700963218H1
ctatcttcaggcaaatcaaattaaaatcacaacacccccaattcccgaaaccctaaccctacctcctcgcagccatggctaagaa

SEQ ID NO: 79018 - DNA, 141 bp, Glycine max
  Clone ID: 700963219H1
ctagtgttggtatcaatactgcgtgggggcttctaatggctagcatctcagtagatacgggtcgtgaaacaccattgcagttcgcttatatgtgagtactttcatcggtatgagactatgtgtgtatgtctaattgtactg

SEQ ID NO: 79019 - DNA, 258 bp, Glycine max
  Clone ID: 700963220H1
caacattttacactcttttcttcttctcgttgttgcttcggtgttgaatcatggatcagaaagtcgatttcagtgctccgcattccatgggaaccactatcatcggcgttacttacaacggcggtgtcgttctcggagccgactctcgaaccagcactggagtgtatgttgccaaccgagcatcggacaaaatcacacagctcactgataatgtttacgtgtgtcgctctggatcggctgctgattctcagattgtct

SEQ ID NO: 79020 - DNA, 202 bp, Glycine max
  Clone ID: 700963221H1
tagcgtgcaaaattatattcaaaaaaaaaaaaaaaggggaggctgcagattagtgagttcgtcaacccggaaattatttcgggcccggaacttgaaggggtacaagttttcccaaaagggagccgtattaaagcttggggaaatcatggccaaagctgttcccagtgaaaaattgtaatccgttcaaaattccaaacaacat

SEQ ID NO: 79021 - DNA, 252 bp, Glycine max
  Clone ID: 700963222H1
gagagcacttcaagtgagggtgagagtgacataaatctagagagagcaccagtactctaaaagtctattatattcttcataatatgaccatgcatcgcgagtcttgggcttttgtcttcggcgttatgggcaacatcatctcctttagagtgttcctcgctccattgccaaccttttaccatatctacaagaagaaatccactgaaggtttccagtcacttccttatgttgttgcactgttcagtgcaatgc

SEQ ID NO: 79022 - DNA, 253 bp, Glycine max
  Clone ID: 700963223H1
tctcgatcgcgcgtcgtgaagccaccgatcatctatggtgatgtgagccgcccaaagccaatgaccgtcttctggtcatctctggctcagagctttaccaagcgcccaatgaagggaatgcttaccggtcctgttaccattctcaactggtcctttgttagatatgaccaacctagatctgagaccacctagcagattgctttgtctatcaaggacgaactggaagacctcccttaggctggcatcactgtta

SEQ ID NO: 79023 - DNA, 253 bp, Glycine max
  Clone ID: 700963224H1
ctcacgagggctgcacagcaatgggtggggagcgcaacaaggctttcactttggccgaggtctctcagcacaacaatgccaaagactgttggcttgtcattcatggtcaggtttataatgtaacaaagttgttggaagatcaccctggtggggatgaggtcctgttgtcttccacagggaaaggtgcgaccaatgattatgaggcatagtggtcaccgcagcattgccgtagccatgatggatgagctctatg

SEQ ID NO: 79024 - DNA, 256 bp, Glycine max
  Clone ID: 700963225H1
cggctcgagtcagctttgactttggtggaaactaaagactagtcaaaatggtgaagttcacagctgaagagctgcgtcgcattatggactataagcataatatccgtaatatgtctgtcattgctcatgttgatcacggaaaatcaaccctgactgattctcttgtggctgctgctggtattattgctcaagaagttgcaggtgatgtccgtatgactgatacccgtgcagatgaagctgagcgtggtattacaat

SEQ ID NO: 79025 - DNA, 240 bp, Glycine max
  Clone ID: 700963226H1
agttagggtttaacttataattgcgtgatcgattccgattcgattgattctcttctctctcaaacggagtaggaacacggaactcaggattcatggcgacaacagcgacgacgagcggaaaaccggtgttcgtgacgttggatcggttaaaacctgccaccaacggcaatacactgacggtgaaggtggtcagttccaagccggtgaagacggtgagcaccgcggcggtcgacgacggtg

SEQ ID NO: 79026 - DNA, 250 bp, Glycine max
  Clone ID: 700963227H1
gcaaaatcttatcttagcaatagctacccctatcacaacaatactctattaggcaaaaacaccaaatgggagaggaaaaagagcagcctaagaatgaaaccgagaagaagcccgaggaggccgccgcagcccccaagaaagacgacggacccatccctgtcgtttacaaactcgacttgcattgcgagggatgcgtcaagaagatcaaacgcacatgtcgccacttccaaggtgtggaaaccgttaaggc

SEQ ID NO: 79027 - DNA, 79 bp, Glycine max
  Clone ID: 700963228H1
gcataatcgtgctggaatgggccacaattatgccatttgggttaccaaagaaaatggcataattgtggccaattccaaa

SEQ ID NO: 79028 - DNA, 250 bp, Glycine max
  Clone ID: 700963229H1
attttcgacatggcggcgcaacatctcatcgttgccgtcgctaacaccgctgctatgcgatcctattggaacaccagtctaatggattatctctataacatgctcaggtgtttcggtggaaatgactcaactggacagctattttctgcttccaatgtagagtttgctctagtcacctatcatactcatggatgttattctagttcccgtgtgcaacgggctggttggcacagcgctccagaagttttct

SEQ ID NO: 79029 - DNA, 258 bp, Glycine max
  Clone ID: 700963231H1
tgttgctgctcatcctccgtaacctccgagctctgcaccgaagaacgaagccatggggaagacacatggaatgggatctgctcgcaagctcaagtcccaccgcaggaggcaaaggtgggctgacaagtcatacaagaaatcacatcttggaaatgaatggaagaaaccttttgctggttcatcccatgccaagggaattgtccttgaaaagataggtattgaggctaagcagcccaactctgccattcgtaagtgtgc

SEQ ID NO: 79030 - DNA, 251 bp, Glycine max
  Clone ID: 700963232H1
ctccgccgccacttgtaccgcctgttagttctcagtcaaacagtgttgttgtaccatcatctagcttgcagacacaaaaaccaggtagataatacccgaatctggaaaacattgaaatcttctcggtcgtttcttttgtcgcgtttgatagggttaaaactagaccaacaaaacatttgttgtttttgtgggtggtgtttttcttcttttttttttttttgcccctgggatcttggagcttacgggttttt

SEQ ID NO: 79031 - DNA, 265 bp, Glycine max
  Clone ID: 700963233H1
gtgttttaacaagagtgatgaggtgggagggggttcttctgtgttccatgtggatttcaaagatggctcttctgatagtgactcaagcgcgatcttgaacgaggagaacaacaaccacagccccaacaataacgcggcgatttcgtcgtgtggggttctgcaaagtcacgggcttttgttgtcgccttcttcgtcgtcgatgaacaactgtttccagttccagaaacagtaccagacgacgacgacgcagtacgtaaagatggag

SEQ ID NO: 79032 - DNA, 264 bp, Glycine max
  Clone ID: 700963234H1
atcgattggtcaatcaaacaagctcgttcaataaggacaaacttgacagcgagtggaccaaggccaaatccacaaggctcctaccactatggattaataaacattagtaggacaattaccttggtgagctcaacagcacaagtgaacaagaaacaaagatacgcagtgaacagtgtttcattcacacctgctgacactcctttgaagctagcagattactttaacattggagggattttccaagttggaagcatcccagatagc

SEQ ID NO: 79033 - DNA, 262 bp, Glycine max
  Clone ID: 700963235H1
cttacttgaagttgtgctattcaatcccaaagccacagaaataatattattcagattttagagactgaaaacatcatggccaacctcgacctcgacccattccagacaagcatcttaaccgtcgtcccaatagcactcctggtggcgttactatctcgtactcgtcgaagagcaccctacccaccaggcccaaagggtttaccaatcataggaaaacatgttaatgatggagcagctaacccaccgcggcctcgccaacctg

SEQ ID NO: 79034 - DNA, 257 bp, Glycine max
  Clone ID: 700963236H1
gatttcccttcctttttaacttatagcctctgctccccttttgcggggtccttcaatctcacttggggaacctccgtgcattaacccataagagttcatggacccttaattaaaaaatattttgcctagaaccaaaacctgcccttactctataacatttaccaaccgggaattcttcctggacgttttgttttttgattctagacacttggaagaagaatgagttgttttccttgtttttcaaagactaagagaac

SEQ ID NO: 79035 - DNA, 252 bp, Glycine max
  Clone ID: 700963238H1
aatccatccctgtcaaacaaaccatggcttccgaaacaaaccagtccaagaatgtgtgtgtaattggagctggaccctcggggctattggcagcgagggagctgagaaaagaaggtcacaaggtggttgtgttggagcagaaccatgatattgggcggtcaatggctatatgacccaaatgtacaagaggaggatcccttaggaagagacccttggctaaaggtgcatagcagcatctatgagtctttaagg

SEQ ID NO: 79036 - DNA, 250 bp, Glycine max
  Clone ID: 700963239H1
taagtccctttggtcttcatcttctgttctgatccaggtatggcttctaaacgcatcttgaaggagctcaaggatttgcagaaggatcctcctacctcatgcagtgcaggccctgtggctgaggacatgtttcactggcaagccacaatcatgggacctgctgatagcccatatgcaggtggtgttttcctagtttcaattcattttcctcctgactatcccttcaagccaccaaaggttgcttttcgga

SEQ ID NO: 79037 - DNA, 246 bp, Glycine max
  Clone ID: 700963242H1
caaaattccacacaagatacgacttctagcaaactcaagactctagcctctttataaaggaccgtctctttttctcgatagtccgttagtatgctctgcggttgttgaatcttttttagattattcctgaacccttcaaaaccctcttatctctcttctatcgcttggcctggtattctttttggctgagagatcaagcaaaaatgagcgtggttggatttgattttggtaatgagagctgcattg

SEQ ID NO: 79038 - DNA, 79 bp, Glycine max
  Clone ID: 700963243H1
gtgtagtactagtactacttttatttccccaattttcaattcatagtcagcaattctgatattgtcaaattgcacccgc

SEQ ID NO: 79039 - DNA, 248 bp, Glycine max
  Clone ID: 700963244H1
gtctacacggaactcgttcgagcctcaccccatggttgccgatgcctgggaatccctcagaaaatctctagtctattttagaggccaaccggttggcacaattgcagctgttgatcatcaatcagaggaagttctgaactatgatcaggtttttgttcgagattttgtgcccagtgctctagcctttttgatgaatggtgaaccagagatagtcaggaacttcttgttgaagacactgcatcttcagg

SEQ ID NO: 79040 - DNA, 249 bp, Glycine max
  Clone ID: 700963245H1
caaaaacggaaatttcttcctcaaatgccttctgggtcgctcttctttgcatccagattacgaagtttttggtcgccagtaaggtctgtgattcaagtgctattttagcattttttttttttcctggacggtgagggtcaacttgcatgcacatgttagtgaaaaaccacaataagggggatggatctaagtccctcgccgatacactggcgaaatggaaagaatataatgcttggctggagtctaaca

SEQ ID NO: 79041 - DNA, 255 bp, Glycine max
  Clone ID: 700963247H1
tgaaaattccccacaaatcatagaaggaccaaaggtcaatactgctatgaatgggagctgtagcagtaccagtaccagcactaccagctcaacaagcaacagcaacagtggtgctagcagcagtgtatttgcaagcttgtttgcctcatcatcagcatccgcaactgcaagcctccactctcaaacaccagcattcactgacctaattagggccatggggcatccggatcatccagcagacctctcaaggccttc

SEQ ID NO: 79042 - DNA, 268 bp, Glycine max
  Clone ID: 700963249H1
caataaaagtatccactttcaccacatctgtcttccatttgtggatttctcaaaagtgagtatcagcttccgggacttccacagtgatcaatacgccccctataaagacctggattacccaaacgggaagatgccattgtcaggaccttttggatcgcggccgggttcgcgaaacggggttcatttggatgaagcagaaggcgccaagccagcacttcttcgaggcaaccaagaccctcgtgagctacgcggcggaagtcaccgccta

SEQ ID NO: 79043 - DNA, 261 bp, Glycine max
  Clone ID: 700963250H1
gacgaaaatcttcaacctgaacctctccaacaacctcctggtggacccgttccccgagatgaacgtgaaagggatagaatcgttggacttgtcgaacaacagttttcacctggggagcattcccaagtgggtggcttcgtcgccgataatattctctctgaagcttgtgaattgcggaataaagatgaggctagaggattttaagccttcggagacttatttctatgattttattgatctttcggggaatgaaatttcagg

SEQ ID NO: 79044 - DNA, 258 bp, Glycine max
  Clone ID: 700963251H1
gcgagaggtacttactcacagatatattttttttttttgtctccatcattttctcgagagctttcagtttgtgtggttcatctttcttcttctccttccctcccccctctgtaacaccccgcttctctgaatccctttctgttaatcatctgtctttcaagctaagattttcgggtttgtctattaattcaccaagaagcaaacttagaaggatttttcgaaagccaggtgttttcagaaacgagatccaggttttat

SEQ ID NO: 79045 - DNA, 257 bp, Glycine max
  Clone ID: 700963252H1
accaaacaatcgaatttcaatttcaatttgatcgctccgataacttccatctatggcggcggcgaaaccccaacgcactccgcaggaagtggaagacatcgtcatccgcaaaatctttcttgtctcgatcaccgaaatcgccaccactacggattcgagaatcgtgtatttagaactgaccgtggccgagattctcagcgaggacaaggagctccgcctctcgcgcgattgcatggagagggttttaatcgaccgtc

SEQ ID NO: 79046 - DNA, 254 bp, Glycine max
  Clone ID: 700963253H1
accttctcgatcgtgtcgagcttttcatcccctctgtccctctttctttagtcctttctcacctcttttgttgcctttctttcacgttttttcgtttcgctcgcgttgaaatcgcagagaccaccggcacgccaccgtgaaccaccgccgccgcctccgtcagtcactgtgccaaaaatgttgccggcgagcgactagatgattctttcttatgttgtggaagctgtgggagggtgttggaagattactttttt

SEQ ID NO: 79047 - DNA, 252 bp, Glycine max
  Clone ID: 700963254H1
cttatatttgcttcatttgtaccctttttctttgacattccagtatcaacacggtttcgtgtgtttagcttcctcttctcagacaagtcattcatatatctagctggtcttcagcttcttttgtcatcatggaaaaggtctatcttaccggggatgtgtggcatccttgctggttccttgtaccgtttgaatgtcttttacattcgcaaagcaaagttcccagagatgatctcatcattattttcaagaatt

SEQ ID NO: 79048 - DNA, 252 bp, Glycine max
  Clone ID: 700963255H1
gttcttaacctttcaatccattcggctgaggttaccttccccttggccataatcacccaaaaaataaaaataaagaaaagaaaagaaaaaagaaccttcatggcaaaaatgcataatttcttccttttaacgtgtttgatagtcatcatacctaccttgcatgccaatgtcaaggaggatgaaatatattggaagtggcaaagtcaaatacttaatgattcatattggacgcaaaaagcatcagttgcagaa

SEQ ID NO: 79049 - DNA, 251 bp, Glycine max
  Clone ID: 700963256H1
gccaaaccaaattttctctctttcacttatttattgactccccaaaagcttttcaaatatctctgttcctctctcacgtaccttctccctatctttcactccacttcttaacaccacaaaacagaacaactgccgagcaaacaacaagaaaaatggtgttgttgtccaaagcaacaacagaacaatactcctacattaagaactgcatgccaaccaaattttcctcaacaattcccatagtgaacctctcc

SEQ ID NO: 79050 - DNA, 241 bp, Glycine max
  Clone ID: 700963257H1
ccaaattcctcttaggtcccaacccagtaactatgattccatcggaaaccgttaattttgctcgaaatttcgcagctatggtcagagttcgtggccctttctggtggaacaactctttcagcttctgggatgctcgtacctgataccctgtgtgatgctcaagtagctggatgtctctatggtgataactgtgtggatacggtgttggttatgacggttgcttcagttattgagcctcgtc

SEQ ID NO: 79051 - DNA, 247 bp, Glycine max
  Clone ID: 700963258H1
gctgatgacaaagctggaacagaagagagtaaaacatccaaagatgagacttcatctaaagattctccagcagaacaaagagcgacagctacttttggacctagacctggacctgctgggcatccaggcaacccttttgatctctcagcaatgtctggtctgctcaatgatccaagtatcaaggaattggctgaacagatagcaaaagatccatcgttcaatcagatggctgagcagcttcagaaaa

SEQ ID NO: 79052 - DNA, 248 bp, Glycine max
  Clone ID: 700963259H1
ggccatcacaaacctcactgagcatctcagggaacagaatagggcagaggatttgcacagccttcttacacagttgaggcccttcttttccttgattcctaaggcaaaaactgcaaagatagtgaggggcataattgatactgttgcaaaaataccagggacttctgatctacaaattacactatgcaaagaaatgatgcaatggactcgtgctgaaaagcgtacctttctgaggcagcgagttgagg

SEQ ID NO: 79053 - DNA, 248 bp, Glycine max
  Clone ID: 700963260H1
cctactttcagctcctaagagcacgcatcactgttgcacttcttactcgttctccctcttttttttcttcttcttcttcttcgctaaaccccccctttatttttcctatctcactaacatcgatgggagacgagaataagaccaagtcccctgcttccggcgtgtggtccaccatcaagcctttcgtcaatggcggacctccggcatgctcgccacctgcgtcattcaacccatcgatatgatcaagg

SEQ ID NO: 79054 - DNA, 260 bp, Glycine max
  Clone ID: 700963261H1
gaaaaagatggaactggaacatgtgaccagcttgtcaagaagagatcatgaaagaccaaatcccttttttcgagtgagagcagttagcttgggtggttggttggttactgaaggttggatcaaaccttctctcttcgatggcattccaaacaaagacttattggatggaactagtcttcggttcaagtctgtgtcaacagggaaatatctatgtgccaagtctggagggggaaatgtcctacttgcgaacggcacaggtg

SEQ ID NO: 79055 - DNA, 255 bp, Glycine max
  Clone ID: 700963263H1
cttttcctgtgtttcttcctcgtttgagtttgtgtttgtgctatcttcttcgctcttcacttttgttgtctaacatggctttggtgaatccgtttctgtgtaccactcgaacgtccctccctctgcgagtttcaggtccaccaaaccaagtcctaccacgttggactctctgctcccaatattcattcaaaacatcatcactaagatcgaagcaactcaggtgtggcgccactgcagacatcaaagcagatcacg

SEQ ID NO: 79056 - DNA, 261 bp, Glycine max
  Clone ID: 700963264H1
tcgagctgctacgaagccactgttgcaactatcttaccatcatcaccgcgctggcagcgttccttgcaacgtactcgttccgccgacgccctatcctgcaacggcatcctcggctcctatgctcacaccggcggcgtgcggctggcgtcgtatgtctccgactcggcaaagcagccttaccgggtcgagtcgacggtgacggtactcaacaacggcctcgacgagctcaagtcgtggacagtcttcgttgggttcgcccac

SEQ ID NO: 79057 - DNA, 264 bp, Glycine max
  Clone ID: 700963265H1
gaaaaatagcaaggttctcgatttgttatcagacacaaacatcaacaaaatccaaattctcgtgtcacggtggcgctggatgtaagaatgggaaatcgacgcttcactcaggtcgcaaccagcgacgacgaggacgaagcgccgccggcgccggcgcctcctcccaagcagcaatcgtccgtcagtgcctccgaagaaaactgttcgaagcagcagcagcagcagcagcgcaagaggaagaggatgaagctccaagaagaagag

SEQ ID NO: 79058 - DNA, 261 bp, Glycine max
  Clone ID: 700963266H1
cgtgattcgaagctaactggaagggtggccatctggcacatcatccgaaacaaaaggagtggagaacgaaataaccaaaaaaatacaaatatataaataattaaagcagcctcgacccacaaaatggcagagcgtgtgttactcctcactccatctcagtctcatcactctccaaccacaatggctgtcttgggcggcgcgcctccgctcgcatcattccctccgtctcactctccacctcttctcgctccttcttctcct

SEQ ID NO: 79059 - DNA, 259 bp, Glycine max
  Clone ID: 700963267H1
gagaattccaactgataaaaagaatattcagagaattccaaagacagagatgactgtcattaaggaagagcaacaaccaaaccaaatagctggccacaaagaacttggtcacaaaagcctccttcagagcgatgcactctatcagtatatacttgaaaccagtgtgtacccaagagagcatgagagcttgaaggagctacgagagttgacggaaaaacacccttggaacctgatggctacaccacctgacgaaggacaa

SEQ ID NO: 79060 - DNA, 253 bp, Glycine max
  Clone ID: 700963269H1
ggaaaataacaggaagacagataaagagtggcttagtccaaaacctcacacgactccctttgttgcgttgtgtttcctttcgccgaaaccctcgctcgcaacttctacagaatccctttcaccatggatattgaggaggacatccgttctttacagctcgattcagcagaagacaataatggggtggtaaatgcagaggattctcggccagaagaagttgagaaatctgataagatggatgaagatccaaagc

SEQ ID NO: 79061 - DNA, 250 bp, Glycine max
  Clone ID: 700963271H1
aactctacccattgcttcaaattcaatatgctttttggtttcgtttcgtctcggcttgtctttcactttctcaaccacccaacacaacacaaattcgctttcttcttcttcttcttcttctaaatagatagaaggaatttagattaattaaaacaacctttcattcattctgttgtgttgggaaatatgatgttcgactttgccaggatttggacccgaaacacgttaataggtctcggcttgggtcagt

SEQ ID NO: 79062 - DNA, 57 bp, Glycine max
  Clone ID: 700963272H1
tcgagtttcacagccaagtcgtaaaagggtttcaagggatggaaaacatgcacgagc

SEQ ID NO: 79063 - DNA, 247 bp, Glycine max
  Clone ID: 700963273H1
ctctcatagaatgtgaaagaatctaccaacattccattggcattattattattatcccaatcagaaaaagaagaagaaagaaataaagttgatagtatttcagatctcagaatgcgtttgatggaaatcatcggaatccgagttggttagcattgctattaaagtataacacactgcaacaccgtgccattctgaagttgaacggcggagaagaagatgttgtgcgcttgttcttccggggagcagt

SEQ ID NO: 79064 - DNA, 231 bp, Glycine max
  Clone ID: 700963274H1
ctcgagacgtatcatggtgtctttacgtcttcctcggaggcggtactcgcgacccgtatcagctggtacaatgggatgcacgagctcatagaagacggtcgccggagccggtgattctaggtcggagggacgtgcgtggtgcctacatgttctcggaggcgaagcaataatgggttggggagacaccaaaacggcgtcgtcgaggatgcgcgtcacggggatgcgcgtgag

SEQ ID NO: 79065 - DNA, 246 bp, Glycine max
  Clone ID: 700963275H1
gagaatccgaggcgaagagaagagaaaaattaagatggaggggaaggagcaggatgtgtcgctgggagcgaacaagttcccggagagacagccgattgggacggcggcgcagagccaagacgacggcaaggactaccaggagccggcgccggcgccactggttgacccgacggagtttacgtcatggtccttttacagagcagggatagcagagtttgtggccacttttctgtttctatacatcac

SEQ ID NO: 79066 - DNA, 246 bp, Glycine max
  Clone ID: 700963276H1
ggagaaccagcaatgcatggtcaccgccggtggaaggaccaagatcgacagccccagtgcactggtcttccagagctgcatcttcaccggcgaacccgacgtgtttgccttgtcccccaagattgcttacttgggaaggccgtggagggtttacgctaaggttgtcatcatggactcgcaaatcgatgacatctttgtccctgaagggtacatgccgtggatgggaagtgctttcaaggacacaag

SEQ ID NO: 79067 - DNA, 202 bp, Glycine max
  unsure (1)..(202): unsure at all n locations
  Clone ID: 700963277H1
gcgcgatgagattgatcaattgctccatgcccagggagagcaactgcggcgggcattggcggagaagaggcagagacattaccgcgcgctgctgagcgcggacggaggaggcggtggcgcgacagctctagagagaacggaagcgggaagtgcgaaatgtgccaacgcgcaagataccgcggagnnttggacagctacgcgc

SEQ ID NO: 79068 - DNA, 247 bp, Glycine max
  Clone ID: 700963278H1
gcggtttcgaacattcggaggaatttctctctcgctctctctcttcaattcaacacttcgagaatcgaaggcacagtaggtaaagagatttttcatcacacaccctactcaatcaaaaacttaagatttctgtatggtgggatcttaaaaaatatagtgattccaaatattaaatggggtgtctttgaactgatgatgaggtatgtatatactgggacagtaaatgtcaatttggatattgctgagg

SEQ ID NO: 79069 - DNA, 251 bp, Glycine max
  Clone ID: 700963279H1
ataacctgctggtgcagcttttcttttttaaaaacagaaaaatttaagttaaaagggataagaaaaatacaaatagctcaatacgcttctcttcagggttgaagacttgtgctagggcctttgtataacgagtaggcaatttgcaatttaattgcatccgttactattaagtgttagagtgaaatttgtgtgtactgtaaattctggtggaagtgtaagtacccataagttttgttaacttttgaaatgta

SEQ ID NO: 79070 - DNA, 247 bp, Glycine max
  Clone ID: 700963280H1
gcgaactatccatcgctcccgctcccaaagttcacattggcgcccgatgcagctgagttcgtaacaacgttgttaatgacttcattcccaaccccagtgaactatcaaccgctcccaaagttcacattggcgcccggggcaggctcagtttgtcaccgcgttaccaccgttgcgtagggctcgggaagctcggcatttggccattctcgctctgtgtgtttttctctctttcctcaagctttgtttt

SEQ ID NO: 79071 - DNA, 264 bp, Glycine max
  Clone ID: 700963281H1
taaaatggcaagcaacaccaccatggtagacgagcgtgcaggggcggagatcgtgtatggcgcggaggaatgccaccgcagactccatcggacctcctggaagagcttggattccccaaaggggtgatgccattgaaggaccttgtggagtgcggccgggttcgcgaaacggggttcatttggatgaagcagaaggcgccaagccagcacttcttcgaggcaaccaagaccctcgtgagctacgcggcggaggtcaccgcctat

SEQ ID NO: 79072 - DNA, 253 bp, Glycine max
  Clone ID: 700963283H1
ggtttttaagacctatatttgaacttctagttccattgtttcaaaatatcctgtattcaaatgctggatcatttcctaaagggtgaagattgtaacttatgtatcaaccagagtataataaattagatagaagtctacatggtggaaagcttatattgattagtattcaaggtaatatggatatcatgactatttagtgactctctctgcctttctgcaagggtctattatctttttaaattatttttgttga

SEQ ID NO: 79073 - DNA, 255 bp, Glycine max
  Clone ID: 700963284H1
gcgaggcagcacgaaaggccattgaagaagcacctccagttgttaaggagactcctattataattcaagatactgaaaagattaattcattattggctgaagtcaatagtttgaaggaatcactcctattggaaaaagaggctaaagaagaggccagaaaagctcaggctgaggctgaagctagaaataaagagatggttaaaaaggttgaagattctgaccgcaaagtggatcaacttcaagaattggttcaga

SEQ ID NO: 79074 - DNA, 247 bp, Glycine max
  Clone ID: 700963286H1
ttgaaatgatgaggatcggcatgaagactttctctgtatgaagggacgtttgtgcggtagagagggtccacatgatgaaggtgatctctttcataatccctctcataaggatcgagtgtaggattaacttgaggggctggtatcgcattccttttatctccttggagaccataagctcggtaactcttctcagtaagaaataaatcacggggaatttcttcttgccgttcgatttggggatcccttt

SEQ ID NO: 79075 - DNA, 250 bp, Glycine max
  Clone ID: 700963287H1
gtgaagataagcacagagagtgtcatctactcacctctactaccataaaaaaagaaaaacaaaaagccttcagagtcgactattcatcctttcttattcttaattaccgtgccttatccacccccaactatatttcagccagccgcggcgacacaacaacgccgacaccctcatttccactaccaactatacccgctcgttctctgatttctgaaatccctcacccatggcttcctcttccctctctctc

SEQ ID NO: 79076 - DNA, 246 bp, Glycine max
  Clone ID: 700963288H1
gagagagagagatggaggatctcgaggaggaagagaacggagcggaggaggtgttggggtcaagcttgaccatggagaaggtggcggcggcgaagaagttcattgagaatcattatagggctcagatgaagaacatccaagagaggaaggagaggcgttgggttttagaaagaaaattggcgtcatcggatgtgccaaatgaggaacggatcaacctcatcaaagatttagagaggaaggagactg

SEQ ID NO: 79077 - DNA, 247 bp, Glycine max
  Clone ID: 700963292H1
ctccacaccatgtcctaatctttctgcaccatcgttctccatttttcgctttacaaaaccactgtgtctgattaagggttctttaatatttccaatatttcttgtagtgaaaaagttgttagctaaaagaagaccaagtttttggtgttgtagaaggaagagaagaattaacatgaaaattcagtgtgacgtgtgtgagagagctccagcaacagtgatttgttgcgcggatgaggctgctttgtgt

SEQ ID NO: 79078 - DNA, 249 bp, Glycine max
  Clone ID: 700963293H1
caggaaggtccaaaaagtcagtgcagcgaaaacggacgatccgaagaatacccttttcatctctctctacaataatcatcatcttcctcttcttcttcagtaaattattgtacctgacgatcttctcggtttgatcttatatcaatggaatttttttagacagaactcggattcacagggaaatctgattgcataggaacaaaaaagacaacacctttttatctctacacaagtgattatggcggttgc

SEQ ID NO: 79079 - DNA, 270 bp, Glycine max
  Clone ID: 700963295H1
ctcggcatcggctcgagtttcgatagatgttatccaattgaaattttaaaaatgactgggataaacttaagaattcaattattgaaattgaataagtaaacaatttaattggattggtcgaatggtatcaaaaacatggagtactaactcccatttcttatttattattgaattaaccgatcaacttgctttgttatcgaacatttctttttgatttcaaaaattttccggaaaaaatttgaatctatttttatatgcgaatcaatccta

SEQ ID NO: 79080 - DNA, 259 bp, Glycine max
  Clone ID: 700963296H1
ctcctccgaagccactgttgctactaccttaccatcatcaccgcgctggcagtgttccttgcaacgacgtcgtccgccgacgcccaatcctgcaacggcatcctcgtctcctacgcccacaccggcggcgtgcggctgccgccgaatgtctccgacccggcaaagcagccttaccggttcgagtcgacggtgacggtactcaacaacggcctcgacgagctcaagtcgtggaaggtcttcgttgggttcgaccacgacg

SEQ ID NO: 79081 - DNA, 281 bp, Glycine max
  Clone ID: 700963301H1
caaactagtgaccaacagggttctagccacaagaaatacaaacctggagtgtgagggaaaaaaaaattactgtttggcttctgatatatgcagcgaatgccaaacataccaagtccaagatgagagttaagtatagattaacattgtaattccaataaatagtaatcttagttgcatcttagagagagaggctattagtttaaaccaggtaaaattaggtaaaactattaatatttggagggcttccttagcattgtataaaatcattagagttaatatat

SEQ ID NO: 79082 - DNA, 207 bp, Glycine max
  Clone ID: 700963302H1
ccatgttcttaggaggcttgtttttccttgtgggggcattattaaacggcttcgcgtcaacattgaaatgctgatcataggccgcctcttgcttggtttcggtgtcggatactgtaatcagtccgttccggtgtatttgtccgaaatggctcctgcaaatattagaggagtacttaaggggggcaacgatgttatcaattggaatct

SEQ ID NO: 79083 - DNA, 286 bp, Glycine max
  Clone ID: 700963303H1
ttcggctcgagatccaatatgacggaggaacggaacgtgcggaagacacgtgtggtcgacgtggtcctcgactgcgtcatcccttacatcgacgaccccaaggaccgcgacgccgtttcccaggtgtgtcgacgctggtacgagctcgactcgctcacccgcaagcacgtcaccatcgcgctctgctacaccaccacccgggctcgtctgcggcggcgtttcgcgcatctagtgttgcaaattctaaggggaaacctcgaggcgcaatgttcaacttgatacccga

SEQ ID NO: 79084 - DNA, 234 bp, Glycine max
  Clone ID: 700963304H1
tgcagcctcaaagcgctgcaggtggattccctccttacggttcttctgcctatagtgctcctgggtatggttatggtccggctaataatggcattggttatggtgcatatggaagttatggtagtgccactgctgggtatggtggacctgctggtgcaacatatgggaatcctaatgtccctaatgctgcttatgctggtggtccacctggtggcccaagaagttcatggcctg

SEQ ID NO: 79085 - DNA, 274 bp, Glycine max
  Clone ID: 700963305H1
ctttctctgcgtgatagatgtgtttctcctgatcttcagctctggattctgggcttggttgcaaaaaggtcattttttattggcttatgagggtgcaggttttcagcatctaagtagcttagcttccttgttcataagccttgaaggtttttgatgctgtttttctgcactttttgaaccttttaaccttggttgtgcatctgggtgttgttttggaactatctcccactgttggcatgtgagttttttttacatgtgtggattttagatatgg

SEQ ID NO: 79086 - DNA, 273 bp, Glycine max
  Clone ID: 700963306H1
cgacaacccaaacaaacactcacagcagcaagcacgcgacaaactttaaacgggttttctttgaccgtccgcaaccttctactaaaatcctccttcacttcaatctttttccactttccaccgaatccaagtcaagtctagaatttccaacgaaccgaacaaaggaaaatcccctcttagatccaatccaaattaatatttgtacatctagtcaagacccaagtccaacgcgtggtcgatcgaatttctcatttggggttctcttttttattt

SEQ ID NO: 79087 - DNA, 260 bp, Glycine max
  Clone ID: 700963307H1
atccaccttggcctagccagctagcgcttcttctctcgcattccgtggagatctagtgctgccaaacctcgctgaaaattagggtttcgtttcggaggtagacgaagatgttcggaagggcaccgaagaaaagcgacagcaccaggtactacgaaatcctcggcgtttcgaagaacgcttcgccggatgatttaaagaaggcttacaagaaagccgccattaagaaccaccctgacaaaggcggtgatcctgagaagttc

SEQ ID NO: 79088 - DNA, 263 bp, Glycine max
  Clone ID: 700963308H1
ttttgttttttcactctttggccatttttcctattcattcttttgagtcccgaccaaaaccctaatcgagttcgattgcaaaacatctcagtttttgaattccaccttctccgaccacccgctgccaaacctcttactaccgaggcgattgcgcttacggaaaagaagatggacatgacactagatgacataatcagaatgtctaaaaacccgaggaataagacgcaaagaagggttccgaacaaaagtcaaaagttttcaaa

SEQ ID NO: 79089 - DNA, 267 bp, Glycine max
  Clone ID: 700963309H1
gctttgcatttctcagctccagttctgttgttgagcaaagggtttgtatttcagaatgcctaactaacacgtcaaatgtaaatgcaattgctggagattctcccctttgctttggacatgatgttaaagagttggattgcaagcctgtagagggtaaaagggcaggtggaacaattggtcttggggcatttgggttccacaacaggggaacccggacatttgacattgttaattttgagcaacttgatcttgtggtgactgaatctg

SEQ ID NO: 79090 - DNA, 267 bp, Glycine max
  Clone ID: 700963310H1
gaagcgaatggtaggattgaatgtgtctcagccatttttgtcaccgatttgcaagacggcaccttacccacttgatctcatagccaccgccgcgtgcctccacttcggccaccttctccgccgccgcgccacccaccatccccgccttggggttcttcttcactcctgtttcaagattgaaggattagtggtgtcagagatgccttcaactcaatgggttgaactatcttcaactatcaactggcgatttggcttcctcatgttcaa

SEQ ID NO: 79091 - DNA, 268 bp, Glycine max
  unsure (1)..(268): unsure at all n locations
  Clone ID: 700963311H1
cccccttgtccctctctttctctcttctttctcctctcagcttccttttccttttgaaattatcacataaaagaacaaaaactcccccttaaactgataaggtatataagccacccttcagagcaatttgtccatcttcttcaatttattagccgaagatgtggtgcattagaccttagtctttgtcatagtttcttccacaacaacttggtagcanactttccaaaaattcacataagagcaatagttctctccctagaaactgata

SEQ ID NO: 79092 - DNA, 264 bp, Glycine max
  Clone ID: 700963313H1
gcacaagtcatggaaagaataatggttggaagtgcaacaaaggttgctttcaccctcttggccactttcgccattgtcattccatgccttgaggctggcattgctgagtttgacgattttctcaaagcccaagctgatgaagcccataaaattgctcttgattcctatgtcgagagccccaagatgtcgcccatgaactcaatttccatgttcatatggcatgggaaactcccccaaggaggaactaaggacgaggaaacttag

SEQ ID NO: 79093 - DNA, 130 bp, Glycine max
  Clone ID: 700963314H1
ccctgatgaagatctccgtctacaagggccccaccactccctcctgcgtcttcacctccgccaaactattgggcaaagtttcaatacccctcgatctcaccttggccgagtcacgcccctgcaccttcca

SEQ ID NO: 79094 - DNA, 263 bp, Glycine max
  Clone ID: 700963315H1
atcaagtggaaatgttgggaaatcaactttttcacgcatcacaagtaatttcggattgaggttgtctccaaagtctcctgtagcagatgacagttccaatgaaacagctggacaatctaatttgtttggaactattacgaaaggcctggtcgactcttctaagaatgcagtgaaagctgtgcaggttaaggcacgccatgttgtttcacagaataaacgcagatatcaggaaggaggttttgatttagatatgacatatatca

SEQ ID NO: 79095 - DNA, 238 bp, Glycine max
  Clone ID: 700963316H1
ttttacttcccctatggctcgtcactccttgctcttagccctcctcctcttcgccgccgtggccaccgccgcgatggcggtgccgcgtccgacgccgacgacatcctgatccgtcaggtggtgccagatgttggcgaagcgaagaggaggacaacctgctgaacgccgagcaccacttcgcgagcttcaatgccaagttcgccaagacctacgccacaaaggaggagcacgatcatcg

SEQ ID NO: 79096 - DNA, 276 bp, Glycine max
  Clone ID: 700963318H1
gccccctctcttcctcgcctccgccctcatcggactcctcaccggcctcgacgactacctctacgcctgcgggtggctcgccttccggtctccactttctctctaatccaagcctcccacctcgccttcaccgccgtcttcgccttcctcctcgtccgccacaggttcacgccctactccgtcaactccgtcgtgcttctcaccgtcgccgctgtggttctggctctgcgttccagcggggaccgccccgccggtgagtcgagtcgccagtacgtg

SEQ ID NO: 79097 - DNA, 274 bp, Glycine max
  Clone ID: 700963319H1
gaaagtggtatatattgatatatgtgtgtatttcctttgggcttgaaactcaaaactataataatgggttcttcttctcctccggacactagcaagagtataaagctagagcgatacaacagctacatcaggagactcaacagcaccaaactcctcaacgcctcctccaaactcctcttccgtgccactatcttagtcgcactcatcctcgtcttcctcttcaccttcaactaccctcccctcgccccagacttcacctcccaccgccacctcc

SEQ ID NO: 79098 - DNA, 223 bp, Glycine max
  Clone ID: 700963320H1
ggattgaagagtaaacataggatccacgatcaactcgatcttatacttttgtatctatttctctggaggcagctatctagggtcatactcatggggagcttcaaaggagacattggacatgccaatggcgaaaatcttaccgaagcttctgttgccaacacgagatgcacaacaacagcatcagacagacgacgtggaacaaagattcggtgacaatccctgg

SEQ ID NO: 79099 - DNA, 154 bp, Glycine max
  Clone ID: 700963321H1
gcacacaattgatatcatcaatggcattctattgctagccattttctcctttcgctaattcttcttctacgctctctctgcaatagatgccttccaaggacaaaatcgcttacttctacgacggtgatgtcggtagtgtatacttgggggcgac

SEQ ID NO: 79100 - DNA, 262 bp, Glycine max
  Clone ID: 700963322H1
aagaaatctgactccttcgcgtcacgaccgccaatggaaccttcttgacggccatgtctttgaaggaactactattgaaaggtgggcactaattagttttgggggcacacctgagcagaagtccaatgtccccagatttataaaccagttatgtcaaaggtgtgaacaattgggcatttttctcaacaagaacactgttattagtccccagtttgaatctatccaaattcttaacaatgtcacccttttggaatctaggctc

SEQ ID NO: 79101 - DNA, 164 bp, Glycine max
  Clone ID: 700963323H1
gggaggaagaccattagccggttgaaaatcaatgacctgctagagtcacactttaaggagaactgtgaggagtcctctgatggcgttttctttgactcagaagatgatgagaatgccttgacagcttgtgaaaccccgagaacagcaccttccgagaggaagag

SEQ ID NO: 79102 - DNA, 261 bp, Glycine max
  unsure (1)..(261): unsure at all n locations
  Clone ID: 700963324H1
gcaggcagtgtcatctctcctttgacgacaagatgagcatcccaattccccatcggcagttattcatagacggagactggaaagtccccgtcctcaagaatcggattcccatcatcaacccttccacccaacacaatgaganagatatcccagcagctactaaggaanacgttgatctcgctgtcgctgccgcaaaagctgccctctcccgcaacaagggcgccgattgggctccgtgtttccggctccgttcgggctcgc

SEQ ID NO: 79103 - DNA, 267 bp, Glycine max
  Clone ID: 700963325H1
attttgatgatgttgataatctttggcttgaacctctatcctggcagggaataggatgtacaaaaatcacaaaagcaagaaatgaaggttccatcaatgggaattcagaatcaagatcatatcttgaaaagaagcttgtgttttgttttggttcttatgttgcatcccaaatgttacttccttttggggaagaaaacttactttctacatctgagatacagcaggcacaagagatagctacacgaatggtcattcagtatgggtggg

SEQ ID NO: 79104 - DNA, 250 bp, Glycine max
  Clone ID: 700963326H1
caatttcaggagttggctcaagtactccttggcttgttcgtatttcaacaatggctaagaaatctgtgaagtactatgtggttgacgcattcactgattcagcgtttaagggaaaccctgcagcagtgtgtttcttagaagaggagagggatgaagagtggttgcaagctgttgccaccgagttcagtgcccgtcacatgtgtacttaactcgcattgccgagtcccatcacaaccttaactcgttccgt

SEQ ID NO: 79105 - DNA, 250 bp, Glycine max
  Clone ID: 700963328H1
caagagccctgcaggaactcatgatcccaccagtggtggtttgcttggaccaagctatgcttcatgcacatgtgctcctcacaagcttgtttctgattctgatatgaaaagttctggtatttcaccatcactgttatggaaaagtactacatctggccctaatttagatcgtcgatactatatccaccaattaagccccgggacctaaaaccggtgacactcttgctcatcatcagctggccatgagctt

SEQ ID NO: 79106 - DNA, 232 bp, Glycine max
  Clone ID: 700963329H1
caaagactgaaggcaaaaaaaacagagaaaggtctggctctgaatgatggatagaaggcactgttacaaggatttgctgccattggtggtgcttgttgccaatgaatgcaacaacacaggcttgttcactctcttcaaagcagccacactgcaagggatgagtaactatgtctttgtcacctatgcctattctgttgcctttcttgtacaactccctgacacttttttctac

SEQ ID NO: 79107 - DNA, 208 bp, Glycine max
  Clone ID: 700963330H1
gtattcttgaaaggaccatctttatatgcttttcaaggacttgctggtcgtctggcccctgttggagtccatatagcattgctactgataatggctggaggaactcttagtgcttgtgggagcttcagaggttcagtcactgtgccccaggggctgaattttgttgtatatgatgttctggctccttctggctttctatcctctcaaa

SEQ ID NO: 79108 - DNA, 221 bp, Glycine max
  Clone ID: 700963331H1
gagataactagaaacagtgtgatgaaaatgaaggtccttgttttcttcgttgctacaattttggtagcatggcaatgccatgcgtacgatatgttccctctccgaatgaacactggctatggtgcccgtactccggaggtgaaatgccgaaatttggaggcttgctgtggaagcacacaacatctttggctttgagaccattcctgaagattgcgttgaag

SEQ ID NO: 79109 - DNA, 133 bp, Glycine max
  Clone ID: 700963332H1
ctcttcttcgtctcaaatatcttcgttccttcgattcgttccatttcttccaaaatggccaaagacacagttcgcgttctcgacactggagctgctgggtgaattggttacgaagttggccccaagattgaaa

SEQ ID NO: 79110 - DNA, 216 bp, Glycine max
  Clone ID: 700963334H1
gctaacatgggtagctccgaattattattattattaacaaaatcatacattggcgaccagggtcgaagattaaagaaatggaagtgctgcggatgagggagttattgacactttggtcaacgttgcaaattaacaacgttgccctagtggggggaaaccacaccgccgccagattttgcactcgctaagtccccgttgttcttccccccctttccc

SEQ ID NO: 79111 - DNA, 264 bp, Glycine max
  Clone ID: 700963336H1
gagaaattactcactcgtggcaggaaagtactttctgacatttcaaactctgggaagccacaggttcctgagataaaaaataagaagaccctgaaaccaatagaggagtctcttccccccagtgcaattgccgaagaacaaatcttgcacgatcataagaaatgcatccattcacagtttgaaactgcatatggcatcaatttttcaagactgttggacttgacgatggtacatttatatattctatgtggtgcatttttttgg

SEQ ID NO: 79112 - DNA, 100 bp, Glycine max
  Clone ID: 700963337H1
ctttcaaccccatccaatcctcacatgcatgctgtgtctgccaaagtgccaagtcacataacatttccattgttaccagtctttctttccacaaaacata

SEQ ID NO: 79113 - DNA, 269 bp, Glycine max
  Clone ID: 700963338H1
ctttgaagagctgactgcagcctataaaagtggagagttacatcctggtgaccttaaaccagcattggcaaagtcgttgaataaaattctggagcctgtaagggaacactttaggaaggacagcaatgctaaagagctattgaaaagggtcaaggcttacagagtcaagtaatatgctgattaaggacttcaggctaatatctattctttgccaatcagccatagaattttcacgttgagattatgcacttgtggacttgtaaaatgtg

SEQ ID NO: 79114 - DNA, 265 bp, Glycine max
  Clone ID: 700963339H1
gtggaatatatgagagaggcgtgtgctttgaaaagtagcgtttgtatataaactatgtgagatgtggcctcttttgatgttatctttgtctctaataaaaccacgatttcatgccacgtggcctgtgttatttggttatggtggatcagttatgaacttatttagggtttaattatggtaaaacattgtttttcttaatttctcttgattcctgatctttggctttatggtggagtttgcactttgcggcatgcatgcatttgaa

SEQ ID NO: 79115 - DNA, 262 bp, Glycine max
  Clone ID: 700963340H1
acatcacatccatccttttgagtccctcctgaacctgtctgcatccattcccatttcttcttccgtatgcatgttcccaccgtctaaaaaacctagcaaagcaacaaaacggcgtcatgcttgggaagtagcatgcaattgtaaccctagaaataggagggacattctgatcggccttggaggactctatggtgctacaacaagtctcacaagtaacaacactggttctgcaatgggtgcttcattgtcgcctccagatcca

SEQ ID NO: 79116 - DNA, 263 bp, Glycine max
  Clone ID: 700963341H1
cttcaattcatatcatatcaattagatttagagctaaacataaaattgttttcacataccatggacaacaacaatgacttttggaaattcagtgaccagttgaggcttgaatctggtttggccaatctgtctctgaatgattattccatttggagcaacagctacagctccaagaggcctgatcagaggaggaatttgatgtcaagggagtgatttcaacaacaacaacaactcatcaaaggcttttgatgatgatttcaatg

SEQ ID NO: 79117 - DNA, 244 bp, Glycine max
  Clone ID: 700963342H1
gaagattcaatcggagctcagtctcaagaaacctaatcgccgatcgcgtcgccgtcgcgccgaaagttcgttgttgtactgtgaaattgccggttttaatttttcgttttgtgataattctgagaattagtaacaattattgtggtttttttttctgttaggtaacgttgctgtggttctttttttttcttttttcttttttataatttcgttgccgttttgtaggtgaagatagtcgttttgg

SEQ ID NO: 79118 - DNA, 259 bp, Glycine max
  Clone ID: 700963343H1
tccaactccaagtcacattggtgacaaagttagaaacaaggagaaagaaagaagatggcaggaaagaaaatcccagatgtgttgctgaattcaggacacaaaatgccagttataggcatgggaacttcagtggagaatcgtccatcaaatgagacccttgcttctatctatgttgaagccattgaggtgggttaccgtcattttgacactgctgcagtgtatggaacagaggaagccataggcctagccgtggccaaag

SEQ ID NO: 79119 - DNA, 262 bp, Glycine max
  Clone ID: 700963345H1
gtggattgatgatagtcatagcattaatattgggaaggctgtaccagtgcaccctcaaaagccagaggaacccagaaagccatccaagaagagggctaggccgggggagagtactcgaccgcggccaaaagatcgtcagcagatccaagactgtatcaaagagttgagacgaattatccccaatgatggaaagtgtagcattgatccttggtagaccggaaccatcagatacatgcttttcttacaaagtgtcctcaagtat

SEQ ID NO: 79120 - DNA, 172 bp, Glycine max
  Clone ID: 700963346H1
gaaaaggagaaggtttgggattttagagcgtatgtggttttggttggtaactgaagagtgtgtggaggaagaagaaggaatcggcggtgttcaactgacgatcgcatctcaaagtttggtcacgatcgttgctttgcttattcgacatttttttcccttttggtttttctga

SEQ ID NO: 79121 - DNA, 141 bp, Glycine max
  Clone ID: 700963347H1
ctttctcgcattttccctcttctttctctctcacgttttccgcttcagttttctcgggaaaatcatggtgaaaggtccaggcctctactctgacattggcaagagagctcgcgatcttctgtccaaggattatcagaatga

SEQ ID NO: 79122 - DNA, 226 bp, Glycine max
  Clone ID: 700963348H1
tttctgtagtctcaattatagtaacagtgcaagatctattttccacatcttggatatcattggctaaaagattgaatattgtgttattccttctagtagtcaaggggaacaatgaatgcactagcagccaccaacaggaactttaagttggcctctaggcttctgggattggattcaaagcttgagaaaagtttactgattccattcagggaaatcaaggttgaat

SEQ ID NO: 79123 - DNA, 240 bp, Glycine max
  Clone ID: 700963349H1
gcagcgtttggaaggacgcatcctgttgtgacgtacttgcccaagtcaaaagcagataaaaagaaaagtctgctgggaagttcaccagattctagtgaggctcaagtggcatccaaggtggttgatgaatctgaagatgatgatgattctagtgatgatggtgattctaatgatgatggtcctgtggagtgggcttcatattggccacctattataacaatctacgtggttgcttacttc

SEQ ID NO: 79124 - DNA, 272 bp, Glycine max
  Clone ID: 700963350H1
aacaaacttggttttaattggtataggcttgccaaggtcttgttgattgagcgttaagtgctttaactaatcaatcccaagaccttggtttaccttgccacacaaaaaaatatataaaaaggcaaaataataataaaaaaaagagaaggcttggagccaagaaaataaacacaaagcacaagtcatggaaagaataatggttggaagtgcaacaaaggttgctttcaacctcttggtcactttcgccattgtcattccatgccttgaggctg

SEQ ID NO: 79125 - DNA, 270 bp, Glycine max
  Clone ID: 700963351H1
atgggattgacctcacaactcctcctttctttgttcatcagtacccttcttcttcttcttccctcttccctttcacaatctaaccagttttgtgacgctggaacttcatccaagctgttgatcaagggcggcaccgttgtgaatgctcaccaccaacaggttgccgatgtctatgtcgaagatggtatcattgttgccatcaatcccactattacggttggagatgaggtgacggtcatagatgccactggcaagtttgtcatgccaggg

SEQ ID NO: 79126 - DNA, 270 bp, Glycine max
  Clone ID: 700963352H1
cacacacagaagatcgatctggtagaaacgatgaaggaactatgggcacaaatggggtcactaatggccactattgtgttcatgtacacaatctttgagcgcttcttccctccacacttgcgtgaaaaacttcaagcctatactcaaaaactcaccaaccatttcaacccttacatccaattaggcttccctgagttctcaggggaacgactgaagaagagtgaagcatacacagccatccaaacctacctgagtgcaaactcatcccag

SEQ ID NO: 79127 - DNA, 263 bp, Glycine max
  Clone ID: 700963354H1
ggcctgctcttgccagtgtaattgtggaagctctcaaggtggacagtttgcagaagctttgctcatctttagaacccattcttcgtagagttgtcagtgaagaagtggagcgtgctttggcaaagttaggtcctgcaagacttagtggaaggtctcctcctaaaatgattgaaggccctgatggtagaagcttacagctgaaatttaggtcccggctgtctcttcccctattcacaggaggaatagtggaaggcgaccagggg

SEQ ID NO: 79128 - DNA, 150 bp, Glycine max
  Clone ID: 700963355H1
ggggaaggaatggacgaaatggagttcactgaggcagagagcaacatgaacgatttggtggcagagtaccagcaatatcaggatgctactgctgatgaggatgagtacgatgatgaggttgaggagggggagcatgctttcgaggacccg

SEQ ID NO: 79129 - DNA, 120 bp, Glycine max
  Clone ID: 700963356H1
caggcgaggagaaagatggaggggaaggagcaggatgtgtcgttgggagcgaacaagttccccgagagacagccgattgggacggcggcgcagagccaagacgacggcaaggactaccag

SEQ ID NO: 79130 - DNA, 262 bp, Glycine max
  Clone ID: 700963357H1
aaaaaaatggatgagaaaaaagatatagtatataatatatggaaatgatttgggtggcggggaattgtctttcatctggtaagactgatgacgaagttgttatcaccttcagcaccaccatgtccatgtctaagggttccaattccaaatccaaccgtaaaatatcgatatgcatacagtcacagagggcaattgcgtgttcgatgcagtgatatagtgatgaagagaaggagaaggagaagaagaagaagaaggaaaagcg

SEQ ID NO: 79131 - DNA, 107 bp, Glycine max
  Clone ID: 700963358H1
gaaaatcctttctttcctagcaagcttaccaagataatagaaaaaacatttcgatcatttccatatggacaagctctgtttcaactactgtttcgttggatactgcc

SEQ ID NO: 79132 - DNA, 206 bp, Glycine max
  Clone ID: 700963359H1
agaaaaaggaggaacgcagaccgaggcgtttccagttcgaaagggaaatgaaagtgtctttgttggtgaagggtaggtgagagaaacgaaaggggtgtgtgttgggttgaataggtatagataggatcaatgagcaacaacaacgcaggaaaggtggtgtgtgtgacgggtgcttctggtttcatagcttcatggatcgtcaaatt

SEQ ID NO: 79133 - DNA, 78 bp, Glycine max
  Clone ID: 700963360H1
atcgcgagcggccgccctttttttttttttttgaacaagacttatatgttatttaaagatagagattccaaactttac

SEQ ID NO: 79134 - DNA, 257 bp, Glycine max
  Clone ID: 700963361H1
ggcctcaccttgactttggatgggtaaataaagctacatatcatccaaagtgaaagatttgtgctgttctcttcttcttgtgtgaagccaaagccacaacaacaaccattggaacaacccaacaacaacaacatagtgaacaacaacaaccttggtaataataataacaaccatggagagcaccgaagactcatccacgagttcacaacaacaacaaccgaacctgccacccgggtttcggttccaccccacggacg

SEQ ID NO: 79135 - DNA, 153 bp, Glycine max
  Clone ID: 700963362H1
ggcggcttggtttgttctacttcctcttacactgggattagaacaaggcgtttgtgcacttctaacaacaccacctttcccttcccccaacaacctcaattactctctttcgctaaacctctcaaactcatgtctcaacctttgaccaccaat

SEQ ID NO: 79136 - DNA, 218 bp, Glycine max
  Clone ID: 700963363H1
aatacaaccaagcaggcaaaactgtctggcggaggaaagttgcatcacttatagcaatggcaaagttatccaagatcttgtccttagattgcgacacgtggaaagcggtgaagtggaaatccaattgcaatggattaatcttcctggctccaagggtttatgattccttaaccatatgcatgcattcaactttcaagcaggggtgggttttatatatc

SEQ ID NO: 79137 - DNA, 141 bp, Glycine max
  Clone ID: 700963364H1
ctttctcgcattttccctcttctttctctctcacgttttccgctatcagttttctcgggaaaatcatggtgaaaggtccaggcctctactctgacattggcaagagagctcgcgatcttctgttcaaggattatcagattg

SEQ ID NO: 79138 - DNA, 248 bp, Glycine max
  Clone ID: 700963366H1
cttttgctggataacaatgaatttcttgttggtttatctcccgaactaaatgaactgaggatgctttccgaatgtcaagtagatgaaaatcagctgactaatgctgctaaaatgccagcttgtacagaaagagctaccacaaggcatattggtcaagtaaaggtactcgtggctcacaacattctaatacttctcctgctgctaatcattaccagtttaatcgtgtggctgctccacctcttgagagc

SEQ ID NO: 79139 - DNA, 264 bp, Glycine max
  Clone ID: 700963368H1
catcatcaaagattcaggaaagtgtgtgcgatgcagccggagatgaacttggggaggatattgaatacattgatttatacaatatttatgctccactatgcaagaatgcaaatctcacagccctgcccaaaaggaacacaattgtgactgatccatgtagtgagaattatgtgtacgcatatcttaatagaaaagatgttcaagaggctctccatgccaatgtaaccaacctcaaacatgactgggaacctgcagcgatgtcat

SEQ ID NO: 79140 - DNA, 98 bp, Glycine max
  Clone ID: 700963369H1
atggatccgtgccccttcgtgcggatcctcgtcggaaacctcgccgtcaagtccccggcatcatcaaagccctcttctttctccggcaaagtccaccc

SEQ ID NO: 79141 - DNA, 265 bp, Glycine max
  Clone ID: 700963370H1
aatcaacaacaacatggctaatttgcaaggagggcctgactttgacaaaatcttccacttcctctccatttgcatccttgctttcatcaatgaaggctcttcctccctctcaagtgcattcatgaacgagccatggtcatggggcataagcattcccattagtttgtacgtgaaatttgcacttgagatccacactcaccttggaatctgtgttggggttggagtaccctctttggtctattggggtgcacacgtggtgccattg

SEQ ID NO: 79142 - DNA, 262 bp, Glycine max
  Clone ID: 700963371H1
gaaaaaacgacattcattcatctatggctacccttattgctcccagcaaccactctccccaagaagacgctgaggctctcagaaaggcttttgaaggatgggggactgatgagaaaactgtcatagtaatattgggtcatagaactgtttatcagaggcagcaaatcagaagagtctatgaggaaattttccaggaggatcttgtgaaacgcctagagtctgagatcgtcggagactttgagaaaccgtgtaccgatggata

SEQ ID NO: 79143 - DNA, 263 bp, Glycine max
  Clone ID: 700963372H1
gctgcttcttcagctagctccgttcctcctccatctcattctcattctcccaaatcttcattcacaagacaaaatgggttgtcatggtagcaaggagaaaaaatcaaacacttcctatggatcagcagccactggcagtggtagtggtagtggcagtggtggtggttacaacactgttcagccatcaccacctactaccgatcaggttcaagcatcagcacagactccagaaaaccgaaaagcttctcctacagtgcagaaga

SEQ ID NO: 79144 - DNA, 260 bp, Glycine max
  Clone ID: 700963373H1
gtccatgctcttcttggatggatgtgcttctctgcatttcttttctagaatgtgccccagcttctccttcttgtatttttccagaagaaataatctgattcgccctagccctgccattctgcattccctcagcattcattgctttttcattcctcatgacttttgctcagtgttcaatttccaacatgtttcaacatagaaaccatgatgatttcgcaactgtggcaggtgttgtggtacttcatgacgagttttatgtt

SEQ ID NO: 79145 - DNA, 255 bp, Glycine max
  Clone ID: 700963374H1
cttgcctttttctttttcctttttctctgcccagctatatgcttgtgtaagaaggggaactactaagccattctaaagggagctgaagaatgtggaatctgaatgactctcccgatcagagaaaggactatgaatctgaaggctgttcttcttctctgaatgatgataaaggcaagagagtgggatctgcttccaatcagtcctctgcggtggtattgaagatgggatcggaaggaagagacagtgaaagaggtg

SEQ ID NO: 79146 - DNA, 256 bp, Glycine max
  Clone ID: 700963375H1
cttttccctcgttgaaatgaaaatgggttcttctttgtggacttcgtgtctaattttggcttcactagcctcttctgcattctgtgcctttccacggaggccagtggatgttccattcggcagaaactacgttcccacttgggcttttgatcacatcaaatacttcaatggaggttctgagattcaacttcatcttgacaagtacactggtactggcatccagtccaaagggtcatacttgtttggtcacttcagc

SEQ ID NO: 79147 - DNA, 247 bp, Glycine max
  Clone ID: 700963376H1
cttattcaaatcctctctcatctcttccttttcgctggcaattaactcacgagggctgcacatcgacaatgggtggggagcggaacaaggtcttctctttggccgaggtctctcagcacaacaatgccaaagactgttggcttgtcattcatggcaaggtttataatgtgacaaagttcttggaggaccacctggaggggatgaggtcctgtgtcctccacaagggaagatgcaaccaatgattttg

SEQ ID NO: 79148 - DNA, 123 bp, Glycine max
  Clone ID: 700963377H1
agagtctccattgtgaagagagagagagagagagtgatggggaattcatttgcggtgttcggcttccggcgagaggtctggtgtcggcggcgaggtgacggacgatttcggcttgaggcgaag

SEQ ID NO: 79149 - DNA, 151 bp, Glycine max
  Clone ID: 700963378H1
tgcacgcacttaaccctatcttcttagttacatatttcaattttaaaactccaattacaatgatccttccaaacatcaaagttcgtcttttcttactcttttgccttattgggatagtgtcagctcagttatcctctaccttttatgccaa

SEQ ID NO: 79150 - DNA, 129 bp, Glycine max
  Clone ID: 700963379H1
gacatatatcttagtcagtctcagctaggtactggtgtgggcgttattcggtcatggatctgtgacaagtatgcgatacggacttatgcttctcgactgaagatatcagggtgaactgatcatcctcta

SEQ ID NO: 79151 - DNA, 189 bp, Glycine max
  Clone ID: 700963380H1
aattctgatacagcaatttccattgctgaggagatggtggaacatctggaactcacaaatgaggatgtatctgtcattgcagagctaataaatgacatgattgctaagcttgtccccaacttgaaacccttaagtgagaaactctcatccggaacagatcaattgtacaggccttcttcggaagttcag

SEQ ID NO: 79152 - DNA, 268 bp, Glycine max
  Clone ID: 700963381H1
tgacacacaacacgaaacacacacatgacacaacacagcacgctgcaagaacaacaacaacaacatagccacaacacaaccaaatgacacccacaaagagggagacaaagagagacgctactacttcttcctcctctctgctcgcagaaccctgaagctccagaagccccttttcgaattaattcgcttctctcatatctaaattcattgattcttgtcgtggacatgttggagggtccaaggtcacttgtgtcgagggacatacaga

SEQ ID NO: 79153 - DNA, 267 bp, Glycine max
  Clone ID: 700963382H1
gggcactcaacattttacactcttttcttcttctcgttgttgcttcggtgttgaatcatggatcagaaagtcgatttcagtgctccgcattccatgggaaccactatcatcggcgttacttacaacggcggtgtcgttctcggagccgactctcgaaccagcactggagtgtatgttgccaaccgagcatcggccaaattcaaacggttaattgttattgttaacgtgtgtcgctctggatcggctgctgattctcagattgtctct

SEQ ID NO: 79154 - DNA, 266 bp, Glycine max
  Clone ID: 700963383H1
gctgaagcaagtaaatgagtttgctgcaaagggtcgcggtcctccaagaaagaatggatttgccagggcatcctccatgtcaccaaatgcaagaatggccagaatagcttcacttgagaacatgctgagcatatcatctaattcacttgtagcaatggcttctcaactttctgaggcagaagaaagagaacgagccttctctaatcgtggacgctggaatcagttgcgctctatgggagaagccaagaatttgcttcactatatgt

SEQ ID NO: 79155 - DNA, 250 bp, Glycine max
  Clone ID: 700963384H1
aggagctttcctccatacgaatccaaggaggagagaggagacacagacacaaaggaaacggaaaaagcaacacacacaaaaaaggtctgtgcctcctcttatatgtaatagatagtttctgaaacaaaagaaaaaaataaaataaaaataaaaggaccacatggattatgaaaacaacagttgaatttgggagggggtactcttatacccgcgtgtgtgtggtggactagtggatacagcatccgggctg

SEQ ID NO: 79156 - DNA, 260 bp, Glycine max
  Clone ID: 700963386H1
atggctcccaagggtttaacctttctggctgtgttaatatgcgtttcagcactgtcactgagtccttctgttgcgggggaagggcaaaataatggccttgttatgaacttctacaaggaatcatgccctcaggctgaagacatcatcacagaacaagtcaagcttctctacaagcgccacaagaacactgctttctcctggctcaggaacatcttccatgactgtgctgttcagagttgtgatgcttcactgttgctgga

SEQ ID NO: 79157 - DNA, 258 bp, Glycine max
  Clone ID: 700963387H1
aaacgtatgaattggtcggtttttctccggagtcgtcttcacttttctccgagtttttattatcatcatctctctcgtgtccctgtctccatctccatctcttagtttcttcttcaaatggcagaagttgaagacatagacaaccctcatcacgaccaccatcattacctttcttcttctacaacacaacctcaagggataatttccccgcgatatctgtaaagaaccttcgtgggagtgaacaacaacagcaataaa

SEQ ID NO: 79158 - DNA, 95 bp, Glycine max
  unsure (1)..(95): unsure at all n locations
  Clone ID: 700963388H1
tttaatacttaattcgtctttgttatctgtctttctgactttccccttttatatttctgggngcgatattgttatcggttaatgtgtgcacaact

SEQ ID NO: 79159 - DNA, 250 bp, Glycine max
  Clone ID: 700963390H1
accccccacgaagcaccaattatggctctgaatctttgtatctcacctaagtttaaatgggttccttccttagatagtgcttcctattctttgagaccttcacttgggcctggttttggtaccataaccattgcaagtgtgagcctaggtcctacaagagtttgagtttgaaggaggagtgggagtgttagtgtaagatctagtttagaactgcggggcccacagtcacagtgggacaggtcactgaggt

SEQ ID NO: 79160 - DNA, 247 bp, Glycine max
  Clone ID: 700963391H1
gcatcaacaaaaccaactcctggacttgctgtcaatatcacaccataactgctattgaagctctgctctctgacttgcttgcatactctctctgttctttctgttcacaaagatttgtaaatttatatttatcataccatatatactatataatatattgtatgctccacttgtttaaacctgtgtcgcatactctggaccataacatcgtggggctgatgtctagagcattggggcatgagtacat

SEQ ID NO: 79161 - DNA, 255 bp, Glycine max
  Clone ID: 700963392H1
gtttttggatgaaggtcccggtaactctttcccccgtaagatgggacgtgttgatggacacaatcctcatatcaggaaggatttgccgttgacctggactaatgtctatgaggaggccactaattcatctgtatcattagagacttcaagtaaagatgagactggtcagtttttggatccaaagaaggtacacattcaaaggaacctaatgcaagtgaaagaaaattcaaagagttcatttgtggtgggggagcc

SEQ ID NO: 79162 - DNA, 244 bp, Glycine max
  Clone ID: 700963394H1
atcaagattcaagcacatagttatcatcaattccccagctagttttggccacgcctgcatcttcttctgctttaagctatggcctctaacttcagcttgagaactttgatgatatttgcccttgcattttctctcgccctgcaaggcactcttggagggatagaatgtgagagtctgagccatgacacatgctcattcgccgtgacatctgctggcaaacgatgtgtgcttgagaagcaggtga

SEQ ID NO: 79163 - DNA, 194 bp, Glycine max
  unsure (1)..(194): unsure at all n locations
  Clone ID: 700963395H1
aaaatcccttgatttccttccttcaccgcacccacttaaatancnnaaattagttntccaatgcagaaagcaggttacggtggcgatggaatatacaggtctctaaggccttgtttggttctcccaaatgaccccaacctctccctcgtctcattcctcttccaaagcgtttcctctttccaatccaaaatcgc

SEQ ID NO: 79164 - DNA, 190 bp, Glycine max
  Clone ID: 700963396H1
gttcttgttattcattattcattctcagcttcttttcttctggggggcaaaaggggtcacttttcagatccgagattgagctcctttacccatcatcatcatggagctcctcgggtacctgaatcagggtcacccttctagaggaacaacacttgttattactctttcattggtgctttcgacacttgtg

SEQ ID NO: 79165 - DNA, 269 bp, Glycine max
  Clone ID: 700963401H1
gaagcaaacaagaacaagttcatagaggattggggcactgccagagagaatctggagttcaatttccgttggactcgccgcaaccttgctcttgttggcatcttcggcatcgctattcccgtcctcgtctacaagggcatcgtccttgaattccatatgcaagatgaagataatggtcggccgtacaggaagttcatgtgagagagtatggagagtcttttgtaataattcgtcaagttagaccttgatattatgaggctacaaaccat

SEQ ID NO: 79166 - DNA, 267 bp, Glycine max
  Clone ID: 700963402H1
gtttgctttgttctctttctctctcctcaaattttttcctctctctctagggttccaagagtgtcttgaactactccagaaccctctcttgtttttcacaaatttgggtttagtagagtactgacccagaaaagaaggttcaacaggtacctaagagaggggatagaaagaaaaaaatagaaactgtacgtataaaagaagaaagaaacaaagatataaggaaaaagggaaaatattttgaataaggaagatataaggcaatatata

SEQ ID NO: 79167 - DNA, 257 bp, Glycine max
  Clone ID: 700963407H1
cttaagcgaaaagcaatagaattcaaagagagagtttcttgttctgtattttttgatttgatcatttcaatcttcaatttttttttatatatccaccaatccgcaaagtgcaaatttctaatctttcacgtattgggttcttctcttttccctcttcgtctccgatcgatccaattctcttcccatggctacgatcggacacaacaatctcaatgccaaattggttcttctcggggacatgggtgctgggaaatcca

SEQ ID NO: 79168 - DNA, 261 bp, Glycine max
  Clone ID: 700963408H1
ctgttgcagagacagtggttgagaatcactgctcaaaagaataataataccaaattccaaccagataaggagtagtggaatttggaagcttcacttctttcttgtattacttgatgcccttttcccttctctccctccctcttctcttattctcattgtttagttacctaccgtggatcaaagtcaattccctatctcgcttctttttgtagttgatttcttttgggtttcgcagtctccccaaaagggttgtttttattt

SEQ ID NO: 79169 - DNA, 258 bp, Glycine max
  Clone ID: 700963409H1
caaaatggttttctcgagttgttcacgcgcaccgcgtggtgggtgattccaaccgtttgggtgccggttgcacgttggttcatttccaactccgtaaaatcaggcctcccttctcttgatgtagctctgctcgtctttcttggcatcttcgtttggactttggccgaatacacattgcaccgtttcctcttccatgtcaaaaccaagagctactggggaaataccttgcattatcttctccatggctgccaccacaag

SEQ ID NO: 79170 - DNA, 256 bp, Glycine max
  Clone ID: 700963410H1
gatggaaatcggtttggagaggggtttccgaactgcacttagtgagttcatattaatgcaactgcagcttgccccagtattcttcacattttcacttgggacaaaaactcattattttggaagaacattacttcatggaggtgcgaaatatagacccactggtcgaggatttgtggttttccatgctaaatttgctgacaactatagactttactctcgtagccactttgtcaagggtattgagctcatgatatta

SEQ ID NO: 79171 - DNA, 257 bp, Glycine max
  Clone ID: 700963411H1
aatggcttgtagaccttcttctttccttgcacttcttctcatcaccactatccttcttgccactacatggcaagcagttgctagacgccacattggtccaaaacactcaaacaatggggacaagaaagagcctcagtttttgttccctcctgaaggtaatttccattttcctggctttgggggagtagggttgccacctttctttgggtttacacctcaaaacccaaacactggtggtagtggactagggtcaggac

SEQ ID NO: 79172 - DNA, 260 bp, Glycine max
  Clone ID: 700963414H1
ggcagtgaaagctagaatccgccgagagaacaccaactctagaaggtactcaggatcttacatgagaagctttagagaagacacaaggtcatttagatcaaacataaccatttctagcactgcttcttcacccggataccccttaaaagatgatatagacccttcaacatattctttcacaactgctcttaaagcattgcaagcaagggcaggctataacaggtggggatgcttatctccagatggttttgctttaaatt

SEQ ID NO: 79173 - DNA, 271 bp, Glycine max
  Clone ID: 700963416H1
accccatcaggatcgccgagggttacgaaatggcgtccaggatcgccgtcgagcatctcgagcgcgtcgccaacaagttcgagttcgacgagtctaatttggagcccctcattcaaacttgcatgaccacactctcctccaaaattgtgaatcgctgcaagcgtagcttggctgagattgctgttaaggctgttcttgctgttgctgatctggcgaggaaggatgttaatttggatctgattaaagtggaagggaaagttgggggtaaatt

SEQ ID NO: 79174 - DNA, 259 bp, Glycine max
  Clone ID: 700963418H1
ctaggaggggtgctcatgtaggaaatgataatgtgggttctggtgctagtggtaatgttaatgctaatgctgcctctgctgtgctggctggtgcgaggggggagtctagtaagaaggctgcattgggtggtttgaggaggcggggggcaggaaacttggggaagttggatttgaatgtggagtttagcaatgaggtggaggagccttcccgtggagtgcacaaccgcgaagggaatgctgctggacatgctgaggataa

SEQ ID NO: 79175 - DNA, 258 bp, Glycine max
  Clone ID: 700963419H1
tccgtttttctctctctctcgccaaacgcttcttccactatgccttcccaatcggttctggttaccggaggagccggttatatcggtagccacaccgtccttcagcttctcctcagcggttaccatgtcttcgccgtcgacaacttcgacaattcttccgaaaccgccatcaacagagtcaaggaactcgccggagaattcgcaaataacctttccttttccaagctagacttgcgggacagagctgccctcgagaaa

SEQ ID NO: 79176 - DNA, 256 bp, Glycine max
  Clone ID: 700963420H1
aatgatttatgtggtatcaaggagtctgatactggtttagctgcaccaagccagtgggatcttgtttctgataaacaaatgatgcaggaggagcagcctcttcaggtagcaaggtgcacaaagatcataaatccaaattcagaagatgccaaatatgttatcaatgtgaagcagattgcaaagtttgtcgttgggctgggtgataaagtttcacctaccgacattgaggaagggatgcgtgttggggttgatagaa

SEQ ID NO: 79177 - DNA, 255 bp, Glycine max
  Clone ID: 700963421H1
cacctttcccttggcgacgccgtgagaaacgaaaagcgaacaaaaaaaaaacagagtggggtgggaggcacacgcacaaacgcagagtcagaatctccaatcttcaatcggagacaaagctagctcgaacgaacgaagtagagtagtgtgctacgaaaaatgtggcggtgcatcgcacgtggtctccgtggacctgcttccaccagatccacctgacatcactcacttggatctcaactttctagattcttctct

SEQ ID NO: 79178 - DNA, 245 bp, Glycine max
  Clone ID: 700963424H1
ctttaaaatttgaatcaaaacgttcagtaactgctggtaatcgattaccattcttgtgtaatcgattacacagtgtaaagtttgaattcaaatttctaatagctgttataagtcattttggccattggtaatcgattacatcctctggtaatcgattacgagagagtaaatctcttgaaaaagacatttttacttaaatttcttggccaaaccttttgcagtttcaatttgggattcccttccta

SEQ ID NO: 79179 - DNA, 254 bp, Glycine max
  Clone ID: 700963425H1
aaaagatggaactggaacatgtgaccagcttgtcaagaagagatcatgaaagaccaaatcccttttttcgagtgagagcagttagcttgggtggttcgttggttactgaaggttggatcaaaccttctctcttcgatggcattccaaacaaagacttattcgatggaactagtcttcggttcaagtctgtgtcaacagggaaatatctatgtgccaagtctggagggggaaatgtcctacttgcgaacggcaca

SEQ ID NO: 79180 - DNA, 256 bp, Glycine max
  Clone ID: 700963426H1
gaaaattgttattttgatagggtttacagcaaatgcagcatagcctgcctcgtcacaaaatactgaacgccgcagctctgtggttgatcgacgcattcttcacttcaatcccacaatgtctataacgcacagcctcaccacttcactctcttcttcttcctctgctttcttagctccctcttccttcaattccagaggacaggtttcgttgcctgtgaagagcgtgagcatttgcaaatgcgttgccacacccgaa

SEQ ID NO: 79181 - DNA, 199 bp, Glycine max
  Clone ID: 700963427H1
aaggaattgtcctatttgtgactctgacatggatgctagcgtgcatgtcaatctctcttagtacaactttttttcttttttctttttacataattttcattgtagagtttagaacaacagaaactagaaacaaaatagtttatcttgtcaaaaagacagttagaagaaaaaaaaaatagaatttggaattcttttgttc

SEQ ID NO: 79182 - DNA, 257 bp, Glycine max
  Clone ID: 700963430H1
gtttgtttgttttgtttctatgtcttgtcatatgttctaagaaggcaatgttgggctactagccccactctgctgacaattggcgtgaccgacatctgtagcttttatgtccacggaggaatcaatgcacctgtttttggtgggtcttgttcgtcttcaactggaaactattacctactttggtagacacaaatattatctctaaagcttgtttacaatgctcctttaatcttattgatacaatatatgcaacaagg

SEQ ID NO: 79183 - DNA, 259 bp, Glycine max
  Clone ID: 700963431H1
cggcaacttcgagctgggtccgaagccctccgccctgaaaggaactgtggtgattggtggcagccactcgatcccagaatgggagatctctggcttcgtggagtacataaagtccggccagaagcagggcgacatgctgctcgtggtccccgagggggcctacgcggtgcgcctcgggaacgaggcctccatcaagcagaggatcaaggtgatcaagggcatgtactactccatcaccttcatggtggcccgcacctgc

SEQ ID NO: 79184 - DNA, 261 bp, Glycine max
  Clone ID: 700963432H1
caagaaggcatatgtcaggttgacacctgattacgatgcattggatgtggcatacaagattgggattatctagggtagtactagtacttaggcagctctatggttattcttgaagaaaacttttttaaaaagcatagattctatattttgtgttttgttattttgtatcttttgtctcagttgacactaagcagaccttgtgtttcaattttgactagagagttgtttaaattgaagatttaaatgatcatgttaaaattt

SEQ ID NO: 79185 - DNA, 129 bp, Glycine max
  Clone ID: 700963433H1
aaggactataataccgtcagccacactttacaccccatcctcactcacacactccaatgaagtcataacaagaagaagaaaaagaagaaaaaaaaacacttcccagagttcaaagacctcaaattccac

SEQ ID NO: 79186 - DNA, 258 bp, Glycine max
  Clone ID: 700963434H1
caagcagcgtaggtggtatatttcctcaagtcagtataaacttcatgggctgagatctatggttttgaatccagaacattacctcatgcattatggtttccttgatggtgctgacaatgtggtgcattggcttccaaaaagtggagcagggattcacaattttacgagatcttgtcctaaaagataagatatatgtatatgacttagctaatcaacgaattggatgggccgattatgattgtaccttgtctgtgaacg

SEQ ID NO: 79187 - DNA, 257 bp, Glycine max
  Clone ID: 700963435H1
tgaggattgagccacactttgctgagtgctacgggaatatggcaaatgcatggaaggagaaaggaaccattgaccttgcaattcgctactacttgattgccatacagctccgtccccattctgctgatgcatggtcaaatctagctagtgcatacatgcgtaaaggaagactcactgaagcagcccagtgttgtcgtcacccacttgctataaatcctctaatggttgatgcccataccaacttgggtaatcttatg

SEQ ID NO: 79188 - DNA, 254 bp, Glycine max
  Clone ID: 700963437H1
ccttcccagaaattaggttttagtatttctttctttctttatttatcagcgattcgtggcaatttttcgaaggtacggtttgatgggtgatcgcggttcgggcgtggcgaaccgatttggatgaagcaggcggaggaggcgaactgaagagcgaggcggagaaggacgcggcggcgaaggcggcgttcgaggccaccttcaaggctttggagaacaaacatgacaagggaggaggaggaggaggaggagggagc

SEQ ID NO: 79189 - DNA, 255 bp, Glycine max
  unsure (1)..(255): unsure at all n locations
  Clone ID: 700963439H1
ggtaggagatactctcattcacctcccatcatcattataatcattcattccaacctacccttattcttcttcttcaatttcacacccatcatgatacattttccgatcctctttctcgtcgccaccctcatcaccctcgcctccggtgcccgccacgatattctccggttaccctccgaagcttccagttncttcaaagcacctgctaatgccgatcaaaacgatgagggcaccaggtgggcctttttagttgcc

SEQ ID NO: 79190 - DNA, 250 bp, Glycine max
  Clone ID: 700963441H1
gtttctatcaacactactccctccaccatgcaacactgcatgcagaatgcttccaagtatggataatacttgcccatgtatgtcggatattacgcagatcattaggaaagctctcattccatgctattgtttgtattttccttgcatcttctgtgtctccccaaatgaaagagcgacattgcacactaacacagatcttgtagcaatggcgagcgctcccactccacgcgaagagttcgtgtacatggcg

SEQ ID NO: 79191 - DNA, 256 bp, Glycine max
  unsure (1)..(256): unsure at all n locations
  Clone ID: 700963443H1
attaggaggaacctccagctatcgttgctgccggacggngncattagtcgccgccaaccgaaactacgagagttacgtcgtcgttttgaagctcaagccgccgcacgtacacgaaaacgtcgcgtcgtgctccaattgacctcatcgccgtgctcgacgtcggtggcgccatgtccggcagcaagctccgtctcatgaaaagctccatgcggcaagtgatctcgtcgctccgtccaaccgatcgtctttccatcgt

SEQ ID NO: 79192 - DNA, 252 bp, Glycine max
  Clone ID: 700963444H1
taccaacctatgaagacaaagatgctgactggatgctcgttggtgacgtaccgtgggaaatgttcgtggattcatgcaagcgcctgcgtataatgaaaggatctgaggcaatcgggctagcaccaagagcagtggaaaagtgcaagaacagaagctagagtcaaatttgtaaattccactttcgacaacaatctgctctatctgttgctcttgggcgtccacggaaagcattaatgctaatttctcgagcaa

SEQ ID NO: 79193 - DNA, 254 bp, Glycine max
  unsure (1)..(254): unsure at all n locations
  Clone ID: 700963446H1
cttaccttatctcacccttctttgactgttctcccacaccacaaccatgatggtcctcctgctccttattctcctctttcacgcggcggaagccaagggacagtggcagctcctccacaaaaacatcggcacaatcgccatgcanatgcagcttctccacaacgaccgcgacatnatcttcgancgnaccgacttcggactctccaacctaaccctcccgagannnanatgccgcaacaacccaaacgagttgg

SEQ ID NO: 79194 - DNA, 261 bp, Glycine max
  Clone ID: 700963449H1
gtttttatatcatttcattattttcttctcccttcgatttctccagaacagcaagggagaatcaattcctcatcgttgcaattcttccctctctagattctcatctttcctctcttctatctccttcagaaaaaaaaaaacaaaaaaaccacagcttcatattatatatctagctcttcattttctcttgttcaatcaaggttatgctttaaaattctgaaactcacagtttcaggcaaattttagcctaaagatctgtgg

SEQ ID NO: 79195 - DNA, 253 bp, Glycine max
  Clone ID: 700963452H1
gcatgaaaacgttgtcgagcttgttaactattgtgttgatggtcctttccgtgcccttgcctacgagtatgctcctaaaggatcccttcacgatattctacatggacgcaaaggtgtcaagggtgcacaacctggtccagttctctcatgggctcagagagttaaaattgctgttggagcagccaggggacttgaatatcttcatgaaaaggcagagattcatatcatccatcgttacattaagtctagtaac

SEQ ID NO: 79196 - DNA, 119 bp, Glycine max
  Clone ID: 700963455H1
cttgttttaaaatgaatgtttggcctgtgttcatggtacttgtagaagattagatgtgcagttattgttaccaaagttatactttgatataatgatgcgattttcgtctgtggttgctc

SEQ ID NO: 79197 - DNA, 250 bp, Glycine max
  Clone ID: 700963456H1
caaacaaacaagcgctgtcgttggatctcacacaacccgattcttgtgcttttatggatttgcgtcgccaagagagtttgtgattttcatcttgcgaacgccttgcggatctgtgatcggaatacaggatcgtttcaatggctgggagtaacgagcttaaccccaacgattctaagatggtggttccgctgaatatgtgggttctgatctcaaatttcaagttggcatacaatcttctccgtcgccctga

SEQ ID NO: 79198 - DNA, 253 bp, Glycine max
  Clone ID: 700963457H1
cacaaggacccttgtttcagtttgccatggaagcaagattgcttccccatattctccgagtcaagccctttgtaccacacaagcaacaaacgacgagcctcttaccccagaggaagaaaaagaccttcaacttgccatccagagattccatgagctttgccataagtgtgtgcaagtcaacattcctttgttggttgatgcagaacacacttctgttcaacctgctattgactacttcacatactcctctgcc

SEQ ID NO: 79199 - DNA, 245 bp, Glycine max
  Clone ID: 700963458H1
gaagatactcacaaagagggagattgaaggagggatatcagatccctatttgtatttcgggttgtctttctgaacaaccccatcatatatcattaagaggggtatcaagatcaatccttgattagcaagatcataaattttcattcatatacacaatttacatatcgtaacaagatcacatttgttttgttttgtgttgtttgtgttgttgttgtgttgttgatctcataataacaacatggagg

SEQ ID NO: 79200 - DNA, 250 bp, Glycine max
  Clone ID: 700963459H1
gcgccacggcaatgggaaggagcactttggctttggttctcgcgattctgatctctttgcagggaaccccccacgttagatccgatgcctccgatcatcgttacaaggacggagactccgttcctctttacgccaacaaagtcggtccctttcacaaccccagtgaaacgtatcggtactttgacctgccattctgtgtaacaggtcatgagaaagataagactgaagccctcggtgaggtgttaaatgg

SEQ ID NO: 79201 - DNA, 249 bp, Glycine max
  Clone ID: 700963460H1
aagaaaaaaaaaaaattgttcaaccttgaaagatgtcggtttctgaggttgctgtgagaccgattttgaaaaaatcggtgcattggcaagggcgttgctctggcgaatctatccggatatatctaaccgtagacggtgcgttgagaccaatgcgtgtattggagtctgactccatagcttcggtgaaaatgaggattcaagcatgcaaaggaatcgcagggaagaagcacaagctggtctatggtggca

SEQ ID NO: 79202 - DNA, 253 bp, Glycine max
  Clone ID: 700963461H1
gacgcaatgtgatttctgcccagtgctctgaatgtcaaagtgaagaaattcaaccaagcgcgggtaaacggcgggagtaactatgactctcttaaggtagccaaatgcctcgtcatctaattagtgacgcgcatgaatggattaacgagattcccactgtccctgtctactatccagcgaaaccacagccaagggaacgggcttggcggaatcagcggggaaagaagaccctgttgagcttgactctagtccg

SEQ ID NO: 79203 - DNA, 255 bp, Glycine max
  Clone ID: 700963464H1
cagagagtgatttcagtgagtgatcggtgttcacttgatctcatcataatcgtcagcgtcaattgaagaagatgccgatcagaaacatcgccgtcggaaggcctgaagaggcgactcaccccgacacgttgaaggcggctttggctgagttcatctcaaccttcatcttcgtgttcgccggctcaggctccggcatcgcctacaacaagctcaccgacaacggcgctgccacccctgccggcctcatctccgcct

SEQ ID NO: 79204 - DNA, 256 bp, Glycine max
  Clone ID: 700963465H1
gaattgttgtaactttttgattcctaaattctctaaaattcgaaattctaatttcgttaggggatagagattgtttgtgtgtgagtgagtatggctggaaaaggcgagggtcctgctatcggaatcgatttgggttcgacgtactcttgcgtcggcgtgtggcaacacgatcgtgttgaaatcatagccaacgatcagggtaacagaactaccccatcctacgtggctttcaccgacacagaacggttgatcggcg

SEQ ID NO: 79205 - DNA, 255 bp, Glycine max
  Clone ID: 700963466H1
aaaaagcgtgaaggacagtgataggtttggtttggaaggaagaagaaaatgaaggccatagtgataacgaggccaggaggtcccgaagtgctccaacttgaggaagtggaagatcccctagtcggagacgacgagcttctcatcggagtccacgccacttcccttaacagagccgatacctttcagaggaaaggctcctaccctccccctaagggcgccagcgttacctcggtctcgaatgttccggaactgtcc

SEQ ID NO: 79206 - DNA, 251 bp, Glycine max
  Clone ID: 700963469H1
tcgggaaaaggattggctctgagggctgggcacgggggtcccagtcccgaacccgtcggctgtcggtggactgctcgagctgcttccgcggcgagagcgggtcgtcgcgtgccggtcgggggacggattgggaacgggcccttcggggcctcttccccgggcgtcgaacagtcaactcagaactggtacggacaaggggaatccgactgtttaattaaaacaaagcattgcgatggaccctgcggatgttg

SEQ ID NO: 79207 - DNA, 251 bp, Glycine max
  Clone ID: 700963470H1
tctcagcatactgggaaactttctgagggtagcaactatatacaaacaagaatcttcaacaaggatcaaaatccaagcttggagttcaccttagggagatcaaattggcacaacagtgaacatgcctaattttaattggtttacatatatgatcactttattactagccaaattaatagaaaagattaatatgcacaggtatataaattaatatataggtagtgcttttgtcaagacaaagatgtctgcac

SEQ ID NO: 79208 - DNA, 250 bp, Glycine max
  Clone ID: 700963471H1
ctccgtttggtttaggattgagtgttggatctagtcatctagataaaaaaaataaaaatgaagatcattgagaaaattcgcgcagcttctgctgatccaaacagggtggtgttctcatttgagttcttcccccccaagactgaggatggtgtggacaatctgtttgagaggatggaccgcatggtggctcacaacccctctttttgcgacatcacttggggcgctggagggacaacggctgatcttacat

SEQ ID NO: 79209 - DNA, 249 bp, Glycine max
  Clone ID: 700963472H1
cagaaacttgcacttgctgcattcatcttactggggagaatatattagcgtttgtttctcttagtcttattcagttcaaagtgttgctgcgtttgaagatgacggaggaacacgagaatggcgccaacgcaagcgaggaggaacaggtcataggcccgggcccggcccctcgtgcccggcccaagcgaccccttcagttcgagcacgcctacctcgacgccttaccctctgccaacatgtacgagaaaa

SEQ ID NO: 79210 - DNA, 251 bp, Glycine max
  Clone ID: 700962935H1
ctagccgcagcagcctcaggaggagaataaggatgtctcacaggaagttcgagcacccaaggcacgggtcactgggatttctccccaggaagcgtgctgctcgtcacaggggaaaagtgaaggcattccccaaggatgacccatccaaggcacccaagctcactgcattcttgggttacaaggctggtatgactcacattgttagagaggtcagaagccaggatcaaagcttcacaagaaggaaacatgtg

SEQ ID NO: 79211 - DNA, 249 bp, Glycine max
  Clone ID: 700962937H1
ctttcttccttcactcttgtttcctcctcttctgtctcctctcggctccttcctgtgtttccatgttctctggtattgagacaggagatttagaaaaaagagatgatttgtttccacagattctaagagccaaggcagtggcaaggctttatgagcttgggaaggtgagtgatgctagcggttatttggagaggacattcttgagtcctgcatccatgagggcaatcaatcttattcgtaaatggatgg

SEQ ID NO: 79212 - DNA, 249 bp, Glycine max
  Clone ID: 700962938H1
cttgaacttgaactatcgggtcttcttcttggctctctctgtttaggatcgatatggatttgtattttcctttggcaatacttgtgctgatattaggcacaccatactctagtgcttttgggaagagtgaaagtaatgtgaaaacagctgtttttctgtctcccaagtttgaacttggaccgggttcggtagccaataaatttgattatgatattgattttccaagaggtcatattgccctcaagagtt

SEQ ID NO: 79213 - DNA, 251 bp, Glycine max
  Clone ID: 700962939H1
aaaaaccttcccttctcttctcacccccacactcccatctcacacacccctcgcatccaacaatgtctctcaccattccctccaacctctccaagcccgccgccctccgccccaacctaagcccaaagctaaggtccgccgccacaaccaccatcgtctgcagcaccaccaacaacaacaacaacaacaacgtgtcctccgacctgaaggcgtctccgccgcgctggccctctcctccatcctcctctccg

SEQ ID NO: 79214 - DNA, 247 bp, Glycine max
  Clone ID: 700962940H1
aaaggactcagcagcacaaacttcaaataagtgcaatgaagaaatttcttgtagtccaggtgagcctcaggaagttgattcagatgtaagagcctgcaacaattctatgtccagttccggagatgtaatacatggctcatcttctagggaggaatctgcaacagtgagctcactgactgaaactagtggttcaccatatagtgattctcagatacaattaaggaggctggaaaggaggacagtgcaa

SEQ ID NO: 79215 - DNA, 247 bp, Glycine max
  Clone ID: 700962942H1
gatcagccaccctaaactcggaaactgccacagatctttgaaaaagatagaggaaagaaatgtgattgaaaataagctgaaagaggaagcaagagagccaggaaggaagcaaattattgctgaatttaaatctttggtttcttcatttcctgatgaaatggggtctatgcaaagccagcttagaaaatataaagaatctgcttcagataccattctctgcgtgcagatgtgaagtctgtttctagta

SEQ ID NO: 79216 - DNA, 246 bp, Glycine max
  Clone ID: 700962943H1
cgtcggagctgtgtctggggaaatttgcgttgtttttcgcggtacagctcacacacactgaacggtaagtatggcggacaaggctgttacaatccgaacccgaaagttcatgaccaacaggcttctttccaggaagcagtttgtcgttgatgttcttcatccagggagggcaaatgtttccaaggctgaacttaaggagaagctagctagatgtatgatgtgaaagaccctaatactgtatttgtc

SEQ ID NO: 79217 - DNA, 248 bp, Glycine max
  Clone ID: 700962945H1
cccaaatcaccgtcacaccatgggctcctccgcgatggtgttggacccgaaaccctcatcggagcctccgccgttcctcccgtcgacgaaatcggactaccttcaaggcagcttcggcggcgacgccaccgcctccgacgaggacgacctctacagccgcctgaaatccctccagcgccactggcagttcatcgacatccaggaggagtactgaaggatgagcagaagaatctcaagcgcgagtagct

SEQ ID NO: 79218 - DNA, 253 bp, Glycine max
  Clone ID: 700962946H1
ttcaaaagtcacatgtaaacaggaacaaagaggtgttccaagaaactacaaaactagtactcaatcccatctttttgcaatcccagtttcaccgatctctaggagaggatggattatcagtacattctaggagggattatggcttgtagttttgcttttttgtatgttgtgtacagttttggagcaaaggtcacagattcaagttcaatacatgtaaagagtaatgaatgtgcaaagatatcatcagagaatg

SEQ ID NO: 79219 - DNA, 251 bp, Glycine max
  Clone ID: 700962947H1
ccacattcacctgagctttttgtgaggattccaaagcatggcttcccttgcagcatccactgctgctgcttcccttggcatgtcagacatgcttggaaaccccatcaacctcagtggtgccacaaggccagctccatctgcctctagccctgcctccttcaagactgtggctcttttctccaaaaagaaggctgcacctccaaaaaaagctgcactgctgctcctgccaatgatgagcttgccaagtggta

SEQ ID NO: 79220 - DNA, 251 bp, Glycine max
  Clone ID: 700962949H1
atcaaaacaaaccactatgactaatactaacgataataatagttacaacaatacactctagcttctagcctgctacctttccttatcaccagcaccaatggcttcagacgccaaactctcctcttctgagtccctcaacggtttcaaattcggccaaaaaatctattttgaggatgttggtcttgctactccagccacctctcttacttcttctcttcttcttcttctgctgctactgttacttcttcttc

SEQ ID NO: 79221 - DNA, 251 bp, Glycine max
  Clone ID: 700962950H1
caaggaagtaacttagatcgcgatttggttgcaatctcaagtccagatatggttgcatgcaagaaaatagagtctgaaagcaaagattttagcactaaggaaagttctaatggcctaattaagaatcctgtttcaatgagaaacaggaaatttgccagtgatgtgaaatttgattcaaagtgccaacaagctaccaaagtggttgatcaagaatgcactcttggatctagtgaggatcctagtaatttggc

SEQ ID NO: 79222 - DNA, 244 bp, Glycine max
  Clone ID: 700962951H1
ggaaaagaaaattctctcaattcgagacagaggtatcggtatgacgaaggaggatttgataaagaatttggggacaatagcgaaatctggaacttctgcatttgttgagaagatgcaaacaagtggagatctcaatctgattgggcagtttggagtcggcttctactctgtttatcttgtggccgactatgtcgaagttattagcaagataacgatgataagcagtatgtatgggaatcaaaag

SEQ ID NO: 79223 - DNA, 248 bp, Glycine max
  Clone ID: 700962952H1
gagcccttccccttcttcttcttctcctccaaatcctccttctttttctcttctctctaccacacaaaaacccttaccaagttctttctttctaattcccttgataatgtaaaatcacagaaaaagaaaaagctactaaaaacttggctctaaacctttctttttttgaggaaaacctgaaaagttccacacaatgtcttctagagcttctctagagctttcttcttcttcatcttctttcttatcaa

SEQ ID NO: 79224 - DNA, 246 bp, Glycine max
  Clone ID: 700962953H1
ccagctgggacttacaaaaacgttactggatctgataaatcactttgtcacagttgtcctgttaatgagcttcctcatcgtgctgtttatatttcagtccgaggtggtattactgaaaccccttgtccctaccaatgtgcttcagacagatatcttatgcctgactgctatacagcccttgaagagttaatttacacatttggtgggcttggctatttggtcttttccttattggtctcttgatct

SEQ ID NO: 79225 - DNA, 246 bp, Glycine max
  Clone ID: 700962954H1
gaaggtttcagcggttggcactagcagtgttaccctttcttccctcttccgatttgaatctggttcggtttcgctgttatcaaaatccaaatcatcatttggcgtagatgctctttggcttcttcttcacctgcgaaggcgcttcgcagaatcctggactccccaggggtccaccaaggtcctgcttgcttcgacgctctcagcgccaactcgttgagaacgccggcttccaattctgcttcagca

SEQ ID NO: 79226 - DNA, 246 bp, Glycine max
  Clone ID: 700962955H1
cagatcctcatcttctaccatttcaggtgctcactttcttcgcccatttttatttgtttgttgttttaacaaaacccataatcagatccgatcctcttgagattgggatcaacgccgagtccatgagcacgccagcgctttcagggggcacgggcctcttctctgggttcactcggttatgcaagggccttgcggtggtgcttgtttgcggtcacattgcggttcagtttttcccttcagctgtta

SEQ ID NO: 79227 - DNA, 247 bp, Glycine max
  Clone ID: 700962956H1
ctcgagccgaatcggctcgagttgcactgatgtggctggagaaaaagttgagatcggaactacaagtcaaagatttcaaagatggcgaccaagtccttgctaaactcactcatcaatatggaggtgggtttgccgagtttgctgtggctagtgagagcttaacagcagccagaccatctgaggtctcagccgctgaagctgcagcattgccaatcgccgggcttacagctcgtgatgccctcactca

SEQ ID NO: 79228 - DNA, 244 bp, Glycine max
  Clone ID: 700962957H1
gtggccgtgtcgcagcaaaaccaaaccacatattaacttgtttgctctaagtcatggctctgatcttgcacgcaaccaaagcaaacaagaatgctttcaagactctgattgcggcagagtacagtggcgtccaagtggaattggcccctaatttcgagatgggtgtctctaatagaactcctgaattccttaaaatgaatcccataggaaggttcctgtcttggaaacgcccgatggtccagtc

SEQ ID NO: 79229 - DNA, 246 bp, Glycine max
  Clone ID: 700962958H1
caacaagccaaacaaacttggttttaattggtataggcttgccaaggtcttgttgattgagcgttaagtgctttaactaatcaatcccaagaccttggtttaccttgccacacaaaaaaatatataaaaaggcaaaataataataaaaaaaagagaaggcttggagccaagaaaataaacacaaagcacaagtcatggaaagaataatgttggaagtgcaacaaaggttgctttcaacctcttggt

SEQ ID NO: 79230 - DNA, 245 bp, Glycine max
  Clone ID: 700962959H1
gtaagagcagaacctaggcagtaccagtgttcctcttcgaacatggtgtattggaagcgagaagtgaaggcatatgggactggatagaatctcatactaagctgccataatccttctattgtttattatgtgtccgttttatgttgtcatggcgtttatgatttagtaagcttcttttcaagattgttgtgataaaacttaacaaaatctaagacttgcatgtgggagtagctatattttatgta

SEQ ID NO: 79231 - DNA, 248 bp, Glycine max
  Clone ID: 700962960H1
gcttgaacactcagcgtgtgagtgtgtgtgtgtacaagtgtgcctcgtacaaactaaggataccttatcatcgcttcgcaccaaaaactactacttggatactacgaccatcgccatctgtgatactgtgatatttcgtctgcttcgagcggcggatacgtacactagagtacaaaagaaaaagactttaccgtggaggcacagtacctataaattgttgccaccacgatgacgccaaacccaaagca

SEQ ID NO: 79232 - DNA, 249 bp, Glycine max
  Clone ID: 700962961H1
ctcatcgtcatcgtactactactacccacgttctgctcctttgcggatcgtgtccacaaaagatggcagacaatgaggatggaagggataagactactcgtgggaatgaatgggaggttgtatctctgacagcatcgacatatgcagctgctcctggtcctgatgaagttgagatgaaggatgatgggaacgaagatgtatatggacaagtgaaggagaaacgtcacatgctttatttatgtctcgtca

SEQ ID NO: 79233 - DNA, 250 bp, Glycine max
  Clone ID: 700962962H1
gccgcttgcaaaaccgattcttgacgctactcacgacttttgacagaagatggcttcaagattctggactcagggtggaagtgattccgaggaggaggagagtgattatggtgaggaagatgaacactcggcgggtgaacaagctccgaatcaagacgtgacaagcaagtactttgtggacaatgcaagtgacagtgatgattccgatggccaaagcgcgttgtgaggtcggcgaaagataagcgattcg

SEQ ID NO: 79234 - DNA, 254 bp, Glycine max
  Clone ID: 700962963H1
agcgagtcaggttcagcaaagacggttctgccctccaactaaccgcggttgacggccgtcgcgcctccgttattgtccccaatgacccggacctcatcgacatcctcgccatgaacggcgtcgacatttccgtcgcggaaggcgaatcccccaacagcttgttcaacatcgttggcaacttgctcttccccttgctcgcgttcgcgggtttgttctcctcttccggagagctcaaggcgggcccggtgggcctg

SEQ ID NO: 79235 - DNA, 256 bp, Glycine max
  Clone ID: 700962964H1
atcgatctgggtgggctacaagtgtctcaaatatcaacattcaacaaagtatggggcacctatggcggcggaccggacaatcaaggcttcaccatgtttgaagcatcaggaattcctcaaggtttctttatgttaggtagctactgccaacccaacaacaagcctctttttggatgggttcttttggcaaaagatgtgtctaaaagcacaagcaacccactttaaagcaaccaatcgattacacgcttgtatggaa

SEQ ID NO: 79236 - DNA, 251 bp, Glycine max
  Clone ID: 700962965H1
agtgatttgatttgcatcaatatggatcactaaccttgctggtggctggtgcatacaatagtatttgtaccaaacctcttttttcttttgggcacgtgtattgttttttatttatgaacccaactccatccatcattgttgcaacgaactcaacaagctagatcagtagtatatatcatcaaattcaatagtctcttctccatttaatagatggttgaaaaatcttccagaaccaaccttggccaccatca

SEQ ID NO: 79237 - DNA, 248 bp, Glycine max
  Clone ID: 700962966H1
acatttatactgatcaaagaaactcaaaaaatggtgtcctacttggtgcccctaaggcttgcaaattgggtcatgaaccaagtgcttgttaaatcatgttatggattttctaggaaacttaaaagccttgggtttcgttggggtgatctttcatccaaacccttgcatcaaccctcccctttccctaatattaccaagtgcgatttggaggtagagggtcacaaaccctagcttgtgtatttcacaaa

SEQ ID NO: 79238 - DNA, 246 bp, Glycine max
  Clone ID: 700962967H1
caggaaaatatccttttggagactacatttcttattccaactttacttttacggtgaaagaaatcaagcatttgtggagacacaaagggtgtgaaagcaaatatgggaggaaactggttatgaggattgatgattttatgaaaccagtagaaacaaatgttatctgtagcaattggaagaaatggaagcaacctatcatatggtttcaggaacagtagattctgtggcggcacagtttttcttaaa

SEQ ID NO: 79239 - DNA, 245 bp, Glycine max
  Clone ID: 700962968H1
gctctttgtccctcacttctcttcctttatattactgtagttcttgtttgttggagctaccttgaccaaatagctctggtctttatagtagttaatattttctcttttgttcaaagaatttgttgctaaatgccgattatatgttctgggtatttatttattcatctctcgaaatatccctaattgttctggtgttcaaccatggagcaatatagaacaatagacaggatagttttcaagtatgt

SEQ ID NO: 79240 - DNA, 246 bp, Glycine max
  Clone ID: 700962969H1
ctctgcttcaacttgctccctcagaagcgaagaagaagccacagagaactagtctcctactctcacccgcaagaaaaaaatggcatctcacatcgttggatacccccgtatgggtcccaagagagagctcaagttcgctctcgagtctttctgggatggcaagagcagcgccgaggatttgcagaaggtgtcttctgatctcagggcaccatctggaagcagatggctgatgctgggatcaagtac

SEQ ID NO: 79241 - DNA, 235 bp, Glycine max
  Clone ID: 700962970H1
cagtgaactcattgttggatttaagggttatccccattttcaatgaaaatgatgctgttagtactaggaaggcaccatatgaggattcttccggtattttctgggacaatgatagtttggctggtctattagcccttgaacttaaagctgacctccttgttttattgagtgatgttgaggggctctatagtggtcctccaagtgaccaaactcaaggttgatccatacatatata

SEQ ID NO: 79242 - DNA, 107 bp, Glycine max
  Clone ID: 700962971H1
ctgtttattatttatggtcactcgttacaaaaaatgcactatcttgctttcaatccaagttcactttggtggcagttgaacgagtttgcaaccccacacaacatacg

SEQ ID NO: 79243 - DNA, 234 bp, Glycine max
  Clone ID: 700962972H1
gaggccaggcaagccccactcaaccaccacacctctcctcgttcacgctacccctttctgctcttcttctacctttcaagttttaaaagtataaagatggcagagacattcctatttacctcagagtcggtgaacgagggacaccctgacaagctctgcgaccaaatctccgatgctgtcttcgacgcttgcctcgagcaggacccagacagcaaagttgcctgcgaaacatgc

SEQ ID NO: 79244 - DNA, 246 bp, Glycine max
  Clone ID: 700962973H1
gcgatgcaagcacagaccattgatgttgtaaaacgtatgaaagagatcacacttgtgatgcaaactccagaacaagtattgaaagaccaaggagttacccctgcagacattgaagatatgttggaagagttgcaagagcatgttgagtcgattgacatggccaatgatctccactcaattggtggtttggttcctcttcttggttaccaaagaattctcatgccaatattcgagcaatggctgctg

SEQ ID NO: 79245 - DNA, 245 bp, Glycine max
  Clone ID: 700962974H1
tgaagctccatattatcaaatcagccctgctggtcactgccctcatgatgaagttcctgagatcataaatttcttacttcgcgggtggatcagaaacctagagtctcagggttctgtgtcattaccattgcttgaagatctagacagtatgaagcactctattattgacagggaattagaatttcccagagaaggttcaaaaaagtcagtgatggtcagatatttcgcttccaatttctcacttt

SEQ ID NO: 79246 - DNA, 245 bp, Glycine max
  Clone ID: 700962975H1
ctgcatttggggatggtaatgggacaacagaaaatcgccctcgcccctccctcttcgtccttccgcctccgcagccgcagcctcaactccctccgcctccgccgcatcttcgacatgttcgacaagaacggcgacggcaccatcaccgtcacggagatcagccaggcgctgagcctcctcggcctggacgccgacgtggcggagctggagtccatgacgaaactctacataagacccggcaacga

SEQ ID NO: 79247 - DNA, 244 bp, Glycine max
  Clone ID: 700962976H1
agaagacatgtggagaatttgttacaaccaattaaaaatgcatggagccagaagggtgtgagcattgttagtgatggatggagtgacctgcaaagaagatctcattaatttcatggttgtcccggagagtggacctatgtttttaaaggccattgattgttcaaatgagatcaaagacaatgatttcattgccaaacatatgagggagtaattatggaggttgggcactcaaatgttgtgcgaa

SEQ ID NO: 79248 - DNA, 247 bp, Glycine max
  Clone ID: 700962977H1
cttcttcccaaccactactactcactcactgcagatctcaattgtatcgctgtccatggctaccatcgttagcatcaaggcccgccagatcttcgacagtcgtggcaatccaactgtcgatgtggatttgacttgctccgatggtacttttgccagagctgctgttccaagtggtgcatccactgggatttatgaggcccttgaattgaagatggaggatctgactaccttggaaagggtgtatcaa

SEQ ID NO: 79249 - DNA, 251 bp, Glycine max
  Clone ID: 700962978H1
aaagccagttccgcaaaaaactttccaacaatccatccttgaacgtgcctttagatctgcaaacttcagcttagagcaaaacaataaataaaaaatccaccttttctatcaacctctagctatatccatttttatccaaatgacagaaaaactttccaacaatccatccttgaacgtgcctttactatccgagtggaatcaccatgatgagggaaagccatagcctctcatccttctaccaaaaatactgt

SEQ ID NO: 79250 - DNA, 251 bp, Glycine max
  Clone ID: 700962979H1
aaagaaagaagttctaaggaagagggaatatgcagaatacaaggtgctagttgtctatttgcaataacaacatcagcgatccaaccttagtattcttcaacccagagagatttgtaataataaattacaacaacttaaacgatggcaggaggagcttatgtagattcgggaaatgcaaagcaatttgatgggaaggtcacggcattcgtcattgttacatgctttgtggcagccatgggaggcttactctt

SEQ ID NO: 79251 - DNA, 224 bp, Glycine max
  Clone ID: 700962980H1
cttcttgttgattctgtgaaagaactagcaaaggaagcactaatcaaagttcctgagcgatacgttcatccaaatattgaaccccccattttatttcataaagacactttgccacagctccctatcatcgacctaaacaagttattgtctgaagatgttaaggaactggaaaagctagactttgcttgcaaggaatggggcttttttcagcttgttaatcacgg

SEQ ID NO: 79252 - DNA, 256 bp, Glycine max
  Clone ID: 700962981H1
aatcggctcgagataattgcgtgttcgcaggccaggcaactgagagagaaagaatacagagatagagagtagcatcaataatgtattgtgactgaaaacaaaataagggaagaggagcacaaacaaaaccaaacaaacctcataagttagggattcctttttggttcgttgctgtggaatcgattcctttgccacatattaaacgtgcgtcgctgtgaagtaaagcatgatcgcagcattgtctgctagttatgac

SEQ ID NO: 79253 - DNA, 248 bp, Glycine max
  Clone ID: 700962982H1
cacaagccaagtgaaagtgagaaaaaataaaaatcaaagagcataatgtcagggatcattcacaagattggggagacccttcatgtgggagggcacaagaaggaggaggagcataagggtgagcaccatgctggagaatacaaaggggagcaccatggtgaacacagtagtgagtacaaaggagagcatcatggtgaacacaaagctggagagtaccatggtgagcacaagccagagcacaaagaggg

SEQ ID NO: 79254 - DNA, 243 bp, Glycine max
  Clone ID: 700962983H1
gtggtgccttatcgctgtggttttcatcgtcttccttctcttatatttcttttttttttttgtcttcgccgcacgccgaaacaatggccggaaaaggagagggtcctgctatcggaatcgatctcggaaccacctactcttgtgtcggtgtgtggcaacatgaccgagttgaaatcatcgccaacgaccaagggaacagaacgagccgtcttacgtcggcttcactgataccgagcgtctcat

SEQ ID NO: 79255 - DNA, 244 bp, Glycine max
  Clone ID: 700962984H1
acaattcggaaattcgtaaaaaactctagaagcgttttcggttgggtttccgggtcaagctttttattgaaccgaaccgaaccgacctgaatccacagtgtgcttcctcgtcatctcaagttttgctcatcattctcactgcagctattattgactctgtttccaaagacgcaatggcatccttagatattcattcactgcttttattctctgccattttccgtgttattttgattgtgtatgg

SEQ ID NO: 79256 - DNA, 244 bp, Glycine max
  Clone ID: 700962985H1
attttacatggtctaaaagaaccaagacttatcatagtggagatcaaataaattgtgtgcagacttcaaatcaaagcaaaagttatattatatagcatacagtttgctatacagtttatattacaagttcttgaaaagaatcagtgccaaaaacttgacaccaggagaggaatggggcttgtaaaaaaaattgggaagtatcagctggtaggacaattggagaaggtacattctctaaggttaa

SEQ ID NO: 79257 - DNA, 245 bp, Glycine max
  Clone ID: 700962986H1
cttgaggtcataaccaatggcaagtacaagagtgtcatgcaccgagtgattgcccaagccgatgataccagaatgtccatagcttctttctacaaccctggtgatgatgctgtcatttctcctgcaccggctttggtgaaggaattagatgagacaagccaagtgtacccgaaatttgtgtttgatgattacatgaagctctatgctggtctcaagtttcaggctaaagagccaaggtttgaagc

SEQ ID NO: 79258 - DNA, 237 bp, Glycine max
  Clone ID: 700962987H1
cgataatttcatttataaataagcatctgcagatattgatcaggatgcactcaaattagtctcatcgaaatgggagaacagaatgacattacgctgacatgggagactttggaagctactgttacaaatggaaagaaccgaaaactaattcttcatgggcttacaggttatgcccagccagggagacttttggctataattggtcctctggcagtggcaaatccacacttcttgatg

SEQ ID NO: 79259 - DNA, 244 bp, Glycine max
  Clone ID: 700962988H1
ctttttcttcttcttcttttccttttttttttccccaaagaaaatcgcttagattttcgtctttcaagatttcgacgtccttcttcttattgcgccaaagttattgattttctcctttcccgtatttgaatcgtttattggtcattttcgtgtcggttaatttcttgtcgaaaaaaaaaagaaagaggaaggattaggagacgctttaatgacctagattagtttaataatatcacgtttgaaa

SEQ ID NO: 79260 - DNA, 243 bp, Glycine max
  Clone ID: 700962989H1
ctctcgctcttcaatggccgtatcctctattcgaatcgccgtcgtcggtgatgtggtaaagtatcctcttcccactgtcgttacagttccaattttcctaacacaactttcacttaacatgttttccaattttggaacgattccaattacctgattttggggggttttctgaagcatgattgctggaaccttgaacaagattcgaaagcacttgagctcttgcagccagacttggtgctgttt

SEQ ID NO: 79261 - DNA, 242 bp, Glycine max
  Clone ID: 700962990H1
cgacgccgtccaacaacaacaacgacgctactactaatgtcgcatctttttcctccttcgatgagcactccaccttagcctccaagttccgcaaccaccagatcacctccaataacaacgcgcccaaaaacgccgcggcggcggctctcatgctccaacaccaactcctcagagactctggtcttctcaacatgcctctttccttgcccggaaacgacgtcgtggttgacgcttctaccttc

SEQ ID NO: 79262 - DNA, 242 bp, Glycine max
  Clone ID: 700962991H1
ctttgagctgcatgaggatgaggatgagcgtgatgtgcattgtgaggtccaagtgatttcgtggagggagcgcaaagttaacgcccaaatcacggttgatgctgacactgagtccgtttggaatgctctcactgattatgagcatcttgctgacttcatcccaaatcttgtgtggagtgggagaattccttgtccgtacccaggaagatatggttagagcaaaggggattccaaagggcaat

SEQ ID NO: 79263 - DNA, 245 bp, Glycine max
  Clone ID: 700962992H1
ctgaaattggtaaacaatttaggaatgagggcatagatttgacccataatcctgagtttactacctgtgagttctatatggcttataaggactacaacgacttaatggatataacagagcaaatgttgagtggtatggttaaggaacttaccaaagggagctataaaatcaagtatcatgctgatgggattgacaaggaacctattgaaattgactttactcctccttttagaaggattgacatg

SEQ ID NO: 79264 - DNA, 246 bp, Glycine max
  unsure (1)..(246): unsure at all n locations
  Clone ID: 700962993H1
attccatagttctcagatagggcacgtctctcgcggcctcttctctccctcgcgccgcccacactaaaaggttattgctctattattgtttgacgatggctgatgctcatgggactgataagaacattgaggtgtgganaatcaagaaattgatcaaagctcttgaggctgccagaggaaatgggacaagtatgatttcccttatcatgcctccacgtgatcanatatctcgtgtcaccaagatgc

SEQ ID NO: 79265 - DNA, 245 bp, Glycine max
  Clone ID: 700962994H1
aaacttctttctggttatgtcaatcagaagaagtttggtggtgataccccttatagtttgatgtttggaccagatatatgtggttcacagacaaagaagctccatcttatactatcataccaggggcagaattaccccattagaaaagatctgcaatgtgaaacggataagttgactcatttctatacatttattctaaggcctgatgctcttatagtatccttgttgataatcgggaaagagat

SEQ ID NO: 79266 - DNA, 250 bp, Glycine max
  Clone ID: 700962995H1
gagaataatcatatttattattaaatagaaaaaatggcccgatcatttatcaaaggccaatcttcggtagaagagaaggttcctttggaacacttatttctatttcagtataccgggtctctttctttcatttcaaaaaatttatagaatttcgattttgaaatgaaagttaagtgtggggataaatataaatgacaaaaagatattggaaataatcttggaagagatgatggaagcaggagttcatttt

SEQ ID NO: 79267 - DNA, 253 bp, Glycine max
  Clone ID: 700962996H1
gcatcatcaatggttgcatcgtcttcgccctcgagtcaacccttttgttccttttcaaaccccaactcatcatcatcatcgctctctttcaaaaccaaagctattaccaggacaagaccaagaacaaaaaccagaactagaacaacgaggttaacatggctgaatcctcaccctcgtggtgctttggttgaggcaacaccaccaccaacaagtcacctccttccccaaaagatggatctctcaaggtgcttgc

SEQ ID NO: 79268 - DNA, 246 bp, Glycine max
  Clone ID: 700963001H1
gtttaattcattttactttcttaatttcttctccaacaagtatttactgagaacccagtaagagacaacagacaaggcgggaagctaagcataaaaaaacgagcactgtttagcacaacctgcttgcgatacaaactaagccaaaaatttctccttccagagagtgaaaagttcaaattcaaattcaaaatggtagaattgattgaaatgcaattcgattatccagaatgaaagaaagacttggtg

SEQ ID NO: 79269 - DNA, 279 bp, Glycine max
  Clone ID: 700963002H1
tgcgtcgcactcgcaggcaacaatttactgcgaggtacggaatccgtgaattttccggcgaggtaagattccgttgaaattttgctttggtccgagggggagggtggaactttgtggaattaggatcgatttggctccagatctgggaattagggtttagttttggttgcgggtgatgttaattttgggggagaggctttggtagatggaatccggcttgagatcgggtggttctggggttgtggtgaagagcagaaactcatctggttgtttaattgt

SEQ ID NO: 79270 - DNA, 311 bp, Glycine max
  Clone ID: 700963003H1
tcgcacgcacgcgattcggctcgagctttctctcgttttttctcagaaccttctgaggttaaagcaaaaaaacaaagagagagagagagagaaaatgatgaagccatcgatgctcagatctctccactccgccgccacccgcggcgcctctcatctcttccgccgtgggtacgcctgcgagccggtgccggagcgcaaggtagccgttctcggcgccgccggcgggatcgggcagcctctctcccttctcatgaagctcaatcccctcgtttcgagcctctccctttacgatatcgccggaactcccggcg

SEQ ID NO: 79271 - DNA, 278 bp, Glycine max
  Clone ID: 700963005H1
ttcacagcgaagtcgtaggagggtttcaaaagatggagaacatgcagagcttctggcaattgggcgatgaactccgtggacactcaaaagcatcggaggatcacaaatggttaatggttgcttcgaaattggcggaacagacaagattgaagggggagcgtgtgaacaaccttgatctttcaaagggccccattgaaataaggtcaagggataaatttgggttccaggaagagaacaaatttgattctcttaacttaagcatgttgaacctggactct

SEQ ID NO: 79272 - DNA, 279 bp, Glycine max
  Clone ID: 700963006H1
tttgtcagctttttcttgcttccatagttcatggcgtgtgttcaagtcatcacagttcttctctttgcattggctcttgcaaaaattgacccctcaacatgccaaatggtgcagggcagagtcttctgcgttgactgcactcacaactatgacttatctgatattaaggtttcagtgaggtgtgatggtgtgaaaaaactggctttggcaactacagaaaatgatggctccttcaaggttgatcttcccttagaccacacaaaaccttcttctgtgaag

SEQ ID NO: 79273 - DNA, 282 bp, Glycine max
  Clone ID: 700963007H1
cttactttcaaatgttgccatgggagacacagaaactaaatctgattctgagctccacaccatcattcatttcctctgtttcaggcatagctgaaggtgctcgattgctgctttcccaaacatatcatggtgatagagttattgctgtctatgacgatgattactctagcataatatcatatgcccttagttccaaggaatatgaagattgggtgtctggtaagtcagatatgcaagagagtaactggattgctcgtgagagaagcaaagaagatttagctg

SEQ ID NO: 79274 - DNA, 280 bp, Glycine max
  Clone ID: 700963008H1
ggcgacaccgtgagtttgcccaacttatcgaccaaagtagtagctattgctgcaggggaagcacacactctccttcttacaggggatggacgtgtttattcctggggaagaggaatactgggacggcttggtcaaggttctgaacatgacaagcattttcctgttgaagtcaagtttggatcagaagaagacagcgtaagaatagtgggaattgccgctggtgcttatcatagtcttgctctagcaggcttctccacagatgtcgataatgctcctggct

SEQ ID NO: 79275 - DNA, 249 bp, Glycine max
  Clone ID: 700963009H1
agatgacaagttgaagttgcgcaacagcgattgggcggagaaacagtctcaacacacaaacacccagacacccacgttgtgttatgttatgtcttatgtctcctatattcatcatattaataattaaaccaatctaattaaataataataatttaacttcaccggaatcaacgctctccacttggcttcacaaatctgaaagaacacattaaccactcctctctttgttctcttctttccacacaacat

SEQ ID NO: 79276 - DNA, 284 bp, Glycine max
  Clone ID: 700963010H1
tacttggtgtcttgcaattcccaatggcctccattttcaagctctcaacgccatctccagctgcttccttatcagaagcgcttcgccccagagattctcgcttcctctccttcaatccttcttccaacgctattaattacaaaattaacctctccgcttccctccgatccattcactccctccctcttaaaacctccttgcggatcaaatgctcccaaacagatgggaatggaagtcctgcaaagaggacagtgcttcatgatctttatgagaaagaagggcag

SEQ ID NO: 79277 - DNA, 282 bp, Glycine max
  Clone ID: 700963011H1
tgattttaaaaacgcgacccatcactgtgtgtttaacacacagcagaaaagaacaaaccgcagttcttcctaatcgaaacggttccaaagtagtgaataaacaaattctcgtgcctagggttttcccttttcttcgattcacactcccagagcgaacgaaccgtcatgggaggaggcgaggagaagcgacaccagatgatgcagaacctcttcggagatcaatcggaggaggaggaagagctcgacgtcgattccgagcacgaatcgaacccgcaacaaaat

SEQ ID NO: 79278 - DNA, 253 bp, Glycine max
  unsure (1)..(253): unsure at all n locations
  Clone ID: 700963012H1
ctcctaatgctacctccttagaaattgcttaatctttttcattcattcaattacttagcaaattgttacgaaatgcaacacaacatcttcgcctcaccgcgtacnttgaagatcatggacggttgcaagggcactcaggtctacgccatcaacccctccagcgccaccggcggtggcaattggcgagaagcttctccaacagcttcacgaccacatcaaaagccacacccttagaaccaaatcggttcggaac

SEQ ID NO: 79279 - DNA, 283 bp, Glycine max
  Clone ID: 700963013H1
tggcgtggtggtttttctggtgcaaatgatgaacgtgaaagtactttaaatcagctgttggtggagatggatggttttggaaccacttctggagttgttgtgttggcaggaacaaataggcctgatatcttagacaaagctcttcttaggcctggtggatttgaccgccagataacaattgacaaacctgatattaaaggtcgtgaccagatatttcagatctacttgaagaaaatcaaacttgatcacgattcttcatattattctcaaaggcttgcagccc

SEQ ID NO: 79280 - DNA, 281 bp, Glycine max
  Clone ID: 700963014H1
tggaaataacaccagagaccatccaggaatgatccaggttttcttgggccaaagtggaggacttgacactgagggtaatgaacttccacgtttagtctatgtttctcgtgaaaagcgtccagggttccaacatcacaagaaagctggtgccatgaatgcccttgttcgagtatctgcagtccttaccaatggacctttcttattgaatcttgattgtgatcactacataaacaacagcaaggccttgagggaagctatgtgctttatgatggatcccaatc

SEQ ID NO: 79281 - DNA, 285 bp, Glycine max
  Clone ID: 700963015H1
atcaaatggaaaagctccatgcttctgtgctcgcccttgtattccttcttgtcatactatttcaggaaggattggtaacatgtatgaagaatgaagacggatcagaagaatggggatatgtgcaagttagaccaaaagcccacttgttctggtggctttacagaagtccatacagagtggagaatccctccaagctttggccaatcattctctggcttcaaggaggaccaggctcttcaggagttgggtttggaaattttggagaggttggtcctttggatgcta

SEQ ID NO: 79282 - DNA, 285 bp, Glycine max
  unsure (1)..(285): unsure at all n locations
  Clone ID: 700963016H1
atgtgacaatctgtgcaagaactgcaagagacctggtcattatgcaagagaatgccctaatgtcgcaatttcgccacaactgtggcctccctgggcatattgcttctgaatgtacgacaaagtcactgtgctggaactgtaaagaacctggccacatggccagcagttgtccanatgagggtatttgccacacctgtggtaaagctggacaccgtgctagggaatgctcagcccctccaatgcctccaggggacttaaggttgtgcaacactgttataagcaggg

SEQ ID NO: 79283 - DNA, 284 bp, Glycine max
  unsure (1)..(284): unsure at all n locations
  Clone ID: 700963017H1
gagatcatttgtccgcagcaaaacagacaagatcattcatctttccgaagatgggaaattagaagagattatgcatgcaaaatcatgttctgatctttataaagttattggtgaggatttttggttggctacctggtgcaacagtactgcatttgaagggaagcagcttgaaggaactaggataaaccttgtaaaaatgggagagcatggttttgactttgcaatcanaacaccttgtacccctgctagatgggaagattttgacgaagaaatgacagtggcat

SEQ ID NO: 79284 - DNA, 284 bp, Glycine max
  Clone ID: 700963018H1
tattaattcaatattcatagacttcactgtctgattgtctttgtttaataccatataggattcattaaggattctctaatgttggcacaaatggacatggaggagcttgtctcatgtaacaacaacgatgccaccaacatagccaaagggaagcgcacaaagcggcgcttgaggcctttgtctccttgtgctgttgtcgctgctaccactatcaccaccaccaccactgctatcaccgctatcaccaccgtcatgacatctagctgttcaagtgcttctgccgg

SEQ ID NO: 79285 - DNA, 280 bp, Glycine max
  Clone ID: 700963019H1
gcaaaaagaaagaatcccaggcgaggagaaagatggaggggaaggagcaggatgtgtcgttgggagcgaacaagttccccgagagacagccgattgggacggcggcgcagagccaagacgacggcaaggactaccaggagccggcgccggcgccgctggttgacccgacggagtttacgtcatggtcgttttacagagcagggatagcagagtttgtggccacttttctgtttctctacatcaccgtcttaaccgttatgggagtcgccggggctaagtc

SEQ ID NO: 79286 - DNA, 277 bp, Glycine max
  Clone ID: 700963021H1
ccgaccttgaacgcttcccatcttggtgagtaacacgaatctgaggaaaaaaaatgtcgattatgcaactttacgggcgcacaagagcgtggtgaagcggtcgaagaagtacttggaagaagcgctttacatgaagctcttcaaagatggaagctcccagctcatcgttcgccagagcctcaacaacttcgtcaagagccgaaagcgcgtttacaaatgggaggtaggcgacacgctcaagaagcttcgcgatcgcaagctctatcaacccgctctt

SEQ ID NO: 79287 - DNA, 279 bp, Glycine max
  Clone ID: 700963022H1
gtttgtcagctttttcttgcttccatagttcatggcgtgtgttcaagtcatcacagttcttctctttgcattggctcttgcaaaaattgacccctcaacatgccaaatggtgcagggcagagtcttctgcgttgactgcactcacaactatgacttatctgatattaaggtgtcagtgaggtgtgatggtgtgaaaaaactggctttggcaactacagaggatgatggctccttcaaggttgatcttcccttagaccacacagaaccttcttctgtgaa

SEQ ID NO: 79288 - DNA, 279 bp, Glycine max
  Clone ID: 700963023H1
aacaaacctcagaagcagaaaaaggtcttctctctttctctctccttttccctcaagctcagaatctcccgaacgaaagttgaattttggtgcatattttacaaattaagaatcttgttaaaaagaagaaggatgtcaagcggagcaacacactggtgtcatgcatgcagacagccagttgtgcttgatgggagagatgctgtttgcccttactgcgatggaggatttgtacaagaacttgatgagttggaaggaattgcaccccaccataccttttgc

SEQ ID NO: 79289 - DNA, 279 bp, Glycine max
  Clone ID: 700963025H1
gcacaacacaacaattcactaagctaaaatcacttcatcatggcttcctcgtgtgcttcctctgccattgcagctgttgccatctccacaccaagttcccagaagaatggatcactcttgggaagcacaaaagcttcttttcttagtgggaggaaactgaaggtgaacaactttacagcaccagttggagcacgatccagcactacagtttgcgcagttgctgagcctgataggcctctgtggttcccaggcagcacccctcctccatggctagatggc

SEQ ID NO: 79290 - DNA, 283 bp, Glycine max
  Clone ID: 700963026H1
tagggcctttgaggtctccttgaggagaagggaagaagaagaaggaggaggaccccaccaacctccagcttttaattccatttttcgttgattcttccttccttcttcatttctctttaatcccaaacaaacgctgccttctcgtttcttctattttgactttcaaatcgcgtgcacttctactttccttcccttcacttatcgtctctgcaattgtcaatgatcttcagtcttcgctttcccattcgtttttgaactattcctcttttaccttaaaacacac

SEQ ID NO: 79291 - DNA, 281 bp, Glycine max
  Clone ID: 700963027H1
caaaatcttcatattcatcaaactcatcaaaatgaatctgtaccactcctccacaaacaacaccacacaaaacatcttcaccgtcatattcctcctccttgcaatattattcagtctcacaccccacaaggccaacggtgccacgtgtcaccctgaggaagaagcgggcctgttgggcttcaaatccggtatccgatccgacccgtccggcctgctcagtaactggatatcgggtacggactgctgcacatggaccggagtagaatgccactataacagca

SEQ ID NO: 79292 - DNA, 279 bp, Glycine max
  Clone ID: 700963028H1
cacagtcatcgtctgttcaggatcatattcacgccccctctctctctctctctctctctctctctcttactttgtgtctttctatctctctcttcaattccaaaaccctacccccatccaattccaattcaccctcaatcatgggttctgaaggttccactgtcgtcggtcattattcaacctcttcacttccatcttcatttcctaatatcttttttccttctctctatcaattactcttgtggttcgctaattataattatgagtttttggttgttc

SEQ ID NO: 79293 - DNA, 286 bp, Glycine max
  Clone ID: 700963029H1
tcgagagaaaacaaaacaagaagaaggaaacgcgcaacgcaacacaaaaaaccacactttcaattgcatttctctctctttctcacaatttccactttccgggttttcgattcgatattcgttgttccaatgagcgatcacttggtggtgttcgttgaccgtctcgcgcgccctgtccccgttgatccggtggcgcagacggcgcaggtgccttccgaaccatctccacctccggccgccgtggatgccgacgccgccgggagctccggcacctcaccgtcggagg

SEQ ID NO: 79294 - DNA, 278 bp, Glycine max
  Clone ID: 700963030H1
atccttttctccttttctttttcgtattcggggttgctgctttctttcgactctattgtcttcttaataaatacagaaagaaacaaaaaagaaaaaagtttataggtgcctagaagaaaagacaatatagtgtggagcaattacgtttgatcacaagggaaattagggtgcaacggttttgcaagatagcatagaagattttgaagaatcttagttgcaatatagttgtgcagttgttgaaatgggggctcctttatcagcatggcctttggagaact

SEQ ID NO: 79295 - DNA, 277 bp, Glycine max
  Clone ID: 700963031H1
acctcgttgaaatgaaaatgggttcttctttgtggactttgtgtctaattttggcttcactagcctcttctgcattctgtgcctttccacggaggccagtggatgttccattcggcagaaactacgttcccacttgggcttttgatcacatcaaatacttcaatggaggttctgagattcaacttcatcttgacaagtacactggtactggcttccagtccaaagggtcatacttgtttggtcacttcagcatgaacataaagatggttcctggcga

SEQ ID NO: 79296 - DNA, 280 bp, Glycine max
  unsure (1)..(280): unsure at all n locations
  Clone ID: 700963032H1
ggcattcaccatctcctgtgggacacaggtatagcaggaggagcagaagagacagaagcagatctccttattcatcctactcttacaacaggcgaaaaagtcgttctatttcaccaagaggtcacagaagtccttctactactccaagacgtcgtagaagccgaactccatctgctanacgatacagaagacatagaagtaggagttcctcgttgtctcctactcgtaaatcttccagtcaaagtcttgggtcaatagagcacaaagtgcaactgaaaac

SEQ ID NO: 79297 - DNA, 176 bp, Glycine max
  Clone ID: 700963033H1
ctcgagccgagaacttcatgcaaaacgagttctacctcaagtctttaattctcgaagacattccaaaccatggaacctagaacttcatatgtaactcctgggtttacaattcaaaacactacaagactgatcgcattttctttgccaacaatacatatcttccaagcgagacaccg

SEQ ID NO: 79298 - DNA, 284 bp, Glycine max
  Clone ID: 700963034H1
caacaagcaaagtacatggttgatttggaaatccaggtccccaccccattcgacccgtttgccgaggcgagagaatcggatgcccccggagcaaaggagtatgtgcatattcgaattcagcagaggaatgggaagaagagtctgaccacagtgcaagggctgaagaaggagttcagctacgagaagatcctcaaggacctcaagaaggagttctgctgcaacggaaccgtggtgcaggacaaggagcttggcaagatcatccaactccaaggcgaccagcgtaa

SEQ ID NO: 79299 - DNA, 278 bp, Glycine max
  Clone ID: 700963035H1
cttcaaagttcacacacacaaaagaatgagcatggctttcaatagagagttagaagctgtaacccaagctttctcagggcatggagtggatgagaaatcattggtaacattactgggaaaatgggatcctctggagagagaatctttcaggaagaagacaccacatttgttcagtgaagatcatgaacgccattttcagaggtgggatgatcaatatgtccgtcttctcaagcatgaattcgtgcgttttaagaatgctgtggtgctttggtccatgc

SEQ ID NO: 79300 - DNA, 277 bp, Glycine max
  Clone ID: 700963036H1
caattatggagaaagcaattcaaagacagagagttctgcttgaacatcttcaacccatttcttcaagttcaaatttttcctctcaaacccatcaatctacggatctctcagcttcattatgttttgctgggaattcttcgcatggtcaaacaggtggatcagatgatgacgtggtgattgtagctgcatatcgtactgccatctgcaaagcaaagcgtgggggctttaaggatacccttccagatgaccttcttgccacagttctgaaggctgtaat

SEQ ID NO: 79301 - DNA, 276 bp, Glycine max
  Clone ID: 700963037H1
aattgttgtaactttttgattcctaaattctctaaaattcgaaattctaatttcgttaggggaaagagattgtttgtgtgtgagtgagtatggctggaaaaggcgagggtcctgctatcggaatcgatttgggaacgacgtactcttgcgtcggcgtgtggcaacacgatcgtgttgaaatcatagccaacgatcagggtaacagaactaccccatcctacgtggctttcaccgacacagaacggttgatcggcgatgcggcgaagaaccaggtcg

SEQ ID NO: 79302 - DNA, 276 bp, Glycine max
  Clone ID: 700963038H1
tgaatttcaatttccctaggggcttaatatctcccctcacttgtgcctagccttatgtcatagtattatcattcattctcatctttctctcttctctctccacccaaaccctaactcccgaccctgttcccctctcgtatccgtcatgaaaggaggaaagtccaagaccgaatctaagagagccgatcccaaacttgctgtgaataagaagggagccgccaccaaggctaggaaacccgccggcaaggggaaggcagcgaaagaccctaacaagcc

SEQ ID NO: 79303 - DNA, 275 bp, Glycine max
  Clone ID: 700963039H1
tgcattcttacagagtgggatgagttcaagaacattgattttcaaagagtgtatgacagcatgcagaaaccagcatttgtgtttgatggaagaaacatattgaatgctgagaagttgagggagattggattcattgtgtactcaattgggaggccattagagcaatggctaataagcatggcctaacaggcttgaagattatgaattgagcagagctatcaattatgttatcctttgtgacatttcaccacttgctatttttcatgatttcaagc

SEQ ID NO: 79304 - DNA, 274 bp, Glycine max
  Clone ID: 700963040H1
ggccaccgtcacttctgcagccgttgctattccctcattcactggcctcaaggcaagcgcaggcaaagtgagtgccgcagttaaagtctcagctccccaagccacaaggttgggcatcaaggcttcgctgaaagacgttggagtcgctgttgtggccactgccgcgagtgcagtgctggctagcaacgccatggccattgaagtgttgctgggtggtgatgacgggtctctggctttcgttcccaacaatttctccgtggcctctggggagaag

SEQ ID NO: 79305 - DNA, 280 bp, Glycine max
  Clone ID: 700963041H1
ctgaaagtgtgaagagtgaagatggccgaagaaaaagaatcaacgtcaattcctcttagtcaaggggaaaatgcatctcgcgacgatcccgaagacccagccaagtctccaccaagctcgcccaactcctccactcgcaaggcttgctgctttgttctccagagttgggtctctaagaaatttatgactggatgcgtagttctttttccagttgctgttaccttcttcattacatggtggtttattcagtgtgttgatggtttctttagtccaatatact

SEQ ID NO: 79306 - DNA, 275 bp, Glycine max
  Clone ID: 700963042H1
gtcaagataccagtgatctacatgagaaagtcgattttgtggcatgcttgggtggagatggcgttatactgcatgcgtcaaatctattcagagatgctgttccccctattgtgtcatttaaccttggctcccttggttttctgacttctcatgattttgaagattacaagcaagacctacgacaagtcatccatggaaataatacacgagatggtgtgtatattactcttagaatgcgcctccgatgtgaaatttttcgtaaaggtaaagcaatg

SEQ ID NO: 79307 - DNA, 278 bp, Glycine max
  Clone ID: 700963043H1
aagccaagtgaaagtgagagaaaaataaaaatcaaagagcataatgtcagggatcattcacaagattggggagacccttcatgtgggagggcacaagaaggaggaggagcataagggtgagcaccatgctggagaatacaaaggggagcaccatggtgaacacagtagtgagtacaaaggagagcatcatggtgaacacaaagctggagagtaccatggtgagcacaagccagagcacaaagaggggttcctagacaaagtcaaggacaagatccatg

SEQ ID NO: 79308 - DNA, 277 bp, Glycine max
  Clone ID: 700963044H1
aaaacaagttctggatctttgttctactggagaagctcgcgttcttgagctccagaatatcgtagaagaacgtgatatggcatgccaatctgagcttgagtcttccaaaaagcagctctcagttgagtctgctgccctggcctctgcaacgaacgaaattcagatgctcaaggcgcaacttgaattggtagctaattgtgagagtgtgcaatctcaacacgcagaatcagcagacattgagcttcttaacctgaagcagaacttgtccgaaacgctt

SEQ ID NO: 79309 - DNA, 275 bp, Glycine max
  Clone ID: 700963045H1
agcaacttcacttccagtgttagcgaactcacaattggcaagaaggatttacgaaggaacttgaagggaaaatatcgtggtgacggtccatgcatagccacaaaccccatcgacaggtgttggaggtgtgaccccaattgggccaacaatcgccagaagctcgcagattgcgtccaaggcttcggtagaaacaccgttggaggcaaaggtggaccattctacgtggtcaccgatccctccgacgatgatatggtgaaccctaaacccggcacgct

SEQ ID NO: 79310 - DNA, 274 bp, Glycine max
  Clone ID: 700963046H1
caaacacagatgctgcacagcttgctgaaacatttgctgtagcaaaatgccccacaaaggtggttggtgttcctgtcactctaaatggagatcttaaaaaccagtttgtagaaactaatgttgggtttgacacaatttgtaaggttaattctcagctcatcagcaatgtctgcaccgatgctctctctgcagagaagtattattatttcatccgtcttatgggacgcaagcatcacatgttgctttggaatgcaccctccagtcccatccaaac

SEQ ID NO: 79311 - DNA, 276 bp, Glycine max
  Clone ID: 700963047H1
gttcttctgtctctcaagcagccagcatttgttctctcatcaccacaccatccagatccagatcaaatggcagccatggctatgttgcgtttgtcaccactctctggtcaaaaccatgttctttctttcccatcatcgccatcaccaccaccacctaagcttcataaccgtcctctgtatctcaccaatttgcctcatttgccccaaaggttgaaactttccttcgccggagggcccggcggagatggggtcggacgtggtggtggcagtggtggc

SEQ ID NO: 79312 - DNA, 278 bp, Glycine max
  Clone ID: 700963048H1
atcgagccgattcggctcgagctttttcctcagtggaacaaacagcagaaaaagattttagaaattaaatattgtttacaggaaagatgtcaagtggagcaacacactggtgttatgcatgcagacagccaattgtgcttgatgggagagatcctgtttgcgcttactgtgatggaggatttgtgcaagaacttgacgagttgcgaggaattgcacccaaccataaccataccttttcgtcacagtcaggagactttcatcaaatgcctgacattttc

SEQ ID NO: 79313 - DNA, 279 bp, Glycine max
  Clone ID: 700963049H1
gtaacaacaacaacaacgaccgcggcggcggtcaccggagaacaacacattcccgatcagtttcctggaccgaccggtctccggttacccggaaaccgccgcgtccgcttcagcctctcgccatcaacaaacgcagcgttatggagtggccgagcgccggctgcgacgatctcggcgattggtctcttccaccgaccccaagagtgtccaccataacaccagatgagggttcgggtaaagtatttcaattcaagaaagactattatgcgttctacgaca

SEQ ID NO: 79314 - DNA, 279 bp, Glycine max
  Clone ID: 700963050H1
aactgaggagagtgagagaaaagagaagagaagatgacaacacgcttcaagaagaacaggaagaagaggggccacgtcagcgctggccacggtcgaatcggaaagcacaggaagcaccctggaggacgcggtaacgccggaggcatgcaccaccacaggatcctcttcgacaaataccaccctgggttcttcggcaaggtaggaatgcgctattttcacaagcttcgcaacaaattctactctccgatcctcaacatcgacaagctgtggtccctggtc

SEQ ID NO: 79315 - DNA, 275 bp, Glycine max
  Clone ID: 700963051H1
aaacatctcaatgggttcttcttctattacaacatcgcctgaaaccatgaccatggctgcgatcgtgctcctgttcacggtctttgccgtttcctccgccctagacatgtcgataatctcgtacgacagcgcccacgcggacaaggccgccacgttgcgcaccgaggaggagctgatgtccatgtacgagcagtggctcgtgaagcacgggaaggtgtacaacgcgctcggcgagaaggagaagcgcttccagatcttcaaggacaacctgcgat

SEQ ID NO: 79316 - DNA, 265 bp, Glycine max
  Clone ID: 700963054H1
actctctctcaccaaagccttcctagaacgatgaaatcaaacaagagcaattttccctcaccaaacaagaagaaccaaacaatggccgatcaacttaccgatgaacagatctccgagttcaaggaaccattaagcttgtccgaaaatgacggcgaaggatgcatcacaaccacggagcttggaactgttatgcgttcattggggcaaaacccaactgaggcatacctccatgacatgatcaatgaagtggatccagatgggaatg

SEQ ID NO: 79317 - DNA, 277 bp, Glycine max
  Clone ID: 700963056H1
ctagctagctagctagctagcaaatagcaatgttaaaaaaccaaccacaaccagattggcctgagcccattgtccgggtacagtccttatccgaaaactgcgaagattcaatccctgaaaggtacatcaagccttctactgatagaccatccataaaaagttgtaattttgatgatgccaatattccaatcatcgaccttgggggactatttggtgctgaccaacatgtctcagcctcaattcttaagcaaatctcagatgcttgcaaagaatgggg

SEQ ID NO: 79318 - DNA, 274 bp, Glycine max
  Clone ID: 700963057H1
gaaggttacattttccgtggaagattcgtagggtcttggcttgttaagcttctttcttctttctaaaggctacattttccatggaactgtcagaagacgtgctactctgaaatatcaacacttgctcaaactccacggagcactctcttcaaggcagatttcttgaattacgaatctctttgctcagcaatttctggatgcactgcagttttccatcttgcttgccctgtaccctcaattattgttcccaaccctcaggcaattctttttatat

SEQ ID NO: 79319 - DNA, 274 bp, Glycine max
  Clone ID: 700963058H1
ctttctctctcaagaaccatcaaatctcgatcctcccctctccctgcaagatccggtggtggttccgattgctcacatagggtttggtctcgggtcggtcaaggctggcgggtatttgggtgaagtaaatggcggatccggccggaatccggctccgtgagtggtgcaagcgtggtgttgcggcggcggcgttgatagggttacagtgcggtgacgattgttgccaacaagagtgaagcatgctgagcgtgctgcgcgtgcaccttccttctga

SEQ ID NO: 79320 - DNA, 271 bp, Glycine max
  Clone ID: 700963059H1
agagagaaagagaaccaaaccaaataaagctcttggttggttcacccttgtgcttattttttgttgctgagaaagagcaaagaagaagaataagaagaaggttttgatcggatgcgatgagcacacaaggacaagtgattgatgaggcggttctggatgacataatccggcgcctaacggaggtccgattggcccgacccggaaagcaggttcagctctccgagtctgagatcaagcaactttgcgtcgcttccagagacatcttcattaa

SEQ ID NO: 79321 - DNA, 263 bp, Glycine max
  Clone ID: 700963060H1
gtggtgccttatcgctgtggttttcatcgtcttccttctcttatatttctttttttttttttgtcttcgccgcacgccgaaacaatggccggaaaaggagagggtcctgctatcggaatcgatctcggaaccacctactcttgtgtcggtgtgtggcaacatgaccgagttgaaatcatcgccaacgaccaagggaacagaacgacgccgtcttacgtcggcttcactgataccgagcgtctcatcggtgatgcggctaagaa

SEQ ID NO: 79322 - DNA, 273 bp, Glycine max
  Clone ID: 700963061H1
cacagtcacaatggtttcttctaattgctactatcttgcattggtatgctgctgtgttctgctgctgctgaaccccaccgtgggggagcaggacgagcagaacttggtgctccagtaccacaaaggcgcgctcctcaaggggaggatcaccgttaacctgttatggtacggcagcttcaccccagatccaacgctccacaatcgttgacttcataaagtcgttaagctcctccccgggggccccacttccctcggtggcatggtggtggaaga

SEQ ID NO: 79323 - DNA, 271 bp, Glycine max
  Clone ID: 700963062H1
gttggtggaacgttggagaagatcgttgaccggttatctgtagtttggggcatgatcaatcatctaaagtctgttaaggatagttcggagctacgttctgctattgaagatgtacaggcagaaaaagttaagtttcagcttagactgggtcaaagcaaacctatttataatgcattcaaagccattcaggagtctcctgattggcagacactcagtgatgctcgaaaacgtattgttgaaagccaaataaaggaggcggttcttaatggag

SEQ ID NO: 79324 - DNA, 113 bp, Glycine max
  Clone ID: 700963063H1
gaaaagaattctgaaaaaaaaaattaaactaagaggttccctttcgcagttagtggcactgcatgtgaataacaatttgacatttcatcagtctcgattcataggacaaatgg

SEQ ID NO: 79325 - DNA, 263 bp, Glycine max
  Clone ID: 700963064H1
ttcgttaaaaatagaaagcacaacacataagctacgcacacgtagcttccttcatttcggaaattctaagcaatcaataaaagatggcagatggtgaggatatccaacctcttgtttgtgataatggaactggaatggtcaaggctggatttgctggagatgatgctccaagggccgtgttccctagcattgtgggtcgtccacgccacactggtgtgatggttggaatggggcaaaaggatgcatatgttggtgatgaggct

SEQ ID NO: 79326 - DNA, 252 bp, Glycine max
  unsure (1)..(252): unsure at all n locations
  Clone ID: 700963065H1
cttgtttcggagcttctcagggaccaaattacaggggattcttccatgttcaaagatctccaattgtccagcatattcacattgttttcatgttaattgtggtggaaagaatgtaaaggtgatggaaaatgatgaaaatattcactatgtaggagatggaggtgtgttaggtagcggtgctgctaatatttcattgatcatganaatcactggggatttcttggatgatggtgatcgattaaattcacgtta

SEQ ID NO: 79327 - DNA, 269 bp, Glycine max
  Clone ID: 700963068H1
aacctgtcacgactacggggcaggagatagatgtattgtatcaaaaggtggacaacatcaacgatctgaaaggtttcaattgggaatctgatgtaggctttggaggttcttctacttcccaggatgctttcaatttatcaattataccacaccagaggattccagtgattgagtgagtggatatgaatatggaaggaccttatgatttatcatgcaatggagaagctggtaacaaaagccttcagatcattagatactctccttataaa

SEQ ID NO: 79328 - DNA, 264 bp, Glycine max
  Clone ID: 700963069H1
accttatcaggttgggaatatgcctttagggcccgattttggcaatcaagctggaaatgctatgcaagtagatagagggtcttcttggttgcctggtccctcagaaaacctagcacatctttctggtcctcctggtcagatgagtgctgctgctaatcagcttcgttcggctcctggggtgacaccagagatggagaaggcactgcttcagcaggtcatgagcctcacaccggagcagataaatctcctgcctccagaacaaag

SEQ ID NO: 79329 - DNA, 272 bp, Glycine max
  Clone ID: 700963070H1
aattgctggagtggcactctactcgttcatcaaagccaggatggaggaagagaagcgacaagcgaaagcagcataagaagttgtcaacctggaggatgtcttgcactgtaaatcaccacaaatttccttcaaaataattgagtgactggttcagtgttgtactatccttgtgatagcgcgcttttatttttccttctatttttgtcaaatattttctttttttcctttttctctcttcattcagaaaacaatgtctcgctgctgatttgcag

SEQ ID NO: 79330 - DNA, 272 bp, Glycine max
  Clone ID: 700963071H1
aaaacattcccaataacaataatatacacatcttcaattaagctccttctcctatagccatggctctttctaagcttataattgcttcccttcttgcgtcgcttctccttcttcatttcgttgatgctgatcaatcggcacatgcacaaacgcaggggtctcttcttcagcagatagattgtaacggagcatgtgctgcgaggtgccgtttatcatctcgtccacgcctctgccaaagagcttgtggaacttgttgtagacgctgtaactgc

SEQ ID NO: 79331 - DNA, 275 bp, Glycine max
  Clone ID: 700963072H1
ctcgagccgcatccatcgaatccaaataataccaaaaaacaccatgatgcttggggagacccaccgcccaaatccaaccgtacacgtgccaccgtgggcgccggagatcttctcaccatacaccggcaatgccgattactctccgtactccatgcaagaagcacttagtgcacttcagcactacgaatccaccgatgctgagtcagactcggaggttccgtctcgggaaccggaagtcccggtggacgcttactccctgcgacatttccgcatgt

SEQ ID NO: 79332 - DNA, 273 bp, Glycine max
  Clone ID: 700963073H1
ttaagagatcaatatggccaccaccactacccagcctccctctaatatctgttttttccttctgttgttgcttctagcacactttcatttgggcataagccaacttgagctgaattactactctaaaagctgcccaaaagctgaagagatcatcaaggaacaagtcacacaactatataacaagcatggaaacactgccgtttcgtgggtcagaaatctcttccacgattgcgtggttaagtcatgcgatgcatcattactgttagcgacggt

SEQ ID NO: 79333 - DNA, 272 bp, Glycine max
  Clone ID: 700963074H1
tagacacagacaccctcagaacctgaccaaaatacttactactatatcctactcacattttacattcccacctctttcctttcccccttaccattctcgagattctcgcttttactacattactctctccttcatactgggtttaaggtagggtttatttaactaggaagaaagtttttaaagagagagataggcaaaccgaaaagacgtggtctttctcattgatatatacatacacagatccctatggaatgaagagggtgctccccaat

SEQ ID NO: 79334 - DNA, 274 bp, Glycine max
  Clone ID: 700963075H1
tgaattggaaaatctaagaggagatggaaaaggagagcgcaaggaatatgataggatctatgattatgatgtctataatgatttgggtaacccagacaagagcaatgatctagctcgtcctgttcttggagggtctagtgcctatccatatcctcgcaggggaagaactggtagaaaaccaacaacaaaagactctaagagtgagtcaccatccagcagcacctacatcccaagagatgagaactttggtcacttgaagtcatcagatttcctt

SEQ ID NO: 79335 - DNA, 270 bp, Glycine max
  Clone ID: 700963076H1
caccaccttaatgtaattcatgagcctaagttccccatccaccaacattccccgccacaacctacccttttgaggttcggttgcttggcactcacgtaacaccaccatgagttttaattgccttacctgtggccaaattcttcaaagggtaaattctgatagggatgatgaatgtctcccaccacaagaaacaaagaaacctaacaggaaagtggcaatgcaagttgatagaagctggtcaaggaacatgaccccacccaaatatgcacg

SEQ ID NO: 79336 - DNA, 178 bp, Glycine max
  Clone ID: 700963077H1
agtaaattctttttggtattttatttattcagtctttcaaaatctgaaataatacagtaccagtcagtcatattttttgttcatgttttaccaaagaaaaaatatgactgactggtactgtattatttcagattttgaacgactgaataaataaaataccagtaaattctttttggct

SEQ ID NO: 79337 - DNA, 273 bp, Glycine max
  Clone ID: 700963078H1
gtgctcatccctttagggtgaaagaagaatggtgctttcggaggaggaaatcggtcgtctataccgaataaggaagacggtgatgcagatgctgagggacagaaattttctggttggtgacttcgagatcaacatgtccaagcacgagttcaagtccaagtacggcgaacacatgaagcgcgaggacctcgtcatcaacaaatccaagaaggacaactccggcgaccagatctacgttttcttccccgacgaacccaaggtcggcgtcaagac

SEQ ID NO: 79338 - DNA, 275 bp, Glycine max
  Clone ID: 700963079H1
cattctcagagtcacacacacgcacatatattttcttcatcttcgtacaccactgtctcatcatctccttttccttgttctggtggcgctcttgattttcagatgacaacagcaattgggtgaaacgtgaacgccaccaccgatcggggtttgccaaaaccttacaatggaggtcgaaaggatgagacagttgatgctgatgtggtgtagaatacgaagcaaccgtgtcgctcttgtgggtggaaaccataccgctgcaaggttttgcagtcgct

SEQ ID NO: 79339 - DNA, 272 bp, Glycine max
  unsure (1)..(272): unsure at all n locations
  Clone ID: 700963080H1
aaaggaccacctcaccctccccctccattactcccactgcatcttcttcaaattcctgtcctgaagatgacagcaaagtggtatctcattgtgtgtgttgtagcgatctgggccgttgatctgggttcatcatcacaccatgcccgtgccccagcaccagcaccgtcagtggagtgttcanacctggtattgaccttatcggattgcctcaccttcgttagcacggcagcaacgtcaccaagccacagggacatgctgctcttccttgaaaa

SEQ ID NO: 79340 - DNA, 294 bp, Glycine max
  Clone ID: 700963081H1
ctcggggttcggctcgagaaagcatttagtgacggtgttctgtttatgggctttaacatgttcccttcttccatctttctcctttggaattctgagaattggtttgaagaagagacctctagatcttgatagtattaatgctgctagaaaggcaagagaaggtctaagatctgtaagaccaatgatgggtgcacatgatcagtttattggtaagtcaaaaggtgaagatatagtacctttgaagaattatttggacgctcaatattttggtgagattggaattggcacaccccc

SEQ ID NO: 79341 - DNA, 275 bp, Glycine max
  Clone ID: 700963082H1
cacacaattcctacacatttctactctttagtttctccaattttctttctcaattctcaacaatggccactacaacacaacttcacttaccccctggattcagattccatccaacagatgaaagactcgtcatccactacctttgtcgcaaatgcgcttcgcaacatatcgcggttcccataatcgccgaaattgatctgtacaagtacgacccttgggaccttccaggaatggctttgtacggagagaaagagtggtattttttcacgccgagg

SEQ ID NO: 79342 - DNA, 272 bp, Glycine max
  Clone ID: 700963083H1
gaagctttgttggcggcaaagcaaatctgcatagcgatggcgcctccgaagctcttcgtatttgcgctttcagtaaccctgatttttgccatcgttggggccgaagccgatgtttccgtcgaaggagccactccagagcctgatacctccgccatcaagatccaattagatcaactcaattccaagatccaaattctcgagtctcaaatcagtgaaaagttggaagaagtgaagaagaaggacaaaattatagcagaaaaagaaaattccat

SEQ ID NO: 79343 - DNA, 270 bp, Glycine max
  Clone ID: 700963084H1
ggaatatagaagcataaaactgaaactaacatatacatgccattaaaatactaaaattttcatgttgtctctagcctcaaggatcagatagcaaatctacaatcagagaatgaatccctacggagtcaggcagcggctgctgctttagagcagaaagttcatccagaaaaaatagaagcagaccattcagcagctgctctagagcagcaacttcttggtctggttctattttttctggatgaactttctgctctagagcagcaagttcat

SEQ ID NO: 79344 - DNA, 240 bp, Glycine max
  Clone ID: 700963085H1
gatttcatgtaccatcttcagttagcaaattagttcaaatggtaggggaattagagtgattcaaacaacatattgaaatatggctttaactgtatcttgattattttcatcaggttagtttccatagaggaaattcatgccaaaaattacacactgggttcattggtttgtttcatgaacaagacagggttgtagatttgaagtatgctgctgaaacaaatattctttttacgaacgaat

SEQ ID NO: 79345 - DNA, 270 bp, Glycine max
  Clone ID: 700963086H1
gctgtttccccatggagatctcactgaaataggtgagaggggagttaacttgagtggaggtcagaagcagcgaattcaacttgctcgtgcactttatcagaatgctgatgtatatctcttggatgatccatttagtgctgttgatgcacatactgccactaatctgtttaatgaatacatcatggatggtcttaaagagaaaactgttttactcgtaactcatcaagttgactttcttccagcgtttgattctgttttgttgatgtcaaa

SEQ ID NO: 79346 - DNA, 269 bp, Glycine max
  Clone ID: 700963087H1
agttccacgttgttgtccgctctgtggctctctacatttcatcattcatcggaaaaatggctctcgaggttgctgttaaggctgctgttggtgctccaaatgttctcggagattgtccattttcccaaagggtcctcttaactttagaggagaacaaaatcccttacaaactccacctcatcgatctcagtagtaaacccgaatggtttttgggtgtgaatcccgaagggaaggtgccagtggttctttttgatggcaaatgggtggct

SEQ ID NO: 79347 - DNA, 274 bp, Glycine max
  unsure (1)..(274): unsure at all n locations
  Clone ID: 700963088H1
ctcgagccgaatcggctcgaggtaaattgcgctgtatgtagtgagagcgctttggttcagtagcatcaaccataaattttcgctttgcgttccatcttctttaggccagtcttccataaaaacacaaaaagacccacagagaggaacatggcatgtccagcaatggcaaatgggaacggctcattgaagaacttgaagctaaatgacaccaagggaaagaccatcacttgcanagctgccgtggtatatggtcctggagagccctttgtggtgg

SEQ ID NO: 79348 - DNA, 271 bp, Glycine max
  Clone ID: 700963089H1
ataaaactctagggttacatacattactaacctgtccgcgttctctctctctctctgtatcttgcgaaatccgttcccctatctgcttttcgagttgttgctaaagagtgatggactcaccgcccagcaatcaccacgcggtcgacggagacgccaacgacgtcgttagatccttttcccaccgcgacgacgatgaagacggcaagccccaacccctcaccggggacggcgccagtcctggaaagatattcatagggggtttagcgagaga

SEQ ID NO: 79349 - DNA, 269 bp, Glycine max
  Clone ID: 700963090H1
ctcaactagatcatggcctcttctaactcctctctttctctccttctaccttctctcacaaccctcattctcctccaaattcaaacatgtgtctcctcatcacaattaacacaaaaacccctccttctgcctctcaaaacacaaacacaaacaccttcacgtaagctctcattccaccacaacgtcacatcaaccgtctcactaaccgtaggctcgcccccacagaacgttaccatggtcttcgacacaggcagcgaactctcctggct

SEQ ID NO: 79350 - DNA, 270 bp, Glycine max
  Clone ID: 700963091H1
aaagcgtgactgggcgcggagaaggaaacgccaaacacttcggcctaagcctaacgggaatgagcaacaacacatttagaaagaagggtcgaaggttttgggcctgtactctaaacattaatgtcatattcttttcttattatttatgatattcattttttaagcaatttttattgcatttatgatttttttttttgttttaaacatgacttgatttatataattttctccgctccaagtcgtcgaagaaggagttcactgtgttctctc

SEQ ID NO: 79351 - DNA, 259 bp, Glycine max
  Clone ID: 700963092H1
ctctgaaccagttttttgtggaaatcgatagctctctcaattaggggctcgcgataaatggcacggttggttctgccatcgaagacattgattttttcgaggaacactcttctgggtttgatctcccctgctcctaatacagcaagagggagcatcagattcaagcatttccttgcatcagaggtcattttccgaaagaagtattgcccattatattcttcactaccaacggtatagcaagtaagtaggcgactaattt

SEQ ID NO: 79352 - DNA, 266 bp, Glycine max
  Clone ID: 700963093H1
gtagtttcttcatgttgggtagttggaactccttaagcagcttcagagtctgagaagtgagaagcggaagaagaagcgatgcgtttttgcccgtgttttggatccgaggaggccaagggggtggcggatcgcgacccggtcctgctggtttcgggcatgggcggctccattgtcaattccaagcccaagaaattcgggttcaccactcgggtttgggtcagactcctcctcgctgacgtcgagttccgaaacaagatttggtccct

SEQ ID NO: 79353 - DNA, 272 bp, Glycine max
  Clone ID: 700963094H1
gcggaaacttcaaaaccatctctgaagctttggctgccatcccaccaaaatacgacggaaggtacgtggtttatgttaaagaaggagtgtacgatgagaccgtgacagtgacaaagaaaatgctaaacgtaaccatgtacggtgacggacagcaaaagagtatcatcactggcaacaaaaatttcgtggatggagtcaggactttccaaactgcatcattcgttgtacttggaggtggattcttggcgaaagacatgggattcagaaacaca

SEQ ID NO: 79354 - DNA, 272 bp, Glycine max
  Clone ID: 700963095H1
gcaaaacaccccataaaaaaaatgatgcatctaagcttatattttaccgttgttgccatagcgctcctattttcatttacatcttcttcagcagatactcatgaaaactttgttcaatgtctttataattatcccaatagcggaacctcaatctccaaagttgtttacacccagaccaactcctcatacacgtctacactagattcttccattcaaatttctaggttcttaaacgcaagctcaaaaccccttgtcattgtgacacctttggt

SEQ ID NO: 79355 - DNA, 270 bp, Glycine max
  Clone ID: 700963096H1
tttagctttgcagaggttggccttggcaggcacacgcacatcccacattacaacaaacagatttcattttttttattctttctcctttgtcatcctcaaaatccccgaccttaattgctccgaccccaacaaaaaacaaaacaagcaagccatggattcctcccagatccatggcttgtcctcgtaaattcagaactttacaagtcaaacttagaccaccattaactgaaaaaaccgcagaagaagaagaggatcaatctcagaagggtt

SEQ ID NO: 79356 - DNA, 258 bp, Glycine max
  Clone ID: 700963101H1
agttccctttatgctgttcaaaaacatgtcttttttctcccccttggtctgacacaagatttttcggtgaatgagactctagcatggaaagaaggaagtgagtttcttttcttattttgaacaccacagtgatgaacgaacacccatttgaggactgttaacgttccatattaacatctttgctggttacacttgaagttagaagcctcaagtgaagtgtacttgcatcttgttcttggaaaagttcagttgaatggg

SEQ ID NO: 79357 - DNA, 254 bp, Glycine max
  Clone ID: 700963102H1
aatagacacagccattgtttgtttactttccattgattgagcgaaactttgttttttctgcgatcattttccattgggtggaagaaagtctcaacctttagtcgaaagagcaaggatctgagtgagtgagcgatcatgtgtggtggtgcgattatctccgacttcattccagcgggtcccgccggcggggcgcacgcgtgaccgccgacatcctgtggccgaatttgaggaagcggttctcgaagtcgctgctg

SEQ ID NO: 79358 - DNA, 254 bp, Glycine max
  Clone ID: 700963103H1
cacattcttcctgtggatgatactattgaaggagtaacaggaaacctctttgatgcctacttaaaaccttatttcctggaggcatatcgaccagtgaggaagggtgaccacttccttgtgagagggggaatgaggagtgttgagttcaaggttattgaaactgacccttctgagtactgtgttgtcgccccagacacagagatcttctgtgaaggagagcctgttaaaagggaagatgagaatagattagacga

SEQ ID NO: 79359 - DNA, 247 bp, Glycine max
  Clone ID: 700963104H1
aaaaaaaacaagcattatatgaacttaatgacccttgacatttcttttgattttgtgtattaaattgttttggtggatcaattgatctcttgagtactcagatcagtgctggacaaggacaagtaaccaaaattccaagaagggttcattaatacatggccttagagcactacctttcgcaggaatggaaaaccagccccagcccgatcccgagccccatgacagtgacagataaccttgatgggtg

SEQ ID NO: 79360 - DNA, 250 bp, Glycine max
  unsure (1)..(250): unsure at all n locations
  Clone ID: 700963105H1
ccttgagcttttctttctttctctgctctcttttcttttaggtttccactctcacacactcatcatcttctcnttctctgcaataatctctcttctcttcttcactctctcaactcctgccaaacccccatttccgcagttcttatcacttgcagtctgatgtctccgccattgctggttaccgaagatgaagggcagtgccatgcctcgatggtagcatctgcatcttcaccatccctgaactgtttct

SEQ ID NO: 79361 - DNA, 253 bp, Glycine max
  Clone ID: 700963106H1
taccaactacatttcaaggaacaacaaggaggtcaaataggaatagcactagatgtcatttggtatgaacctataacagaacttgatgaagacaaagacgcagcagcaagacgctatggacttttcacttggatggttccttgacccacttttctttggaaaatatcctctctcaatggagaaacttgtagctaagagattgccggagatttctgatacagcctcaaaatttcttgtgggatctttggatttt

SEQ ID NO: 79362 - DNA, 250 bp, Glycine max
  Clone ID: 700963107H1
actgcttgttctttaattttgcttcatggaactgcacaaatccacacatgtggttcttcactcaagccctggtctgggccatctcatcccaacgattgagcttggaaagcgcttcgtccatcaccacaacttccaagtcactgttctcgccgttacttcccaaacctcaaaaaccgaaactgagatattaaactcatccctctgccacatcatcgacatcccttcaccagacctcactggtcttgttaac

SEQ ID NO: 79363 - DNA, 250 bp, Glycine max
  Clone ID: 700963108H1
ctccgatggctaatccctcactcttgttcttcagtctcctcctattatccgccaccgtagccgccgccgaacggatcgacgatgaagacgaccttctgatccgtcaagtggtgccggatgcggaggaccaccacctgctcaacgcggagcaccacttctccgccttcaagacaaagttcggcaagacctacgccacgcaggaggagcacgaccaccgcttccgtatcttcaagaacaacttgctccgcgc

SEQ ID NO: 79364 - DNA, 245 bp, Glycine max
  Clone ID: 700963109H1
cttcaatttataagaatggcactttctcctattcgttcttcttctttctcttcatcagctattgttgcattggctgtgttactgcttcttacagggacctcttcagctaacctctcaaagaacttctattccaagacatgtcccaacgttttcaacactgtaaaatctgtagttaaatctgctgttgtcagagaacctcgcattggggcatctattgttcgtctcttcttccatgactgctttgt

SEQ ID NO: 79365 - DNA, 246 bp, Glycine max
  Clone ID: 700963110H1
ctttctctctcccttagtcaaagggactcgttgttcttctcccagcgttatttagaaaagcaaaatggtgaagatttgctgcattggtgctggatatgtggggggtcctactatggcagtcattgcacttaagtgcccatccattgaagttgctgttgttgatatctctaaatcccgcattgcagcctggaacagtgaccagcttcctatctatgaacctggccttgatggtgttgtgaagcaatg

SEQ ID NO: 79366 - DNA, 245 bp, Glycine max
  Clone ID: 700963111H1
tcttcaattgtcgatgatcttggccttctgctaagagaaaaaggatttaattatcacggtttggaggttctatatagtggtgtttatggaacggaactaacatgtgagatatttattggacctgtttattatcaacggctgcgtcacatggtttcagacaaatttcaggttcgatctactggcacaattgaccaggtcacccggcagccaataaaaggacgaaagcgtggtgggggaattcgatt

SEQ ID NO: 79367 - DNA, 209 bp, Glycine max
  Clone ID: 700963112H1
atctggatgagcttgagaatagacttgatgacatagatagcatagaggctgaggaggaacggaaaagatcaagtcaagcaaatagaaagacatccaatcgtggtgttacaaaagcagctaagaagtacacggaaatacggtagacaagtagtaaagagaaaagagttaagtcagataatgataattattcaatggaaattgagaatgtt

SEQ ID NO: 79368 - DNA, 241 bp, Glycine max
  Clone ID: 700963113H1
gtttgtcagctttttcttgcttccatagttcatggcgtgtgttcaagtcatcacagttcttctctttgcattggctcttgcaaaaattgacccctcaacatgccaaatggtgcagggcagagtcttctgcgttgactgcactcacaactatgacttatctgatattaaggtttcagtgaggtgtgatggtgtgaaaaaactggctttggcaactacagaaaatgatggctccttcaaggtt

SEQ ID NO: 79369 - DNA, 243 bp, Glycine max
  Clone ID: 700963115H1
tatggttcccgttgcgtgaagccaccgatcatctatggtgatgtgagccgcccaaagccaatgaccgtcttctggtcatctctggctcagagctttaccaagcgcccaatgaagggaatgcttaccggtcctgttaccattctcaactggtcctttgttagaaatgaccaacctagatctgagaccacctaccagattgctttgtctatcaaggacgaagtggaagaccttgaaaaggctggc

SEQ ID NO: 79370 - DNA, 243 bp, Glycine max
  Clone ID: 700963116H1
aaacggatcgccgtgatgcgcaggagtatcttgagctgggacaattgtaaattctttctgacacgggagctgcactggatgcattcaaaactgctcgtactctatttaagaagggaggtcaagaagtaccaattgaattactcaataatattggtgtgcttcagtttgaaaggggggaatttgagcttgctcaacaaacatttaaggaggcactaggtgatggtgtttggctatctttcatca

SEQ ID NO: 79371 - DNA, 266 bp, Glycine max
  Clone ID: 700963117H1
ttcggctcgagcacatataaactccgatgttttacgccttttaatttctttgcaccatactctttcattcaattcaacgccacacttcatagaaaagaaaagcgatggagtcttccggtgcagcgaatgagaagctcttagaaaatggcacttcttctgataaacccacaaagggaaagggtggtttaagaaccatgcccttcatcatagtgaacgagtgtctggagaaggtggcgagctacgggatcatgcctaacatgatactg

SEQ ID NO: 79372 - DNA, 251 bp, Glycine max
  Clone ID: 700963118H1
gcggaagctctagcttgggtagcgaatcacaatggcgagaggattaaagaagcatctgaagaggcttaatgccccaaagcattggatgcttgacaaactgggtggtgcatttgctcctaagccctcatctggaccacacaaatcgagggagagcctgccactcatactcattttgcgaaaccggctgaagtatgctctaacataccgtgaagtcattgctattctgatgcagcgacatgtccttgttgatg

SEQ ID NO: 79373 - DNA, 250 bp, Glycine max
  Clone ID: 700963119H1
cacacacactacagcaccaaaaaccgaagcaaagcaagcaaagcaagccaatcaagactcaccttcgtgttccaatcagaggatatagagagagaattatgagttggttgaataaaaataaaagtacttgtagtgatggtagtgccaataatgaatcttcttcaagtggaatagttggagaaagggataatcatcttgatcatgaaattgcacagctcacaaaacttaggtcaagtcctcatgagctttt

SEQ ID NO: 79374 - DNA, 248 bp, Glycine max
  Clone ID: 700963120H1
aaaagggacaacattgaagacaacgttatcatatccttctttgcttggaatggaacaagctgggaagcaaggaattatggtggcgtctcagagtcaaaaccccattgagcaaatccaagcgcgcttcaaggacttggaaactggattccgcctctggctctccaagcagtccctccccgtcgaggcagccgtcgtcaccaccaccagcgccgcccagggcgccgccatcggcgccttcatgggcaccc

SEQ ID NO: 79375 - DNA, 247 bp, Glycine max
  Clone ID: 700963121H1
gaatgttgcgagggaaatcataaaccatagaagtcttcggcaccccaatattattcggttcaaggaggtggttctgactccaacccatctgggtattgttatggagtatgcggctggtggagagctctttgagaggatttgcagtgctggaagattcagcgaagatgaggctcgatatttcttccagcagctcatctcaggagttagctactgtcattccatgcaaatctgtcatcgagacttgaag

SEQ ID NO: 79376 - DNA, 247 bp, Glycine max
  Clone ID: 700963122H1
agactcatgtatacaagaggccacctgtcttttcaagatcattgatttttgctactgcattcatgagcttcttctctgtagttatagcactgtttaaggatatacctgacattgaaggagataaagtatttggcatccaatctttttcagtgcgtttaggtcagaagccggtatgttgttcaaatgtaccatctcagcagaattagttgtgccctcctgtatcccttggttgttactaactactctt

SEQ ID NO: 79377 - DNA, 248 bp, Glycine max
  Clone ID: 700963123H1
caaaaattatggacccataatgttcataaagttgggacaagtcccaaccgttgtagtttcctcccctgaaactgcagagctattcctcaaaacccatgacacaatctttgctagcaggccaaaaactctagcttcagaatacatgtcttatggaagtaagggcctagcgttctctgagtatggaccctattggcgtaacgtgaaaaagttgtgcaccacacaacttctgagtgcatcaaaggtcgaga

SEQ ID NO: 79378 - DNA, 245 bp, Glycine max
  Clone ID: 700963124H1
cactagatgaatagataggtactgtttcgttcgtaatttgcaatttggtgagattcttcattcttatgctgtgcgggtttcctcttcagattcatggcggcaacccaaccaccgcagggtccggatcgtaccaccgatcatactgtcaattgagcttattgatcatgcatgcagaagagataccggccgaaccagataacttgaaggagcagggtacaacaactataggtcattcaagggagacc

SEQ ID NO: 79379 - DNA, 235 bp, Glycine max
  Clone ID: 700963125H1
ccatggcttcccacgttgctcttcttcgtgctcctcatcctctttcaatctccactcaacgcttccatgccaaacagatttccattaacggactcaaattcacttcttcttcttcttgttttccatgttccataacaacacagagagagtcttgttcctctgtgattacatgttcatcttcgaatgacagagacccgaattcggtggatgatgaagatgtaaaacaagtggagcg

SEQ ID NO: 79380 - DNA, 241 bp, Glycine max
  Clone ID: 700963126H1
ttgggagttaggttctgcacgctctgcttccagcgagtgttctttcttcgtttcaacaccttaatttgcacacgctgcttcttccacttgagaaatggcacaagaaacctttctattcacatctgaatctgtaaacgagggtcaccccgacaagctgtgcgaccagatctctgatgcagtgctcgatgcgtgccttgaacaggaccctgacagcaaggttgcctgtgagacatgcaccaag

SEQ ID NO: 79381 - DNA, 241 bp, Glycine max
  Clone ID: 700963127H1
ctaaagtaagcgtagatcctttgccaacaagtgggtttcaaagggtcttgcaaggtcaagaactttcgaccttgagaggtaattttgctgaaagaacgaatctgatacggcagagaagtctggtgtgtggccacctgccacggatgatgaaaagattgatgtttctacctcaagaaggtatgggtcagacagctggatgtcaatgggaaggcatgaaccaacatatccagatctactttca

SEQ ID NO: 79382 - DNA, 241 bp, Glycine max
  Clone ID: 700963128H1
tctgagggccccagaagctcatttgatctgggtttctcttgtttttgtgttgaaggagagtcttttgttttttgtggcgagtttgttgcacgtttaagaagcaatggcacgcaagaagatcagagagtatgactccaagaggttgaaggagcactttaagagaatctctggccaggagttgcccatcaagtctgcacaggttacagaatccaccaatttcagtgagctagcagagaaggaa

SEQ ID NO: 79383 - DNA, 242 bp, Glycine max
  Clone ID: 700963129H1
tagtacttgaattagagggtggaggtaaacaggagccacacttttgggattagagtttctctttgttttccaaaaaaaaaaaaaaaaaaatcatttggtgttgtgtgttacccccttgtttaaggctacggcttcaaaaatggggtactttagagggcagtgttttaacgtgttgaaatccccatcttgttgatttgaaattgtacctagaaatgtctccaattaggatttagagttgtaaa

SEQ ID NO: 79384 - DNA, 243 bp, Glycine max
  Clone ID: 700963130H1
ctatgttaaaggacaaaagagatgcagtgagggtgattgctgagagatggaagcttgcagtgaatgcagctggtcgggagccaaagcatttcgtagttgttcatgttaccccaaaatcaagagctcctgctcgtgtgctagggtttaagggtactacaactgtaaatgtaccccttcctccggcatttgatcctttggttgatatggatcctcgacttgttgtctcttttatagacttaccaa

SEQ ID NO: 79385 - DNA, 221 bp, Glycine max
  Clone ID: 700963131H1
cgccattagtgaaccttgaaaccttaacagagtaaacttgcttgcagcgaatccagattcggaggaggagtgagtggtccttgttgctgatttggcaacaacaaataaagatgatagtttgagtttgagtttgtgtgaatccagatctgagtttcatttcgcagttttgcggagaagagaacaatggagtcagcaacggtatcatcatcggagtcggagac

SEQ ID NO: 79386 - DNA, 253 bp, Glycine max
  Clone ID: 700963133H1
ctccacagcactactgttatatatggattcgatgcttcttcgatcttttcctaatattaacaacgcttcttctctcgccaccactggttcttatttgccaaatgcttcatggcacaataggaaaatccaaaaagaatataattttttgaggtttcggtggccaagtttgaaccaccattacaaaagcattgaaggagggtgtacatgtaaaaaatgtaatataaaatttgttgtgaaagcgacctctgaaaaa

SEQ ID NO: 79387 - DNA, 250 bp, Glycine max
  Clone ID: 700963134H1
cgagattccaactgaggaaagtgacagtgctctacgagcttctctctgcttgtctatcagatttaggtgaaaataacaagaaatttagccggaggagaaagggctatgatgctcaacaacgtgtcactctgcggctgctagcaacttggctcgatatcaagtgggcaaaaatggaggccattgagacaataggtgctagttctgcaatggttttattaaagagcaagaggcaagtaaagaagaaattcaa

SEQ ID NO: 79388 - DNA, 248 bp, Glycine max
  Clone ID: 700963135H1
cttgcattttcctacttccacgacatagattcacgcttcagccatggacttgacttgcctcccgaagaaaccgagaagggtttcctaggaaaaatcatgcccaggctcgtcaaatccatctctggcgacaggacacacgtgcttcgcttcgagaccccagagactatgagcagggacaggtttttctggtttagggatgaggagtttgctagacagactgttgctggtctcaacccgtatagtatacg

SEQ ID NO: 79389 - DNA, 243 bp, Glycine max
  Clone ID: 700963136H1
cgaatacataatcgttggatctgccaatatcaaccaaaggtcaatggatggtgctagggactctgagattgccatgggtgcttatcagccctatcatttggctaccaggcagccagcacgtggtcagattcacggtttccgcatgtcattgtggtatgagcaccttggcatgcttcatgactccttcctccagccagagagtgatgcatgcattaacaaggtgaaccaagttgctgacaaata

SEQ ID NO: 79390 - DNA, 245 bp, Glycine max
  Clone ID: 700963137H1
ggtgggaggtcgaaaactagaaaagtagcaggggcttacactgtaccattaccatagtcactttttgtctcttgtatttcttttccttttttccttttttttttttcattgacttgttgagggggtcttctttatctagctggagaaacaataatggttgctgtctagttctgtgaaattcaaccccatcatggatcttgagtctgtgatccacaggatcacaatttccgatgaatcatggaaga

SEQ ID NO: 79391 - DNA, 247 bp, Glycine max
  Clone ID: 700963138H1
cattccaatcgctcccaaaatattttctaatttgttcataactcaataattctcatcatgggctccttgattgttccaggtgaacatgatcacaaactaaagcttgttctctcttccctttgtatcaaccagtcacctcattcccgtagtagacatagctaggctctttgccattcatggtgttgatgtcaccataatcaccaccacagccactgccgccattttccaaagctctatcgatcgcgac

SEQ ID NO: 79392 - DNA, 247 bp, Glycine max
  Clone ID: 700963139H1
atctgagatagagctacagcaccattatcattcatctccattactttcctattcgatcctcgatccctctcccacatagaagattcataaccccaaaacccaattttttttaataatacaactgcaattatttttattttctcagtaaaaaaaaaaaaaagagaaaggagtccgattcattggttaaaaactcttgctgtcccgcttcgtcctttttctcctccgtcgctctttccgcaatgccatt

SEQ ID NO: 79393 - DNA, 244 bp, Glycine max
  Clone ID: 700963140H1
ctttgtgtaggtgctcaaccctagtaagccgcaatggtgaagtactcaagggagcctgacaatccaactaagtcttgcaaggctagaggcgccgaccttagggttcattttaagaacacaagggaaactgcctttgcaatcaggaagttgcccttggtcaaggctaaaaggtacttggaagatgttcttgcccacaagcaggcaattccattcagacgtttttgtcgaggtgttggaaggacag

SEQ ID NO: 79394 - DNA, 245 bp, Glycine max
  Clone ID: 700963141H1
actcgagccgattcggctcgagaagagggagttataagatattcacagaagcagcaaaaatgcttatgcaacaagttcatgtatcaaatccaagttcatcttgtctcatccttcaaaagccatgcctccgtgacattactcacccatcttttcagctttggtcaaggccatcatcgttcccataccaaaggacgcaggaagggtttctcatggatgcaggtcttatggcatcaatatcttagctg

SEQ ID NO: 79395 - DNA, 241 bp, Glycine max
  Clone ID: 700963143H1
gacagttgtaaagacacggttcagtgacgatggcaaagctgccttccaatgccaacgagcatggaggccaaattcacttataaccctgtctgctgaatatgactccacaaagatctttggttcatccaccaagttcggtcttgctcttgctctcaagccttaacttgccctggctattaaatcttgtttggcgacatcaacttttttcatatcattgtacattgtttccaaaacccatgtt

SEQ ID NO: 79396 - DNA, 239 bp, Glycine max
  Clone ID: 700963144H1
ctcataacacaaagcacaaagcaaagctcatccttgagttaaaaaatggcagcagcttcttccatggctctctcatccccatccttggctggcaaggccgtgaagctgggcccatcagccccagaagtgggaagggtgcgcatgaggaagaccgtcaccaagcaggtctcctcaggaagcccatggtacggcccagaccgagtcaagtacttgggcccattctctggcgagcccccgtc

SEQ ID NO: 79397 - DNA, 238 bp, Glycine max
  Clone ID: 700963145H1
taaatttctaatgtctttgtcctgtccttccttttccttgcaaagtagaaaacgaaagcatctccctctctcctaagcaagcaattgcccttaaccctcaaaatcttcctctttctctcacagccattgattctccatggacgaatcggagcaatacccgaaggagtattaccctaacgatcaaacaatcaccagaagagtctcctcgtcctcttcgacgaccagcgtccacgtgaca

SEQ ID NO: 79398 - DNA, 241 bp, Glycine max
  Clone ID: 700963146H1
atgagtttgagtttgagtttgagtttcagtctgagtgtgtgtgtatgagagagagagagagagagagagagagagacgcacaagcacatatactataagaatatcacacattacagtattctgagtatctctctgctgcgcagttatgaccgagaatacataggtgagatttctacagtagtgtagctgggtgcagttctcatggctgtctagcagacactcatcttccgagccataagtg

SEQ ID NO: 79399 - DNA, 242 bp, Glycine max
  Clone ID: 700963147H1
ttccctcttcccactccccagatcccaaaggagtgtcttttctttttttatcaagtttgttgtttatatttaacaacctagagttaaggattttttttgtgctaattagatttaaggatttttaataatggacataaaagtgctttcttccggagttcagtactcaaatctgccggagagttacatccgacccgaatcggagcgacctcgtctttccgaggtttcggagtgcgaggatgttc

SEQ ID NO: 79400 - DNA, 251 bp, Glycine max
  Clone ID: 700963149H1
gtggtagtgcccaaacatgtaaccaatgaccagcaagatatctcacgatcatggatgaaacttgcttactttgtacaagggctgaaccctcaaaagagagagagaggtcaacatatagaacatggaaatgagcatgaccatttgcctattattttagggcaatcgattgccaatattcatgctctataggtggatgggtgagtgtctgaagctagcaagggggaaatggatgaagaaatagatgagagcgc

SEQ ID NO: 79401 - DNA, 249 bp, Glycine max
  Clone ID: 700963150H1
agatgttgcacattttttgtttggcatctttgggaatgcttccgctctgttcctattcttggctccagtgatcacattcaagaggattattaagaacagatccacagagaagttctcgggcattccatatgtcatgacactgctcaattgtctcctttcagcttggtatggtttgccttttgtgtctccccacaacatattagtgtcaacagtgaatggcactggatcattgatagaaatcatatacgt

SEQ ID NO: 79402 - DNA, 169 bp, Glycine max
  Clone ID: 700963151H1
ctcttgtgtactggattggaatatatatgtacttgatgttttctatgtaatgaaggtcttaataatataattaatcttacaaataataatattgagaccttcattacatagaaaacatcaatattattatttgtaagattaattatattattaagaaatggttcgcttt

SEQ ID NO: 79403 - DNA, 243 bp, Glycine max
  Clone ID: 700963152H1
ataaaagaccatgtcggtgaaggagtgcgagcaccacaaggggaagaagaggaagatcttccggcaagtgttctggtgcttagtggtgttccttttcatcgtgctggtcacaattcttttgatatgggcaatccttagacccaccaaacccaccttcacgctccaagacgtcaccgtctactacttcaacgccaccgtggcgaacttcctcacttcgaattttcaggtcacgctcatctcgcg

SEQ ID NO: 79404 - DNA, 242 bp, Glycine max
  Clone ID: 700963153H1
atacgtgaacagtgaagatgatttcttttcacatcctattgctaagcaacattacaaaaaccatattaaggctgtgttgacaagaaaaaacacaataactggggtcgcatataaggacgatcctgccatatttgcgtgggaacttatcaatgaaccccgttcccaacacgacaactccggaaaagttatttagcaatgggtgattgagatggctgcctacgtcaaatccatcgacaacaatc

SEQ ID NO: 79405 - DNA, 242 bp, Glycine max
  unsure (1)..(242): unsure at all n locations
  Clone ID: 700963154H1
ctcccatcctttcgcattctcaatacccttttgatttgtgaaaggaaagcaaacatggttgatcaggtccaacaccctacaatcatggacaacgttcctagtcaactccatctcagacctggtctttcatctggtattagaagttatgatggagcctaccgccacccagctatgtaccaaagaccctcttttgggaattactcggctngtgccttgcagtttcctgtgatgcccacatgcaa

SEQ ID NO: 79406 - DNA, 242 bp, Glycine max
  Clone ID: 700963155H1
attcaagtaaaatttcacttaagcttggtaaagttgaagagaatggcatagagaaggaatctgaccccagaaagaaggctgcggttttaattcttggagctggtcgggtctgtcaaccagctgctgaaatgttatcatcatttggaaggccatcatcgagccaatggtataaaacattgttggaagatgattttgaatgtcaaactgatgtagaagtcattgtgggatctctgtacctgaag

SEQ ID NO: 79407 - DNA, 241 bp, Glycine max
  Clone ID: 700963156H1
gttccagaggcccgtcttcggagtgcccgtgggtattgaagcccgacgtcgtggcccctggctcgtccattttggccgcttggattccggatgtgcccgcggcccgaattggcccaaatgtggttttaaatactgaatacaatttgatgtcgggaacgtcgatggcctgccctcatgcttccggggtggtggctctgttgaagaatgcacatcctgaatggagtgcttctgctattaggtc

SEQ ID NO: 79408 - DNA, 241 bp, Glycine max
  Clone ID: 700963157H1
ctcacagccgccgctcgcggtggtgccaccgttgcactctccgctagctctctattcgatctccctctcaccgatactaagaaggtaaagtcgttaacgatggacgaagtctctggtagtaagagttgtggcactttggctctatctggaggttgatgaaggctatagttggatgaacacaactgaaatgaatggaaaccagcaccgttacaatcctttgctaatcagtaagcattgacaa

SEQ ID NO: 79409 - DNA, 238 bp, Glycine max
  Clone ID: 700963158H1
gattcaacatacaattctctggtaaaggggttttgtaaggcaggagatcttgtaggtgctagtaagattcttaaaatgatgataagtaggggtttcctcccaagtgctaccacttataactacttttttaggtacttttcaagatgtagaaaaatcgaggaggggatgaacctgtatacaaagttgattcaatctggttataccccagatcggttaacttaccatcttctggtgaaga

SEQ ID NO: 79410 - DNA, 237 bp, Glycine max
  Clone ID: 700963159H1
aaataaaaaaggaaaggagatgtttgaataaaaataattccccttcaagttcttattttttgagaggacaggacaatatgaatgttttattatgctctatcaacacattaaaaagattatatgatatatctgctgtggaagtaggtcaacatttctattggcaaatagggagtttccaagtacatgcccaagtacttattacttcttgggttgtaattgctctcttattggtttcag

SEQ ID NO: 79411 - DNA, 236 bp, Glycine max
  Clone ID: 700963160H1
gttcgtgtccactattaaaaaaatcaacaagagtagtaacgctcccaagtccgttgcgagcaccggagcgacaatatcaccattgaacttccgaaccggggttgatcatttttgccttcacaccggaggaaaggcggtgatcgacgggatcggaatgagcttggatctgagcgagtatgacctggaaccggcgaggatgacgctgcaccggttcgggaacacgtcggcgagtagct

SEQ ID NO: 79412 - DNA, 239 bp, Glycine max
  Clone ID: 700963161H1
gcaggaagagagaaaggcgatggacctcggaacctatgaagtgccagaaggagtggacattctaggaagatacgatgcagagtttgcaaaaatcctcacaaaagacgctttgacattcgttgctgagctggaacgtgagttccaggagcgatatcaagcatgcattagggagcagtagagaggcaaagaagaagtacaatgaagggactcttccggggtttgatcctgccaccagtcaa

SEQ ID NO: 79413 - DNA, 239 bp, Glycine max
  Clone ID: 700963162H1
aaagcagatgatgagaatatacgtcgccagtccagtaagcgactgggaagatagtgacgctgagagatatgtggaccacactttatctctttgggacgaatatgaagccgaactgtcacattttgtatctcaattatatgattcattattcaaggactgtgctagtatcaatgttgctttgcaacatagctcttgcctcatatcgaagaatgacgtatgtgtgtcatctccccggcgta

SEQ ID NO: 79414 - DNA, 237 bp, Glycine max
  Clone ID: 700963163H1
acagggcatgatgcaatggcaatatctcacttaacaaaggtgggaatgctgtttgtgcgttgtcgcggaggcataagtcactctccacaagagcatgtgctagataatgatgtctgggcagctggtttagcaaccttgtcatttctggaaaacctatcataagtgatacggtaactgtgtaaagcaataaatagatgatagcttgtaattataggttaatttattgagttaattcat

SEQ ID NO: 79415 - DNA, 252 bp, Glycine max
  Clone ID: 700963165H1
tgcgtattcagctcgagatgtggatgaaagtaaagaagtagcaaagatgtttccattcgggcacaatggtcacaagataaaggggactatggtggttatgcagatagaatgcgttggatatcaacagcatcaccagtgttgacgggatcgtcggtaccggcttagacttcttaggcagtggactcgatacagttacttgtttagcatcctgcatctccatccaacttagtagtgctaccaaggctgatggtg

SEQ ID NO: 79416 - DNA, 243 bp, Glycine max
  Clone ID: 700963166H1
aaccaagcttctctgttaaaaaaaaattaggcgtctaaagggccaaagcttagaaagttgaagctttttttgttgaggtgaaagtgaaatggttggcaaggataatctgagggctgaggacttgaacttgtgctttaagaagcttatgatggtggccgggagtgggaacagtgagaaaggggtgaacttgaaggttggggtgatcaccgagtggaaggatattcctgtggagcttctgatgca

SEQ ID NO: 79417 - DNA, 246 bp, Glycine max
  Clone ID: 700963167H1
aacactgcagtgttgactatgctgctagctcaacccattttcctctctcgcaactttcccactctcaacaaccgaaactcgagaacttctcttcaacttcacaaccctcctgcactcataagagtttcaccgcaaagaacgccaataatagcctcttctggttgttttggttgcttcgtaaaaccgcttgatgtcagaaccaaaacctcgctgggtgcgttttttaagaaaagaaagggttgtgca

SEQ ID NO: 79418 - DNA, 240 bp, Glycine max
  Clone ID: 700963168H1
cgaatacataatcgttggatctgccaatatcaaccaaaggtcaatggatggtgctagggactctgagattgccatgggtgcttatcagccctatcatttggctaccaggcagccagcacgtggtcagattcacggtttccgcatgtcattgtggtatgagcaccttggcatgcttcatgactccttcctccagccagaaagtgatgcatgcattaacaaggtgaaccaagttgctgacaa

SEQ ID NO: 79419 - DNA, 239 bp, Glycine max
  Clone ID: 700963169H1
gtaccatcttataactaggtatttattttctcatatgctcttcttaaacttctctatggtagtgtgttcacatacatatctacggatagtgattagtattgtcaccacatacaataatgggttccattagtaacaccgagagtcataatcagcacaatgatgatgacgacgatgatcatcgtcatcgggtgaatttctcgatccagagaggatatgggacaatattgtaggaggcattg

SEQ ID NO: 79420 - DNA, 243 bp, Glycine max
  Clone ID: 700963170H1
aattgctggagtggcactctactcgttcatcaaagccaggatggaggaagagaagcgacaagcgaaagcagcataagaagttgtcaacctggaggatgtcttgcactgtaaatcaccacaaatttccttcaaaataattgagtgactggttcagtgttgtactatccttgtgatagcgcgcttttatttttccttctatttttgtcaaatatgttctttttttcctttttctctcttcattca

SEQ ID NO: 79421 - DNA, 239 bp, Glycine max
  Clone ID: 700963171H1
aataaattatgctactgggtgcatatttgagtatgacaaagctcatccagagggttctggcattggctttaaggaggaagacaaacccaacttcattggttctttctattccaaaactaaggctatggtcgaagagctcttgaaagaatatgacaatgtgtgcaccctcagggttcgcatgccaatttcatctgacttgagcaatccgcgcaatttcatcaccaagatttctcgttata

SEQ ID NO: 79422 - DNA, 240 bp, Glycine max
  Clone ID: 700963172H1
tcccaactcgccctcgactcacatccttgtccgattccgcgaacgagtcgagtcaatcgggttggtaagatctattctgtttcttcgtcatggcaaccggacaactattctcgcgtactacacaggctttgttttacaactacaagcaacttcccatccagcggatgcttgattttgacttcctttgcggcagggaaacaccatcagttgctggaataattaaccctggttctgagggat

SEQ ID NO: 79423 - DNA, 236 bp, Glycine max
  Clone ID: 700963173H1
aaaaaaaatgggttcttctctgtggacctgtctgattttgttatcacttgcttctgcttccttcgccgccaacccaagagcaccaattgatgtgccatttggcagaaactatgtgcctacctgggcctttgatcacatcaaatacctcaatggtggttctgagattcagcttcatcttgataaatacacaggtactggcttccaatcaaaagggtcctacttgtttggtcacttca

SEQ ID NO: 79424 - DNA, 236 bp, Glycine max
  Clone ID: 700963174H1
atttggatcactggttttcatggaagatgatgatgttggattcttttggcctggcagtttcagacaggtagaccaacaaggagctggtgatgttaatgtaggacatgctcaaagttcaaatgctagtttagctccaatggtgcctcctccaccacaagcttctgcatctcctgatctcacattgaagctttaagtttaaggcttaagaaaatgacgatacatacacaagcaaaggc

SEQ ID NO: 79425 - DNA, 236 bp, Glycine max
  Clone ID: 700963175H1
caagaagcaaaggctcctttgggcctcaaccagtgtaaagaaccctgcctattctgacaccttatatgttgctcctcttattggacccgacactgtatcaaccatgccagaccaagcccttcaagcatttattgatcatggtaccgtatccaggacaatagactcaaatgcatctgaagctgaaggaatatacaatgctctccagaaattgggtattgactggagctttgttggtt

SEQ ID NO: 79426 - DNA, 230 bp, Glycine max
  Clone ID: 700963176H1
gccttgtccacgcccagagcatcctcgccatctgggccacccaagttatcctaatgggtgctgttgagggttatcgtattgctggtgggcccctcggtgaggtcactgacccaatctaccctggtggcagctttgacccattgggccttgctgatgacccagaggcttttgctgagcttaaggtgaaggaactcaagaacgggagattggccatgttctctatgtttggg

SEQ ID NO: 79427 - DNA, 236 bp, Glycine max
  Clone ID: 700963177H1
caacaaaggaatacatccatggcgaacaatatagatcagactccaaaacagttaaccaacaagcttacttttatgccagagacctcgaagtccatcccaaggacacatttgtgttcagtatagatggcaccgtactctctaatattccatactacaaaaaacaaggatatggggtggagaaatttaactcgaccttgtatgatgaatgggttaacaagggcaatgcaccggcactg

SEQ ID NO: 79428 - DNA, 234 bp, Glycine max
  Clone ID: 700963179H1
attgtccatcattttagtccttacttgcaagattggggtacatttgaccatttgcagaaacaacatttggataatccaaaggatgataatattgctcagcaagctgcaaagcagagattcacactggaaaattttgttaggctttcagagtcgcttaagacaagttcttgtggagagagaataaaggacattatcctggagaagggtataactaaaactgcaatgacacatttg

SEQ ID NO: 79429 - DNA, 238 bp, Glycine max
  Clone ID: 700963180H1
gttcgttggcttgcaaggatctggtaaaacgacgacgtgtacaaaatacgcgttttatcatcagaagaaaggttggaagcctgctctggtgtgtgcggatacgttcagagctggtgcttttgatcagttgaagcaaaatgctactaaagcgaagatccctttctatggaaggtacacgctggtttcttttcttgttggagaatttcagagctggttggatttaactgtagacttattg

SEQ ID NO: 79430 - DNA, 263 bp, Glycine max
  Clone ID: 700963181H1
gttcggaattcggctcgagatttcggtagacggtagctattaacattacaacacctttttattatttcacctctctctctctctctctcattgccatagatctgaaacacagatcacagggttaacgctttttgacccttctctccattggtcattcccccgaatacgccgcacctataatctagcaccgaccggaccctccatacccgttttcgcgcggatctaggagctcaggtaatccccgaggaattttcaattgttat

SEQ ID NO: 79431 - DNA, 234 bp, Glycine max
  Clone ID: 700962656H1
tatcaaggaggctgctaaagagaagatggtgcagctcaaggtacatagatcagtgagaggtatgagggcgtctatttacaatgccatgcccttggctggggttgagaagttggtggctttcatgaaggattttcaggcaaggcatgcctaaaggagtaacctcaatctgaaacaaatacttgcattgcatgaacctaatgcctgaaggattttatgctaataaagtgtttgtct

SEQ ID NO: 79432 - DNA, 241 bp, Glycine max
  Clone ID: 700962657H1
cttgagaaaaccgaaaccctaatcacgactccgagaaccctaaattcgcccaatccaaagtcccaaacctctaaaatcaaaccatgaaaagcgtagaggtggcgaagacggtgctcgaggtcgcgacgtggcttggaccgccgttgaacacacccaccatctccgccaccgcagtcatcccgtccccgctgcccccgcagccgatgtctgcccatccgaccaagatttggagtctctgcga

SEQ ID NO: 79433 - DNA, 239 bp, Glycine max
  Clone ID: 700962658H1
gcgagttttgacttttaagcgtggtttgcttttcaattcagcattttgtcgcttcttctattaattctaccaagcttcgctgattgatccatcttcgtcgacgaattgtgcattcctgtgctgtgctggtgatgggtatggtttggatttcaaatgtctttcttctcgggtaatgagatgcatcaagttttgaagtacagtgagcagggatggacattgctgctcttttaacttctgct

SEQ ID NO: 79434 - DNA, 240 bp, Glycine max
  Clone ID: 700962659H1
tttgggtggactggccagaaagcagatgaattgatcctaccagtcttaaaggagtataacaagcgtgagactcaattgcggttggaagcattttacaattttaatgaaagatttgcaaaaattcgtagtaaaagaattaagaaagcggtaaaaggaatcactggtaagcagccttcagatttgatagatgattctgtagaagagttctccaagagtaggaagactgggagagaacctgag

SEQ ID NO: 79435 - DNA, 241 bp, Glycine max
  Clone ID: 700962660H1
cgaaataattaacccatcagagagagagaggtaataatgggagtgataaaggatggcacaatctcaggggttctaccggaacctcaaggatttatggtgcactatcctgcttatccatcatccatctctcgagctgttgatactcttgggggaattcaagccatccagaaggctcgctgttccaaatccaacaaattagagcttcgtttccgtcctgaagacccctattctcaccctgcat

SEQ ID NO: 79436 - DNA, 242 bp, Glycine max
  Clone ID: 700962661H1
tagagaaagaactattggaggaggaagagagaaaacagagggaggaggtttcaaggttagtggaggagcgtaggaaactgagagatgaaaaagtggaagctgaaaaagatcacagcagatcatgaaatgtcagtaaggagaaggaccgtcagaaggaagctgaaaagaagcgtcaggaaaaaagaaaagagaaagataaggggtctagtaagagcaactctgatgttgaagaattggaaaga

SEQ ID NO: 79437 - DNA, 240 bp, Glycine max
  Clone ID: 700962662H1
aaacccaaaaacacttgatttgtaattttcctcttctcaatcttgtcttgggtttctcttgccgtgagattgaacatccaccatatgccacaagttgtgtaaagagagagtgaaggatcaagcaatgcataagatagagcctgctgacagaagatagagagcatagctgaacatacccaacagggctttgtgtatgagcagttgttctctcttttcttctatcaacatatcagttcctgg

SEQ ID NO: 79438 - DNA, 242 bp, Glycine max
  Clone ID: 700962663H1
gttcacaatcactttctgcgcttcactcactcccttcgtgcggttttctttctttgtcgaactcgtgcgaaaatgcgtgagattcttcacatacagggagggcaatgcggaaaccagatcggagcacgttctgggaggtggtgtgcgcggacacgggatcgattccacggggaggtaccagggggacaacgagttgcaactcgagcgagtcaacgtctattacaatgaagcgagttgcggaa

SEQ ID NO: 79439 - DNA, 244 bp, Glycine max
  Clone ID: 700962664H1
caaaggactaacccttccttggatctctttctacctcttttctccgcgactggtttcaatttgaacctaaggcagagaagccagagagtctcctctgccttagagaaactctcacaatggcgtttcaggactttgatctcatctcagagaggagaaggaacgagaagaggcaaaatgcgatgaagaggatcatgattggcgtggtctcttccgttgtcctcgatgccatgataggtgcagtact

SEQ ID NO: 79440 - DNA, 242 bp, Glycine max
  Clone ID: 700962665H1
gctctcagtttctcatctaacaatagtccattgtcaaagctagagtcaaactcatatgtgttaaggccacagcattctcttgaaattgctagtggctcgcctgaggatgattcttatttgacgatgaccttgatgacctgacacataagataagagagctggaaactgctatgctaggacctaatgcagatatgctagatatctacagtaatgtaattccagaacctgattcatttttgtta

SEQ ID NO: 79441 - DNA, 240 bp, Glycine max
  Clone ID: 700962666H1
ccaacactttgctggtgccactctttctgacttctcttccaaaaacacttcctccaccaaccttaaaaaaacagaggaaagccatgagtcgcagaaacgaaagtggtccaaagcttgacttgaagctgaacctgtccccaccgagggctgatcggagactggagtcaccgacacgatcggcgacggcgtcgcaacgtcaccgccgagctcgtgcgtgtcgtcggagctgaaccaagagga

SEQ ID NO: 79442 - DNA, 237 bp, Glycine max
  Clone ID: 700962667H1
tctttgtctctgtctctgtttctactttgaggcctccgttgttggtgggtgggtctttcttctctcaaaatggccaccggagtgaacagaaaaatttctgctgcatcagctcgggcccacacagaagggcaaagaaaaccaattccctttccctcccatcgggaattcttggaacagcactagcagtgttgtttattgggtttttagcatgggcttatcaggttattcaacctcccg

SEQ ID NO: 79443 - DNA, 236 bp, Glycine max
  Clone ID: 700962668H1
cggaacaaacgaattggcaatactgatagcaaaattgtacactggctcccatgacatgatatctctaaggaattcttaccatgggaatggtggtggaacgatggggaccacagctcaaagcatttggaaatataatgttgtgcagagtggtgttcatcatgcggtgaatccagacccttatcgaggccttttcggttctgatggagagaagtatgtaagagatgttcaagaaatca

SEQ ID NO: 79444 - DNA, 236 bp, Glycine max
  Clone ID: 700962669H1
gggtgactgagagatggacgctcccctgctgctggccaaaggcgagggggacgcgctggtgacggagaacggcgactacgtggcggtgagggagctgaaggaggtgaagaaggtgttctggattgagacgaagagagtgtggcagattgcgatgcccattgttttcaacatatggtgtcagttcggtgtgaattccgtgaccagcatgttcgttggacacctcggcgacattcagc

SEQ ID NO: 79445 - DNA, 237 bp, Glycine max
  Clone ID: 700962670H1
aaagcagcgattttgaagtctctccaaaccattatggttgtcttcctgctgatagtactctttagcagcaacaccaaagcagaaaaagaaacaatccacgaccatgcaaacaaaaagacctacataatccacatggacgagaccaacatgcccttaaccttcaccgaccacctcagctggttcgacgcctccctcaaatcagcgtccccctccgcggagattctctacacttacaaa

SEQ ID NO: 79446 - DNA, 239 bp, Glycine max
  Clone ID: 700962671H1
aatacatcaagccggtcctgcctttgattacttagagaatgctcttggtagatttggtgatgggccattctttcttggtcaattcagctgggtggatattgcttatgttccatttgttgaaagattccagctcgtctttgctgatgtgttcaagcatgatataactgaaggaagacctaaacttgcaacatggattgaggaagtgaacaagattagtgcttatacacagacaagagctg

SEQ ID NO: 79447 - DNA, 239 bp, Glycine max
  Clone ID: 700962673H1
gtctcggtcagagtttctcacagagaaaacaggaaagcgagaaccttcttaccccttcacctcttctctcttttcctatttctttctctcacgtttcgctccatcatccctcacacctcacccaccctacccccaccccacccaccttcttctttctctctttcttcccttttccctttagttttcgtttgttcttcccttgtgggttctcttgtttctctctgatctcatgaagaaga

SEQ ID NO: 79448 - DNA, 237 bp, Glycine max
  Clone ID: 700962674H1
tggaaatcgaagtgaaaagaacggttgaaagtgaaagagtaagatgctattgcaattgcgctgctctcattctcaccacaaactgacacttgcctgcagttgaagaaagaatagaggatcgggtcgatggcgtctgctagccttggaagtggtggggtcggcagttcgaggtctgttaatggtggcttcaggggttcttccagttccgtcgattggcttggcagagagatgcttgag

SEQ ID NO: 79449 - DNA, 242 bp, Glycine max
  Clone ID: 700962675H1
tctcgagccgctgcgagcggctcgagcagtatttccatggatgctcctaaatatagtaagtttatttgctttctcagctttccaattttgagttcattttaaataatttctcagctttccaattgcgaagtatatgatctttgtttgcctagtgtagtcaatttgttctgaaactttgctgattatagtttatgaaacccattttttatccttcaatagtaccaaccattgatgggaagacc

SEQ ID NO: 79450 - DNA, 238 bp, Glycine max
  Clone ID: 700962676H1
ctcaaccggcccaatttagcataagcccagcatggccaccgcaacagcagcagccacctcgtccttcatggggacgcgcctcctggaggcccactccggggcggggcgggtgcaggcccggttcgggtttggcaagaagaaagccgccgccccgaagaaagtttccagggggtcgggctctagctccgataggcccctgtggtatccgggcgccaaggcgccgaggtacctggatggg

SEQ ID NO: 79451 - DNA, 87 bp, Glycine max
  Clone ID: 700962677H1
agagaaaaaaaaaaaaaacagaccaacacagaaactcaaaaccaaaatagagttattatggatcacattcatgggttacgttgtttt

SEQ ID NO: 79452 - DNA, 238 bp, Glycine max
  Clone ID: 700962679H1
gagagagtagagtggtgaaggggaaagtgctttcttctctgagggggttcaacaaccaactacttttttttttcttcttggccaacaaatgctgtttaatgaaccatcaattcatttatctctctctctctctctgtctctctggctgctttttttttctttctttctaggttttaaaatttaagagaggtaatcccacacgctttgatcaaacgaaacacaactaaagaagaagggt

SEQ ID NO: 79453 - DNA, 241 bp, Glycine max
  Clone ID: 700962680H1
cttacctcttggcatggccattcaaatgtcttcttttgtctttgtttctcttacaattttattttgcttctcttccttggagaagagttttgcctttcaaacaacaaaggaggccacagaaagcaacaatcttcatcaatatactcatcttgttcacctcagctcactccttccttcatcttcctgcagctcttctgccaaaggtttcaaaagaaaagcatcattagaagtggtacacaaa

SEQ ID NO: 79454 - DNA, 239 bp, Glycine max
  Clone ID: 700962681H1
gaactaagtgtgaaccactaccaagaaacaagcttttaagtccaattatttttcatgagggtaggtttgctcaaaggccaactcctctagctgccctcttgaccttcctatggctgccaatggcatcatactctccatcttaagggtctaccttaacatccctttgcctgaaagaattgcttggtacaactacaagctcttaggaatcagagttattgtgaagggtacccctccaccgc

SEQ ID NO: 79455 - DNA, 236 bp, Glycine max
  Clone ID: 700962682H1
tgaaaattgcaaccatgttaatggtgatatagtagattatgcagctgctgggcttgcacaagtggcagaatttgcaggagcagaaacaaatggagaggccataactggtgttgttgtgtcacagaataagaacagtgtttactttgatgagcaacaagatgatgaagttgatggagttcaaaatggtgatgctttttggtctgtccatccaacaaatctgggggggagagactttg

SEQ ID NO: 79456 - DNA, 216 bp, Glycine max
  Clone ID: 700962683H1
attccgttcccatcgcatctgtaacaatggaagcgcgccatgcaactcttggtcgacgaacgttggaggaaattcggcaaaagagggccgcggagagattgagcaaaacctcttcgggaccagatctcgggcaggttcccagcacctccgagacttcgggaatgagcaaatccgagagcgcaaataggctctctgagacagttcttgaggctcaat

SEQ ID NO: 79457 - DNA, 234 bp, Glycine max
  Clone ID: 700962684H1
acactgttaataattattctgattcacgaaaaacaggaaaaccccaaaactctctttgttcacaatgggcacagagacctcatcggtagatgtttcggaacccctgctcttggatcctacgggaacgaggaaaaggaagagtatttgcgcgaagaggttccggagtggaaggagcagataacgataagagggttggtggtgagtgctgtgttggggagcttgttctgcatcatc

SEQ ID NO: 79458 - DNA, 237 bp, Glycine max
  Clone ID: 700962685H1
caaccaccatggccaatttcaaaactttcttcatttcccaaaccctaaccctaaccctccttttctccaccctagtgactgccacttaccaccacaacatctctccaagtcttgtacgttctcgtgagaagctgacccaccttcacttctacttgcatgaaatttttactagcaaaaaaccctcgaacatcgtaatcgacccccccaaggtggtagccagctctccacttccatttg

SEQ ID NO: 79459 - DNA, 238 bp, Glycine max
  Clone ID: 700962686H1
aaaaaaccaatccgtctgtaactgtcacgtacacacgcagtgtgtctcgtctcggcttagcaggtatcgctgattcattcatggaaccctttcgatttcaattgatgccaaattccctgtgcttactcgtttgccgcttcaaatgacgattaaggataatcttattttctcaatctctgaatgtgatgtcctttgcaataagaccaaggttattgataacgttcttcatgtaatttaa

SEQ ID NO: 79460 - DNA, 84 bp, Glycine max
  Clone ID: 700962687H1
ctctctttgactgttctccaccccagggtaatgcccacactaagttattcccaaaccacaccaatgtcgacctcttcaccactc

SEQ ID NO: 79461 - DNA, 238 bp, Glycine max
  Clone ID: 700962688H1
caaaaagggttgcaaggagttcgatgagtatggcatttccttcaaatccaaacccggtgctcttcccactatcgttttgctcgatcgaggaaattgcttctttgctttgaaggtatggaatgcacagaaggctggagcttctgctgttcttgtttcggatgatattgaggaaaagttgataaccatggacactcctgaggaggatgggtcatctgcaaaatacatagagaacataaca

SEQ ID NO: 79462 - DNA, 235 bp, Glycine max
  Clone ID: 700962689H1
tcttgctgttgctggggctgaccctttggaaatggcagaggattggaaccgcacagcccttcttgtgatcgacatgcagaaagattttatagaagatgggggtcccatgctagtaaaaggagggaaagacattgtcccaaatgttattaaggctgtcgatgttgctaggcagcgtggaattctcatagtttgggtagtacgggaacatgatcccttaggaagagatgttgaactc

SEQ ID NO: 79463 - DNA, 236 bp, Glycine max
  Clone ID: 700962690H1
tattgttatccatcctattcctatccacttgaggaagaaatgcatcatatctgtgtttgctgcaagggcttgactcctctacctcctcctcctcctccgcttcaccaaagacgaaacactctagtcattacttttgcttcaaagtctggaggaggattttcacttaactcgttactgaaaagttgtaaaagttgcggaggaaagggggcaattgaatgtcctggatgtaaggggac

SEQ ID NO: 79464 - DNA, 79 bp, Glycine max
  Clone ID: 700962691H1
gttctagatcgcgggcagccgctcgcgcggctcgagctgtttttgatttccccagtagcattctccatcttctccacag

SEQ ID NO: 79465 - DNA, 235 bp, Glycine max
  Clone ID: 700962692H1
ttcttctcttgcggctagggttttagcgcagttgcttctagtttctttgcagatttaaggaagatgggtaaggaaaaggttcacatcagtattgtggttattggccatgttgactctgggaagtccactaccactggccacctgatctacaagcttggaggcattgacaagcgtgttattgagagatttgagaaggaagctgctgagatgaacaagaggtctttcaagtatgcct

SEQ ID NO: 79466 - DNA, 236 bp, Glycine max
  Clone ID: 700962693H1
caaagaggaagaagacacagaaggagaggttcaacatcttcttcatctatggcgacgccggattctgacgctaccactcagcctcaagattccgacactgctcccaattccagtcctccaacgccctcgtccccgccgctcccgccgtttgcctccttcgcttcgccaccgactccgccggcggcgctctcatgggctccgtctttggatacggtgctggattgtttaagaagaaa

SEQ ID NO: 79467 - DNA, 237 bp, Glycine max
  Clone ID: 700962694H1
cttagacttagatggagtcgcgtggacactcaaacccgcttctgacattttccagcttcatccatcaacactgcgtccgcttagggtccgacctcgcgactcgtttggatgacacgaagcgagccctagctcaatctcatcataatcttgtcttccccaaacacgccctcgcccacgccgccactgctaccctgggctcccagcacgtggctaagtccctcgtcggcacctccgttt

SEQ ID NO: 79468 - DNA, 240 bp, Glycine max
  unsure (1)..(240): unsure at all n locations
  Clone ID: 700962695H1
ctttgaaatcctttctcagttctgcgccaactgaaacgcagatcgaactccgccgtagccatcatcaccgatcgaacttcgcaagacagagatcagattctgattccgacacagtaacagtgagagcgtcatcgacattctaacccgagtcgattccatttgcaagaagtacgacaaatacgacgtcgataagcaccgcgatgctaatgtctctgnggacgatgcctttgccagactcta

SEQ ID NO: 79469 - DNA, 243 bp, Glycine max
  Clone ID: 700962696H1
ttgacatctccaggcagaagtcaaggctctatacatatgatgatgtggtggagaaagtggctcaacaacttggtttggaagatccatccataattaggcttacccctcataattgctactctcaacaacctaaaccccaacctattaagtatcgtggtgtggaccatttgtctgatatgctggttcactacaatcagacttcggatatattgtactatgaagtacttgacatccctctgccag

SEQ ID NO: 79470 - DNA, 235 bp, Glycine max
  Clone ID: 700962701H1
tagttctagatcgcgggcggccgccctttttttttttttttacaccaacaaaagtacagaatataacatacatcaaataaaatagacagtatttcatcaatctttaaaaagctgtaaaaggtagctttgatataaatttacagtggataaaatacacgggaactttaccaatgtagccgcaaattttaaacaactcaaagcgcactcaaaggcgtcatgtcattctagatcgcga

SEQ ID NO: 79471 - DNA, 292 bp, Glycine max
  Clone ID: 700962702H1
ttcggctcgagagaaatttgagtgaggagctagagaatgatgatgaagtctgctatgtgtgcagtcgtggttgtaggacttcttctactggcggaggtggcgcccatggctgatgctgtgacatgcaccccaacagagttgagtccgtgtcttccagcaatcacttccggtgctaaaccttccagtgcttgttgcgcgaagctgaagcagcaaaaaccatgcttatgtggctacctgcaaaaacgctagcttgacgcagtgtgttaggtctgctaatgcccgaaaaaccgtt

SEQ ID NO: 79472 - DNA, 260 bp, Glycine max
  Clone ID: 700962709H1
gagtgagcgagcgagcgaggtagggttttcgttgttcccccgtctttgaattcagttcgcgacgatggggtccatccccgatccaggcgagttgagcgagttgactcagccgagcttcgacgagttccagcgccaaacttcccccatgaccagctgcaccctcctctggaaggagctctccgaccagttctcctccctcgagcaagtcctcaaccacaaatccgaagcccgcaaacgcaagattcgcaccctcgacaaca

SEQ ID NO: 79473 - DNA, 273 bp, Glycine max
  Clone ID: 700962710H1
gccgctaagacatttacagaccagaaaaatttaatggataagcatgcagaagatcagacagaaacttctcgtgcttcttcaactcaggagcaattaccaagccaaaaggaagctaatgttgacaaagctatggctgatgatgattgttcgagtgcaaaccagacagataatatcagcctggataattcttgttcagatggtgctgatgccccaaaagggaggccaatgtctcctggaactttagcattgatgtgcgatgagcaagatacaatg

SEQ ID NO: 79474 - DNA, 271 bp, Glycine max
  Clone ID: 700962711H1
ctcgagccgcaagaagctgagagttttgagttttgagatttgactcacgagaggagagtacatgtgtgggaagtagaagtagaagtagaaggagagaagcaccactacgtcagcgattcctttgcctttttcttctttcttagactcgaagacaagtttgatcctattttgagaatcgcattcagatggaaagcgcatcagagcttgtggaattcccgttgttgctgacaccaatcgattccaactacagagcttgcaacattccttacag

SEQ ID NO: 79475 - DNA, 125 bp, Glycine max
  Clone ID: 700962712H1
ctgagatcaaccttgcatcagggttagggaatggctgctatcttagctcggaaatcactccttgctcttcgtgcgcgccaattggctgtaagcggtcaagggctgcacagctcccaaaactatgg

SEQ ID NO: 79476 - DNA, 263 bp, Glycine max
  Clone ID: 700962713H1
cattcttctatggtcacacctcaccaagaaagtgtatttatttgatcgtctatgttgatgacataattatcagaaaaaatgctgctgctgcaatttctcagctgaaaaaacatctattcaggcattttaagaccatagaccttggatgtctaaaagtctaaaatacttccttggtatagaggtagctcaatcaaacaaaggcattgttatctctcagaggaagtacgctttggatattcctaaatgaaactggcatgagtgga

SEQ ID NO: 79477 - DNA, 264 bp, Glycine max
  Clone ID: 700962714H1
agagcctttcttctcttcccccattttttcctctttcttcctcgcctagctagctccagaaaattaggatctgcttcagatctagtgtttccctgtcccaaatcacgagtccattgagtttgattttgtggatgaaaagcatagatagggcttttgcaaaactctccaatgtttcttgaaattatatgaccatgcgtcgaattcgtatgctgcactccttctccgtcgtgttcctctagtggttctacgtttactcatgaactc

SEQ ID NO: 79478 - DNA, 273 bp, Glycine max
  Clone ID: 700962715H1
aatttatttacactcccgccgacaccggcaccggcaccggcaccggcaccaaattcatttaggcccgtgcttggtttgacctacatgatcgccgaatcagttgtcttgagattgcgggattgatttgtgtggttgcagtgatggaactcttgtttggtaccggaagaaaagaaggacaactttgatcatagagagaataaaagcatgggattaggtgtgattaagaaagtagcggtaatgatactactgataatgtttctcagctaccctgta

SEQ ID NO: 79479 - DNA, 271 bp, Glycine max
  Clone ID: 700962716H1
cagaaacttcagtgtctgacctcaatgctagaagcatctgatgctaaattacctgatatcaaggcaaaattagagagtgagatgaaacgccttttggaggatgtgaacaaaatggttgaatcttcttcctaaataacgtatggaatactagcaattgtttagctagtaatcagggtaggtttatgatatgtcatttccatttagcgggactgtctttatttgaggatcatttatttgtctcatttctgagcctagctttaagaggtaaaat

SEQ ID NO: 79480 - DNA, 273 bp, Glycine max
  Clone ID: 700962718H1
gcaaggaggctgatataaaaagaagtgctgcgctttcggccaccaaatatgctgaagcttgtcaggagcttggcttacaggggaaaaatgtcagagtagaactcttggagacagcactattacttccgagcacgtttagcaaaattctggatgttgtaaacagtgacaacttgtcaagggcaattgagtattattccaattttgtcagggatgctcacattgaaaatgatagatctttgggagacgtactacaaaacttgaagaatatgcgcg

SEQ ID NO: 79481 - DNA, 245 bp, Glycine max
  Clone ID: 700962723H1
cctggcttggcctagcgcttattctctcgcattccgtggagatctagtgcttctgctgcaagacctcgctgaaaattagggtttcgattcggaggtagacgaagatgttcggaagggctccgaagaaaagcgacagctccaggtactacgaaatcctcggcgtttccaagaacgcttcgccggatgacttaaagaaggcttacaagatagccgccattaagaaccatcctgacaaaggcggggat

SEQ ID NO: 79482 - DNA, 260 bp, Glycine max
  Clone ID: 700962725H1
atcaatgatggctcagcttctccacactcccttcatcccctcctcctcctccgcgctccgccgcgccgccaccattccccaccgcaaaacgacttctcgcctcgtcgttcgggccaagatccgggagattttcatgccggcactgagctccaccatgaccgagggcaaaatcgtctcctggaccaaatccgagggcgacaagctctccaagggcgacacgtcgtcgtcgtcgagtccgacaaggccgacatggacttggg

SEQ ID NO: 79483 - DNA, 269 bp, Glycine max
  Clone ID: 700962726H1
acccacaccgctctctctctctccacaactctttctcaaacgctaggggttccttccatcgcatcttgatttcgcaacctcgtctagcaattctccatggagggtgctgggatggaagagaataatattattaatgatgataataagtctgatgcgcattttacttctgccgctgcttttgtggagggtggaattcaggatgcttgtgatgatgcttgcagcatatgccttgaagctttctgtgatagtgatccctccacggtgacaag

SEQ ID NO: 79484 - DNA, 266 bp, Glycine max
  Clone ID: 700962727H1
agatgagggaggtgtaagaaactggaaggagtaggtgttgttggcattctgacctaaagcttgtgtctttctgcttcgtttgtatcttctgctgcgtaaagaggatccctttctgattcttccgtaaatttcgtctctgaaactagggctaatacttcatctaccgatctctatattctggatgaaggtttgcttttgatccggcttgggagttttgatcgacttgattttaactccaacttttaagaaatgtcattccgcagcat

SEQ ID NO: 79485 - DNA, 266 bp, Glycine max
  Clone ID: 700962728H1
gttcattctctttgcgcagttccctacctctcctttcaagatgcagatcttcgtcaagaccctcaccggaaagaccatcacccttgaggtggaaagctctgacaccatcgacaacgtcaaggccaagatccaggacaaggaaggaattcccccggatcagcaacgtctcatcttcgccggaaagcagctcgaggacggccgtaccctcgccgactacaacatccagaaggagtcaacccttcaccttgtccttcgtctccgtggtg

SEQ ID NO: 79486 - DNA, 266 bp, Glycine max
  Clone ID: 700962729H1
caaccatctcaaaacgggagaaatggaaggcgagtggagacacagagagagacagatagagacagagaaacaatgagaagaagagagagagagagagatagagagagagagtaatgcatggctgggttactggcatgggctgtaggatgtcgcggaggaaaagaggcggagtacgacggcatcatcgcaatcctgttttctgcagatcagcaaaagtacgtcaacgagctcgatcagaaggcgagctctctccggcgttggatcca

SEQ ID NO: 79487 - DNA, 253 bp, Glycine max
  Clone ID: 700962730H1
cttcaccttcctgggttttacttttcatattcctacttcatttggggtagtttaaaattggaacttcaaagtacaagcttttgagatttggaggttagctctttgcaaggaattgaattgttgcacctcattaccatctgtgacatctgaaattcaggtttcttagtattatttgagaccaacacaatggtgtctgcttgtgtgaccttgaaagccaatacccatttagtaaaatcgagaaaagacaatactt

SEQ ID NO: 79488 - DNA, 269 bp, Glycine max
  Clone ID: 700962731H1
gattgacgccgtggtcattgccaccggcgttcataccttctttgggaaagctgctcaccttgttgataccactaatcaagttgggcactttcaaaaggtgttgactgcaattggaaacttctgcatatgttcaattgctgtggggatggttattgagattattgttatgtatcccattcaagatcgagaatatcgccctggaatcgataaccttcttgtgcttcttattggtggaattccaattgccatgcccactgtcctctcagtga

SEQ ID NO: 79489 - DNA, 266 bp, Glycine max
  Clone ID: 700962732H1
caaaactctcctcagttatccctccaacagaagatcacacatggttctagttgcaagtcatggcgaggaggaaaagggggcacaaggcattgctgctgttgattttcgaggtcaccctgtggacaagacaaaaactggaggatggctagcagcagggctcatcttaggtattgaactggcagaaagaatatgtgtaatgggcataagcatgaacttagtgaactacttggttggagttttgaatctccttcagctgattctgccac

SEQ ID NO: 79490 - DNA, 275 bp, Glycine max
  Clone ID: 700962733H1
gaccttccaatgttgtcatgtcactacatccaaaacggcgtgttactcaccgccccgccctcctcttttgacgacttaatactttcttttaaacacactctttctatcgcgctctctcactttcccgctctcgcgggaaggtttgagaccgattccaacggttacgttaatattgtatgcaacgacgctggcgttgattttattcatgctatatcaaaacacctaactttaaacgccgtcgtttcgccgtccctcgttgatgttcacccttgctt

SEQ ID NO: 79491 - DNA, 183 bp, Glycine max
  Clone ID: 700962734H1
tgtgcccttctttttttatttgatttggcaaacacggctacttgtctccatatatgatggaccacttgtactgccggctttgtgcacaattatctacttgtaagaagtccaatttcgggcaacaacgtctgtaatgcagacataggtcattagcattgtaaatctccatgcgatatatgggat

SEQ ID NO: 79492 - DNA, 235 bp, Glycine max
  Clone ID: 700962736H1
caattttgggaagtgggtttttgattttgtgtggggttgttgttgttggtgggaaaatgagggtagataggattgaagagatcaacaccaatcttctccgccatgccaacgtcgacaccttcatcgtcttccgatccctcacccctctcctcgtcgccctcgccgacaccgtcttccgcagacagtcctgcccctgcaacctcagcttcctctgcctcctcgtcatcctcgacgg

SEQ ID NO: 79493 - DNA, 261 bp, Glycine max
  Clone ID: 700962737H1
tctctctctctctctctcttttctctgtgtgtgtgcgtggattggtgaatttgagattggagaagatgatgcatgctggacccggcggcatggcccaacaagcgaaccagcaatacgcacagcaacagcaacaacaacaacaacaagcctacatgctcatgccgacgcaggcacagccccctcagatgtgggccccatcggtccagtctccgtcccaatcggtagctcctccgaaacccaccagcgccgatgaggtccgta

SEQ ID NO: 79494 - DNA, 269 bp, Glycine max
  Clone ID: 700962738H1
caaaggtctctgtcttaatggtgaaaattgcatggttgttcgataaaactgttgtgataatgtacaacacaattatcgataacttatgcaaaaataatgtttgtttctgaaatggttggtaagaaaatttctttccatatcatcacttacaattccttaatccattagaataacaagtgggtttgttgactgaaatagttgaaaaacctaatgttattacttatcattcttagatattttttaatggatgggtattgtttagttataat

SEQ ID NO: 79495 - DNA, 270 bp, Glycine max
  Clone ID: 700962739H1
cacaaagcacaaagcaaagctcatccttgagttaaaaaatggcagcagcttcttccatggctctctcatccccatccttggctggcaaggccgtgaagcttggcccatcagccccataagtgggaagggtgagcatgcggaagaccgtcaccaagcaggtctcctcaggaagcccatggtacggcccaaaccgagtcaagtatttgggcccattctctggcgagcccccgtcctacataaccggtgagttcacaggctactacggctggg

SEQ ID NO: 79496 - DNA, 269 bp, Glycine max
  Clone ID: 700962740H1
ctcagatgacgccaccaccaatgcgaacgatttggaatcggaggattttcaggagatttcgtcgacggtgaatttcgcggaagagttcgagccgccggaggagattattccggcgaacatcgaacggaaagcgaacagcgtggagcttccgttttcgctgaggataatcaagaagaagctgcagtggaaggaagggttcagggaggcaggggaatccgcgtattgctctgtcaagaaagcgttctctcctcaggtttttataatcaggg

SEQ ID NO: 79497 - DNA, 90 bp, Glycine max
  Clone ID: 700962741H1
gtagatatctagagatctcattaagatgctcccacgatgtatattgttttcttttatatatatatatatatatatatatatatatatata

SEQ ID NO: 79498 - DNA, 265 bp, Glycine max
  Clone ID: 700962742H1
agaaccaatcaggattcagtttcatggggtcatcagaacttgatggaatcacacaaggaagtcctaaaaagccaaggaaccatgaaattctacgctctccaaaccgtgtcccttcaatcaacatggatgtgaaagccaatgaggcaaacaatgagcaacaactctctatggcacttgaaaggcagaatagggatggctacactttcatgggggacgaacaaacttcattagtggttttggacaaaccctatgggggaaattggta

SEQ ID NO: 79499 - DNA, 264 bp, Glycine max
  Clone ID: 700962743H1
aaaggattctacccgccgctcgatgggaattgcgcttcaaggcgtctcgtagggctaatccgcctcacgagggtcaccaacggcacgtgcctttggggggccgaggccccctactgctggtcggcaaacggacggcgggcgcagcgtcgtttttgccccggtttctgacttagaggcgttcagtcataatccaacgcacggtagcttcgcgccactggctattcaaccaagcgcgatgaccaattgtgcgaatcaacggttcct

SEQ ID NO: 79500 - DNA, 263 bp, Glycine max
  Clone ID: 700962744H1
cttttccctcgttgaaatgaaaatgggttcttctttgtggactatgtgtctaattttggcttcactagcctcttctgcattctgtgcctttccacggaggccagtggatgttccattcggcagaaactacgttcccacttgggcttttgatcacatcaaatacttcaatggaggttctgagattcaacttcatcttgacaagtacactggtactggcttccagtccaaagggtcatacttgtttggtcacttcagcatgaaca

SEQ ID NO: 79501 - DNA, 259 bp, Glycine max
  Clone ID: 700962745H1
gtcaaaagcacagtttgacagtatcatgtcatgggcaactggtggtggaggttcaaaggaataacctttttgttgccaactttatttttatttaagcaccttggtttctccgtctttcttggagacacacacacgctctctcatgactctaaccaacttacccaccaactaataatctttttaattccaaaaaaccaaacaatgcctctttttctcacttcacaacttttatttctgtttgagttctccaatggcagct

SEQ ID NO: 79502 - DNA, 90 bp, Glycine max
  Clone ID: 700962746H1
caccttccctctcttctgttaccaatggctccctcatcaaactacatttgtttgcttttcctcaccagccttttgtgtgctcttcaaatg

SEQ ID NO: 79503 - DNA, 211 bp, Glycine max
  Clone ID: 700962747H1
tgctctctcacgagaagaatactactaactgtgttgtaatacctcagtggagaacaagatgaatccatggaacatgagaacttccaagttactctctcaacaacttgcttatcctccttatcgcttggtagaagagattccaaacatgggaaattccagttgtgtgagcaaggagccaagaggttcacagatgacaatcttttatggtggc

SEQ ID NO: 79504 - DNA, 94 bp, Glycine max
  Clone ID: 700962748H1
ttcatgtaccgcacctccctgcctgatgctcgtgcagtctcaagacctttctccctctcttcgctccttctctcacaggcccatttctagaagc

SEQ ID NO: 79505 - DNA, 270 bp, Glycine max
  Clone ID: 700962749H1
agtacatcttcacaatttctatttgatttggcaaacacggctacttttctccaaataagatggatcatttgtattgccggctttgtgcacaattatctacttgtaagaagtccaatttcgggcaacaacgtttgtaatgcagaaataggtcattagcattgtaaatctccaggcgataaatggaatatcaaatggaagacgccgcatagcttctggtgtgacgatatcattgtgttgggcaaagcttttcgaagaaattacgtggattta

SEQ ID NO: 79506 - DNA, 268 bp, Glycine max
  Clone ID: 700962750H1
tcttcactgggcatctgctggcagtgcttcacgtggtagtactgaggggatagttttgtcaaaccaagcaagttgatttgtgctccatttgtagttaagtaggttatattttgagggtgttcactaacaaagggaatctagctatgcaatctggaagcccttggtctttgtacttaggatggatgagattgtgtattttgaaaattggtggttgttagaatagggtgatctttccttcagggtatttgatcgaggaattcttgtaagt

SEQ ID NO: 79507 - DNA, 271 bp, Glycine max
  Clone ID: 700962751H1
gtcacgggctcgttggtgagccgccaccacacttccaccacaaattcatattcattccctgtgcttcattcagtcccttgagattgggaaccattggtggctagctaagcgaagtaaaaccaaactgcttcagcagtttgtctatgcttagcttcttcttctgcttttgctttctccaccatcacaaccaccatgtattctgccactgcctccaacactttcttccttctctcttgtttccttctcttctgtctcctctcagctccttcct

SEQ ID NO: 79508 - DNA, 250 bp, Glycine max
  Clone ID: 700962752H1
tggaatttggcaaaaagtagccatcggcccaacgatcccatttcccttgacttctctacgtgaagatccttgtgtcgcatagagctagttaaaatgtctgagggaaatgcagggaaaggaaagagaatcgccatcattggcgtctcagccttattgttggtggctatggttgtggcaatcacagttggggtcaatctcaatgagaatggttccaacaatgatacagaggacaacaagaaaaatcatgttg

SEQ ID NO: 79509 - DNA, 264 bp, Glycine max
  Clone ID: 700962753H1
agctacttcaccactccaaacccagcagaccaccattattcatatctcgttctctaacctttcactctgccttactcactctctactttgctcatcatcgtagatgggccaacacttctagtctctcttgactgagaaccatgtagaaatgagtcacctaatgaaaaatcagtagctccttgttgcgctatgaatagagtgtgtgttgagataaattcgtttgtttgtttggtattgttctcgtgttaacgaattagttgatgg

SEQ ID NO: 79510 - DNA, 261 bp, Glycine max
  Clone ID: 700962755H1
aacaaaacaaaatacaataaatttggtaaagggcagtggcactttaaagggaagaaagcaccacctcaaaccagaaggggaaagtgctcctaacattagattagaccctctaccatgttcctctgcctctgaagtctgaacctccccaggaatggcaatggagaatacaacattgtttgtgttgctgctgaatgtgcttcttgtgttcagtgcctctcttgtgtccgcagagcaacaaagtcaagcctcagctgtagggga

SEQ ID NO: 79511 - DNA, 191 bp, Glycine max
  Clone ID: 700962756H1
gcaaaggattctacccgccgctcgatgggaattgcgcttcaaggcgtctcgtagggctaatccgcctcacgagggtcaccaacggcacgtgcctttggtgggccgaggccccctactgctggtcggcaaacggacggcgggcgtacgcgtcgcttctagcccggattctgacttagaggcgttcagtccat

SEQ ID NO: 79512 - DNA, 263 bp, Glycine max
  Clone ID: 700962757H1
acaacacctttcataacttcctgtcttcctccttcttcttcgggttgtgagtgtatacgcatcacgcatggcagctttccttcgacgctggattccacgatggaagattttatcttctccaccctgacgggatagcaaatctttcatgaaattgagaattgctgctgctaataaacaagcttccattgagatgggggagttcaccgggagtggtgagtatgtgactatcggcgaatttccttcctccaggacaaatcactcaa

SEQ ID NO: 79513 - DNA, 262 bp, Glycine max
  Clone ID: 700962760H1
actgttcattgcagttccatgacaatgttaaagcctttgacttttttgtttttggcttggttctttcagtttcctgttgttaatggtgcacacgcagtgtcttccttgttgaggtgttactttttcttgtttttttctctccaagttttccctcaaccaaacagaatgagctaaaaaaatgtggaattttctctttcttcttccacttcaggtcttccggatgcttttattttgggtagttattttggtttttggatgagtg

SEQ ID NO: 79514 - DNA, 53 bp, Glycine max
  Clone ID: 700962761H1
caacacaaaaaaccacactttcaattgcatttctctctctttctcacaatttc

SEQ ID NO: 79515 - DNA, 121 bp, Glycine max
  Clone ID: 700962762H1
atcttgggtttgtaaggcttgtgatacacctgacgtcaagcgggagtgttctactttgtcctgtaaaaggtggtgctctaaagccgactgatgttgacacattgtggggtcatgtcacttg

SEQ ID NO: 79516 - DNA, 262 bp, Glycine max
  Clone ID: 700962763H1
gcaaagaggacccatgccgttgagaaggattgaagcctccgcttgctctctccatgaaatttcttcactttgcaaaaccaaaacagattgaattgctattatccaattcatctacttcttcttcttcttcatagccatgtacaggttttaattttaacgcctttttttattattagcctaacgaatcttcttataaaccctcaaacctcttgtgctgttcgcattccgataaacaaacacgcagatttgaaggaacgaaaga

SEQ ID NO: 79517 - DNA, 122 bp, Glycine max
  Clone ID: 700962764H1
aaataaccttgaggagatgttggtggtgataagagcggaagttgataaagcaaaggaagacgtggactctggtctggctatttttgcggcagacctggttggaattcttggagaaagtgcag

SEQ ID NO: 79518 - DNA, 271 bp, Glycine max
  Clone ID: 700962765H1
gccaaacggaaggtcattagtaagactttccgtcgcctgcttgaggtaagtgagaaacaaacatttactggtccaccggaaaatgtcagagatcatgttatggctgccacaagggttcttaacaagggagacttccagaaggcttttgacattattgtgtctcttgatgtgtggaaatttgtgagaaatcgagacaccgtacttgaaatgctgaaggacaaaatcaaggaggaggcattgaggacatacctctttaccttctcttcatctt

SEQ ID NO: 79519 - DNA, 267 bp, Glycine max
  Clone ID: 700962766H1
caaggcagaaagcaagctcatcctagagttttaaaaatggcagcagcctcctccatggctctctcttccccatccttggctggcaaggccgtgaagctgggcccatcagcccccgaagtcgggagggtcagcatgaggaagaccgtcaccaagcaggcctcctccggaagcccatggtacggcccagaccgcgtcaagtacttgggcccattctctggcgagcccccgtcctacctcactggcgagtcccacgtgactacggctggg

SEQ ID NO: 79520 - DNA, 253 bp, Glycine max
  Clone ID: 700962767H1
gttgaaatcggcaggggacggaaatatcgaaagagacagacagagcgacgtcggagaaagaaagaaaggaatgaatgaaagagggatggtaggagaaaaatgagaatggcgtgaatgtgaggagagaagagcctgaatattagaatcggatacccttaaagaagcggagataggagtgtgcgactccaaacccaaggggcttcgggagggctcttcatcggaggcggtgctatattcccctccggattccccc

SEQ ID NO: 79521 - DNA, 258 bp, Glycine max
  Clone ID: 700962768H1
gttctgaagatctacctgctaaatttctaaaattcattcattttccctgtctatattctctcctctccctcctcctgtgtctcagtttgctggctagatacgtagaattgctgctgcttcttcaatggctcaaattgcgcttattgctcctgcagcaactgttatacctattattactggtagggggatacaacaaaaactatcatatgctgcaagaagagacaaagtgagtttagcatcactggttcctagttggag

SEQ ID NO: 79522 - DNA, 263 bp, Glycine max
  Clone ID: 700962769H1
cgaagatctttgcttagattttactctccctggttatcctgaatacaccttgaagccaggagatgaaattgttgatatcaacaatttggaggagtatatatccttggtgatcgatgcaactgtcaagactggaatcatgcggcaaatagaagcatttagagcagggtttaaccaggtttttgatatctcatctttacaaattttgactcctcaagaactagataatttgctttgcggccgcagggagttgtgggaggctgaga

SEQ ID NO: 79523 - DNA, 119 bp, Glycine max
  Clone ID: 700962770H1
gaagttggaaaagttcgcttgcgatttgcccctgaaccaagtggttatcttcatattggacactcaaaagcagctatgttgtgcaaatattatgctgagcgatacaatggtcaggatat

SEQ ID NO: 79524 - DNA, 236 bp, Glycine max
  Clone ID: 700962771H1
aatatcatctagctagctagctagctagcaaatagcaatgttaaaaaaccaaccacaaccagattggcctgagcccattgtccgggttcagtccttatccgaaaactgcgtagattcaatccctgaaaggtacatcaagccttctactgatagaccatccatgaaaagttgtaattttggatgatgccaatattccaatcatcgaccttgggggactattcggtgctgacaaaaat

SEQ ID NO: 79525 - DNA, 262 bp, Glycine max
  Clone ID: 700962772H1
aagtttcttcctttctctgctctttgccttctctgacacatttggtgccttgtagagcgtgttttggcaggaaggtggtatggcgaaggacgttgaggttgctgagcgtggctccttctctgggaaggactaccaggaccctccaccagcaccactcattgatgctgaggagctcacaaagtggtccttttacagggctctcattgctgaattcagtggcactttgctcttcctctacattactgtgctcacagtcataggg

SEQ ID NO: 79526 - DNA, 263 bp, Glycine max
  Clone ID: 700962773H1
cagaaatcaaacatgaaacccttgagactctctgtttctgaccttccaatgttgtcatgtcactacatccaaaacggcgtgttactcaccgccccgccctcctcttttgacgacttaatactttcttttaaacacactctttctatcgcgctctctcactttcccgctctcgcgggaaggtttgagaccgattccaacggttacgttaatattgtatgcaacgacgctggcgttgattttattcatgctaaagcaaaacacct

SEQ ID NO: 79527 - DNA, 240 bp, Glycine max
  Clone ID: 700962774H1
catcaaattgtgcttgtgattgtctttgtatcacgaaaactatacgattcgattccttgttttcaatggacaccttcttcaattctcaatcttcttcttcttcgagaagccgctggagttacgatactctcaagaatttccgtgagatctctccgctggttcagaatcacatcaaacgggtttattttacgttatgttgcgctgtggtggctgctgctgttggagcttttcttcatgttc

SEQ ID NO: 79528 - DNA, 259 bp, Glycine max
  Clone ID: 700962776H1
atttttcttgaaagatgatggaactttgacaccattggccattgagttaagtaagccacatcctcagggtgaagaatatggtcctgttagcgaagtctacgtgcctgccagcgaaggagtggaagcttatatttggttactggcaaaggcttatgttgttgtgaatgatgcatgctaccatcaaatcattagccattggctaagcactcatgcaattgttgagccatttgtcatagcaacaaacaggcaactgagtgtg

SEQ ID NO: 79529 - DNA, 258 bp, Glycine max
  Clone ID: 700962777H1
ctgggtacaaaattgaaagcaaacaagttttggcttccaaaagtacaaggctactagtagataaggtagttattaattgatctctgttaacttctgttgcagttataattggttaagtagctcaaaggatacattttgatcttctgctgacatctgctgggtacaaaattgaaagcagacaagttttggcttccaaaagtacaaggctactagtagataaggcctgaagttgaaccaatggattgttcagctgctaga

SEQ ID NO: 79530 - DNA, 163 bp, Glycine max
  Clone ID: 700962779H1
tttccacatatctgacagaaaaaaatggagaactatcagtacccggcgtcgtaccctgactccggcgagtcctccccgcgctcgcgcgagatcgacttcgagaacccgccgccgtgggacgagcagcagaaccaaaactacaaggccaagttcatgtgcagct

SEQ ID NO: 79531 - DNA, 126 bp, Glycine max
  Clone ID: 700962780H1
caatttgtcactatactctatttgggaacagaactaggtgataacttttggtgtactgaatattggggtgtcagtttcctgtgaaagattctgaaggcaattgaagtaaatgccatggatcgtggg

SEQ ID NO: 79532 - DNA, 268 bp, Glycine max
  Clone ID: 700962781H1
aaaaggtttgtccaaggatgataaggctcaaaaattagccctccaacattggctagaagctattgacccacgtcatcgctatggacacaatttgcacatgtattacgatatttggtttgagagccaaagcacccaaccatttttctactggttggatgttggagatggtaaagaaataaatcttgagaaatgcccaagatccatcctacaacgccagtgcattaaatatcttggaccaaaagaaagggaagagtatgaagtaattgtt

SEQ ID NO: 79533 - DNA, 133 bp, Glycine max
  Clone ID: 700962782H1
ggctcgagccgagttcggctcgagctttgaaaagcactccgctagaaggtgtaagcgaaatgctgcttctttttcattgcgtatagagagacatgggtggacataacaatgaccatgaacatcaacgaagctt

SEQ ID NO: 79534 - DNA, 260 bp, Glycine max
  Clone ID: 700962783H1
agtttgcaagctatcaagttagttagaaacaattttctgataagttagttgatggccaacatctaactgtttttaagtttttccattttggtagttttctctttgataacttattttcttgagtgctatataaacatagaagtatttccttatgggtatgttgcaacagtgaggtcccattcatgcaatcacaatgagtggaagatcaaagtgtgtcagaaagatagagtgacacttggggatccttgatgttgttatct

SEQ ID NO: 79535 - DNA, 244 bp, Glycine max
  Clone ID: 700962784H1
gtgaggtcgacgacaccaccggcctcatcctcaaactcaagtccttctgcctccgcatggacgcattcgggttcttcgccttcgtcagcgccaagaagaaggagctcgacggcctacgcgccgagatgcctgtggctctggcggagtgcgttgatccggcgaaattcgtgctggaggcgatctccgaggtgtttccggtcgacaagagaggggacaaggccggccacgacttgggctgggcttg

SEQ ID NO: 79536 - DNA, 127 bp, Glycine max
  Clone ID: 700962785H1
atttgatctctccaccttggtgaaagccttgtgacccataaggcttttacagaaggtgggattttgactagctaggtgtttggctgttgagtttatggagggccaagttccttgttgaacagtgttt

SEQ ID NO: 79537 - DNA, 255 bp, Glycine max
  Clone ID: 700962786H1
aaaggattctacccgccgctcgatgggaattgcgcttcaaggcgtctcgtagggctaatccgcctcacgagggtcaccaacggcacgcgcctttggggggccgaggccccctactgctggtcggcaaacggacggctggcgcacgcgtcgcttctagctcggattctgacttagaggcgttcagtcataatccaacgcaccgtagcttcgcgccagtggcttaccaaccaagcgcgatgaccaattgtgcgaatc

SEQ ID NO: 79538 - DNA, 258 bp, Glycine max
  Clone ID: 700962787H1
ctttctctcgttttttctcagaaccttctgaggttaaagcaaaaaacaacgagagagagagagagaaaatgatgaagccatcgatgctcagatctctccactccgccgccacccgcggcgcctctcatctcttccgccgtgggtacgcctccgagccggtgccggagcgcaaggtagccgttctcggcgccgccggcgggatcgggcagcctctctcccttctcatgaagctcaatcccctcgtttcgagcctctccc

SEQ ID NO: 79539 - DNA, 238 bp, Glycine max
  Clone ID: 700962789H1
caagcctctctcttaaccccacccctctccggtctcaaagccagcgaccgcgcctccgtgccatggaagcaaaactccagcctctccttctccagcccgaagcccctcaagttctccagaacaatcagagcagcagccgccgacgagaccacagaggcaccagcaaaagtagaggctgcaccggtcgggttcaccccaccagaacttgacccaaacaccccttccccgatcttcgggg

SEQ ID NO: 79540 - DNA, 256 bp, Glycine max
  Clone ID: 700962790H1
caacaatataaattggttaaagagaggactatatctggagattcatactatggctctcacgtgatgcagtatggtgatgtacggcttagcagtgatgttctcttccattatttgggtacagatcctgctaatgataatttcacttttgtggacgaaaactccttatggtcaccttcaaaaccagtcaaccaacgtgatgctgatctcatccatttttgggataagttccgcaaagctcctgagggttctctcagga

SEQ ID NO: 79541 - DNA, 222 bp, Glycine max
  Clone ID: 700962791H1
aatggcagcaactttcaaattcagacaaagatctttttccactcctggaatgctttacatctatatcacatgctctgggtactggtttcactcaatttgctgaacctgtatttaggaggtgcataaatataatccagacccaacaatttgctaaggctgatcctgccgccaccacaggggttcagtatgacaaggagtttattgtatgctctcttgatttgc

SEQ ID NO: 79542 - DNA, 238 bp, Glycine max
  Clone ID: 700962792H1
acaataaccactaattctcccaactcaatttttctctcaaccggcccaatttagcataagcccagcatggccaccgcaacagcagcagccacctcgtccttcatggggacgcgcctcctggaggcccactccggggcggggcgggtgcaggcccggttcgggtttggcaagaagaaagccgccgccccgaagaaagtttccagggggtcgggctctagctccgataggcccctgtggt

SEQ ID NO: 79543 - DNA, 249 bp, Glycine max
  Clone ID: 700962794H1
gaagaagaaaaatgtaggtttgttccattatatcctgatgcatttcagccggtcagaatcccctttcagaaaggagttggccagaaatttgctcagccttctggaacaggaattgacctaggcttctttgagttggatgatctttcaaagccctcacccggagaagatgtctttcctcttgtaatatgtgctgaaacaagtttgaaaactacctcagaagatgaaactcctggtgattccttgctagat

SEQ ID NO: 79544 - DNA, 259 bp, Glycine max
  Clone ID: 700962795H1
cttcaatggaatttggcaaaaagtagccatcgccccaacgatcccatttcccttgacttctctacgtgaagatccttgtgtcacatagagctagttaaaatgtccgagggaaatgcagggaaaggaaagagaatcgccatcattggcgtctcaaccttattgttggtggctatggttgtggcggtcacaattggggtcaatctcaatgagaatggttccaacaatgatatagaggacaacaagaaaaatcatgttgctt

SEQ ID NO: 79545 - DNA, 263 bp, Glycine max
  Clone ID: 700962796H1
caaacaggcaaatttctcggatctttttccctcccacgttttgccgcggtgatgcggcaaactcacggaaatatgtcacgcactcgtatcgccattcagcgcttccgccacacctacaccgcgttatcatcatcagctgcacttactcgctcccaattccaatgctctcaacaacatctcacgcgcgcacccctcctcttccacgctcctcgtcattattcatcttcccccaaacaagactatcccaccggagactttgattt

SEQ ID NO: 79546 - DNA, 265 bp, Glycine max
  Clone ID: 700962801H1
tggggttctgttttgttctgttctgtcaccatcattcttgaaccttcacaaaagccagccaaaaaaatggctccaaatttcttgcaccaagtggcattccttcttgtgctctcaactgcggtttccagtggctatgcttgggttggtgtgaactggggaaccatggcgacgcaccagcttcaacccgagaaggtggtgaagatgctgaaggaaaacgggttcagaaaactgaagctgtttgatgcagacgagttcattatgacgg

SEQ ID NO: 79547 - DNA, 259 bp, Glycine max
  Clone ID: 700962802H1
cacatactcaccatggaggctaagttggccaccaccataatacttattttctccgtaatttggcttatgagggtgaatggcatagacccttgtgcctctcaagcggataattccgacctgaacgtgattcccatctacagcaaatgctcaccgttcaaaccaccaaagtcagactcatcgtgggacaacagaattataaacatggcctcaaaagacccactccgattcaaatacttgtccaccttagtgggccaaaaga

SEQ ID NO: 79548 - DNA, 249 bp, Glycine max
  Clone ID: 700962803H1
gcttctcgctatccaatccctcatgaggttgctgagatgttaacgaagaggagcttaattgaagcagtaatactgattagagtagttttatggctgctggcaacaaggttgggaaccttgttgctctgtggtttcctctgtcttggtgaaaaatggccctatgtcaacaacttctcaaacatatctttggagaaaagagaaatggttatgcagaagtggctgaaacataggttcctcacacctattaga

SEQ ID NO: 79549 - DNA, 258 bp, Glycine max
  Clone ID: 700962804H1
ggttatcatcttcttcttcctctttcttagatctcttctttctctacgccgcacgccgaaaccatggccggaaaaggagagggtcctgctatcggaatcgatctcggaaccacctactcttgcgtcggtgtgtggcaacatgaccgcgttgaaatcatcgccaacgaccaagggaacagaaccacgccgtcttacgtcggattcactgacaccgagcgtctcatcggtgatgcggccaagaatcaagtcgccatgaac

SEQ ID NO: 79550 - DNA, 258 bp, Glycine max
  Clone ID: 700962805H1
gctcacaaaacatctctaaacgcttgtaaagatctccatctcccattgatccttctgaagtttttgtattcaaccatggctacctatagttggtcaactgagatattttcatttttggttctaacgttgttgtcgacaagcagtcacacaatggttgctggagcacgcaatcttctcgaatcaaccttgtcaaaaccagaagtgccaacacttcccaaacctcatgagttgccaccattgccggaagtccctgaattg

SEQ ID NO: 79551 - DNA, 256 bp, Glycine max
  Clone ID: 700962806H1
tgaagagcaagttgccgcaaaactttcaacacagggtaaaagcgggaggcagtagataggccattagcctgcaaatcttcccttgcagccctttaactgatttggatatttttattagtgctatgggattattttgaatgcgtcttgttggcagatctggtggtgttttgtctcgggaagaaattgtcattgctaatgtatcttgagacttaaatttatttagttttagaagtcgtgaactaagagctactggggt

SEQ ID NO: 79552 - DNA, 111 bp, Glycine max
  Clone ID: 700962807H1
aattttctgaatgctacaaccattgaaggcgcgaatttgatctgatttcacgaaggccgaatcgaaaacgcgacatggtagactccaaattgctgtttcaacacatgcaag

SEQ ID NO: 79553 - DNA, 259 bp, Glycine max
  Clone ID: 700962808H1
caatggttcctcaacctctgctaacccttttcctctttctctcccttctctcaattgtcaactcctctccttcccaacaccttcagatcgccaatgctgaacgcaggattgacttgacttctcacattattaaggtgtacttgacgttgaaggttgaaaatttggggacatctcctacttcagaagtacatattgccttttcacccactgaagtagaacatctagcaatagtcagagctgctgcaacttctgggaagag

SEQ ID NO: 79554 - DNA, 256 bp, Glycine max
  Clone ID: 700962809H1
agcttaccaagtacgagggaatctgaggtatagtagtgcatttggtgagtaccctgtgcttcatggacataaagttgagcattcccatagaagctttttgatgccaccaccaccatcaactcaatatgagagtcctcgttcaagagaactgttgtccaaaccaatatcaggaaaaccttgtgaggtttcaaaactgaaagacagtgactgtaagctatttggcatctcacttcttagtagccgccccattgcatca

SEQ ID NO: 79555 - DNA, 253 bp, Glycine max
  Clone ID: 700962810H1
attacaattactactttctctctctttgtaacttgtaagcatggagtcctcaaagatctatgcttacctcttcctttgcatgctcttcctctcctccgccactcccattctcggttgtggctactgtggcaaaccccccaaaaagcacaagcctggtacaacaccaaagacacccacagtacccgttgttaagccaccagtcacaatccctcccattgttcagccaccagtcacaatccctcccattgttaat

SEQ ID NO: 79556 - DNA, 252 bp, Glycine max
  Clone ID: 700962811H1
tgctgcagtttcaactagccagggaaccccagttcaaactagctctagcgacccttttaaacaacagcgagtcatggtcattggtggagatggatactgtggttgggcaactgccctccacctttctaacaagggttatgaggttgccattgttgacagccttgttcggcgcctttttgatcaccagcttggactggattctctaacaccaatttcttccatccagaatcgccttcagtgttggaaatctct

SEQ ID NO: 79557 - DNA, 254 bp, Glycine max
  Clone ID: 700962812H1
cagtgaaagagaatccgaggcgaagagaagagaaaaattaagatggaggggaaggagcaggatgtgtcgctgggagcgaacaagttcccggagagacagccgattgggacggcggcgcagagccaagacgacggcaaggactaccaggagccggcgccggcgccactggttgacccgacggagtttacgtcatggtccttttacagagcagggatagcagagtttgtggccacgtttctgtttctatacatcac

SEQ ID NO: 79558 - DNA, 255 bp, Glycine max
  Clone ID: 700962813H1
tgcaaaccgaaccaggcaggaagatgctctcaagaaaaataagcctgcaattgttgttggcacacctggtaggatagctgagctcagtgcatccgggaaacttcgcactcatggctgtcgatatttggtattagatgaagttgatgaactgttgtcattcaatttccgggaagacatgcaccggatattggagcatgtagggaggagatcaggtgcagacccaaactcagattctagaaaggccgaacgtcagtt

SEQ ID NO: 79559 - DNA, 251 bp, Glycine max
  Clone ID: 700962814H1
actaaaaccccactctctttttccgagtcttccagtgaaagaaaggcagcgatggaagaagacttcgacatccccggcggcgaggaaatggatctcggcgaagacgaggtcggcgaggagagggagatcggctctggcggcctcaagaagaagctcctcaaggaaggtcaaggctgggaaacccccgaagtcggtgacgaagtccaagttcattacacggggactttgctcgacgggactaagttcgattc

SEQ ID NO: 79560 - DNA, 263 bp, Glycine max
  Clone ID: 700962817H1
gtccattaaagggtccaaaactgggtggcagcccatgtcaagaaactgggggcaaaactggcagagcaactcatacctcaatggacaatccctctcttttcaagtcaccaccagtgatggcagaactgtgacaagcttcaatgtggcaccagccaattggcaatttggccagaccttccaaggaggccaattctagagacattattgcaatgagggatagaaaatagtgcaaaacaaaaaaaatgttggtatacctatgatta

SEQ ID NO: 79561 - DNA, 258 bp, Glycine max
  Clone ID: 700962818H1
acgataactaggaagtttcctaaacatcccttctttcaaaaaaccaatggctttcaagaacttgtccgttcttactctctgtgtttcccttgtgctttccttctttgcaccgaattccatagctgctaacaaccgtgcagtggttcctccagaaaccatttgcaactccaccgtaaacccttccttctgcaaaaccgtgcttgctaatcaaaatggcagcatcgttgactacggtcgaatttctgtccgaaagtcctt

SEQ ID NO: 79562 - DNA, 256 bp, Glycine max
  Clone ID: 700962819H1
tgagaagggaaatattgacctgagccaactaaagtttcgtgtccttgatgaagccgatgaaatgctgaggatgggttttgttgaagatgttgaaatgattctaggcaaggtagaaaatgttaataaagttcagacacttcttttcagtgctactttgccagactgggttaagcaaattgctttaaaatttttgaagccagataagaaaactgctgaccttgttggaaatacaaaaatgaaggccagcaccaatgtt

SEQ ID NO: 79563 - DNA, 255 bp, Glycine max
  Clone ID: 700962821H1
ttccttgtttcccctattattatctcgctctcacaaaatcatggcattctctagtgctttgattctgtggtcgttgctagcaatcaacatggccctgccaaccctcgcaaccgtctacaccgtgggagatacttcaggttgggcaattagtactgattatagcacttggactggcgacaagatcttttcagtgggtgatagtctcgcgttcaactatggaactgggcacacagtggatgtagttaaagagagcga

SEQ ID NO: 79564 - DNA, 254 bp, Glycine max
  Clone ID: 700962822H1
atttggtagcatattttggggatagaacatttgcatggactgaagaatcccagctaaaaccttttaggacacatttctcctccattgaaaagcagagcacttcagaatcatttcagaatgctgtagattgtgctgtggatgaagtcacaagacgagtcgaatatgggctggcatgttcttgtctacctaacgatacctatgactcaattaaattccagacggtagaacacactgggattcgatcagaactaagt

SEQ ID NO: 79565 - DNA, 81 bp, Glycine max
  Clone ID: 700962823H1
gtaatttttaagcattatttttgttgtgaaaatgctaactagtcagacgtattttctttgcccgaaatcttgactaagttt

SEQ ID NO: 79566 - DNA, 255 bp, Glycine max
  Clone ID: 700962824H1
gcatcttgtgttgaaggatatccatgccaccttgaagaaatttggaagcaatataattttctcaaatggcctcttggatccatggagtggtggcggcgttttgcagaatatatctgaaagtgtggtttcacttgtcactgaagaaggtgcacaccacatagatttacgttcttcaacaaaaaatgatcctgattggttggtagagcagagggagactgagataaagctgatagaaggttggatcagtgactacca

SEQ ID NO: 79567 - DNA, 252 bp, Glycine max
  Clone ID: 700962825H1
caaagtttcttcctttctctgctctttgccttctctgacacatttggtgccttgtagagcgtgttttggcaggaaggtggtatggcgaaggacgttgaggttgctgagcgtggctccttctctgggaaggactaccaggaccctccaccagcaccactcattgatgctgaggagctcacaaagtggtccttttacagggctctcattgctgaattcattgccactttgctcttcctctacattactgtgctc

SEQ ID NO: 79568 - DNA, 249 bp, Glycine max
  Clone ID: 700962827H1
gatgagaaaaagatggaactggaacatgtgaccagcgtgtcaagaagagatcatgaaagaccaaatcccttttttcgagtgagagcagttagcttgggtggttggttggttactgaaggttggatcaaaccttctctcttcgatggcattccaaacaaagacttattggatggaactagtcttcggttcaagtctgtgtcaacagggaaatatctatgtgccaagtctggagggggaaatgtcctactt

SEQ ID NO: 79569 - DNA, 252 bp, Glycine max
  Clone ID: 700962828H1
cagcctcatacagaaacttcaattcccaaacttcttcctccactggccaatcactggacgccacggggcaggcaaagatccgttgggtgcaaaagaattacatgatttacaattattgcactgatatcagacgtttccctcaaggccttcctccagaatgctccattgcatgagaatatttaattcaatgttgcatatcattataaaatgatcctcatgaacgtgacacacatgtgttgcctattacgttaa

SEQ ID NO: 79570 - DNA, 253 bp, Glycine max
  Clone ID: 700962829H1
gatatttcgcggactaaattcatggtttattcaagaaaaaatgcatcattattaatgtattttgaaagctttctgaaattaaaagttatcatgcttatttatgtttttacttttttcctttcagtactgtttcccttttctacaagtaagaagtttaaacagggtcatcagtaagaaaatattttcagaaaagctatgtgaaagaccagtttactacttgctttcaccaaggttcacaaggattatgctgtgt

SEQ ID NO: 79571 - DNA, 250 bp, Glycine max
  Clone ID: 700962830H1
gtgaccttccacaagacccatgttcctgctggctccaagcaacgacttaaggttaatgttcattcctgcaaacacttgtccgttgtggaccagtttggggttcgaagaatcccaaccggtgaacatgaactccacattggtgatctcaaacattcaattaatgtccaaactacgcattgaatcaagcactaaaagatgattaatttaactgtcaagaaaatttgacagatacaactgaaagttttgcaaa

SEQ ID NO: 79572 - DNA, 256 bp, Glycine max
  Clone ID: 700962831H1
ctgctaacccaactcaaaaactggaacttgttggaagttaggtgggaaactgagattctgagaggaatcagcccttttccgtatactttacttgaacaagccgtttgagttcggcgtgtttaataactaacatcacaagacaacgttgtcttgcgcctgaaagtgttgtggagacaaaaccacaatacagttttagaatggagaagacagcagttaaagttcgatgccagaggattgggtgcgacgccatgttctc

SEQ ID NO: 79573 - DNA, 259 bp, Glycine max
  Clone ID: 700962834H1
gcaaacgatccaaactcttttttcatttgcagcatcaaaatgagtggtagcaacgatggtagcggcagctggagctctaggtttttgaaggtggctagtgcagctgccgctacagccgccgttgccggcggtttatatgccattctttcatcctcaacctctgctagctctgagatggaagtgccgtttggcagcgcacggcgtgagagcaaagaacgtgacgatggtggctccgggtctcatcctcgcgagggtgcca

SEQ ID NO: 79574 - DNA, 255 bp, Glycine max
  Clone ID: 700962835H1
caggtgggaaggaaggagttctcgtgatttggcggttagacacaaaaaagaattattgcttaccaagatttggatctccacttttgtattttgtagattctcctgatcgatcacttttctcaatatctcatgcagataatcaaatgcttatattgaagaagccttcaaagccaatggaaataatcagctgtatttctggtatcaagccccctttgtcttctcaagatatatgtgaaggtctttccagccgagttg

SEQ ID NO: 79575 - DNA, 256 bp, Glycine max
  Clone ID: 700962836H1
gaaacaggttcctcaagagttggtagcaaaagttggtgaaatatttgaggcaattttgcaggagacagataacataaggcaagaatccagtgaagacatgtctgtacttcgtggtctttcaatcgttttcgataggaagccagaactgaggttggaggggattgcttataaggtacttcagtggtatttatgtagactggagggctggtttgctgcagacactgatgctatttcactgaaaggatgggaccaggag

SEQ ID NO: 79576 - DNA, 255 bp, Glycine max
  Clone ID: 700962838H1
gtttccatccaaaaaatggctctatcgcgcgtggctcaatcgtcgccatcacagtcgaatcttttgaaacccctctcgtcgtacttatccctacgacgccgttcggtgtcgacctcgtcggagcccctcaccgtggagacctcggtgcccttcacctcccacaactgcgatgcgcctccacgcgccgtggagacgtcctcggcggagctcttctcgttcttccgtgacatggcgctgatgcggcggatggagatc

SEQ ID NO: 79577 - DNA, 230 bp, Glycine max
  Clone ID: 700962839H1
cagaacttgacttccaagttggaaaagagagatgtatacctgagtctgatataagtcagttaacataccttcaagctgtggtcaaagcaactttaagattatacccttcagtggctctctcatcacctcgtgaattcatcgcggcttgcactttaggtggctacaatgtctacgaaggaactcgtcgacttacaaatatgtcgaagatccacacagatcttagtgtttgg

SEQ ID NO: 79578 - DNA, 257 bp, Glycine max
  Clone ID: 700962840H1
tgaactcatcgaactgcaacagaaaactcgtcggagcgaggtttttctcgaaaggctacgaagccgcacttggacccatcgacacaaccacggagtcaaagtcagcgcgtgacgacgacgggcacgggagtcacacgttaaccaccgcggcgggctcggtcgtacccgaggctagcctcttcggcttggcatcgggcacggcacgtggaatggccacgcaagcgcgcgtggcggtttacaaagtgtgctggctaggc

SEQ ID NO: 79579 - DNA, 252 bp, Glycine max
  Clone ID: 700962841H1
ggaatgctccaatgcttatattattgtccggagggatgccttagatgagtgcctcttcattcttgaaatggaaaggctcagcatcgaggacgtcttgaaaatggagtggggtactctgaactcaaaaatcaaaagatggatttgggctgtgaaaatttttgttagggtgtatcttgcaagtgagaggtggctcagtgaccagctttttggggagggtgagcctgttggtctatcttgttttgtcgatgcatc

SEQ ID NO: 79580 - DNA, 252 bp, Glycine max
  Clone ID: 700962842H1
ctcgagccgaatcggctcgaggcccccactcctggtgagagcatcgcagtgctgcaacagatagagggacccctttcgccagctgagctagcagggattctacaaagaacattggaagaacaaggggtggcttttggaagtgatagggctaagcaggaagaaaagatccgagcagaccgtaggcttagagaagagcaagatgctgcatatcttgcagctttgcaaattgacaaggaaaaagacaaaccgaat

SEQ ID NO: 79581 - DNA, 250 bp, Glycine max
  Clone ID: 700962843H1
agtccccagagatccgcctctgcccctaacaacgcagtgtcgtttcttcgaccccaacaatttcttttctgctcagttcacaaccaatgtggtctacgagaataacaacaacaacaacgctgccatcgaatcacgattcgttaatagcagagtcgccgcagatccaccgaaacagaggttaaagaagagtttctacgactccgcggatttcttccccgagccgaaacacaccgtttcggtgtacggagag

SEQ ID NO: 79582 - DNA, 253 bp, Glycine max
  Clone ID: 700962844H1
gggaagtatccggtgctctgccaactacgttcctctcactccaatcagcttcttggaccgcgccgccgtcgtttaccgcgacagactgtctcttgtctccggtgacgttacctacacgtggacccagacacaccaacgctgcatcaaacttgcttcttccatttctcaacttggtgtcggtctttctcccctcgatgtggttgctgtattggcccctaatgttccagctatgtatgagctgcattttgctgtt

SEQ ID NO: 79583 - DNA, 254 bp, Glycine max
  Clone ID: 700962845H1
gagagaaacatttttagagagataaagtcagtgacaagcaccagaagaagtagctagcacccgacaaccacaccagattttggataaaaagtaagatccattgagtttgttcttgcacatcatgattttctctggttcaacaacgaagggtgtgaagagatgggtttgatcatgacccttttgatgagtcacatgcccacatagctcagtagttaaaatcgcgctcttttttgtgtgttttgtggaatttgttc

SEQ ID NO: 79584 - DNA, 252 bp, Glycine max
  Clone ID: 700962847H1
caataagctttcagctgtttcaagagcacaaatttcagcaccgccaggattctctgtaccgaacagggcaccacctcctggtctctcttcagttgagagaatggggcaggcttttgactccctctctgggaattcagtgctggatccttctttctgactgagaaattcttatcaaacaccctcaaatggaaatattggtggtccaggtgacgttgaatttatggagcctgctattttggcagttagtagagg

SEQ ID NO: 79585 - DNA, 257 bp, Glycine max
  Clone ID: 700962850H1
atcgttttctccgttctttctcaaagccgcactcaactttctaaaaccaaatcggtttgaatcctcatttcccgcctctcactggaaagcagcaaaatcacctttctctactatctatctgttccttttgtactctgagtgggtagaagtcatggtaaggctcactgctgacttgatttggaaaagccctcatttcttcaacacgattaaagagcgtgagttagatctcagaggcaacaagatagctgtaattgaaa

SEQ ID NO: 79586 - DNA, 253 bp, Glycine max
  Clone ID: 700962851H1
aatcgataaatgtgtgagtaatagacagtcttgcttgaaatacatatgattttcatttacagttagaaataggcctgtgagtaactttatgctttatctcctgcacaagaaacttgatattagatattaatgtgaaagcactgatttcaggctagctatgctttttttttccctttcttatttactaatgccttgtattgatgtttccattctactatgactcagattgcagatgtgtggtcttgtggggtga

SEQ ID NO: 79587 - DNA, 252 bp, Glycine max
  Clone ID: 700962852H1
aattgatgacctgtttggggcatgatttgagtatctggctctctgtgtaactagcttctagacatagaaacccaagttaagacttgaggatggcttcaaattgcatactagctatgtcaaagcagttgatcttgtttgtgtccattcgccttgagattgatttgaatgtttgatttataaagcaatgggactttcatatatcaaaatgcttcgcgacttcagtcaatttatttctaaaatcatgtgaattga

SEQ ID NO: 79588 - DNA, 250 bp, Glycine max
  Clone ID: 700962855H1
gccagattacagcaatgacatagaagaagatatgattcgtgcagccattgaggcttctacgcaagaggctgaggagaattatagaaatcacaaacttgacaggcagattgacttaagtgaatcaggatcacagccaaggcaatcatatttggaagatcctgagcttgcccatgcagtttcattgtccctgaagacagcagagcaagacaaagcattgcgagtacacgggggagattctggatcaccaaca

SEQ ID NO: 79589 - DNA, 246 bp, Glycine max
  Clone ID: 700962856H1
agagtgagagagagagagagagagagagatactgagagaaattcgcaaaccctaatttcggaaagatcggcgatggctgcctccaaggatcgcgagaactgcgtctacatcgccaagctcgccgaacaggccgagcgatacgaagagatggtggaatcaatgaagaacgttgcgaatctcgacgttgaactgactgtggaggagcggaatttactttctgttgggtacaagaatgtgagtggtgct

SEQ ID NO: 79590 - DNA, 247 bp, Glycine max
  Clone ID: 700962857H1
aaagtttttgaaatgttgtcaccccttcttctatttctatgcctaactcttcctttgtttttgttgtccttcttcaaataccgtaaaaccttcaagaatccaccacttccaccaggtcctagaggccttcccataatagggaatcttcatcaactagatagtccttctcttcatgagcagctatggcatctctcaaagaaatatggtcctttattttcccttcaatttggattaaggccagccatag

SEQ ID NO: 79591 - DNA, 248 bp, Glycine max
  Clone ID: 700962858H1
atcttttctttattttctctctatgcatattgctccacatagttcaatggctatggagggagagctacaaccatcacaagttcaactcagggtaaactctaggcagtggaggaaagtggtaaatgtacattcaatggagatagacccatctttcacttcaaaagttgaacacagggaagtgaagcatttcaaggaatggtttccttggttgattcccttctttgtcattgccaatgttattgtgttca

SEQ ID NO: 79592 - DNA, 248 bp, Glycine max
  Clone ID: 700962859H1
ggaactgtttctgtatatgttgcaattaattctgggaggtgtgtgatatttggtgtgttgatttaggaagtggtctcggaataaatagcattgctgtaattggaattactgtattcgtttataaatatgcaattatatcttcaggtgtgatggtaattgtgaactaggtcaatcttttcagtatgtacgtgatttctgggcagaagtaaagaactactgaattgtgactggttctgtgaattacacgt

SEQ ID NO: 79593 - DNA, 251 bp, Glycine max
  Clone ID: 700962860H1
caggaattaatccactagatatcccaaagatattcactaagtttgcacaaaaccaatcgttaacaacaagaaatcctgctggaagtggacttggcctggcaatttgtaggaggtttgtaaatcttatggaaggacatatttgggttgaaagcgaaggtattgataaaggatgtacagtcacttttattgtaaaacttggaatcccagaccgatcaaatgaatttaagctaccttttgtacctaaagtaccg

SEQ ID NO: 79594 - DNA, 249 bp, Glycine max
  Clone ID: 700962861H1
ctccagggatacctgctggggaatccagcaacaactcgaaggcatgaaaactatcgaatatcctttgctcatggaatgggacttatttctgatgaactatacaggtcactgcaaaaaaattgtaaaggagagtacataaatgtagacaccaaaaatgtattatgttctagaaatatcgagacattcaatgaggttacatcaggacttagtatggtcaatattttggacccgtcatgtgattggcttgat

SEQ ID NO: 79595 - DNA, 251 bp, Glycine max
  Clone ID: 700962863H1
aaacactatagcaatagaaacatttgcttttgaaaatgccctcactcttcatcactacactagctacccacatacaatgtcgaccaaatttaaggtgtttcgtgaattcacaagcgatgactcattcctaaaccaagttaaccctgaaaacatcaccgaattccaagtgactctgtccctcgctagagactacgatggcaacaactcaaccaacggaaagttcattccttactgggacactgaaaaggtca

SEQ ID NO: 79596 - DNA, 262 bp, Glycine max
  Clone ID: 700962865H1
ctagggctttgagaaaacaacattgcccgaaggccaattacctaacacagggaagaaaacaagaaaagagaaaaaggtttcatcataatcataagctgttaggcatggcgactggattcgacaccgcccatgagaagaagaagaagattgccgttctgagcgtgtcttccatcctcctggtggcgatggtggttgcggcggccgtcggcataagagacggcgccgaagtggtcgaggaaggtggcgacacgatcgcgaaatc

SEQ ID NO: 79597 - DNA, 257 bp, Glycine max
  Clone ID: 700962866H1
atttagctctggagactcaggtggttctaacgtgtgcagctgaaacctccgtgtcccacgaaaaccttacaaaattgaattgtggtattacagtatccaacagcaccatgctggattctgccactccccatgacaaaatcaccacagcagcttctggcttcgtacttgaggatgttcctcatctatctgcttacatccctcacctccaaacatatcctgacccgttgcaagacaatccttcctattctgttgttgcg

SEQ ID NO: 79598 - DNA, 253 bp, Glycine max
  Clone ID: 700962867H1
ctctccctgttttccctgccaaagtaacctcgttagtgacaaacaaaaagctctctcacactgagtgaaagaaagagaacaattttgaggacaaagtgaagagagaaagaaaagaagagtgagttgtttcagacagtagtagtagttagatagagaaggtggaagtggaaaaagggtgtttgttgtattgtgaagtgaaacaaggggtgggggtggtgtgaaacaaaaaaaggtgtatagtgagagagaaaga

SEQ ID NO: 79599 - DNA, 253 bp, Glycine max
  Clone ID: 700962868H1
atttcattttcttgcacccaattggattttgatctgaacccagttaatcatttagtcactgtattgtgaggaagcttgtttgtcattgtttctaatttgaagtactgggtttgctacattaagtggggttttgagtggtgaatttgacattgaatgtctggtgaaacaggatccttttagcccgtaacagaacagtgaaagttgcagtttggatttgtactttcaactaataaatgtcgaggggatctgatgg

SEQ ID NO: 79600 - DNA, 254 bp, Glycine max
  Clone ID: 700962869H1
aaaaaattaggcgtctaaagggccaaagcttagaaagttgaagctttttctgttgaggtgaaagtgaaatggttggcaaggataatctgagggctgaggacttgaacttgtgctttaagaagcttatgatggtggccgggagtgggaacagtgagaaaggggtgaacttgaaggttggggtgatcaccgagtggaaggatattcctgtggagcttctgatgcaaattctgtcccttgtggatgatcagacggtg

SEQ ID NO: 79601 - DNA, 256 bp, Glycine max
  Clone ID: 700962870H1
ggaacaagaacaagaacaacaaagtaacgtgaaagagagagagatggaggcgattgttccagtggtggatttccagaggctttcagaggaagaggagcgcaagaagctgagaaaaacatgtgagaaaccagggtgtttcagaatcatcaaccactcaattccactaacactcatggctgacatgaagtcagtggttaaatacttgcatgaccttcccacggaaatcaaaatgcgcaacaaaccctccgtccctgag

SEQ ID NO: 79602 - DNA, 255 bp, Glycine max
  Clone ID: 700962871H1
ggaccaaaaatgattattttttgctggtacttaatcttagtaccacctagctcgcatttttgaatctggaatgatgtttagttagcatttttaatagatagaacgaattcggagtcataggaaacgtgatatttgttctttgcagatttatcataatgcatcttccaatgcgatttggagaggggtcatgaaggttggtctttgaccctgcaattaataattcaaattcgaaagcctgaattggccatcatggca

SEQ ID NO: 79603 - DNA, 254 bp, Glycine max
  Clone ID: 700962872H1
gcttgccagctttactcggcaatggtggcaacatatataggcagcaacccataaaatattattatgaaaaattgaaaattaacgtaaaggggttcattgcacatcctttttgctttcagggttggaagaatttttgcgataaaatattttttcacccaaaaaaaaatggtgttggatccaagactggtgctggtgctgttcatcggcacttgcattttggccatcaatggtgacacagatccaaatgacgttgc

SEQ ID NO: 79604 - DNA, 250 bp, Glycine max
  Clone ID: 700962873H1
cagtatttctctttagaagagattctgagagctgaatagaagagatgtttgatgtttgtgtgcataatggaatatcctagaccagaagaataacgagttatgtatgttaccatgcatattaatgttgtgctggtgcatatactcttatttgctcattaggggcaggtggtttttgttacaggagtggtggacatatgtctgtatgggaccatcagatcctcatcgaaattggcatcttggaatgcgaggt

SEQ ID NO: 79605 - DNA, 247 bp, Glycine max
  Clone ID: 700962874H1
agaaaactgtgactgccttcaagggtttcaggtttgccactctcttggtggtggaacaggttctggaatgggaacactgttgatctcgaagatcagggaagaataccctgaccgaatgatgcttacattctctgtgttcccatcccctaaggtttctgacacagttgttgagccttacaacgcaacattatcagtgcaccagctcgttgaaaatgcagatgaatgcatggttttggataacgaagct

SEQ ID NO: 79606 - DNA, 245 bp, Glycine max
  Clone ID: 700962875H1
aagacactaaaagcggatgatttggcttcttcggtggtaggaactcccaactatatgtgtcctgaacttcttgcagatattccttatggattcaaatctgatatttggtcactaggttgttgtatatatgagatggctgctcatcgcccagcttttaaagcttttgatatggcagggttgataagcaagataaaccgtgcctctattggccctttgcctccctgttattccccatctttgagaac

SEQ ID NO: 79607 - DNA, 252 bp, Glycine max
  Clone ID: 700962876H1
atcaacatcatcatcgacacatggacccggcgtggattcaggggcatttccctagtgggcccatgatgcctaaccctgcacctttcgtagagcatcagaaagccgttacaataaagaacgatgtcaacatcaggaaagagacccttaagcttgaacccgacgtagaaaattctggccacttccttgtttcgttttccttcgatgccaccgtttctggcagcatcaccatatatttctttgcgaaagaaggtg

SEQ ID NO: 79608 - DNA, 249 bp, Glycine max
  Clone ID: 700962878H1
gtgagattgaattgaggttgaagtgtgttgtgttgtggcaaagctcagaaaaagagagagagattgaagaagcgatttttttatatgaaattttgaagagtgaatgagaaatctcaatcccatggatgagcaattgaatttgagctgaatcggcgtcgtttcgatttctctcagtcacacactactgactcggccagattcaagtaaacgcttcttctcagcaaaccctagatattggagattgatgtg

SEQ ID NO: 79609 - DNA, 251 bp, Glycine max
  Clone ID: 700962879H1
atttcaatttccctaggggcttaatatctccccgcatttgtgcctagcctcattattatcatagtagatattcattccccttatctttctctcttctctctccccgcccaaaccctaactccctaccctattccgctttctctcatccatcatgaaaggaggaaagtccaagaccgaatctaagagagccgatgccaaacttgctgtgaataagaagggcgccgccaccaagactaggaaacccgccggaa

SEQ ID NO: 79610 - DNA, 253 bp, Glycine max
  Clone ID: 700962880H1
gagaagagacaatggatcacttgagattcaacaaaaccacccttgtcctcatcggaaccctctcttgcctcctcctgtccatcactgccgtcccctcaactcgcgtcttggaactcgctcccagcgaagcccccaccgcggagcctatagcctccggcatcagcctcttcgacaatcttcttgccaaggaatcaagccccatgattctgaaattctgcaccggcaccgagaaccccaccctctgcgccgaaac

SEQ ID NO: 79611 - DNA, 255 bp, Glycine max
  Clone ID: 700962881H1
gttattgatcatttttgtatatacatgttcgatttttctctcggttgttcctttggctctcgtcaaaagcaacaactgcattcaaagggagggctaaaaaacaatgttgccatcattaacacacatggtttcgctctccattttgaatctcctccacactctcaaatcattttacatagatagatagctcctttattatacacaaacaatcacacaccgtatcccttgttttgagtttccgaggtcagaacatgg

SEQ ID NO: 79612 - DNA, 78 bp, Glycine max
  Clone ID: 700962882H1
caagcctctctcgtaaccccatgccgcaccggtctcgaagccagcgactgcgcctccgtgccatggtagcaaaactcc

SEQ ID NO: 79613 - DNA, 252 bp, Glycine max
  Clone ID: 700962883H1
gggtgagatgctttcgtctaagcttgctcaaactggcctcgtctatgctgtattgggcagttgtggaatacaaagatctttgaacatctcctttactacatttttgcaacacctacctctttctctctctctctttcactcgtcctaggtttgattttttcttccctcaattcccaacctcgcatctcccattattttattctcaaaccacgacaacagaaacacaacacaccccaacacacgcacacaaac

SEQ ID NO: 79614 - DNA, 76 bp, Glycine max
  Clone ID: 700962886H1
ctcatcctcgtggtgggtatgctaattggcgcgcttactgtagttccacgtccatagggcttgaaccacaacaccc

SEQ ID NO: 79615 - DNA, 246 bp, Glycine max
  Clone ID: 700962890H1
gttgtaactcgttcttcttcttttgttgttctgtgtttgtgtttgttttttctctcacctgaaaatgtcttgctgcggtggtaactgtggttgcggaagctcctgcaagtgcggcaacggctgcggaggctgcaagatgtacccagacttgagctacactgagtcaaccaccaccgagaccttggtcatgggagtggcacctgttaaggctcaatttgagggtgctgaaatgggtgtgcccgctga

SEQ ID NO: 79616 - DNA, 121 bp, Glycine max
  Clone ID: 700962891H1
gctcagcactacactgaggcagctatggatgagataacaattttgcagcagattgcggagggagatcctgatgataagaagtgtgtggtgacgcttttggaacatttcaagcatgctggtc

SEQ ID NO: 79617 - DNA, 247 bp, Glycine max
  Clone ID: 700962892H1
cgaggcccttgaagttcccggtgctcatagaagtgactatgaggacatcagtgtgggtaagaaaattgtattggcttttcagacacttggtgttgtctttggtgatgttggaacaagtccattatataccttcagtgttatgtttagaaaggcccctattaatggaaatgaagacattcttggagctttatcacttgtcttgtacactttaatcttgtttcctttattgaagtatgtcctggtggtt

SEQ ID NO: 79618 - DNA, 248 bp, Glycine max
  Clone ID: 700962893H1
atcgttttggaagaacaagggcatgtgagaaaaaacatactaatcaaattaaacagcgaagaagagtttcaaatttattgcttcgaatctccagcttcgtcagggaaggaaaacagcataacgtgtggtctcgggggaaccaaaaactgtgaaattctgaagccactaggccttttaaaaaccaaactaaggaagacggtttagacagagagtacttcaagctaagaaaatggaaagtggggttgtgg

SEQ ID NO: 79619 - DNA, 154 bp, Glycine max
  Clone ID: 700962894H1
ggagaagaagaagaaggagcatggccatgagcatggccatgacagcagcagcagcagtgacagtgattaaactgctgcatcacctatatatttaaaaggtttatgggaccatagtagcgaaggctgtgccttaatttctctctctctctctctc

SEQ ID NO: 79620 - DNA, 248 bp, Glycine max
  Clone ID: 700962896H1
cagattttcatgctcctcctttcattaaattaaagaacagtttctaggtatggaaactctttcatatgggtcagcaccatgctgccaagtcgtgaactcaaagtggaaattagttgaaaagagtttgagttcacgtcaatcaagagtttcctctataggaaaacttggagtttattacacaggtactatttctgcatgtgcgcctgtgagattttatgagatgggtactagggtgcagctaagaagct

SEQ ID NO: 79621 - DNA, 266 bp, Glycine max
  Clone ID: 700962902H1
ttctgctcgatcggctagctatcggggttattttcaaggatgaaaatgggaagcagcatgaggcgtatctaggaaatgacaggcagagtgaggtgattgtgtctagtggggcacttgggactcctcaattgctattgctgagtggaattggcccaaaagcagagcttcagaaattgaacatccctgtggtgcttgacaaccaatttgttgggaaaggcatggctgataccccatgaacacaatttttgttccttccaaaagatcag

SEQ ID NO: 79622 - DNA, 253 bp, Glycine max
  Clone ID: 700962903H1
attaaacccaatgggccgaatttggacaatggtagctgggggaggtgctagtgtcatctatgctgatacggtaggggatctcggttatgctcctgagcttggaaactatgcagaatatagtggtgcacccaaggaagatgaggtcttgcagtatgccagagttgtgattgatgtaatcgattcttatctcaaacatcattgttggcatatttatggataaactatttttgctttatgcgatcagccatttctc

SEQ ID NO: 79623 - DNA, 251 bp, Glycine max
  Clone ID: 700962904H1
agctcgagccgattcggttcacggctcgagggaaaaagttggcactcttcacagcacttactttctctcagaagctgtcaggtctcccaccagaaactgtgttccaaccacttcttaaagataaccttgtggccaaagggctagttctgtcatttatgactgacttctttaaggagtatctgattgacaacagccttgatgatcttatttcattctaaaacggggaaaagtagaggaggatcttttggaca

SEQ ID NO: 79624 - DNA, 250 bp, Glycine max
  Clone ID: 700962905H1
gttcattcaattcgcgaagagctgctaacaacttgaaacgccttgctgaagaatttggacctgagtgggctatgcagcacataattcctcaggttttggagatgaacaacaatccacactatttgtatcggatgaccattcttcgtgctatctctctgcttgctcctgtgatgggccctgaaatcacttgttcaaacttgttaccggttgttctgctgcatctaaagacagagtgcccaacataaagttc

SEQ ID NO: 79625 - DNA, 251 bp, Glycine max
  Clone ID: 700962906H1
gcatgcagttactggtgcttatgctaaacccatcttcgttgataaactcggtgctagtctggattcaatttcaaatggaatccctttggaagattttggacatggccatcctgatcctaatctaacatatgcgaaggatcttgtcaacattctgtatgctgaaaatggacctgattttggagctgccagtgatggggatggtgatagaaatagattttaggaagaagtttctttgtaactccttcagactc

SEQ ID NO: 79626 - DNA, 253 bp, Glycine max
  Clone ID: 700962907H1
ctagtagctaccagaatttagccgtacttgttttaccttgcttgttgtatggttttttagtatgtaaataaacctttatcatattcctctaggctaaatatgtatttaaaataatacttttattttaaatacatatttagcctagaggaatatgataaaggtttatttacatactaaaaaaccatacaacaagcaaggtaaaacaagtacggttaataatgtatttaaaataaaagtattattttgaagccta

SEQ ID NO: 79627 - DNA, 252 bp, Glycine max
  Clone ID: 700962908H1
ataaagaggattctttgaccgtgtcagtgactgagccttatgtgttgcaaagctcaaggcgtagtatactgccttggaggaagaggaagttgagtttcagatctcctaaatctaagggggagccattgttgaagaaggcttatggcgaagaaggcggtgatgacattgattatgatcgcagacagcttagctctgatgaatccctttcactcgggaagactgaggatgattcaggtgcaaatcgatcatcgg

SEQ ID NO: 79628 - DNA, 253 bp, Glycine max
  Clone ID: 700962909H1
ctgattcagaaactcttaggcattccacattctcaaccccgaaccctaagagcagagcgaaaatgacaaccaccttcgcgaccgtcgcaggactcggtggcgcattactgtcatccacctcatctcgtctcacctcagggtttgtgaaatccccagtgattgctaggaatcccttgaggcaagctgtggcaatgggaaatgggaggattacatgtttgaccggaattggctgcgggcagattacagtgtgatt

SEQ ID NO: 79629 - DNA, 250 bp, Glycine max
  unsure (1)..(250): unsure at all n locations
  Clone ID: 700962910H1
cttcttcttcatctacattagtagttcttgttattcattattcttcatactcacacagcttcttctgggggcaaaaggggtcatttttcagatccgaggttgagctcctctacccatcatgatggagctcggatacctgaatcagggtcagccttctagaggaacaacaccacttgtcactcttccattgttgctttcaacacttgtgttctctccactttcacacatgccttcaggagntctgtgtttc

SEQ ID NO: 79630 - DNA, 103 bp, Glycine max
  Clone ID: 700962911H1
cttgagcaagtgtacttcctagttgttatgatcattatctcttgcaggctaattttatatttggcatggactgcaatatccaaattgccaaaaattttatggg

SEQ ID NO: 79631 - DNA, 251 bp, Glycine max
  Clone ID: 700962912H1
ggaaatcgttcctatcatcacttctcaaatctcgaaccctctcgttcgtgccgatcactaggtcacacttcatcaatggcgggtagaggcaaaaccctaggatccagcgccgctaagaaggccacctcaaggagcagcaaagccggcctccaattccccgtcggtcgtatcgccaggttcctcaaggccggaaagtacgccgagcgcgtcggcgcggagcccccgtctacctcgccgccgttctcgaatat

SEQ ID NO: 79632 - DNA, 253 bp, Glycine max
  Clone ID: 700962913H1
ctttcacatgacacttctctttctgcgtcaaacacacctacctaccagtttgagctccggccatggcgtctttaccttcgggtcgcagcaacggtggttccaacggctttgatttgggttccggtgacatcctttattcgtacgacgaggaggactataccaaccacgattcttctaacggcactcacatcgatcccaccaaggattctcatgcatcaaggatgggaagaacatcaatagttcctgctactgc

SEQ ID NO: 79633 - DNA, 252 bp, Glycine max
  Clone ID: 700962914H1
attgagaatcgttcgagactgcaaaatccaaaaccaaaaccaaacacaacacagcattcgtcattcaccgccttgtctcgtcttcttctgtctccgaacacggaatctctctgaatcgcgggattaagagaggaatatgcaacagaggcttaagttgcagcaacaacaacaagccctcatgcagcaagctttgcttcaacagcagcagatgtaccacctggcatgctcgccgctgctatgtctcagatggag

SEQ ID NO: 79634 - DNA, 180 bp, Glycine max
  Clone ID: 700962915H1
caaatatactgataaagatagaataagagagagagagagagaatggaagggagagagagttgtcacccattgctgagaggaggtaggagaagagaggagaaaggttacaaccatggcttatccaccactcagatgcatctcatggctgccatatgtgatgccctcattccttcccttcca

SEQ ID NO: 79635 - DNA, 258 bp, Glycine max
  Clone ID: 700962916H1
aagagaagaagtgaaagacagcatcagccgcggcggtgttaggtaggcggaccatggcggcgcctgaatcccctctctgttacgtcggtgtcgccaggcaatccgctgcttttcgcctgatgaagcaaatggggtgggaagaaggagaaggtcttggaaaagagaagcaggggatcaaaggacacgttcgagttaaaaacaaacaggacactattggtattggccttgagaagccaaacaactgggccttcgacacca

SEQ ID NO: 79636 - DNA, 257 bp, Glycine max
  Clone ID: 700962917H1
gtgagttgcaggcagtgtcatctctcctttgacgacaagatgagcatcccaattccccatcggcagttattcatagacggagactggaaagtccccgtcctcaagaatcggattcccatcatcaacccttccacccaacacatcatacaggatatcccagcagctactaaggaagacgttgatctcgctgtcgctgccgccaaagctgccctctccccaacaagggcgccgattgggctccggcttccggctccgtt

SEQ ID NO: 79637 - DNA, 253 bp, Glycine max
  Clone ID: 700962918H1
cccatttcttctgtgtctgaaaaatttctctttcttgtcttcgtgttgtctccttcttcttcgcttcatcgcttgccaattcaagttgcttgacatggctacgcatacgcccaaaaatatcctcattactggagctgctggattcatcgcatctcatgttgcgaaccgtcttatccggaattatccccagtacaaaattgttgttcttgacaacttgattattgctcgaatctgaagaatctcattccttcaa

SEQ ID NO: 79638 - DNA, 252 bp, Glycine max
  Clone ID: 700962919H1
gcaacgttagtggcggtgtgcataaaattgaccattgttcttcatgacattgtttacgctgctgttcctgcttcctcactgagtgaagaaaaaggacgttacaaaagcgcacacgatttttcaagagccaaacagagtgccctaaattcaagcgcaacgagtcaaacaaacaaagagagaagaagaagaagcaaaataaagccattgaacatgtcttcagcaaccaagggtgataggaagactgcacttgat

SEQ ID NO: 79639 - DNA, 250 bp, Glycine max
  unsure (1)..(250): unsure at all n locations
  Clone ID: 700962920H1
ccacatccatctttgccttctgcatgttggttctctgtaaacagatactgcaaaagaagaataatattgaatatttggttgggttgaatccctgggttgacgcgttgcagacatcacggctattctaagagtgtctcgctctctcattcatgtcccaactgtacgacggaggacaggttgcgtaactgccaccaacccttcgccgcacgngtggcgtggtgctttgccttctgaaggtggtagcccttca

SEQ ID NO: 79640 - DNA, 251 bp, Glycine max
  Clone ID: 700962922H1
gcagcactcaaaaccctagagaggacgagagagcgtgcaactttcggcaaccacagaccatgacattcaagcgcaggaatggaggtcgcaacaaacacggccgcggccatgtcaaattcatccgatgctccaactgcggaaaatgctgccccaaggacaaggccatcaagaggtttttggttaggaacattgttgaacaggctgcagtcagaatgtgcaggaagcttgtgtctatgaacaatatacacttc

SEQ ID NO: 79641 - DNA, 250 bp, Glycine max
  Clone ID: 700962923H1
agctgaatgaaccacaggttaaaataacacacaaagaatcacccgagttaatgtgtagtaggaacactcccaggcactgtaatttcatttcctacccttggatatgtagtagtgtagattcttagtcctttattgttacagatataatttgaagtcattgtacagctggagcattacccagagaaagcatgcacagatgaagtggtataatctaattgcagagttgtataactacaaggctgtttcaaat

SEQ ID NO: 79642 - DNA, 245 bp, Glycine max
  Clone ID: 700962924H1
gcaacggtggtcttgtatttgtttcttttggagacagagagtgagagagaagaactgtgtgttgtgtgtgtaagagagccatggggaaatctacctcctgcttcaaactagtcacttgcggtggcgatgcggcggagaatgatgattaccaccaagtctctgagatcaaggcatctaacgataaacgtggttggagtttccgagagaaatctcaaggcatcgtgtgcttagcaatactgtgatag

SEQ ID NO: 79643 - DNA, 250 bp, Glycine max
  Clone ID: 700962925H1
gttattcggtgtgtgcgtgtccaactttgaacgcactttgatactgccactttctccaccacaaagagaaaaaagagagaagaaaagcgaatcccctgtgatctctcacacaattccaattcctctggatctcgtctcgatcgatagatctcgaacatgagcactggggagcttctcaacatcgaacctctcgaactcaagttcccctttgagctgaagaagcagatctcatgttctcttcaattgtcca

SEQ ID NO: 79644 - DNA, 248 bp, Glycine max
  Clone ID: 700962926H1
attcaaatccaaatggccctttacattacactaataattggcctcctagtaaacaccctagtactctataaatagcatttgcatgcaccttagtcttcaccaaaatactcctcttggcatcttgtgttgtgtccctcttttaagctatttccttctcttaacacaattggttgtgccaattgccatagtcaccaaccaattaacaaaggttatatatcatcatatcatcaccaaatgaaaaatattgg

SEQ ID NO: 79645 - DNA, 246 bp, Glycine max
  Clone ID: 700962927H1
gactctctctctggtttttttttaggattccaactcatcacacctccgcgcacgttagccaacagctcccagtcccctcacacagtgactctcccaaatccctaatgcgaatctcaccctaatccctctctcctcgtccatcatcatccatcttgcaagcagcaagctgcaagctccatcaacacttgcctcactttcgcttccagaatttccaaattctcattcaccaaccacaatgatggagga

SEQ ID NO: 79646 - DNA, 250 bp, Glycine max
  Clone ID: 700962928H1
cttgaggctagggttaccggattcttgcgttttaatatctgcaattcagaagcatggggcactccaatgtgtggaattctcaccctaagaactacggacctggttctcgcacttggtatgttactcatcttcgccaaatggtgattcaggatgagttgatccttttccctctttgttccttctcaatttgattatgcgattattattaaggttttgcttttaatttgaagcatttaattttatcccccat

SEQ ID NO: 79647 - DNA, 253 bp, Glycine max
  Clone ID: 700962929H1
ccctcaacgaaacgcaagaactggtatatagtcatggtcggaaattggaattaacttcccagaaattaaacgaaagtatgtaccctaaaaaataacagtataaaatttgcaaagttacatttttaatttaactttagccgcggaaaaggtttttgcgttgcgttgcactagcccctgcacagtagtgtggtacgatgatttgattttgataagaaggtctgtgctgtggggatcattggaagcatcgatcgga

SEQ ID NO: 79648 - DNA, 254 bp, Glycine max
  Clone ID: 700962930H1
aaaaatcttctctcttccctaggaaggttgaatgatttggaaaaatgagttctggcaatgtgaagccagaagaagaagccctagaaaaggagaatgtaggtattcctgtccctgaaatttcagaaccaaaagagcacaaggctggaagtaactgcaagggaattgagcagattcctttgtctggggaaaatgaagaggatgtgctagttaatatactgggagtgggtccataatttctggtggcaaggcagtgg

SEQ ID NO: 79649 - DNA, 256 bp, Glycine max
  Clone ID: 700962931H1
atcctttgtttcgatgccaaaacagacccttgacaaccccattttttcttcttattttttttatctatttgtttttcagttaatctcattctttgaatttttatggcaataatattgcctttcagttttctctcttgcccccgaagtcactgaaaattcttgggaaaatctcaaaatcaggtttttctctcttttttttcttcccttttctgtttcggggcttaaatttcacttgagaattcattgaacccagata

SEQ ID NO: 79650 - DNA, 260 bp, Glycine max
  Clone ID: 700962932H1
tttcctttttatctctatctttcttcacatcttaaccttgttcttaccagatggctgcctcagttaaactcttatttttgtcctttctctcgttgttcatctctttctccatagctcaaacctctttcagaccaaaggcacttgttcttcctgtaaccaaagatgtttctgcctcagttcctcagtatgtcacacaaatcaaacaaagaaccccacttgtggcagtgaaactaactgttgatcttggtggtggctacttg

SEQ ID NO: 79651 - DNA, 255 bp, Glycine max
  Clone ID: 700962933H1
atcatatagaaaccctaatttgttacacctagcttcttccttcattttctcatcatcaatattcaacaacatggctaatttgcaaggagggcctgactttgacaaaatctttcacttcctctccatttgcatccttgctttcatcaatgaaggctcttcctccctctcaagtgcattcatgaatgaaccatggtcatggggcctaagcattcccataagtttgtacgtgaaattcgcacttgagattcacactca

SEQ ID NO: 79652 - DNA, 259 bp, Glycine max
  Clone ID: 700962349H1
caagcgtcaaccagctacaacttgaactgttcataacccaaaccaaaagttccacaccccaacccgaaaaatcacacacaccccctttggaattgggatccatcgccatatcactgattaggttagataaggttccctatgagcacttccattctcgaggccctgaacgtccgcgtggaaagttccggcgataagtacctgttcctggctcacggcttctgcacagaccaatccgcgtggcagcgcgtgctcccatact

SEQ ID NO: 79653 - DNA, 261 bp, Glycine max
  Clone ID: 700962350H1
attctcagccgcaaaacaattgctttgtgattccatcaccatcagtaggtgcatcacattccactcctgatcagcatgttatcttggccaatattggtgggttccaaaccggggttcatgatttcagtgcatggagggagtgtagaagtgagatgctagtcatacaaactatggatggacagaacttacaaggtcagggattatctcacagccttggaatccacatgaccctcaggagttcaaatgccttctatccatgat

SEQ ID NO: 79654 - DNA, 257 bp, Glycine max
  Clone ID: 700962352H1
agcagctgcagcccacaacgttcccctctgattgagaactcagtctcctctgcctgcttcatccttccttcctttcttcattcactggcacccttccgagtcaagcataagatcaaagggataccctttctgttccttgtctccccctgcatgcgaacatgccagattttcaatctcctccaaatgtttactccagcacgtggtgtgtccttccgtcaccctcctcatcattaaaaggttgtagtccttcgatctgg

SEQ ID NO: 79655 - DNA, 244 bp, Glycine max
  Clone ID: 700962353H1
aatgactaacgcatccttggatctctttctacctcttttcttcgcgactggttgcactttgaacctaaggcagagatgccacagagtctcctctgccttagagaaactctcacgatggcggttcaggactttgatctcatctcagagaggagaaggaacgagaagaggcaagaggcgaggtagaggatcctgaatagcgtggtctcttccgatgtgctcgattccatgataggtgcagtactct

SEQ ID NO: 79656 - DNA, 209 bp, Glycine max
  Clone ID: 700962354H1
tgcagcctatagttcagggtataggtttggataccgaggctgtcggtcatatcacattagtgatgattctgaatttctgtacttttgtgttcttactccatacattccattgcggtgggtgcccagaatccgccgcttcgcggtgctaccgcattttacagcgaaatatggcatctttagaggaggctgcttgccactctccttcttat

SEQ ID NO: 79657 - DNA, 253 bp, Glycine max
  Clone ID: 700962357H1
caggaaactctttctcttcttccgtttcctagtctcacacccaaacctcatggaaggctctgtcaacgaacgtcttgattttgggaagatgggatatgggtgcaatcattaccggagaagatgcaggattcgtgctccctgctgcaacgagatctactcatgccgtcactgtcataacgacgctgcgagcttgttgaagaatccctttgatcgccacgagctcgttcgccaagatgttaaacaagttgtttgt

SEQ ID NO: 79658 - DNA, 253 bp, Glycine max
  Clone ID: 700962358H1
gtcatggtgtgggagtgtggctaaagcaaactactcctcagtcctcactctgctccaacactcacagtcactgcacttgttctgatgaagaaactctcactcttaccttcggatttggacaccaaatgttccttcaccctctctttgatgagtatgatgggcttcttcgtcgcttccttcgtcctctgctctgtgattttctcactctccattgttcttcgagaccctccctcagatgccgccctgcacgaac

SEQ ID NO: 79659 - DNA, 240 bp, Glycine max
  Clone ID: 700962360H1
cgagatctgcgtttggcatgaggtgccaggacaaagatgaattcatatcaatcatacaagaaggtgtataagttgcagcaggttttaacataggagatttatttccttctgctaaatggcttcaacatgttactggtttgaggtctaagcttgagaagctgtttggacaaattgatcggatactatgagacatcatcaatgaacacaaagaggcaaagtcataatccagagaaggcacgg

SEQ ID NO: 79660 - DNA, 254 bp, Glycine max
  Clone ID: 700962363H1
cagcacaacacttttgcacaagcaattgcaacaaaccaacgttgaattgtgtctcactctcttttttgtttgggggtgtgtcacagtgtctctcttcttcttcaatcaagataagaaagaacacaccctgttaccatggaaggtggtgtaccagaagctgatatgtctgccttcagagaatgtttgtctctatcatggaagaatccttatgttcttcgccttgcttgctctgctggaattggaggccttctctt

SEQ ID NO: 79661 - DNA, 261 bp, Glycine max
  Clone ID: 700962364H1
aacacatacattgtagtatcacttttgtctcggaatttgttcttttgagttatggcaagcttaaaggttgcatgtgtggttttgatgtgcatggctgtgatgagtgcaccaatgatggtgcaagccgtgtcatgcaatgatgtttctgtgaacctagcaccgtgcctatcttacctgatgcagggtggagatgttccagaatcgtgctgtagcggagtgaggaacattctgggttctgccagcaccacctttgacaaacaa

SEQ ID NO: 79662 - DNA, 260 bp, Glycine max
  Clone ID: 700962366H1
gttggaccaagtgtctgctatgccactggacacatataagggacatggtttccgaactgaccttgttgaaatgctgacagctttgaaaccaagatttatcagatttccgggcggttgttttgttgaaggagaatggttaagaaatgcatttcgatggaaagcatctgttggaccatgggaggagagacctgggcactttggtgatgtttggatgtactggactgatgatggacttggctattatgagtttctccaacttg

SEQ ID NO: 79663 - DNA, 256 bp, Glycine max
  Clone ID: 700962367H1
cggaaaccgcgctcgacatcctcgaagacctcgcccctgtctctgacgcgcaacgccgcgcgtactgcgcagtcgccgtggagtgcaccgtcaagtacctcgctgcgtgccccgacgttatcgatggtgagtacgccggcgctgtacggcggatctggcgcggacgcgtggcggcgctgcaggcgcgccggagcgggctggtctctggggagttggtgcggtggcgcgatgagatagagaacgcgcttggggagga

SEQ ID NO: 79664 - DNA, 109 bp, Glycine max
  Clone ID: 700962370H1
ctcacttattattacatcaaggataaggctaattcatcattgtttggtgctcagaaaaagtaagaagacatttgtcgattgttatccctttctttaagtcctccctgtt

SEQ ID NO: 79665 - DNA, 241 bp, Glycine max
  Clone ID: 700962371H1
ggattttacattaacactttgctgggagcttctgtcacagcaagatgaaactgtcgtatggaagaaaactagtaaaaaaagttgctatgcatcaagagagtctggttctggcccttctttgtgtggtagaggtattgatgtggagactccctattatcgagaattgctaaactgcataggtggaacacagagcagccgttaggttccaattgaaaaaagggaaagattgccttcccgggct

SEQ ID NO: 79666 - DNA, 251 bp, Glycine max
  Clone ID: 700962373H1
ctggcagcaagtagtagtaacaatttaggattgtggtgtgttgttgttgttgtagctatcagtaggtgaatccaaaaccctagccctcactctcaccaccattttttcaattcttgagctatgtttcagggataatagggcagggatgtacaaagaacgagagcgaggtggtgtttccgtttccgcctctaaatccgaggatcggaagcgaatcaacgacgttctcgataagcacttggaacgatcctctc

SEQ ID NO: 79667 - DNA, 251 bp, Glycine max
  Clone ID: 700962374H1
gtctctgtgtttgcggctgaggattccgaacgagcgaccttcttcgtttctcgcaaagtttaagtcatcatgggtaaggaaaagactcacatcaacattgtcgtcattggacatgtcgactctgggaagtcaactaccactggtcatttgatctacaagcttggaggtattgacaagcgtgtgattgagaggttcgagaaggaggctgctgagatgaacaagaggtcattcaagtatgcctgggtgcttga

SEQ ID NO: 79668 - DNA, 249 bp, Glycine max
  Clone ID: 700962375H1
gcaaaacttcagggatctgaattaaaatatggtccatatgaaaatcttcctccattttcatacctgccaatagttattcactttgagaataaccaaccctttgctgttgctaaagagttggttcgagagatcgaaatttcccattggggcaatgtacagatcacagagcattacgatattatccatgctggttctcagagcaaaggagaattttctaggcttgactatcagaccaggccatttttaaga

SEQ ID NO: 79669 - DNA, 159 bp, Glycine max
  Clone ID: 700962376H1
gtctaaaggcccacccacctctctctctccctctctctctctttacacacccacgacacaacagccaaatcctatttttcttttttgttttatcaaacaaaacagagaaaaaaaaggttgtgaattttgcagttgcgtgcgtttctgttccacacaaca

SEQ ID NO: 79670 - DNA, 256 bp, Glycine max
  Clone ID: 700962379H1
gtgaagatgatgtccggaaaatatacgtcgattgacgcgcagagcttcatagatctgttcctgccgttccagattcacgacccgccaccgtcaatttcgcagattcaaatcttcagacatttcctccatctggtcctctgggcaagattactgctgcttccgggcctcctcgtgacgctgatgattcattttcaaaacctgtatctggttctgatgaaccccagcagggtggttggtttcagacttttacaattgc

SEQ ID NO: 79671 - DNA, 259 bp, Glycine max
  Clone ID: 700962380H1
atttagcaatctgagattccattttctccgttgctcacaatggaaatggattcccttcccaacggcaacaacacctccggaaccccgatctccgccaccgccaccgccaaccccgcgcagctccgtcgtcgaaccttccccaactgacggagtctctgaagctggagcaccagttcctcagggtccctttcgagtactacaagaaaaccctccgtgccaaccaccgcgccgtcgagaaggagatgtccgccgtcatctc

SEQ ID NO: 79672 - DNA, 250 bp, Glycine max
  Clone ID: 700962381H1
agctagtttagttatctactcttttctgcatgtttgttctctcaacgactcctccgcgatagtagattattcaatattttggttgggttgaatcccggggttgaagcgttgcagacatcacggctattctaagagtgtctcgctccctcattcatgtccgatctgtacgatggaggacgggtagttgcgtaactgccgttagcccatcgcttcgtcgtaggcgtagttctgtgccttctgaatgtggtag

SEQ ID NO: 79673 - DNA, 260 bp, Glycine max
  Clone ID: 700962382H1
aaaaaaaaacccgaacacatagaaacagagaaagtgtgagtatcgtcgccgtagccctaccctctcttcatattcttctattgcctttctttaactccctcactttttcagttttgaagcgcttccagtggcgtatttacggttatacccttcttgttatgatagcttccaatcggcgtcagcacagagccgaagctcttggcttccacacatattttcggtcttgtcgattgagatacaaagccgccaagccagccgat

SEQ ID NO: 79674 - DNA, 236 bp, Glycine max
  Clone ID: 700962384H1
cttttcttttattcctctctaatttctttttctttttcatggaccgcagatacagagactatcaccatcgtcctgctcatttggcacatgcttctccccctgaatactttgtaccgcctggagaacacaacttacaaagacgatctatatttaaggaagaggacaaggatgcgtcggtggctttgttcgtacttggtcaggttggaaggagtccttacccattcaatatgagaaat

SEQ ID NO: 79675 - DNA, 255 bp, Glycine max
  Clone ID: 700962385H1
gaaccggaagaggaaaaactagaaaagatcccaacagtgagaagcccagtgattttgtttaccttccgagagatgaagcatttggtcacttgaagtcatcagattttctcgtatatggaatcagatcagtggctcaagacgtgttgcccgtgttgactgatgcgtttgatggcaatcttttgagccttgagtgtgataactttgctgaagtgcgcaaactctatgaaggtggagtcatactagttgaaagttttt

SEQ ID NO: 79676 - DNA, 251 bp, Glycine max
  Clone ID: 700962387H1
ctcgagccgagtcggctcgagatggcttctctagcaaccttggctgctgttcaaccagctacgatcaatggccttgctggacgttccctctctggaactaaactctctttcaagccctctcgccacagtgtcaaatccgagaacttcaggagtggtgccgtggtagcaaagtatggtgaccagagtgtgtactttgatttggatgatctgggcgacactacagggctgtgggacttgtctagctcagatgc

SEQ ID NO: 79677 - DNA, 241 bp, Glycine max
  Clone ID: 700962388H1
gtccactcttaacaactttgtttctgtaaatagaagaaatcgtgatagtgccattagagccttatctgaagtgcctgttcttagaaatcaagctcctcattgtcaattgaagactgcaaatactgaaacacaggacttgattacaagatcatcactttgttttgaccaaagtgatgaacctgctagggcgagtgagattgaatctttgaagcaacttaatcctgataatgtcttctacaaa

SEQ ID NO: 79678 - DNA, 246 bp, Glycine max
  Clone ID: 700962389H1
gcttcaacaagggtgtgatccaaggaggagacaatgtaaagaatagattattgttggagaccataatccgaatattacctttggatgtgggcagtgcctctttcagtttcttggggaagttattaagggtagctattcagttggaatgtgaagagttggagagatctaaactgattaggagaataggtatgtgccttgaggaggctaaggtgtctgatttattaattcgcgccccagttggtgatg

SEQ ID NO: 79679 - DNA, 250 bp, Glycine max
  Clone ID: 700962390H1
ctaatcttccctcttctctctccttctatttatccttccctccatcacagtaacaaccaccaccacctctgcaacacaacacacataacacgtaacaaagagaatgagagcgctaaattcgcacgtgctcctcgtagatcttcactcccaccatcacgtgcccagctcaaccctctcctacctcagaaactcccgcttcatatcatcactccgtcgacgctccccaagaaccggaatccgatgtacggcg

SEQ ID NO: 79680 - DNA, 251 bp, Glycine max
  Clone ID: 700962391H1
gccaatgataacaagcaaaacatagatgacaaagatgaagatcttgacggcaagaaatgcagttctaattatgaagcgatgcagaaaaacctgctatttgtagaaaataacgagggactgttaaccatagggcttggacaaggaaagcttaagactcatcgaacaggttttaaaccctacaaaagatgttccatggaggccaaggaaaatagggttggagcaagcagcaatcaaggtgaagagcaaggttg

SEQ ID NO: 79681 - DNA, 251 bp, Glycine max
  Clone ID: 700962392H1
cacaaaccctcccctcacactctccaaaccctagcggcactacacacgttatctctctctctctctctctctctccctctctccttccccaagatgtcgagcgccgatcccgagcaccgagaagaggaggaggcacccgccgtcggcgacgacgaggacaccggagcacacgtcgctcccatcgtcaagctcgaggaggttgctgtcaccaccggcgaggaggacgaagatgcaatcctagatctcaaatc

SEQ ID NO: 79682 - DNA, 252 bp, Glycine max
  Clone ID: 700962393H1
cgtttccttcccttccctaacgatctgaggaagacaccaagcttctctccacgcccttcttgggtaatctgaagtgcagcgatggcggatggattgcactcgcggcatccatcagtagttcagaagttatctggacagtcttatttgttgtctaggcttgcccctactcactcaagaaactattccacaactggtagttacctcaatggaggcttgcagtcttcgggtttggttccagtcatggcacatgca

SEQ ID NO: 79683 - DNA, 254 bp, Glycine max
  Clone ID: 700962394H1
gcaagataaataagaggagacaagaacaagcagctgaaaatggaatcattccccatttgatgctattcatcacatcaaattctcccttgaaacagtatgcattgcctctgctatgtgacatggctcatgcatctcgcaattcaagggagcaattaagggcccatggcggtttggatgtctatttgaaccttcttgaggatgagctttggtctgtgacagcactagactctattgctgtttgtttagcccacgac

SEQ ID NO: 79684 - DNA, 252 bp, Glycine max
  Clone ID: 700962395H1
ctctagtggtgctaaagtcgaacttaatcactctgtttctctcgataccgttctctatctatgcccatctcttcaggtaagcatttatttctgtttgttgtttatatgtcgttttacaccactttctgctctcatactcgttcatcgatgggtataaattagtgtgttgaaattgcaaaacagaaaatgaaaaactggtgttgtgaattgaggcatcgtaaattgactctttaagttgtcctcaatgaccaa

SEQ ID NO: 79685 - DNA, 126 bp, Glycine max
  Clone ID: 700962396H1
aacacatacattgtagtatcacttttgtctcggaatttgttcttttgagttatggcaagcttaaaggttgcatgtgtggttttgatgtgcatggctgtgatgagtagcaccacattagtggtgcaa

SEQ ID NO: 79686 - DNA, 238 bp, Glycine max
  Clone ID: 700962402H1
gacttcttccacgacgtcgtccacgtcatcttcttcctccgtggcttcgcctgcttccggatgctccaagcaaacgctcatggaagccgcatctgcaattgttgaaggtaaacacgatgttgcggcggagatcctaaccggttgaacggtgtgaaccggagtgataggttgacggattgcatggtttcggcgttgaaatcgaggatgaatccggtggagtatcctccgccggtggcgg

SEQ ID NO: 79687 - DNA, 237 bp, Glycine max
  Clone ID: 700962403H1
tttcgaactccactagtgtggctgaagtgttctccaggattgatcataagtttgacctcatgtatgcgaagagggccttcgtgcactggtatgtgggtgaaggtatggaagagggtgagttctcagaggctcgtgaggaccttgctgctcttgagaaggattatgaggaggttggtgccgagtctggtgatggagatgatgatggtgaaggagatgatgattattagagtgtctgaa

SEQ ID NO: 79688 - DNA, 235 bp, Glycine max
  Clone ID: 700962404H1
cgatgatggggaaggacccagcaaccgaacccataagcgacgcagggaagaggatgatgatgatgaagaagaagagcaacaacaacaacgaagctttgaaatggtggacccttcaattggaactcaggagcaagagatcacgctgctccaccccacgatggatcgaattctaacgcaaatggggctggaaccagtagcagggataggtccgttccaatcttcgtttccgaccctg

SEQ ID NO: 79689 - DNA, 237 bp, Glycine max
  Clone ID: 700962405H1
ttcatccacttagagagacattgtggttacccatagtctcatatagtgtcatacagcaaaaaaattcagcaacacaaaacaatgggttctcttatggcaggatggtattctacccacatggatcctcaatcagcacacttaaaaggaaccgctcactcactaaggatgaaattgatgcttactggaaatcaaagaagaagatagaggaagaacaccttagagctatttccaatgtgt

SEQ ID NO: 79690 - DNA, 234 bp, Glycine max
  Clone ID: 700962406H1
ttattattattacattgggttttggtgggaatcgctcgccatgaatggcgaggggagtgaagcaatgcaagtggagatggagattgagaaggagaggttggtgtacatgtggggttacctttccggagctctgcgcagaggacgccactgttgacgccggttctcgttagggttccgccctctggttactcttggaaggatgtttgcggtggtggttgtggattcgccatggct

SEQ ID NO: 79691 - DNA, 234 bp, Glycine max
  Clone ID: 700962407H1
ctttccacttgtctccgaattagttatcttgagaaacattattcccattgctatatattatggctagcatgaaggttacatgggtggttgtgatcatgtgcatggccgtggtgggtgcaccgatgatggcgcagcatgacatgcaatgatgtgacggtgaacatggcacagtgcctatcctacctgatgcagggaggaacaccttcaacactctgctgtcaccaccgttgacaa

SEQ ID NO: 79692 - DNA, 239 bp, Glycine max
  Clone ID: 700962409H1
ggcttctcaagttcttcttcaacaggcactgtttgcccccaagctaagtttcccttcttcttctcgtaacgtcgcgttaatttctagggttccttccaccccaatttcatggcgttgcactcctctcattgctaacctagtttcgctgtgagagctgactccaacgtcgaaggcgctggtgaagccaccgaggatgttccttcgtataatgttgatgaagtttcggaaggcgaaggaga

SEQ ID NO: 79693 - DNA, 240 bp, Glycine max
  Clone ID: 700962412H1
tagtactctcgttaatttttttgctaattgctaattgggcacaatggaaaagcttcatgctgtgtgcatcccatacccagcacaaggccacataaacccaatgctcaagctagcaaaactccttcatgttagaggttccacatcacctttgttaccacagaatacaaccacaaacgccttctcaaatcaagaggttctgattccctcaatagtgtcccatcatttcaatttgaaaccatc

SEQ ID NO: 79694 - DNA, 240 bp, Glycine max
  Clone ID: 700962413H1
gtggttgccactgctcctaagttcgatgggatcacccatgttggaggtgacatgttcgtgtccattcctagtgctgatgctatttacatgaagtggattctgcatgactggagcgacgagcactgcatcaagatctgaagaactgcaggaaggcaataccagagaagacaggaaaagtcataatcgtggatcacgttcttcgacccgaaggcaacgaactcttcacagacgttggcatcg

SEQ ID NO: 79695 - DNA, 241 bp, Glycine max
  Clone ID: 700962414H1
ctgcttaatcgaactattcagattctaaaaaatgagttggtggtgggctggagcaatcggtgctgccaagaagaaattcgaggaagaggaaccgccgcgaacttccagagcgtgggcctggtgatcggcgtgacggcatcgtgggcaacagcctcgccgagatcctccctctcgccgacacccccgccggtccatggaaggtctacggcgtcgcacgccgcccccgtccgccgtggaacgc

SEQ ID NO: 79696 - DNA, 243 bp, Glycine max
  Clone ID: 700962415H1
ctcatagtaatgacccatatgtagatgactattaccaccaagcttgtctggcaaaaaaacctaatgtggctaagttaaaacatccattttgcccaagccaaataagggaatatcctccacgatcccgtgctaatactagccacattcatttgttcagattgatgccctagggagggtttcattttcttctattcgctgtcctcgccctcttcttgaggttgaccctccaaacacttctagctc

SEQ ID NO: 79697 - DNA, 242 bp, Glycine max
  Clone ID: 700962416H1
aataattgtcggtggcaggatggaaatgcagccacatatttttatggatccttttgaagaaatggggatgggtgcaaggtttgccgagcaacatcgaagaagtgctgctgaaaaggaggcttctgaaaactccggaatgtggatttacgacattttgcattttatgcatttgctggtcgatctggtgttgaacgatggagcagaaaaaatgagaacattgaagtgcattcttcagatgcatc

SEQ ID NO: 79698 - DNA, 240 bp, Glycine max
  Clone ID: 700962417H1
gcttctgactccgtgccctagcttcttcttcctcctcctcctctgccattgcagcaaggcacacacctcaggctccaacccatttcacgagggatcggattcgctcgccatcatggggaagaagaagaagagagtttcctcgaaggtgtggtgttattactgcgatcgcgaattcgacgacgagaagatcttggtgcagcatcagaaagccaagcactttaagtgccatgtctgccacaa

SEQ ID NO: 79699 - DNA, 244 bp, Glycine max
  Clone ID: 700962418H1
gaggaaaagaagaggaaaaggagagtggagaggaagaaaaggattgaagttgttgctgtgagaaagagaaagagtgaaatcggagtttgggaaggaattgcaatcaatggatgtgataaagacgcagcaaatctcatctcgaccaatcgagaaggtggtggttcaccctctcgtgcttctcagcatcgtcgacaactacaacagagtcgccaaagacactcgcaagcgcgtcgtcggcgtcttg

SEQ ID NO: 79700 - DNA, 236 bp, Glycine max
  Clone ID: 700962421H1
atagatcgctgctgtgtttgtcttagtgtgtttgttattcactatcgtcattcctgttcctcaagctttgtagtgagcagatataatggctgttgaaaggtctggaattgccaaagatgttacggaagtgagttgtgtaccatgatgcccatttctgcatgctttttcattctgtgttttgcccctgatgatagtgtttctttctagattatgtactgttgtctgatgtgtgtttt

SEQ ID NO: 79701 - DNA, 235 bp, Glycine max
  Clone ID: 700962422H1
catcaatcaacttgagcaaatgcgacctgaccacatgaggaggcttaacccaactccatataaggttagtgttagtgcaaaattatacgacttcattcatttcctgtggctcaatgaggcaccagttggggagtacagtaaggcaaataaaatggcggcgtgccttcagaacccaatgggtatggcaaaaaaaatgttcagttcacgggaaatttctccatacagtatttttttt

SEQ ID NO: 79702 - DNA, 127 bp, Glycine max
  Clone ID: 700962423H1
tttctcccttattattattattattatttaattgggaaaacaaatcaaatttcttcatagcatcacttactttggttcagtgggaagcattctttcccttgtagcaatgtatcattcagttatccct

SEQ ID NO: 79703 - DNA, 239 bp, Glycine max
  Clone ID: 700962424H1
ccttaaaaaccaacacggttttctttttggtttggcaacatagcaccaaaaccctaaacccttcttctctgatatttaaaaacctatcttgtcaccacattcacctttctccatttcctttctgatcaatcaatccctcttctcttccggccatggcctccttgctccgctctctccgccgccgtgatgtcgcttccgcctccctctccgcctatcgctcgttaacgggcagcaccaag

SEQ ID NO: 79704 - DNA, 239 bp, Glycine max
  Clone ID: 700962425H1
ctttctttctttctctggctcttaaaaatgggcacaccaaacccaacccaacccgacgatgggccctgacccacttcgccggcaatgggaaagcccggagaacaccaccctctgccctcctactccgccgccgagatcagcggcggaatgcggcgcctccgccgggatgcgccgtcggactccgatgccttgtcgtcatgcttttctcggtcgcggttttcctctccccactcttctgg

SEQ ID NO: 79705 - DNA, 238 bp, Glycine max
  Clone ID: 700962426H1
ataaaaagaaaaaaacatcactcaaactcactcattttttttctcaacttctctttctttctttctctggctcttaaaaatgggcacaccaaacccaacccaacccgacgatgggccctgacccacttcgccggaatgggaaagcccggagaacaccaccctctgccctcctactccgccgccgaggatcagcggcggaatgcggcgcctccgccgggatgcgccgtcggactccgat

SEQ ID NO: 79706 - DNA, 238 bp, Glycine max
  Clone ID: 700962427H1
aagcttccctcttttttcttctctttctgtttgttctctccataaaattccagaatttaaactctcacacaaaaaatcataaacaccccaaagtagcagtacgtgttgcactagtaacatcttttttatgggaatatatgcttttttttcctgttgaataaaattaaacaagaagagggagcagatgcaattcagttaccctgacagttttcagatcaccacttctttttttggcttt

SEQ ID NO: 79707 - DNA, 243 bp, Glycine max
  Clone ID: 700962429H1
cttgttcttcttccttctcttcatctgtctctacccttctacgcaactttccttcatagtctattgagcttccaaatattctcacggcttgctatagtagttgcaccctccaaacacaaactgattcccttgtcttttcatctaattgcttggtctttaatggacgcgctttaactttacgcacggaaactgataaggttcaggtacttgtaagagaacatactgtaaaactaaaaggaaaaa

SEQ ID NO: 79708 - DNA, 242 bp, Glycine max
  Clone ID: 700962430H1
atgaaaatgggttcttctttgtggactttgtgtctaattttggcttcactagcctcttctgcattctgtgcctttccacggaggccagtggatgttccattcggcagaaactacgttcccacttgggcttttgatcacatcaaatacttcaatggaggttctgagattcaacttcatcttgacaagtacactggtactggcttccagtccaaagggtcatacttgtttggtcacttcagcat

SEQ ID NO: 79709 - DNA, 243 bp, Glycine max
  Clone ID: 700962432H1
ggctatttgaacacggctcctgttcgatcagcaattagttatattgatggtgatgaggggattcttagatatagaggctaccctattgaggagttggcagagaaaagcactttcacggaagtgtcctatctcataatgatggaagtttgccttctgaaagtcagttagcagaatgggagtatagaatatctcagcattcggctgttccacaaggaattttggatatcatacagtctatgcccc

SEQ ID NO: 79710 - DNA, 234 bp, Glycine max
  Clone ID: 700962433H1
gttgtctccttgaatgtaaataacttcacaaccacgccaaccttggctggtcaatgggacacaaaaataagcattgacaacccgaatgacaaacttgtcgcttatttttccaacttcaaggttgacgtggcgtacaggatggcgttatggcaattaatcatgcgcctgggtttgtgttgaatacaaatgatcatatggatgtgaacgtggcaggtttgtctaactaagggaatg

SEQ ID NO: 79711 - DNA, 229 bp, Glycine max
  Clone ID: 700962435H1
ctcgagccctcgagccgaatcggctcgagatttcaaaggaggctcagaatagctggtcgaaccgccagcacagatccacaaatcggaaagaatcagagcgccgtcaaaaaccgccgtccacggcgtgaaactcgccttcgaatccagagcctctctcggttcctcactcttctcacatcgagcgcaacgccaaaaaatcgaatttcacgatggaagagttggagcagtg

SEQ ID NO: 79712 - DNA, 233 bp, Glycine max
  Clone ID: 700962436H1
ctctctcagctcaggagtgtataatctgagcgatgtcagatcttgaggctcccttgcgccctaagaggaagaaggtttgggtggactatttcgttcagtttcgatggatccttgttatttttgtggtccttccatctccttcaccatttatttccttacataccttggggatgtaagatctgagtggaagtcctataagacgcgtcagaaggaacatgatgagaatgtgaaga

SEQ ID NO: 79713 - DNA, 228 bp, Glycine max
  Clone ID: 700962437H1
caggcaagccccactcaaccaccacacctctcctcgttcacgctacccctttctgctcttcttctacctttcaagttttaaaagtataaagatggcagagacattcctatttacctcagagtcggtgaacgaggacaccctgacaagctctgcgaccaaatctccgatgctgtcctcgacgcttgcatcgagcaggacccagacagcaaagttgcctgcgaaacatgc

SEQ ID NO: 79714 - DNA, 235 bp, Glycine max
  Clone ID: 700962438H1
aaaatgtcaatcaccttgcgaactccgccttctacaactctctcttctgctgcatcttccattcacagaacaagatccaccaccttctccttctcgctttgttccccaccaactcttcgcgtcaattcccacgctccctctctcttactcgcgcttccgcttcctctatcactaccgcttcgaccactgagctggacgctgtgtcctccttcagcgagatcgttcccgacaccgt

SEQ ID NO: 79715 - DNA, 235 bp, Glycine max
  Clone ID: 700962440H1
ccatattattactattaatattttttggggttgtttttatgcccatgatcttaaaggcccagttagtaacaggccgtttctatggtatcacgaaatgtttatggattttgttgggctgggcctggctgggatgaccgagccttgtctggcccaatctatcaactgaattcatgctcacttctgatgagttgcggacttgttaacacaaacaggcccattgagcattaccacgcta

SEQ ID NO: 79716 - DNA, 126 bp, Glycine max
  Clone ID: 700962443H1
gttcctcttgaacaaccatgttgatgttacctttcttctgttcctgtggctgtttggaattggatcctcatcagcttctatttacaacgctaattactgcccaaacaacacatcgtacaattccac

SEQ ID NO: 79717 - DNA, 239 bp, Glycine max
  Clone ID: 700962444H1
gcacaggaaaccttccgggaccgtcttcccgaaccggccagctcctcgacagatttgccggcagaaacttcgacgccaccgacgtggtcgcgctctccggcgctcacaccttcggacgggcccactgcgccacatcttcagccgcatcaaccagacggacccacccatcgaccctaccttgaacaacaacctcatcaaaacttgtccctcttcccagtcccccaacacggccgtgcttg

SEQ ID NO: 79718 - DNA, 240 bp, Glycine max
  Clone ID: 700962445H1
gggtggtgcctctcttccatctccccagccaaatcctctctcaagaaggccacattaggcccttctgtcttcgcaaccgttagcactccttcttctccttcttcttcttcttcttcttccttcccttctctcattaagacaggcctgtctttgctgcccctgcccccatcatcaccccaactgtgagagaggatatggcaaaggaatacgagcaagctattgaagaactccagaaattgt

SEQ ID NO: 79719 - DNA, 88 bp, Glycine max
  Clone ID: 700962446H1
actcggtatttctcttcctctaaagaccgagtccgactcggagggcgaagaaggcaaactcagtaacctttccttccacacaacatag

SEQ ID NO: 79720 - DNA, 242 bp, Glycine max
  Clone ID: 700962447H1
gggaatatccccaactcgatttcttccctggcgccgaaactgacgtacttggatcttgggcacaactcactttccgggaaaatccctgattttctgggaaaattcaaggcgcttgacacgcttgacctgtcatggacaagttttccggaacggtccctgcgagtttcaagaacctgacgaaaatcttcaacctgaacctctccaacaacctcctggtggacccgttccccgagatgaacgtg

SEQ ID NO: 79721 - DNA, 240 bp, Glycine max
  Clone ID: 700962448H1
gtaggttcgtataccaaaccagttgcaggtgccactccaggatatgcatcagaggtgatctttgctgatggaaccttcattgatgggagtacaagtgagctttcatgtgatggaccacttagagagccatttactgattttgccagggtggcacccattggactcaatggggactagtcctatgagaagttttgaaatcattatgatggaatataattttcaatcagaagtttatagaaa

SEQ ID NO: 79722 - DNA, 101 bp, Glycine max
  Clone ID: 700962451H1
gctacaatgtccaaactggtagtgctggagattggggtagctacttctactatggtggtcctggtagaaacccaaattgcccttgatcattcatgttaatc

SEQ ID NO: 79723 - DNA, 235 bp, Glycine max
  Clone ID: 700962452H1
cttggatagatacaaagatgttttttttaagggccaatttgtttacttcagttacatactatcaaagttagagaacgaaggaacttttgtactttctctggggtgtgtgtgtgtgcctgtctcacaccacaacactgaaagtacaatcttcttgtggttacaaaaactctgaaaaacacacacacacacacacttcttatgcctatggctggtgagcaaggtgatagattctcct

SEQ ID NO: 79724 - DNA, 235 bp, Glycine max
  Clone ID: 700962454H1
gaaggcttcggcaatgctcctcaagtacttgaaatggagaaattcatttgttccaaatggctctgtatctgtgtcagatgttcctaacgaacttgcacaagataaggtgttcatgcaaggacacgacaagataggtcgacctatacttatggtcttcggtggaagacattttcagaacaaggatggtcttgatgaattcaagcgatttgttgtttatgttcttgataaagtatgt

SEQ ID NO: 79725 - DNA, 234 bp, Glycine max
  Clone ID: 700962455H1
tggatagataacatcctatcattttgaatgcattgatgttgttttgttagctaggagcttctttgctttgatgtaaggtgtcaatggctttttgtgaatcaagactcaataaaatcattcagccaaaaaaaaaaaaaaaaaaaaaaaaaaaaaaaaaaaaggggggggcgccgcattggggactcctccccccgggaatttattccgggccgtgacttcggggggaaacatttt

SEQ ID NO: 79726 - DNA, 238 bp, Glycine max
  Clone ID: 700962456H1
caattcttccccctccacccacccagcatatctctctattcctatttattagcacccctcacattaccttgtgtcaccaactactttgactcctttaccataccattacaataattatcaaacctaaccagtaaaatggtgaccgtggaggaaatccgcaacgctcagcgttcccatggacccgccaccatcttggccttcggcaccgccacgccgtccaactgcgtctcccaagccg

SEQ ID NO: 79727 - DNA, 238 bp, Glycine max
  Clone ID: 700962457H1
ggcatttttgttggttcgagtgagcgagggaagatgtactctagagattcatggggtggtccgttggagataaacgcgacggactcggcaacggaggacgagcggagccggaacctgcaggacgtggacagggcggcgctgtcgcgtcccttggacgagacgcagcagagctggctcctaggccccggcgagcagaagaagaagaagtacgtcgatctcggctgcatcatcgtcagcc

SEQ ID NO: 79728 - DNA, 236 bp, Glycine max
  Clone ID: 700962458H1
accaaaactgacgcttttgttattcttcgagtctctgagagagatgtgtggaggcgctatcatctctgacttcattctcctttttgagacttctaatatcctcagggttttttgggagaattggctaaaaaagggtctaccacagcgaaatctgtggcattccaagttcgagctgagaaatttgcaaataggaagaggaaaaatcagtataggggaatccgtcaacgcccttgggg

SEQ ID NO: 79729 - DNA, 240 bp, Glycine max
  Clone ID: 700962460H1
aaatgagggaatgaagactattagctcattctctgaatattctgacatccgccaccgccacgtgtcaacctaattgggatccacattcttcttccttcttcagctccacgcgccctctttccctttcctgtttcagctgttaccgacgtcaattgttactccgattatttattcttatttattttccccatctcactctccttcgattcgggatcactcacaacacaagtactactacct

SEQ ID NO: 79730 - DNA, 240 bp, Glycine max
  Clone ID: 700962461H1
atgctataggccttgatgttatttgggatgtggggttttgggaaaaacccaactgaaaaattgaatctttttctccaaactggtcctgagaaccttcacaaaggtatagaattagcggaagcagagacaaagaaagagtcacatgcatcattgcagatgctttagtaacctcttctctcctagtggctcagaccctcaatgttccttggattgcactttggcttcccaattcatgctcac

SEQ ID NO: 79731 - DNA, 241 bp, Glycine max
  Clone ID: 700962462H1
atgtttcacaaccttagcaaaaaagacatctatgataatcaatctagaactgcttttaagactatgtggcaaggcatggatggactaagaggtccaggtctttcaggcagcggcaattacttaagtagaagtgcttactatttggaagtccaaaccaaaaagacgactatctgaaggatgcacaaaagtactttggcaagtctaccgcatacattgaatcactgaaggccatccgtggaca

SEQ ID NO: 79732 - DNA, 243 bp, Glycine max
  Clone ID: 700962463H1
cagatgtcctgttcgagccattatttctattacaaaaacatcaccacataagctgggatttgatttgcataatcctccttcccctccagcatgtaatacaacttctggactgacctggattcaccctaatgtaaatagttcttccaattgcttggttaacacatcaacccatgtttctgatacaaaaccatcaccacataagcttgggtttgatttgcaaaatcctccttcccctcctgcttg

SEQ ID NO: 79733 - DNA, 234 bp, Glycine max
  Clone ID: 700962466H1
ctcgagccgcttgcgaagaatctacaatgaatcagcaactcttgattaatgagctccagaagcgagataacatgattgagcatttgcataaggcaaagttagaagaggctcagaaaagacagattgaggtaatcggttcgagaaggaactttatatgatgcaaagtcttgttgatggctacagaaaagccttgaaagaaacacggaaggcttttgctgaatatagagcacaatg

SEQ ID NO: 79734 - DNA, 232 bp, Glycine max
  Clone ID: 700962467H1
ggaagaagctgtgttatgtccaatttccacaaagatttgatggtattgatcgccacgatagatatgctaaccgaaacacagtgttctttgatatcaatatgaaagggcttgatgggattcaaggtccagatatgttggtactggaactgtgttcaacaggcaggcattgtatggctatgatccaccagtatctgagaaaaggccaaagatgacatgtgactgttggccatca

SEQ ID NO: 79735 - DNA, 230 bp, Glycine max
  Clone ID: 700962470H1
acagttattccgtagatttgaagaaagaccttttcctccaattgcagagtcaaagtttaaggcctaagttctctcaactctcattcaacccacttccaccatcaacttcttccttttcttcaccccgtacttcacaaccctggctctcttcatctctaagacataagccgctcctgctaagactaaggttacaaagccaaagcaaaaggttgaagatggtatctttggca

SEQ ID NO: 79736 - DNA, 234 bp, Glycine max
  Clone ID: 700962471H1
gctctctctctcaatttcccttcactctcacgcgccgccgtggtttccgccggcggccactccctatccgccgcgcatccatcccgcttccctctcctcgcttttctctaaaaaaaattaaaaatttctctgaagaccgtgttatcattatcgttccctgagttaggttttctgttcttcctagggtgtttttattgtgtccaataacaagaggagggggaagagaaacaagca

SEQ ID NO: 79737 - DNA, 231 bp, Glycine max
  Clone ID: 700962472H1
cctcctcattaagccgccactttctctctctttccttttcgtcttctttttcttcttcgttgggtttgttgccacttagtaagaaagagggtgtgaagagagtggggagaagatttggtgttgtggccatgcggagtctaagagtactgtgcttgttacgggagcgggtggtcgcacaggacaaatagtttacaaaaaattaagagagaggccaaaccaatatgtggctag

SEQ ID NO: 79738 - DNA, 236 bp, Glycine max
  Clone ID: 700962473H1
ctcgcccgcaccgtccagatcgtaatcaagagaagaggagcgagttctctttttccttgcagcccaagccatggcgcctctgatcctgcatggtggaaaaaccaacaaaaattcttacaagacactcattgcggcggagtatgccggcgtccaagttgactttgccccaaattttgagatgggtgtctccaataaaactcctgaatttctcaagatcaatcctattggcaaggttc

SEQ ID NO: 79739 - DNA, 235 bp, Glycine max
  Clone ID: 700962474H1
agtgagaagagaaaaatggcaatctccatacccagtagacaacttttcatagatggagagtggaaagtccctcttctcaacaatcggtttccgatcatcaaccccgctactgaagacatcatagggcatatccagccgctactaaggaagatgttgaccttgcggtggatgctgctaaaagagccttttcccataacaaaggcaaagattggtcttcagctcctggctctgttcg

SEQ ID NO: 79740 - DNA, 235 bp, Glycine max
  Clone ID: 700962475H1
tgtcactgaaatctgctacatctagagttcactgatatctttactaacaatcaaccggccacatgtattgcaaaaagcaattcaatttatgaatcaacaaaatagactgaaggaaaaagctgtcatcaaatgtaattcaatcaaatgctgatatagcacataatatcagctaccaattcctcttaccttgtctacagtttacttgtacttttattagtctacaattttttgctta

SEQ ID NO: 79741 - DNA, 237 bp, Glycine max
  Clone ID: 700962476H1
ctcgagccgctcgagccgttgcttttcttaccatctccttcaattctctctcactctctttattctctcaacaaaacctttcacccaatatcctcaaactactacttctgataaattgctaatttttataaactagctagagatgatggttcaaaaggaagatttgggtttgagtttaagcctcaacttccctcatcacaataccccaaatcctcaacatccgagtctcatgtcatc

SEQ ID NO: 79742 - DNA, 237 bp, Glycine max
  Clone ID: 700962477H1
ctcacttttttcagcttctctaaattctctgtctacttcaccaagcactttttgttgcagctttggttaatttccaatatggtgtttcctctcctatctatctttgctttactcaatctttcagtggtggcaaccatgcagaaaccttgccccctgaagtttactggaagtcgaagcttcccaccactccaatgccgaaagccattacagatatccttcacccagatttggcagaag

SEQ ID NO: 79743 - DNA, 241 bp, Glycine max
  Clone ID: 700962479H1
ggactgaatgaactaatggagtctaaaggtgggaaaaagaagtctagtagtagtagtagtaaatcattgttctacgaagctcccctcggatacagcattgaagacgttagaccaaacggtggaatcaagaaattcagatctgctgcttactccaactgcgctcgcaaaccttcctgatatccatccagattgatagttcattgcatgcaaccatagttttattaggttttttcttctttgt

SEQ ID NO: 79744 - DNA, 238 bp, Glycine max
  Clone ID: 700962480H1
aactaagtcttccaattttggaacgtgtgaagggacctctggagaaggcacttgctgaagcaggtcttaccgttgaaaatgtacacacagttgaggtggttggttcaggttctcgggtaccggccattaacaaatattgacagagtttttcaaaaaggagcctaggcggacaatgaatgctagtgagtgtgttgctaggggctgtgcgttggaatgcgcaattcttagtccaacgttc

SEQ ID NO: 79745 - DNA, 234 bp, Glycine max
  Clone ID: 700962481H1
tcgacggcgacgtaaagaaactcgcgtccgttcccggcggcgtcgacgtcgttttccatccccgtaacttgtacgattacgggaagaacggtggtggtgacgtggcagaggctggtggaatggtgtcgtgcttgagagtgggtccgggcacgaaagttgggtgagggttgagaagctggaattggggctgtgtgggaagagcaggcccgttttcttcagaggggtggcgactgt

SEQ ID NO: 79746 - DNA, 234 bp, Glycine max
  Clone ID: 700962482H1
atttgtaaaaagaagagaagaagaagagatatctgaaaaagggggttctggtggattgaattgcattagcaatgggcgtgtcttcaaattcaaaggaatcgatggaactatgcatatttgatttgaggagggccaacacgaaggccaagagctcgataagatcctcttcttcttccccgccggtttgcccttctcaaagcaactctccgtcattggcctcagcgaaggactcat

SEQ ID NO: 79747 - DNA, 230 bp, Glycine max
  Clone ID: 700962483H1
ctccatatggccactcttcttcttcccacgctcctccttctcatacccttcgccaccctcgtctccgcccgccctcacctcgccggagactttctccgactgccctccgaaaccgataacgatgacaacgccagggcacccgctgggccgtcctcctcgccggttccaatggctactggaattacagacatcaggctgatgtttgtcacgcctatcaaatactaaggaaa

SEQ ID NO: 79748 - DNA, 230 bp, Glycine max
  Clone ID: 700962484H1
gcaggaacagatttatcaaattctctatgttcatactgctctccagatcatggctctgggagtggtgggcacggaagctcaccacaccactctcaacatggaacaccctctcatcatggatctacatcactggaggtggtggaagtcacaatccaaccccatcaactcccccaggtggtggaagctatgatccaactccatcaccaccctcaggtggtggtggaagttac

SEQ ID NO: 79749 - DNA, 232 bp, Glycine max
  Clone ID: 700962486H1
atgaagctctcacctccatccttattgatgcctttgaggttggctacagacactttgatactgcttctctgtatgaaagtgaggagtctctaggcaaagctgtggcaaaggccttagagctaggcctcataatagcagagaggaattattcatcacatcaaaactatggtccactgatgctcatcctgaccttgttgttccagctcttaagacctccctgcagaagttggga

SEQ ID NO: 79750 - DNA, 234 bp, Glycine max
  Clone ID: 700962487H1
gtgacacaccaaatcaaagacacctgagccattcaattcccctcctttattgctttcaagtttcaacactaattttattatctgaaaaaatggctttcaaagtttcgtttttccttgcacttgttctagttccaatatcctcctccttgatacaacagctgctggacgcagcattggcgaaaactccaactcagaggaaaagaaagagcctgagttcttgttcaagcatgaagg

SEQ ID NO: 79751 - DNA, 235 bp, Glycine max
  Clone ID: 700962488H1
gcgacgacgatccaagtgatagacactcgtcgcgatggaacgtgtagctgaatccgagcgaactctgtacccatacgtgactggatcctctgtagtcgctatcaaatacaaagatgggattctaatggccgctgacatgggaggttcgtatggatctaccctgcggtacaagagtgttgagcgtatcaagcctattggaaagcattctcttcttggtgctagcggggagataagt

SEQ ID NO: 79752 - DNA, 234 bp, Glycine max
  Clone ID: 700962489H1
accaaagtagaacttaaatccaggttttcggagatgacatttaacactataatgaggatggtgtcagggaagaggtactatggtgaagactgtgatgtgagtgatgtacaggaagcaaggcaatttagaggatcattaaagagttggtgacgttaggaggggctaataaccctggggacttcttggctttgcttaggtggtttgattttgatggtttggagaagagactaaaga

SEQ ID NO: 79753 - DNA, 235 bp, Glycine max
  Clone ID: 700962490H1
caataaacccctttctctcaattttcattcaacaccatggcaagaagaaccaagtccattttcttcaccttcttattatgctcttgggtggtggtagtagtagcccaagaggtagcaattgcaaaatccgaagtgaagcattaggggaaccggaattagaaaaaagagaaacacttgaaatcatcattggtggtggtggtggtggtggttaccctgctccttctccttctccatc

SEQ ID NO: 79754 - DNA, 235 bp, Glycine max
  Clone ID: 700962491H1
ggtcctgattttgtactattatgtacactctctattggactttcagacatttctagctgtgggtgatgactctcattttcattaacactgtccttctcagcatcttcatcacacctgttaggctgttcagaaccccctgttgaactgtctgagaatctgacactacttcctcttcaattgatccttcagcttctacctcacgtttctgatcacaagaaattagttcatttcctgg

SEQ ID NO: 79755 - DNA, 234 bp, Glycine max
  Clone ID: 700962493H1
cttttcccttaattctctctctaaacatcacaatggagtatggaaggttggtaccctctgatcctggtggctcctcgcgcctcaacaacgttcctccgacatcttccgcctggaagaagattgtcttgctttactctttagcgtcttgttaatagccgcgtctgctgtaactgcagttgtcgtccgctctcgtattcaacaaaatacgagagcccatgagactaggctcggaaa

SEQ ID NO: 79756 - DNA, 237 bp, Glycine max
  Clone ID: 700962494H1
ttcaaacatcacaaacactttttaacgttgtttgattttggtgcaatctttacttcacaacttcctcgtacttctgagaatcatcatcaaaaaccccaaactcatgatcatgatgatgatgaataggttccttcactctttgtgttcgcattgttattcatgtggtcggttcacgcagacaatgctcctgccccttcacccaagtcatcaccctcgtcgccgacggccaaaccaccc

SEQ ID NO: 79757 - DNA, 240 bp, Glycine max
  Clone ID: 700962496H1
gtttgggattggagggattgacgctgcgtctcttcctcttctctttcgatccatccctcattcctaaccctccaatccaaccacctcagcctcacactcacatatacacatatctgaacgcgtatcgtccctccatggcttcaaagcgcatcctcaaggagctcaaggacttgcagaaaaccccaccaacttcttgcagcgctggtccagtagctgaggacatgttccattggcaagcaa

SEQ ID NO: 79758 - DNA, 262 bp, Glycine max
  Clone ID: 700962501H1
tagtgttacccctttctctttttctctctttcttgaatttggcgcgtgcgtttcgattcttcttccgaatcagagggattctggatttcttgttgaagatgcgacgctcttctgcatccaaaaagtcgggtcaatccaattccactcccaacgccgccgatctcttccgctctgcttcaagtaaggcaagctcgaaggaatcagaacgaattgatagtctattctattcatatgccaatgggtctaccgggttgattgaccc

SEQ ID NO: 79759 - DNA, 269 bp, Glycine max
  Clone ID: 700962502H1
cggctcgaggttagccaataatgatacttaccgttttgtgtaataattttaataacgacaggaaaaaatagtagaaagtggtaagaatatgtattgtcagactgcttccgtccagataatcttctaggcttctttttctacctcaatgttaagttgattgtggctgagtgtgacattgaatgttaataatctagccatatttctttctcagacccggctcaagtattcacctgataacctactatattgcagtattttttaatttagat

SEQ ID NO: 79760 - DNA, 259 bp, Glycine max
  Clone ID: 700962503H1
gtttgaggcggagaatagctccaacagttcccaaattggaaccctagcattcgccattgccgccacctttccccacgcagcttttgttgtagcaaaagattgatattttcttcttcgtctataaaacccacacgtcaagtcacttctttttaactcaattttcggtcccgtagctctatattttctcattcgcagacaagaaaaatccaagcctgtggattagaaaggggttcattttgctgattctctagctatggct

SEQ ID NO: 79761 - DNA, 259 bp, Glycine max
  Clone ID: 700962505H1
cgcgcactttctctcttctctccgcatctccaactctctctctcacacacgcactctgaaacaaaaaaatagaaatagaaaaaaaaaacaaaagttaaaaaaaaaggttagttattcttcttcaaccacgccatggagggtcttccccaaggttaccgtcccaacgttggtgtctgtctcatcaactccgatgatcagatttttgtggcttctaggttgaatgtcccaggagcatggcaaatgcctcatgggggaattg

SEQ ID NO: 79762 - DNA, 253 bp, Glycine max
  Clone ID: 700962507H1
cttttggttaggtaggttcacgggtaggcatttttatttgcacgtttctctggtgagggcaagatcacagaattggtgtgagagagatgggttcgtccgtgaagctttcaaggagggccttggaaactgagatgcccggtatggttcagatgcaggaattgcaacgaggagctaagaatgccctgtctttggcccagggggtggtttactggcagcctcccaagcaaacgttggaaaaagtgaaagaacctgt

SEQ ID NO: 79763 - DNA, 236 bp, Glycine max
  Clone ID: 700962508H1
aaacatttaacaccagctcagccagaaaaacatgccaaaaatgtggtattaatatacagaacagaactattatgttacacatgtatctaagaataaaattaaagaagtaagtaaatgtgtgtatgttttagttttagatggtaagttgagggcgtataatattctcgctataagtatagagaagaagatatagccactttattatctccccggtatagaggcacatgaaggaaggg

SEQ ID NO: 79764 - DNA, 260 bp, Glycine max
  Clone ID: 700962509H1
gaaagcagcgattttgaagtctctccaaaccattatggttgtactcctgctgatagtactctttagcagcaacaccaaagcagaaaaagaaacaatccacgaccatgcaaacagaaagacctacataatccacatggacgagaccatgatgcccttaaccttcaccgaccacctcagctggttcgacgcctccctcaaatcagcgtccccctccgcggagattctctacacttacaaacagttggggcatggcttctccg

SEQ ID NO: 79765 - DNA, 253 bp, Glycine max
  Clone ID: 700962510H1
aagatgatcaacattattggagcacttgttctactctttgcatttctcttcctcagttgtgtgtatgcacaagacacaacaacccttgtgcctgcaatcataacttttggtgattctgctgtggatgtagggaacaatgactatcttcccacccttttcaaggctgattaccctccttatgggagggactttgttaaccaccaacctactgggaggttttgcaatggcaaattagctactgatttcactgctg

SEQ ID NO: 79766 - DNA, 252 bp, Glycine max
  Clone ID: 700962511H1
atcacaaataactgcacctacacggtgtgggccgctgccgtgcccggcggcggcgcaaggcttaaccctggcgaatcgtggaacatcagcgtgacgaacggcacaacacgaggacgcatctggggtcgaacaaactgcaacttcgacaacgcgggacgcgcgaagtgcctcaccggcgactgcgagggtattctggagtgcaacaaaacaggtacacccccgaacacggtcgttgatttcgcgttgaaccag

SEQ ID NO: 79767 - DNA, 253 bp, Glycine max
  Clone ID: 700962513H1
gcttcttcataattgagtctgaaaggggttctctattggcactgaatgatatagagagagaattatgagttggttgaataaaaataaaagtacttgtagtgatggtagtgccaataatgaatcttcttcaagtggaatagttggagaaagggataatcatcttgatcatgaaattgcacagctcacaaaacttaggtcaagtcctcatgagcttttgggtcgtgttgttcctggtaagatgaggttacctgca

SEQ ID NO: 79768 - DNA, 253 bp, Glycine max
  Clone ID: 700962515H1
gccatttgggagttaggttctgcacgctctgcttccagcgagtgttctttcttcgtttcaacaccttaatttgcacacgctgcttcttcagcttgagaaatggcacaagaaacctttctattcacatctgaatctgtaaacgagggtcaccccgacaagctgtgcgaccagatctctgatgcagtgctcgatgcgtgccttgaacaggaccctgacagcaaggttgcctgtgagacatgcaccaagaccaaca

SEQ ID NO: 79769 - DNA, 254 bp, Glycine max
  Clone ID: 700962516H1
tgctgttcaagtccttgactctgtgaatatcaccttgggtgctgaagatgaactaagacatgcagttgcatttgttcggccagttagtgtggcctttcaggtggtgaatgggttccatttctacgagaatggagttttcactagtgacacttgtggtagcacttcccaggatgtgaaccatgccgttcttgctgttggatatggagttgaaaatggtgtcccatattggctcataaaaaattcatggggagaaa

SEQ ID NO: 79770 - DNA, 261 bp, Glycine max
  Clone ID: 700962517H1
gtcagaaccaaaatcatttctctgaccctcaatccaatcacaacaaccttatccaattgcctcgtttctaccaatacaacacaatcaactccttttatttatttctacccatttttctttttccttacattatttcatcggaaaaaacaaaagatacgatcttatgatgaggggaagaacaagacatgaagaagatgagcaatctcgagctttgtaccagctctccgcgctcgttctcaacctccttcgctcgcctctgtg

SEQ ID NO: 79771 - DNA, 268 bp, Glycine max
  Clone ID: 700962518H1
attcggctcgaggtgctacatgcaaagctgccgaccgtgtcacgctactatgttagctgcctttcgtggagactgtatgttggcattggaagaggggagttgttgccatcaaaggatgtgcgccggttgttgttacagacatggctgctgcctctgatgaatgactacaactggctgcagcatggatgcaggtcatttgataggaaacttgtggaggaaggaattgggaggactattctcaccttgcctcttgaggatcaacaaagca

SEQ ID NO: 79772 - DNA, 206 bp, Glycine max
  Clone ID: 700962519H1
gtgcattaaatttcccgaaaggctaaaatatccattgcacctttctcttcctccgatggctaatctctcactcttgttcttcggtctcctcctattctccgctgccgtagccaccgtcgaacgaatcgacgatgaagacaaccttctgatgcgtcaagtggtgccggacgcggaggaacaacagctgctcaacgcggaagaccaat

SEQ ID NO: 79773 - DNA, 253 bp, Glycine max
  Clone ID: 700962520H1
gtggaatgaatagcaataccaccggcgctgcagcaatgaacgaccagctctccaacaccacctccatcttcggcctccgcctatgggtggttctcggggtgtgcgtgggcgccgccatcgtcctcatcctcttcctcatctctgtctggctcgccttcaagcgctcttccaaaaccaaccctgtttccatccccgacgtctccaaagagatccaagaaatcaggctcgacaccaaccccactctccaacccga

SEQ ID NO: 79774 - DNA, 253 bp, Glycine max
  Clone ID: 700962521H1
gtttatgcattggtgattactgattagctagcagtagcatcgtccccttctccaaagatcgtataaccttcaatccatcttcatctccggtgagtcaagttgcagctactttggcatcgtattttctgggtcagttctgtcgaattccttggtccaagactttgcagctgaaccagcagcatggcgggtcagtcctccaatgaaggctccagtactggaaacatttcagcagaatgttccgattcaactgttc

SEQ ID NO: 79775 - DNA, 257 bp, Glycine max
  Clone ID: 700962522H1
cttcttcctcctctaaccttacatttagcctttctttcttttctatgttctctctatctctcattctcatctcactttcttttctttttcttttcttttcccgaatctgaatttttccctacaaaatccactcactgtcctcaaagacagatccgaaagtggatgccaaatctatcacccctcgtcgcccgagattatcgtacccattagattcttcttccctcttccttctacactttcccaaattttcacactat

SEQ ID NO: 79776 - DNA, 254 bp, Glycine max
  Clone ID: 700962523H1
ggctcaaggctggaaagcaaagtcaaaaactttggaagaagttctggaatcaacttctaaaatggaaccaaaacttattggctatgatgagactcccattgatgtaacagataccaataaacacatagtggttaatgcagacccatacaacaagtctaacccagaaattcgccctatgcaagagacagatgaaatatgctctccatgtgtgaaacctttcggccaacggcttcaatcttctgctaagggaaagc

SEQ ID NO: 79777 - DNA, 256 bp, Glycine max
  Clone ID: 700962524H1
tctcaacttcctttcaattttcttatttccatcataatttcactgttgttctctgaaagcttctttggttcgttttttttttttcctcgcaacctcttgtttttggcttggcagcggttggatgtttcttctccttggttattatttatcctgtgaaagatttgatttttaaggtccgcaagagttctttttgtttaaaatacaagtgagtattctcaattttgtttctgattacttttttatgcctttctggctt

SEQ ID NO: 79778 - DNA, 250 bp, Glycine max
  Clone ID: 700962526H1
ggcgctcaacctacaggaactgttcaggacatttcaaaaagggctggtgtttttatggaacttagctcgaatcaacaaacgaaattccattaatgaaataaaaaaaagggggtgtggatgacttgtatatagatttctaaaactcttttctcttttatccccccgctctcttgttctattcatacctaatttttgctaattccttgtggttatataagatgataggatgtagtttctatacccagaaaag

SEQ ID NO: 79779 - DNA, 64 bp, Glycine max
  Clone ID: 700962527H1
cttctctcttgtgtactttgattccttgaaagatgagaaaatgaacgattttgcttccttgact

SEQ ID NO: 79780 - DNA, 252 bp, Glycine max
  Clone ID: 700962530H1
agagtgagttcggttatcttctttctatttcgtcattttcttcgcttctttcttcttctctgttaattcttttcttacatcttaaaaaacaatataaagaagggcgtggttttgttgtgagtactgagctgagaagagggagaagatgatcatccccgttcgttgttttacctgtggaaaggtaattggaaacaaatgggatacctatttggaccttctccaggcagattacagtgaaggagatgcactgga

SEQ ID NO: 79781 - DNA, 252 bp, Glycine max
  Clone ID: 700962531H1
ctcgagcggcggcgattgtcccttcaaatgttgaagacaagttgccttttacactggtcccacagtcggaggacttctgaatgctacatgtgggaatgttactgagctcataatagcaatatttgcccttagcagtaacaaaattgctgtggtcaagtattctctgttgggttctattctttcaaaccttcttctggttcttgggacctctctattatgtggtggcattgcaaaccttaaagtggaacaaaa

SEQ ID NO: 79782 - DNA, 254 bp, Glycine max
  Clone ID: 700962532H1
gtgtggttgaaagttaagaagtagcaaagatgtttccattcgggcgcaagggtcaaaagataaaggggcctatggtggttatgcagaagaatgtgttggatatcaacagcatcaccagtgttgacgggatcgtcggcaccggcttagacttcttaggcagtgcactcgatacagttacttttttagcctcctccatctccatccaacttatgatacctaccaaggctgatggtgggagaggataagttggaaag

SEQ ID NO: 79783 - DNA, 253 bp, Glycine max
  Clone ID: 700962535H1
cgttcttttgtgtttgactctctctctctctctctctctttcatatcatatcagtcatctctctctgtctcatacatacacataccactgtacctcgttctcacgaaaaccttcaactaggaatccatcgagccagagtgttgtgttgctagtgcaagaggcaccaacatagatagatacatacgtgcgtgcgtacgtaggaagggtacgtacgcggtagtacacaacacaccaacacaccgttttgcactct

SEQ ID NO: 79784 - DNA, 252 bp, Glycine max
  Clone ID: 700962536H1
gattgatacacccttcttcgttcctcactcaccagccacagattctctcttctctattcagtaaacggctgttttgtatacgagctgtcccggtctcagcctctacatcccaaaacatcaaaacaactggttgggctccttgtatggcttcttcctcagttggtagaagagctacatattcaacacaatctgtatcgacaaatgagccagttgtatctgtagattggctttatgataacctgaaggagccag

SEQ ID NO: 79785 - DNA, 253 bp, Glycine max
  Clone ID: 700962537H1
ggaaattgatggtaggtttctgaacactggcctcctccttgtggccacaatccttgtagccaaactcatctcagctttcatagtgcccaagtccagaaagagggtacccccaattgtgaaggggtggcccttaattggagggctaatccgtttccttaaaggtccaatctttatgctccgtgaggagtaccctaagcttgggagtgtcttcaccctcaagctcttccacaagaacatcaccttgctcgttggc

SEQ ID NO: 79786 - DNA, 254 bp, Glycine max
  Clone ID: 700962538H1
atttctctctctctctttttctctgcaaaacaaaaatgtctcacttcggacgttcgggtcccccagacatttccgacacttactctcttctcgttctgaacatcaccttccgtaccaccgccgacgacctattccctctcttcgacaagtatgggaaggtcgtcgacatcttcatccccaaggatcgaaggactggtgaatcgaggggttttgcgttcgtgcgttacaagtatgctgatgaggctcagaaggcc

SEQ ID NO: 79787 - DNA, 251 bp, Glycine max
  Clone ID: 700962539H1
gttcttaagcattgaaatttgtcttgtagggtggctatgttgatttatgccgtggtgtttggaggatccagggatctcttgctgtgtctaggggaattggagatagacacctgaaacaatgggtgacagcagagcctgagaccaaagttctcagaattgaacctgaacatgacttgttaatcttagcttcagatggattatgggataaggtatagaacttgaccatttcacttcaatgttaatagtgtctt

SEQ ID NO: 79788 - DNA, 252 bp, Glycine max
  Clone ID: 700962540H1
acaaagcattgttagcgccagaggattctatagaagacgagagttgtagccttagtgaggtggaagaagcaaaagcagtactaaggctggttcctatttgggctacaactctggtttatgctgtggtgtttgctcaagttcctacgttctttaccaagcaagggattactatggagagaacaatatttcctggctttgacatacccgctgcttctcttcaaacgcttgtcactgtggccattgtcctgttca

SEQ ID NO: 79789 - DNA, 253 bp, Glycine max
  Clone ID: 700962541H1
aaccaagtggaatcaatagccatgaagatcgttcggaaagacctcgtacccaatggacctggcagcgttaagatggttgcagtggattcggatgatctctggtttgcgtataacctgatagctcccggagactctgtcatggccgttactgtcaggaaggttctaagagaagctgctagtggcggacgggaagcagaacgcgtcaagctcaaattggaaattaaagtccaagagcttgctgattatgacaaag

SEQ ID NO: 79790 - DNA, 249 bp, Glycine max
  Clone ID: 700962543H1
aaacattgtaagcgctgtaacagcaggtttcggaggcttttggggtagccgacgagacacagtggattccttaattctccatggatatggagatgaaagaaggtgaagcccccgtgttgtggttcgaaacctctgactctgtctgtcgtcgacaccagtttgaacccgatggtcaactctccgtagtgattgtcgatgattccaggcccttataccaaagggtggctggatctttcatgaataaatttt

SEQ ID NO: 79791 - DNA, 250 bp, Glycine max
  Clone ID: 700962546H1
aacacaacaccttttccttttcccttccgttggtgccattcgtgcagcaccggatcctctcatttctccggcgataactctcccttttccggcgaattcaccgcttcctcgatatgaatcccgagtatgactatctgttcaagctccttctgattggagactctggtgttggtaaatcatgccttcttctaagatttgctgatgattcatacattgagagctacataagcaccatcggagttgattttaa

SEQ ID NO: 79792 - DNA, 249 bp, Glycine max
  Clone ID: 700962547H1
ctcccctttgccgctgttgttgttgctgcaccaccgaacaacttcccctgtaaatcgcgtttcgtttgtgcaaggttttaaaagacggctgatgctgaggacattcaacctcttgttgttgataatggaactggaatggtcaaggctggttttgcaggtgatgatgctcctagggccgtgttccccagcattattgggagaccacgccatactggtgtaatggttgggatgggtcagaaggatgcttac

SEQ ID NO: 79793 - DNA, 209 bp, Glycine max
  Clone ID: 700962550H1
tgcataggagagaagaacatcaatggtgaggattgcttcatcttgaagctttgtactgaccctgaaacattgaaggctcggagtgagggtcctgctgagatcataaggcatgtcttgtttggctactttagccagaagactggacttcttgtacacattgaggactcccatctgacccgcatccagtctaatgggggcgatcaatttat

SEQ ID NO: 79794 - DNA, 247 bp, Glycine max
  Clone ID: 700962551H1
atatccccccctagctacagagcagccaaaggggaggaataataataagcctatattctaaggccggaaaaataaaaaaggaataacaaaaatgtctggaaaggtaattatctcggctgtttctttcatcctggtggttggagtggccataggtgtggtggtggccgtcaacaagaagggcgaggatcccacacttcaatctcagcaaaaatcagtaggggttatctgccaaaacactgatgaccag

SEQ ID NO: 79795 - DNA, 229 bp, Glycine max
  Clone ID: 700962552H1
ctcatcacttactggaagccttgttgtgagtaagagaaaaggcttcctgcaccgagcacaccaacttgatacctctgattctttctttgcttagaattccacagaatatggagactgttcttttcaatcactccccacctttggaattcaagggtttgagcaaggaggaggaagactcattgctagggcaagtggaaatatggaggtacatgacatgcttcacggactc

SEQ ID NO: 79796 - DNA, 251 bp, Glycine max
  Clone ID: 700962553H1
gagctatgccaaagcgtacagctatgaacttccagttgctgttgccattgttatttcgggcatgtatgaggatgatctggataatgctgaggatgttgtgtacactggtcaaggtgggcataatctgactggtgataagcgtcaatttcgggatcaaaagttggagcgtggtaacttggctctgaagaattgttctgagcaatgtgtgcctgttagagtcattcgtggtcatgaatcttcaagcagttaca

SEQ ID NO: 79797 - DNA, 251 bp, Glycine max
  Clone ID: 700962554H1
gaaatagcagagggcacatcacctaattgtccaggcttgtccaccttgattttatctcataatttgatcagtcatattcccaagtgttttttcagacacatgaatgctctaacactacttgatttatcatataattatgagttaacatctttgccaaagtctctgtctaagttgaggtctcttacttctttagtgctccgtcaatgttcaaaattgaaagatatacctccactgggagatctacaagcatt

SEQ ID NO: 79798 - DNA, 248 bp, Glycine max
  Clone ID: 700962555H1
ctaaaaagcgctgtttgatgagcctgcgtagtattaggtagttggtcaggtaaaggctgaccaagccaatgatgcttagctggtcttttcggatgatcagccacactgggactgagacacggcccggactcccacggggggcagcagtggggaatcttggacaatgggcgaaagccggatccagcaatatcgcgtgagtgaagaagggcaatgccgcttgtaaagctctttcgtcgagtgcgcgatca

SEQ ID NO: 79799 - DNA, 80 bp, Glycine max
  Clone ID: 700962556H1
gcaaagtgattgattccagttccaatggccttaggcacaagagccttgatcggaaggaaggttcttgtctcacccccaac

SEQ ID NO: 79800 - DNA, 247 bp, Glycine max
  Clone ID: 700962557H1
tatttttctcactgtctctccagagaacttgatagagagatggcagctgcaacatctggtgctgtgttaaatgggttgggatcttccttcttgagtggaggaaacaggagcctaacccttctgggcctctgctattggaggcaaagttggtgctgctgttactgttaatcccagaagactcattgtggtagctgctgctgcaccaaagaagtcatggctccctggtgttagaggtggtggcaatctc

SEQ ID NO: 79801 - DNA, 246 bp, Glycine max
  Clone ID: 700962558H1
ccgaaaccaagcattacaattcccaatttcatagaaacaccagaatcaataaaaacacataacaacaaaagcagtgaaaaatggcgagctcggtggagaaggagagtggcgcgagcgaggaaactttctctttggagctgcctgctccaccaggttggaagaagcagttcatcccaaagaaagctggtaccccaaagaaaaatgagattgtgttcactgcaccaacaggagaggagatcaataaca

SEQ ID NO: 79802 - DNA, 244 bp, Glycine max
  Clone ID: 700962559H1
acaagacataccttatagattggatcataatttgaacgtttgtgacataaattggatcaacattaacttgcaagttttgatgttttaaatgctcggagacagattttattgtatagtaatagtaattcttctcggattgcttgaggtagaagagaactttatttgtatggtaaatttttgtaggctcgatcaggattgtctctagtagaagatattaatatgcaagcggtggggaggcttggca

SEQ ID NO: 79803 - DNA, 246 bp, Glycine max
  Clone ID: 700962560H1
ggagattcaaagtctgtgttgttgtggaatgcgtgggaagaggagcaagagaaatggattgataggcatatgttagaagatgttgacttggataatcatagtgaggtaatgaatgaaactgctgacataccctctgatctgacaatgcctttacttagatatcaaaaggaatggttagcctgggctttgaaacaggaaagttctgcgagtaaaggtggaatacttgcagatgacatgggaatgggg

SEQ ID NO: 79804 - DNA, 248 bp, Glycine max
  Clone ID: 700962564H1
ctgttaccctagggctaggctagtagtatgaatggattatggatggtgaagattgattgattcaagatgactgcaactggagtggccgtgtcgttggggttggggacattctctaactgttactgttacccagtgcctgtaaaggaattgcttttttctacaacgcgcattcgcaatcggagtaggaagaagcgttttggttttggtcaaaaaaggttttgcgttggagctgcaaatgcaaatcatga

SEQ ID NO: 79805 - DNA, 251 bp, Glycine max
  Clone ID: 700962565H1
ttccaggcaaaatgcttggaaactggggaggcagtggcaattaaaaaggttttacaagacagaagatacaagaatcgtgaactaccagttaatgcgtgtgatggatcatccaaatgtgatctctttgaagcattgtttcttttccactacaagtactgtcaaactttttcttaatttggtgatggagtatgttccagagtacatgtatagagtcttaaagcactagagcaatgctaatcaaagaatgccta

SEQ ID NO: 79806 - DNA, 248 bp, Glycine max
  Clone ID: 700962566H1
ctcttaggcactttcttgttttctctctcaccctcatatccatcatcttccacacccatggagcgtcctctgagcaatcaataatcaagttacccacagaccaaccaagggtagagaaactgacccacttgcattttttctaccacgacatcttagagggcaagaacatcacggtggtgaaaatcatcgagccatcagcgagcgaggttcgtgaagcaactgggtttggaaccactttcatgatggac

SEQ ID NO: 79807 - DNA, 249 bp, Glycine max
  Clone ID: 700962569H1
gtctccgtcatagctgaacatattatttgatcatgtattcgttgacagtgaaacccttcttcacacctaatttagtttcttcttcttcaacttccacttcgtcctcttcgatttctctcgtgtcctttccatctcgttcggtctcatcaattagcttttccagaaatttaaagcccaaaggaagatttggtctcagagttgaagcatacgattcctccaataatgacaattccaacctcgccagtgctg

SEQ ID NO: 79808 - DNA, 249 bp, Glycine max
  Clone ID: 700962573H1
cactacgtcgctcgtcacggttccgtcagtgcttttccgccgccgacgcggttcaaacttgaaaagtttactccttaaaagggttagagataaataaaattagcgagttgccatctgcagttcaaaaggtgtgaaagcaaataagatgcagcatagaaatttgacttctggaaggccttctggaactgatggctccgattactcctaccgtatggtagtcgattcaaggtatcaactggttgcaaaggg

SEQ ID NO: 79809 - DNA, 245 bp, Glycine max
  Clone ID: 700962574H1
gccaaacggaaggtcattagtaagactttccgtcgcctgcttgaggtaagtgagaaacaaacatttactggtccaccggaaaatgtcagagatcatgttatggctgccacaagggttcttaacaagggagacttccagaaggcttttgacattattgtgtctcttgatgtgtggaaatttgtgagaaatcgagacaccgtacttgaaatgctgaaggacaaaatcaaggaggaggcattgaggac

SEQ ID NO: 79810 - DNA, 245 bp, Glycine max
  Clone ID: 700962575H1
gaaacttcaagtacgtaaacaccatcaaagcagcggttgagaaagaatgccccttgacggtttcatgcgctgacattgttgctctttctgctagagatggcattgccttgttgggaggaccaagcattgaaatgaagacagggcgaaaggatagcaaagaaagctatgcaacggaggtggaagccttgattccaaaccacaatgattccatgtcctcagtgctgtctcgttttcaagccattggc

SEQ ID NO: 79811 - DNA, 242 bp, Glycine max
  Clone ID: 700962576H1
gcaaagggtaggcattgacccctttgcacaaaggaaaagaggggtggtgttgtgttaaaaaaatattgaacttggttggttctaagtagaaacaaaaattgtcattttcccatttctgcatttttggtttgggagaggagaaaccaagaattaagaaatgggttgctccgtaagagtttgttgtgtcttatttttggtgttgttggtggcatgtgttagaggggaggacccttatagattct

SEQ ID NO: 79812 - DNA, 242 bp, Glycine max
  Clone ID: 700962577H1
agatggtcttgtctgtaccgctcgtaagccctggattgctgttgggatgcggaacgttgactataagagagcccgtcattttgaagttgatttgtctgctttccggaatgtacttgagatcgacaaagaacggatgattgcaagagttgagcccctagtcaacatgggtcagatcagcagggtgactgtacccatgaatctttcccttgctgtagttgcagagcttgatgatctaactgtcg

SEQ ID NO: 79813 - DNA, 245 bp, Glycine max
  Clone ID: 700962578H1
gatcaaccttggatcaggtttagggaatggctgcaatcttagctcgaaaatcactccttgctcttcgtgcgcgccaattggctgtaagcggtcaagggctgcacagctcccaatactatggccttcggttaagtgcacactccttctctaccaaaagagaggatgaggaaagggagcaactcgcaaaggacatttcaaggattggagttctgtctttgaacgtagcattaacactctctttctca

SEQ ID NO: 79814 - DNA, 248 bp, Glycine max
  Clone ID: 700962580H1
caagaatatcacattggtctcttgtcttcctcctcatctctacacttatccacatacagcccagcctctcaagcccaagcccaagcccaagcccaagcccggtcatgaaatccttctgcagcagcacccagtacccagccctctgcgtctcatccctctccgtctacgcctccagcatccaacaggaccctcaccaactggttcagacagcactctccctctccctgaaccgcacccaagcgaccaaa

SEQ ID NO: 79815 - DNA, 98 bp, Glycine max
  Clone ID: 700962581H1
gttgattaatcaggacaagaacaaatataacactccgaaataccgatttgttgttcgctttagcaacaaggacaattttgcacaaataatatctgcta

SEQ ID NO: 79816 - DNA, 244 bp, Glycine max
  Clone ID: 700962582H1
gcagacttaacaacagcacaaagcgggttactgtctgttcaagctaccatctctctctctctttcttagtgcctccttgccagaagttaaaatggcccaagaaactttcctattcacatctgaatcagtgaacgaggggcaccctgacaagctctgtgaccagatctccgatgctgtgctcgatgcatgcttggagcaggaccctgacagcaaggttgcctgtgaaacctgcaccaagaccaac

SEQ ID NO: 79817 - DNA, 245 bp, Glycine max
  Clone ID: 700962583H1
cgggtatgttggcttcattaatggaagtggtacggacaacagttgcctgtgaatgtgtttatgtacgagccatggtgatcaaggcattaatctggatgcaaggtccatttgactcatttgatgaactagaatttattattgcatcggaactttctgatccagcttggccagcagcactattgaatgatgtactactcactttgcatgtacgttttaaggcttctccagatatggctgttactctt

SEQ ID NO: 79818 - DNA, 244 bp, Glycine max
  Clone ID: 700962584H1
gtgctggagagttggaaagtggaaatgcaggagagccagcaaaactgatcagacagagataccgtgaagccgcagacatgatcaagaagggaaagatgtgtgctctcttcatcaacgatcttgatgcaggagctggtcgtcttggtggaactacacaatacactgtcaacaaccagatggtgaatgccaccctcatgaacattgctgataaccccaccaatgtgcagcttcctggtatgtacaa

SEQ ID NO: 79819 - DNA, 247 bp, Glycine max
  Clone ID: 700962585H1
gaaagcagcgattttgaagtctctccaaaccattatggttgtcttcctgctgatagtactctttagcagcaacaccaaagcagaaaaagaaacaatccacgaccatgcaaacaaaaagacctacataatccacatggacgagaccaccatgcccttaaccttcaccgaccacctcagctggttcgacgcctccctcaaatcagcgtccccctccgcggagattctctacacttacaaacacgtggcc

SEQ ID NO: 79820 - DNA, 209 bp, Glycine max
  Clone ID: 700962587H1
gggttattgatgttgccaaagatatgtgcaggctttttaagatggacccagagactagtataaaatttgtggagaacagaccatttaatgaccagagatactttcttgatgatgaaaagcttaagatcttgggttggtctgagaggaccacttgggaagagggcttgaagaaaaccatggactggtatatcaacaattctgattggtgg

SEQ ID NO: 79821 - DNA, 247 bp, Glycine max
  Clone ID: 700962588H1
cacaaatcttagccgccattgatttttcctcttccatttctcttactttctcagcctttttcgattacccatttggttatttcgccctaatggctcttgctccatccaaagtttccaccttttctggtttttctcccaaacccagtgttgggggtgctcagaaaaacccaacttgctctgtttctctgagctttttgaatgagaaacttggaagcagaaaccttagggtttgtgcctcaacggtgcc

SEQ ID NO: 79822 - DNA, 243 bp, Glycine max
  Clone ID: 700962589H1
tgagtagcagaagagaagagaagatgggatctgtatgtatctgagactgtgcatcaccccattccctgttgcggttgattcttgaggacaggcagagataggattaacttaatatgacgacacgacaccattgcaatttaccattctacatttaggcaatgccagccacccaatagataatagcaataagtctttcttcacttcaactcgcactggtatttaaacaagtctgatgggttcaag

SEQ ID NO: 79823 - DNA, 244 bp, Glycine max
  Clone ID: 700962593H1
gaaaagaaaaaaaaatgcattcgtgcattcctcagcaccttcacttggcttcttccctaaaccccaaggcgtgtaattctcccctacgcaatttgaggatccgtgctgtttcaaccacacataatcacataccagctgctccagtttttcttcccgatagaccatggaaccagattcctggtggagttactgctgcggagggattcaaagctgcgggaatgtacggaggtttacgtgccaaagg

SEQ ID NO: 79824 - DNA, 244 bp, Glycine max
  Clone ID: 700962595H1
atcaattatgaaaccatgttggtcttcttccattccatctactcttcgcatggcatgacctcatcttcgcgtgttgtggcttaacgtgcgccggaaatggaggaggagcagcagacttttgtgtccaaagcgagaaccgcctttcattccgccgcggccaaagcggagcgcgttctcttggatttcaaatccgatcgagatcacgataaacaatcgtcgcccaacaccttcaccggccaacaac

SEQ ID NO: 79825 - DNA, 256 bp, Glycine max
  Clone ID: 700962601H1
ccccaacgcgatttccaacttcaggatttcggaaccattgagggagaaattgaaggagaagggtatcgagtcgctgtttcccattcaggccatgaccttcgacaccgttctcgatggttctgatttggttggccgtgctcgcactggtcagggtaaaactctggcatttgtgttgcccatattagagtctttaataaatggtccagcaaaatctgccacaaagactggctacgggaggactccgagtgttctcgtg

SEQ ID NO: 79826 - DNA, 273 bp, Glycine max
  Clone ID: 700962602H1
gcacgcacgcgtacggaagcagctcactctctctagtcctgttatttgtcagcgcgtaaagcatggctttgttggtggagaaaaccacgagtggtcgcgagtacacggtgaaggacctttcccaggccgacttcggccgcctcgagatcgagctggccgaggttgagatgcccggcctcatggcctgtcggaccgagttcggcccctcccagcccttcaagggggcccgcatcaccgggtccctccacatgaccatccagaacgccgttctca

SEQ ID NO: 79827 - DNA, 250 bp, Glycine max
  Clone ID: 700962603H1
cgccaacactgcagaagggttcattgccaaggcaatgacattccagaacactgccggtgctgagggacaccaagccgttgcattcaggaaccaaggagacatgtccgctctcgttggttgccacatcttgggttaccaagacaccttgtacgtccagaccaacaggcaattctaccgcaactgcgtcatctccggcacagtcgacttcatcttcggcacctcctccaccgtgatccagcactccgttatc

SEQ ID NO: 79828 - DNA, 249 bp, Glycine max
  Clone ID: 700962604H1
gctgttgtctcttggcttcaagattgtattcttgtcaggaagatatcttgacaaaatggccgtaacagaagcaaacctaaagaaggctggcttccacacatgggagcagttaattctcaaggatccacatgctatcactccaaatgcactttcatacaaatcagcaatgagagagaatctgttgaggcagggatacagaattgttggaatcattggagaccaatggagcgatctgcttggagaccacag

SEQ ID NO: 79829 - DNA, 246 bp, Glycine max
  Clone ID: 700962605H1
gtggaatcagtttcttcatcacctataaggatttcagatgcagataagtttacagacaaggttattattgggaaagatgatcctcatgatattgctgctgtggatagtccaagaagatgctcagatcattgggatgatggtgggagtgatcgatctggaacagctaaggaggatgaatctttcaccattgcccataggtcagattttcgagacaagggtgttaatcacatgtctggtactaaactt

SEQ ID NO: 79830 - DNA, 91 bp, Glycine max
  Clone ID: 700962606H1
ctctttgactgttgtccaccccagggtaatgcccacactaagttattcccaaaccacaccagtgtcgacctcttcactactcttcctcgtc

SEQ ID NO: 79831 - DNA, 249 bp, Glycine max
  Clone ID: 700962607H1
gagaaaagttagggttcacaacttttgcttttccttttgcttgcgaatctgagtcaaataatcaatcatccattcattattcatcaagtcgtcggcgaagaaaatcacgctgaagagttcggacggcgaggtttcgaggtggaggaggcggtggcgctggagtcgcagacgataaagcacatgatcgaggacgactgcgccgacagcggcatccctctgccgaacgtgacgagcaagatcctggcgaag

SEQ ID NO: 79832 - DNA, 249 bp, Glycine max
  Clone ID: 700962609H1
tcttcctcggaaaatggacagggaccatctgcagatcgcaatgctggcatcccttcaactagtggggttgattctgatttaacttctgaagatgaagttgtccgtttgttgaactgctctgatcattatgcagcactgggattcacgcggtatcaaaatatagatgtttcaatactaaagcgggaatataggaaaaaggcaatgttggtacatcctgataaaaatatgggtaatgagaaggctgcagaa

SEQ ID NO: 79833 - DNA, 247 bp, Glycine max
  Clone ID: 700962610H1
attcatgaatcgaaaagttgggtctctagttgtcccagcaggatctctatcagcttttctcatcattaccattctcctctttacttccctaaatgagaaactcactgtgcccttagctcggaaactgaccacaatgcccaagggctcacaagtctccagagggttggaattggactcgttttctccagtgttgccatggcagttgctgcaattgttgagaaagaaaggagggcgaatgcagtaaaaa

SEQ ID NO: 79834 - DNA, 248 bp, Glycine max
  Clone ID: 700962611H1
atcacaaataactgcacctacacggtgtgggccgctgccgtgcccggcggcggcgcaaggcttaaccctggcgaatcgtggaacatcagcgtgacgaacggcacaacaggaggacgcatctggggtcgacaaactgacaccttcgacaacgcgggacgcgggaagtgcctcaccggcgactgcgagggtgttctggagtgcaacaaaacaggtacacccccgaacacggtcgttgatttcgcgttgaa

SEQ ID NO: 79835 - DNA, 248 bp, Glycine max
  Clone ID: 700962612H1
caatgctaaagatcacatctttggacttgttctgatgaatgactggagtgctcgagatattcaggcatgggaatatattcctcttggtccatttcttggacaagagttttggcacaacaatatcaccttggattgtgaccttggaagcattagaaccttttgccagtgaagccccaaaacaggatccttctccagttccatacttgactgagaaagaacccaaaatctatgatatttccctagaggct

SEQ ID NO: 79836 - DNA, 92 bp, Glycine max
  Clone ID: 700962613H1
atgtttattttagggtgatgtttagtaattgcgtttgtttgagtaatattgtatttagggtaagatttagtaatatgggtgatgttcagaat

SEQ ID NO: 79837 - DNA, 248 bp, Glycine max
  Clone ID: 700962614H1
gtcgacatggttgagaatcggcttgtaggtatgaagagccgtggagtgtacgaaactccaggaggaaccattctgtttgctgcagcacgcgagttggagtctttgacacttgatcgtgaaacaatacaagtcaaagattcattagcccttaaatatgcagagttagtgtatgctggcagatggtttgatccgcttcgggagtccatggatgcctttatgcagaagatcacggagaccacaacaggttc

SEQ ID NO: 79838 - DNA, 253 bp, Glycine max
  Clone ID: 700962616H1
atccaaccatcaagtctaaaatcgacctgtctgacaaagatattagcaagaaaaatcaagcccggtttcagatcacagaagcactgaaggcaaagcgggctgaacgagtagagttgatttctcaggtcaagtctctaagaggcgacagtaggcaatttcagagtattgtggatgagaaattgaaagagattggacctctgcagcaagcactgggcaagctgcggactacaaatgatgccggccggggtggttt

SEQ ID NO: 79839 - DNA, 246 bp, Glycine max
  Clone ID: 700962618H1
cttatctgctgttctagtttattagcattgggatcagtaactgcaattcccaatgcaaattttcatcgggcgccaaggagcactagtgtgcttctggttgttgtctgtgttttttgtggtaacaggatcaacaatgaagagcacaggacagtggaggtagttggcctaggagaatgcgcagactgcaggcagaacaatattaagaataaccacgctttctcagggttacgtgtgacggtagattgc

SEQ ID NO: 79840 - DNA, 248 bp, Glycine max
  Clone ID: 700962619H1
gagggttctggtggattgaattgcattagcaatgggcgtgtcttcaaattcaaaggaatcgatggaactatgcatatttgatttgaggagaggccaacacgaaggccaagagctcgataagatgctcttgttcttccccgccggtttgcccttctcaaagcaactctccgtcattggcctcagcgaaggactcatcagtttcactagaatcttctctccagactctgcttgcgaggtcatcgaagctg

SEQ ID NO: 79841 - DNA, 210 bp, Glycine max
  Clone ID: 700962620H1
gcggtggcagggtgtaagttaatccaacgtatcaggcaaatgtgttttgagaaggttgtcaacatggaggttagttggtttgatgagcctggaaaactcaagtggtgccattggtgcaaggtctcaggagatgctgcttctgttcgtgcgcttgtcggcgatgcgctgggactattggttcacaatttcgcaactgtactggcacgtttg

SEQ ID NO: 79842 - DNA, 247 bp, Glycine max
  Clone ID: 700962622H1
aatccctcactcttgttcttcagtctcctcctattgtccgccaccgtagccgccgccgaacggatcgacgatgaagacgaccttctgatccgtcaagtggtgccggatgcggaggaccaccacctgctcaacgcggagcaccacttctccgccttcaagacaaagttcggcaagacctacgccacgcaggaggagcacgaccaccgcttccgtatcttcaagaacaacttgctccgcgccaagtcac

SEQ ID NO: 79843 - DNA, 237 bp, Glycine max
  Clone ID: 700962623H1
ggcaacattttttatggcacttggccattacttgtatatatggtggcttcatggcatgggtttccatctagtagatgcattcatatttctagatatgcgtgcattgcttagtgcaatagtagatcgcaaaaaggctttatcaggctaaggatagctctaggaacacttcatgcagctcttcctgatgcaacaactgaggagctaagagcatatgatgatgaatgtgctatttgtaga

SEQ ID NO: 79844 - DNA, 247 bp, Glycine max
  Clone ID: 700962624H1
ggttaatagagaaattgctcagaaggatgcaaagggtctttacaaagcaggggagaagaaactgggaactgatgaaaagacttttatccacatattcagtgaacggagtgcggcgcatttggctgccgtagttcttattaccatgacatgtatggtcattcactgaagaaggcagtaaagaatgaaacatctggggcctttgaacatgcacttttgacaataatccaatgtgctgttaatccaggaa

SEQ ID NO: 79845 - DNA, 246 bp, Glycine max
  Clone ID: 700962625H1
aagccttcgaatctctctgaaacttttctcttctctttgattcttctctatcagttaaacattagaatgagccgttcacaggatccacacccttcccgatctttcttcccttttggaaatccttttcggatgatatcacctaaaggctctcgcatgtctccacaacttcttgcagtgttgcaagcttttgaggcaacattggcagagaggctgaaaaatcttatgcctaaaagcaaggatgaaatc

SEQ ID NO: 79846 - DNA, 249 bp, Glycine max
  Clone ID: 700962627H1
tcgatctcgagcgaatcggctcgaggcttggaaaagctagtggtctgaatgaatctgatgcaatggatgatgatgacgatgacgatgatgtggatgatgatgttggtgtccctcctgtcattgctacaaagaaaaggatgcccttaaggaagaacccattgacaatagcccttcaaagccaacagcaacaggacctgctcgtggaacaccttcttcaaagtcttcaaaggggaagagaaaattaaatga

SEQ ID NO: 79847 - DNA, 242 bp, Glycine max
  Clone ID: 700962628H1
atgagggccttccatggcttccgcttgtgcttcctctgcaattacagctgttgccatctctacgccgagttccgggcagaagaatggatcaggaggttgttttcttagtggaaggaaattgagggtgaaaaaggagagagcagcaattggaggacgatcgatgggcactacagtgtgcgcagttgctgagcctgacagacctctatggttcccaggcagcacccctcctccatggcttgatg

SEQ ID NO: 79848 - DNA, 244 bp, Glycine max
  Clone ID: 700962629H1
ctctacctgagaaggaggatccctgtgctagctcgatcagagatcaaagatgtaggagcggactcgcagcattctgatttgtgatgaccttggcttccatctccattgctggctgcaatgcaggtggcttgcagcatgcataagggtaggcatggtaagcatggtcgtcatatgtctgctcgtaatgtgacttacgacggtaagtcactggttcattaacggaagtcgcgagatccttttttcc

SEQ ID NO: 79849 - DNA, 99 bp, Glycine max
  Clone ID: 700962630H1
actcgagccgaagtcggctcgaggacaagaaaaaaaaaacaggccaactcggaaactcaaacccagaatggagttggttatggctcacattcatgggtt

SEQ ID NO: 79850 - DNA, 248 bp, Glycine max
  Clone ID: 700962631H1
gcttttccctcgttgaaatgaaaatgggttcttctttgtggactttgtgtctaattttggcttcactagcctcttctgcattctgtgcctttccacggaggccagtggatgttccattcggcagaaactacgttcccacttgggcttttgatcacatcaaatacttcaatggaggttctgagattcaacttcatcttgacaagtacactggtactggcttccagtccaaagggtcatacttgtttggt

SEQ ID NO: 79851 - DNA, 249 bp, Glycine max
  Clone ID: 700962632H1
gaaaaagtgagaagagaaatcaaaattttaagattgttcatgcatcctcacattattcgactttatgaagtcatagaaactccaactgacatatatgttgtcatggagtatgtgaagtctgtagagcttttcgattacatagtagagaagggtaggttgcaggaagatgaagctcgtaatttttttcagcagataatctctggggtggagtactgtcacaggaatatggtggttcatagagatttgaag

SEQ ID NO: 79852 - DNA, 246 bp, Glycine max
  Clone ID: 700962634H1
gtagagtcacgcatcaaattcccatcacaaccatcttacttacacaataagcacctctcattaatttctgattttctctaacatggctatggtggtcctcacaccccttttggccatactcggtattctcctacttagactcatctgtgacagcctctcatgttactggctcacaccactacgcataaaaaagacgatggatatgcaaggtgtccgtggccctaaacctcgtttcttcaccggcaa

SEQ ID NO: 79853 - DNA, 245 bp, Glycine max
  Clone ID: 700962635H1
ttccttttcatcattctcatatcctcaatcaccccccctcgcactcgctcttcgcttcctctggtggcgacaatgtcgactcctgctaggaagaggctgatgacagacttcaagatgctgcaacaagacccgcctgcagggatcagtggtgccccccaggataacaacatagtgctgtggaatgctgtcatgtttggtcctgatgatactccatgggatggaggcacgttcaagttgacactcca

SEQ ID NO: 79854 - DNA, 242 bp, Glycine max
  Clone ID: 700962636H1
gaacagtctaatgcaacaccatattgcacttcctcctgataacatgggaaagattacctacattgcaccacctggccaatattccataaaggatactgtattggaacttgagtttcaaggtgtcaaaagaaattcaccatgcttcagacttggcccgtacgtacaccaaggcctgttgcatcaaaacttgcagctgatactcctcttcttactggtcagcgtgttcttgatgcccttttccc

SEQ ID NO: 79855 - DNA, 241 bp, Glycine max
  Clone ID: 700962637H1
ggggtatatttagggggaggaggatcaatcacttagattccacaaaaaagatatgtattgccagtttgaatgtgatgccaaatgatagagattttccaacagctgtcatgactttgtgtgaaactggtgttcacctaagcgcatggatgaagagttcattgaccaagatcaccatatggtgagtaggcattttgatggcaaagacactatttttgaccagacacatttgggtttactagta

SEQ ID NO: 79856 - DNA, 244 bp, Glycine max
  Clone ID: 700962638H1
cagttcagccgcacgacctcctcccaagtcccaaccctccctctccctcacgccttgctctctcagccaccgggaggtcagccgtcaaggaagaaagccatcgcgagcacatccagcatacgaccacgaagccactgcagtcagtcacttcgtcgggacgctaccgcttgtcacccatttacgagctcacaccgtcgcgattccaccgccgacagccagtgtgacccccagatgagtatcacta

SEQ ID NO: 79857 - DNA, 78 bp, Glycine max
  Clone ID: 700962639H1
ggcgaacatatttgattgctgttagtttcccaggttatgtagactatgtgacaatgcagcattgtttggatttgcccg

SEQ ID NO: 79858 - DNA, 242 bp, Glycine max
  Clone ID: 700962640H1
cttgggaagaacgctcgctcgcactgtccagatcttactcaatacgagtgagttttgtttttccagccatgacgccgcttatcctggatgctgggaaaaccgacaaaaattcttacaagacactcatcgcagccgagtatgctggcgtccaagttgattctgccgctaattttgagatgggtgtctccactaaaactcctgaatttctcaagatcggtcctattggcaaggttcctgtggtg

SEQ ID NO: 79859 - DNA, 245 bp, Glycine max
  Clone ID: 700962641H1
caccgatctctaggagaggatggattatcagtacattctaggagggattatggcttgtagttttgcttttttgtatgttgtgtacagttttggagcaaaggtcacagattcaagttcaatacatgtgaagagtaatgaatgtgcaaagatatcatcagagaatggaatatgctcacatgaggatgcaggaagtgctgacatcattattgtgggtgctggggttgctggttcagctcttgcttgca

SEQ ID NO: 79860 - DNA, 242 bp, Glycine max
  Clone ID: 700962642H1
aaacaactctttttcttcttcttactacttgtttttcttcttcaccattctcaattcttttcttcttcttcttcttctaacatgggaccctcttccaagcacactcctcgttcccccacgtacttgattccctgcgttatagctcttgctctattctccctcaccggactcctcctctacaaggtggacgacgttgcttctcgcaccggaacggggtgggtcacaacctagaaccgacgccg

SEQ ID NO: 79861 - DNA, 242 bp, Glycine max
  Clone ID: 700962643H1
gatcggtggatcaggaatggacctgaggagcaaagcaaggactctcccaggaccagttagcgacccttcaaagcttcccaagtggaactatgatggttccagcacaggccaagctcctggagaagcagtgaagtgattatatacccacaagccattttcagggatccattcagaaggggcaacaatatcttggttatctgtgatacttacactccagctggagaacccattcccactaacaa

SEQ ID NO: 79862 - DNA, 242 bp, Glycine max
  Clone ID: 700962644H1
gggcaatgcttggtgcccttggctgcaccttcccagagatccttgagaagaatggtgtcaaattcggcgaggccgtgtggttcaaggccggtgcacagatcttctcagagggaggccttgactacgtgggcaacccaaacctgatccatgctcagagcatccttgctatctgggctgttcaggttgtgctcatggggtttgttgaaggttacagagttggtggaggaccacttggtgaagga

SEQ ID NO: 79863 - DNA, 243 bp, Glycine max
  Clone ID: 700962646H1
aacacaacaccttttccttttcccttccgttggtgccattcgtgcagcaccggatcctctcatttctccggcgataactctcccttttccggcgaattcaccgcttcctcgatatgaatcccgagtatgactatctgttcaagctccttctgattggagactctggtgttggtaaatcatgccttcttctaagatttgctgatgattcatacattgagagctacataagcaccatcggagttg

SEQ ID NO: 79864 - DNA, 242 bp, Glycine max
  Clone ID: 700962647H1
gtggaaaactcagttccacgagtcttcaacaacaagaagtgtctttgaaccggcctccagctttaataaacgttcatttggtatgcagaagagaaacatctccatggctaccattaaaagaggttccttatcgggtttgggttcaatggagaaatttcgcgttcacaggtgctgtcaaggagatgctatgcgtcacctcagatctccccccacaccaggaaattggaatgccttctctctca

SEQ ID NO: 79865 - DNA, 223 bp, Glycine max
  Clone ID: 700962648H1
ccaggaatacttgcatcggctggaggaggctaaaaagtatgatcacaggattttgggtgtgaaacaggagcttattcttcatcatgaatggagtcctggaagctggttttttcttccacatggcgctcggatctacaacaaactcatggacttcattcggaatcagtacagggacagaggctatcaagaggtcatatctccaaatgtatttaacatggatcta

SEQ ID NO: 79866 - DNA, 244 bp, Glycine max
  Clone ID: 700962649H1
ccttgcttcgctttgcttgcatgcttccttccccattcaaatctctctcagttgtttgttatttaattgaatttaattttgtgatcggaatcggaatcggaatctgagtggatgtggattgggtggtgaaccggtgaaagatgcgacgacgggctgccgagtatcggcgcccggcacgacggaggttttcatattggatctggcttctccttgctttctcctccatcctcggattgctcctctt

SEQ ID NO: 79867 - DNA, 243 bp, Glycine max
  Clone ID: 700962650H1
gaaacgcatacgcgcaatttctgttgttcagagctcttcaggaagaaaagaaaaacagagaaaaccaaaccctaattagaaacgatttcggaatccctaattcgcaaatcgcaaccctagttgtgctgtgcgttgttgtagtggtttttggaagaggaggcttgagctaaacgctgcgtttcgacgacgatgatcgtgagccagaacatggtgacggaggcggaaattatttgcaagcagaac

SEQ ID NO: 79868 - DNA, 242 bp, Glycine max
  Clone ID: 700962651H1
gaacctcatgctaccctaccataacggcgccctcctcaaaggaaccattaccgttaacctcttatggtacggcagcttcaccccaatccaacgctccataatcctcgacttcattaactcgttaagttccaccgcgggggccccacttccctccgtagcatcgtggtggaagaccacggacaagtacagggggggatccactacaatcgtcctagggaaacaaatcctagaacaaacttatt

SEQ ID NO: 79869 - DNA, 240 bp, Glycine max
  Clone ID: 700962652H1
aaagaatatttcaagagatgaaatgttaagagaagctcaagtagtggcctcttgttcctacgaaaataacacaaattggggcacagaggtgggattctcatatggcatattactagagagttctattactggctgtattcttcacagcagaggatggaaatcagcatatctttacccgaaaacaccatgtttcttaggttgtgctcccactgacatcaaggaaggcatgcttcagttggt

SEQ ID NO: 79870 - DNA, 240 bp, Glycine max
  Clone ID: 700962653H1
cttttcttttctgttttcattttacctgtgtttttgggagatttaaataggcttccctctgctttatggagataatatctgttttttaataaagaaatacaaatgccctctagctgaaaccttatttttttctttgatttattatatctaacttcaatgccttttctcttttgttttatccaatatatatctttggttcccttttagaacaacttgacttttgattcaggattggtgaat

SEQ ID NO: 79871 - DNA, 241 bp, Glycine max
  Clone ID: 700962654H1
caaactcagggtagggcagagagagagagagagagagagagagagagagagagtgggagtgtgggatatcgcggtgcatggtggcgctggtgtcgaccctaatgtcccactcgagcgccaagaagaagcgacacaagttgtcacgcgctgtgtcaatgtgggagtctgtgctctgaattctagtgttcgcggcatagatgtcgtcgaacttgtggagagggaattggaaacgggtgctctg

SEQ ID NO: 79872 - DNA, 241 bp, Glycine max
  Clone ID: 700962655H1
cactgaactctcttgctaatcgagtttctcactctgcaaaaaccttcaacgatggccgctgaaacgattccgtaccagaatggcgtcgttgccaactccaacgactcctccgccgcggtcaagaaatcgagggagagcgaccgccgccgccgccgccggaagcagaagaagagcaacaaggcatctgaggacccggttcctaactccgctgaagagagtgacgatgcgaaagagaacgacg

SEQ ID NO: 79873 - DNA, 233 bp, Glycine max
  Clone ID: 700962029H1
ccttcatccaattcaaaacgaaattgacacaaactcaacagatcgaaaatccataatgttgttgcgtaacaacaataaaaatctcccatttgtgttttcttctcttcacgcacaccaacaaaacctctctctcatcggaatctccaaaaagaatggacaacaaaacgcagcagtccgagagtaagcaaaacgacaacgacgaggaagttgcgccaaaacgacaagaccctaac

SEQ ID NO: 79874 - DNA, 230 bp, Glycine max
  Clone ID: 700962030H1
ggttcctccatcgcgaaattagggttcgctcacttgtcttcaatttcccagattcacctagcaccatccataaatccccctattaacgtgtctttcggaccgatttttctacgtgacgcatcgcaattcttcagcggtttcgtttagggaacccgcgaaaccgaatcagatagtgcggcacggaaactaggaattaaagcaatggcagaagatctggtgctggatactgc

SEQ ID NO: 79875 - DNA, 254 bp, Glycine max
  Clone ID: 700962033H1
ggctccctgacctctcttcctctgctgaaaatggtgtcaccactcacttccaatcccccgaaagcgtcacaaattcatggatgaagaagaggttctttggtggaaaccttggtgagtgttctgcctcctgagaaggattctgtcccatgcaacttcctccttcgccttctcagaaccgccaacatggttcgtgttgacgccacttatagaggtgagcttgagaaccggatttcgtggcagctagaccaagcttc

SEQ ID NO: 79876 - DNA, 250 bp, Glycine max
  Clone ID: 700962034H1
cgttgctacttctactgtttcttcctccgatccctcattgccgcaaatgactcctcctgctagtgttaggtgaattccctcgcttcacatgcatgatcgcaccttcaactctcttcttcttcttcttctccatggctttttttcaaggttttggcgccgtggagttcgttttgtagcatcaccgtatcatcagcttcagcttgctttcaccaaaacggctttactatttggtgtgttccatgtcacaaaa

SEQ ID NO: 79877 - DNA, 246 bp, Glycine max
  Clone ID: 700962035H1
cgcaatcagacacttgtcttctgcagctaaagagattactgtcacggaggctctgaactccgcactcgatgaggaaatgtcagctgatcctaaagtgttcttgatgggtgaataggttcgggaatatcacggtgcatacaaggttggttgcttccttagttgctttacttgtcttgccaccctctcctcttaagaacttcattaacttaactttcattttagatatccaaggggctgctcgacaag

SEQ ID NO: 79878 - DNA, 244 bp, Glycine max
  Clone ID: 700962036H1
gctgctgccacttttcgctgagttgcgtcgtctctctaacaaaacaaacagacaaaacaaatgatttctgcgatttcgtgggtgcccaaaggggtttcgaagtcggaacttgtcgtggctcaacctcctctcgaagaggaaattcaagagataatagccaaccacgcaaccaacagtggagacagtgacaatgaagacgctaacaactatgacgttgtggcacaagcattaactcgtagcagac

SEQ ID NO: 79879 - DNA, 243 bp, Glycine max
  Clone ID: 700962038H1
ctgcattgcctatcctcctctctggttgaagtcccaaaacaaacttgataaaatcttcaaattaatagtgccagaaacaccagtcaataatttccccaacttcgaaatcacgaattttgaaactgaagagaaaatattctcaaattgcgtttgaatatggctataagctgcaacaaacaagaattcttgctacgacccgtttttcacgctagagaatccaccacagcgtttctacctccacta

SEQ ID NO: 79880 - DNA, 240 bp, Glycine max
  Clone ID: 700962039H1
gtctcaaatctcttcgttccttcgattcgttccatttcttccaaaatggccaaagacccagttcgcgttctcgtcactggagctgcagggcaaattgggtatgctcttgtccctatgattgctaggggagtgatgttgggtcctgaccagcccgtgatcctccacatgcttgacattcctccggcagcagagtcattgaatggggttaaaatggaattggtggatgctgcattccctctt

SEQ ID NO: 79881 - DNA, 240 bp, Glycine max
  Clone ID: 700962040H1
gaaatattaggagctagtgctaggtgcgagtagtggagcaaaacgcgggtgtgtgtgactttcgttggagagagatgcagttccattcagaaactccaaacaaacatccctcgcgacaaccttaggaatctcgatcgccgaaaaaacctatgcagccccgaacacacacactctgcattccaacttgtttaaatcatgcctctcgattcacccttctctctcaataaatcttttggccta

SEQ ID NO: 79882 - DNA, 238 bp, Glycine max
  Clone ID: 700962041H1
aaagacaatacttttcgtcaagatagtggttttttaggtgagagaatcaaagggggtctgaattacagtccctggatcattaaccaattggcctcaagtttgagaacccaagagagggtgaagaaggccaaacctggtgttgtttctgctgttcttacatcaagtaacaccaaagaatcagtggcttttcaaatgccatcgtttctcagaagaaaggctgatccaaaaaatgttgttt

SEQ ID NO: 79883 - DNA, 236 bp, Glycine max
  Clone ID: 700962042H1
gaaacctatcttctggatacatacacagggacatagaattcgtgttacttctctcttgttctgctggcttccctcagatacttacaacagcaacttgcataaaagaaattctggagggattttccaaacagaaaaataatggataaatctatcaacaagtatctggtttctgttactctgctggagcggttacccctgtcatagaggttcaaatgggaagatgctccttccagaga

SEQ ID NO: 79884 - DNA, 233 bp, Glycine max
  Clone ID: 700962043H1
ggggcagttttaccatttggatccatggaattggagctagagaagagcaattcgactgaagcattcaggtctatcctggaaaagatagaaacagccaagctggagggtggtgaacttgatgttctatgccatcaactccaggaattaatttcttccctgaagccatcaaaagacataattcaaagcattgggagaatattcccaagcaatgcacgtttaattgttcgatccag

SEQ ID NO: 79885 - DNA, 232 bp, Glycine max
  Clone ID: 700962047H1
acttaatctatcaggtatcagatcatttacctttatcacttctcagtggtcagcattagatcccaacatgcatactaaaacaagtattctaaaggtaaaacaacaaaattctgaacttaattatactaactaaaccaacatggtcacatgtaagaagacaacattccttgactaatagaatgttgatcagccatgtagcatataatggaagaccaggaaacagcagataaac

SEQ ID NO: 79886 - DNA, 232 bp, Glycine max
  Clone ID: 700962048H1
cctacccacaacaccccctttctccaattcctctcactcaccacaacaactcctttttttacctcttcacattctccatttcacagggttctgatcatgttggggaagaggccccggccaatgatcggaaagttgtcggagttgttggtctcgagaggccgcacggtggcatatttggacaccaccggaagccctagaggcccattagacatgaagatgatgcaatcatcac

SEQ ID NO: 79887 - DNA, 247 bp, Glycine max
  Clone ID: 700962049H1
gaaagaaactgttgaatcgcgtcgattaaggttttgagatttctaggctttcatctcagacagtgaaaaaatgatagatataagtacacttaatgctgcacagattactgtgctgggatctgccttttgtgctatgctttccatgcatttcacgtcgcagttactgtctcagcatctcttttattggaagaatccgatagagcaaaaggctattatcattatcatcctcagggttccaatctatgca

SEQ ID NO: 79888 - DNA, 246 bp, Glycine max
  Clone ID: 700962050H1
ccatatttgctttagctttgttcactcttttgcttataggaagttctttagctcaactctctgagaacttctatgatagtaaatgtcccaaggttttctatgccgtaaaatccgttcttcaatctgctttgtctaaagaacctcgccagggagcatctatcgttcgcctcttctttcatgactgctttgtcaatggttgtgatggatcagtactacttgatggcccttcctcagagaagactgcac

SEQ ID NO: 79889 - DNA, 244 bp, Glycine max
  Clone ID: 700962051H1
agcctttgtttttattaccttacttacacctctctatggtctagaccaaataaaaataaatgtctggaaggtaaaattaaatgaagaagcaagcagccagattatgatcaaatggtggcatgtgatcatttgttatacaaccggttctttgaatgattatttgtaggatggatgagatatctgcagctacaagtgtgcttaagctgacactctccgagtggagaacattcacaagtgagtgagg

SEQ ID NO: 79890 - DNA, 243 bp, Glycine max
  Clone ID: 700962052H1
caaatgacgaagcttggaacctctctattggttccttctgttcacgagctagctaagcaacccatgaccaaagttccagaacgatatgttcgtctaaaccaagatcctgttgtatctgacacaatctctctaccacaagtcccagtcattgatctgaacaaattgttttctgaagatggaactgaggtagagaagctaaaccaagcatgcaaagaatggggtttcttccagcttataaatcat

SEQ ID NO: 79891 - DNA, 223 bp, Glycine max
  Clone ID: 700962053H1
cttttcaacagttgacaagcctaaactccttagtcagttaacagcaatacttggtgagatgggactgaatattcaagaagctcatgcattttccactactgatggattttctctggatgtgtttgttgttgagggatggcctaatgaggaaactgaggagctgaaaagtgtgttggaaaaggaaattaacgaggttgaggagcgaaatatgtcaaatcagggt

SEQ ID NO: 79892 - DNA, 238 bp, Glycine max
  Clone ID: 700962054H1
gggagctttctatggggaggatcaaagacaaagaacaagaaaaaggaatcctcagaaggtgcagaagttgctgtggagtcagatcatcagggagttcataatccagtttcactgaatagcatctcacaaaatcaaaaccttcctccaactcccccatctctaagtccttggtcaacatcacgtccgttggacatgcgtaattcccatgtggacattgatttaatgcgtgggtgacaca

SEQ ID NO: 79893 - DNA, 238 bp, Glycine max
  Clone ID: 700962055H1
catctttctctggttctgttgttgcctaagaatgggaggaaattccagtttcagggatgaatataccttcgaacaaaggcttggagaatcgcgggatattgtggccatgtaccccgatcgagtccccgtgattgtggaaagatatgcgaaatgcgatctgcctgagttggagaagaaaaaataccttgttcctcgagacttgtctgttgggcatttcattcatattttgagttccaga

SEQ ID NO: 79894 - DNA, 237 bp, Glycine max
  Clone ID: 700962056H1
ccgacttcggcctcagcactttctccgagcagctccggcacgacggcctgctgcacactacgtgcggcacgccggcctatgtcgcgcccgaggtgattgggaaaagaggctacgacggcgccaaggccgatatttggtcttgtggcgtaatcctctacgtacttcttgctggatttttacccttccaggatgacaacctggtggccttgtacaagaaaatttaccgcggtgacttca

SEQ ID NO: 79895 - DNA, 230 bp, Glycine max
  Clone ID: 700962059H1
caaacggaaacctcgactccatgcatttcacattgttctgctgctctgctatctctacacccacaacagatagcagcacgcgttcaggggttatcgcccaacggcaacaacctccaaactgaaacctttcgtagagaaataataatggaaatatgttaccatgcccacatcgatcgcgagattgaatcgctcctagaaagaatacatcctcccagggtctgtatcgataa

SEQ ID NO: 79896 - DNA, 269 bp, Glycine max
  Clone ID: 700962065H1
gtcagctcggtcttcggctcgcgcgacaccaccgcggcttacacatagtacttttggtcgaaaaatcgatctgatttttttcgtacttttcgctcaatgatgacatgggtcagattctacaggaccaaaccaagtgggcgttccggcgtgatggtagcctcgccctgaagcgccgtaaataaaaatgcagtagccgagtcctgattccaaacgagaaaattcaaacttgattgaaaaggatctttctgattattgaagaatgggacaaa

SEQ ID NO: 79897 - DNA, 163 bp, Glycine max
  Clone ID: 700962066H1
tgcaaattgatattcaaaatagacattgttctaaaatattgtcttctcgttaaatggcagtttgtatgtttttattttattttatgccaagcagtctgtagaaggttctgaagatgtctattggattactcatcttagaggtgcatgtcaggatggttaatac

SEQ ID NO: 79898 - DNA, 241 bp, Glycine max
  Clone ID: 700962067H1
cagccaactaactcaacaattctgaacaatgtgtatagctttgtttctttggcaatgccacccactgtacccttttcttcttttgaataacagagatgaatatcacaataggcctacgaagccagtgtcttggtgggaagattgtgatattttggcaggaagggacgaaatagcaatgggaacatggttggcttgttccacacaaggaagggtggcttttctcaccaatgttttggagctt

SEQ ID NO: 79899 - DNA, 242 bp, Glycine max
  Clone ID: 700962068H1
tttcaattgaagtagcacgcacgtttcatcatccactcgcaatcgcgatcacccgttgccgatcccgaagcagagaaaacctaagccaacatgagtggcgacgccccaacccaaacccaaacccaagccaccgacaccaaaccagaagaaacccacacccacacccaaaccatcactaccaaaccggaagaatctcattctcaatctcagtctcagcctcagcctcacactgccgattatgc

SEQ ID NO: 79900 - DNA, 235 bp, Glycine max
  Clone ID: 700962071H1
tgaagaagtgaggggtgttctttgttggtgaatacacccactcacgcgttcgtggttgcaggctctaatcagatcccaaatgatcaactttgtgcttctcattagtcgccaagggaaggtgagactgacaaaatggtactcaccttattctcagaaagaaaggagtaaggtaatccgtgagctcagtggaatgattctttcccgtgctcccaagcaatgtaattttgtagaatgg

SEQ ID NO: 79901 - DNA, 219 bp, Glycine max
  Clone ID: 700962072H1
aaccaacaccatgaatccgacattcctcaacaccctcttgaccctctaaccatcctcgagttcaacaaggtccgcaccatccttttgaactattctctcttcaagtcctcatccagctacactctcaacttcgttgtcctttaagagccagacaaaaaacttctcctcaaatggaaaaagggtgatctaccctttcctaggatggcttccgtggttgca

SEQ ID NO: 79902 - DNA, 231 bp, Glycine max
  Clone ID: 700962074H1
gcgcagaacgccttggccgcggcctccaggcctcgcccctcggcctctaaccccttcggtgatgctttctctgggcctgagatgtgggcccgtctcaccgcagaccccaccactagggcttacctccaacagcctgatttcgtgaagatgatgcaggatatccagagagatcctaataacctcaacttgcacttgaaggaccagagaatcatgcaggccctaggagttttg

SEQ ID NO: 79903 - DNA, 226 bp, Glycine max
  Clone ID: 700962075H1
ggagatttgagagttagggtttagggtcatttgagtttgagttggtgatggtggtggtggaggaagagtgagggtggttttcttgtgatggtgtattggggtgtgaggttttgtttggatccgaggttattggctacatagggtgatggagagaaagttcatggccttaggtttcatttggtgggtggtggtggttcatccactatgcctgatttcagctaacatg

SEQ ID NO: 79904 - DNA, 228 bp, Glycine max
  Clone ID: 700962076H1
ctcacaccaggcgcacgttagcacaaactatcatggccacggcaacagcagctgccacctcgtcctttatggggacgcgtctcctggaggctcactccggagcggggcgagtgcacgcccgattcggcttcggcaagaaaaaggctcccgccccaaagaaagcctccaggggatcgggccgagacaccgacagacccctttggtatccgggcgccaaagcgcccgaat

SEQ ID NO: 79905 - DNA, 225 bp, Glycine max
  Clone ID: 700962078H1
atccctttcgaccgtcatcggatctttctgcggccaccgtctatcgcacttcgttgccgtcatcggcgccggaattctgaatcttaatgaagttgtgaagtgatgatgagtggaagagctatccaataacatgacatgaattccaaaattttctatacttgaaaattaagccagcttaaacaatacaaggatgttttcgttgttttatggactatggaagtactt

SEQ ID NO: 79906 - DNA, 257 bp, Glycine max
  Clone ID: 700962081H1
atttctcagtctccagtactcgtttatcaatctcatctccaatgtgttaacgttcttcactcgtccctgcttctgcttctgctcattcttctccgtccacagggatggcttatgttccacatggaaatgcaaattgcaactctttattccaaaaatttgcaaattcccatgtgggtatttctgctttgcccttcctgcaaccgggactaaaatcttgtacagttttcaacagaggaacactcattcccctgtgctta

SEQ ID NO: 79907 - DNA, 237 bp, Glycine max
  Clone ID: 700962083H1
aattgaatttggttagggcgccgctcccctcatggaatcccttccctggatcaatcacttcaaacacacacctagccgagaatggtttgaaacggatgcagttctgcgggttagcttggggaattttctgtttttcactattctagctgttctgatggttggtgtgaaaacccagagggatccccgggatagtatgcaccatggaggttggatgatgaaaattatctgctggtgcct

SEQ ID NO: 79908 - DNA, 238 bp, Glycine max
  Clone ID: 700962084H1
gtagatggtgggtgaaacggcggcaacggggaagtcggttggtttgggtttgggatgtgacccagtggtgggatccttggcttgttcgaagaagagagaatacagagtcaccaatcgccttcaagagggaaagcgccctctatacgccgtcattttcaacttcatcgactcccgctacttcaacgttttcgccactgttggcggcaatagggttactgtgcatcaatgtctcgaagga

SEQ ID NO: 79909 - DNA, 235 bp, Glycine max
  Clone ID: 700962085H1
gccaaggagaaaagactacaaaaaagaactggactccttcaattagtgcattgtttcttttcttcaaatggtagcaagacgcaattgttaatttgagcaatggcgagttacgaggctattaagaactttgatgatgatgatgatgatgatgatgatgtggagatggcactcccccatagccagatctctgaatcaagatctgccactgtttcttcccccattggccaaactaccc

SEQ ID NO: 79910 - DNA, 226 bp, Glycine max
  Clone ID: 700962091H1
aagaaataaaatgctttaaatcattttactcaaacttaaagaagtatttttttacaggtcccacaaaaattattttccttcctttctatttatcttcttaaacaaataataaaatttgatatttttatctcatttttcttgtttttgttttatgttattccatttcattttcaagaaggaaagtaagattatgtttgattttagaggagagaaatagaataaataa

SEQ ID NO: 79911 - DNA, 224 bp, Glycine max
  Clone ID: 700962092H1
tgcaggcagatatatgtcaagggccaaatttgtgagagtgatcatatttgttatgatgaacatggagatgcatgtgactgctccaatttccttgatgtggactggctttcttcttctggaaattcttgtgaagaggaattacttgaaaggtcaaccagcatctcctcagagaatattgcgaatgaactaataactactgagacatctgcaagtgaatctggatc

SEQ ID NO: 79912 - DNA, 217 bp, Glycine max
  Clone ID: 700962095H1
cattaacatatacaaattctctgtgttgtgttgtgtacttgtgttaattgtgttgttgttgtaggaaatttaagtgaagagagaatgatgatgaagtctgctatgtgtgcattggtgcttgtggcactggttgtggttgaagtggggcccatggctgaggctgcggtgacttgcaacccaacacagttgactccttgtcttccggcaattaattcag

SEQ ID NO: 79913 - DNA, 101 bp, Glycine max
  Clone ID: 700962102H1
cgggattcggctcgagaactccagaaagccaaggaaggaagacaaaccaaaccaaacatattccttatttcccacttgttcaacctgtggtttatttatcc

SEQ ID NO: 79914 - DNA, 266 bp, Glycine max
  Clone ID: 700962103H1
cggctcgaggcaaatttgcaatctctctctctctctctctctctatcccctttctgccgacgattttgtttgtcccctttggatcagttcgtgcccttgttgttggtttgtagcttttgctgaaatccagcaataatgaagaaggttattggtcaaactgttagggaccttaaaagagaagtaaataagaaagtgctgaaagttcctgggattgaacagaaggttcttgatgctaccagcaatgaaccatggggtcctcatggatc

SEQ ID NO: 79915 - DNA, 255 bp, Glycine max
  Clone ID: 700962105H1
ccaacttgaaccctctctcctctcctcatacccatttcttcattctctggcaccctatttttggccttgttccgcatctcctacccctctcctctgctgcatgcaaccatgaagattttcaacccctccaaatgctttctccagaacgtggtgtgtcctttcgacaccctcttcatcattaaaaggtttaagcccttcgatctgggtctctcccacctccaccaattccaattcctatcctactattgaaaccaa

SEQ ID NO: 79916 - DNA, 254 bp, Glycine max
  Clone ID: 700962106H1
ctcctcaaggagctaaactagcaaagaagcaagtgaaaatgttgggaaaattcttcagtttgagttttttttggggcttctttcaatggttctacactgctactgaccagtgtggatttcaagccttcccttcattggggcttaaagcatatgaaaacaagttcttttttgattttgctgcaatctatgttggagttggaatgatatgcccatatatcataaatatatcagtgcttcttggaggaattatttct

SEQ ID NO: 79917 - DNA, 254 bp, Glycine max
  Clone ID: 700962109H1
gtgggatcccgaggatttgcctgggcaatctatattgaaaacgggagataggcaatggttctttttctgtcacagagataggaaatatcctaatggtggaaggtctaaccgagcaaccagacgtgggtattggaaagcaacaggaaaggatcgtaacgtgatatgcaattctaggtcagttggagtgaaaaagaccctggttttctacgcaggcagagctcccagtggtgagcggactgattgggttatgcatg

SEQ ID NO: 79918 - DNA, 252 bp, Glycine max
  Clone ID: 700962110H1
gatgatttcagtgacatataaaaacaacaacaactactatataattagggaaatagcgaccttaaagctcctacggcatcccaacgttgttagattatatgaggtcttggctagcaaaacaaaaatttatatggtacttgagtacgtgaatggaggggagttatttgacataattgcatccaaaggtaaacacatcgaaggtgaaggtagaaagctgttccaacagttaattgatggggtgagctactgcca

SEQ ID NO: 79919 - DNA, 255 bp, Glycine max
  Clone ID: 700962111H1
ggaatgcacaagattagatcattggcaacaaaagatgccagagtggagacacctaaattatcacagattccttgcaagttgattgagaaagacttgcacaaaggtatgaatgcattaagagtactgtgcaggtttctggctcttaaaggagctgataactgtgtattatataggcagcaaaggtaatcatgatgtggaacagcctgctggctctctaaagtcatatttttcagtacgttttgtcacatccaagtg

SEQ ID NO: 79920 - DNA, 254 bp, Glycine max
  Clone ID: 700962112H1
cttcatggcctgagaatgggacaatccaattaattgatctgaaggtacgttacaaggaaaatcttcccgtggtgcttcacggagtatcctgcacatttcctggtgggaagaagattggaatagttggtcgtactggcagtggcaaatctaccttgattcaagcattatttcgattggttgaaccggaggcagggagtatccttatagacaacattaatatttcatcaattggtcttcatgatcttagaagtcat

SEQ ID NO: 79921 - DNA, 251 bp, Glycine max
  Clone ID: 700962113H1
aggctactttggctcctttaattggatcctctattcagtcagctactggggtagtgtataatattactggaggaaaggacataaccctgcaggaagtgaacagggtttctcaggttgtgactagtttggctgatccttctgctaatattatatttggggctgtcgttgatgatcgctacactggggagattcacgtgactatcattgcaactggcttctcacagtcttttcagaagaagttgctaacagat

SEQ ID NO: 79922 - DNA, 254 bp, Glycine max
  Clone ID: 700962114H1
ctgaatgtcgtcactgcatatgggtttgatttggtccgtggaacccatactcttgatttgatcaagggtggatttcccagtggaaaatacctctttgctggagtggttgatggaaggaacatctgggccaatgaccttgctgcttctctcactacattgcagggtcttgagggcattgtgggcaaagataagcttgttgtgtccacctcctcctcccttcttcacactgctgttgatcttgttaacgagaccaa

SEQ ID NO: 79923 - DNA, 256 bp, Glycine max
  Clone ID: 700962115H1
cacagagaaccagtctcctactctctctcacccacaagaaaaatggcatctcacatcgttggatacccccgcatgggtcccaagagagagctcaagttcgctctcgagtctttctgggatggcaagagcagcgccgaggatttgcagaaggtggctgctgatctcaggtcatccatctggaagcagatggctggtgctgggatcaagtacatccccagcaacactttctcgttctatgaccagctgctcgacgcca

SEQ ID NO: 79924 - DNA, 258 bp, Glycine max
  Clone ID: 700962117H1
cgagcaggatcatggatcatcgtcattggcgcttcttcattatgcttttcattaccgcagcagcaataggacttgtttcgtcgttagggataaactacggccaaatagcgaacaatcttccttcacaagacgacgccgttgcgttggtgaaatccatcggagcgacgaaggtgaagctctacgacgcagatccacgcgttttgaaagcgttcgcgaacaccggagtggaattaatggtaggtctgggaacgagtactt

SEQ ID NO: 79925 - DNA, 257 bp, Glycine max
  Clone ID: 700962118H1
cacaaacacatacattgtagtatcacttttgtctcggaatttgttcttttgagttatggcaagcttaaaggttgcatgtgtggttttgatgtgcatggctgtgatgagtgcaccaatgatggtgcaagccgtgtcatgcaatgatgtttctgtgaacctagcaccgtgcctatcttacctgatgcagggtggagatgttccagaatcgtgctgtagcggagtgaggaacattctgggttctgccagcaccacctttg

SEQ ID NO: 79926 - DNA, 253 bp, Glycine max
  Clone ID: 700962119H1
ggagaaggcgaacagctccggatgatgaccagcgagtcttttcacgacaccatgtatcactccgcgatcgcttctcgactggcctcagacttcaagtctcgctccgatctgtagcacttgaatagttaactattccttctttgttgtattttgcggattgtttgtagccaaatttttagggtttcaaatgtaaccgttgatgtataatagattagcatttagaataatttaggttatcaattgatgatacaat

SEQ ID NO: 79927 - DNA, 252 bp, Glycine max
  Clone ID: 700962120H1
aacgtattcagccaagggaaagggaacagagaacaacagttccatctatggttcgaccccaccaaggacttccacacatactccgtcctatggaatcctgcaagcatcatattctctgtggatgggacaccaataagggagttcaagaatttggagacaaaaggggttcctttcccaaagaaccaacccatgagaatatactctagcctttggaacgctgaggattgggccacaaggggtgggcttgtgaaa

SEQ ID NO: 79928 - DNA, 253 bp, Glycine max
  Clone ID: 700962122H1
atcaaagtctcttattcctctttgtattaattttttcctcttctcccttttcattttccggtggcaattcaaatcgcactctttgcgtttgtgctgatccactgtgaatgaaaaaaacaaaactaagagagagaagagagaaaaattacaacaacattattatttattgtaactaattagctaattaattggttattaaaaattataaggccatgtttggcgaaaccgttccgcgaccacagttcatgcaatc

SEQ ID NO: 79929 - DNA, 253 bp, Glycine max
  Clone ID: 700962125H1
caactgcgcggtgagtgagtgagagacggaaagtgcaaagccaccgtcttctcttctcagagcttggctttgcttatcgattctctctcctctcatctttctcattcaaggtttgtaaaagatggccgatgctgaggatattcaaccccttgtttgtgacaatggaactggaatggtcaaggctggatttgctggtgatgatgctcccagggctgtctttcccagtatttggccgacctcgacacactggtgt

SEQ ID NO: 79930 - DNA, 251 bp, Glycine max
  Clone ID: 700962126H1
ctggactgcataactctggatggtgatcaagtaagcaagaaaggcagtatgactggaggattttatgatcacagacgatcaagattgaggtttatgaatatcattaagcagaatgcagacactattcacattagagaggaggaattggagaaagttagatttaatctacaagatatcctttatgttaataaatgaatattctttttgtatttttcatttctcttaggcaaaaactcattataaaatgcata

SEQ ID NO: 79931 - DNA, 253 bp, Glycine max
  Clone ID: 700962128H1
ttccttttcttttcttcaaatcaaggagctcagctatgactaccagagaaatccttcaaaagatgaaggtaaaagttggtttgggttcatcagaccctgattcagggaaaggaaagagcaagatgtcaaagaacataactcatggctttcatttggtgaaaggaaaatcatatcatgacatggaggattacgttgtggctcaatttaggcaaatagataacaatgaattgggtttgtttgcaatatttgacgg

SEQ ID NO: 79932 - DNA, 254 bp, Glycine max
  Clone ID: 700962130H1
gaacattattagtactagcactgtacctttgcccgaaacttttcttgactcttcctgtttcgctcaaattctaccctcctcaaattgggaaggtggtgatttccaaagcctttacaacgttgcttttgatcaagggcgaacagcatcttttccccctcagccatttacaggtctagttgaagctagcaatctaaaaatggagatgtaaaccagataatccattattacaatatgttggattaggtcactcggaa

SEQ ID NO: 79933 - DNA, 257 bp, Glycine max
  Clone ID: 700962131H1
cacgggccaagtttcccatctctaaatccaaaacctgcctcttaagaaaaagcagagaaactcacacacacaatagataaacaaaccaacttatcctccttcttctcactctctggattcgattcaaaagaaaaagcttatcctctgtcactcatcttcttctgccaaaaccaatgccagcacccattctctactttctaacacactctatttcaacaaccatgtcactacacgacgccgctttcgtcgacacagag

SEQ ID NO: 79934 - DNA, 260 bp, Glycine max
  Clone ID: 700962132H1
tgaaatggaagcagcatcggccacaattctgctactgatactaattcttgctctgatatgctcatggaaggttctgaactggttatggctgagaccaaagagactagaaaaactgctaagagagcaaggttttcgtggcaatccatacacccttttctttggagactccaaggagtttctcaagatgagaaaggaagccgtatccaaacccatgaccctctctgatgacatagtgccacgtgtctctgcctatgtccaac

SEQ ID NO: 79935 - DNA, 257 bp, Glycine max
  Clone ID: 700962133H1
atacaaccaaaccctaacacacacccatttgattcagtttccatggctagcctcaaggttgcatttttggctgcagtgctctgcatggttgtggtgagtgcacccatggcacatgcagctatcacgtgcgggcaggtgacgaatagcctgatcaattgcatcggttacctccagaacggaggaacgccgccgtcgggatgctgcaacggagtgaagagcctcaatgccgccgccaagaccaccgccgaccgccagac

SEQ ID NO: 79936 - DNA, 251 bp, Glycine max
  Clone ID: 700962137H1
cccaattcttccccctccacccacccagcatatctctctattcctctttattagcacccctcacattaccttgtgtcaccaactactttgactcctttaccataccattacaataattatcaaacctaaccagtaaaaatggtgaccgtggaggaaatccgcaacgctcagcgttcccatggacccgccaccatcttggccttcggcaccgccacgccgtccaactgcgtctcccaagccgattaccctga

SEQ ID NO: 79937 - DNA, 250 bp, Glycine max
  Clone ID: 700962138H1
gccttttgtctctgtgttttcacatcgacaattctttacagatgaagagatgtcaagggaacttcttacttcccaaacagatcttcctacatctatatataaacactggtttatcaagaatacgcaagaaaagcattttgaattgttgattcattgccagagatggcttagaatcaatagttcattatctaatggatttttccgttctaatactctatctgagagttatcaatatttatcaaatctgttc

SEQ ID NO: 79938 - DNA, 250 bp, Glycine max
  Clone ID: 700962139H1
ggaacttccgtggagaacttgtaacttcttttgaggatcacctcttgtggcatcctgattgcaatacaaacaacatatatataaccagtgaccaggatcttatcatatcatattgcaaggccgattctgatgattcattgtccgaagaaatgcaggttctattaatgtcagcaacattttaactggcaagtgtcttgcaaagataagagcaagtaatggcttacccatggtgaaggaatgcagttgcagc

SEQ ID NO: 79939 - DNA, 244 bp, Glycine max
  Clone ID: 700962140H1
cagcttctctaaattctctgtctacttcaccaagcacttttggttgcagctttggttaatttccaatatggtgtttcctctcctatctatctttgctttactcaatcttgcagtggtggcaacccatgcagaaaccttgccccctgaagtttactggaagtcgaagcttcccaccactccaatgccgaaagccattacagatatccttcacccagatttggcagaagacaaaagcacctctgtg

SEQ ID NO: 79940 - DNA, 251 bp, Glycine max
  Clone ID: 700962141H1
atttgtccaagaatatagtggaacgcctgtctgctcttagaacgcgtatagttgtaatggctggtcaagaaggtcctacaattacaagaacaaaaagaaaaactcagcatggaggttcaacactggctgaccttctgcaggctcttgaggattacttgcctgttgttctgggattagttaagaatggaagccatttacagtataaagtacaatttacttgggtgaatcaagaggatgacaaagaggaaaca

SEQ ID NO: 79941 - DNA, 251 bp, Glycine max
  Clone ID: 700962143H1
atttcgtatctcactaaccgcgctgctgtctatttggaaatgggacagtatgaggaatgcataaaagattgtgacaaggctgttgaaagaggaagagaactaagatcagattttaagatgatagcaagagctttgacaaggaaaggaaatgccttggtgaaaatggcgaagtgctcgaaggattacgagtctgccattgagacttatcagaaagcactcactgagcaccgcaaccctgacactttgaagaa

SEQ ID NO: 79942 - DNA, 249 bp, Glycine max
  Clone ID: 700962144H1
acaggccccgtgtccctaacatggtcacgctccattgttggacgctccctccacattcagctccaccaaaaccccttagattccccaccctaccctaaccctaaccctaaccctaacccctccccctccaccaccctctccttccacctccacataagacccttcctcttctggaaaaaacacggttccaaaaaactcgcccccaacacccacctcttctggaacctctccagagccaaattcggcgcc

SEQ ID NO: 79943 - DNA, 251 bp, Glycine max
  Clone ID: 700962145H1
ggaatgtggaaaataataattttactgcctggataccacaacagttgaagaacataaacctacagaccggtggtaatgcatggagctcagggcctgcacgcccacctcctcctgggacacctccagcacctacaagcaaccagcaccacaactctggtggtggaagcaccaccccctcagatactgccactggcagcagctcaattgacgagggaagaaaatctggtagaggcagtggcgccatagccgga

SEQ ID NO: 79944 - DNA, 255 bp, Glycine max
  Clone ID: 700962147H1
caacttttaggttccgtttctgaagacttaggcttgatccaataccttcgccacatcgatctctccaacaatttccttaatggctctctacccaacactatcttcaactcttctcaacttcaagtactttccctctcaaacaatgttatctcaggcaaactacctgagctaattggcaaaatgacaaaccttaaacttctcaacctctctgacaatgccttttccggtttgatcccagaaaacctctctactcta

SEQ ID NO: 79945 - DNA, 254 bp, Glycine max
  Clone ID: 700962148H1
gagcaattgtggtttcacagaacgtgatcttatcaactatggcggagaaacacaacatcaagaacccagccgtgaagcggattctccaggaggtcaaggagatgcaatcaaacccttccgatgactacatgagcctccctcttgaggaaaatatatttgaatggcaatttgcgatcagggggcctcgtgatactgaatttgaaggtggtatttatcacggacggattcagctgccttcagaatatcccttcaaa

SEQ ID NO: 79946 - DNA, 254 bp, Glycine max
  Clone ID: 700962149H1
cggctcgagagaagatgctcatgaatttttgaggtgcgtggttgatacaatgcaatctatttgcctcaaggaagttggtgtttcaagtcctttggcagaagaaacaactctagttagttacacctttggaggttatcttcgatctaagataaagtgcttaagatgcctggggaaatctgagaggtacgagagaatgatggatcttactgttgaaattgatggggatattgggactttggaggaagctcttggac

SEQ ID NO: 79947 - DNA, 252 bp, Glycine max
  Clone ID: 700962150H1
gatcgagataactagaaacagtgtgatgaaaatgaaggtccttgttttcttcgttgctacaattttggtagcatggcaatgccatgcgtacgatatgttccctctccgaatgaacactggctatggtgcccgtactccggaggtgaaatgcgcaagttggaggcttgctgtggaagcacacaacatctttggctttgagaccattcctgaagagtgcgttgaagcaacaaaggaatacatccatggcgaaca

SEQ ID NO: 79948 - DNA, 246 bp, Glycine max
  Clone ID: 700962152H1
gtataatttgtccttgtcagcaactagggtagggttcttactaatggccattccctccgccaaacccaaagagtagaagaaacctacaaaaggaatcctctataaacaactccgtttgtcactcgtgtcttgcgagcgggaaacggcggctttagcaatcactccctcgtcgttttcccccgttttctctcccttttccccgttttgcgttttggattcatttctctctatcttctgctgatttat

SEQ ID NO: 79949 - DNA, 247 bp, Glycine max
  Clone ID: 700962154H1
ctttgcactcttccatgtgacatctctaattaaagttgcttttactactaaactcgaagtactttcttagtggcttcactgagaattttgaattctcagtctttttcttttcagatcacatctcagatccatttttattttacaaacttttgggtcctctcccccattgtcctaccacacctgctccacattactgaaattctttattctcatcataattcccatcaaaaaatcttttcttgcaatc

SEQ ID NO: 79950 - DNA, 250 bp, Glycine max
  Clone ID: 700962155H1
ggattatttcagtggcgtgaaacttccagaagaactcaaagtcactcctcttctgcttgccctctttcgcttcctgcaaatctttctgagaatcgagtcacagactagagctaaatcagcatagagatacaaaaatgccaaaagtaaagacaaatcgtgttaaatacccagagggctgggaattaattgagcctacactccgtgaacttcaagcaaagatgagggaagctgagaatgatccgcatgatgg

SEQ ID NO: 79951 - DNA, 248 bp, Glycine max
  Clone ID: 700962157H1
attttccattaccaattccataatgtggcagacagctgatcgaccactgatgtggaaacagtcaccagaacaaccaatcgttttccctcattgcccctacaaagcaaaggatatcactacccccgttgttcagtatcaccctttctgcttctgtggggtgaaaagcagcaggggcatggtgaggaagccgggtcccaagcaagggagcctcttctttggatgtggaaattggactgcgactagaggtg

SEQ ID NO: 79952 - DNA, 240 bp, Glycine max
  Clone ID: 700962158H1
aagacaaatgacgtccaatagaataataatataacaaaatcttacaaatttcattcactccatccaaggaagaacatcaactattgagtaatatacggttatggagaacttatgtaatatagattaacccacaatagcacatttattggaatttaaccagttcagcaccagcaacttaacaaaagaaaaatatggaaagatagccgagtatgtaattccaactcaaaacaaacaactggg

SEQ ID NO: 79953 - DNA, 249 bp, Glycine max
  Clone ID: 700962159H1
aacgcgcgttcgttccaataatgtctgaccccgctgccgaagaggctgctttcatcgagaagctctacgaatacggcgagcagctcaacaatgccaaggacaagtcgcagaatgtgcaggattaccagggaatcatagatgcggcgaagacgagtgtgaaggcgaacagctcgccgcgcactgattcccaagttcttcaagttcttccctgacctctcgagccctgctctcgacacgcatcttgatttg

SEQ ID NO: 79954 - DNA, 248 bp, Glycine max
  Clone ID: 700962160H1
gcagtttgttccactatggagcttgtaagatgtcagcatttcctcattgcgaggggtaaggggttcattcagccacagatgtcagcatttcaaatagttcttgactgaagttcttaaaatggttttattcaaggtgacctgaccttttgttgatgaatgacccttttgaaattcacggctaataggttgttgtcctttttttttttttttttcctggaaccaaatattttcagggctttatacaactg

SEQ ID NO: 79955 - DNA, 69 bp, Glycine max
  Clone ID: 700962162H1
ctcgagcgctccgaagccgctcacgttatccacacaacaacagtcacaaaaccctaaccaaccatggct

SEQ ID NO: 79956 - DNA, 253 bp, Glycine max
  Clone ID: 700962163H1
atcagactagagagagtaagagtaagagaagagatggaaagagtagcatcagtatctcggccactgaaaatatacttcctcccattcttctcaccggggcacctaatccctctggtccagctggctcgcttggtggcggcacgaggccagcacgtgaccatcatcaccacccccgccaacgctcaactcttcgaccagaacatcgacaaggacaccgcctccggccaccacatccgcgtccacatcatcaagt

SEQ ID NO: 79957 - DNA, 251 bp, Glycine max
  Clone ID: 700962164H1
ttgtgaagttccattttgcaaaagcagtccaggttcaggaggttcttgcactttggatcctacaaacttcggctaccctaatttgaaggaaatccatctgtatggttttcctttgaaggttgttggggacattaactcttttgactctacttcagagctaactgtgaatcaaagtttcgattactacactaaaaatgacagcagtaaggagtacaatggtccctatgacttaactatcaaagtttctgaaa

SEQ ID NO: 79958 - DNA, 252 bp, Glycine max
  Clone ID: 700962165H1
aaattagttaagactatagataagtaatgatttaaaattacctaataatttttcgtgtttgtgtgttttattttcaggtcaaattttaaaatccaaattccaaaataaaatgtattttggataaaataaggttgggttagttttctttatctgatgttaaaagacttttcttctgattttaagaataataaaaaatggtattctcattcttaaaaaaaaaaaaaaaaaaaaaaaaaaaaagggggggccccc

SEQ ID NO: 79959 - DNA, 246 bp, Glycine max
  Clone ID: 700962169H1
ggcggtttcggggttgagaagcggtggtttgcctctcttccaccatcaccaccacctccaccaccttcgcttccttcaatcccctccttcctttgccaagctcagttttcttggctccaagtcgtcgaagaaggggttcacagtcttctcccgctatgcgcaagcacgtgcaccttttctcctcgcgtagattccaagatagcatggagaagctgccgaacctggtggaggacattgtgcagacat

SEQ ID NO: 79960 - DNA, 247 bp, Glycine max
  Clone ID: 700962170H1
cgactgcgaagggagagcgaataaaaaaaggcaaatcaaattcgagagaaggagagaatttagagagggaaaggatgaagatcacggcgttgttggtgcttaaatgcacgggcgagggatccgatccggtgattctggcaaacgcttccgatgtcagccacttcggctacttccagcgttccagcgttaaggaattcatcgttttcgttggtcgtacagtcgccagtcgcactcctcagggccaacg

SEQ ID NO: 79961 - DNA, 246 bp, Glycine max
  Clone ID: 700962171H1
gatcttgtgggtaacagtgaaagatcgtttttttttccgtcgctttttcatcgaggatgtctctcaagatctgtctggggagtggagcttgatttgattattgatattaaggaataaaatctcattcaacacactaaacaatacggattttgcaaatgctaaattttggaaggtccagaagtcagtcaagggcagccagagctacaacaatgggaggcatggattatgcagaaaaaaaagaagggc

SEQ ID NO: 79962 - DNA, 245 bp, Glycine max
  Clone ID: 700962173H1
ctccctcagaagcgaagaagaagccacagagaactagtctcctactctcacccgcaagaaaaaaatggcatctcacatcgttggatacccccgtatgggtcccaagagagagctcaagttcgctctcgagtctttctgggatggcaagagcagcgccgaggatttgcagaaggtgtcttctgatctcagggcatccatctggaagcagatggctgatgctgggatcaagtacatccccagcaaca

SEQ ID NO: 79963 - DNA, 245 bp, Glycine max
  Clone ID: 700962174H1
gtgtgcaccattgtcgccttgcgtgcgccggttgcgcaccccctatcttgcgcatccccaatcacctcatcgaaactactaacaccttcacaatcgttcaccagccctacagaacccagatctcgggttccaatcgtcgagccatgtccaaggcacgcgtctacaccgatgtcaatgttcttcgccccaaagagtactgggattacgagtccctcaccgttcaatggggtgatcaagatgattat

SEQ ID NO: 79964 - DNA, 239 bp, Glycine max
  Clone ID: 700962175H1
gttggaccaagtgtctgctatgccactggacacatataagggacatggtttccgaactgaccttgttgaaatgctgacagctttgaaaccaagatttatcagatttccgggcggttgttttgttgaaggagaatggttaagaaatgcatttcgatggaaagcatctgttggaccatgggaggagagacctgggcactttggtgatgtttggatgtactggactgatgatggacttggct

SEQ ID NO: 79965 - DNA, 242 bp, Glycine max
  Clone ID: 700962176H1
ctttcctcttaagtggcacattgttaaggatgttcctaacaatatgttgaggcacattaccttggacaacaatgagaacaaacctgtcactaacagtagggatacacaagaggttatgttggagcctgggctgaaattaattaaaattttcaaggaatataccagcaagacatgcattttggatgattttggcttctatgaggctcgtcagaaaactattttggagaagaaagcaaagcaac

SEQ ID NO: 79966 - DNA, 134 bp, Glycine max
  Clone ID: 700962177H1
gtatcactccaagttataggtcacattgtcacaatgtggtcaccaattgttcttctgttgtgccttattcctcctgtgttcttgctattcttcttccaataccgtagaaccttcaagaactcaaaccttccaca

SEQ ID NO: 79967 - DNA, 246 bp, Glycine max
  Clone ID: 700962178H1
caccttatttatctcaaagatttctcctttctctccttttttctctctttgcccttctgggtgtttttgaaacgtgcttaaaccgtgatgggtgctgttgtggagtgctacccgccgcctcgcacggcggtgctgtccctcaacacgctgccgttagggttccgtttccgtcccaccgatgaggagcttattgactactacctgcgctcgaagatcaacggaaatagtgacgatgtttgggttatt

SEQ ID NO: 79968 - DNA, 250 bp, Glycine max
  Clone ID: 700962181H1
agtttcagtttttggtgttccatttttcttcctccatctttatcttaaacataacttgaactctccattccttaaattttagctacgagctagttccgacacagacaaagcaatggcaaagaccgagttagaggtgactgttgagagcaagaacaaagacctcaagcacctggggtttgtgaggattgctgctattcaaacatttgtgattgtgtcaaatctgtatgagtacgcaaagcagaattctggg

SEQ ID NO: 79969 - DNA, 248 bp, Glycine max
  Clone ID: 700962182H1
catcaaactcatcaaaatgaatctgtaccactcctccaccaccaccaccaccaccaccatcttcaccgtcatattcctcctccttgcaatattattcactctcacaccccacaaggccaacggtgccacgtgtcaccctgaggaagaagcgggcctgttgggcttcaaatccggtatccgatccgacccgtccggcctgctcagtaactggatatcgggtacggactgctgcacatggaccggagtag

SEQ ID NO: 79970 - DNA, 246 bp, Glycine max
  Clone ID: 700962183H1
cggatgcaatgcattgtattgaatccggtggtcagtctcccaacttcaagttctttttctttgctcagaaagcagaagcagcatcaatgtatcttgtagagtgtataatcaacacatcgtcagccaagtcacagattaaaataaaagctgatgaccaaagttcatcccaggcattctctactttattccaatcagccttgtccaaatttggtttaccttgaatctttatggtgtcttcagagctta

SEQ ID NO: 79971 - DNA, 245 bp, Glycine max
  Clone ID: 700962185H1
tccgcagccactttcccaacccaaaacctctcttcagcccataaccatcatgtatctcccccgccaccacatcctcaccagactctccccttaccgccgtcacttctcccactccgccgccgccgtcctccgccccccggagccggagcccctcacctacctcgacggcttccctcgccccgatcccaagcacgacgagaccatcctcgccgtcccccgcgccgactccggcaagaacatctccg

SEQ ID NO: 79972 - DNA, 241 bp, Glycine max
  Clone ID: 700962186H1
aactagtcgtagtattatttcatcgattctctcccttctctttctctctgcgacaccagatgatggagacgacgttgaagcgaaacgctgtcgttgcgccaatcgcggcgttgttgttggtggtgctactcgcggcgagtgtggtggtggaggctcaggagaactcggacgtgaagacgctggtgaagcacatgcacgggaagaagtactgcgacaaaggatgggaatgtaagggctggtc

SEQ ID NO: 79973 - DNA, 247 bp, Glycine max
  Clone ID: 700962188H1
agtttcagtttttggtgttccatttttcttcctccatctttatcttaaacataacttgaactctccattccttaaattttagctacgagctagttccgacacagacaaagcactggcaaagaccgagttagaggtgactgttgagagcaagaacaaagacctcaagcacctggggtttgtgaggattgctgctattcaaacatttgtgattgtgtcaaatctgtatgagtacgcaaagcagaattct

SEQ ID NO: 79974 - DNA, 237 bp, Glycine max
  Clone ID: 700962189H1
gatcaacgtctactacaatgaggcctccggcggaaggtacgttccccgggccgtcctcatggatctggagcccggcaccatggacagcatcagatccggcccatacggcaagatcttcaggcccgacaacttcgtctttggccagtccggcgccggcaacaattgggccaagggccactacaccgaagtgccgagttgatcgattccgtcctcgacgtcgttcgcaaagaggccgag

SEQ ID NO: 79975 - DNA, 245 bp, Glycine max
  Clone ID: 700962192H1
gtgcaaaagagcgtcgtagtcgcaaccctaatcagaagaagcgcagtatcaagcgagtgacagccaccagccatgggtcgtatgcacagccgcggtaagggtatatcctcttctgctttgccctacaaaaggacacctcctagctggctcaagatctcttcgcaagatgtcgaagaaaatatctgcaagtttgcgaagaaaggtttgaccccgtctcagattggtgtcattctcagagattctca

SEQ ID NO: 79976 - DNA, 243 bp, Glycine max
  Clone ID: 700962193H1
gactgagaagcgtgggatagcttttgatcaattacttacaattcctgaacaagatgaatgtgtatacagtgatgggaaatcaacaacatgtgttgcctttattctttcaatgtataaagcggctggaatattcggccctatttctagctccattcaagtaactgaattcacaattcgtgatgcatacatgcttaggatttttgaggataaccaaacacgtctaccaagatggtgcaacaatga

SEQ ID NO: 79977 - DNA, 248 bp, Glycine max
  Clone ID: 700962195H1
caaagttgttgaacttcaagaagagcttgatattgatgttcttgttcatggagaaccagagagaaatgatatggttgagtacttcggtgagcaattgtcaggctttgccttcactgttaatgggtgggtgcaatcctatggttcccgttgtgtgaagccaccaatcatctatggtgatgtgagccgcccaaagccaatgactgtcttctggtcatctctggctcagagctttaccaagcgcccaatga

SEQ ID NO: 79978 - DNA, 252 bp, Glycine max
  Clone ID: 700962196H1
attccctttccaacttgttaattaattaagccttcttataattaaagtgtgggatatatatatatatagataaacagtttaatttatacacactttgatcctacaaagcatcttgacacaagcattcaataggatttcaccactttatcgcaacattttaacatgatgcggtaataaagtaaattcttgttgaatatttggataacgatgttatatactcatagtttgtgtgtataaattaaacttatattt

SEQ ID NO: 79979 - DNA, 146 bp, Glycine max
  Clone ID: 700962201H1
tgatagggtaggcacaacaacaaattattaccacaataagagagtatgttgcttgatcacatggctacaatttgtaagtgatgattaattaccaataatcgaatctttggtaatatatatttaaaaatcaatattacattatgtgt

SEQ ID NO: 79980 - DNA, 171 bp, Glycine max
  Clone ID: 700962202H1
gtaaactagacccgcaaatctatggtccacaggaatcaacaacaactagggaagtcattgagccacaaactatcacttatggaacaactgaagaggcccttaaagaaaagaagttgttcatgctggactaccatgatttattcttaccatatgtaagcaaagtgagaaaaa

SEQ ID NO: 79981 - DNA, 290 bp, Glycine max
  Clone ID: 700962203H1
gaaaagtgaagttcaatatagtctctggcacctcaatgtcatgccctcatgtgagtggcatagcagctttggtcaagtctaggcaccctgagtggagtcctgctgctataaaatctgctttgatgacaacagcttatgttcttgacaacaccaagaaaactctcagagatgcctcaactgctaaaccatcaagtccttatgatcatggtgctggacacattgaccctattagagctcttgaccctggtttggtctatgacattgtgccacaggactactttgaatttcta

SEQ ID NO: 79982 - DNA, 289 bp, Glycine max
  Clone ID: 700962205H1
ctcttctctgcatgtttgttctctcaacgactcctccgcgaaagagcattattcaatatcttggttgggttgaatcccggggttgaagcgttgcagacatcacggctactctaagagtgtctcgctccctcattcatgtccgatctgtacgacggaggacgggtagttgcgtaactgccgttaacccttcgtcgcacggtgggcgtggtgctttgccttctgaaggtggtagcccttcagacttgctcttcctcgctggtggtggtttcttctagtttcttcactcttt

SEQ ID NO: 79983 - DNA, 195 bp, Glycine max
  Clone ID: 700962206H1
ctattctcaaactttaaatacacacgacggcacggctgctatgccaagccgcgccatggaatcgagagctccaagtgggccatttttggtaagcagaactggcgatgcgggatgaaccggaagctgggttacagtgcccaactgcgcactaacctagaccccacaaagggtgttggtcgattaagacagcaggac

SEQ ID NO: 79984 - DNA, 287 bp, Glycine max
  Clone ID: 700962207H1
cacctcttctcttctcccagaatcggtgtaggttacaggtttaagggttttgttttcatttaggtcactaatccgatatcatgaagcccgatacgactagtctcgaatcgtttcccacactgattgcacctaaaaacgacgtcgccggagaactctccgccgctccgttctttgaccttccgaattccaatgacttcgatgggttcttgaaagacgctattcagatggtgaagcccgcgaagggcactacaactcttgcttccacacctaaagagggtgttatggta

SEQ ID NO: 79985 - DNA, 222 bp, Glycine max
  Clone ID: 700962208H1
gtaagattcatgacaaggttgctgtcgtgtacacagcaagaactttcagcctatcaaggttgtctggaggattgaacccctgaaatagatgggaatgttaccctctctgtttctattatttatatttatttatctacatgttccttacaagaataatcagtcatgttgaggtgtatgttatatttttttcccactgaacacaaacttgtttatgcgaatatt

SEQ ID NO: 79986 - DNA, 287 bp, Glycine max
  Clone ID: 700962209H1
gggactacattttttgtttaaagtaaattcatcgatctttcacttccactttcgtttttatcactctcaggacatcctgtattaacagtgaaaagtgcatctgaagagacagaatgcaaggacccgggggtggcagggatcgtttctttgattttggcgatccttttggtggttttggaggctttggttcctttggacctcccaggagtttaatctcaagcttttttgggggtacggacccatttaatgatcctttcttcgcccgaccttttggagggatgtttgag

SEQ ID NO: 79987 - DNA, 285 bp, Glycine max
  Clone ID: 700962210H1
agagtccgagaggcatcatggcgacactggattccgacgtgaccgtgtttccggccggcgaagctccagcagcgccggtccttcttcgtccaccaagaagccgaagcgtttcgagatcaagaagtggaatgcggtttccctctgggcttgggacattgtcgtggacaattgcgctatttgacggaaccatatcatggatctctgtactgagtgccaggccaacaaggctagcgccactagcgacgaatgcactgtagcttggggagtttgtaaccatgcttttca

SEQ ID NO: 79988 - DNA, 285 bp, Glycine max
  Clone ID: 700962211H1
atacactgtgggagagtaccttctcttggctgctgttagtgcactgcaagtcatatacatcaggcgcctcttcagcaagtcagtggcctacaatcgtgtttgagtccccttcatgattaacgttatggtttccttcattagcaacaggattaggtttattacatatgcgttctctattcaacagtacgattacaatcccttggtgaacactttttttcttttcaagagagactccacttgtatgttgatacccaacaagatatttaaattccttacaacttgaat

SEQ ID NO: 79989 - DNA, 284 bp, Glycine max
  Clone ID: 700962212H1
agccaaaccaatatgtggctagaggtctggttagaacagatgaaagcaaacagaacattggtgctgcagatgacgttattgttggggatataagagatgctgaaagtattgttcctgcaattcaaggtatagatgccctcataatcctcacaagtgcagttccacagataaagcctggttttgatccaaccaaaggacaaagaccagagttctattttgaggatggggcatatcctgaacaggttgactggattgggcagaaaaatcaaatagatgtcgccaag

SEQ ID NO: 79990 - DNA, 286 bp, Glycine max
  Clone ID: 700962213H1
cttgggtacaggggcgaaagactaatcgaaccgtctagtagctggttccctccgaagtttccctcaggatagctggagcccgcgggcgagttctatcgggtaaagccaatgattagaggcatcgggggcgcaacgccctcgacctattctcaaactttaaataggtaggacggtgcggctgctctgttgagccgcgccatggaatcgagagctccaagtgggccacttttggtaagcagaactggcgatgcgggatgaaccggaagctgggttacggtgcccaact

SEQ ID NO: 79991 - DNA, 286 bp, Glycine max
  Clone ID: 700962214H1
accttcttccctttctcacttaccactctcacccttctttccaaaacactccctttcactttctattcacttcccctacccttccgtgatgatgtagatagagaataaaaagagaccagtgtgcagtgagaaagagattgctcacttcttgtgtgggtttgttttgttctttgtgttggaatttgttcatgggtgaagaaggagaagaggtgtcaagagagaaggaacaatacatgggagtttatggaaatgagtggttgtattgtggttgctctgcaaattggcg

SEQ ID NO: 79992 - DNA, 282 bp, Glycine max
  Clone ID: 700962216H1
attctcttcccaaactctcttcttctattccaaagacccttttgaagtaatcgatggagtttcagtctctttccagattctacgttcttctttccttaaccattctcttccttgcaccctttcacgctcaagctaaaattaaagtcacttactgcgataagaaggcagactatcctgtgaaggtgtctggagttgaaatatcaccagaccctgtggagagtggcaagcctgctacctttaagatctcggctacttctagtaaagctatttatggtggagaag

SEQ ID NO: 79993 - DNA, 292 bp, Glycine max
  Clone ID: 700962217H1
aatcaaataagccaacattaccagagaagtcagagggatatatccaggtctttcttgatggaggtttgaaccaacaaaagatggggatatgtgatgcagttgctgttgcaaagacactgaatgctactctggtgatcccataccttgaactgaatcctgtatggcgagattcaagctccttcatggatatacttgatgtggatcatttcattgatgtattgaaggatgatatttctacagttaaagagttgcccaaagagttcgcctggagcacaagggagtattatggctt

SEQ ID NO: 79994 - DNA, 289 bp, Glycine max
  Clone ID: 700962218H1
aggctcgagtgttagattagaagccggtttgtgatgttgcacttcactttttgcaggctggattccgattccaccatgctgaaccagattaccttgatgctcgtgaattggattcccaatacctcccgatacacttcctgcaaatgcttcgcaccgcgttgctgttggtgcttttgtcatgaatgccaatagggaggtgcttgtggttcaggagagcaatggcaggtttagtggccaaggaatctggaagttgcctaccggaggcgttgatgaaggtgaagatatttgt

SEQ ID NO: 79995 - DNA, 288 bp, Glycine max
  Clone ID: 700962219H1
aaaacctgttggtttgatctccaagaaatcttctatctcatgtaaatcaacaggagcaaacaacactgaagagaaagaaagtattacaacttatgatgatagggcacataccaaagatgagaaaaatgatcacactcttgttgttcatggcttggctgatgcttgtagattcgtttgtaatgatgcaaagtttctctcacgtggcataatgaggttggatgctcgtgcacgtcaagatgttgcttttcttgggactgaatttctcaaacttgatgctcgggcaagaga

SEQ ID NO: 79996 - DNA, 284 bp, Glycine max
  Clone ID: 700962220H1
attaatggaagccatttccaaccaaaaccacattcctctcttcaatgcaaatgaaaccctccctgaccaattctccctcctgtcaaaggtccttctttcaaaattctcaaatcttctttggccttgtaccttcttacttgtgcaaaaccgggaactaatgttccattttgtgctactatgtttcccccttgtttgtttcctggtgaagcatttcctctcaaagccctcacccatttaccttgtggacttctcatgtcttaaacctccaagccactgcagggtgc

SEQ ID NO: 79997 - DNA, 287 bp, Glycine max
  Clone ID: 700962221H1
ggagcagccatgtagtgggaaaaattagctcatggacagatttggactcagaggatgaaaccctcagggtagattctgaaaccactcttagacaagaaattgcttgggcttctcatctctctttacaggcctgccttcttcctgcccccaagggaacttcttgtgctaattatgctagatgtgtgaatcagattttacagggttcaaacaatatgcagttgtggcttaggcttccattggtgaagcctgatgatgactctatggatgcaaagtctgttgctttggtt

SEQ ID NO: 79998 - DNA, 285 bp, Glycine max
  Clone ID: 700962222H1
aaaaatactaagatgacaaacattggagcacttgttgtactctttgcatttctcttcctcagttgtgcctatgcacaagacacaacaacccttgtgcctgcaatcataacttttggtgactcagccgtggatgtagggaataatgactatcttcccacccttttcaaggctgattaccctccttatgggagggactttgctaaccaccaacctactgggaggttttgcaatggcaaattagctactgattttactgctgacactttgggttttaagacctatgct

SEQ ID NO: 79999 - DNA, 127 bp, Glycine max
  Clone ID: 700962224H1
tttcactgcagagtgttattttgagtatcagcatcaatggctccaattgcagtgggaaacgtgattccagacggcattttggcttacttggatgaagaaaacaaaccccaaactgtctccattcact

SEQ ID NO: 80000 - DNA, 226 bp, Glycine max
  Clone ID: 700962225H1
ggccagactcagttaaacttattgcaacttgtgctctagtgctcatagtggtcactgctttctttctacttcccaaaactcagggtctaattagtcaacaatgagaaagtactgattacattctcttagttgttggcagtgactaaaccaattggtctcaggttttctaagttttagatagtagacactagtaatagatttcttctctttcttagtctcttttgct

SEQ ID NO: 80001 - DNA, 281 bp, Glycine max
  Clone ID: 700962226H1
gacacaaagcacatagaagagaaagaaacaaaacaaagaggagaaagaaagtagttgaggaagatacaaacaatttttgcagattgttgagaatgcctttcaagaagcctcatcacacctcagacaagaactacataacaggggacgacggaggcaagttcgagatacaacctagaggactcaacattgtgtggggaaatgattctcgatactggaaaattccagaacaaggtcctgcggagctgatccaagtttcatggttggaggtatccggcgtggta

SEQ ID NO: 80002 - DNA, 283 bp, Glycine max
  Clone ID: 700962227H1
actacatcagtgatttctcctgatgtttcatatgcaagcagctcagcaacaacaaatgagatatatgaggttggagagttgtttgatttaagcatccaactaatatacttggtattgctattaggtttgctagggactggaactttctttgtgattagtcaagttcttgtccgcagagaacttgacctatctgccaaagagttgcaggagcaagtaagaagtggtgatgctggtgcaactgagctttttgaacttggtgcagtgatgctgcgcaggaaatttt

SEQ ID NO: 80003 - DNA, 284 bp, Glycine max
  Clone ID: 700962228H1
gaaatgttgaagcagaagaaccttgaaaaacaagctcaaaatggtgaaatcaatttagatagagaagtgaagactggagaatcttcagaagggtcacaggagcaaagtaaccatacaaagatactagctacttccaatgcctttgatgctactacccacaatgtcggctctcatttgccgggaaatttcatcgaaccatcatctgttccactgtttaaagagtttatgacgaagttcagatcatctttgagaagtcatagcaatctttctctgctccttattac

SEQ ID NO: 80004 - DNA, 284 bp, Glycine max
  Clone ID: 700962230H1
aactctttgaaatgttgtcaccccttcttctatttctacgcctaactcttcctgtgtttttgttgtcgttcttcaaataccgtaaaaccttcaagaatccaccacctccaccaggtcctagaggccttcccataatagggaatcttcatcaactagatagtccttctcttcatgagcagctatggcatctctcaaagaaatatggtcctttattttcccttcaatttggactaaggccagccatagttgtttcctctccaaaactggccaaagaggtaatgaaa

SEQ ID NO: 80005 - DNA, 277 bp, Glycine max
  Clone ID: 700962232H1
catttgctactatgggctctcttcatgacatattgcacggtagaaagggagttcaaggtgctcaacctgggccaactcttgattggatacagcgagttagaattgcagttgatgcagcaaggggattggaatatttacatgagaaagttcaaccgccgattatacacagagatatccgatcaaataatgtgctaatatttgaagatcacaaggccaagatagctgactttaacctttctaatcaggcccctgacatggctgcacgtcttcattcaac

SEQ ID NO: 80006 - DNA, 289 bp, Glycine max
  Clone ID: 700962233H1
gagaaagatgataaacctgaggactccaataactcattgtctagtgaagacagcaacagcaacgataaagatgggtccattgatgaggaaaggtcatcaccaattgcacatgctgttaaggttgagcatgacactgacactggaaacaggttgaaggaaaataaaaaccctgaagcatttacagaaggctcacgcatggacggcttggcttgtgagagtaatgaaacgcgtccgggtaaggatgaaggacaagcagatacacacacaatcagttgttcaatgcataaag

SEQ ID NO: 80007 - DNA, 292 bp, Glycine max
  Clone ID: 700962234H1
acgaaaacaaaatctctctttctctctcctccccagaaacaaatttgtcaagcttttctctctgtcaaaaccgaaacgcagaaaacaaaacaaacacacacaacacagcacaacccaaaagaatagccaacagcaaaacgcaaacactctcctcaaaacgacaaccgccacaaaacaacacaaccaccgcccctaaccgccttcatcttctctctctctctttagggtcgatggctgaactcggaaacaacaacaacaacggcgccaacacgacgtcgtcgaggttctcctt

SEQ ID NO: 80008 - DNA, 283 bp, Glycine max
  Clone ID: 700962235H1
aaaatgggttcttctttgtggactttgtgtctaattttggcttcactagcctcttctgcattctgtgcctttccacggaggccagtggatgttccattcggcagaaactacgttcccacttgggcttttgatcacatcaaatacttcaatggaggttctgagactcaacttcatcttgacaagtacactggtactggcttccagtccaaagggtcatacttgtttggtcacttcagcatgaacataaagatggttcctggcgattcagctggcacagtcactg

SEQ ID NO: 80009 - DNA, 282 bp, Glycine max
  Clone ID: 700962237H1
atcaggttgacgttattctcagcgatggaagcttccacagagccgccgtgctgagcggtgcttcaacaggtaaatgattgctgtttgtttgagagagaaaaagaaatgtgttcagtgagctgttagtgttatgctgcttaaagtgtcattatcctgcaaaacagagattgttgtgtttgaagtgtggtagttgattgtctatgagtggaaatgtggaatgcgtacgttttgcgtgttatattgatgttcattggctgcaaagtttgatttcatctggttatg

SEQ ID NO: 80010 - DNA, 277 bp, Glycine max
  Clone ID: 700962238H1
atcaatgatgtggatgtgggggacatgcttcttgttgatggtggtatgatgtctttggtggttaagtctaagacagaggattctgtgaaatgtgaagttgttgatggaggagagctcaagtcaaggagacatttgaatgttagaggaaaaagtgcaacacttccttccatcactgagaaggattgggatgacatcaaatttggagtggataacaaagttgacttctatgctgtttcttttgttaaagatgcacaagtagttcatgaactgaagaatt

SEQ ID NO: 80011 - DNA, 281 bp, Glycine max
  Clone ID: 700962239H1
tgagaacgaaaccctagagagaaagagagcgagggtgagaggttagaagagaaagacggtgcggcggcacggctgcggaggttattaacaaaatggagtacatgcaccggatggcacctccttcgttctggtacgacggaggacactttcccggtcaaacaagttacgctatggaggttcatccagggtatggtgctagtgctaacaatcattacgtggagccacggtacgtgaaccagggttatcctctgcagccacctctaccgtactacatgcacccg

SEQ ID NO: 80012 - DNA, 278 bp, Glycine max
  Clone ID: 700962243H1
atgatttgtaggctattttggtacatggatttcagttgcttgacatatggttgcatcattcagcttgcaatagcagtgatttccgaacacctaaacctgcttgacatgttaactgcaggttcattgttggaattgaagggaattctcattcggaacttgggatttttattagacatggcaacattttttatggcacttggccattacttgtacatatggcggcttcatggcatggctttccatctaatagatgcattgctacttctaaatacacgtgc

SEQ ID NO: 80013 - DNA, 278 bp, Glycine max
  Clone ID: 700962244H1
acttggtgaacactgtactgacaggctacttctttgtacttgggattgttgccctttcggcaacattattaccactttattaaacgttttctgccaaagcattggaatgaggacctcatagtctggcgttttccatatttccgttcattggagattgagtttacaaagtcacaggtcgttgctggaatccctgggacatttttttgtgcctggtatgctttgcagaagcattggctagcaaataatatattgggtcttgctttctgtactcagggaat

SEQ ID NO: 80014 - DNA, 279 bp, Glycine max
  Clone ID: 700962245H1
attccgtcattctactccccacgccttgattttatcggaaaattctcactttccgagaaagttcgtgtttttactgttgaatcgagaattcccaaatcggggtgtctgcaattcaaagctgttgttgcagttggcggctggggtcagtctctgtggaggtttgggtgtttcatgaggcagagcttattctcattttgctccaatggagatgcaggaccaaatagaaagcacaagatcaaccacatttggctcagctagtaacatccattccaatgctga

SEQ ID NO: 80015 - DNA, 280 bp, Glycine max
  Clone ID: 700962246H1
caccattctcacaaaacaactttcaaactctgagaaagaatggctgccaacacattgatgagtactgctatctcagccttcccatctctcctttcttcctcaaaatccagatttgccaccgcagttcctctttctagctttggtgtcaccaatgcctcttcttctcgctttcctatgagtgctgactggatgccaggccaccctagacgtccttaccttgatggttcagcacctggtgactttggattcgaccctcttcgtcttggtgaagtacaagaga

SEQ ID NO: 80016 - DNA, 148 bp, Glycine max
  Clone ID: 700962247H1
gctacacaggagcgactaaagaagaagcacaagatccaaaaagactcaggaccagtggaaaaagtgattcgccacttccctcaaacaaagcctatagttgctgatgccaaaaaaaacaaacctgagctctctgatgatatattggatg

SEQ ID NO: 80017 - DNA, 270 bp, Glycine max
  Clone ID: 700962248H1
aaataaagcacagaatagttgaagtgaatggcataaaaacgcatgttgcagagaaaggagagggtccagtggtgttgttcctccacggcttccctgagctctggtactcatggcgccaccagattctctctctcagctccctcggctaccgcgccgtcgctcccgatctccgtggctaaggtgacaccgaggcaccaccttcaatcagcagctacaactgcttccacatagtgggtgactacgttgcgcttattgactctctgggtgtcc

SEQ ID NO: 80018 - DNA, 281 bp, Glycine max
  Clone ID: 700962250H1
gtgggaactcgaaccagtaggacatcataagagtccaattttgtgaaaattattaccattcattcttattcatcaacgtcaccccttctgtgcccacttccaaatcttctcctctcgctatgggttgtggctcctcccttccagatagggattcaaggcagttgggtcgacccaattccgagaatggtggagggcaggacgccaagaatctaagggtcaagcttgttctcttacgtgattctggcgttggcaaaagctgtattgttctacgatctgttcgc

SEQ ID NO: 80019 - DNA, 278 bp, Glycine max
  Clone ID: 700962251H1
aaggtcctcatgatcgtcatccctctccaggtcctcgccaacgttgcctccgtcgtcatcggcgaaaccggtcccttcatcaaggattgggttacttggaaccaggtcttcctgcttgttgacattatctgctgctgcgccatcattttccctattgtgtggtccatcaggtcgctcagggagacctccaagaccgacgggaaggcagccaggaacctggccaagttgaccctcttcaggcagttctacattgttgtcattgggtacttgtacttcac

SEQ ID NO: 80020 - DNA, 280 bp, Glycine max
  Clone ID: 700962252H1
gaggtcctttgcaaacatctgcaatgtagggacaaagaatgagcaaatggctgaggcctctgcacaagcttgtgtctctattccttccaatccttggagttctctgcaaaggggtttcagtgcataataattcctgtaatgtgcaccagtaaagaccaaagtatgattattgttacatctatgctatatgattgtacttgtacacacatattttgtcccgcctttgtaaatacaattgggacactactaggattgggaagaagggtctttacatttttag

SEQ ID NO: 80021 - DNA, 130 bp, Glycine max
  Clone ID: 700962253H1
gccgacgaaccaactcgctgccaccaccctcgacgacgttcccaaagccaatttctccgaccgcgtcgccattcgatccatcatctcccgccccgacggcggctcgggcctcgccggcagcaaggcgcgc

SEQ ID NO: 80022 - DNA, 279 bp, Glycine max
  Clone ID: 700962254H1
gtcaaaaagagaccctgctgcacagttcctcatcatcttcagaagcaaggacacaattggattgcgatcccttgctgctggtggaaaattattgcagatcaatagaagaatggagtttgtatttgctagtcatagttttgatgtttgggagaactggactctagaaggttccttacaggaatgcagactggtgaactgtagaaacccatcagctgttttggatgtacgcgttgagattttggcaactgtaggcgaagatggagttactcgttggcttga

SEQ ID NO: 80023 - DNA, 276 bp, Glycine max
  Clone ID: 700962255H1
cacgattgtttcagtcgaaccatgaaggatgaaggggtgattgctctttggagaggaaacactgctaatgttatcagatacttccctactcaggctctcaactttgcttttaaggattatttcaagaggcttttcaatttcaaaaaggacaaagatgggtactggaaatggtttgctgggaatttagcatctggtggggctgctggggcttcctctctgttgtttgtctactctttggactatgcccgaacacgtttagcaaatgatgcaaaggct

SEQ ID NO: 80024 - DNA, 277 bp, Glycine max
  Clone ID: 700962256H1
atttccttttcaagagcttgtatggtttcacagtcttcttctcaatgggtgaactactgatttttgtcactcaggctcctgtaaattatgtttctctccgttgtgtaaaacctagtttgaggccactgtctatggctatatctactgtttcaatccatgtctttggtgatgtgccttcctcaccacttgttggggtcctgcaggatcacatcaacgactggaggaaaacagcactttgtttaacatccattttctttcttgctgctgtaatatggtt

SEQ ID NO: 80025 - DNA, 272 bp, Glycine max
  Clone ID: 700962257H1
ttcaaagagagtgtgtaactagtaataactgtgtatttgtgtgtatgtttttatgatcatataataatagatatgtttttggcatgccagttatgagtgctactattactactactactaccttaaactagaacaatgaacaggggaattgaagttctttctccagcctcatacctccgaagttccaattggctgttccaagaaagcttggggaccaggtggactccacaggagaacaagctctttgagaatgctttggctgtgtttgacaa

SEQ ID NO: 80026 - DNA, 278 bp, Glycine max
  Clone ID: 700962258H1
atttcgaaccctttccttttccttccttctccgcctcaccaccctaacccaaccctctctctttctctctccaaaatctctctccctcccaccgttatttagggtttggcagatctcgatccgtcacaatggacgttcgcaagcgcggaaggcccgacgtcaacctctaacggcgccgttaagaagaccaagcaagaattggagtccttatcaagtggtgtacgaagcaaatcgaagccatgtaccaagtttttcagtactgctggctgcccatttgg

SEQ ID NO: 80027 - DNA, 276 bp, Glycine max
  Clone ID: 700962259H1
accaaggtttacaaagaaggtggggtgggatgccaagctagtaaatgaatcacatccatgggttgagaagcaaattgtccaccgtccaaagttttcaccttatcagagagcatttagagacagtcttctagactctggtgtgtcaccctttaatggcttcacctatgatcatctctatggaacaaaggttggtggaaccattttcgacagatttggccgccgtcacacggctgctgaactgcttgcttcagggaaccatgacaaacttactgtttt

SEQ ID NO: 80028 - DNA, 279 bp, Glycine max
  Clone ID: 700962260H1
aaggttgggtttcgctgctttgaccttatctatcttagcttccgtgcctcgtcaagcattggcatcgagccatggctttcatgctagaaagatctttccagttgaaccgtcatcatttaaaggtttatgctcctctgcgatcactattcatggctacgagtgtcaggaacttgaagttactaccatagatgggtacattcttagccttcaaaggatccctgaaggtcgatggaaggttagtggccgtgagactatgaaacagccagtgataatacagca

SEQ ID NO: 80029 - DNA, 275 bp, Glycine max
  Clone ID: 700962261H1
ttctagtgttcttttaagctctttgtgatatttatgtaatttgatttcatcttctttgtggtgtgcaatgaataatggtgatgaagaaatgaacttatggtaatgtgtttgcaaagacacaaatttagccactgtttcgtgtaaaattttctgcgaaaatttaggttcattcgtttttaaatgatatttgctacgcaatttgttatgtaacaaaatgtgatttcattggtagtacatgcaatgaaccagtactgtcctgtgctgtactttgcatt

SEQ ID NO: 80030 - DNA, 277 bp, Glycine max
  Clone ID: 700962264H1
gtttgctactatgggctctcttcatgacatattgcacggtagaaacggagttcaaggtgctcaacctgggccaactcttgattggatacagcgagttagaattgcagttgatgcagcaaggggattggaatatttacatgagaaagttcaaccgccgattatacacagagatatccgatcaaacaatgtgctaacatttgaagattacaaggccaagatagctgactttaacctttctaatcaggcccctgacatggctgcacgtcttcattcaact

SEQ ID NO: 80031 - DNA, 279 bp, Glycine max
  Clone ID: 700962265H1
cagaatttgacaggtgtggctgggagccctgcatatgttgcaccagaagtgttgtagggtagatattctgagaaggtggacatatggagttctggggtgctcctgcatgctttgttggttggtggtcttccatttaaaggagattcaccggaagcagtttttgaggaaattaagaatgtcaaactagattttcaaacaggggtgtgggaatcaacatctaaacctgcacgagatcttgttgggagaatgctgacaacggatgtttcagcaacgatagca

SEQ ID NO: 80032 - DNA, 278 bp, Glycine max
  Clone ID: 700962266H1
atatcttatgtctctgctagtggtgcattggcttcttccattttactcctttctatattttggaatggaaccattgatggcacaggatttcatgcaaagggaacaatttttagattgagtggaatacctgctgctgtcagtttatatgccttctgttatagtgctcatcctatccttcctactctctataattctatgagagacaaaagtcagttctccaaggtgctgtctgcatgctttaccgtatgcacccttggttatgcagcagcaggtgtttt

SEQ ID NO: 80033 - DNA, 278 bp, Glycine max
  Clone ID: 700962267H1
gacacctatcaatttcgtaggtttgtacatcttttggtttggggcgaaagttcagccttttcagatttgcatcaatttcaacagagaacaaccgtgatttgtggattgctgtaaagtgcattatttggccattagctaatggacaagggggtgcctcctagcctcttcgtcaatgatggttctttcatggagaggttcaagcaacttcaacaagagcaggataaagggaagaatgtcaaattggaggattctaaaccaattaagggtggttccagtgg

SEQ ID NO: 80034 - DNA, 276 bp, Glycine max
  Clone ID: 700962268H1
gaaaaggcgtcttcataaacgccgcccaaaacttctcatacccttttattcattccattcgtttctagggttttcttttctttgccgagaaaatgagagagtgcatttcgatccacattggccaggccggtatccaggttggaaacgcctgctgggaactctattgccttgaacacggcattcagcccgatggacagatgccgagtgacaagaccgttggcggaggagacgacgccttcaacacatttttcagcgagaccggcgccggaaagcacg

SEQ ID NO: 80035 - DNA, 277 bp, Glycine max
  Clone ID: 700962269H1
tccattttcgcttctcgtagcgttttcggaacagttatggcttccattgccggatccaactgcgtcgctctccgaaccgccaaccttcggcgcctccggtaaccggaaaatcggccagatccgccaatggtctccgattctcacgaatctccgtcccgtttccggtcttcgtcaccgatcgaatactccgtttagctcctccggtgtgagagcacaggttgctactctggacgaagcaagaaccggagcaactcagaaagtggaagcgccggttgca

SEQ ID NO: 80036 - DNA, 272 bp, Glycine max
  Clone ID: 700962271H1
cactccctcctttgctgaaaactaccgggttgtgctgtttgattggcccttttctggagctgtgaaggatccaagcctctatgaccctttgaagtatacctccttggaagcttttgcagatgagttgatcactcttatggatcagatggacctcaaagctgtcacctttgttggtcattccatgtctggcatgattggttgcttagcctccatcaagaggcctgaactctttaagaggcttattctccttggtgcttctcccaggtatatta

SEQ ID NO: 80037 - DNA, 126 bp, Glycine max
  Clone ID: 700962272H1
agcactttgtacataatacgcaggctttggcttcagagctaagaattttccaataaatataagcttttggcttcagtgctaagaactttccaataaacatcatatttgttaaatacattttgtcat

SEQ ID NO: 80038 - DNA, 270 bp, Glycine max
  Clone ID: 700962273H1
aacacttcacaatctctgtttcagctttctctcttttctacaatggcttgcaccaccgtcgtgttgacgctagtcgccgcattgttggtaacctccgtcgtggctcagtctccggcgtcctcaccagctctgtctccaaagcgcacccccgtcgccacacctcagaagtctccctcgccggcgatttctccctccgccgtgtcgccgtcgtcctctcctcccgctccggtggtgaacactccgtctccgtcaccaaactcagtcgactct

SEQ ID NO: 80039 - DNA, 269 bp, Glycine max
  Clone ID: 700962274H1
atgttttcatgttcttctctggaaatacgggagaagaacaagatgcaagagaaccacaaggcataatgcatttcgagattgacatagatgtcacgttgcatgacaagaaattagccagattgaatcctttttattgttgttgttggcttttcagaaaaggttaattgtttcctctcatgggaaattgctgtggaactcgttgcaaggttgatgacactttgaactccaaccacagttctgcagatgttaccaaagttcaccgtagaagc

SEQ ID NO: 80040 - DNA, 273 bp, Glycine max
  Clone ID: 700962276H1
ggccgacgaagccaaagccacaggcaacgcagccttctcctccggggactatcctgccgccatccaccacttctccgatgccatcgccctggctccctccaaccatgtcctctattccaaccgatccgccgcatacgcctccctcaaaaactaccgcagatgcattagcggatgccaaaaagacagttgaactcaagcccgactggtccaagggttacagccgtctcggtgccgcgcatcttggcctttcccaatacgatgatgctattttgg

SEQ ID NO: 80041 - DNA, 276 bp, Glycine max
  Clone ID: 700962278H1
cacaacaaaaccctctctctaaaaccctctctctgtctcccttccttctcatcttcaccaccaccaatggcgtcgccgccgccaccaccttgtgtcctcctcctcttcctcaccctcgtcgccgccacggcttcctccctcacctgcaccacccaaaagctcacggactccaagaacaacctctactccaactgcctggacctgcccgcgctcgattccttcctccactggactcacgaccccaccaacgcctccctctcggtggccttcgcggcg

SEQ ID NO: 80042 - DNA, 274 bp, Glycine max
  Clone ID: 700962279H1
cacagtggtggatgtggtcgggtacgagcactagagatgggaagctgcccgggacccatagagacacccgctcttctcctatctacctcgtaaagggcttcctcactttatctcccctgacctactcacttctctcccttcccccgattcccatctccttcaaatttctccactccactttttggaaggacttgcttcaaccactacatcaaaattaggagggcttcaccaaatgcttggtttgcaccaacatggaatggcggctgtagccagg

SEQ ID NO: 80043 - DNA, 125 bp, Glycine max
  Clone ID: 700962280H1
gtgcagggttgcgatccgaaatgggtcctggctgcccatagctgaagctatacaagctgcataatggcaagtccctcggaaaggaatgatcggatgcaattgccattgtgtccaactccacacag

SEQ ID NO: 80044 - DNA, 278 bp, Glycine max
  Clone ID: 700962281H1
agcaacttcacctgctccaacttcgagacatcaaatgatcatagtatttgaatgccatgtctgattgtctggctcattaagcatgcagacaaggataagacatgtgatagttttcctatgagtaactgtttctgccaattgattgtcaacattaccagatctgctatgcactcacagttgaactcagcaatgatgttgcacggatctctgaaacgtaattatgtatacatggtcacccacaaatggtgttcagacaagaattgagacagatccagcag

SEQ ID NO: 80045 - DNA, 274 bp, Glycine max
  Clone ID: 700962282H1
aaaatatcaggctcgtcaaaaaggacaaattgggatcactaatccaacacactactttttgccaaaatctcaaagtgctgcagattacaaggcagcaagtagagctctggacttcttccttggttggtattctgatccggttatctatggtgactatccggagagtatgaaatcttcagtaggttctaggctcccaaaattcacaaaagctgaatctgaaggtctaaaaaattccacagattttcttggtgtgaattactacaccacttattat

SEQ ID NO: 80046 - DNA, 269 bp, Glycine max
  Clone ID: 700962283H1
agcttacttcttcttcaccaaagacatcctccatgggaagaccatcgacgtctaccagacgccggaggggaagcaggtggcgcgtgactttacctacatcgacgacatcgtcaagggttgcctcggcgccctcgactccgcccagaagagcaccgggagcggcggcaagaagcggggccctgcccagctcagagtgtacaatctagggaacacgtcaccggtgccggtggggaccttggtgtccattctagaaggtttgctgaaaacca

SEQ ID NO: 80047 - DNA, 272 bp, Glycine max
  Clone ID: 700962284H1
acgctccctctacctcgctttctcccccgacgaggaaatcggtggccacgacggtgccgagaagttcgctgactcctctatcttccaaagtacgaacgttggcgttgttcttgacgaaggtctggcttctcccgacccccattaccggtctttctatgccgaaaggagtccctggtggttggtcatcaaggcctttggtgttcccggccatggcgccaagctttatgataactctgccatggagaatctctttaagagcattgaaagtatcc

SEQ ID NO: 80048 - DNA, 274 bp, Glycine max
  Clone ID: 700962285H1
aacagaatcttctaatattccctcttctctctccttctatttatccttccctccataacagtaacaaccaccaccacctctgcaacacaacacacataacaagtaacaaagagaatgagagcgctaaattcgtacgtgctcctcgtagatcttcactcccaccatcacgtgcccacctcaaccctctcctacctcagaaactcccgcttcatatcatccctacgtcgacgctccccaagaaccggaatccgatgtacggcgtcgcaggagattt

SEQ ID NO: 80049 - DNA, 267 bp, Glycine max
  Clone ID: 700962286H1
aagctcgaggacttctttggggaaatttcaattccttgagtaattagggttctcctgtttgattacatctaattagaggcattaattgtccgattcagccgtgtgccataaaatttgacggacactggttcaaggtaatcatggtgcacaagcgttcttttgatgctgaggaaatacttgaggggtctttcaaacacccaaaacatgcaggaccaagcactgagcttttttcattaccagaatctgttttccccgatgatgattgcc

SEQ ID NO: 80050 - DNA, 269 bp, Glycine max
  Clone ID: 700962289H1
taccgcggtcgcggttgcagaacggagaatcatcatcggaagctgcaggcaaacaggtatcatcacgggctcagtctggaggcttaaaaagtgcagatatttgtactccagagacagcacatgattttgaaaacccaaaggagtctgaatctcctcgttttcaagctatattgcgcgtcactagtgcacccagaaagaggtttccttcagatatcaaaagtttttcccacgagctgaattcgaaaggtgtctggccttttccattttcg

SEQ ID NO: 80051 - DNA, 267 bp, Glycine max
  Clone ID: 700962290H1
gtggacctggccaaggacattcttcaggcgaacccaaataactacgcggtggtggtgagcacggagatggtggggtacaactggtaccaggggaaggataggtctatgcttatcccgaatagcttcttccgcatggggtgttccgcggttctgctttccaaccgtcgaagggactacagccgcgcaaagtaccgccttgaacacattgttcgcacgcataacggtgccgatgaccgcagcttcaggtgtgtgcaccaagaggaagat

SEQ ID NO: 80052 - DNA, 264 bp, Glycine max
  Clone ID: 700962291H1
aatggtcaatgatactttggttcgccaggctgcaatggtactcaagtgtacattgttgatgtattacaagaacagcagaggccgaaattatcgtaagcagggtcaaatgctgactttagttgaatacctcctcctgctttaccgtgccttgttgccaacaccagtttggtatcgtttcttcctgaacaaagaatatggaagcctcttttcatcactgatgacaggactgtatctaacacttaaactcacgtctgttgttgaaaa

SEQ ID NO: 80053 - DNA, 268 bp, Glycine max
  Clone ID: 700962292H1
atttcattaacccaacagtgtcgctgcaggagaagaagatcgaatagaaacgaaacgcgaataagtttctttctctcttgctggacgaataatggttctgaggaggaagaagatggagcagcgcttcaccttcttctgctgatgttgatttcatggccacctcccagtcccagcatcgctgcgttttcgttgggaacataccgtatgatgccacagaggaacagcttattgaaatctgccacgaggttggcccagtagtctcattcag

SEQ ID NO: 80054 - DNA, 268 bp, Glycine max
  Clone ID: 700962293H1
aaaagactgatggggacctgtgtaatccctatgcctcagatggaattgtctagcaatgatgatgaagttggaaaggcaagtactgactgtagctgtgaagaccagggttccatgagatgtgtcagacaacatattgctgaagaaagagaaaaacatataaaaacatttggggttgagaaattcactgaattgggattcactaacatgggagaacaagtggcagaaaattggagtgctgaggatgaacagctatttcacgaggttgttt

SEQ ID NO: 80055 - DNA, 133 bp, Glycine max
  Clone ID: 700962295H1
taggatgaatatgggttcttcttcccgtcgggacactagcaagacactagagctagagcgatacaacagctacatccggagactcaacagcaacaagctcctcaacgcctcctccaaactcgtcttgcgcgcc

SEQ ID NO: 80056 - DNA, 275 bp, Glycine max
  Clone ID: 700962301H1
tgataacaaagttgaagaagaaaaggccttagtgctcagtgctagagaacttttttttgttttcttctttttttcttttttcatctcttacttccatgatttgttgtgggcttctcaacatcatacattgactctatcagtttcattcctgaatcaattagtttcttcactttcactttctaactgggaggatcaaagtgtgtgtctttgtcctcttggtgttgtttcttcttcttcttcaagtgtgcttcataaagcagtaggatttggaagca

SEQ ID NO: 80057 - DNA, 256 bp, Glycine max
  Clone ID: 700962302H1
gtacaaaaaagtgtcgtatctgagaagaatatacattaagcaagtcatgcaggttaattccccagatatttgtaacatctttgcttgttgacgtcttgacaactcacacactacagcactttacacggtgacacttcactcaatgttcttttgggttagaatcctctaccggtcaaaactcttcgtaagtagccccttctgaaactgccgataatccttcgccgcacggtgaggatcaatgattgtcaccacaaat

SEQ ID NO: 80058 - DNA, 266 bp, Glycine max
  Clone ID: 700962304H1
ctcaagagaactctcaagggatacatcgcagccggattcgccggaatcattctcgaagatcaggtttctcctaaagcgtgtgggcacacgcgcgggaggcgagtggtttctcgagaagaggcggtgatgaagattaaggcggccgttgatgcgaggagagagagcggttccgacattgtgattgtggcgcgcagtgatgctcggcaagctgtgtcgttggaggaagcgcttgttaggtcaagggcctttgcggatgctggagctga

SEQ ID NO: 80059 - DNA, 264 bp, Glycine max
  Clone ID: 700962306H1
gaaaaatctagactagttgaagaaagaaacgcttgtctttccctccgtcctcagtctggagcatcatcatgatccgttcccttccaatttaccccaaaaattaaaatatactatttcattccaatgtttcccaagaagcggcaacgcaccaccgcagcctgccgttcctcctccacactcgccaccatctcttccctctccgacgtaaacctaaccgaaatctcccataaccctcgaccttcctctcccatgcccgacgaccgt

SEQ ID NO: 80060 - DNA, 265 bp, Glycine max
  Clone ID: 700962307H1
agacaattcaacttaagagatcaatatggccaccaccactacccagcctccctctaatatctgttttttccttctgttgttgcttctagcacactttcatttgggcataagccaacttgagctgaattactactctaaaagctgcccaaaagctgaagagatcatcaaggaacaagtcacacaactatataacaagcatggaaacactgccgtttcgtgggtcagaaatctcttccacgattgcgtggttaagtcatgcgatgca

SEQ ID NO: 80061 - DNA, 258 bp, Glycine max
  Clone ID: 700962309H1
aagttctactgggcaccaacaagggatgaccgcattggtgtctgcactggaatttttcgcaccgattcaattcctgaacatgacgttgtcaagattgttgacaccttccctggccaatccattgatttctttggtgcactgagggccagagtatatgatgacgaagtgaggaagtggatttctggtgttggtgttgacggcattgggaagaaacttgtgaactcaaaagatggacttccaaccgttgagcagcccaag

SEQ ID NO: 80062 - DNA, 261 bp, Glycine max
  Clone ID: 700962310H1
ggaagaagagctaaattcaattattgtggaaatgagaaggaattgcacttctttacaagagaaattggtgaaggaagaatccgaaaaaacagcagcagcagaatctcatcttaaagagagagaagctaggcttaactttgagaggtcacagagtacactgcaggaggatcttggacgagcacaacgagagctccaaagtgcaaatcagaagatatcatctctcaatgacatgtataagcggttacaggattacataacaag

SEQ ID NO: 80063 - DNA, 257 bp, Glycine max
  Clone ID: 700962311H1
gtcagtatagtcagccaggctttgatatttgtaacccgttctcgaagctggtcctttattgaacgccctggaatgctgttagtttgcgctttcgttattgctcagctgattgctacaatcatagcagtatatgctgactggggctttgcaaaggtgaaaggaattggttggggttgggcaggagtcatctggctctacagtattgtcttctatattccacttgatgtcatgaagtttgccacccgttatgtattgag

SEQ ID NO: 80064 - DNA, 116 bp, Glycine max
  Clone ID: 700962312H1
cggctcgagtgctgcaagtgcaactccaagaagcgcagtggcaagccaccatgtttcaacattcaacagaagcgtttggccttccacttttctctttggatttggttcttctgctt

SEQ ID NO: 80065 - DNA, 260 bp, Glycine max
  Clone ID: 700962313H1
ggcaatcttcacagcacttgctttctctcagaagctgtctggtctcccaccagaaactgtgttccaaccacttcttaaagataacctagtggccaaagggctagttctgtcatttatgactgacttctttaaggagtatctgattgacaacagccttgatgatcttatttcaattctaaaacggggaaaagtagaggaggatcttttggacattttcccccctacaaaaagatccattgaagctttctctgagcatttca

SEQ ID NO: 80066 - DNA, 255 bp, Glycine max
  Clone ID: 700962314H1
atggaattttgcaaaaaggtagtcatcgcccgcaacgatcccatatcccttgacttctctacgtgaagatccttgtttcgcatagagctagttaaaatgtctgatggaaatgcagggaaaggaaagagaatcggcatcattggcgtctcagccttattgttggtggctatggttgtggcaatcacagttggggtcaatctcaatgagaatggttccaacaatgatacagagcacgacaagagaaatcatgtaggt

SEQ ID NO: 80067 - DNA, 270 bp, Glycine max
  Clone ID: 700962317H1
gcagcatccaaaggcttctagggttttttttttttctctatcaatctttattagtgttttcaggtcctcctcttcatatctaagtagttcagcgtttttttgtttgtcctttttaattcaattgcgtttagttgcgaagtgcctatgatggtgttaaatatactccgagatttatttctatgacatcaacttcgttctgaggcactagcttatccttccttattttcgattggaagcacatgaaagtgctgtgagggttttgctatactt

SEQ ID NO: 80068 - DNA, 268 bp, Glycine max
  Clone ID: 700962318H1
gccggccataacagacaacggagggcgtttcacattgatcaacagaaacaggtcgtgccctttgtacgtcggtctcgaaaacaccgacacgccgcagggctacccgatgaaattcaccccttttgccaacaaggacgacgacgataacttgagggtgaacacggacttgaaagtgacactggtgcaagtttccacaacgtgtgtgcaatccaccgaatggaagttgggtgagaatgacacgaggagtggaaggaggctcatcgtcact

SEQ ID NO: 80069 - DNA, 265 bp, Glycine max
  Clone ID: 700962319H1
caatgctcctcagctgtcaacaagtgcagggcacagtagagaagcttctggtgaattaaatccagggccagaaactgctggtactacttctgtggcatcagtgcatagagaacctgagttcccactccgattggagacaaggtctcgaagtcaagccatttggaggcggccatcagagaggcatgttcctaggatagtatcttctcctgttgttgaaacaagagctgatctttctgctattgaaacccaggttcggaatttggtt

SEQ ID NO: 80070 - DNA, 262 bp, Glycine max
  Clone ID: 700962320H1
gttgcgttttaggcctaccagacaaagactatggagagattgttagtgcaatcgttgtgccagaggccgatgttaaacgaaaacaagatcaagaatcaaagcctgttctaagcctagaagaattatccaactgggccaaagacaaaattgcaccttacaagattccaactcagctaatcgtgtgggataaactccctcgcaatgccatggggaaggtaaataaaaaagagctgaagaagctgcttgtttcagaacagtgaac

SEQ ID NO: 80071 - DNA, 240 bp, Glycine max
  Clone ID: 700962321H1
tgtgtttgcattgagttgtgctgttccttcctcctgttgtctgtctcttaacaaatcaattcatttccgccgtcgtcgtctccgccgctgagagcgatgtcttccgtcgaaacggagattgagccactcacgtcgggggcgagcaaccgcataattccgcttcttaaagccctcagagcctccctcatcttcgtctacaccttcttcctttccttcctcctgtttattctccctcgccgg

SEQ ID NO: 80072 - DNA, 262 bp, Glycine max
  Clone ID: 700962322H1
ctcgagccggtttttgagagatcaactacttgatccgagttacacttgctgctcatgtgacttgccatcagaagctcatgttcattgttatactcatcagcaaggcagcctgacaatttccgttaagaaatcggagtttgctttaccaggggaacgagaaggtaaaatttggatgtggcacaggtgcctgaaatgtactcgcatacatggttttcctcgtgctacacgaagagtacttatgtctgatgctgcctggggctta

SEQ ID NO: 80073 - DNA, 248 bp, Glycine max
  Clone ID: 700962323H1
ctctttcaagctcaaggtcataagggcatatgctttgaacaaaacctgggtgataggttttctaatggatatatttggggcactgttgatgttaagggcattagctcttgcgcctgtctctgtcatccaaccagtttctggctgtggactggcaattctctcagtcttttctcatttttatctcaaagaagtcatgaatgttgttgattgggtgggcattaccttggcaggttttggcaccataggta

SEQ ID NO: 80074 - DNA, 260 bp, Glycine max
  Clone ID: 700962324H1
cagcaacccatcggaatattccctttcttcgttttgaatcactggacggcatggccactcccaatggcttcgtcgacggcacttctccggaatccgcattgatctttctcggcagcggttgttcgagcatggttcccaacgtcatgtgcctccttcagccttctgaccctccctgccccgtctgcgtccagtcattgtctatccctcccgaacgaaaccctaattacaggtgcaatacgtctctcttaattgattactgc

SEQ ID NO: 80075 - DNA, 258 bp, Glycine max
  Clone ID: 700962325H1
aaacaaactcgttttgttttgtttcacgttccgttctgggagttgaaagaaagaaaggaaggatgggagtgacaccgaacaattgctccttcgatgctctcttccgacttcgccaatttggcttccgaggctcagcgcatgctccacttcggcgccgattggctccacatggacatcatggatgggcattttgtccccaatttaactattggcgctccagttattgaaagtttgagaaagcacacaaagggatatttg

SEQ ID NO: 80076 - DNA, 257 bp, Glycine max
  Clone ID: 700962326H1
gaattctaagcagggcatccactgatcaaaccaatgttgatgtctttatccccttgttcatcaattttgtggtggctatgtacattacagtgatcagcatcttcataatcacgtgtcaaaattcttggccaacagctttcttgttaattcctcttgcttggttaaacatttggtaccggggttattttcttgcttcatctcgcgagttaactcgtctggattcaattacaaaagcaccagtgattcaccatttctct

SEQ ID NO: 80077 - DNA, 258 bp, Glycine max
  Clone ID: 700962327H1
aacactcataacacaaagcacaaagcaaagctcatccttgagttaaaaaatggcagcagcttcttccatggctctctcatccccatccttggctggcaaggccgtgaagctgggcccatcagccccagaagtgggaatggtgagcatgatgaagaccgtcaccaagcaggtctcctcagggagcccatggtacggcccagaccgagtcaagtacttgggcccattctctggcgagcccccgtcctacctaaccggtga

SEQ ID NO: 80078 - DNA, 258 bp, Glycine max
  Clone ID: 700962328H1
cacatatacaaattctctgtgttgtgttgtgtacttgtgttaattgtgttgttgttgtaggaaatttaagtgaagagagaatgatgatgaagtctgctatgtgtgcattggtgcttgtggcactggttgtggttgaagtggggcccatggctgaggctgcggtgacttgcattccaacacagttgactccttgtcttccggcaattaattcaggttctgcaccttcgagtgcttgttgccagaagctgaaggagcaaa

SEQ ID NO: 80079 - DNA, 260 bp, Glycine max
  Clone ID: 700962329H1
ctagtaacccttcttttctctctctctctctcgtgttctgagctgctagaagcaatggagaggaaaagaagccatgcttctttcaccatgtttgcaatgcttgttggattgctctctcagagccttatcattcctgtaatatccaccactgttgcagatcagaagaactactacaccccagatccacatgctggaagtccccccacaggctcacacaatagtagtcctccatctcatggccatgggagctctccaccctc

SEQ ID NO: 80080 - DNA, 261 bp, Glycine max
  Clone ID: 700962331H1
ggttattcttgtctttacttatcattattattattattattattattatatatatatatatacaggttagtcagcttggaacggttgctcaaaaataccagtcttttactcaaaatgcaacacccaatgtatctgttcccgaattacaaaataattgcaatatgtttgttgcatcagcccgtcagttggctaaagccttagaagtaccattggttaatgatttaggatacaaagagatacgtgcgctgcctacagatatca

SEQ ID NO: 80081 - DNA, 262 bp, Glycine max
  Clone ID: 700962332H1
aaaaaaaattaggcgtctaaagggccaaagcttagaaagttgaagctttttttgttgaggtgaaagtgaaatggttggcaaggataatctgagggctgaggacttgaacttgtgctttaagaagcttatgatggtggccgggagtgggaacagtgagaaaggggtgaacttgaaggttggggtgatcaccgagtggaaggatattcctgtggagcttctgatgcaaattctgtcccttgtggatgatcagacggtgatcata

SEQ ID NO: 80082 - DNA, 267 bp, Glycine max
  Clone ID: 700962333H1
gaacattattatattgaatgtcttgtcttgactgagtcagatgatgtgatttgcataatagaatgtgttgcttggttttttactcttttaagccatgtataatggcaaaacatgtgggctttttaacatggtgaattcttgtggcttcaaagaaattttggtattactgtggagggtgggtattgtatagtgcgttagaaagcatattttcaagtttttctgtacagttttggtacactgggtcaatcttatgccttccccaattaa

SEQ ID NO: 80083 - DNA, 263 bp, Glycine max
  Clone ID: 700962335H1
gataataataataataataacctagacgacgagtttcagactcaaaacggcacgcacaaacgatgtcgtagcatcggggatattttctccctctcggaactagccaacagcaagagcgtggtgaagctctgggacaccataggcttcggcctgggcttggacttcgatgattacgatggttactacgttggtaacgcggcggttccgacgagctccaccgcgtctccctcggtggttgtctcggcgggggaaggcgcgtgcgg

SEQ ID NO: 80084 - DNA, 259 bp, Glycine max
  Clone ID: 700962336H1
gtttcatcttctggtggcttatacacatacgggtggagcaaatatggccagctaggacatggaaattttgaggattctcttgtgcctcagaagcttcaagccttgagtgataagttaatctctcaggtatcaggtggttggaggcatagtatggcactcacgtctactggactactatttggatggggttggaataagtttggacaggttggagtcggtgacaatgttgatcactgctctcctgtgcaagtgaagttcc

SEQ ID NO: 80085 - DNA, 258 bp, Glycine max
  Clone ID: 700962337H1
cgcacgcagagggagatggagcttcacgataagaaccacgatggcttcgtttccttctccgagtacgatcctcccagttgggttcaaaatgcagataatgaatctttcggttatgatatgggttggtggaaagaagagcattttaatgcatcggatgctgatggagatggtgttctaaacttaactgaattcaatgactttctgcaccctgctgacagcaaaaatcccaagcttcatcaatggttgtgcaaggaggaa

SEQ ID NO: 80086 - DNA, 253 bp, Glycine max
  Clone ID: 700962338H1
cgaggcttcaggccaaataacttccttcactgtcgaaattgataatctcaaacatgatttggtgtctgtgcagaatgagaaacatgaattagaacagcagtgtgaaaagctgaagatggagctggattctacaaacaaccggaacgatgagattgaagagcagctgatagctaaagaccgtgagaacaccaaattgagaggggaaattttgggactgcagggaacaataactgcatggaggatgacattagct

SEQ ID NO: 80087 - DNA, 273 bp, Glycine max
  Clone ID: 700962339H1
gctcggctcgcgcctcaattcagcttaagagcccaatatcggccccagcagtaactggcctgcctctaatatctgtcttacgcaacaagctttgcttctagtccactttcaattgggcataagccaacctgagccgaattactactctaaaagctgcccacaagacgcagcgatcatacaccggaacaagtcacactgactatgtaacaaccatggacacactgccgcttcgtcgggtcgaaatctcttccacgactacgcggttaagtcatg

SEQ ID NO: 80088 - DNA, 92 bp, Glycine max
  Clone ID: 700962340H1
tgtttctctatctagatttctcacgcgtcttcatgcctctcattccctctgatttgttctcaccctttcagatctcgtctctctcactaccc

SEQ ID NO: 80089 - DNA, 153 bp, Glycine max
  Clone ID: 700962342H1
cgaaccgaagaggaggacaacctgctgaacgccgagcaccacttcgcgagcttcaaggccaagttcgccaagacctacgccaccaaggaggagcacgatcatcgcttcggcgtcttcaagtccaacctccgcagagccacggctcgcacgcca

SEQ ID NO: 80090 - DNA, 253 bp, Glycine max
  Clone ID: 700962344H1
cttccccaaaatttcacccctttcattcaattcttccctcttctctgctactgatccatccctcgttttctccgaacaatggctgctggtgtcactgtcaagtccgaggttctagaatcttctcctcctgaaggagtttgttccaacacggtggaaaaccacctggtccagaccaatttgtctgatgggtcacccaacaagtctgtgccagcatctggacttgatgcagtgattcctagtgcaaatcagctta

SEQ ID NO: 80091 - DNA, 257 bp, Glycine max
  Clone ID: 700962345H1
tgaaaatgggaaagtttagttcaagttacagtacttctgattttgttcactttggagttctacttccctttcttctgttatcacagttgttctttcaacttgcatggtgtggctccatagtaaatctccttcctggattagagggaccccttccttttgttcttgaaaccgggtatgtgggagtgggtgaatcagaggatgtgcaggcattctactacttcattgagtcagagaacaatccaaaggaggatcctctc

SEQ ID NO: 80092 - DNA, 254 bp, Glycine max
  Clone ID: 700962346H1
ctcccctgataaacttgtgccactggtgaatatggctttgaatttcatgctcactgcattgatgaaagatccaaataatcacgtgaaggacacaactgcatggactctagggcgaatgttcgaatttttgcatggatcagctctggatactccgattattactccagcaaactgccaacagattattactgtgctgcttcagagcatgaaggatgttccaaatgttgctgagaaggcttgtggtgctctttatt

SEQ ID NO: 80093 - DNA, 259 bp, Glycine max
  Clone ID: 700962348H1
ctctgttctcttctgtcattgcttctcctccacacacgcacagagacacacacttttgcagtcacattgagaatggggcgtgttcgcacgaagacggtgaagaaatcctcgcggcaagtgatagagaggtactactcccgcatgacgctggacttccacacgaacaagaaggttctggaagaggtggccatcattccctccaagaggctccgcaacaagatcgcggggttctccacccatctcatgaagcggatccaga

SEQ ID NO: 80094 - DNA, 245 bp, Glycine max
  Clone ID: 700961735H1
ccgaaacgcagcgtctcatgcacgagcgcaaattgggaaaacctgtgtttcccaaggcaatcggcgaactccacggccattccggcatcgcgaggttgatgctgttctacgcaagaggcttgtgcggcatcgtcgaccaccgcagaggcgccggcgcagcagacgccggcctcgtcttcttcaacggaaaactcctcgccatgtcggaggatgatttcccctacgaactccgaatcaccgcctcc

SEQ ID NO: 80095 - DNA, 252 bp, Glycine max
  Clone ID: 700961736H1
ctaagagtttcaattccaaacatgaggtttctaagagccagaacactgctatggtttcagtttctaggccatcaacatcaccacttggtgtgaatgtgagaagccaatcaggattcagcttcatggggtcatcagagctagatgggatcacacaaggaagtcccaagaaaccaaggaaccatgagatgatgcattccccaaatagtgtcccttcaatgagcatggatgtgaagcccaatgatgaaaacaatg

SEQ ID NO: 80096 - DNA, 251 bp, Glycine max
  Clone ID: 700961737H1
cagcttcaccttcaccttcaccttccgaattgtatcaaacctcaaaaaatggatcatcaaaacaaacacgtagcagtctttgctttcccctttggcagccaccttatgcctctcttaaaccttgtcctcaaactagctcattcccttccagactgttcattctctttcattggcacacacaaatccaatgcaatccttttcccaaaaccccacatcccagataacatcaaggcctatagcataagtgatgg

SEQ ID NO: 80097 - DNA, 248 bp, Glycine max
  Clone ID: 700961738H1
ctttcttttctttgccaacactccttcgattaggggtttcgatgccaaattacaaattggtcgccatgaacgcaacctcatactctgctcttccttctacgttccgcagtctccatcatcggaatttctcagcgttttgttctgatatccaaaatcctggctatgttgattgccattcaaattgtaataagtctacatctcaagcgtctttgtttttgtgttccgactccaacagtagaagaaatggt

SEQ ID NO: 80098 - DNA, 248 bp, Glycine max
  Clone ID: 700961739H1
gtgcaaatagcgcgttgcatctgctcccaatcattcatattttcgccaaacagccgattccgttaagtgtttctaccgtagcgctcaggaaggaggcattggctggtggtgttggttgtggtggaggtggttttgccgatcagttgtggtagagggtaggaaagaaaaaaaaagtggaaaatgagttcagacagccgcagcaggagcaggagcagaagcaggagcccaatggaccgtaagatccgctc

SEQ ID NO: 80099 - DNA, 177 bp, Glycine max
  Clone ID: 700961740H1
ctttcaagtagtaccaattgggcactttgtttagtgtcttcatgttttttttcatcctcatcaaattaaccccctaaacatcatttagctagctagccaaattaattattaattaggcaaataatgggaaacccagaatccaatttgccacccggttttaggttccacacaacatac

SEQ ID NO: 80100 - DNA, 250 bp, Glycine max
  Clone ID: 700961741H1
ctctgatctcactcaccattcaccaacctgcttctctgttctcttctttcccttcccaagaagaagaagaagaagatgccttcttcagaatcatcaacaggcttctccgaaaccatttgtgtgaccggcgctggtggcttcatcgcctcttggatggtcaaactcctcttggagaaaggctacactgtccgaggaaccctcagaaacccagatgatcccaagaacgggcacttaaaagagtttgaaggag

SEQ ID NO: 80101 - DNA, 247 bp, Glycine max
  Clone ID: 700961742H1
cgctgatgtcgctggtgttgacgaggctaaggacgagctggaagagattgtggaatttcttcgcaatccagacagatatgtacgactaggagctcggcctccccgaggtgttctcttggtgggtcttcctgggacaggtaagactttactggcaaaggctgtggcaggggaagctgatgtgccatttataagttgttctgctagtgagtttgtagagttatatgttggtatgggtgcttcccgtgtg

SEQ ID NO: 80102 - DNA, 245 bp, Glycine max
  Clone ID: 700961743H1
caaaaagaaggttcgtttgggggttcctgctacacaatggatttcagtttacaatgcaagactgccaatgaagcaaaggtatcattacaatgtagcggatgcaagattagcgcaacatgtggagagagggattgcagatggccttctaattagttgtgtggcttcttgttccaatctctgggcccttattatggatgctggaactggcttttcaagtcaagtttataagttgtcaccatttttct

SEQ ID NO: 80103 - DNA, 239 bp, Glycine max
  Clone ID: 700961744H1
gggtagacataaggttatgtaggttggtccttgtttgctttcaaaagtgtgtttatttctgttcatggttggagtttagaagcggtgctgaaacctatgttcttgttgttgatggctgcatacgattgattttctggtttttgaattagatttagaggttttctgcttatctatattttccaggggaaatttgtcagctgaatggtatatgaatatgtagtttagtttagttggtgtgg

SEQ ID NO: 80104 - DNA, 245 bp, Glycine max
  Clone ID: 700961746H1
gtttcaacttcactcagatccattcaggggagaactaatggaagttcttgaaccttttatgaaaagtccttctcccaactatttcccttcctccccctccctccctaatctttactcaaacgggttatccagcaacacccaaagcttaattggcttcgggcaagcgcaacccacatctcttgtgggcctgaaccacctaaccccatctcagatctctcagatccaatcccaaatccatatccagg

SEQ ID NO: 80105 - DNA, 244 bp, Glycine max
  Clone ID: 700961747H1
aaattctcgacgaagcaaccctgaccataaccacactctctcaagtcccaagaaagaaccctctcacctagctagctatcaaactaccgattcatagcactcttctcttcctcacttatgcgaaacgccaacatggttctcgttctccttttccttatggcaatcttctccgccatgaccactccgtcaacctccgcgatcgacaccttcatcttcggcggctgctcccaggccaagttcacgc

SEQ ID NO: 80106 - DNA, 280 bp, Glycine max
  Clone ID: 700961748H1
gtcgcgtgtacgcgtactcgggatccagttctatcctgtctttcgagatccagacctcttcccaatgatgaacctctgtttcttcttcttctacttcttcaccttcttcgccgccgtcagatctgatccctcagatcaccgctacaaagaaggcgaccccgtccctctctacgccaacaaagttggccccttccacaaccctaccgaatgctaccgttacttcgacctgcccttttgtgaaccaggtgatttgaaagagaagaaggaggcgctcggggag

SEQ ID NO: 80107 - DNA, 264 bp, Glycine max
  Clone ID: 700961749H1
gatttggatcgagctttctccctcagaagcgaagaagaagccacagagaactagtctcgtactctcacccgcaagaaaaaaatggcatctcacatcgttggatacccccgtatgggtcccaagagagagctcaagttcgctctcgagtctttctgggatggcaagagcagcgccgaggatttgcagaaggtgtcttctgatctcagggcatccatctggaagcagatggctgatgctgggatcaagtacatccccagcaacact

SEQ ID NO: 80108 - DNA, 247 bp, Glycine max
  Clone ID: 700961750H1
gatttgttcattctttgttcactatgtttgtagtggaatccatacggctttgtagtgttgttaattcagataaagtttgcattgctatgctcctttccaatagtgtgatattgagaagtccttagtatcattgatttttgtagtttttctctaatatgaactcatttggacataggtctagatgcttcccatgtgtgctttgttgcctgattttgttggttgtaagatgttgcatctaaaattcatg

SEQ ID NO: 80109 - DNA, 251 bp, Glycine max
  Clone ID: 700961751H1
actttaccaactcctaacaatttctctctgtttccttcttcaccgcatcaatggagttggacggcgttctcctcggcatgtgcaaccctctcctcgacatctctgccgtcgtcgacgacgctttcttgcaaaaatacggtatcaagttgaacgatgcgattctcgctgaggataagcacaaacctatgtatgaagaattggctaacaatcctaatgtggagtacattgctggaggtgctactcagaattca

SEQ ID NO: 80110 - DNA, 249 bp, Glycine max
  Clone ID: 700961752H1
atcctaccttcgtgacacacttctgataaggttaattttcagttttggttttttgggcggctccaatggcaacctctcaaatcactgcatcattgaggaacttgcctgcatttgaaaggtttcaaccttcagcgcttcgattttgctctgctgggcacgtcagaattggaacactcacgcaaccctcgtttccctctttcgttgtcaaagccgccactgttgttgcccccaagcacaccactgttaagc

SEQ ID NO: 80111 - DNA, 247 bp, Glycine max
  Clone ID: 700961753H1
attgctgtcttgtctgaagttagttcagcaatttttgctgaagttatgcaaggaaagcctgaattcactgaccatttgactcataaactaaagcaccaccctggtcagattgaagctgctgctattatggaacacattttggaaggaactcctattggagtctccatggataatacacgtttggctcttgcttcaattggtaaactcatgtttgctcaattctctgagcttgtcaatgattattaca

SEQ ID NO: 80112 - DNA, 245 bp, Glycine max
  Clone ID: 700961754H1
gtcagctcaggagtttataatctgagagatgtcagatcttgaggctcccttgcgtcctaagacgtacaaggtttgggtggactatgtcgttcagtttcgatctatccttgttatggacgtggtcgttcccatctccttcgccatttgtttccgtgcgtacgttgggggtgtaagatctgagcggaggtcctatgatgctcgtcggatcgaacatgatgatagtgtgatgagggctatcgaacgcc

SEQ ID NO: 80113 - DNA, 241 bp, Glycine max
  Clone ID: 700961756H1
agagcgcggtgacagtgaagctttggctccctctcttcctttctctccaagctggaactcatggccgattcatcagatgtgtgtcccgctgaggatgctcttaaggcattcctagagtacttggttgatccagtgctgccagctagaccttctatacgagataattccccttcaccatctcaacaccagttagttgccaaacaggtatgtatgctcattcttctcttttattcttgtacaa

SEQ ID NO: 80114 - DNA, 246 bp, Glycine max
  Clone ID: 700961757H1
tctttgcgcagttccctacctctcctttcaagatgcagatcttcgtcaagaccctcaccggaaagaccatcacccttgaggtggaaagctctgacaccatcgacaacgtcaaggccaagatccaggacaaggaacgaattcccccggatcagcaacgtctcatcttcgccggaaagcagctcgaggacggccgtaccctcgccgactacaacatccagaaggagtcaacccttcaccttgtccttc

SEQ ID NO: 80115 - DNA, 241 bp, Glycine max
  Clone ID: 700961759H1
ctcgagccgctcgagccgcatttttggatccaccaacatttggatcgatcatgtttccctatctaactgagccgatggtcttatcgatatcatccaaggctccactgccatcaccatctcaaattgccacatgaccaaacataatgatgtgtttctctttggtgctagtgactcatacaacggagacaagatcatgcagatcacagtggcattcaaccacttcgggcaacgactggtccag

SEQ ID NO: 80116 - DNA, 242 bp, Glycine max
  Clone ID: 700961761H1
ccaccttctcctttctccttcttcctcctcctttctgcttcttcattctctccttgcctcttgagcttttctttttagcacggaacatgtgagtgccacaaagggtttgagactttttgaggctttctctcactctaataagtcctaacctcattcacctcttgggtggtgtggtctataatgtaatttatcatttgtgcaaattttttctcagatctatccaacttctcttttttgtcctt

SEQ ID NO: 80117 - DNA, 240 bp, Glycine max
  Clone ID: 700961762H1
tctcattctgtgactctgtgcttagttaacgttaacagtgacttaagatggcggattctgcagatgtcacccacgatgttgtgtccctcctctcttctcctcaaagggactttcttcttcgaaacaacggcgatccggttaaaattgacagcttgaagggtaagaaacttggtttgtatttttcggcatcctggtgtggtccatgtcaaacatttacgccaactttggtcgatgtgtaca

SEQ ID NO: 80118 - DNA, 241 bp, Glycine max
  Clone ID: 700961763H1
atgtggtgcattagaccttagtctttgtcatagtttcttccacaacaacttggtcagaactttccaaaaattgacataagggcaatagttctctccctagaaagtgatatgctatataagccgtcctttggagcaatatatccatcctcttcagtttagcagaaggtgtcgtgtattagaccatagtctttgtcattgttgtttcgcaacatcaaagtttagcctttgagcatcagcaatc

SEQ ID NO: 80119 - DNA, 254 bp, Glycine max
  Clone ID: 700961765H1
cttgacaatttgcgccactacgcaccagagaaggcttctaagaactcaagggatggccaagacaataattgatgctgttttgggcctcactcttgatgattctcccagcaatcttgcagctgcaacccttttgtacgtgttgaccagtgatggccaagatgatcacctccttgaatcacctggttctgttcaatttctgatgaagttgttaaaaccaattgtctccacagctattaaagacgaagcaccaaaat

SEQ ID NO: 80120 - DNA, 257 bp, Glycine max
  Clone ID: 700961766H1
cgacgtatcttacaccataaccttcgagagccaaaagaagaagggttgcgtcttacgtaaacaatcaaagctaacaagaaaagtcctaaccggagtaaccggagtagtgaaccccggagagttaacggcaatgctgggtccctccggcagcggcaagacgaccctcttgaccgccctggccggaagactcgccggaaaagtctccggcaccataacctacaacggccaaaccgaccccaccttcgtgaaacgcaagg

SEQ ID NO: 80121 - DNA, 247 bp, Glycine max
  Clone ID: 700961768H1
ctttcaggaaaatatatttgaatggcaatttgctataagggggcgtcgtgatactgaatttgaaggtggtatttatcacggacggattcagctgccttcagaatatcccttcaaacctccttcgtttatgttgctcacacctagtggccgttttgagacccaaaccaagatttgcttgagcatatcaaatcatcaccctgagcattggcaaccatcatggagcgtaaggactgctttagtcgcactg

SEQ ID NO: 80122 - DNA, 241 bp, Glycine max
  Clone ID: 700961772H1
ccagaacatggccccctccccattcggttttctttgcttgaacctgttggtttcatggtgtttgtttgggctgttgcagcaatgattgttattggtgcaccattttctcgtttggtgagtgccattcttttattttggggtatttggctgcttgtcagatcttctcaatcactcatgacactatgccttccaatattgggaatccttctgatggtgtggcatctctgctcaaggaaaagca

SEQ ID NO: 80123 - DNA, 226 bp, Glycine max
  Clone ID: 700961773H1
gatcggcttctgcttgtgtgtgattcagaattggcaagatcatatctggtctcagagatgcagaagtcgtgcactctggtggtccagctcgacaatggcacgccggcgctgtccaatgagatcaatgatgccctggaaggaaacgacgtcgctgcgaatatctacgcgctcaagaaggccatcatgatcctcctgatcggcgataccattccgcagcgcttcatca

SEQ ID NO: 80124 - DNA, 243 bp, Glycine max
  Clone ID: 700961774H1
tgagtgcttaaaagggttcacgccaaagtctccagagaaatggaactcaatggttaggacacaaggatgtggccttaagagtccattgacttgtaagtctgatggatttgctcaggttgatggtttgaaagtgccagatactacaaatacgtctgtgtatgagagtattgatcttgagaaatgcagaaccaagtgcttgagagattgttcctgcatggcatataccaattctaatataagtgg

SEQ ID NO: 80125 - DNA, 242 bp, Glycine max
  Clone ID: 700961775H1
gtgagctataagctagtttatcgtgaggagaatatgaagttgtttgttgtcgttgttgctgcagtagttttggtagcatggccatgccatggcgcaggctaccaaaggttccctctccgaatgaaaactggctatggtgagcgttcttcggaggtaaaatgcgcaagttttaggcttgctgtggaagcacacaacatccgagcgtttaaaaccattcctgaagagtgcgttgaaccaacaaa

SEQ ID NO: 80126 - DNA, 169 bp, Glycine max
  Clone ID: 700961776H1
attttaaggagtatcaaaaccgattgatgtgcgtcaattggagcttcagaggctacgaatttggtgaaacaagcactagtgctcatcactgtagggggcaatgattttgtaaacaactacttcttggtgcccaattcagcaaggtcccgccagtacccactacctcaat

SEQ ID NO: 80127 - DNA, 240 bp, Glycine max
  Clone ID: 700961779H1
gagtaccattgctccactgtcgccggccaccatgtctttctcggagttccgaccactcgacgacacgtccctcatcgaatacataaagtccgtccccgccctctcctccaaactcgccgacaacctcgacgacttatcagtcaaagaagtcggagatggcaatcttaacttcgtcttcattgtttccaaccccgcaggttcttttgtcatcaaacaggctctgccgtacgttcgttgcat

SEQ ID NO: 80128 - DNA, 241 bp, Glycine max
  Clone ID: 700961780H1
ttccccctgtggtgttctcgtgttgctggtaacaatatggttgttgacgctttgaatgaggatttgagaatcaacggagcagttgaaccgttgcctgaggactttgatgcaacagctgtaatcatagatcccgtgcctttggcagttgtagacaatggcattgtcaaggaggaggcgcagatcattaaaggaaaagagaaaagagaaatagtactgggaagaaatattcatacctcgtgtc

SEQ ID NO: 80129 - DNA, 287 bp, Glycine max
  Clone ID: 700961781H1
acgcacgcacgcgaacgcgagtccaggattcgcagagggcgtttcgtgatgatgcgtggaggaacattgtgcctggccttcctgctgttattctcaggtgtacgtgtaggctcgccaacgctgtctctgctggcaccattctcgcttctagacaggtgagaaggaagcttgtagaagattggttgccggttttggttgtatgcaaacataatgtttcaccaatatcacccagcaacaaatcgttgtatctggaactggaagaaacattcttgcgaatcatctccaca

SEQ ID NO: 80130 - DNA, 226 bp, Glycine max
  Clone ID: 700961782H1
cttcattcttctcctaaatcctaatccttcttcactttcagttctcagcatgggaagttctggaacaaccgactatggagcatacacataccaaaaccttgagagggaaccttactggccctctgaaaagctcagaatttccatcactggggctggtggtttcattgcctcacacattgctcgccgcctcaagaccgagggatattacatcattgcttcttattgg

SEQ ID NO: 80131 - DNA, 246 bp, Glycine max
  Clone ID: 700961783H1
cgagaagcccatgtatgaacaaggtttaattttacttccccatctagctactctaggttggggggtaggtcctgggggggaagttatagacacctttccatactttgtgtctggagtacttcacttaatttcctctgcagtattgggctttggcggtatttatcatgcacttttgggacctgagactcttgaagaatcttttccattcttcggttatgtatggaaagatagaaataaaatgactac

SEQ ID NO: 80132 - DNA, 245 bp, Glycine max
  Clone ID: 700961784H1
gaaaaaggtacattccaattgaggagatcccacttcactatggtggtttcaagagggaaaatgattctgagttctcttcccaagatggtgctgtttcagaactcattctcaaggctggatcaactgcaaccattgaggttcctgcattggaggtgccaactaatttcttagatgtttttggtgtagttctctgaccaaaattggagttttacagtgataataacatttaatgctgcagacctttc

SEQ ID NO: 80133 - DNA, 245 bp, Glycine max
  Clone ID: 700961786H1
aagcacctctctctcccctctcttttcctcaaaccaataaagcgaatcaccccccacaccacacttcactctctcttcccaaaacaaaacaaaaaatggctgaaactctaaacctcccattgctactctcagtctgcatcatcttcacaaccctctctcttacaacctctcgcacgatcacaaccccatcacacaccaatgttctcgatgtctcttcttctctgcaccaagcccaccaaatcctc

SEQ ID NO: 80134 - DNA, 238 bp, Glycine max
  Clone ID: 700961787H1
aactgaggttgtgatgattgtatgtcactcgtatagctgtaagctgtgtcattgtccagtgagatattctttgggaattaattaatttcagataaattctttgatcttgggggaattctgtatataatttagagctggactttcattcaaggggagcaacatctctactgattaggactgaaactgctgttttgagaacgggcttgccttcatgaaatgtgtttatttagtattaggg

SEQ ID NO: 80135 - DNA, 243 bp, Glycine max
  Clone ID: 700961789H1
caagattgtagtgattcagaatctcagagaactgctccaagggcatcatcatcttcaggcaaaagagattgttgtgactctgcttcttccgtgtcaagagaaggttggcatggaaaacactctaaaggaagtgcggattcacttcgtgctctccgcttgacaaccaagctccgtgacttacataaacttgccaaggttgattcagaatcccataaagaatttgaacactggaatgaaatgctt

SEQ ID NO: 80136 - DNA, 238 bp, Glycine max
  Clone ID: 700961792H1
cagggaaacattgatccatatagcatttatacaccagtatgcaatgatatagcagcaatcaaacgccgtttggggggtcgctatccatggttgtctcgagcatatgatccctgtactgagaggtactctaccttgtatttcaatcgtccagaagttcagaaggcacttcatgccaatgtaactgggattccttattcatgggcaggatgcaatgatggtaatgtggaaaattggggtg

SEQ ID NO: 80137 - DNA, 239 bp, Glycine max
  Clone ID: 700961794H1
gctacaagcccaacaaacttggttttaattggtataggcgtgccaaggtcttgttaattttgagcgttaagtgctgcaactaatcagatcccaagaccttggcctaccttgccatacagaaaaaaaaaaagcaaaaaaaaagccaaggtttggagccaacaaaaataaacacaaagcacaagtcatggaaagaataatggttggaagtgcaacaaaggttgctttcaccctcttggcca

SEQ ID NO: 80138 - DNA, 238 bp, Glycine max
  Clone ID: 700961795H1
attgaattggagcggacgacagagcatagagagaaaaaagtttattacagtggtgcgaaagaaaaagggggcacaaatataaagttccaaacaatcgccaccccaaaccaaagcactgtttctttcgctgtgcggattttccctcaaaatggcaattgctcgctagtcgccagcaaggacacacaaaaacaaacagaagaaaagaaaaagaaaatgcaaaacgagagtgtgaatgtga

SEQ ID NO: 80139 - DNA, 221 bp, Glycine max
  Clone ID: 700961796H1
tttgtttagtttttggatctcatttgcaaagtttaggactttattctcaagagcttttggttatggtcacaaagttgtgaagggtgattgcaatgcttggatctttgtttccttcaatggtttggtcacagttagttcttccatattctccctctgggccttttcttgggcttatttatgtgctccccccagttatcaatcattggggcggagtcatgccc

SEQ ID NO: 80140 - DNA, 253 bp, Glycine max
  Clone ID: 700961801H1
gggagagggatgtgaaaaatgagtttgtaagaaagaaaagaaggaacgtaagaagggaaattcaattcccttcttgttgttcccctagcacggccaattgatcttgcggtgaggggcaataattaaaacacatgaagcaaaaatcttaactcaatacaacgcaacacatgcatgtgagtttttgccaacaaacgtgatcattgccgcaacaacgaagactcaatattatcataggccattatgttcaccaaca

SEQ ID NO: 80141 - DNA, 248 bp, Glycine max
  Clone ID: 700961803H1
acttgaaagtcgaaattctctgttatgttgtcttggaacctacctctaaaacttctcttctttgtcccaaacaaacttcgttagtcattacaaatacattccctttctctctctcttctccaatttcaatgagatgagcaacaacaacagcaacagcatcctcgtcctcctcaacctgtaccttattattcacacactcttgtcacgcgcgcattagtgtctcaaatctcaattccgtttccccttcc

SEQ ID NO: 80142 - DNA, 236 bp, Glycine max
  Clone ID: 700961804H1
tagatcacaagttagagatgaatcatcttttttcatttagcatataatataaggttttttgtactaaaagatggagttcattttttaccttaaggccttttaaacttgtagtacttctggacgaaccaaattatgcctgtttgaataacgaaaaaaaaaaaaaaaaaaaaaaaaaaaaaaaaaggggggcccccagattttgaaccacttcacccgggaaataaattcggggcggt

SEQ ID NO: 80143 - DNA, 244 bp, Glycine max
  Clone ID: 700961806H1
ccgaaccctcgatcactctcacgcgctcctatattcgctcctccaccgtcgctctctcgaacaaccacaacaccatcttcatcacatggcaaacgcagcatctggtatggcagtccatgatgactgcaagttgaggtttttggagctgaaggcaaaaaggacacaccgtttcatagtttttaagattgaggagcagcagaagcaggtcattgtggagaagcttggtgagcctgcccagggctat

SEQ ID NO: 80144 - DNA, 243 bp, Glycine max
  Clone ID: 700961807H1
gagaaatgtaagaaatatgggagagcaatgcgcattgggacaaaccatggaagtctttctgatcgtataatgagctactatggagattcacctaggggaatggtagaatctgcttttgaatttgcaaggatatgccgaaagttggactatcacaattttgttttttctatgaaagcaagcaacccggttatcatggttcaggcataccgcttacttgtggctgaaatgtatgtccaaggctgg

SEQ ID NO: 80145 - DNA, 245 bp, Glycine max
  Clone ID: 700961808H1
ttcgaatagattatcctaagtctttgggaatagtgctgcaatggcttcaagtcaggaggaggtgacccttttgggagctactggaagcccatttgtgtgcagggttcatattgccctcaagttgaagggagttcaatacaaatatgtcgaagaaaatttgaacaacaagagtgaactgcttctcaaatccaacccagttcacaagaaggttccagtgtttattcacaatgagaagcccatagcag

SEQ ID NO: 80146 - DNA, 245 bp, Glycine max
  Clone ID: 700961809H1
aatcaaagcactcccttctatctccctcttttcctctctgtctggtttgcattagtatacatacatataaatattcatgtatttgtataaggtcaatccccagaagaagctgaaggtccttttttttctgttggtttctttggttggatctagagaagacaatcttagttgtgaaactcagacacacatgttgggagtaattattttgttgtaaattctgagccttttgcaggagaggttaaact

SEQ ID NO: 80147 - DNA, 241 bp, Glycine max
  Clone ID: 700961810H1
ctccctcactcatccgttccgttggttcagaatattcatcaccatcgggcccaacaccaaaccccttcccctctcccccaaattagggtttctctctgggaatgtgattcagcgcgcggcagcatcaatggcggagaagagattcggcgtgatagggtacgctctggcgccgaagaagcagaacagcttcatccgcgactcgctggtgagcctagcgaaatcgcgagggattgagctcgtg

SEQ ID NO: 80148 - DNA, 245 bp, Glycine max
  Clone ID: 700961814H1
attttaatgggactttattatacaggtactttttgatagtaacctaactctcccactctccttttctcaagacgtgtgaccagaccccacccccctactcacacaaaggagaaaagattgaacactaacatcaaacaacaaacaaaaaagaccatggtaatggtaaaccctctaaattattggggaagacaaaagaatgagaaagaaagctgccctttctctcgctactcctcctaccccaaaca

SEQ ID NO: 80149 - DNA, 246 bp, Glycine max
  Clone ID: 700961815H1
gagtgatttcagtgagtgatcggtgttcacttgatctcatcataatcgtcagcgtcaattgaagaagatgccgatcagaaacatcgccgtcggaaggcctgaagaggcgactcaccccgacacgttgaaggcggctttggctgagttcatctcaaccttcatcttcgtgttcgccggctcaggctccggcatcgcctacaacaagctcaccgacaacggcgctgccacccctgccggcctcatctc

SEQ ID NO: 80150 - DNA, 250 bp, Glycine max
  Clone ID: 700961816H1
gcatagagtgagaagtgagaagagaaaaatggcaatctccatacccagtagacaacttttcatagatggagagtggaaagtccctcttctcaacaatcggtttccgatcatcaaccccgctactgaagacatcatagggcatattccagccgctactaaggaagatgttgaccttgcggtggatgctgctaaaagagccttttcccataacaaaggcaaagattggtcttcagctcctggctctgttcgt

SEQ ID NO: 80151 - DNA, 247 bp, Glycine max
  Clone ID: 700961818H1
gttttgaccaaggagaccaggcatggccgttctgcacacagaatgtcctccacctctttgcgcaagaaatctagccgaactcttgtctcaaaggttccatgtgccactctcagaaactttctttcaaatttgcaagaggttattcttggcaccaagctttccattctcatccctgctattccagctgccatcgttgctgagtgctttggctttggaagaccttggatttttatattaagcttacttg

SEQ ID NO: 80152 - DNA, 199 bp, Glycine max
  unsure (1)..(199): unsure at all n locations
  Clone ID: 700961819H1
ttcattattcattctcagcttcttttcttctggggggcaaaaggggtcacttttcagatccgagattgagctcctttacccatcatcatcatggagctcctcgggtacctgaatcagggtcacccttctagaggaacaacacttgttattactctttcattggtgctttcgacacttgtgtncttcaccacttccacac

SEQ ID NO: 80153 - DNA, 242 bp, Glycine max
  Clone ID: 700961822H1
acctggccatgtttttgaccagcttgtgtccattgggaaattaattactgattttcaggaggttgtggatgttcccaatgggagttccgcgatggatggtgaggaggggcttgatgatgatgttggtgttgctgttgagtttgaggagaatgaggatgatgatgaggagagtgatttggatattgtgcaggatgaggaggaagatgatgaggatgtcgcggagccaaatggttccggggcta

SEQ ID NO: 80154 - DNA, 243 bp, Glycine max
  Clone ID: 700961823H1
gttatataccttcttcttcttcgaccttcgatttgggcccaacacaaacgcaccattggctccgatcactgcgcgacccaattccatggcggctggccctccaacaacatcaccctccgatcgacccaccatggtccctcccccaatgctcgtctccgactccttcgccaaggacgccatcctcgcctggttccgcggcgagttcgctgccgccaacgccatcatcgacgccctctgcgccca

SEQ ID NO: 80155 - DNA, 239 bp, Glycine max
  Clone ID: 700961824H1
ggcaggtttgtcattggagggccgcatggcgatgctggtctcaccggccgcaagatcatcatcgacacctatggaggatggggtgcacatggtggtggtgccttctctgggaaggatcctaccaaggttgataggagtggtgcctacattgtgaggcaagctgcaaagagcattgttgcaaatggacttgctaggagggcaattgtgcaagtttcctatgccattggtgtgcctgagcc

SEQ ID NO: 80156 - DNA, 241 bp, Glycine max
  Clone ID: 700961825H1
aaagtcactggttgctgctctaatacctctacagaaggattctgaggttccttctcatgtgttgatgggtatcccagatggtacagctgcttttcccctttcacctcttggagaagcttgtctacgaatggatctgactgccctgcatgaggtgatggagaaaattgggtataaagacgacgagggcgcacaactgagctttcattccaaatgtggacgaaccagatgcaggaaacgttga

SEQ ID NO: 80157 - DNA, 238 bp, Glycine max
  Clone ID: 700961826H1
caaatagtaatttgaatctatgatagcccacatgttacattgggtgcatccagacccaaaagcctttaaataaattgggcccagttgcataaaatctgatgttggcccggcaaatgttagcccactggtcagcaactgtaagattatttatgttattgcttttgagactatgtaatcatgaataaaaagtttggataaataactaaaaaaaaaaaaaaacaaaaaaaaaaagaaagag

SEQ ID NO: 80158 - DNA, 208 bp, Glycine max
  Clone ID: 700961827H1
atttgacaaaaaagtagccaatgccccaacgatcccatgtcccttgacttctctacgtgaagctccttgtgttgcataggagctagttgaaatgtccgagggaaatgcagtgaaaggaaagaaaatcgccatcattggtgtctcaaccttattgttggtggctatggttgtggcggtcacaattggggtcaagctcaatgacaatggg

SEQ ID NO: 80159 - DNA, 150 bp, Glycine max
  Clone ID: 700961829H1
tcaaaattgcattgcaatttgtaggagagaaacagagatgtttggtaggggaatggtgtggtcagtgtggaagcgcggcaaagaagcatgcaaaattcacaagctatgcctaagaggaacgcctttctcttcttcttccacacaacatac

SEQ ID NO: 80160 - DNA, 243 bp, Glycine max
  Clone ID: 700961830H1
atgaagatgaaggcgaagaagcatgcccacgctgaagaggagggagttgctccgcttccttcaccaacactatccgattccgactctgattacgaggactcttcagccgatgatcaccacgaatcttctgtctcgctggattctcaatcccaatcggaattagaagacgcttcacctgaaaatggtagctccggcgttgtagaatctgcagaaaatgaatcatctcaatacgaggacactgtt

SEQ ID NO: 80161 - DNA, 245 bp, Glycine max
  Clone ID: 700961831H1
gcaggaccagagaagcaccaagcagtggcactgagatcagactcagacctctctgtgttcttccgatgtgggatctttggttaccaagacagcctctacactcacaccatgcgccaattctacagagagtgcaaaatcagtggcacagtggacttcatcttcggtgatgccacagcaattttccaaaactgccacatctcagccaaaaaagggttaccaaatcaaaagaacacaatcacagcaca

SEQ ID NO: 80162 - DNA, 247 bp, Glycine max
  Clone ID: 700961832H1
cttcttcttctttcggatttcgttctctttctcttccttccttctccttctctcagagaacaacacctctctctctcaccgcctccttctcctctcacaccgccatgggcgagacttccgctcccgccgccgatgccggaatggacgccgtccagcgccgtctcatgttcgaagacgaatgcattttggtggacgagaatgaccgtgtggttggtcatgattccaaatacaattgtcacttgatgga

SEQ ID NO: 80163 - DNA, 256 bp, Glycine max
  Clone ID: 700961833H1
cttctttctgtttatcaatttccaaatcacgaaactcaagaagaccggagaagagggattcaatagaccagtaagagttgggcctcatcatctcaacccttcatcatccagccagccgaacgaatcatcctccctccatgcttcagcatgtgtggcgggggatagcgctgcttatcaaaggacatcgacattcggggacgatgttgtgatcgtggctgcttatcggactgctcattgcaaagctaaacgaggtggt

SEQ ID NO: 80164 - DNA, 243 bp, Glycine max
  Clone ID: 700961835H1
gagtttcacagagaaacatgccgcaagatcaaagcactccaccaatatgattgcttgcgagccaataaatcaacatttgcttggggtctagaagcccgtgtaccatttttggacaaggcatttatcaatactgcaatgagtattgaccctgagtcgaaaatgataaaaagagatgaaggacgaattgagaagtggattctgaggagagactttgatgatgaagagcatccttatctgccaaag

SEQ ID NO: 80165 - DNA, 240 bp, Glycine max
  Clone ID: 700961836H1
ctcttcctcaccgattgctagaatggaatttcgatgctcagtcatctcttttaccattctcttctctcttgctcttgcaggagagagccatgtccatgcatcgctacctgaggaagattattgggaagctgtttggccaaacactcccattcccactgcactgcgagagcttctaaagcctctccctgcaggtgttgacatcgatgaactccctaagcaaattgatgatacacagtaccc

SEQ ID NO: 80166 - DNA, 238 bp, Glycine max
  Clone ID: 700961837H1
caattctgaattgtcaaattcacccgctaccttttcccgtgtacgaacgaatccaatccaccaaatcggcggcgacgctccgctctgtctcgaaaccacagatctgcagcggaaccgcgtctccgactatctccgattgatcttccggtaaagtggaccggagatgccggttgccgcttccgccatttacttcctcaacctccgcggcgacgttctcatcaaccgcctctatcgcgac

SEQ ID NO: 80167 - DNA, 241 bp, Glycine max
  Clone ID: 700961838H1
acaattactactttctctctctttgtaacttgtaagcatgagtcctcaaagatctatgcttacctcttcctttgcatgctcttcctctcctccgccactcccattctcggttgtggctactgtggcaaaccccccaaaaagcacaagcctggtaaaacaccaaagacacccacagtacccgttgttaagccaccagtcacaatccctcccattgttaagccaccagtcacaatccctccca

SEQ ID NO: 80168 - DNA, 238 bp, Glycine max
  Clone ID: 700961839H1
ctttgtttcccagagatcctgccaagaaagagttcggagagcaattgatatcccatgttgatacattcagcagagacctgttcgtttcattgaaaggggatgctgtacagcaagccagtcccgcttttgaatacttggagaatgctcttggtaaatttgatgatgggccattcttgcttggtcaattcagtttggtggatattgcctatattccatttgctgaaagattccaaattgt

SEQ ID NO: 80169 - DNA, 242 bp, Glycine max
  Clone ID: 700961840H1
ttccaacttccaaatctccaatttatctatctagaaaacaacaatctctcgggtcgaatacccgataacatcggtaaccttacccgattagatgtactcagtttaactggtaaccggttcatcggacccgtaccgagttcaataaccaagttgactcagctcactcagctcaaactcggtaacaattttctcaccggaacagttccccaaggaattgccaagctcgttaatttaacctattt

SEQ ID NO: 80170 - DNA, 241 bp, Glycine max
  Clone ID: 700961841H1
atggagaatacatgcctagctagtaaactcttacattcttcttgaaaggttatacggaaaataattattatttaattgatagtaatgtaaaacttttacacttaattaatattagttcataaaagaaaacaaaaaaaatatttgtaaccaatatgtttccttttacaacgtgattactctcattcctcccttacaaatatctctttctcgtcacacgaaccacccttcatggtatatttct

SEQ ID NO: 80171 - DNA, 235 bp, Glycine max
  Clone ID: 700961843H1
ggaccgtaaagttgagtttggccttcctgacttagagagtaggacgcagatattcacgatacacacaagaaccatgaactgcgaaagggatattcgatttgaacttctggctcggctttgcccaaattccactggagctgatataaggagtgtatgcacagaagccggtatgtatgctatccgtgcccggaggaagactgtaacagagaaagacttccttgatgcagtaaataaa

SEQ ID NO: 80172 - DNA, 238 bp, Glycine max
  Clone ID: 700961844H1
aaaacagtaaacaaaagcaaatgaggaaatgaaataattattttaattttgtaattcattgtttggttctgcttcacaggaatggtagatttgaggtgaaaaggttccacattggtcaggttcagatctcacaatggggaagtcaccaggaaaatggatcaaaactgtattgttttggaaaaagtcatccaaatcaaatatttcaaaaggcagagagaagcttgttaatcaagaagaa

SEQ ID NO: 80173 - DNA, 239 bp, Glycine max
  Clone ID: 700961845H1
gtgagaaccttggtagaggaacaaagataactttgtttcttaaggaagatcaacttgagtatcttgaggaacgccgtctgaaggatttgataaagaagcattctgaattcataagctatccaatttctctctggattgagaagactactgataaggagatttctgatgatgaggatgaggaagagaagaaggatgaggagggtaaagttgaagatgtggatgaagataaggagaaggag

SEQ ID NO: 80174 - DNA, 258 bp, Glycine max
  Clone ID: 700961846H1
cggcattcggctcgggtcgaggtggcttatgacgatatgaggccctccgtcttcctcctgtggcttgtcattacttctgtcctcgcgcactctgccctagcttccatctctctcagcttatgtcgtagactgtgggggcaccccagaggtaacggtagacaatctcacgcacattcctgatgagagttacatcaaggtgggcaaaaccatctccatcatcaagccagacttgttgccaatactctcaacattgcgata

SEQ ID NO: 80175 - DNA, 242 bp, Glycine max
  Clone ID: 700961847H1
atcgttgggatctccatacgccggatctgctaaaatacgcttgatccatatgggcctcctcgaccacttgtgggacgacaccgtcgccggcccaaggccgaaaacggtctcggcaagctccgaaaacaccacaccttcactttccgacctagctccggcaaggaaacggagggcgggagcgtgagatcgtacggagacgaatcgtcggatgaagcgacgagagtgacgcgtagtatcatgat

SEQ ID NO: 80176 - DNA, 242 bp, Glycine max
  Clone ID: 700961848H1
gggaaggaagagtgggtgttggtggttgtcctcctccctcctcatgggtatggcaaccctctcctcctctcttcctcttttccatcgctaccctaaccctaaccctaatccttcgctctttcgcccctccctttccctctccttctccttctctcgcactaaaccccgtcgtgccccctttctcgttctcgcttcctcttcccacgatttcacctccaactccaagatatcagtgctcactg

SEQ ID NO: 80177 - DNA, 244 bp, Glycine max
  Clone ID: 700961849H1
gagactgtggaatacaagaacattagcttcactgtttgggatgttggtggccaggacaagattcgtcccttgtggaggcactacttccagaacactcagggtcttatttttgttgtagacagcaatgatagggacagagttgttgaggccagagatgagttacataggatgttgaatgaggatgaactgagagatgccgtattgcttgtgtttgcaaacaaacaagatcttcctaatgcaatga

SEQ ID NO: 80178 - DNA, 241 bp, Glycine max
  Clone ID: 700961850H1
ggaggagtaagtgtggtggaggttcagggctgaagaaattaccttgtctttcagctcttgtaccatttagctaagatatttggctcgaattctcttaaattcggttctgcctagtagtactgattatcttttaatttgtatttgtgttgtgtttgactcctcctcctcctccatcgtgctctcgggacatattcatggagcctgtgtgttttccgcacgccactttgatatgttatacggg

SEQ ID NO: 80179 - DNA, 94 bp, Glycine max
  Clone ID: 700961852H1
ctctcttttcgtgtgtttctcatcatcatatctcaattctcaacgagttttagattaagagatgaaaccactagcgacattagcagacgtatgg

SEQ ID NO: 80180 - DNA, 240 bp, Glycine max
  Clone ID: 700961854H1
gatgaggatgatgaggattttaacagtgatgatagcaatgatgaaggaatggaaataattgcaaaagaatatggagttaaaaggtatggttggcttgtttacatggataagaaggctaaggaggaagaaaaaaggcaaaaagagttgatcaaaggtgatcctgcaattaggaagctgagtcgtaaggaaagaaggaaggcttctcagattgaaagggagagagagagagaagccacacgg

SEQ ID NO: 80181 - DNA, 241 bp, Glycine max
  Clone ID: 700961856H1
ctgttctaaaaatttctgaagtgtttgtacctgtgtcccccttcactttctttcgaggttgcatttactttccctttcgacttcgaaacgatccaaaatactacaaagcaaagcaaccagctaaaaagcaatcacgcccgaaaacgaaagcatctccctctcccctaagcaaacaactgcccttaaccctcaaaaacaagccacccaaacccatccacttcaacccccccccccaaaatca

SEQ ID NO: 80182 - DNA, 238 bp, Glycine max
  Clone ID: 700961857H1
cgaggccttcacagagagaaagagaaaacatttcaaaaaaaataaaaaaaaataagcctctttctctctctgaatttctaagcctctctcacaacaatggaggagccacaaccaggacccagcccgttacgcaaaatgattttggtgtcatcaatggcggccggtatccaattcgggtgggccctacagctctcccttctcaccccatatgttcaaaccctaggcgtcccgcacgctt

SEQ ID NO: 80183 - DNA, 233 bp, Glycine max
  Clone ID: 700961858H1
agcttttcagaggaacaatggcgggtagggtttcgacgtgcttcttcttcgtgtttgctctttctctccttcttccttttcagatctccgctgaggaatcatcggagaaagagttcgtactcacattggatcactctaactttcaccacactgtcagcaagcacgatttcatcgtcgtcgagttctacgctccatggtgtgcccactgtaagaatcttgctcccgagtatgag

SEQ ID NO: 80184 - DNA, 236 bp, Glycine max
  Clone ID: 700961860H1
acacttctcacattgctgtcaagtttgctgaactcatgaccaagattgacaggcgatccggcaaagagcttgagaaggagcccaagtttttgaagaacggtgatgctggttttgttaagatgattccaaccaaacccatggttgttgaaactttctccgagtatcctccacttgataggtttgctgttagggacatgcgtcaaactgttgctgtgggagtcatcaagaacgttgag

SEQ ID NO: 80185 - DNA, 238 bp, Glycine max
  Clone ID: 700961861H1
ccttcagtctccaacatggaaaacatgatgaggccaaagcgccaagtttcaaacatggatgaggaaacgttgtacccatcaaagaaataccttagttcctcttgcaacttccctactaacatcagcaaccaatacgagaacccacaatgaggctacctcatgaagcagtctttgatgaatcagcggttaatgcttggtcctcatcttcaatttcaaggataatccaaaaatatcaaaa

SEQ ID NO: 80186 - DNA, 239 bp, Glycine max
  Clone ID: 700961863H1
agtgcctcagctgctctcactgtagacccttcactccacttgtcaagagcttctagcattgtgatgttgattgcatatgtagtctacattgtctttcaactgtggacacacaggcagttatttgaagccgaagatgagggtgaggatggtgaggacggtgaagaagaacaagctgtgattggattatggagtggcattgcttggttggtagggatgactgtgttcattgctgtgttgtc

SEQ ID NO: 80187 - DNA, 247 bp, Glycine max
  Clone ID: 700961864H1
ggtttcgaaaatgttctccggctcccagttcgacgccaccaccgccttctccggcggcggtttcatgtcttctcagccgtctaccctcaacgattcctctcccgcgccgtcaaaaagccgcgaaactcagggtttggtgccagtgacagtgaagcagataagcgaggcctctcaatccggtgatgaaaagtcgaatttcgtgatcaacggtgtagatctgaacaatgtaacactgcttgggatggtg

SEQ ID NO: 80188 - DNA, 245 bp, Glycine max
  Clone ID: 700961865H1
tcttagtacagcggaataacgaagccgcctcggtcttctacttacaaccttcctctcactcaaaccgtacggtcgtttcttcctctctcctcaaccggagacatcgtcgccttcttttctgaatctcgcggtgttgtaagttctgcggcggttgtagttccggcggcgatgggacagcaatcgttgatctacagcttcgtcgctcgcggcaccgtgatcctagcggcatacaccgagttcaccgg

SEQ ID NO: 80189 - DNA, 242 bp, Glycine max
  Clone ID: 700961866H1
atcatattcttcaaaaaagaaaaaacagtcttagaaatgacacgatccttggtaatggcttcttcatcaatgtcatgtccgaagctggggaattgtgcagtgtcacatacaaagttccaagcttttcatctctcttcaatgttctctccactggatcgaggccttttctcaccttggagtggtttaaagcatctgggtatctcagctaaaccaaaacctcttcttcacatagatagaaaggg

SEQ ID NO: 80190 - DNA, 234 bp, Glycine max
  Clone ID: 700961867H1
tgaagctgagtggactgaaatcggtggagaacgcgcacgatgattcggtgtgggcggtcacatgggtacccgcaaccgccaaccggccaccgctcctcctaaccggttccctcgacgagaccgtcaggctctggcgctccgacgacctcgttttggagctcaccaacaccggccactgcctcggcgtcgcctccgtcgccgttcaacccctcggctccgtcgtcgcctcctcct

SEQ ID NO: 80191 - DNA, 238 bp, Glycine max
  Clone ID: 700961869H1
tgtttataagtggattagatgacagagaaaagattctgttggaggagtacacatcagttttagtgaactataaggatgtcaggctgaagctcaatgatgtggaaaagaaaaaccgtgacagcatttttgagttgactcttcagctaagggaaatgaagaacgctctttccacaaaggataaagagatacaggttttacatcagaagctggacaatccagatgcaaatcctgatgaaag

SEQ ID NO: 80192 - DNA, 238 bp, Glycine max
  Clone ID: 700961870H1
gctttacttaattagcaaatccaaatatggcactttcttcttcatcatcttcaacatccatatttgctttagctttgttcactcttttgcttataggaagttcttcagctcaactctctgagaacttctatgatagtaaatgtcccaaggttttctatgccgtaaaatccgttcttcaatctgctttggctaaagaacctcgccagggagcatctatcgttcgcctcttctttcatga

SEQ ID NO: 80193 - DNA, 237 bp, Glycine max
  Clone ID: 700961871H1
cttacaagctgaaactaaacaagtttgctgacatgaccaaccatgcatttaggagtacctatgctggctcaaaggttaatcaccacagaatgttccaaggcacgccacgtgggaacgggaccttcatgtatgagaaggttggtagtgttcctccttctgtggattggaggaagaatggtgctgtcactggtgtaaaagatcaaggccaatgtggtaagctaaatgatcactagtccc

SEQ ID NO: 80194 - DNA, 237 bp, Glycine max
  Clone ID: 700961872H1
atttcatcaagcctgccatggcttcctcgtgtgcttcctctgccattgcagctgttgccatctccacaccaagttcccagaagaatggatcactcttgggaagcacaaaagcttcttttcttagtgggaggaaactgaaggtgaacagttttacagcaccagttggagcacgatccagcactacagtgtgtgcagttgctgagcctgataggcctctgtggttcccaggcagcaccc

SEQ ID NO: 80195 - DNA, 235 bp, Glycine max
  Clone ID: 700961873H1
ctttcattggtgtggcctagctgttttctcaatgagaaagccttcatctctgcaaagcgcacttttgcgatttggggttcccttgttgcttgttatcaccttctgttatgctacttctactgctgcagcaacaactcaagtttcagggaatgaagagctgccaaagacaaacctaaatgaccatgatgaagaagcaaaattcggattttttcatcataaaccaatattcaagaaa

SEQ ID NO: 80196 - DNA, 232 bp, Glycine max
  Clone ID: 700961874H1
gggatattactactggccttaaaacatctgtctttggaggagagtttcagtctggacatactgcagatgtacttagtatctccattaatggatccaactcgagaatgtttgtatctggttcttgtgatgcaactgctcgattgtgggatactcgcgtggcaagtcgagcagtgcggacatttcatgggcatgagggagatgttaatgcagtcaaattctttcctgatggaaa

SEQ ID NO: 80197 - DNA, 234 bp, Glycine max
  Clone ID: 700961875H1
ctcatatactactaacaccctcagaaccgttccccacttgcttttcaattttctttttttgcccttttcgccgccctcaaagagttcaaggatttatacaattaatagttttttaatttggaatggctggaatttgctgtggagttgttggagaatccggagagacttcttcctcttcaatcgaacccacctcgcgcccctccgctcgccggagtttggacattttgcctttga

SEQ ID NO: 80198 - DNA, 234 bp, Glycine max
  Clone ID: 700961876H1
gtaagctttgtgctaggaactgcttattcaatcaatgtgcctctgttgagatggaagaggtttgcagtgcttgcagcgatgtgcattctagctgttcgggcagtaatagttcaacttgcatttttccttcacatccagactcatgtatacaagaggccacctgtcttttcataatcattgatttttgctactgcattcatgagcttcttctctgtagttatagcactgtttaag

SEQ ID NO: 80199 - DNA, 234 bp, Glycine max
  Clone ID: 700961877H1
ataaaactaaacacacagttgtttcatcagcacacccgcaggtctcctaaacaagtcacattttattcatcatggacatgaagaaggtcacttgtgctgttctcatcgccgccgcctccgtgagcgctgtggtggctgccactgaggtcacagcccctgcccccggcccaagcagtggagcttcagctagcttgccccttattggctccttggttggtgcctcagtcttgtctt

SEQ ID NO: 80200 - DNA, 234 bp, Glycine max
  Clone ID: 700961878H1
gtggcttatgacaatatgagcccctccgtcttcctcctgtggcttgtcattatttctgtcctcgcccactctgccctagcttcaatccctctagcttatttcttagactgtgggggcacaaagaggtaacggtagacaatctcacatacattcctgatgaaagttacatcaaggtgggcaaaaccaccaccatcaacaagccagacttgttgccaatactctcaacattgcgat

SEQ ID NO: 80201 - DNA, 240 bp, Glycine max
  Clone ID: 700961879H1
gcagaggtgacggagtttcagttttgtaagtgcatgatcataataataaggtttttatagaaaagaaaagttgagaataagatgggggaagatggtaattcttggattaggaggacaaatttttcacacacagtgtgccatcgtttggatcctgctagattaggctctattcctatcagtgttcagtcagagcagaaatcaaggccttcctcaaaggctcagagacaccctatgacatac

SEQ ID NO: 80202 - DNA, 241 bp, Glycine max
  Clone ID: 700961880H1
gcagaattcaccaagtgttggattgttcacccaccaatagggaacgtgagctgggtttagaccgtcgtgagacaggttagttttaccctactgatgacagtgtcgcaatagtaattcaacctagtacgagaggaaccgttgattcgcacaattggtcatcgcgcttggttgaaaagccagtggcgcgaagctaccgtgcgttggattatgactgaacgcctctaagtcagaatccgggcta

SEQ ID NO: 80203 - DNA, 241 bp, Glycine max
  Clone ID: 700961881H1
ggcaagtaccatttttctcaaccttatcacccttttgcataaaagggccaccccttcttcttcttcccttctcaacttgtactacaatttctggattgaattatcttcaaaatgagagaaatccttcatgttcaagctggtcaatgtggaaaccaaattggaggcaagttttgggaggtgatgtgtgatgaacatgggattgatgccactggaaattacgtaggtaactttcatcttcaac

SEQ ID NO: 80204 - DNA, 188 bp, Glycine max
  unsure (1)..(188): unsure at all n locations
  Clone ID: 700961882H1
gctaaaaccttgacccagtctgaggtcaagaatggtaggttgtctntccagttcctaggaaagcttgcagagagatttttcgctcgtatggtctactcagcggtccctcctggtcatactatgcgtgtcatgcttggtcttggtgttgcatggaagtcctgatccatctatagggggatgtcgaggcg

SEQ ID NO: 80205 - DNA, 237 bp, Glycine max
  Clone ID: 700961884H1
gcgagaaccaaagaaaaaaaaagcttcttccattttccgaaatcgaagcattagggttagggttttttccgatctgagaaattcgcggcccaatggcggaggaaccggagagcaccgtcaccaccggcgccgccgacgaatcgctgctcgataagatcaccgagaagcttcacggccacgattcttcgtcctcttcatctcccgactccgactccgactccgaaaaaaccgttactt

SEQ ID NO: 80206 - DNA, 236 bp, Glycine max
  Clone ID: 700961885H1
gcacaatccattcattcagtgagcgagaaagtgagaagatgctggcaccaattttcattttcatataaaagaagaatcatcatctgtataccttactagttatttactaaacagacaaatgggtttcagagtattaggagtatctcttcttatcttcatctatctcattaatcttgctcctgcatatcctcttcaaaacaaattgttttcagaatttgtgcagaatagcaagtacg

SEQ ID NO: 80207 - DNA, 235 bp, Glycine max
  Clone ID: 700961886H1
aaaagaaagccaaaactacagttctttcaatgaagctcccagctttttcttcttctcctcctccagtacattattgttttctgccttcaacgacttttaagtcacttgtccgtttgacagtactattactagttgtttccagcaacaaaacaaagggtgctgtggaacttccaccaaatgtctcggttccagcagtgttggtatttggagattcgatcatggacactggcaacaa

SEQ ID NO: 80208 - DNA, 236 bp, Glycine max
  Clone ID: 700961887H1
gatctttctttcagcttcttgttctacaatgaaaagcctctgccttgggccgtttcttgctgctagtgccccagttggtagaagagcctatggaggccacttaagcagaaagtgctttcaaaagcaacttcacttccactcacgttgtgttgtgttctcttcattcatatgttctgcaactatatcagtgatgccagaattagaagagaagcaagtgtttgatggagagaaggcta

SEQ ID NO: 80209 - DNA, 234 bp, Glycine max
  Clone ID: 700961888H1
tcgaagttgatgccaacggcattctaaatgtgaaggcagaagacaagggcactggtaaatcagaaaagatcaccattacaaacgaaaagggacgtcttagccaggaagaaattgagagaatggttcgcgaacagaggagtttgcagaggaagacaagaaggtgaaggagaggatcgatgctcgcaacagtcttgaaacctatgtatacaacatgaagaaccagatcagtgacaa

SEQ ID NO: 80210 - DNA, 232 bp, Glycine max
  Clone ID: 700961889H1
attttcttttccttcactttcccgagaaaaaaataacacttttcactttcttcactacgttctcacttcgatatggctcgtacgaagcaaaccgctcgcaagtccaccggtggcaaggcgccacgtaagcagctcgccaccaaggccgctcggaagtccgctccggcgaccggaggagtgaagaagccccaccgcttcaggccgggaaccgtggcgctgagggaaatcagaa

SEQ ID NO: 80211 - DNA, 230 bp, Glycine max
  Clone ID: 700961890H1
cattttgcttgtcattgttattagtcagaagctagaaattcgtgttgagagttgagttgaggcagagattcaagagaatggagggtgtgagccccgagcccctgagatcagaattggattccaaatccaaacatgacacagcaaaagaagatgatgacgctttgaaagacagcactgaagccgaagtcaccaaaattcgtctcatgagagcctttgttgaaagccgagat

SEQ ID NO: 80212 - DNA, 232 bp, Glycine max
  Clone ID: 700961892H1
ccttcctggataacgttttcgggttcgagaaggcacttgtgttgtttttcgtacgaaatggagactaaacagagttcggtgacggttacgctcagttacggcgcgttgacgtgcgccgcggaatttctcgcgactttgctagcttctgctgtcgtcaaagcctcgcttttagccccggatctctaccggctgctattgatcaacacgcctactgccaaaggagagagcaaaa

SEQ ID NO: 80213 - DNA, 232 bp, Glycine max
  Clone ID: 700961893H1
gttttgatgcaacgctgtcactgagaaaggatctctatctacgaaggagcggaataaaacccttctctctgtgattaagagaatggcttcagatcggaaacttcacacttttgaggaggtggcaaagcacaaccagaccaaggattactggctcatcatttctggcaaggtgtatgatgtcacccctttcatggaggatcatcccggaggtgatgaggttttgttatctgca

SEQ ID NO: 80214 - DNA, 248 bp, Glycine max
  Clone ID: 700961894H1
tttgcaaaccctttccaacaattagcaaaacatttgttaaacgatggaagtaatgtgtggtgccaaagttggcaatatggtccataaggccaagccttatgtgttaactgtggggttgcaatttgggatggctgggacatacctcttcaccatggccagtttgaaccatggaatgagccgtttggtgttcattgtgtatcgcaatgccattgctgcattggcccttgctccctttgccttgatctttg

SEQ ID NO: 80215 - DNA, 238 bp, Glycine max
  Clone ID: 700961895H1
ctattttctcactcctgtctctgccaggtctcgccaattcactgacccccagtattgtcgttacctcatcaccgagtatcgtaaaattctcatgaggttgtatgagttgggtgctagaagggttcttgtgaccggaactggtccattgggctgtgttcctgctcagcttgctacaaggagtagtaacggagagtgcgtgcctgagttacaacaagctgcacaaattttcaacccactt

SEQ ID NO: 80216 - DNA, 243 bp, Glycine max
  Clone ID: 700961896H1
caggccgggtctggtctccgtagcggttaccccccaaagatgcctttacccagttcccatttcatctcttctcagacctctacctggctcctctaaaaagcaagccccacttctctccgatgcctctctggacaaccctgatctcggcccattccttctcaagctggcccgcgacaccattgcctctggcgatggccccgccaaggccctcgacttcgccatccgggcctccacttcctttga

SEQ ID NO: 80217 - DNA, 272 bp, Glycine max
  Clone ID: 700961902H1
atgcggctccagctatcatggctgagcatgatgctcgagatgtacaaaggcccctcgaccaatggagaagcagcaaagggggattcatggcttccatgtacattttagtcttgccagcattggataacatgggctttgaggcaaacatggtaagcatagtcctatacttttatggagtgatgcactttgatctagccagttcagccaacacactcacaggcttcatgggctcaacctagttgcgggaccttgctcgtggcttcatctcagat

SEQ ID NO: 80218 - DNA, 258 bp, Glycine max
  Clone ID: 700961903H1
gccttgctttgcagcttcagttcagtctctaactgtgttgaatttatctaacaactctattgtggggggactacctgcttgtattgcttcttttcaagctttgactcatttgaacctgtcagggaaccacttgaagtatagaatatatcctaggcttgtgttctcggagaaacttcttgttttggacttgagtaataatgctttgtctggtcctattccttgtaaaattgctgagacaactgagaaacttggccttgt

SEQ ID NO: 80219 - DNA, 255 bp, Glycine max
  Clone ID: 700961904H1
atccattctttgctccctcgaactgctgtttggtctcttcactcttatccatggcatcaacgtttctcaccctaccaactcccttcctacacaaaactaatgccatcactttctctgacaagagaccctcatttttgcagaggagctctctgaagatcaatgcaattaccaaaaaatgggaacccactaaggttgtacctcaggctgatagagttcttgttcgtttggaggagctatcagataaaacagttggtg

SEQ ID NO: 80220 - DNA, 253 bp, Glycine max
  Clone ID: 700961905H1
tgcaatggttcctcaacctctgctaacccttttcctctttctctccctcctctcaattgtcaactcctctccttcccaacaccttcagatcgcccatgctgaacgcaggattgacttgacttctcacattattaaggtgtacttgacgttgaaggttgaacatttggggacatctcctacttcagaagtacatattgccttttcacccactgaagtagaacatctagcaatagtcagagctgctgcaacttct

SEQ ID NO: 80221 - DNA, 252 bp, Glycine max
  Clone ID: 700961906H1
ggaatatgatgaataagaaaatggttaatggggggacagttaacaactggttctgcataaacttttcaaggaatgttcaagatagtgttgcccgtggtttttgctatgaacttgctcagatgtgttatatatctggaatggcatttacacctgagccagtagtccccccagtcagtgctcgccctgatcaagtggaaaaggttcttaaaactcggtatcatgatgccaagaacaaactgcaaggaagagagc

SEQ ID NO: 80222 - DNA, 242 bp, Glycine max
  Clone ID: 700961907H1
ctcgcgcgatatggtattgtccctttccatttcccattagcttcttctcctcacgcccgctcatgagccaccatcgcaacaaccacgctgcgctcactgtttcaaccggcgatgcgaatcccgatgactgtcaccaaccggtcgatgctcccctttccgcagcagaacagattagggttagggtttcatcggaggacaacgcggcacccgcatcctccaccgctgatcgcttcgaccgcatc

SEQ ID NO: 80223 - DNA, 255 bp, Glycine max
  Clone ID: 700961908H1
ttcgaatagattatcctaagtctttgggaatagtgctgcaatggcttcaagtcaggaggaggtgacccttttgggagctactggaagcccatttgtgtgcagggttcatattgccctcaagttgaagggagttcaatacaaatatgtcgaagaaaatttgaggaacaagagtgaactgcttctcaaatccaacccagttcacaagaaggttccagtgtttattcacaatgagaagcccatagcagagtctcttgt

SEQ ID NO: 80224 - DNA, 255 bp, Glycine max
  Clone ID: 700961909H1
aaaacatctctaaacgcttgtaaagatctccatctcccattgatcctcctgaagtttttgtattcaaccatggctacctatagttggtcaactgagatattttcatttttggttctaacgttgttgtcgacaagcagtcacacaatggttgctggagcacgcaatcttctcgaatcaaccttgtcaaaaccagaagtgccaacacttcccaaacctcatgagttgccaccattgccggaaatccctgaattgccc

SEQ ID NO: 80225 - DNA, 254 bp, Glycine max
  Clone ID: 700961911H1
gtaggaattccagggtctggccaacgaggaacccgtgatatgctggtccacaaaatgaatggtagagatatttttttgttgttacgcatccatagtcatatcctatttcattgcaacaaagcagccctggtaaaagtacttgggtagaaactataaactgggaactatggaaggaggagggacctggctgcaagacagtacctggatgcaatgctcagaactttattaatttgtcattgcaatttttttctttt

SEQ ID NO: 80226 - DNA, 255 bp, Glycine max
  Clone ID: 700961913H1
gagcagcggttgcaggaaaagccgtgtcagcgagcgtcgcattcacggcgatggcggagacggtgagacttcgcgtggtgttcgaggatcgtggcatgttgagcaagtcaaagaagaagcaagggctcaagcgttgctggtttctgcttaaaccccaacacaccaccatttccgatgttgcctctcatctactcaacactttccgcctccaccgcacctgtccccatggcatcgtcctatcgatggatggttttg

SEQ ID NO: 80227 - DNA, 255 bp, Glycine max
  Clone ID: 700961914H1
gtcatcatccgcagctgctgttattcgcaccgcaaacaaacagtgagccatggccgtcggaaagaacaagcgcatctccaaagggaaaaagggtggcaagaagaaggcagctgatccctttgccaagaaggattggtatgacattaaggccccttctctttttcaagtgaaaaatgttggcaaaaccctcgtctctcgtacgcagggtaccaagattgcttctgaaggacttaaacatagagtgtttgaggtctc

SEQ ID NO: 80228 - DNA, 254 bp, Glycine max
  Clone ID: 700961915H1
gacaacaactgaggagaaggatatcttgaatgggatcactggttctgtaaatccaggggaagttttggcattgatgggcccctcgggaagtggaaagacaactcttttaaaccttcttgggggaaggttaagccatcctataagtggtggttctatcacttacaatgaccaaccatattccaagttccttaagagcaggataggattcgtgacacaagatgatgttctgtttcctcacctaactgtgaaagaga

SEQ ID NO: 80229 - DNA, 255 bp, Glycine max
  unsure (1)..(255): unsure at all n locations
  Clone ID: 700961916H1
ctttcttccatcttcttcccttttcacgtcattatcctaaaaacttgcagattttcacattccacacaacatgcaactttggtctctgtttctgtcggtgctcctttgtgccacttttcatctctccttctctattatcgacggtttagttgccaacggcaactttgagttggngtccaaagtcctccgccctaaaaggaacagtggtggtgggcgggagctctcgatcccagaatgggagatctccggctttgt

SEQ ID NO: 80230 - DNA, 273 bp, Glycine max
  Clone ID: 700961917H1
attcaggtcgagcgtcattccgccgtcgtcgcaatcgcagggatccatcatcacaagttccgtggaatcaaatggtcgttttctctgtgaaacctttcttcagaattctcgttgtctccctctcactcctcttccttctcgcactgcaattgccttcttcccttttctctcaagttcagatttatagggaaccctccttacgggaggtggatatatggagtgttcggagactcatggaatggagaccttgcaattggtggctacaaggccgtc

SEQ ID NO: 80231 - DNA, 255 bp, Glycine max
  Clone ID: 700961919H1
ccaatttttacatgaatcagaactcgtagtataaattcgatgggtggcattagccccaatttcttcatctctgcatatgaataaatcgatttcaatctttgcagtatcgaacatctctgcacacttcattcccaaatcccactcgtttctctgttgtttctgcactgttttgaggaggttgaaggggaaaagtgggtatcaaagttggcatagcagaagtgcaatcagctctagtttcttctcttccaagcaaca

SEQ ID NO: 80232 - DNA, 227 bp, Glycine max
  Clone ID: 700961920H1
caagggcacttaattaactatgtactctcgttgattgccattgttaattttctagcttgtgcccctgctgtttatgtttcttattttccaacgtgcttgttgctaatgtaatggatcgtggcgtgcttgtttttgtttgttgttgttgttgtaacttgtaatagtgtgatttgtttgtttctctactttagttttggctaatattcctgttacgtacgtacatcttt

SEQ ID NO: 80233 - DNA, 154 bp, Glycine max
  Clone ID: 700961921H1
tggaatttgaatacaaatggcgaacatatttgattgctgctgcattgtcacataatctacagatccttgaaaactaacagcaatcaaatatgttcgccatttggaatttgattgctgttagttttcaaggttctgtagattatgtgacaatgca

SEQ ID NO: 80234 - DNA, 252 bp, Glycine max
  Clone ID: 700961922H1
gcaagtttcgatccccagaaggaaaataaaaatgcacgaaattagagaccctgcaattcggctcttcggtcagaagatccctttccctgaagatgttgacaaagaagaagagagtgctgaggatagagaacaagagatggaagaacatgaagacgaaggagacaaggatactagagttgaaaatgttactaaggaagagctagaagctgatcctcctctagatgctgaagagactaagatttcaggcacatc

SEQ ID NO: 80235 - DNA, 251 bp, Glycine max
  Clone ID: 700961923H1
caccattctatcgcttcacacagagtgagatatagaatcactgaagagcttccttcaatggcggtttcttctctctctgttactcctctttcgctctcaaattcttccccctctctatcttccaagccaaagtttccatctttgtgttttctctctggcaacaacaccacattgagggtaacatgcccaaaacctctgcactcatccactgttgttcatgttgctaccgaagcgttggattcatcccctga

SEQ ID NO: 80236 - DNA, 254 bp, Glycine max
  Clone ID: 700961924H1
ggcaggtttgtcattggtgggccgcatggtgatgctggtctcaccggtcgctagatgatcatcgacaccgatggcggacggggtcgcacatggatcgcgtgtgttcgctgcgaaggatcgtaccagtgtcgataggagtggtgcctacatgatgcggcgagtctgttggagcattgttgcctatggcactgtcaggctgggcaattgtgcaagcgtcctatgccattggtgggcccgagcccttgtctgtgttt

SEQ ID NO: 80237 - DNA, 253 bp, Glycine max
  Clone ID: 700961926H1
ctttggaatggaatgaaacctcttcttccctctctcctaattctctctcactacatccatcctcgtaaaacaaaacaacctcttacctccgttcaagtttcacacgttcttccactatgtcctggttgcgacacctctcctccaagttctcctccaccaccatcacaagcacgcgccgcttcacttccctgtcccggttcagtacctcgaccgctccggctcgtcatgcgggcctggggcccactcaggccca

SEQ ID NO: 80238 - DNA, 248 bp, Glycine max
  Clone ID: 700961927H1
gttggatagagcttcttgccttgtgttctacgttctgcattcttctcagcccgaaacaaggacctgtcatcaagatggtgaagttcacaactcacaggcttcggcacataatggactgcgaacacaatattcgtaacatgtctgttattgcacacgtcaatcatgccaagtctacgctcactgattctcttgtggctgcttctggtaatatccttgcacaagagggtgaagctgagcgtggcaacact

SEQ ID NO: 80239 - DNA, 252 bp, Glycine max
  Clone ID: 700961929H1
accatgtggaagagactcacacttgagggggagatgtattgggttacaagtgtgaggtgaagtcccacatcggatagaagtggaaaggttgagcaccatataagtgaggagaagacccataaacctgagccttaaggttttgggttagagtgttgtgtcaggtctccttatgtggtggcttgtggtccacaggtgtacttctcgaatctccccaacaggtggattggaaggggtattcaatccttgtcaagt

SEQ ID NO: 80240 - DNA, 252 bp, Glycine max
  Clone ID: 700961930H1
atccaaaatcagccatggtttcaaatggtaggatgctgtgttcaagcttgattacagcacctccgtcatcctccctctccagaactactccatcctacttctgctcatttccttctcgtagaatcatcttcacgccaagaattggatcatctccggccccggcccaggcccaggcccagcccaaggaagccaagctctggggtggcaggttcgaggagggcgtaaccgacgttgtggagaggttcaccgagt

SEQ ID NO: 80241 - DNA, 255 bp, Glycine max
  Clone ID: 700961935H1
gtgtgacacagaaattaagctagagcttcatagtttcttcttcttttctcaccttccttctctcccttcagacaaagggacaaaaaatcagtgtgtgagagagagagagagaaattccaaaaccatgtcccacagtcatctaagtttcgcctttgggattctaggtaacattgcctccttcgtgtgctttctggcaccactaccaacattttatagagtttgtaagaagaaatcaaccgaagggttccaatcaat

SEQ ID NO: 80242 - DNA, 248 bp, Glycine max
  Clone ID: 700961936H1
gtgctcctaacattagattagaccctctaccatgttcctctgcctctgaagtctgaacctccccaggaatggcaatggagaatacaacattgtttgtgtagttgctgaatgtgcttcttgtgttcagtgcctttcttgtgtccgcagagcaacaaagtcaatcctcagctgtaggggacccatgaatgcaaagagatggtttaagggtggcctttgaagcttggaacttctgcaatgaagttggtcaa

SEQ ID NO: 80243 - DNA, 249 bp, Glycine max
  Clone ID: 700961938H1
attctctcttctattctattctaaactcgaaacaatcttagagaaagaagcagaagaaaatgccgatttctagaattgccattggaaattcttcggagttgaaccaatctgatgcacttaaggctgcactagctgagttcatctcaatgctcatctttgtttttgccggggaaggctctggaatggcttataataagctgacaaacaatggttcagcaacaccagcagggttagtggcagcatcactgt

SEQ ID NO: 80244 - DNA, 248 bp, Glycine max
  Clone ID: 700961939H1
attctcaactgcgcggtgagtgagtgagagacggaaagtgcaaagccaccgtcttctcttctcagagcttggctttgcttatcgattctctctcctctcatctttctcattcaaggtttgtaaaagatggccgatgctgaggatattcaaccccttgtttgtgacaatggaactggaatggtcaaggctggatttgctggtgatgatgctcccagggctgtctttcccagtattgttggccgacctcg

SEQ ID NO: 80245 - DNA, 249 bp, Glycine max
  Clone ID: 700961940H1
ctcttcttccattttccttctcaatccaccactctaaccctcgcacgcttcgttcaattacaacaatggacagatcaactggccgtggtggtggtggaagtgtggacatgtttctccgaaattataagttgggaaaaacactcggcattgggtcctttggcaaggtgaaaattgctgagcatgtacggactggtcataaagttgctataaagatccttaaccgccacaagattaaaaacatggcaatgg

SEQ ID NO: 80246 - DNA, 248 bp, Glycine max
  Clone ID: 700961942H1
gcttgagggacttttccatttcccgagcatcagttgagtggggcattcctgttcctgatgacaagacccagactatatatgtatggtttgatgctttactaggctatatatcagcactatctgatgatcaggaacaacctgatttacttaaaactgtttcttcaggttggccagcttcactgcacttgatttgtaaggatattctacgcttccatgctgtttactggccagctatgctaatgtctgct

SEQ ID NO: 80247 - DNA, 244 bp, Glycine max
  Clone ID: 700961943H1
tggttctgaactaattgttataaataatacctaaaattttgagttgtcctaaacattgggggttagacaaatccaatctctcaatatataatcctatgatctcaccctcactctgattctgatttctcactctacgtgtctcgttcggttcatcagcgtgtgtctcagccatggcgtatctctacatgagagacgttgtcggatttatgatcataactgtacatattgagacttacttggatgt

SEQ ID NO: 80248 - DNA, 250 bp, Glycine max
  Clone ID: 700961944H1
ctcgcaagcaaaaagaaagaatcccaggcgaggagaaagatggaggggaaggagcaggatgtgtcgttgggagcgaacaagttccccgagagacagccgattgggacggcggcgcagagccaagacgacggcaaggactaccaggagccggcgccggcgccgctggttgacccgacggagtttacgtcatggtcgttttacagagcagggatagcagagtttgtggccacttttctgtttctctacatca

SEQ ID NO: 80249 - DNA, 248 bp, Glycine max
  Clone ID: 700961945H1
gtcgaagtacaaaaaggagggagaatgcgctcacttctcaatttagaaaagagggaacgatctcttaattatgagggacctagacaagggatttctcatggaaggatatcatcagttcatgtgctccctttcagtgggttaaacagagagcacattctatatccactgagaaggctacagtttctgctaccgatgaagattccattgctgatgtgatggaacagcatgacgaatttcttagttcaatg

SEQ ID NO: 80250 - DNA, 247 bp, Glycine max
  Clone ID: 700961946H1
ctcccatagtgcccatcatgccccgcccaggtcccaaaccttacgattgcatcaaaagagcttggcacagtgaaatacaccaacccatcagaggaactctcattcaagaaattttcagggttgtcaacgagatacatgggtcttctactaagaagaacacagagtaccaagagaagctaaacgctgttgtgctcagggcagaggacattatttactctaaagccaattccgcagctgaatacatgga

SEQ ID NO: 80251 - DNA, 254 bp, Glycine max
  Clone ID: 700961949H1
ataaagtgaaggtgtttgatttggaggatttgctgagggcttctgctgaggtgttggggaaaggaacttttgggactacctataaggcggttatggaggatgggcccgtggtggctgtgaagaggttgaaggatgtgactgtttcggagaaggagtttaaggagaagattgatgtggtgggagtgatggatcatgagaatttggtgcctctcagggcttactactatagcagggatgagaagcttcttgttcat

SEQ ID NO: 80252 - DNA, 245 bp, Glycine max
  Clone ID: 700961951H1
gatgtgagaatgcaaaatatcttgcatcattgttgtgttgtgggtcatagaattatataggagccgaacgtgatcaaactctaccatatgatacgatgatgtcttatctttttcccttagcttcttcctcttacactcattattccatcatcaataagacccgaactattgcatctgcatgtgctccttcctacatcatcaagaaagcgattggatttcacccttcaaacctccacaacaagtgt

SEQ ID NO: 80253 - DNA, 248 bp, Glycine max
  Clone ID: 700961952H1
gatgaatctgaataccaagctttctcactcataagttcccactccctctcttatcatttatcaaacaaatttttcatctttccccacttgttggattaatggctgcctcagctttgtcactaacatccccattccatttcagaaaaccccacaacagggtttcacctctcaatgctcattctctcattctcatccaaaagggtaaacaatctcttaaatcaaacttctcattctcaaccctgaatgct

SEQ ID NO: 80254 - DNA, 205 bp, Glycine max
  Clone ID: 700961953H1
ccttttcagtcattagtgtcagtgtgaggtggggttgatcttagtttgttgttctcggggtcagttattatctgcttgcgtgttgctatagttgttgcgtgttaagagttttcaaatcactagtggtgggtagccttttcaatcgtgtcaatgcctcctacatactttgccgcttcgttgggagagcactggggaccagtggtgg

SEQ ID NO: 80255 - DNA, 246 bp, Glycine max
  Clone ID: 700961954H1
ggcagaaccaaatagctcattagtgagtttttgagttcgtgtgtcctttctttgtgtgttgcaaggttacaagatggaggatcaaaatgcatcatctaatggattgggcaaggtgttccacaaggttaagccctaccttgctatgatgtcccttcagtttggctactccggaatgtacatcatcaccatggtttctttcaagcatggcatgagccattgggtactctccgtgtaccgtcatatagt

SEQ ID NO: 80256 - DNA, 236 bp, Glycine max
  Clone ID: 700961955H1
caccaaacaagcccagaaaatcctcgtcacggttcagtccaagatagactccgataaaacccgaaccggtttgctcgcgaagtccaccaccaacccggtttaccggctcagcgtattcgaaccgaagacgggttcatggtgcgagttacccctgggacccgaactcgctttcgggctccccatgttctgtcagatagcgggtgtcgggttcgaccttgtcgtaatgggcgggtggg

SEQ ID NO: 80257 - DNA, 249 bp, Glycine max
  Clone ID: 700961956H1
ggaacattacaagaaaaagaaaacgagtatggttttgtcattattaattatgccatgtaaaataattaatataagattattttaatcttgagtttcaatattttgtggtctacatcatgtaagacataaatgtgtgaaataatttgtttgagattattttaacttatttggtagtgttgaatttgagattttttaagatattttttttggaggcaattttttttagtcgaataaaattattataattgg

SEQ ID NO: 80258 - DNA, 247 bp, Glycine max
  Clone ID: 700961957H1
gatgttctggctccttttggctttctctcctctccaaccgatgcttttaatacagagattcatgtcaacaaattctccatggattattatgagagtggagaggtttcacagttccacaccgatctttcccttcgtaacatggatgggaaagaagtaatgaggaagacaatcagtgtaaatgatcctttaagatacggtggtatcaccatatatcagacagattgggagtatttccgctctgcaaatt

SEQ ID NO: 80259 - DNA, 249 bp, Glycine max
  Clone ID: 700961958H1
aaacttcttcttggaatgtcccttcctaaataaccctcaaacaaaagccaccttaacatctcttctctgaaaattctctttagagagatagagagatagagagagagagaaagaaattaagaaaaaatggcagcctgcactgtctactcaacacaatctctgagcacaaattgctccatctcaaccccatcaaagacacagctgagtttcttccaccaaaagcaggtagttttctggaggaacagcaac

SEQ ID NO: 80260 - DNA, 247 bp, Glycine max
  Clone ID: 700961959H1
agagagggagattctttgtttgctaccttctctcggaaaaatggttacgttcaggtttcaccagtaccaggtggttgggagggctcttcccacggaagcagatcagcaccccaagatctaccgaatgaagctctgggccaccaacgaggttcgcgccaagtgccaattctggtattttctgaggaaactgaaaaaggtgaagaagagcaatggccaagtgcttgccatcaacgagatttttgagaag

SEQ ID NO: 80261 - DNA, 247 bp, Glycine max
  Clone ID: 700961960H1
cttggttttaattggtataggcttgccaaggtcttgttgattgcacgttaagtgctttaactaatcaatcccaagaccttggtttaccttgccacacaaaaaaatatacaaaaaggcaaaataataataaaaaaaagagaaggcttggagccaagaaaataaacacaaagcagcagtcatggaaagaataatggttggaagtgcaacacaggttgctttcaacctcttggtcactttcgccattgtc

SEQ ID NO: 80262 - DNA, 248 bp, Glycine max
  Clone ID: 700961961H1
tctattcttttaaaccttagtctcccacggaagacttcaacagaagaaaaaggaagaattaatatcactcttccatggttgccgacgaagcttcaccattcgagaccagcgatatgctggcaacgctcctggcgtcgacgccgctgttgtcagagtcatggcggctgtgcaccaccgtggccgccaccgcgccgaggagtttcatgactgagcagcacggtggcggcggtgtggtgtacgtcgctttc

SEQ ID NO: 80263 - DNA, 245 bp, Glycine max
  Clone ID: 700961962H1
tacacaggtgaatccgtcgacattcattgcaatttgtgatcagcgaggaaagaaagcagggaggttctgttgtaggtgggtgagtaatagtatcggtcgtgttgtggatagatcggcatggcttcttcttcagcttctcctcgaccgagcgccgccgcggaacattcgaggaagatattagggtttatggcgcacgcgaagcaacggaaggacagcttcatccaattcttcgccatgacgggtat

SEQ ID NO: 80264 - DNA, 114 bp, Glycine max
  Clone ID: 700961963H1
gtgagcatttgcaaatgcgttgccacacccgaagctgaccctgcctacaagacaggggtcaatcgcaatcctaatatgtgggaaactatcaagctaggctagtctcttatcccg

SEQ ID NO: 80265 - DNA, 255 bp, Glycine max
  Clone ID: 700961964H1
ctcttcctccctttctcacagcaatggccgccgcagcacgccctctcgtcaccgtgcaggccctcgacggtgacatggcaaccgatgcctccgccaccgttcccatccctgacgtcatgaaggcctctatccgccccgacatcgtcaatttcgtacactcgaacatctccaagatcagccgccagccatacgccgtcagtcgtcgcgctggtcaccagacctccgccgaatcctggggtaccggccgagccgtct

SEQ ID NO: 80266 - DNA, 253 bp, Glycine max
  Clone ID: 700961965H1
gaggacttgaggaacaagagtcctcttctcctccaaatgaacccggttcacaagaagattccggttctcatccacaatggcaaacccatttgtgaatccctcattgctgttcagtacattgaggaggtttggaatgacagaaatcccttgttgccttctgacccttaccagagagctcaggctagattctgggctgattatgttgataagaagatatatgatcttggaaggaagatttggacatcaaaaggag

SEQ ID NO: 80267 - DNA, 253 bp, Glycine max
  Clone ID: 700961966H1
cttggttttaattggtataggcttgccaaggtcttgttgattgagcgttaagtgctttaactaatcaatcccaagaccttggtttaccttgccacacaaaaaaatatataaaaaggcaaaataataataaaaaaaagagaaggcttggagccaagaaaataaacacaaagcacaagtcatggaaagaataatggttggaagtgcaacaaaggttgctttcaacctcatggtcactttcgccattgtcattcca

SEQ ID NO: 80268 - DNA, 249 bp, Glycine max
  Clone ID: 700961967H1
ctttgttcactcttcttctcttgcggctagggttttagcgcactatcttctagatttaaggaagatgggtaaggaaaaggttcacatcagtattgtggtcattggccatgtcgactctgggaaatccactaccactggtcacctgatttacaagcttggaggcattgacaagcgtgttattgagaggtttgagaaggaagctgctgagatgaacaagaggtctttcaagtatgcctgggtgctggacaa

SEQ ID NO: 80269 - DNA, 243 bp, Glycine max
  Clone ID: 700961969H1
cgcaacaaaaagaaagaatcccaggcgaggagaaagatggaggggaaggagcaggatgtgtcgttgggagcgaacaagttccccgagagacagccgattgggacggcggcgcagagccaagacgacggcaaggactaccaggagccggcgccggcgccgctggttgacccgacggagtttacgtcatggtcgttttacagagcagggatagcagagtttgtggccacttttctgtttctctac

SEQ ID NO: 80270 - DNA, 242 bp, Glycine max
  Clone ID: 700961970H1
acacacttggctgaggaaggtcggaaaagaaaatggagttgttcttctacacggtgttcggtgcactggccgcggttgtggcagttatggagctgagcaagaacaacaaggatcgaatcaacacctcttccgcattcaattccttcgagaacaactacatcctcgtctattccctcatgatggctggagattggctacaaggtccatatgtctactacctttacagtacatatggatacggg

SEQ ID NO: 80271 - DNA, 232 bp, Glycine max
  Clone ID: 700961971H1
gatgtcgggtcgtggaaagggaggcaagggtttgggaaagggaggagccaagaggcacaggaaggtgcttcgtgacaacatccagggtatcaccaaacccgcaattcggcgtttggctcgcagaggtggtgttaagagaatcagtggtctcatctacgaggagacacgtggcgtcctcaagatcttcctcgagaacgttattcgcgacgctgttacctacaccgagcacgct

SEQ ID NO: 80272 - DNA, 201 bp, Glycine max
  Clone ID: 700961972H1
cattaaccttgctgcaaattgcgcacacgattctttgcattccttcgaaactctcccaaatcccactctctctctctctctctctcataaatacgccaccttttattttacgtaactgctctgcaccttagtcttctctctccaatctccaactccatttcttcgatctggagctctccgctattcaagctgtcaaatttc

SEQ ID NO: 80273 - DNA, 248 bp, Glycine max
  Clone ID: 700961973H1
acacaagatgtttccactttaccttactagagttctgactttcttcatgtatgcgtttatgtttctacttatttctgttcattgtattaccgttctcaaacaagttattatataattaagaccggtctcatttcaaaaaaaaaaaaaaaaaaaaaaaaaaaaaaaaaaaaaaaaaaaaaaaaaaaaaaaaaaaaaaaaaaaaaaaaaaacaaaaaaaggggggcccccccaccaagagaccccccccc

SEQ ID NO: 80274 - DNA, 239 bp, Glycine max
  Clone ID: 700961974H1
aaatgagaccatgcaaatgcaaatgcaatgttctctctgctctcattcttcttgtcacattcctttttattgcttcttccgtccactgtgaagacccatatcggtacctcacttggaaggtcacctatggtgacatctatcctcttggtgtcaagcaacaagggatcttaattaatgggcagtttccagggcctcaaatagatgctgttacaaatgacaacttgattatccatgtctat

SEQ ID NO: 80275 - DNA, 245 bp, Glycine max
  Clone ID: 700961975H1
caaaggaagacaaggggaatattatgtgatggttatggacatgcttggtccaagcttgtgggatgtttggaattcctcaagccaggctatgactgcggaaatggttgcatgtatagcagtcgagtccctatcgatcctggagaagatgcatgcaagaggctatgtgcatggagatgtaaaaccagaaaactttttactaggtcaaccttctacaccacaagaaaagaaattatttcttgtagacc

SEQ ID NO: 80276 - DNA, 245 bp, Glycine max
  Clone ID: 700961976H1
ctcaactaaactcatattccaaaacgcagagccaacccatgtcgttccccttcaaccactctcacgccacccacacccaccaccgcagggacgacgacgacgacgaacgacccaccgtttaccctccgccgggaaactccttcagcaacccgccacctccgttctacggcgtccctcaaccaccaccccctcagccggagacccacgtgttccattccgctcacgtgacaccaggacacgtgtcc

SEQ ID NO: 80277 - DNA, 244 bp, Glycine max
  Clone ID: 700961977H1
ggttagcaacatctccaaccagttcaactgattcggcacaagttgtatatgttgaaactgaccttgaaaccaaaagtaaaactcttgatgaggaaaataaagattcattttcaacagatgtaagttctgaaaagaagcatgttgtgcaaaatgctaatgaattatctgccagcagtgaaaatccggaagtagaagaaaagcaggaagatctcagccccccatctggttgtagtaaagaggataa

SEQ ID NO: 80278 - DNA, 172 bp, Glycine max
  Clone ID: 700961978H1
cttttattgttctactattaccatttgaacatcgaatggattttaataaatcactttgtatgcgtgcaaaatttgtgtgatgttgtctatgttaaaactaatcttgcgctgtgtttgctatttcaagcgtgttttattcttcagaccaatggacgtgtttttcactttttgt

SEQ ID NO: 80279 - DNA, 238 bp, Glycine max
  Clone ID: 700961979H1
gtccatacagaagcgtgatgatgctcgacagtttatgaagtttcttcatcctgatcttggcgttggtaattcaatccgattcttttttattagctctgaattggttagaattaattgattatgtatcagcgttgtatttgagatttgaaaacatttttggttagtcaaggataaagctgttttcttcagtttaaaaatgtgtaatttctatgtttgatcttggcagaacttccagaaa

SEQ ID NO: 80280 - DNA, 249 bp, Glycine max
  Clone ID: 700961980H1
gaccgagccagagcttcgtcttggccctcgattttgccctgtaaaactaatcccagtcacaacagaaataatcaatggcaccgaaacagaccaaggctgagaagaagatcgcttacgatgcgaactgtgcgacctaatggaggagtacggccaaatcctcgttgtaaactccgacaacgtgggatcgaaccagctccagaacattcgcaagggtctccgcggcgactctgttgtcctcatggggaagaa

SEQ ID NO: 80281 - DNA, 250 bp, Glycine max
  Clone ID: 700961981H1
gaaatcgaggtcgtagtatggtggtttagcgggtatggattggaagcagtaccggctcgtacccaagaacaagaacatggattatggcttcctgcttttgctcctcttcttccatatcttccttcctcactcctctggtaaacccagtggagtgtgtgtttctcaaggaggtcgttttcctcccttcaaatcagagggtagcactcccaaaaagggtcctaaagatttgactctttgccggatctttcgc

SEQ ID NO: 80282 - DNA, 213 bp, Glycine max
  Clone ID: 700961982H1
ctgaggtcctatgattcagtctcttctacaagaattacaacttgacattgtaacccctgttgtctactgtgataactacctaagtactgtcactggcttataatccattaattaactgttgtatgaactcatggttataaaatgatggttttcttgaaaaaaaaaaaagaggtggccccgcggcaatatgccttgtctagccgggattatttt

SEQ ID NO: 80283 - DNA, 239 bp, Glycine max
  Clone ID: 700961983H1
cagacttgaatagggaaaaggattttaaatttttcttgtgatctgtgtatctctagtggtatgaggcttttgttgttgttgttgcatctgtatttatgtgaatagcttgcgctgtttgggaacatttcatagtcctgtacttttaggaatttattttgttccactaaaccaaaccaaggacgacatatgtacggaagttaatacatctgcacacattttggtatataaaataaattctt

SEQ ID NO: 80284 - DNA, 243 bp, Glycine max
  Clone ID: 700961984H1
aaacaaccttcaacaaagacaaaaaccgctctcttctgttctgtccctcaccttataaaacaaagttccacttcatccgattcacctaaaccacaccattcgcatcacaacacttggttgtttgttaccatcttccaaaaatatcatgctcctaacgtaaaaatcctcggtttcacggtgccactgctatctctaaacattaccatggcatcactctcaggcattttctcctcttccccaact

SEQ ID NO: 80285 - DNA, 243 bp, Glycine max
  Clone ID: 700961985H1
cgaccatgttttgataaacttctctcataagttaaaaacaactactgcacctcagcttttgaataagtttgatgagagcttctataaaagttgaagtgcataagttgacctcaacttatggaaaaattatgtttttccattttattttcttctcctataagtatgatgtagaatttaggtgggaatcaaagtatatatggagaactttagccaaacaaggcttaaaaggacttggatctatat

SEQ ID NO: 80286 - DNA, 241 bp, Glycine max
  Clone ID: 700961986H1
ctttctcatcatcgaagcccgtcgcgagaagaagctgcttcgtcacggttcccaaaatcgcgtttcccaagctccgtttcaaacccgtcgctatggctacgctcggcgctcgcatggtggccgccgcacccaccgtcactccgccggcctcgctcgacttcgaaacctccgttttcaagaaggagaagattaacctcgctggacacgacgagtacatcgtgaaaggagggagggatttgtt

SEQ ID NO: 80287 - DNA, 239 bp, Glycine max
  Clone ID: 700961987H1
ggcctccccggcgtctgcatcgccatctccgggcctcaccgctgcaggagctgacccttttgcgcccagttgaagcccatgtctgtcgagggtgcatagttgcctcacgttggacggcgttcaatacgatgtgtcgaagaagatttgaggatcaagagtggactgcttctcaaatgccaagccagttcacaggaaggttccagtggttcttcagaatgagatgcccatagcagagtctc

SEQ ID NO: 80288 - DNA, 246 bp, Glycine max
  Clone ID: 700961988H1
gggagacgcaatgatgctgtcccccgtaacgagcactgacaggctttagtcttgtagccacagcgaactgggacgcagtgggcggtgagcatggctatcatcacagaagaacccgaaccagagcaaccaacacactcacgctcacagatctcacccagcaaacccaacaacaaccccttctccttctggttctacttcaccctctccgtctccctcttcactctcttcttcgtcttcacctcctcc

SEQ ID NO: 80289 - DNA, 208 bp, Glycine max
  Clone ID: 700961989H1
cacatctgttgctggattttctcgcgaacgtaatcgcacttgagacggtcattattaggcgcgtactacgatatggtctgtaagccgatcaccgttcgcttgaatacaggggattctgggatatgctccttatctctgcacgatggccgcaattttctccgtaatgtctactgcagaggagagaacatggaatggttaagggcgaggg

SEQ ID NO: 80290 - DNA, 233 bp, Glycine max
  Clone ID: 700961990H1
tttttggttcttaagccatggcatccacatcctctctgcatctatctcaggcccttctggcacgtgctgtgtaccttcatggctcttcttctgaccgtgtctcactctccttcccatcattctctggcctcaagtcacattctccatgcaaagcagcagccacgtcctcacgtagaaggggtgcttgcgcttccaccagcgttgttcttccatgctgcggttgacacactgga

SEQ ID NO: 80291 - DNA, 211 bp, Glycine max
  unsure (1)..(211): unsure at all n locations
  Clone ID: 700961991H1
cctggttctatcaattccagaaaatgattacactataggatatgcatcagtatcagactataatgctcaaaggtttccgcataaccaatgccaccatgagnagaatgttgttgcaactgttatggctcttccaagtcctggaacatcaggaacgatgctcttacctgtcgatgtggtcaatgagacttcaactagttctaaaagaaccacg

SEQ ID NO: 80292 - DNA, 244 bp, Glycine max
  Clone ID: 700961992H1
gtgctggaacattgcaaagaccctacaacacagcagaaagttatggatgaaattttaggtgcagttagcatgttagctcaggatcagtatggcaactacgttgttcagcatgtgctggaacatgggaagcctcatgagcgttcttgtataataaaggaattagcaggcaagatagttcaaatgagtcaacagaagtttgcctccaatgttgtagagaaatgtttgacctttggaggtccttctg

SEQ ID NO: 80293 - DNA, 237 bp, Glycine max
  Clone ID: 700961993H1
ctcgcatctcaatacccttttgatttgtgaaaggaaagcaaacatgcttgatcaggtccaacaccctacaatcatggacaaggttgctggccagctccatctccgttctggtgtttctggtattaggagttatgaaggagcctactgccaccccacaatgtaccaaagaccctcttttgggaattactcgaatgctgcattgcagtatcctgtgatgccctcatgcaaagctactat

SEQ ID NO: 80294 - DNA, 258 bp, Glycine max
  Clone ID: 700961994H1
tttgcaaaccctttccaacaattagcaaaacatttgttaaacgatggaagtaatgtgtggtgccaaagttggcaatatggtccataaggccaagccttatgtgttaactgtggggttgcaatttgggatggctgggacatacctcttcaccatggccagtttgaaccatggaatgagccgtttggtgttcattgtgtatcgcaatgccattgctgcattggcccttgctccctttgccttgatctttgaaaagaaagt

SEQ ID NO: 80295 - DNA, 246 bp, Glycine max
  Clone ID: 700961995H1
ctctggttcgaccccaccagaaacttccacacttactccatcatatggaagccccaacacatcatattcttggtggataacattcccataagggtgttcaagaatggtgagactattggcgttcctttcccaaagaagcaacccatgagaatctattctagcctgtggaacgctgatgactgggccaccagaggtggtttggtgaaaactgattggtccaaggcaccctttacagcctactaccgc

SEQ ID NO: 80296 - DNA, 245 bp, Glycine max
  Clone ID: 700961996H1
gttgcgtgaaagccgcgccagtttttttttttttttcagagcagggtcccctgatatctatatattcgggtgcaatgaaatcattttctgtccagaactaactacactggccttttgttctcgagtcaatttctaaatccaccaccagaccctctcttcaattctctattataattatctccaaacccttcaatctctctaactcttctctcgaatcttccaccgcaatggccaccgctgccgag

SEQ ID NO: 80297 - DNA, 260 bp, Glycine max
  Clone ID: 700962001H1
ttcgcttccccttaattcccaaccttacattattaacttcaccaactcatctccctctaccaaacaaaacgacacaacaaaaccctctctctaaaaccctctctctgtctcccttccttctcatcttcaccaccaccaatggcgtcgccgccgccaccaccttctctcctcctcctcttcctcaccctcgtcgccgccacggcttcctccctcacctgcaccacccaaaagctcacggactccaagaacaacctctactc

SEQ ID NO: 80298 - DNA, 243 bp, Glycine max
  Clone ID: 700962002H1
tagacgagaagttgctaacttcacttcgcacatctcgaagcctctctttccggcaactacgttaaagttcatcaatggcacgtcgtggcaaaaccctaggatccagcgccgccaagaaggccacctcaaggagcagcaaagccggcctccaattccccgtcggccgtatcgcccgtttcctcaaggccggaaaatacgccgagcgcgtcggcgccggtgctcccgtttacctcgccgctgtcc

SEQ ID NO: 80299 - DNA, 254 bp, Glycine max
  Clone ID: 700962003H1
ctcaattactcaactaaagcttcattcattcatcgtgtcgtgttgtgttctttgcaaccatgcttcttagaacagcgtcctctttctctctcttcaacgccaacggcgaccatatactactcccttcctctgttcgctactctcagggcaaacacttggttccatgcgctaccaagaactccaataaccggcccttaaccggcgtcgtatttgaaccctttgaagaggtcaagaaggagctcgaccttgttccc

SEQ ID NO: 80300 - DNA, 251 bp, Glycine max
  Clone ID: 700962004H1
tcggctcgagtgcaaacattagctatccctacaatactccttgtgatattcatatgggtggtacaaccaaagcaacgtcatgggaagattgcaccaggtcccaatgcgttgccaattattgagtaacctccacatgctagggagactcccgcaccgcaccctacaaacctttgcaagatagtatggacccataatgtccttgaagctagggctagtccgcgccatagtagtttcctgaccggaaatcgctg

SEQ ID NO: 80301 - DNA, 230 bp, Glycine max
  Clone ID: 700962005H1
ggggaatcaagtaaccagagcttcatgtgaatgaacacctgatttgaactgagaaaaacaaattatatatctctattcttcattttatgcaacaatgatgagtttcatgtttttccctgtaagctctggtcatatatgaatctcatcattgttgcataaaatgaagaatagagatatatatgaccagagcttacagggaaaaacatgaaactgagatggtggaatatgga

SEQ ID NO: 80302 - DNA, 248 bp, Glycine max
  Clone ID: 700962006H1
attcccttccttccatagaggacgctgacttcaccaatctcataaccggaaatgaccaaactgacatcgttttgcgcctcgacccgaaccaaaccatcgaggaccgcttccttggtgccacactctattggttcaaccaaaaaaccgaaccgaaccggatttccaccttcgttctccaaatcagaaaaaccgataaacgtcgcatccttcgccagtacctccgccacatcaacactgtcgccgacgag

SEQ ID NO: 80303 - DNA, 239 bp, Glycine max
  Clone ID: 700962007H1
ctccttgctcttagccctcctcctcttcgccgccgtggacaccgccgcgatggcgtggcgcgtccgacgccgacgacatcctgatccgtaggtggtgccagatgtggcaacgaagaggaggacaacctgctgaacgccgagcaacacttcgcgagcttcaaggccaagttcgccaagacctacgccaccaaggaggagcacgatcatcgcgtcggcgtcttcaagtccaacctccgcag

SEQ ID NO: 80304 - DNA, 243 bp, Glycine max
  Clone ID: 700962009H1
ctcagtctctgttcacctgggtggagtaccctgtgaccctcttcacccaattgcgttcgatcccactctgaacaagccttgttcttccacctctctgttttggaactgcaagaggagaaggaagaggaaaaactccattatcatggcctctaatctcaggaccaacaatttcctgcgccatgtggaatcaatgaagcttcttccatcaggtgctggccacatttcgcacctgaacgctgtgat

SEQ ID NO: 80305 - DNA, 236 bp, Glycine max
  Clone ID: 700962011H1
atcgagcgaatcggctcgagcggctcgagagcaaaaaaaaagacagtaatatgggaagacgtagggttcagctgaagaggatagagaacaagatcaatcggcaggtaactttctccaaaaggagagctgggttactcaagaaagcacacgagatctctgtgctctgtgacgctgaggtcgctttgattgtcttctcccacaaaggaaagctctttgaatatgccaccgattcttgc

SEQ ID NO: 80306 - DNA, 226 bp, Glycine max
  Clone ID: 700962013H1
gcagcattgggagatagaaagagagagagaaagagagagagagaaagacccttacccttctctatcgctcgctttcctttgacgcttctgacccttgctttgtctgcgtcttccttctttctttctttctttctctgtgtgtcgtaatggctctcccagactcttcttcccgtcgcaactccctgatcccctccttcatctactcctcttcctccaaaacgctccc

SEQ ID NO: 80307 - DNA, 259 bp, Glycine max
  Clone ID: 700962017H1
tggcgacagcagaagagaagagtgcagcgcaagctatagaagagcaaagtgtgtagatgtggttggacattcagtcccaatcacatggcttcttcttctccttctcctccatcttatctcacacaccttcctcttcatccctctcaccaaggtgagagtgagaagcgcgtggatgacgatgaatcgcgcgttccgattcacatcgtgaccgcggcgacgcaacttcccgtcgaatttctggaaccctcgcctcaatcca

SEQ ID NO: 80308 - DNA, 248 bp, Glycine max
  Clone ID: 700962019H1
ctgttattttgatagcaaaggtttcttgtatgttgtagataggttgaaagagttgattaaatacaagggctaccaggttgctccggcagagctagaagagttactcctatctcattcagagataaatgatgctgcagttattccataccctgatgaagtagcaggccaagtgcccatggcgtttgtggtgagacaacctcaaagttcccttggcgcacagaagttattgattttgttgccaaacaggt

SEQ ID NO: 80309 - DNA, 235 bp, Glycine max
  Clone ID: 700962020H1
gctacaagcccaacaaacttggttttaattggtataggcgtgccaaggtcttgttaattttgagcgttaagtgctgcaactaatcagatcccaagaccttggcctaccttgccatacagagaaaaaaaaagcgaaaaagaagccaaggtttggagccaacaaaaatagacacaaagcacaagtcatggaaagaataatggttggaagtggacaaaggttggtttcaccctcttgg

SEQ ID NO: 80310 - DNA, 243 bp, Glycine max
  Clone ID: 700962024H1
gcttcaaatatcatcaggaacttctctttcatgccagataatgaagttataatggcccaacatcgccattgtttggaaacagccttccaatgcatagaagatcatcttgtagaggatgaggaacttgtaacaaatgctctagagacaattgttaacttagctccacttctggatcttcgaatatttagctcttccaaaccttcatttattaaaataacagaaaaacgtgcagttcaggccatc

SEQ ID NO: 80311 - DNA, 236 bp, Glycine max
  Clone ID: 700962025H1
tttctgcaccgtatggagaagaagacaaagggtgtctgagttggctaaacttgcaaccgagtcagagcgtcgtgttgctgtgtttcggaagcatgggaaggttctcgagggctcagttgaaggagatagctattgggttggagaagagtgagcaaaggttcttgtgggttgtgagaaccgagttgggtggtgctgatgactcggcggaggaactgagtctggacgagttgctgcca

SEQ ID NO: 80312 - DNA, 237 bp, Glycine max
  Clone ID: 700962026H1
gactggtctgaactcccaaaggacctcctacacaaaatatcacaactcctcctcgaaagccctctctacctcctccgcttccgatccgtctgctcctcatggcgttcttccactcccccctctcccttcaacccctcaatctccctcaccaacaccttctccctctcccaccgcaccctcctcctcctcaaccctaaccctaaccctaaccctaacccccgcccctggctcgtcaag

SEQ ID NO: 80313 - DNA, 232 bp, Glycine max
  Clone ID: 700962027H1
ctggagcatcaccaacgagcatgttctccttcagtccatggatctatactgttggtgctgcctctcatgaccgggtttatagcgactccatatgtcgttgaaataatgtgaccatacctggagttggtcttgcacctggcacagatgggagcagactttgtagactgattcatgcacatcatgctttgagcaatgacaccacagttgctgatgatatggatgttggttgagt

SEQ ID NO: 80314 - DNA, 234 bp, Glycine max
  Clone ID: 700962028H1
cacagatctgtcttccgaagcaggaactaaatatggctgacttgttggaatggtcaaagcaagataagaaacgaatgcttcatgtcgtctaccgtgttggtgaccttgatcgcaccatcaaattttacacagaatgtttaggaatgaagcttttgaggcaaagagatatcccagaggagaaatatgctaatgcttttcttggatttggccctgaagaatcccattttgttgttg

SEQ ID NO: 80315 - DNA, 231 bp, Glycine max
  Clone ID: 700961384H1
actattcagataggtatgcaggagatgatatgcacccaaaggagaaaaggcgaacacctgcttggtgtgacaggattttgtggtacggagaaggtctccatcaattatcttacgtccgtggagaatcaaggttttcagaccacaggccggtttatggcatattttgggctgaggttgagtcaagtcatggaagactgaagaagagtatgagctgttctcggaacagaattg

SEQ ID NO: 80316 - DNA, 93 bp, Glycine max
  Clone ID: 700961385H1
gaatttgacaaaaaagtagctagtgctccagaggatcccattgtcccttaggccttcgctacgatgaagctcgcgtgtagtgcataggaggct

SEQ ID NO: 80317 - DNA, 232 bp, Glycine max
  Clone ID: 700961386H1
gccagttgaggcactgaagagggaactgatggtggcaaatgagagtagagatactgccttgatggaagtttctgagatgagatcttcacttggagaactgaaacaaaagttggagtacttggagagttactgtgaagagttgaagaaagctttgaggcaagcaatgctcaccaaagaaaccacattttcagaaaagctcaatagccctccccagagaggaacaccctttgat

SEQ ID NO: 80318 - DNA, 233 bp, Glycine max
  Clone ID: 700961387H1
agaactccacaccgcatcgctcgtggttccatcctttgtgtctgtctctctcttcggacacaaagcaacactttccatgtccatgtctctgtctctccttcgtatcttctcttcgccccacctttccacctctctcttctttccaactccaactctttcttccctctgcccttctttcctttccaaattaccaaatgccccctctcccctcattgttttatgccacagggacg

SEQ ID NO: 80319 - DNA, 230 bp, Glycine max
  Clone ID: 700961390H1
caagagagcgtcgccatcaaagtcatcaagaaagagaagctcaagaaagagcgactcgtgaagcagatcaagcgcgaggtgtcggtgatgagactcgtccgccatccccacatcgttgaactcaaggaagtcatggccacaaagggaaaaatcttcctcgtcatggaatacgttaaaggcggtgaactcttcgccaaagtcaacaaaggaaaactcaccgaagatctcgc

SEQ ID NO: 80320 - DNA, 230 bp, Glycine max
  Clone ID: 700961391H1
ctactccttccttcccttccctctcatctcttcttttctcttctcttctcttctttcttatcattctgtctctattccttctctctttctcctgcaacaacaaccatttaagggatttcgggatgcgtttctgcggtctgttgattgtgttggtttgttgagtgtggcgttaacgtaatttggttttgagtgaagatgattttgtgatgtggttgagtgagtggtttttg

SEQ ID NO: 80321 - DNA, 61 bp, Glycine max
  Clone ID: 700961393H1
cacgctgaatcctagctttatcttcccttcccttcaaaataatatctctgtgccacacaag

SEQ ID NO: 80322 - DNA, 236 bp, Glycine max
  Clone ID: 700961394H1
ggcttgtgaatcagcaccacattcacctgagctttttgtgaggattccaaagcatggcttcccttgcagcatccactgctgctgcttcccttggcatgtcagaaatgcttggaaaccccatcaacctcagtggtgccacaaggccagctccatctgcctctagccctgcctccttcaagactgtggctcttttctccaaaaagaaggctgcacctccaaaaaaagctgcagctgct

SEQ ID NO: 80323 - DNA, 235 bp, Glycine max
  Clone ID: 700961395H1
gagagttggaggcgtcgaggttggaagacgagatgtgggcccagttcaacgggaccgggttctggagaagcgcttctcagcgccaccaccaacaacaaactgatggggaatcatgccaagaactccaatgatttcggtacacgtgtcgcgtttccattcgacgacaactcaacgaacgcattcatttacctggattctatgcatgcgacaatgtttaatgtgctgtcatagacga

SEQ ID NO: 80324 - DNA, 261 bp, Glycine max
  Clone ID: 700961401H1
gttgaggacttgtggaagaacttttccagtgcagatactgctagacaggtggtcaagttgaaagcattttctaaatttgagaacacttcagaagctctagaggcagctactttacttattgatggaaaagctagcaagggtctgcgcaagttcctgcgtgttcattgtgaaaatgaaacactaggtgtggcagattcaaagcttgggaatgtgatcaaggagaaattgaaaattgactgtattcacaacaatgcagttatg

SEQ ID NO: 80325 - DNA, 258 bp, Glycine max
  Clone ID: 700961402H1
gccatttacaaaaatggtaaccattaaagcatcttacacagtccttcccaatgaaccaactccggagggccttttatggctatctgatattgatcaagtggcacgtctacgccacacacccaccatctacattttccatgcaaaacacaaccctgatacattaattgagcggatgagaaactctcttagcaagattttggttcactactatccaatagccggccgattgcgcaggatagaagggcgtggtcgattgga

SEQ ID NO: 80326 - DNA, 128 bp, Glycine max
  Clone ID: 700961407H1
gccatgtgtcaaactggtttatcagtgctcgcgttcggctttggaagccaatggttgacgaaatgtacttggaagaaatcaaggagcatgaactaggtaatgcctcagaaagcaccagctcaaaggat

SEQ ID NO: 80327 - DNA, 261 bp, Glycine max
  Clone ID: 700961408H1
gcttctctcctctgtctttttctctctcttgctatccttttggctagtggcactgctgcaagtgcaactccaagaagcgcagtgccaagccaccatgtttcaacattcaacagaagcctttttccttccacttttctctttggatttggttcttctgcttaccaggcagaaggagcagcaagtgtagatgggagaggactaagcatatgggacacctacactagacagcatactgaaaagatttgggatcatagcaccggt

SEQ ID NO: 80328 - DNA, 259 bp, Glycine max
  Clone ID: 700961409H1
tgaagagacaaaaaacaatggctgaaacaaagttgagcatgatgaaggacaaaagatggtcactccgtggaatgactgctctcgtcacaggagccacccgaggcatagggcatgccattgttgaagaattggcagactttggagcaactgttcatatatgtgcacgtaatcaagatgatattgataagtgtttagaagagtggaaaaacgagggacttaatgtgactggctcagtatgtgatttacaatgttctgacca

SEQ ID NO: 80329 - DNA, 255 bp, Glycine max
  Clone ID: 700961411H1
aaattggtggcaagtggcaagcggaaagccagagtgtgtggttccgtttgctgacctgacctcggaaatccaaagagggaaactcacggtgtttcgttgcgttgtgctctgctctgctcctttgggcctgggctgggctgggctgggctgggctgggcatggctattgcagcagcggccgtggtggtaccattgggcctgctcttcttcgcctccgacctccttgttaatctcattcaggcaatatgctatgtcg

SEQ ID NO: 80330 - DNA, 111 bp, Glycine max
  Clone ID: 700961414H1
cattggcatagcagctgggtcgcacagaaagggaaggagacaagtctactctctccaaaatccgttgcagtcagtaatggatcgtcaatggcgtcctgctcctccacccaa

SEQ ID NO: 80331 - DNA, 258 bp, Glycine max
  Clone ID: 700961416H1
ctcgagccgcacacacactcctcacacaataatggaagacgggcaaagaaaaacaacaacactacttctatgctcccacattgtggttcttcttttactctccctagtggccgagactagtgccaaggtttcagcagtgatcgtcttcggcgactcctccgtcgacgccggcaacaacaacttcatccccaccattgcacggagcaattttcagccatatgggcgtgactttgaaggtggaaaagccactgggaggtt

SEQ ID NO: 80332 - DNA, 248 bp, Glycine max
  Clone ID: 700961417H1
gctcaagcccacttcttcttgagagttctatattctattattcttatctcagctatgcagacaccaccacctattctaacagtaaaaccctcccaaaacccacactgtgctaaaccccttttagcactctgtttctctgcttaaccatgtcccaatcactgaagctaatccaggaatacgcctccaaccccaaactctggttggtcattggaataggagttgccggaatcgtggttctggtggagaca

SEQ ID NO: 80333 - DNA, 257 bp, Glycine max
  Clone ID: 700961419H1
ccatatccccccctagctacagagcagccaaaggggaggaataataataagcctatattctaaggccggaaaaataaaaaaggaataacaaaaatgtctggaaaggtaattatctcggctgtttctctcatctcggtggttggagtggccatagttgtggtggtggccgtcaacaagaagggcgaggatcccacacttcaatctcaacaaaaatcagtaggggttatctgccaaaacactgatgaccagaagctctg

SEQ ID NO: 80334 - DNA, 257 bp, Glycine max
  Clone ID: 700961422H1
cacaaattgcaactccttctcggcttttcctaatcagcacgaacacaaacacagagagagacatggattttgaactgagaagagcgagagagaagctagagaaagagcagagggagaggaaggaaagagcaagactgaaacttcagaaggaaaagaaggccaaagaagaggctcagaagcaaaaggacagccatcgaagctgttcaaagatctcgtcgtattgatgccgctcaagctcaactcaaggctgcccaaca

SEQ ID NO: 80335 - DNA, 256 bp, Glycine max
  Clone ID: 700961423H1
cttagaaagaaaaaaacttaaatcaaaatacttaatagcatggcgatacatttatacaaaacttctaccccaagcacacgcaatggagccgtggacagtcaagtcaaatccaatccacgaaatcatttgatcgatggacagcatcgttgtggtaaaggccgtaatgccagaggaatcattaccgcagggcatagagggggaggtcataagcgtctataccgtaaaattgattttcgacggaatgaaaaaaaacata

SEQ ID NO: 80336 - DNA, 203 bp, Glycine max
  Clone ID: 700961424H1
gagagagtgttggtacgaaaaatgtcgaagctgatcttcgtgttcctttcgcttattcctcttctctgcacctccttctccccagagagaccctcagatcgacgcgtcctcgttttgctcgatgacttcgccatcaaatcctctcattctctcttcttcaactccctcaaatctcgcggcttcgatctccaattccacacaac

SEQ ID NO: 80337 - DNA, 254 bp, Glycine max
  Clone ID: 700961425H1
ataccatttatcaactcactcatcaatctcgtttgttctcactaactattacttcatcatgtcgtcgagcacagttggtcaagtcatcaaatgcaaagctgcggtttcatgggaggcagggaagccacttgtgattgaagaagtagaggtggcaccaccacaagctggtgaagtgcgtttgaagatcctctacacctctctttgccacactgatgtttacttctgggaagccaagggccaaactccattgtttc

SEQ ID NO: 80338 - DNA, 116 bp, Glycine max
  Clone ID: 700961426H1
gctatttcttacctcttggcatggccattcaaatgtcttcttttgtctttgtttctcttacaattttattttgcttctcttccttggagaagagttttgccttccacacaacatac

SEQ ID NO: 80339 - DNA, 250 bp, Glycine max
  Clone ID: 700961427H1
ggtttttctttttctctgttgaggttgtcattgggagcactcaacctaaactattcaagttgtgaaagcacatcacaagaaaattcgcaagcgatggatccgaagctaaaagaggtttctcagctcttcgatcgctttaaggcttcgtttatcaggaacgactttgatacctgttccaatctcctttctcagctaaaggtgttacttacaggtttcagaagccttccaccgttgtttgcagatacaccta

SEQ ID NO: 80340 - DNA, 251 bp, Glycine max
  Clone ID: 700961428H1
gctggtgttaatgtacctgttgtgggcggccatgcaggcattactattctgccactattttctcaagccacaccaaaagccaatcttgatgatgatgtcattaaggctcttacaaagaggacacaagatggagggacagaagttgtagaagctaaggctggaaagggttctgcaactttgtcaatggcctatgctggtgccctttttgctgatgcttgcctcaagggcctcaatggagtcccagatgttgt

SEQ ID NO: 80341 - DNA, 254 bp, Glycine max
  Clone ID: 700961430H1
gcatgacataatatctctctcttctccaacctctctcatatatgtaaagacaaaaccaaaaccgtgtttatgcttcagcccttcatcatatagatctgcctgaaaaaaacccttgcgatcagatccagcccaattaatctctctctctagaatgtcttcccagcgcgcagatctagagtgccggatcttcccggtcgcccgaaatcgaccacttcgaccggctaccggactcgctcctccttttggttttcaac

SEQ ID NO: 80342 - DNA, 253 bp, Glycine max
  Clone ID: 700961431H1
ctcgagccgctctgcgctctctctctctgtctcctacgattcgttttgccccttttgttgccctaatttcaaccatgcctcgccgtagctccggtggaagatctgcccgtcctgctcctcgggcagctcctcgtcctgctccagttcaccatgctcctcctccagcccctgctcagagtggtggtggatctatgcttggtggcattggttcaaccatagctcaaggtatggcttttggcaccggaagtgcagt

SEQ ID NO: 80343 - DNA, 253 bp, Glycine max
  Clone ID: 700961432H1
ggcgaggagaacgcgcgatgcatcgccgacgggaacgaggtcatacggtttcattgcttgggttttgccgaggacggtgtaccctacgacggtggtggctgtgcatggtcatttccggagaagaagggggcggcgatttgtactttctccggaagcggcggcgcgcatgagacagccggcggaggaaaggggagaagggccatgctggtttgtcgggtcgtggcgggtcgggtctcgaagcaactcgggtttc

SEQ ID NO: 80344 - DNA, 216 bp, Glycine max
  Clone ID: 700961434H1
cttctttctaaactaaccaactttttttcaaacaaattcgattatatcttcattattaacctaattttcttttcgatccaaaaaatggctttctcgcgcgttgttgctcaatcgtcgcaatcgaatcttctgaaacccctagcgtcgtacttatcactacgacgccgttcggtttcgacttcgtcagacccactcacgatagagacctcggtgccc

SEQ ID NO: 80345 - DNA, 167 bp, Glycine max
  Clone ID: 700961435H1
ccttgatatagctgttccttgcattgcactctcaaataatgactcatatgttatttctgcatgtggtggaaaggtttcgttatttaacatgatgacattcaaggtaatgacaatcttcatgccaccaccacccgcctctacctttctagcttcccaccctcaagata

SEQ ID NO: 80346 - DNA, 254 bp, Glycine max
  Clone ID: 700961437H1
ctagaaaaagactacataaagaatgtattaggggaacaagggcagcacatggctgtgaactactatccaccatgcccagaaccagaacttacctatggattgccagggcacactgacccaaatgcacttacaattctgcttcaagaccttcaagttgctggccttcaggttctcaaagatggcaagtggcttgccgttagtccccaacctaatgcctttgtcattaacattggcgatcaacttcaggctttgag

SEQ ID NO: 80347 - DNA, 252 bp, Glycine max
  Clone ID: 700961438H1
atttttcttgaaaaatgatggaactttgacgccattggccattgagttaagtaagccacatcctcagggtgaagcatatggtcctgttagtgaagtctacgtgccttcgagtgaaggagttgaagcttacatttggttactggcaaaggcttacgttgttgtgaatgatgcttgctaccatcaaatcattagccattggctaaacactcatgcggttgtggagccattcgtcatagcgacaaacaggcatct

SEQ ID NO: 80348 - DNA, 255 bp, Glycine max
  Clone ID: 700961439H1
tttaatttcctctcaaaccctaaccctaaccctaaccctccccgtcacaaaagaaaaccctctttgtccgatcatcgtcgtcaagatgttggaactccgtctcgtgcaaggctccctcctgaagaaggttttggaatccgtcaaggagctcgtgaacgacgcgaacttcgactgctcctccaccgggttctccctccaggccatggactccagccacgtcgccctcgtcgctctcctcctccgatccgagggctt

SEQ ID NO: 80349 - DNA, 255 bp, Glycine max
  Clone ID: 700961440H1
ttgcccctcgctctctctattggttcacgcgcggcaattggagattcacgcgccaccatggcctcaccaccgacactccctatctcctcccaatccagcgcctccggcggctccgcctcgcagtcccagcctccgatcgcaacgccggcgttccgcgccttcatctcccgcatctcctcgtccctccgtcacgcctttgcgcagcgccgcccgtgggcgagctcatcgaccggagctccatgtcccgacctgaca

SEQ ID NO: 80350 - DNA, 251 bp, Glycine max
  Clone ID: 700961441H1
cagctccttccgaaaggctccttctcgcacatcttcaatgaagaacaacaacattgctgagttgaaatcatttgagctgttggatgccttattcaaggaatgtttccgtgttggagaaaaattggtttctgaaggtataattacaagacaagacataaaagaagccaattctggtaacgggattagagttcatagtattggtttaccagcatattgcttagtccagggactctagcgctctgcaaaattaa

SEQ ID NO: 80351 - DNA, 248 bp, Glycine max
  Clone ID: 700961442H1
ccaagagttaaggttgttcatacatctgacaagatacatgggcatgtctacattcctgaaattaattggctactcatgatcctctgtattactgtgaccattggatttagggacacaaaacacatgggaaatgcttcagggttagcagtgatgaccgtgatgctggtgacaacatgccttacttctttagtaattgtagtttgttggcagaaaccccctataatagctctttgcttcctgttgttctt

SEQ ID NO: 80352 - DNA, 244 bp, Glycine max
  Clone ID: 700961443H1
caaacgggtatcatcagctgaagaaagttttgatagagcgctacaatacatgctctgggtgagaaagtttcagctggctgaatgatttgttagatggtttgccgagatgaagacagcatacaactagagcatgtattggtcaaacgggtatcatcagctgaagacagttttgatagagcgctacaatcattttcctcatgagtgtcgatgattgaatttctttcaagagttgaatggtgtgagg

SEQ ID NO: 80353 - DNA, 244 bp, Glycine max
  Clone ID: 700961445H1
aaaatttgcgggtgttcttgtctccgatgcctggcttcatagccagttcacgcaggttgagcttcgcagcctgaaatcaaaatttgtctctttaacgaatcagaatggtaaagttacctttggagatttgccgcctttgatggtgacgctaaacgcattcagagatatgtacagtgaggatgagattaggggtatcttgggtgaatcaggcactgattttaccaatgacattgattttgaagcc

SEQ ID NO: 80354 - DNA, 220 bp, Glycine max
  unsure (1)..(220): unsure at all n locations
  Clone ID: 700961446H1
caggcccatgtgttgtggnagaggagcatgtagcgagcgcgggtaccggtggttcccctgcgtcgtgttgtgtgagatcaaaccctagtttttagacactgcaacagtagcagcagcaaccatggcgagtaggaggtgcctgcgagcgttaactcaaacgagaccgtttctcttccgaaaagcatcctctcttcgctcactcgccgtgcttccatttccc

SEQ ID NO: 80355 - DNA, 255 bp, Glycine max
  Clone ID: 700961449H1
tttctcttttttttccacctacccttaactccataacccctagttagacgcactcaacactgaacacaaactaaaccatgacaagcgatgaatgagattacctaccctctttgcccacgtaatacccgcgtgcacccaaacgtgttataccccaaagtcgccactgttggacttcctcttcccatttttcactattcacagtccaaacaacacacctaaaccagccaaccagtcacgcacactaactcttaccca

SEQ ID NO: 80356 - DNA, 122 bp, Glycine max
  Clone ID: 700961451H1
cgacaagaggacgtaagagaccgcatctgttccgtgtaaggcgaagtcacaaaatttctcagctcctgcctgtatacttcacatggcctaatcccacagtcgcacactcttcgactctgcca

SEQ ID NO: 80357 - DNA, 251 bp, Glycine max
  Clone ID: 700961452H1
cgctgaagtcgacttcttctctcatactccgccacccaacatcgtcaagaaggaacttgatcaaacacctcttcacattaatactggtttacaactccttactgctaacaccaggagtgaccaatctaccgtggatgacgggctttcatcggatgcagaagataagcgagccaaaaccaccgagcttgcacagttgcaattggagcttcaacgcatgaacgctgagaacaagaagctgaaagagatgctca

SEQ ID NO: 80358 - DNA, 198 bp, Glycine max
  Clone ID: 700961453H1
gtactgttccgttcgtaattggcaatttggtgagattcttcattcttatgctgtgcgggtttcctcttcagattcatggcggcaacccaaccaccgcagggtccggatcgtaccaccgaagagataccggccgaaccagataacttgaaggagcagggtacaacaactcgaggtcatgcaagggagaccacaagtcaa

SEQ ID NO: 80359 - DNA, 253 bp, Glycine max
  Clone ID: 700961455H1
aaccccgttgtccggagccaccattttgcgctccggcaatgttcttcccggtggccatcgtcccttaaacccaccacacttcaaagtcatgggtattccatgggacgacgtcgttgtgatccagcaagggaaggatcacaatgagccctgcatcgtcaccgtcaattgccccgacaaggctggtctcggctgtgatctttgcagaatcatcctcgagttcggtctccgcattacccgtgctgatatttccacg

SEQ ID NO: 80360 - DNA, 249 bp, Glycine max
  Clone ID: 700961457H1
cgctgatgtcgctggtgttgacgaggctaaggaggagctggaagagattgtggaatttcttcgcaatccagacagatatgtacgactaggagctcggcctccccgaggtgttctcttggtgggtcttcctgggacaggtaagactttactggcaaaggctgtggcaggggaagctgatgtgccatttataagttgttctgctagtgagtttgtagagttatatgttggtatgggtgcttcccgtgtgag

SEQ ID NO: 80361 - DNA, 134 bp, Glycine max
  Clone ID: 700961458H1
ccgcaagctcctcggcaaagggagccacggctacgtctacaaagccgtcgtccgcggccgtcccgtggcggtgaagcgtccatcgcggccacaccataatgttccccgaccggtctcttcttccacacaacata

SEQ ID NO: 80362 - DNA, 245 bp, Glycine max
  Clone ID: 700961462H1
aagaaaactagtaatatggcttcaagaactatatgttttaccattcaagtgactcttgtagtagcttttctaacaacaaaggttgttttatctgatgacactgtgccaattcccgcgaacaaagcacaattaggtgaatggtataatactaatgtggggcctttagatcaaagaaagagcactgtggacccagcattggtgactgctgaagaaggcgctaaggttgtcaaggtgatgcaagatgg

SEQ ID NO: 80363 - DNA, 248 bp, Glycine max
  Clone ID: 700961463H1
cgacaagagaaaataaaaaaccgcatctgttccgtgtaaggagaagtcacaaaatttctcagctcctgcctgtatacttcacatggcctaatcccacagtcgcacactcttccaccctgccatcaccaatcatcaacacaacgcccattattatttaaaaatccttaatatattattattcttcgtccatcgctttttcttgaagactacttcatccttcttattagtttctttttatttcaatcttt

SEQ ID NO: 80364 - DNA, 243 bp, Glycine max
  Clone ID: 700961464H1
cagcgcgagctcaccgcgagactcccatctcacacacccctcgcatctacgaatgcctctcaccattccctccaacctctccaaccccgccgccctccgccccaaactaagcccaaagctcaggtccgccgccacaaccaccatcgtctgcagcaccaccaacaacaaccacaacaacaacgtgtcctccgacctgaaggcgttctccgccgcgctggccctctcctccatcctactctccgc

SEQ ID NO: 80365 - DNA, 249 bp, Glycine max
  Clone ID: 700961465H1
aaagaagttgtgcatgctggattaccatgatttattcttaccatatgtaagcaaagtgagaaaaattaagggcaccacattatatggatcacgaacattattcttcctcactgatcaagggacattaaagccattagctattgagctcactagaccacctatggatggaaatccacaatggaaacaagtcttccaaccttcttgtgattcaaccaaactctggctttggaggcttgctaaagctcatgt

SEQ ID NO: 80366 - DNA, 251 bp, Glycine max
  Clone ID: 700961466H1
aaacatggcacctcaaatttctagaggcagagtccctattgttgttttgctagcctctctagtcctccccctccttgcttcaagaatattcttcttcttctgtgttcattgcaagtgcatcagcttcagaatcagacgttgatctgttagaatttcccttaaatttagaatacttggaggctgagtttttcttatttggttccttgggtcatggattggatgtggttgctccaaatttaagtgagggagga

SEQ ID NO: 80367 - DNA, 138 bp, Glycine max
  Clone ID: 700961467H1
gtcattcaccgagaaagtcgtactgattcctcttcatctttcgttaaagcgagtacttttcgttcttgatctgttggttacgatgtcgtattcaaggagatctaggtattctccttctccttctccttctccacacaa

SEQ ID NO: 80368 - DNA, 142 bp, Glycine max
  Clone ID: 700961468H1
gacttgacctaaacggagcaaaactcagcactaaagacggttgcaatttgcccctcacgggtctcgtcgacagcatacccgagttaacattcttccacgttaactccaacaccttctccttcaccggtggcttccacacaac

SEQ ID NO: 80369 - DNA, 250 bp, Glycine max
  Clone ID: 700961469H1
atgatgttcgttgcagcatgtggtacaaagcagagctatattccttcacttcccccgttgacaagatgcaaccgtgactcaaagttgatcaagttgtggaagaaagctagcccttgtggtgctaatatctcagagctagaacacatccatgaaggtcataatcctaggccatcaactagccgtggcacccagcgcctctatgttcgtctcaacaccttacactatctcctctctaacatcaacacccttg

SEQ ID NO: 80370 - DNA, 246 bp, Glycine max
  Clone ID: 700961470H1
ggcagggcatttgggagtgtcttgggatcccttcttgcgctgtaggatatgagtgcttgatgcggtgtcttcaaatcctgcaaggccagaggacgcaatcaactcaaacgacaccatgtctggaactatgtctccaaaaggttctttcaaggagagagcaatcaatgcctcaaacatgctggagggattctttgaccaggaagggtaggcgtgcagtaaggtcatgtccgttgaaagcgaggatgt

SEQ ID NO: 80371 - DNA, 93 bp, Glycine max
  Clone ID: 700961471H1
cgacatcgtccgggactataacggacttgccactttccagagaacgctggggacttggaaatattgaatctgtacgttgcctttgaattctgg

SEQ ID NO: 80372 - DNA, 253 bp, Glycine max
  Clone ID: 700961472H1
catatatccctcttgatatactcaaattcgcaatccgctatgttctgagtgggaaggcttgggataatcttttggagaacaagactgccttcactacaaagaaagactatggcaaagaagagagagaagcacagtgggcaactgcacagaggactcttcatggtcttcagccacctgaaacaaccaaccttttcaatgacaaggccagttacagggagctgtcagagattgctgagccagctaagagacgtgc

SEQ ID NO: 80373 - DNA, 248 bp, Glycine max
  Clone ID: 700961473H1
cttgctattgttctgtggccactggctgttgttggggcagttctggcatctgtgttagccagtttcgttcttggtggatatcgaggccttgggaagcaggatccttctttcatgtcaagaatatcattgctgtattcatcataaagggacacagctgcaacaatgtaccccaggcctcgatatcgaaaaattactgaattgaaattgtcaaggacaccttctcgttcaatttccctcccaaaaacaaa

SEQ ID NO: 80374 - DNA, 242 bp, Glycine max
  Clone ID: 700961474H1
aatatacttcaatatgctaatcatggaagtttcacttcgtggcttacttggatttgtcttcgttcttctgtggaggcaaaaatacaagagcagctaaatgtgcggatgtattctatttgaatgtagatagagctccgtcatctgtaaacattttacaatatattcttttgtttggcaatcattataggtgttattaaaattttgttggcatgtatgccccaaattaagcacattgagtaaga

SEQ ID NO: 80375 - DNA, 245 bp, Glycine max
  Clone ID: 700961475H1
gagatgtgttgatttggggttaagaactgtgcttatagtcacacctgtcaacgtgctacataattggcgtcaggagttcatcaaatggagaccttctgagttaaagccactcagggtcttcatgctggaagacgtatcgagagatagaagggcagaattgcttgcaaaatggagatctaaaggtggtgtctttttgattggttatgctgctttccgaaatttgtcttttgggaagcatgtgaaag

SEQ ID NO: 80376 - DNA, 246 bp, Glycine max
  Clone ID: 700961476H1
cacaggctctgcctgttgctttgatgattcatgataactcgtcggatcgcacggcctttgtgccggcgacgcatcattcaaatttctgccctatcaactttcgatggtaggatagtggcctaccatggtggtgacgggtgacggagaattagggttcgattccggagagggagcctgagaaacggctaccacatccaaggaaggcagcaggcgcgcaaattacccaatcctgacacggggaggtag

SEQ ID NO: 80377 - DNA, 247 bp, Glycine max
  Clone ID: 700961477H1
gcagagaggctgtgtcaaatggctcttgacattcatatagcaaataattcagctccatctcttgaagaggcagctgataggaggctcatgggccttatatgtgagacaaagggaaatcatgaaacagctcttgagcatcttgttttagcaagcatggcaatggtaagtaacgaccaagaagcagaagtggcatctgttgactgcagcattggagacacatacttatccttgtctcgatatgatgagg

SEQ ID NO: 80378 - DNA, 244 bp, Glycine max
  Clone ID: 700961480H1
gttgaaatgaaggtagctcccatcgtggtgttcttgttcagagatacagagggtttcgcctccaccatctcacaagcttttcgccccaagccttcctcctccttcacgcgccaagaggactcctttgagctctccttggaggcttatggaatcaaacacctcaaagcatctgggagcgtttctcacttcgttgatgatcacggcgcttacaaggtgacaattgtggctatggagcattatgagc

SEQ ID NO: 80379 - DNA, 246 bp, Glycine max
  Clone ID: 700961481H1
ccacttttcagcagagtctattgcagagctgaaagcaagggctaactctgagtccaaatccaaaaccagcgaaatctcttcgttccaatccttatcagcgcatgtttggagatccgtaacacgagcacggaagctgccaaatgatgagataacaagttgcaaattggccataagcaatcgatcaagattggaaccgcctcttccacacgagtattaatgcatacgcattgatgtggtgagcactgc

SEQ ID NO: 80380 - DNA, 243 bp, Glycine max
  Clone ID: 700961483H1
caaagatatacacatatagggagaggctgaaggaggggcatcagatccctactttgtataaatggggttgtctttctaaacaaccccatcacgtcattaagagggggggatcgatccttgatgtgtgaatttgcttgcattagcgggatcgtatatattcattcatatacacaattacatatcaagatcacatgtagtttggtgttcttgatctcataaacaacatggagggtcagaacaaga

SEQ ID NO: 80381 - DNA, 247 bp, Glycine max
  Clone ID: 700961484H1
cagattcgtgatttaccatttaccacaccaaaaccaatccgatcgtttcctctgcggagtcagaaatccatggatccctacaagaatcggccatcaagcgccttcaattctcccttctggactactaattccggtgctcccatctggaacaacaactcatcgctgactgttggatctagaggtccaattctgctggaagattaccatctggtggagaagcttgcaaactttgacagggaacggatcc

SEQ ID NO: 80382 - DNA, 240 bp, Glycine max
  Clone ID: 700961486H1
cttctctctcacactcactttctctctctataactctttctcacccgctagggtttccttttcatcgcatcttgagtttgcaacctcgtcttgtgatttccatggagggtgctgggatggaagagaataatattattaatgatgatgataataataacaagtctgaggcgcatttgacttctgccggtgcttttgtggagggtggaattcaagacgcttgtgatgatgctgcagtatatg

SEQ ID NO: 80383 - DNA, 241 bp, Glycine max
  Clone ID: 700961487H1
ctacgtctctctctctctctctctctgtgcatcgctattctatttctctcactccctcactgttcctccccaaatgctgaacctgaaccacacccactgatctacactgtggaagacattcccaagatttcagctttggcggaagaagagcagagcaagcggaaaccctcatgagagaggcaatgtgagggagggagaaggttccttctttttcctctttctcaggtttcggaaatggtgg

SEQ ID NO: 80384 - DNA, 249 bp, Glycine max
  Clone ID: 700961488H1
ctcaagtggaagagggaggtcggcgacggctgctacttcaatcggcgccgctaccgaggtctccgtcgcggcggaaaggggcatctccgctccactacggcggctattgactactatggttaattgcattaattgtacataaatagacctctaaatcaaagttatggaagattctgatcaacctgccaaatctgctgaaaaccagcaaactgaacaagtgtgtagttttttcagaaagccggttaataa

SEQ ID NO: 80385 - DNA, 244 bp, Glycine max
  Clone ID: 700961489H1
ggcatacccggcgccggcaatggaaacaacgcaaaggagggttgattttgcaaaagctgggccacccaatgtaatgttaatgcagcagatccctaggcaaaatcctgagtattcgttggtggagactagtccaccactggcggctcgtttgcgctatagaggaggaggaggaggggacaagatatccaccacctacgacttagtggaacagatgaattacttgtacgtgaatgtcgtcaaggct

SEQ ID NO: 80386 - DNA, 239 bp, Glycine max
  Clone ID: 700961490H1
ctcttcttctcttgcggctagggttttagcgcagttcttctagatttaaggaagatgggtaaggaaaaggttcacatcagtattgtggtcattggccatgtcgactctgggaaatccactaccactggtcaaccgatttacaagcttggaggcattgacaagcgtgttattgagaggtttgagaaggaagctgctgagatgaacaagaggtctttcaagtatgcctgggtgctggacaa

SEQ ID NO: 80387 - DNA, 218 bp, Glycine max
  Clone ID: 700961492H1
gaaaacccaaagtgcttctctcctctgtctttgtctctctcttgctatccttttggctagtggcactgctgcaagtgcaatgccaagaaggcgcagtgccaagccaccatgtttcaacattcaacagaagccttttgcctgcgactgttctctttggacttggttcttctgcttaccaggcagaaggagcagcaagtgtagatgggagaggaccaagc

SEQ ID NO: 80388 - DNA, 243 bp, Glycine max
  Clone ID: 700961493H1
ggggaagatgaggatttgagttgggatgttgaagacgatgagaatgacgatggtgggattagatgtgatgccaaacctgtgattatgaataaagaggttggtggtgaaaatgtggataatacccacttacatgttgatggcaatgaagagggaacaaagagattggatgtggaagaggagtctaaggaacaaaagaaagacaatttattggaaagtgaggaagttggcaacaaggtggataag

SEQ ID NO: 80389 - DNA, 240 bp, Glycine max
  Clone ID: 700961494H1
gtttctgcattttgtcaaacaaattgcggtgatgttagtccaaatgtacttggagctttttgtatagacactgaactaccttgtgacttcaatcatagtacatgtggaggaaagaatgaattatgctatggccgaggacctggttatccagatgaatttgaaagcacacgtattataggggagagacaatttaaaaaagcagtggagctattcaacggagcatctgaacagattaaaggg

SEQ ID NO: 80390 - DNA, 246 bp, Glycine max
  Clone ID: 700961496H1
ccgaaatcgaggcaaaggcagagacgaagaaggaatgagtgccacagtgactctaactctaaacctatgtcgttcttccatcgttgcttcttgtccacattataaccacaaaccaaaccctaatttcaatgccttgtttagcttctctttgtccctgtctctgtctcaccacagacgcatcgctatctgcaagaaaccattttcctcaagacggacgtggcttcatggacatatgaaaagagatcg

SEQ ID NO: 80391 - DNA, 254 bp, Glycine max
  unsure (1)..(254): unsure at all n locations
  Clone ID: 700961501H1
ctcgagccgattcggctcgagtctctatctatcgagcgtgtctgaggattccgtgtncttgacgagcgagggtgcgactatgacctgcgacttcgatctccggcaatccgcgtggaggttcgtccagtaaaacggcgccgtatagcgggatctgcgacgctgggcggagtggcaatggagggcgagaacgcgagcaacaaggtgatcgagttgacgaacgagatagccagcatctccgattacaggcctccggt

SEQ ID NO: 80392 - DNA, 250 bp, Glycine max
  Clone ID: 700961502H1
gtgaaatatctgatcaattaatggctcagtatttctttttgtttgttctggtgtttgccagccaactgatggctggattcaatgcaccgctagcgctaccatctccgtcatatggaaatcatacaaccattctcagcatagacggtggtggtatcaggggcattattcctgcgactgttcttgaatacttagacaaggctcttaaggctaaggatccaacaacatctttagcccattattttgatgtgat

SEQ ID NO: 80393 - DNA, 249 bp, Glycine max
  Clone ID: 700961504H1
gctatccatttgtttcgagaatgcggtctctctcagccaacccttccttactgcgacaagctgttccagttttggtcaaaccctacaaatccattctctctcgagcattcctcttcagctcccctgcctgaacatctcattctcacaatactcaatttcttagatccgtcacgtttttctctactacttctcttcgtaattttaattcacgctcaacccatctcaacgatgctggctctatcgactctc

SEQ ID NO: 80394 - DNA, 246 bp, Glycine max
  Clone ID: 700961505H1
atctcgttcttcctttcttctctcagattccccctttgcctccttcttcaaccccttttctttctctctctgtctttcgcactttcattctctcttaaaaatctaaatcccttttggtcttcatctttccctctcatccaggtatggcttcgatacgcatcctgaaggtgctcaaggatttgcagaaggatcctcctacgtcatgcagcgcaggtcctgtagctgaagacatgtttcactggcaag

SEQ ID NO: 80395 - DNA, 248 bp, Glycine max
  Clone ID: 700961506H1
atttattaacacattatgtgtctgaacttaaatcatcagttgttacagtgagtgtccacaaaactgatggattatgggaaagacctaaacgccgcttgcatattcaattattgctgggtgggggtgcaatgcttgatacatggggaactgatggagaagttctgcaactaattttgccttcggaagaatgaggtgttgaagctagtatctactagtgagaagaattacaaggaccgtttggaaaatgc

SEQ ID NO: 80396 - DNA, 247 bp, Glycine max
  Clone ID: 700961507H1
attttgaagacccatattcagtctccagcaacttcacttccagtgttagcgaactcacaattggcaagaaggatttacgaaggaacttgaagggaaaatatcgtggtgacggtccatgcatagccacaaaccccatcgacaggtgttggaggtgtgaccccaattgggccaacaatcgccagaagctcgcagattgcgtccaaggcttcggtagaaacaccgttggaggcaaaggtggaccattcta

SEQ ID NO: 80397 - DNA, 160 bp, Glycine max
  Clone ID: 700961508H1
cgttttgtttgtttcaatatgtttgcacttcccgcctcatagacaagtaaggacaaacaagaacgtggttcctcttcatcatcttcatcccatgatgaagcattaccatgtcttgtacatgtttttatttttcttaccaatttctacgttaagtctccac

SEQ ID NO: 80398 - DNA, 159 bp, Glycine max
  Clone ID: 700961510H1
cagagacattactttttggtagtagcaacaagcaaagggaggaaagaaggaaagaaagagagagaatcttcattcatttttttctgctcattttctgtgtacacctttatcgtttctctcactaactttggagtctgctttactccacacaacatacga

SEQ ID NO: 80399 - DNA, 244 bp, Glycine max
  Clone ID: 700961512H1
aaacaaatcaaagccatggccacctccaacttctctattgttctctccgtctccctagccttctttttggtgccacttaccaaggcacactcgaccgataccgtttctttcaccttcaacaagttccacccagtccaaccaaacattatgccccaaaaagatgctagtatttcatcctctggggtgttacaactcaccaaagttggcagcaacggcgtgcccacctcgggatctctcggtcgtg

SEQ ID NO: 80400 - DNA, 246 bp, Glycine max
  Clone ID: 700961513H1
ctctatggcatctgcgacgcgtctggtgcactgcgagctgcgctcggcgaggcccgcggttcggccgagggaaccggccggtccggttcaggttacgatccccaaacccaaacccaaagcggcggaggcggaaggcgcgaacatcgttttgcagccgcggttgatgcactctcagatcctacggttcggatcgagccggggtgcttatcaagactcgcaaggagggtgaccatgatgacgtgtcac

SEQ ID NO: 80401 - DNA, 246 bp, Glycine max
  Clone ID: 700961514H1
ctcgagccggttgaaatgaaaatgggttcttctttgtggactttgtgtctaattttggcttcactagcctcttctgcattctgtgcctttccacggaggccagtggatgttccattcggcagaaactacgttcccacttgggcttttgatcacatcaaatacttcaatggaggttctgagattcaacttcatcttgacaagtacactggtactggcttccagtccaaagggtcatacttgtttggt

SEQ ID NO: 80402 - DNA, 116 bp, Glycine max
  Clone ID: 700961515H1
ggttccgatccgattggctcgtcttcagtgtgaaattcctcgctcatcgcgttcggaatcttcctctcttgttatccagcaaccggtttggcggcgcggctttcgacacaacatac

SEQ ID NO: 80403 - DNA, 247 bp, Glycine max
  Clone ID: 700961517H1
gacaagatcccggaaaggcgtgccggcgtcagagactcatcagttctcactcgtacggcgttgtgctttgctttctcaccttcttcttcatttctttcatcatcatcatcatcacaatataaagttcgctcctttctcagttttcacccatacccagatgggtaacagcaccatctcggatctgtgtccctcctttaagtgaaaaaggttcaatctttggtctctgaggctgttgggttttcgtcat

SEQ ID NO: 80404 - DNA, 247 bp, Glycine max
  Clone ID: 700961519H1
gcgtttacagcactacagttccacacaacaaacaaaagaaaatataaataaatagagaacacgcgaaacacctgattcccctagccagacgcagcagagtcagagagagagattcactgaaacagagcgagtaagaaaatacataaactaatccagaaaatgagcagcggcgctggaaaggtggtgtgtgtcaccggcgcttccggttacattgcttcctggatagtcaaattcctcctcaatcgcg

SEQ ID NO: 80405 - DNA, 246 bp, Glycine max
  Clone ID: 700961522H1
ctaggcatatgtgtgtgcctaaaaaaaattgtctctattgtttagcgacagggtcttaaattgtagtggcattgctcttctgactagtaaaattgctgaaaattactgaggtaaatggattgtggtcacaatcccttacactatcgtttcactttgatcagaaaaaaaacaaaaacactaagtgacacgagcagtcatattcatcactgtgccacgttttactgattgcattggtagtaggtatct

SEQ ID NO: 80406 - DNA, 245 bp, Glycine max
  Clone ID: 700961523H1
taacagaggctccaatgtaattaaagggaaaggtcctagtggtggtaggggtgagaaaccaaaagaagagtttggaagtggggttcaagaacccgagaagaacaagttggttttcttgagggaagttcttataattttgatcttgaggatttgctgagagcttcggctgaagttctggggaagggtagttatggtactgcatataaggccatactggaggagtcaatgactgttgtggtgaaaag

SEQ ID NO: 80407 - DNA, 246 bp, Glycine max
  Clone ID: 700961524H1
gtaagagctcaattattgcacttatacaaagattctatgatccaacatctggtcgggtcatgattgatggcaaggacatcaggaaatacaacctcaagtccttaagaaggcacatttctgtggtacctcaggagccatgcttgtttgctactactatttatgaaaacatcgcttatgggcatgagtcagccactgaagctgagataattgtggctgcaactcttgccaatgcacacaagttcatat

SEQ ID NO: 80408 - DNA, 245 bp, Glycine max
  Clone ID: 700961525H1
ctaaaaggcctcaaggatacactccggacttaattacgttattttgttagggtcaccgtttcgagatattctaaacttgtactgaaaaatatggagggaaaagaagaggacgtaagagttggagccaacaggtacggagagaggcagccaatagggaccgctgctcaggctaaagactacagagagccaccgtcggcgcctctcttcgaaccgggagagttgtcatcgtggtctttctatagggc

SEQ ID NO: 80409 - DNA, 246 bp, Glycine max
  unsure (1)..(246): unsure at all n locations
  Clone ID: 700961527H1
taaaaaccttcccttctcttctcacccccacactcccatctcactctnccctcgcatccaacaatgtctctcaccattccctccaacctctccaaccacgccgccctccgccccaaactaagcccaaagctaaggtccgccgccacaaccaccatcgtctgcagcaccaccaacaacaacaacaacaacaacgtgtcctccgacctgaaggcgttctccgccgcgctggccctctcctccatcctc

SEQ ID NO: 80410 - DNA, 193 bp, Glycine max
  Clone ID: 700961528H1
cagctaccttcatcaacagggagtttatcatctcttaccacattacacttgcaatacaatcaactttctgggaccctttatgttttgcaagaccttcctctccaagatctgtacaattcttactaccaaaatactttatagatatataaatgaataatatgtatatcctgcaactgcatcaatccacacaaca

SEQ ID NO: 80411 - DNA, 104 bp, Glycine max
  Clone ID: 700961533H1
tctctctctctctctgaagatggcttcacgcaggctcgtatcttctctgattcgatcctcccttcgtagatctcaatcgaagccctcaatttccacacaacata

SEQ ID NO: 80412 - DNA, 75 bp, Glycine max
  Clone ID: 700961534H1
atttttgcgaagctgctccatttttatacgaagagcagattcaggtctctatcaccgggatccaacaacttctca

SEQ ID NO: 80413 - DNA, 197 bp, Glycine max
  Clone ID: 700961536H1
atggcttccaacgatgatgagtccgttctcgatccctgggccttcattttggagttgtctcacatatctccatcccaagaacaaatcttggccactgctccatttgtcggagcagtacaggacaccgccacctccgcctcccatgacatcgacatgctgccgttgccggactccgtccccgaagacgtattccacac

SEQ ID NO: 80414 - DNA, 243 bp, Glycine max
  Clone ID: 700961537H1
cagtttctctctcttagggttttctcctcccccattgacccaccgtccatcgcaaaggaagtcgcgcccaatttccatggtttgtagattaaatcttaaagcagtaagtcatcatggataaatcagagcagactcagcagcaacatcagcatgggatgggcgttgccacaggtgctagccaaatggcctattcttctcactacccgactgctcccatggtggcttctggcacgcctgctgtag

SEQ ID NO: 80415 - DNA, 241 bp, Glycine max
  Clone ID: 700961538H1
atcttcttatagcttcatcccaaaaagctcttttccttctaaatttgattccttagttcagcattctattattatatatggcttcttcaccttcctcagaaaacaaaaacctagagggagtagctggtggtgccggagagaaacccattccacttggtgagaacgttctgcagaagcatgctgcattctttgacttgaataaagatggtgtcatctacccatgggagacttttaaagggtt

SEQ ID NO: 80416 - DNA, 97 bp, Glycine max
  unsure (1)..(97): unsure at all n locations
  Clone ID: 700961539H1
gttcgataacaataagaacattgtcgtgagatactancttcaaataaccggtggagatccacggtgttatcctagtaccggttccgcagttttgctt

SEQ ID NO: 80417 - DNA, 245 bp, Glycine max
  Clone ID: 700961541H1
tggatcccaagggctcaaagcagcagcagccacaggaggtggtaccaaaattcctcagcctcccccaacaccactaccaacaacaagggaattccaacaacaacaacatgggagagaacaaaccatcagaggttaaggatttccagatagtggtagctgctgagaaggacgagagcaagaagcagcaacagttggacaaaacgggtgtttccaacaaggacaggcacaccaaggttgagggcagg

SEQ ID NO: 80418 - DNA, 117 bp, Glycine max
  Clone ID: 700961542H1
ccattcctgggtaccatctgcagcaccctgtctcgttcttcttcaatcagtggcagcgacctcaacatcactcttcttctccaatctccattgtctcaaccgtcaacctgtctcttc

SEQ ID NO: 80419 - DNA, 240 bp, Glycine max
  Clone ID: 700961544H1
gtttccatcttacataacaatagagctgttccttactggagaaagctatgcaggacactatatacctcaattaactaatgttttattggaccataatgctcgttcaactggttccaaattcaatattaaaggagttgctattggaaacccacttttgagacttgaccgggatgcacctgcaatttatgaatacttctggtcacatggaatgatttctgatgaaattggccttgccattat

SEQ ID NO: 80420 - DNA, 111 bp, Glycine max
  Clone ID: 700961547H1
atcgatctgaaggctgggtggtaagagcaaaaagaccaaaagaacagcagcaaagtccaatgacatctacctcaaattacttgtcaagctttatcgattcgttgttcgaag

SEQ ID NO: 80421 - DNA, 165 bp, Glycine max
  Clone ID: 700961549H1
tcgtgccaggagttcagactcgctacccttcatacgatcatcctcgtagtccagctggtattgaaggacagtatgttggccataacgtctacccccctggctccttctatcaacaaccgtttggatcgcctggttattatccagcttctctatcatatggagagt

SEQ ID NO: 80422 - DNA, 115 bp, Glycine max
  Clone ID: 700961550H1
ggctagtaaagcacggcaaggtgtacaaaacgctcggatagaaggagaagaggttccagatcttcaaggacaacctgcgattcatcgacgaccacaactcccaagaggaccgaat

SEQ ID NO: 80423 - DNA, 250 bp, Glycine max
  Clone ID: 700961553H1
ttcggctcgccgtcgcctgcttagattctgctttaactccacaagaactagttcaccttgcaatagactgcttacctacatcttcagaaaaagcacataatgaaacaaccccttcgttctctcgttggaccataatcgattattccagagcctacagttcgggagatataacaccactcatggctgcagcccgatttatagctgctattaatgaatcttcaaaacctccactccgaatgggattctttat

SEQ ID NO: 80424 - DNA, 226 bp, Glycine max
  Clone ID: 700961555H1
cttttacgttttcttaacatttttcgggaatgcgagctgaaatgtcaatcatcatgacatgagattggtcctctctatattgatcgcacaatgtatcagaggaaatataggaagagacgtagtggggtccagcacccatgtgccctcctcctgtctccaccagctgctgccgctcaatgatgagacccctgttccccttcaagttcaagttcaatttccacacaaa

SEQ ID NO: 80425 - DNA, 242 bp, Glycine max
  Clone ID: 700961556H1
gtgagtgtgggcacggtaagatgcagaccattgctaggcgcttagggcagcaatcgctgaggccatcgacgtcgctcaagtccatctatccaatttccgatcaccattatggaatggatcacgagcgttacgtttctaccctcgccaccaagggagttggtcacctcgttcgtaagggcactggtggacgatcctccgtcagtggcattattgctacagtatttggggcaactggattctta

SEQ ID NO: 80426 - DNA, 238 bp, Glycine max
  unsure (1)..(238): unsure at all n locations
  Clone ID: 700961558H1
aaactatatccaatgctggatattggttgattgtgggtgacctagaggtcattgaaccaatccagtacaatgatggacttgatcattttcggctgtctccagcagaactccgtgctgagttcacaaggcgcaatgcagtcgctgtgtttgccttccagctccggatcctggtttcacaatggccacgctttgctaactcactgacacccgnaggcggcttcttgagatgggttataag

SEQ ID NO: 80427 - DNA, 239 bp, Glycine max
  Clone ID: 700961560H1
gtgcgttaggcataaaagatgtatgatcaactacaccatatgggctgtctcatcttcgagagaaaggaattggcttccaactatgagcaagttaaggcttcgattgattcatccgagtttatgtgtaagcatgattcaaccatgactttgtctgcactaattgaagcaaggaaacgggaagaaagcttgaagaaggcagtaggagtcacagaggcatatgaagcgcagaaaaaatcaac

SEQ ID NO: 80428 - DNA, 239 bp, Glycine max
  Clone ID: 700961562H1
aacctttgtcaatttctttcttgttcgactctgcttctttctccaacttcacacacacacacacacaaaaaaaaaaaaacttggcaaaggatagaacaattggtgtggctctggatttccccaaaagcagcaagaatgctctgaaatgggcacttgagaacttagccgataaaggtgaccccatttatgtcattcacattaactccaactctctagacgagtcccgaaacaagctatgg

SEQ ID NO: 80429 - DNA, 238 bp, Glycine max
  Clone ID: 700961564H1
cgcgagccgaattcagactcgagccggaatgttccattgcttgagaatgttcattattcaattcaatgttgcatgttattgtatataaaaaaaatggtccccatatacgtgacacgtgtatgcctattacgttgatttactttcttgtataaactaatgtaactaaaactatgattattgttggttggtttgtgctttaatttgttgagcactactccattgtttgtgatcacaaaag

SEQ ID NO: 80430 - DNA, 233 bp, Glycine max
  Clone ID: 700961567H1
ctttcattggtgtggcctagctgttttcgcaatgagacagccttcgtctctgcgaagcgcacttttgcgctttggggttcccttgttgcttgttatcaccttctgttatgctacttctactgctgcagcaacaactcgagtctcaggggatgtagagctgccaaagacaaacctaaatgggcatcatgaagaagcaaaattcggattttttcatcataaaccaatattcaaga

SEQ ID NO: 80431 - DNA, 228 bp, Glycine max
  Clone ID: 700961568H1
atcgttttcatctctgtttcagatctgagctctcgtatattccccagccatggccgaacaggtcaccataatgaggctcaaggttgatcttcagtgccacaaatgctacaagaaggtcaagaagattctctgcaaattccctcaaatccgtgacccggtgtacgccgagaagaataacatcgtgaccatcgcggtggtttgccataaccctgagaagctcagggacaa

SEQ ID NO: 80432 - DNA, 235 bp, Glycine max
  Clone ID: 700961569H1
ctctctttctctctttctagttcgtgttcttcgtcgcaaatccgaagtaggatctctcttgttttttctctaggtttttcgcgatggcgtcgaagcgaattttgaaggagcttaaggatttgcagaaggatcctccaacatcttgcagtgccggtcctgttcatgaagatatgtttcattggcaagctacaattatgggtcctccagacagtccctatgctggaggtgttttcct

SEQ ID NO: 80433 - DNA, 239 bp, Glycine max
  Clone ID: 700961570H1
ggaagaagctgctgccatggctctctcatccccagccaaggatggggatgagagagccatggaagaagctgctgccatggctctctcatccccatccttggctggcaaggccgtgaagctgggcccatcagccccgctagtgggaagggtgagcatgaggaagaccgtcaccaagcaggtctcctcaggaagcccatggtacggcccagaccgagtcaagtacttgggcccattctctg

SEQ ID NO: 80434 - DNA, 55 bp, Glycine max
  Clone ID: 700961573H1
cgcaaggaggtgcagaatggctgatgcaggtgcagaaggagcatcttcttccaca

SEQ ID NO: 80435 - DNA, 235 bp, Glycine max
  Clone ID: 700961574H1
ggttcatcttggcttcttccttctggggtgtttctccatgatctcatatgctaatggttatgtcagcaatgggggttggaccaatgcccatgctacattctatggtggaagtgatgcttctgggatcatgggtggggcttgtggttatggaaacttgtatagtcaaggatatgggactaacacagcagcacttagcactgccttgttcaacaatggcttgagttgtggctcatgc

SEQ ID NO: 80436 - DNA, 237 bp, Glycine max
  Clone ID: 700961575H1
caaatatctgtatatcacattgaaacagaactctagaagcaacttggaagacagggatcgccggcggcaccctccgaagacggagatacacccactcacaaccactttcccggaaaataaccaccgaccacaatttcttggaatttattttgcggtgaattcactttctgcctttaattttttcatcccctcgcgtgcggattttgttttccccttccgccgatagggttttgatga

SEQ ID NO: 80437 - DNA, 236 bp, Glycine max
  Clone ID: 700961576H1
ttttaattgtctctgcttttctcgtagaacgcgtttcttgccactccgaaaaacaagaggaaaaaattggaagttttcaaggatgttagaacagttactgatatttacaagaggagggttaatcctctggacttgtaaggaacttgggaacgctctgaaaggttcacctatcgataccttgatccgttcctgccttttggaggagcgatctggtgcggcacatacaattatgatgc

SEQ ID NO: 80438 - DNA, 233 bp, Glycine max
  Clone ID: 700961577H1
gacagagaaaccaatcggaggaaaatgaaactagtttggtccccagagacagcatccaaagcatacatcgaaacagttcaatcttgtcggattttccgggaatccggggtggcggactggtgtcggcgatggcggcggggtggaacgcgcactaatcgtggagacgtggtcggaggggggagtgatagcgacgagcgtgggtttagccgtggcgagaactcacacgtgcggga

SEQ ID NO: 80439 - DNA, 229 bp, Glycine max
  Clone ID: 700961581H1
cccatatgatgagtgtggtgatgggtgggtgagtccgaattgtgaaagtaagcaaagatggctttcacggaatcgtctctcctccttccttcggtttcaggaaccaacaagaacaagaacaaggttccagaagacaaatggtatttagcctacattgtgtattttaccctgggtctcggttaccttctcccatggaacgctttcatcaccgccgttgatgacttctcct

SEQ ID NO: 80440 - DNA, 113 bp, Glycine max
  Clone ID: 700961583H1
gaatctctgaaagattacgaggaggattttgaaaatcctgaaaagaagcccagaaggaacaagtacgctttcgcatgtgctattttggcttcaatgacttccacacaacatac

SEQ ID NO: 80441 - DNA, 236 bp, Glycine max
  Clone ID: 700961587H1
gaaaaaatttgcaaggcaacttggttgttgagaaattagatagcctaatggtgctggcatttttgcaccttgaatcctgtcaaagcagtggccgtttgactgaggtattcgatactctactagcttcatttcagagaaccgtattgaatgcgtacaagtcaaaatttacccagtatgtgatgttctatgcatgtgcactggaccctgaaggatgtggtgtgaaatttgacatggtt

SEQ ID NO: 80442 - DNA, 237 bp, Glycine max
  Clone ID: 700961588H1
gctactttggcttggctttctgaattttggtttttcagtgctgagagctgaacaagaagatggggggtggaaatcaagaggcagtcaagcagctgcagaccctgatggaaaatgtggatgatgagcagctgaagaatacattccagattatgcaccagggttatcaaacggaaacgttaatacggtttctcaaagctagggactggagtgttgccaaagcccataaaatgttaattg

SEQ ID NO: 80443 - DNA, 77 bp, Glycine max
  Clone ID: 700961589H1
tagatttgtattgttccttcctccttcatgagtcgtctcctaaacattttacttccttcttccaccgtatcgtagga

SEQ ID NO: 80444 - DNA, 113 bp, Glycine max
  Clone ID: 700961590H1
ctgaacaaggaaaacagctgcacttgcatcacagctcaagccttaaagctttagttctgaaaaatatagaaaaaaagaaagatggaaacacgagtgtcttccacacaacatac

SEQ ID NO: 80445 - DNA, 235 bp, Glycine max
  Clone ID: 700961591H1
aagaagccgagcgattttgtttaccttccaagagatgaagcatttggtcacttgaagtcatcagattttctcgcttatggaatcaaatctgtatcccaagatgtcttgcctgtcttgactgatgcattcgatggaaatattttgagccttgagtttgataattttgctgaagtgcacaaactctatgaaggtggagttacactacctacaaactttcttagcaagatcgccccta

SEQ ID NO: 80446 - DNA, 233 bp, Glycine max
  Clone ID: 700961592H1
aagaagaggaatgatgcgaagggtgcaaagatggcgatgcgtttggaactgtattgatcgcccgagtcagcagctgcgtctattgcacgagggccctgacaccgtagaagagcttctggagaggcatctcgttaaaaacaaaaacgaaaaccagttggagaatcagaggcaactcaccagcactcgccgcgaacgctctgtctctaccgtgacattcttcgggccacccgcct

SEQ ID NO: 80447 - DNA, 234 bp, Glycine max
  Clone ID: 700961594H1
ccactattcaattctctatatttaacctctttccctcattctcttctttcactttcacttcctcatggcatcaacaaagagcatgttcatgtccttcgccatcctcctcctcctcgctctcttctccgccaccgtgtccgctcagggctctccaacaccggctccggatgccggagcagctggatcagtctcgagctctgcctccgtcatcggtgctgcggttgtgttgtccat

SEQ ID NO: 80448 - DNA, 227 bp, Glycine max
  Clone ID: 700961595H1
aggcactatagtaaacaatcttctctatctaagatggagtttgttctaaattacctaaatgccactgccattggagttctttctataaccctcttcttttggtttttgtataatcccttcaaatttgcattaggtaaaaaagaggctcccaaagttgcaggtgcatggccaatacttggtcacctaccactattgagtggttcagagacacctgatgtaggtttggg

SEQ ID NO: 80449 - DNA, 233 bp, Glycine max
  Clone ID: 700961596H1
agaaaaagcgaaaagcgatcatagtttcacttcggccttatccagtttagggtttcggttctctaccctatctttcacgtatcgaaaccttaaatttacgatcaggtctgagcaatctggttggtagaacctttggtcttagtgagtcaagttttatgtctgaattagacgatcaaattcctactgccttcgatccttttgctgatgcaaatgctgatgactcgggtgctggg

SEQ ID NO: 80450 - DNA, 276 bp, Glycine max
  Clone ID: 700961601H1
gcgaagagaatggctcccaagggtttaatctttttggctgtgttatgcttctcagcactgtcactgagtcgttgtcttgcggaggataatggacttgttatgaacttctacaaggaatcatgccctcaggctgaagacatcatcaaagaacaagtcaagcttctctacaagcgccacaagaacactgctttctcctggctcagaaacatcttccatgactgtgctgttcagagttgtgatgcttcactgttgctggactccacaagaaggagcttg

SEQ ID NO: 80451 - DNA, 194 bp, Glycine max
  Clone ID: 700961602H1
gatttgtgcaaatgatgtctttgcagaggaccaagttgtttccttttttcattgtccttgtttccttcacatgtagtctctcccttgctatgtccagtaaccagttggagcagtttgcttcggaggaagaagtgtttcaactattccaagcgtggcagaaggagcataagcgtgaatatggcaaccaagaggag

SEQ ID NO: 80452 - DNA, 271 bp, Glycine max
  Clone ID: 700961603H1
gtcaaagatagatcctggtgatgaatctggtagcacactggacagcgttaagggagaaattgagcttcgtcatgtgagcttcaagtatccttctaggcctgatatacagatttttcgagacctcagcttgactatccattctggcaagacagtggctcttgttggtgaaagtggaagtggaaaatcgacagtgattgccttgttgccaagattttataatcctgattcagggccaatcacacttgatgggatagaaattcgtgagttacag

SEQ ID NO: 80453 - DNA, 267 bp, Glycine max
  Clone ID: 700961607H1
ctctttggaaatgtctgctgttatttacaaggactgggttttcactgatcaagcattgcctaatgatcttgtcaagagaggagttgcggttaaggatccatctgctccccatggagttcggcttttgattgaggactatccttatgcttctgatgggctagagatatgggatgccatcaagtcctgggtgcatgaatatgtctcattctactacaagtcagatgcagcaattcaacaagatcccgagctccaagcttggtggaaaga

SEQ ID NO: 80454 - DNA, 274 bp, Glycine max
  Clone ID: 700961608H1
ctaccaatcttcttccactactttcacttcgttccctctcactctcttcatttgtatgctttttgcgctagggttttctctgcaatctcttgtactcgaagttcgttccttcttccggatctcaatctatggatatccgcaagaggggaagacacgaaaccggcttcagcttaaatggaggattcaagagatccaagcaagaaatggagtccttatcaactggtgtaggaagcaaatcgaagccatgtaccaagtttttcagcactgctggttg

SEQ ID NO: 80455 - DNA, 274 bp, Glycine max
  Clone ID: 700961609H1
gctttctagagctggtgctctgggaggagtagcgattcggcggttgaagatgcgaaggaaggcaccacactaagtaaggttgcgtgaatggaaagcattttagaggttgtttcctttttgtagcattttggtgttttttgtctctttattttgacctatttacaaaattcgttgttttgtgctttgttctgtgttcagagtgtcatgggggcacaaaaaaagttttatttttgttgatagagggttttactcgattgacacgtcgctgcttctg

SEQ ID NO: 80456 - DNA, 274 bp, Glycine max
  Clone ID: 700961610H1
gaggacatgttctgccatgaattccatcttgttgaccttagggtcatggataactgcttgacagttaccaagggtgtggaccatgttttcaatcttgctgctgatatgggtgggatgggttttatccagtccaaccactcagtcattatgtacaacaacaccatgattagcttcaacatgattgaggctgccaggatcaatggtgttaagaggtttttttatgcctctagtgcttgtatctatcctgaattcaaacagttggagacaaatgtga

SEQ ID NO: 80457 - DNA, 276 bp, Glycine max
  Clone ID: 700961611H1
aagccaccagtttacaagaaaccaccagtgtacaagcccaagcccaagccacccattcacaagcccaagccacccgtttacaagcccaagccacccgtttacaagaaacccccttatggtaagtacccaccagttcaagacaacgatcacttctaaaccatgcaacaaggcatgttaatgttaactatctactaaaataaagaggttcagttaacctactacgtacgttgctccttttaattcctaaatcgtaatttacaactttgtagggatgag

SEQ ID NO: 80458 - DNA, 275 bp, Glycine max
  Clone ID: 700961612H1
ctgactcactccacaataagtgtcgattttttcctaaataagtgaaagtgtagttacacctttttttgtgtgtttaccacttttgagtgccacagagttctgagtttcataggagaaaaaaaatgacagaagaacaaaccaaaacggttgagtcagaatcagtaacaccaccacctgctgctgctgctccttcacaggttcctcctgctgctgaggctgaacatgttcctgaggctccaaaggatgtgactgaggagaaatctgtaattccagtg

SEQ ID NO: 80459 - DNA, 271 bp, Glycine max
  Clone ID: 700961614H1
gggatcacgcgcgatgaggcgtgccataatttgttattcgccacgtgcttcaactccttcggcgtggtgaagctgttcttcccgaacgtgctgaagtggatcggacgcgcctgggtgaagctccacgcgcgcctggcggaggagattcgctccgccgtacgaggcgccggcggggagatcaccatggcggcgatggagaacatgccgctgatgaagtcggtggtgtacgaggcgttccgcatcgacccgccggtgccgttgcagttcggga

SEQ ID NO: 80460 - DNA, 273 bp, Glycine max
  Clone ID: 700961617H1
actccctcctcttcacacattttcttagctctctccaacaatccctctcgttcacactttcagattgtgtgaagatgggggctggtggccgaactgctgttcctcctgccaacaggaagtcagaggctgaccctttgaagcgggtaccatttgaaaaacctcagtttagtctcagccagattaagaaggccattccacctcactgtttccagcgctctgttctccgctcattctcctatgttgtttatgacctcaccatagccttctgcctct

SEQ ID NO: 80461 - DNA, 266 bp, Glycine max
  Clone ID: 700961618H1
cttcatcttctttaatttgatgagaaatttggtgcaattctgatgcagcttaggccttacttcttggttttcaacattatcttgtgattctcggtacaactgtgctaattcccactgctcttgttccccagatgggatgtggcaatgaggagaaggcaatagttatccaaactctactttttgtagctggaattaacacattgctgcaaactctgtttggcactcgattgcctgcagtaattggagggtcttatacttacgttgca

SEQ ID NO: 80462 - DNA, 267 bp, Glycine max
  Clone ID: 700961620H1
ccatggtgaacatcatgatcaaactgggcactcttgtcatgaagatgctccacttgttcgtaaagagcatgaccatcgccatattgatcacaatatggaagggatatttttgcatgttcttgctgacaccatggggagtgttggtgttgttatatctaccctgttgattaagtacaagggatggcttatcgctgatcctgcctgctcaatttttatttctattctaattgtatcttctgtgatacctttgctaaaaaattcagcaga

SEQ ID NO: 80463 - DNA, 270 bp, Glycine max
  Clone ID: 700961621H1
tgagaagtggctggaagaacatctaagaaagagaggtgaggagaaggacggtaaatgtgaaagcgacttcatggatgtgatgatatctgctttccaagaggaagaagagatttgtggttataagcgggagatggttatcaaagcaacatcagtgcttcttatccttactgcctcaggaagcacagccataacactaacatgggcactctccttgctcctaaaccatccaaaggtcctaaaagcagcccaaaaagaactggacacccattt

SEQ ID NO: 80464 - DNA, 269 bp, Glycine max
  Clone ID: 700961622H1
gctgataatccatattttcgattgggttacaacagtttgggtgcttttgcaaccattaaccatcttcacttccaggcttattatttggatctgcccttcccaattgagaatgcccccactaagaaaattgcaagtttaaatggtggggtgaagatatctgaactgttgaagtatccagttagaggtctcgtctttgagggtggcgatacgctggaagatttatcaaatgttgtttcagatgcctgtatatgtcttcagaacaacaacat

SEQ ID NO: 80465 - DNA, 88 bp, Glycine max
  Clone ID: 700961623H1
tgcaaatctctcccggacattcactgggaaaactcaacaatgatgtacaggatagcaagagagatcaaatgtcaagcagctctgattc

SEQ ID NO: 80466 - DNA, 269 bp, Glycine max
  Clone ID: 700961624H1
gggtgttgctctgactgtgtgcacaattcctggtcaagttgcatcagatcgtttgggaccaggaaagatggaacttggtcttggaattcatggagaacctggggcagctgtggctgatattcagcccgtaaatgtggtggtttctcatgttctgcagcaaattttgtccacggaaacaaactatgttccgataactcgaggagacagagtggtccttatggtcaatgggttgggtggcactcctacaatggaactaatgattacagctg

SEQ ID NO: 80467 - DNA, 120 bp, Glycine max
  Clone ID: 700961627H1
cttactttgtttcttgtctcggatttcataattgataattaattaatttcaccaacttgttggcttttttagttctataaattccccgcttgaatcacacagagtcctctcttccacaca

SEQ ID NO: 80468 - DNA, 258 bp, Glycine max
  Clone ID: 700961631H1
agccaatacgcattggaagacatgcttttggagaccaatatctggcaactgatacagctataaaaggcccaggaaagctaaaattggtttttgcacccagtggaaatgaaggcattaaagagctagaggtctataactttactggtgctggaggcatagctttgtccatgtataatactgatgagtccattcgagcttttgctgaggcttcaatgaactttgcttaccagaagaaatggcctctctatcttagcacta

SEQ ID NO: 80469 - DNA, 275 bp, Glycine max
  Clone ID: 700961632H1
ttaaaggtggtcatggctaatttgcttacagtgtttttgctaattgaggtgtttgcatatggctacagttacggacaatatggcttaaacacgaattactacttgatgagctcttgtccttttgttgaacctgttgttaagaacattgtcaacagagctttgcaggatgatcccaccctagcagctggtctgattagaatgcactttcacgactgcttcattgagggatgcgatggctctgttctgattgactccactaaggataatacagcaga

SEQ ID NO: 80470 - DNA, 272 bp, Glycine max
  Clone ID: 700961633H1
cgagctcagcatagcagccgcagagctgaatttcttcaaagggaatcacatgctaggcaacagcagtaccagcaaatcataagggatccttaccccggtggtggcatggcaccccgagaccctcatgcaccccgagatcctcatggttacaacaatgtgaatgattcaggtgcaggtggagaagtgcaacgaggctattctgccgatcactttgatccttaccgagagagagctcgatttcttgggggtggtagagatcaaggatttgaacc

SEQ ID NO: 80471 - DNA, 265 bp, Glycine max
  Clone ID: 700961634H1
gcagagttgtcgcgattaagaagatgaagcgagtggagtttatggggctggggctgttagtggtggtgatgatgggatgttgtgggtctgcgactgctgcggatgacttggcaaccaagtgttcggcggtgattcagaaggtaataccgtgtctgaacttcgcgacggggaaggaagaaatgcccaaaaaggaatgttgcgacgccgccacggccataaatgtgagcaacccatagtgcttgtgctacatcattcaagagaccca

SEQ ID NO: 80472 - DNA, 197 bp, Glycine max
  Clone ID: 700961636H1
aaaaaacttgtcttttaagttttaactctaagccatggctcttcccctgttcctcctctgcttcatgctctgcatttcactcacacaccatactattctgttacccctaacacactcaatttcgaaaacccatttcaacagtacccaccagcttctcaaatctacctccactcgctcagcctcacgcttccacagaa

SEQ ID NO: 80473 - DNA, 267 bp, Glycine max
  Clone ID: 700961638H1
atggaacaaacacttacagagctgccactgttgctattcaaggagattactttgtggccatcaatatggggtttgagaattctgctggaccacaaaagcatcaagcagtagcattaagagtccaagcagataagtccattttctacaattgctcaatggatgggtatcaggacactctttatgtacacaccatgcgtcaattctatagagattgcacgatttcaggtaccattgactttgtgtttggtaatgcacttgctattttcc

SEQ ID NO: 80474 - DNA, 269 bp, Glycine max
  unsure (1)..(269): unsure at all n locations
  Clone ID: 700961640H1
ggctccacacaacatctcatctcgtcanncaanaaaatggccctgcttctgataattcccatctcaatggtcacccactggctcggttacaccctataccagcgattaagattcaagctccctccgggtccacggccctggccggtagtcggtaacctctacgacataaaacccgtccgcttccggtgcttcgcggagtgggcgcagtcttacggccccataatatcggtttggttcggttcgaccctaaacgtcatcgtttcgaactc

SEQ ID NO: 80475 - DNA, 267 bp, Glycine max
  Clone ID: 700961643H1
tttcaaaaaacatacaatatactaagcctctttctctctctgaatttctaagcctctctcacaccaatggaggcgccacaacccggatccagcccgttacgcaaaatgattttggtgtcatcaatggcggccggtatccaattcgggtgggccctacagctctcccttctcaccccatatgttcacaccctaggcgtcccgcacccttgggcctcatttatttggctatgtggcccgatatctgggctgctggtgcagccattgtgg

SEQ ID NO: 80476 - DNA, 266 bp, Glycine max
  Clone ID: 700961644H1
cgttggcagatgctgatggcagaattgcatggcaaactaacactgccaacaagggtgttgtggccttcaggcttctttcaaatggtaacatggtccttcttgatgcacaaggcgggttcgtttggcagagttttgatcaccccacagatacccttttggttggtcaatatcttagagcaaaagggccatccaagttggttagtaggctctcagagaaggaaaatgttgatgggccttatagtttggtcttggagcctaaagggtta

SEQ ID NO: 80477 - DNA, 113 bp, Glycine max
  Clone ID: 700961646H1
aaaagtttttgaaatgttgtcaccccttcttctatttctatgcctaactcttcctttgttgtcgttgtccttctgcaaataccgtaaaaccttcaaggatccaccacttccac

SEQ ID NO: 80478 - DNA, 197 bp, Glycine max
  Clone ID: 700961647H1
tttcttttcgcattttcactttttggtcgcatattaataatcggatacggggagtgtagttttagagagagaaagattgagagagaggaaggagcgtgaaaagaccaaattgaccttggacttcgtctttcctctctctccctgtgaactctcgttccgattcgttttcgttggtcttctagaagcttcttccacac

SEQ ID NO: 80479 - DNA, 265 bp, Glycine max
  Clone ID: 700961648H1
gatgaattaattgagcatctgagtgcagccagaatagaggatcgtggtcgatggcgtctgctagccttggaagtggtggggtcggcagttcgaggtctgttaatggtggcttcaggggttcttccagttccgtcgattggcttggcagagagatgcttgagatgaggttgagagaccacgaagacgatagagatagtgagcctgacatcattgatggtgtgggtgctgagacaggtcacgtcataagaaccagcattggtggccg

SEQ ID NO: 80480 - DNA, 176 bp, Glycine max
  Clone ID: 700961652H1
caaacactccctcttcctcaattttcttcgatcaaacccaatttagccaccttcagcttttcacaatttccatagtttccttgatctcaattattgcatgccaaatcatgtaccatttagagaagccacaaagagatgataaacagtttctaactccctctttttcttccacacaa

SEQ ID NO: 80481 - DNA, 264 bp, Glycine max
  Clone ID: 700961654H1
gtgaaacaactgatgaggagccttatgcaccaaacaatcctaaaggttttgttggcaaagctcttggacaaccaggactgaaacgttcagtgagggttggggagacaggtttcagagaagttgcagcctaccttcttgaccatgatcattttgccaatgtaccctttactgcccttgtaaaggtcacacattctatttttactgttaatgacagggtcaatggtagtatgcatcataacaaaaagcaaataagcaagattgcat

SEQ ID NO: 80482 - DNA, 269 bp, Glycine max
  Clone ID: 700961656H1
gaagaacaaaattcaggtttccaacactaagaaaccccttttcttttacgtcaatcttgccaagaggtacatacagcaacgcgatgaggttgtgctttctgctcttggaatgggtactgtttctctaaaacttatattttcattcatcagtctttgaacataaaaatcaaattttcttccgtgtctaaattgcgggaaagttattataaatataaaactgaacatttttaattttttaatgctcatttactccatatcatgtagcagct

SEQ ID NO: 80483 - DNA, 266 bp, Glycine max
  Clone ID: 700961657H1
aaaatgggttcttctttgtggactttgtgtctaattttggcttcactagcctcttctgcattctgtgcctttccacggaggccagtggatgttccattcggcagaaactacgttcccacttgggcttttgatcacatcaaatacttcaatggaggttctgagattcaacttcatcttgacaagtacactggtactggcttccagtccaaagggtcatacttgtttggtcacttcagcatgaacataaagatggttcctggcgattc

SEQ ID NO: 80484 - DNA, 267 bp, Glycine max
  Clone ID: 700961658H1
gggaaagagggttgttttcctgaagcagctcccatctggattgcttcttgtaactggtccctttaagatcaatggggttcctctcagaagggtgaaccaatcgtatgtcattggtacatccacaaaggtggacatctctggtgttaatgttgataaatttgatgacaagtactttgccaaggaagccaagaaaaagaaaacaaagggcgaaggcgagttcttcgaggcagagaaggaggagaaaaatgtgcttccccaagaaaagaa

SEQ ID NO: 80485 - DNA, 264 bp, Glycine max
  Clone ID: 700961661H1
accgacctccacggcggaaaagtcgcattcgcccctgaaaacaacgacggcacactctcctctacgttcgtcacatcggtggaagaaatcccttacaacatctccgtaattcagatcagtaaggttctcccctctgccgcagcggcagcccctgcacccgcacccaccctacaaaacctccccaacattatgtcaaaacacggttgccaagtcttcgccgacactctctctgctcaacccgacgctctcaacaccttcaatgac

SEQ ID NO: 80486 - DNA, 266 bp, Glycine max
  Clone ID: 700961663H1
ttctctttggtgctagtgactcatacaacggagacaagatcatgcagatcacagtggcattcaaccacttcgggcaaggactggtccagaggatgccaaggtgcagatggggtttcgtgcacgtcctcaacaacgactacacccactggttgatgtatgcaatcggtgggagctcagggccaacaattctgagccaaggaaaccgtttcattgctccgaacaacgacaacgccaaggagatcactcacagggactacgccggaccc

SEQ ID NO: 80487 - DNA, 255 bp, Glycine max
  Clone ID: 700961664H1
gtgccctccctctttctagctatttccctctcttaacacaattaacaaagatatatcatatcatatcaactccaaatgatgaaaaatattgggttgtttcttcttgtggtggtggctacttttgtggtggcagccacagctggtagcttttaccaagactttgaaataacatggggtggtgagcgtgccaaaatctatgaaaatggaaatcttctcaccctctccctagacagagcctctggctctggctttcgt

SEQ ID NO: 80488 - DNA, 263 bp, Glycine max
  Clone ID: 700961667H1
gctttcatcgttcaacatatcctcaccatctcagtcatgggcctgctatcttgttttaggtctaccgtcctgagaaaatgttccaaaggaagctctggcatgtcaagattcctgtatacgaacaattttcaacgaaacttgatttcgcctggtggcaatgaatcgtattatgggtattttaacaggagatcatacacttcactttatatgggaactggaactgtgggtgggattacaagtgctagaatcagggtgccaaatgt

SEQ ID NO: 80489 - DNA, 265 bp, Glycine max
  Clone ID: 700961668H1
cataattcagtgctcttgcaacaattgcctcattgggctccttgttctattacacaagctctagagttactttctcctgcatacaagggtcatccacgggtcatggcatacattctaagggttctggaatcctatcctcctgaacgagtaactattttcatgccacagctggtgcagtcgttgcgacatgcatgcagggaaattggtttaagggtatctgcttagagctgctcagagacgtgacatatttgcccatattcttatc

SEQ ID NO: 80490 - DNA, 263 bp, Glycine max
  Clone ID: 700961669H1
cgaaaagttatggcaatggccacaggagaggcaccagctgaagctaccccaactgaggtgccagagattgtcaagactcttcaagaaacttgggacaaagttgatgataagtatgcagtgagttcacttgccttggttggggtgattgcattgtggggctcagttggattgatctcagcaattgataggcttcctttgattcctgggattcttgagattgtaggcattggatacactgggtggtttgtataccagaacatagt

SEQ ID NO: 80491 - DNA, 262 bp, Glycine max
  Clone ID: 700961672H1
cttctccctttttctctctgtctctctctctcggtctcgctcttcttctcatcaagcacagagttacagactcaccgatcttccgattctctttcgtcttggtttatgagctcgaaggagagacccactcttggtggcacgcggattaagacccgcaaacgaaatattgctgcgccgctggaccctgcagcattctcggatgcagtggtccagatttatttggataatgctggtgatctggaacttattgctaagagtattg

SEQ ID NO: 80492 - DNA, 266 bp, Glycine max
  Clone ID: 700961673H1
agttaacttgtgaagaggctattggtggaagttcctataaaacagcagcactatggctctgtttatgaagttctttaattcttcttcgacaagcttaatgctccgtttcatattatcgttagttctatcattcagagcgaaggctgtggtgaaactaccgccaaatattaccattcctgcagtgatagctttcggagattccatcgttgacccgggcaacaacaacaaggttaaaacactggtcaagtgcgatttccctccttacg

SEQ ID NO: 80493 - DNA, 264 bp, Glycine max
  Clone ID: 700961674H1
caaaagagccactaacaaaacagaccccgtgaaagcaaagcaccccaccgcgctctttgcctaaccgactcactcccatggaatccgatctaaacgacgccgtttttcccgaataagatctcgacgacgacgacgaaactccagaggatgaagaggaggaggaggacgacgacgtcttagatgacgatgaaaccgaaccccctccctccgtcatcgccgtcgcgccgcccgcttcccaaacgctcgacaccgcgttaattccga

SEQ ID NO: 80494 - DNA, 162 bp, Glycine max
  Clone ID: 700961677H1
cttcaaaaacatggctctaacacttcgttcttcaacttcttttattaatcagaaggaaaccaaagtcctcaaaacttctgacaatgcccctgccatagttagtttttcaaaattcaagccatcatcatcatcgttccggctccgggcaaaaaattccatgca

SEQ ID NO: 80495 - DNA, 142 bp, Glycine max
  Clone ID: 700961679H1
cggcaacggatatctcggctcttggatcgatgactaatgtagcgaaatgcgatacttggtgtgaattgcagaatcccgtgaaccatcgagtctttgaacgcaagttgcgcccgaagccattaggccgagggcacgcctgcct

SEQ ID NO: 80496 - DNA, 268 bp, Glycine max
  Clone ID: 700961680H1
caccaacgcgagacaagccctaaatctctcttctcttgtcttcttcttcctttaaccatgagaccgatcttgcacgttcagggaggccaatgcggtaaccaaatcggttccaagttctgggaggtgctctgcgacgagcacggcatcgatcccaccggaaagtacaacgaggaaggcaacagcagcatccaactcgagaggatcaatgtgtattacaacgaggcctctggcggaaggtacgttccccgtgccgtgcttatggatctcg

SEQ ID NO: 80497 - DNA, 261 bp, Glycine max
  Clone ID: 700961681H1
aaacgaatcatctgagtctggcccagtccatcgccacaggttccttagtgtatctgctattgtagcaatatctgcatcctttgtcattgtattaggagtgattgctgttagcctacttaatgtttctgtaaggagaaggctaacatttttggataatgctttggaaagcatgtgctcgagctcttcaagatcgggaagtccagccacaggaaagcttatcctgtttgattcccagtcctcacctgattggatcagcaatcc

SEQ ID NO: 80498 - DNA, 229 bp, Glycine max
  Clone ID: 700961683H1
gccctggaaagtagaacagataaatggatgccacttctataatgcatttgttgaagggcttttgtgatcacacacaattgaaatatgctggttttaggaagcttgaccaacatgttcctatgacgttgacctgggaaaatggttaccagaaaagagatgaggttaaggaaagtatgtggggtgacctcagtttcaaatccccagatgagttatattcttcaagcggtga

SEQ ID NO: 80499 - DNA, 261 bp, Glycine max
  Clone ID: 700961684H1
atccatctttgccttctgcatgttggttctctgtaaacagatactgcaaaagaagaataatattgaatatttggttgggttgaatccctgggttgaagcgttgcagacatcacggctattctaagagtgtctcgctctctcattcatgtcccaactgtacgacggaggacaggttgcgtttttgccaccaacccttcgccgcacggtgggcgtggtgctttgccttctgaaggtggtagcccttcagacttgctcttctta

SEQ ID NO: 80500 - DNA, 261 bp, Glycine max
  Clone ID: 700961685H1
aaaatatctaacaaccttaaagatctgatacataaccttagttataaaaggttaaatattctccttttaaaaggtaatcactttatgggggatataccaaagcaactatgccagttgatagatttaaacatgctagacctttctcataacaatttctctggtgttatccccaaatgcttaggtaaaatgccttttgagaataagaacccgaaggacttgttagcaagattttctatctttgatccagatctccatatccat

SEQ ID NO: 80501 - DNA, 258 bp, Glycine max
  Clone ID: 700961686H1
ggaaattgcaagaaaagaaatgggattggattggatgcttaggtctgatagtaagacgcctgtagttactgaaacagatgaaacattgtcagaggaggttcctgtcgaggagtcaaagaaggcaaatcctaaggaactgaatccatatctgaaggataatggaagtggttacccggaagaaagtggagctaaagttggtgctgaccaacttctatcttcttcccttgttggggatggaggagcaagttggagacttaa

SEQ ID NO: 80502 - DNA, 259 bp, Glycine max
  Clone ID: 700961688H1
ccaggcgtcttcataaacgcctttcttctccgtttccgtttcctcgttcgaattcgctttttgatctgcgaaaatgagagagtgcctctcgatccacattggtcaggctggtatccaggtcggaaatgcttgctgggagctctactgcctcgagcacggcatcgggcccgatgggcaaatgccaagtgacaagacagttggcggtggtgatgatgctttcaatactttcttcagcgagactggtgctggaaagcacgtg

SEQ ID NO: 80503 - DNA, 263 bp, Glycine max
  Clone ID: 700961690H1
caaaaaacagcctcgtctctcgtgccgattctccaggacaattcccttcacccaacctaattggcacttgcaattagtgtcgaagatgagtacgttggatgcaacaagggctgaacttggtcttcttgttttatatttgggcaaggctgaagcaagggacaaaatatgcagggcaatacaatatggttccaaatttttgagtaacggggaacctggtactgctcagaatgtcgacaaaacaaccagcttggcacgaaaagtct

SEQ ID NO: 80504 - DNA, 262 bp, Glycine max
  Clone ID: 700961692H1
gaacttgtcagccttatccttttatagcaaatctggatcaaaatgaatggccatcatcaaatgtcgcaaacatggccaatcatgcttaccattcctcacactttagtaagcaactttctctaagtctcgcaacatcgacaaccgcgggaatgtgctcggaggtgagttgctctaatgtgaccccatgcatgaatggaaccatgtcagggttggagcaagcctcttgcagtagtagtagggaactttctatgaatttgggtgg

SEQ ID NO: 80505 - DNA, 262 bp, Glycine max
  Clone ID: 700961693H1
agggaggtcaatatgctagagacttggattcaaccaagtctgtgattgaggattacttcaacagtgttagaccatcagatgatggtcttgatgtggtgttgatagacatagatggcatctttccaccaaatccccattcttccaatttatttaaaagcattaacaattttgtattagaggcaaagaatttaaagaggatgcttgttttaagattatacatgaaccttcaagctggtgggtggtccataattttgttatcaag

SEQ ID NO: 80506 - DNA, 259 bp, Glycine max
  Clone ID: 700961694H1
gagattgctaggatgctggctgatgagttcaggaagcgtgttgtaatagtggatacatctaatgaaattggaggtgatggagatgttcctcatgcaggaataggcagggccaggaggatgcaagttccaaatgtgaatatgcagcataatgttatgattgaagcagttgaaaatcacatgcctgaaaccattattattgatgaaattggaacggagcttgaggcattggcagccagtactattgctcaaagaggcattc

SEQ ID NO: 80507 - DNA, 264 bp, Glycine max
  Clone ID: 700961695H1
cacaatcaaagctatggagcctttcttcactgtagttctttctgcccttttactgggtgagatgcctactttctgggtggtttcttcccttgtaccagtagtaggtggagtggcactggcatcaatgactgaagtctctttcaattggattggattcactactgctatggcatctaacgttactaatcaatcgcggaacgttttgagcaaaaaactgatgactaatgaagaggcaactttggacaatatcaatctctactcagt

SEQ ID NO: 80508 - DNA, 265 bp, Glycine max
  unsure (1)..(265): unsure at all n locations
  Clone ID: 700961696H1
cggaggggaagaaagaagagttgctatggaagagatcaacaagaacccatcagggacttctcttttggtaccatcagtgctagagttggctaaagagaatttgactactgttccacaaagatacattgtcactcaacatcaagacatggtgctcatctctgaagaagatcatagtacccttgagattccagttattgacatgcacagattgcttcgaaaanccctgggagttcagaattggataagcttcacctggcgtgcaaag

SEQ ID NO: 80509 - DNA, 265 bp, Glycine max
  Clone ID: 700961701H1
gaagaagaagaagaagaagaagaagaagaatcaaatatccttgagccagacatgtacaggaacgctgcttcacgtcttagggtcatcagtgcccgttcgtgcagcagcagcaggatacctgccagtgccagatttgcaagttccgttgccacacaacaatcctcttctggtttgggtggtttatttggatggctcactggagaccgatccagttctttaccatctctggatttcccgcttccgggcgttacacttcccccttcat

SEQ ID NO: 80510 - DNA, 255 bp, Glycine max
  Clone ID: 700961702H1
cccactcaagtgttgtaggctcttcgtggtttgcttttgggcccggcccgatacggcttgtttttattatgtatctcacttattcactttgctgtttttattccgtaggctgaagttcaggagaaaactttatatatggaataataacaataattgtacatagaaaaagataatggtcgcatctgtatgtatgtatcataatggctttgaatctgaattatccaaaaaaaaaaaaaaaaaaaaaaaaaaaaagaa

SEQ ID NO: 80511 - DNA, 256 bp, Glycine max
  Clone ID: 700961705H1
gtttccatttgattaagagaacaaaagaaaacaagagaagagattataggaacaaaagcaattaatggacacattgagggtgcaaagcttagcttctcagtcgaaggaaacgattcctgcagagtttgttaggtcagagacagagcaaccaggcatcacaaccgttcatggaacccaacttggggttcctataatcgatttcagtaaccctgatgaagacaaggtgctgcatgaaattatggaagcaagtcgtgac

SEQ ID NO: 80512 - DNA, 255 bp, Glycine max
  Clone ID: 700961706H1
gacgaggtgcgggtgagaaaatctctctacaccgtaatcgctatttggcatcgctgcaacaatctgcgatactctttcctctctccgcttcgaatttcttctcacactctctgcttcgccgcaaacagtgactcactgaacaactttccgaagcattgagtagtagtgattgggtggtaacaaagagagagagagacagaaaaggatgaaccagaacccgcaatcgagtgaaggaaggaacgatgacgattctgc

SEQ ID NO: 80513 - DNA, 252 bp, Glycine max
  Clone ID: 700961707H1
aagctggaaatcgatgacgacctgaagcttcgagcattttgggacaagaggatctcccaggaggttcttggtgatgctctgggtgaggagtttaaaggatatgttttcaaaatcaccggtgggtgtgacaaacaaggattccctatgaagcagggagtgctgacccctggtcgtgttcgacttttgctccatagacgaactccttgtttccgtggatatggaaggcgcaatggagagcgtagaaggaagtct

SEQ ID NO: 80514 - DNA, 255 bp, Glycine max
  Clone ID: 700961709H1
aaattagttcattctctttgcgcagttccctacctctcctttcaagatgcagatcttcgtcaagaccctcaccggaaagaccatcacccttgaggtggaaagctctgacaccgtcgacaacgtcaaggccaagatccaggacaaggaaggaattcccccggatcagcaacgtctcatcttcgccggaaagcagctcgaggacggccgtaccctcgccgactacaacatccagaacgagtcaacccttcaccttgt

SEQ ID NO: 80515 - DNA, 262 bp, Glycine max
  Clone ID: 700961710H1
cggctcgagctctccgcagcagccttcttcgccgtttcagctcaacagccaccagcacgtaagatatggttaagcataacaacgttatccccaatgggcacttcaggaaacactggcaaaactatgtgaagacttggtttaatcaaccagcacggaagaccagaaggcgtttagctcggcagaagaaggctgtcaagattttcccaaggcctactgctggacctctcaggccaattgttcatggccagactctgaaatacaa

SEQ ID NO: 80516 - DNA, 250 bp, Glycine max
  Clone ID: 700961712H1
ttcatgaactcatgaagcatgtgatgattcatgaactcatgggagttgatcctggaactaaccctgtttgccatttccttggaagcaaggccattttatgggtacccaatttatctatggacactgcctatcagactaacgttgttgtttaattagtccatgcatctgcatcttgggcaccataagattgtatataagataaattatggtgtgttgtgtatgttgtgcaagacctggaacttcacctttc

SEQ ID NO: 80517 - DNA, 250 bp, Glycine max
  Clone ID: 700961713H1
cggctcgaggaaaatcctgtttcccgataaaaaccccgtccgtacatggtctggtcacgcggatcgggttgattgagatgcacaccgcgagcaggagcaacggcggcggcggcggcgtgctggcgtcgcggacgagttcgcggtcggtgacggagacggtgaacgggtcgcacaagttcgtgataaagggatactcgctggcgaacgggatcggagtccgaaaacacatcgcgagcgagacgttcacggt

SEQ ID NO: 80518 - DNA, 246 bp, Glycine max
  Clone ID: 700961715H1
ttcgagatgatttctggggagtgaatacttcctattaatattacttgcctgcatatatacctttgcagttaaacggtattgaaattttctgctctcataatgtgttttgttaccatttagtattagagtaggctattgttttagtttcttaaaattagaaaaatgtcaactaaatttctgaaattgaaatttattaatagtaactcactgttcgttccattatggactatgataatagtaagttat

SEQ ID NO: 80519 - DNA, 86 bp, Glycine max
  Clone ID: 700961716H1
ggatcgggtttgagactcttaagagagactttgctttttctttatgagtttccgaattaagtacttgtttcattttctctcgaagc

SEQ ID NO: 80520 - DNA, 81 bp, Glycine max
  Clone ID: 700961718H1
ctcatcttgcaaaagtctctgagctaattcgctattttcttgtagtaaacaaagcaagcaagcatatccatttcaacatgg

SEQ ID NO: 80521 - DNA, 256 bp, Glycine max
  Clone ID: 700961719H1
gccaaagcataaagtaaaataaccgcagaatattctttgctctgttgcacagattatcccttccttccttccttcttatcatttctctcattaattttctcttctccaaaacaaccaccatttaatccctaaacctaatccttatactttaaacccttactcaccaaactgttcatagttttgtgatttttttttccactaaaaattgtgttatggagcttctgacggtggtggatgatttttttgtcacggcttc

SEQ ID NO: 80522 - DNA, 253 bp, Glycine max
  Clone ID: 700961720H1
ttcttcttctcacttcattttataaactcactctgcagttagcgacaaaaccccaacccgattcggatccgattaggttctctcggatcctctccaccgcctcctccgattcccaaatccactccctcctcctgtcttcgctcgagatccgagctaagcacgggattcggatttccgtttccatcgctctctcttcaccagttttgcgcttaaatggcatcaagcgaggggtttctgaccgatggacacagag

SEQ ID NO: 80523 - DNA, 253 bp, Glycine max
  Clone ID: 700961721H1
tcattctcttcctcactacaacataaacaattttttcatttcaccaaacaaaacagtgacaccacacagcgatgacacacacggtgtacccatcggccaagcccgccgcggttaacggcgccgccgccaacccatctttcccggcgactaaggctcaactttacggcgccacacgccccacctaccgccctcagccccaccaccggcgccggagcaagcgccggtgctgctgcaccttcttcttctggctgat

SEQ ID NO: 80524 - DNA, 249 bp, Glycine max
  Clone ID: 700961723H1
tgatcttggtggtgggacctttgatgtcagtatcttgacaattgataacggtgtttttgaagttcttgctacaaatggagatactcatcttggaggtgaggattctgatcaaagaataatggagtacttcattaaattgatcaagaaaaagcatggaaaggatattagcaaggacaacagagcacttggaaagctgaggagagaggctgagcgtgcaaagagggctctcagcagccagcaccaggtccg

SEQ ID NO: 80525 - DNA, 250 bp, Glycine max
  Clone ID: 700961724H1
cgaagatggtgtctccattgctgctctcaacctcatgaaccaggacaaaatcctcatggaaagctggtactatttgaaagatgcagtccttgaagggggtattccatttaacaaagcatatggaatgacagcctttgaataccatggaacggatccaaggtttaacaaggttttcaacaaggggatggctgatcactctaccattacgatgaagaaaattcttgagacctacacaggatttaagtccctc

SEQ ID NO: 80526 - DNA, 224 bp, Glycine max
  Clone ID: 700961725H1
ataaaaagtcatggcgaagattaacaaatttgttgaacattaattattcctgaagcactaatgaagccttaccctttccatatctatactttccttgaactagtcagttaaagctgtgatatatgtgcagcctagtcactttgatttatcctgtttttgcttgagaaagatgtatggttaatattgattactgtctatagatatacgatattcacatctacctc

SEQ ID NO: 80527 - DNA, 183 bp, Glycine max
  Clone ID: 700961726H1
agaatgttggctaatgagcaaatgagttgctatttgggtcagaaactacattacattcttctgttgcacatagaaatgtaatgtagtttttgacccaaatagcaagtcattagttcattagccaacattttgtgcaaaatatttttggttttggggattcctccttcaattcaaatgcacaca

SEQ ID NO: 80528 - DNA, 249 bp, Glycine max
  Clone ID: 700961727H1
aggactttgaaaaattatacatacgtcactcaatttggatccttggaatattacaaccggtgggatttaggttcaaacaacagctacaggtacaatcatgatgtttatgatcgtttctggtatatctatggtgacaacaaggattggaaacaattaagtgcttctattcctgccgattccttaaaccagaacgattacaaaccgccagagattatcttgagtaccgcagttacaccagtaaatgcttct

SEQ ID NO: 80529 - DNA, 241 bp, Glycine max
  Clone ID: 700961728H1
cttcaaatgattcagagaagttgatccctgcatttgaagaagctgcaaaatctttcaagggaaagttgatctttgtatatgtggaaatggataacgaacatgttggaaagcctgtttcagaatactttggtatcagtgggaatgctccaaaagtacttgggtacactgggaatgatgatggaaaaaaatttgtgcttgatggagaggtgactgctgacaaaattaaagcatttgggggaga

SEQ ID NO: 80530 - DNA, 246 bp, Glycine max
  Clone ID: 700961729H1
gggacattgtaccttaaattaaaagatggaagtttcatgtagtttctttttcatcatccattgaactgaaccttaaattgattatagaaccatgtttgcgactaccaattcctccactttgtcacctttgttctctttcagtagaacaacagcgacctctctgccttccaaacccacattctgggatttggttccaatgagacgatcttcttctccggggcacttggccttagccttagacaatcc

SEQ ID NO: 80531 - DNA, 247 bp, Glycine max
  Clone ID: 700961730H1
ctcccaggtaagtaagctcctcatcacatatctaaaacaaacccttccaaaaccaagacaatacttcaaaggttcattccaatggcatcctcgtcaagttttgttcatttggtaaatctaggtttagttttagtactacttggctttattgtccctagaagtgaagccaggccaagagcattctttgtgtttggacattcgcttgttgacaatggaaacaacaactatttgcaaaccattgctcgtg

SEQ ID NO: 80532 - DNA, 247 bp, Glycine max
  Clone ID: 700961731H1
gtgtcgagccgattcggctcagcttacagaattcagcataagtaggatgcaatttcgggaatgcccaccaacttatatagaccatatgacaattttcatcccgagaattcgcatgtgttacctgctctcatgagaaggtttcatgaggcaaaggtcaatggtgctaaggaggtggttgtgtggggcaccggaagtccattgagggagttcttgcacgttgacgatttggcagacgcggttgtcttca

SEQ ID NO: 80533 - DNA, 248 bp, Glycine max
  Clone ID: 700961732H1
cgccgccgtcgggatgctgcaacggagtgaagagcctcaatgccgccgccaagaccaccgccgaccgccagacggcgtgcaactgcctcaagtcggccgccagccaaatctccggcttcaaagccaacaacgccgcctcgctccccggcaaatgcggagtctccatcccctacaagatcagcacctccaccaactgcgctaccatcaaggtttgaagagaaagtcatggacgcaggaaaccggaaact

SEQ ID NO: 80534 - DNA, 261 bp, Glycine max
  Clone ID: 700961733H1
attgaatctcagaattctctaaaagagatctttttctgctctttgaagaaagaagggtctttgcttgattttggagatgtctctgctctcagatctcatcaaccttaacctctccgataccaccgagaaggtgatcgcagagtacatatggatcggtggatcaggaatggacctgaggagcaaagcaaggactctcccaggaccagttagcgacccttcagagcttcccaagtggaactatgatggttccagcacaggtcg

SEQ ID NO: 80535 - DNA, 253 bp, Glycine max
  Clone ID: 700961734H1
ctctttcttttcttctcgcagagcgaaatcccaatcccacacaaatggcatgctcagccacctctgcttctctcttctccgcaaaccccacacctctcttctctcccaaatcctccctctccctccctaacaactctctccacctcaaccctctccccacgcgcccttctctctccctcacgcgcccctcgcacactcgccgctccttcgtcgtcaaagcctcctccagcgagcttccgctagttggaaacac

SEQ ID NO: 80536 - DNA, 273 bp, Glycine max
  Clone ID: 700961022H1
caaatctcagactttttaaggcgctttgggtggatagtgccagcatacaccatgcccccagatgctcaacatgtcacagtgcttcgtgttgtcatcagggaggacttctcaaggaccctcgcggagcgtctcgtgtccgatgtggagaaggtgctgcatgagcttgattcacttcctgcaagggtcatcagcagcaccactgtgacactcagtgcagaagaaaatggcaaggtagtggttgctaagaagaatcctatggagactcagagggaa

SEQ ID NO: 80537 - DNA, 269 bp, Glycine max
  Clone ID: 700961023H1
cttccctctcttctgttaccaatggctccctcatcaaactacatttctttccttttcctcaccacccttttgtgtgctcttcaaatcagtgcaagagacagccagttcttcagcaaagtcacccattttgacaaaaacagtgtcaaagagacagaacttcccaacaaagaagcaccagaagtgaacaagccagagcaacaaccacctttcattccggagactgaaaacagctatggcctatatggtcatcatgatgagtataaccaagt

SEQ ID NO: 80538 - DNA, 267 bp, Glycine max
  Clone ID: 700961024H1
ctcaccccgctgaactcatcacttactggaagccttgttgtgagtaagagaaaaggcttcctgcaccgagcacaccaacttgatacctctgattctttctttgcttagaattccacagaatatggagaagattcttttcaatcactccccacctttggaattcaagggtttgagcaaggaggaggaagactcattgctagggcaagtggaaatatggaggtacatgacatgcttcacggactccgtggccttgaaagctgtcataga

SEQ ID NO: 80539 - DNA, 266 bp, Glycine max
  Clone ID: 700961025H1
cctgccagtagtcatatgcttgtctcaaagattaagccatgcatgtgtaagtatgaactaattcagactgtgaaactgcgaatggctcattaaatcagttatagtttgtttgatggtatctactactcggataaccgtagtaattctagagctaatacgtgcaacaaaccccgacttctggaagggatgcatttattagataaaaggtcaacacaggctctgcctgttgctttgatgattcatgataactcgtcggatcgcacggc

SEQ ID NO: 80540 - DNA, 266 bp, Glycine max
  Clone ID: 700961026H1
aaagaaagaagttctaaggaagagggaatatgcagaatacaaggtgctagttgtctatttgcaataacaacatcagcgatccaaccttagtattcttcaacccagagagatttgtaataataaattacaacaacttaaacgatggcaggaggagcttatgtagattcgggaaatgcaaagcaatttgatgggaaggtcacggcattcgtattggttacatgctttgtggcagccatgggaggcttactcttcggttatgatcttgg

SEQ ID NO: 80541 - DNA, 258 bp, Glycine max
  Clone ID: 700961030H1
tgtcacccctccttcctttatggttcggatggccatgagattgtctagagcaagatggtttacctttttgagaagagtttttcattaccaaaatggatcaaggtccaaccttggctccaaccctttcaattctagcacttggatgatgctggagtttattgccttgattctccaaataacaattacaacgttcactttggccatttccaagagggagagacctatttggccgatgaggatttggatttctggatatga

SEQ ID NO: 80542 - DNA, 255 bp, Glycine max
  Clone ID: 700961031H1
cagtattgttcttgcgttgtttcggagggtcaattgtttggttgagcaaaaatctgaaattcaatttcatttgaaagcaaatggggaatcttttatgttgtgtgaaagttgatcaatctacggtggctatgagagaaggattttgacgatttgagaaggtacttcagccgggatgccattgcatgccatggttccttggaaaacaacttgctggtcatctctctcttcggctacagcaactggatcttcgttgtg

SEQ ID NO: 80543 - DNA, 262 bp, Glycine max
  Clone ID: 700961033H1
ttttgcccgcggtgccaaaaacaatactcttgttgataacggtgaagctccttctttaccttttccctttgtttgagaaccctaatcccgttaactcgtaaaaaaaccacagctcttctctttctctcaattctctcagattttgggttatcgtttgaaatggcatcggtatccagtcaaccacagttccgttacactcagccaccgtcaaaggttctccatttgatgaacttgccatgggagtgcacagaggaggaactga

SEQ ID NO: 80544 - DNA, 257 bp, Glycine max
  Clone ID: 700961034H1
ctttctcagtgttctaagcagtcagaaacaatggagaggaaaagacacagtcctatttctttcactatgttcacattgctacttggagtgcttgctcagaaccttgtcatccctgtaatatctaccactgccatcattgtggaccagaacttcaactctccagacccacatgcagacacagatttatcaaattctctatgttcatactgctctccagatcatggctctgggagtggtgggcacggaagctcaccaca

SEQ ID NO: 80545 - DNA, 255 bp, Glycine max
  Clone ID: 700961036H1
ctctcggcttcttcttcgttgcgctttttcccaaaaccaattgcatcactctcgtccgttaccgccgctgccctagaccaccgcaagcgacgtcgcacaccgccttcatccgttagggcaaaaatgagtcgaggaagtggaggtggatacgatcgtcacatcactattttctcccctgaaggacgtctctttcaagtggagtatgctttcaaggctgtgaaggctgcaggaatcacctcgattggtgtccgagga

SEQ ID NO: 80546 - DNA, 249 bp, Glycine max
  Clone ID: 700961037H1
ctgttctgtcccgcgggagcagacgacctgtcttcatcggcaaacaacctcaaaaacattcatcaacgttcactattaatccatccatcattaagtaagacaataaggttcgatttttttatccttgttttgcttctgatccatcatggaggtgccgaagtcctgggatgcccttcgcaaacaggcaagaaaacttgaagctcagttggatgagcagatgaattcttatcgtaaattggtttctaataa

SEQ ID NO: 80547 - DNA, 264 bp, Glycine max
  Clone ID: 700961038H1
gccgtccggacatttcttggttcctgaaatttcaaagaataccaatggctcacaggcgttgcctcttgataagagggaacctcatgaatcggaagtgccacccatctttcagttatgttctccatagcaatgaagggaaacgtgaatgccctgatgaaaagtcatcttcagctggcattagtaattctatccaaagaaggatgtttgggaactcagttgatggatcaatgcggtttgtttcctattctggtcaaagaatgcatt

SEQ ID NO: 80548 - DNA, 235 bp, Glycine max
  Clone ID: 700961039H1
aaagaggctttgaaacagttgaaggcgaaaggactcactagagaagaagggaaggacctaacttgcgtgggagtgcaatgctataaaatggcttttatcataatcacggcttcaacgttggttggttgtttagcttcggtcattttggcgctgaggactagaaagttttacaaaggggatatctatagagaatttagaatggaacatgaagcaatggagattaccaagactgcta

SEQ ID NO: 80549 - DNA, 257 bp, Glycine max
  Clone ID: 700961040H1
atttctccatttccattttctctctcacttttcaagaatcgtaagctatgggaaagtcttacccaactgtgagtgctgattaccagaaggccgttgagaaggcgaagaagaagctcagaggcttcatcgctgagaagagatgcgctcctctaatgctccgtttggcatggcactctgctggaacctttgacaagggcacgaagaccggtggacccttcggaatcatcaagcaccctgccgaactggctcatagcgct

SEQ ID NO: 80550 - DNA, 253 bp, Glycine max
  Clone ID: 700961041H1
ctcgagccgtccgattcaactcggacgagttgcctcatcgtacggttccttcctcggactctttcctcttcttccccttcctaatcaccgttcgcagggttttgctctctctctctctctgtctctcgcttcctttctagttcagatctcgcattggcttcagcttaaaccacgcggtctaatttcattcccttaaattagggactcatcttatgtcgatacacttgaactgcagatggtgtggttcttgtga

SEQ ID NO: 80551 - DNA, 260 bp, Glycine max
  Clone ID: 700961042H1
gtttgccgtgggagctatctgaatctaactggcgaaggggctttcgaaaaggtactgaaggagtggcatggaattcttgatcgtcattatttgatgctagaagcttgtgaattaaactctgtttctgaagaggactataatgacctgggaagagctggtttaggcagttgtttgcttggaggcctgccagattggctagtttcctatgcagctcgccttgtgagatttatcaattttgaacgaactaaacttcctgagga

SEQ ID NO: 80552 - DNA, 261 bp, Glycine max
  Clone ID: 700961043H1
cttacttgctatgaataaggtctcctttgttaaagttgtaacttacgtttctggagaagccctggatacaaaagttacaactttaacaaaggagtccttacttgctatgaataagcttaggcaagaggtggagtcggagaagagtagagcaaaactggatagccgtaattgtgagccagatttagagatgtgcattagagcaaaaaataatgcatgggttatttctcgagtcacaagagggaaggagctttacatggttct

SEQ ID NO: 80553 - DNA, 258 bp, Glycine max
  Clone ID: 700961044H1
agagaagagaggaagttttggggtttgaatctatagaatagaatcaaaccaaattgaaagaagatcgatcgatcgatcgatggctctggtcggagttgaagtgaagcatgcggcggagggcgcaccggaggagaattgctccgccaagcccaccaagcagggcgagggcctccgccactactattctcacaacatccacgatcatcagctccttctccgtcaaaagacgcataacctcaaccgtcttgaggctcagag

SEQ ID NO: 80554 - DNA, 253 bp, Glycine max
  Clone ID: 700961047H1
tcttcataaacgcctttattctccgtttccgtttccttcccggaattcgattcatcatctctgaaaatgagagagtgcatctcgatccacattggtcaggccggtatccaggtcggaaatgcttgctgggagctctactgtcttgagcacggcatcgggcccgatgggcaaatgccaagtgacaaaacagttggcggaggtgatgatgctttcaacactttcttcagtgagactggtgctggaaagcacgtgc

SEQ ID NO: 80555 - DNA, 256 bp, Glycine max
  Clone ID: 700961048H1
ttcggctcgaggcttctttcaccatgtttgcaacacttgttggattgctctctcagagccttgtcattcctgtaatatccaccactgttgcagatcagaagaactactacaccccagatccacatgctggaagtccccccacaggtttctccgattctctgtgctcacacaatagtagtctccatctcatggccatgggagctctccacctcacacaaatagtccaagtactccatcaaacctcaggtggaaatgg

SEQ ID NO: 80556 - DNA, 257 bp, Glycine max
  Clone ID: 700961049H1
cttctttctcgttattttctatcttcagcaagaagacagataagagatgtcttccatagtgaaaggcatactcataaggagcacagcggatgtgtgcaagaatagcatggttttgaagaagcagagcgaaattgtagggaggagaagcacaagagtgcagtggcagttgcatcttagatcaaaatcaaacacatggaagagaggtagtaggagatcatatcagcctccaatacgtggccaggccatccttaccccag

SEQ ID NO: 80557 - DNA, 189 bp, Glycine max
  Clone ID: 700961050H1
cgattaaagacttgcttccaagatggttctgctctcagaagctctgggatgacgttgttgctggccctcaacctgagcgtggccttggcaagctcagaaaactcaccaccctcaaatctattgatgacggagacagtagcaagctgcagaagacgtcgtcgatgccgtcgactccgacaaccccgatga

SEQ ID NO: 80558 - DNA, 260 bp, Glycine max
  Clone ID: 700961053H1
tagatttatctatagcaagtgcgtcaagagacacgtggtaccctagctagagtgccattctgtggtttctttctttctttctttctgcatcacatcacaatttgctctgcctcgtgtcctttttcttctttgctctccaaaaatctcacacacacaggtatctagcaaatgggttctcaccaataagaaccatggctattggagaatgggaaaccaagggttttgaccaaggagaccaggcatggccgttctgcacacag

SEQ ID NO: 80559 - DNA, 262 bp, Glycine max
  Clone ID: 700961056H1
gtgggatctaatctcccttatttacacttctggaactacatcaaactccaagggtgtgatctatagccacagaggtgcctatcttaattctctggctacggttcttcttaacgagatgaggtctatgccggtatatttatggtgtgttcccatgtttcactgcaatggttggtgcctcccttgggccattgctgctcagggtggcactaacgtctgccaaagaagtgtcaccgctgaagggatatttcacaatatttttagg

SEQ ID NO: 80560 - DNA, 237 bp, Glycine max
  Clone ID: 700961057H1
tgtttccatatcttcaagggacagttattgcattgatggtgagcttcgtcgcttagcgatagctggtgatggacttgaaccacatgatcctcaatggcgggggtaatcgtagcaactacatcggctgactgcgtagtaaaggctgaacttcactcaggtgtcaagctggacgtataatggaaatgagtcctgtttagatgcttggtagtctgcacaggatcggaccgtagagtgccc

SEQ ID NO: 80561 - DNA, 254 bp, Glycine max
  Clone ID: 700961058H1
ctgcagagacgcgctggagaagcagatagggctgcagctcgaagaagccacgcttgacgaccttctcgtgccgagctactcgtacctgaacgaaacgctttacgacgtcgattgcgtggagaggattttgagtcagttcttggaaggtttagaagcgagaaccgccgcggaaacgacggaagacgcggcggcgacgaggtcgccggcgcttatgctcgtcggaaaactcatcgacggttacctctccgagatag

SEQ ID NO: 80562 - DNA, 253 bp, Glycine max
  Clone ID: 700961060H1
gatctattctattcttcaatatcttagggttccgacagattccccatcaattcaaccacttgccgtgttagttgatccattcttataaaaagatcaaagactcattatttatagccaaaggccttctgggtcgtcgtgaatctatcttgtgtttgagagattaagacaaaactttttgctttgcaaatggctgctgcaactgctgcaactgcttcttggatgcgattcaaaggcggcaaggaaaggaagctaa

SEQ ID NO: 80563 - DNA, 248 bp, Glycine max
  Clone ID: 700961063H1
attcaacttaagagatcaatatggccaccaccactacccagcctccctctaatatctgttttttccttctgttgttgcttctagcacactttcatttgggcataagccaacttgagctgaattactactctaaaagctgcccaaaagctgaagagatcatcaaggaacaagtcacacaactatataacaagcatggaaacactgccgtttcgtgggtcagaaatctcttccacgattgcgtggttaag

SEQ ID NO: 80564 - DNA, 255 bp, Glycine max
  Clone ID: 700961065H1
catggatttctttgaagaaagatatgataatcaaattgagcttgaaccatctctgcatgataaagatcattctagcagttcaagtgtatgtgggggattgcctgagcaatcttttcaacagacagcattttcatgcgatcagcctaattaccagcttcaagatctaccgagattcgaaccgatgaatgacactttcttggattctgtacctgaaggtcttccatgtgttgacgttgaaaacctagacaaatccat

SEQ ID NO: 80565 - DNA, 254 bp, Glycine max
  Clone ID: 700961066H1
gtgtgtcgccgccatggccaccgtcaccacccaagcctccgccgcaattttccggccatgtacctcgaaatcgaggtttttgaccggctcttccggtaaacttaaccgggaagtgactatgcggccaatggggtgccctccttctgcctctttcaaggttgaagccaagaagggagagtggttacctggcttggcctccccaacttacctcaatggcactcttcctggtgacaatggatttgaccctctggggc

SEQ ID NO: 80566 - DNA, 254 bp, Glycine max
  Clone ID: 700961067H1
gagataactagaaacagtgtgatgaaaatgaaggtccttgttttcttcgttgctacaattttggtagcatggcaatgccatgcgtacgatatgttccctctccgaatgaacactggctatggtgcccgtactccggaggtgaaatgcgcaagttggaggcttgctgtggaagcacacaacatctttggctttgagaccattcctgaagagtgcgttgaagcaacaaaggaatacatccatggcgaacaatatag

SEQ ID NO: 80567 - DNA, 251 bp, Glycine max
  Clone ID: 700961069H1
accacgtcctcgtcccaatcaagtgaaagctcgatggctgaaatggaccagaacacgggcggtgagcatgaggcggaggaaacgattgagattgaggcggaagtgcacggtggtgaagaggcggttgttgcggagaagaagtggccggggtggcccggggagagtgtgtttcggatggtagttcctgcgcagaaggttgggggtatcattggacgcaaaggagagttcatcaagaaaattgtcgaggagac

SEQ ID NO: 80568 - DNA, 217 bp, Glycine max
  Clone ID: 700961071H1
gtgaaagagaatccgaggcgtagagaagagaaaaattaagatggaggggaaggagcaggatgtgtcgctgggagcgaacaagttcccggagagacagccgattgggacggcggcgcagagccaagacgacggcaaggactaccaggagccggcgccggcgccaccagttggacccgacggcagtttacgtcatgggccttgtaccgggcacggataa

SEQ ID NO: 80569 - DNA, 255 bp, Glycine max
  Clone ID: 700961072H1
gctgatatgataatgctgcctcctgggtggctgagtgaactcatatgaattggtcattattgctgcctggttcttaaagaaggccacatcatacaggcaggaaaatatgatgatctttgacaagccggaacagattttaaaactctagtttcagctcaccatgaagcaatagaggctatggatattcctaatcactcagaagattcagatgaaaatgtacccttggatgacactattatgaccagtaagacatcc

SEQ ID NO: 80570 - DNA, 237 bp, Glycine max
  Clone ID: 700961074H1
ttttgaagacgaagattgaatgggaaaaagcaaagaagcgttagagaagtgaacagaaaagtgtaaaataaattaagcggaaccctcgatttgtgcttttcaattttcttccctttctcttgctttgcgttgagttgagtaatactatcaactaagcacttttctgtttgcaatctggagctatgagttcgtcttcggcagatgtttttccagcaattctggaagttatgctggagt

SEQ ID NO: 80571 - DNA, 249 bp, Glycine max
  Clone ID: 700961075H1
cggaagattaaaaaaacaacggtggtacgtgatgccaccgaagttcgatccctcgcaggtggtggacgtgttcgtccgagtcaccggcggcgaggtcggcgcggcgagttctctcgccccgaagatcggtcccttgggactctccccaaagaagatcggagaggatattgcgaaggaaaccgcgaaggactggaagggcctccgcgtgacggtgaagctaaccgtgcagaaccgcgcagcgaaagtgac

SEQ ID NO: 80572 - DNA, 244 bp, Glycine max
  unsure (1)..(244): unsure at all n locations
  Clone ID: 700961079H1
caataacttccaaaaccttatattcttatgttttcttgaacattagttctaattcatttacaacactcagataacatcatntgattgatacaaacatttgtcttggagaaatttgtagctggttccattgaagattggaagtactaacacatttgaagtgaaaaatttcgtccngctaaatagatcgaagagattcaacaatgtcgtcaggcgcggtgaaaggcccggtgaaaggccaaatgaa

SEQ ID NO: 80573 - DNA, 241 bp, Glycine max
  Clone ID: 700961080H1
ccggcaagaccatcgaccttgaggtggaaagctctgacaccatcgacaacgtcaaggccttatccgtctcatggcaggatcaaacaccggaccaatcaaccttggaaacccaggtgaatttacaatgactgaacttgctgagacagttaaagagcttattaatccaggtgtggagatcaagatggtggagaacactcctgatgacccacgacaaagaaaaccagacatcacaaaagcaaag

SEQ ID NO: 80574 - DNA, 259 bp, Glycine max
  Clone ID: 700961081H1
tgaattttaaataattacagatccaaatcatcaatatgcttgaattgaatgaatcccactccataaacttgcactttcccctcactcacatcattctcttcttcacatgtatcaaactctctaaagctcaatcctccatggagccagttcccacctacatcacccaccacagctgggagccttccgtcgccatcaccgtcggcgccataatcatcgccctcctcttaatgggaatcatctcaatctaccttcgccgctg

SEQ ID NO: 80575 - DNA, 247 bp, Glycine max
  Clone ID: 700961084H1
caattatacaaacacattcttctcttctcttcctctcaaataaatttattttctttttttcatatttttcttctaattttccctttgcataatttctcgcgtaacggaaagccatgaaattcggaaagagcctgagcagccagatcgagaaaaccctgccggagtggcgtgacaagttcctctcctacaaggagctcaagaagaagctcaagcaattcgaccctcccgccggcggcgatgagcgccc

SEQ ID NO: 80576 - DNA, 248 bp, Glycine max
  Clone ID: 700961085H1
atccttaacacactgtccaacaagaatggctaattcatatgaaaacaacttcccccctcagaagcaagacactcagcctggcaaagagtacctcatgaatccaccaccccaatacaacagctcccaatacaagccatcaaataaacttcagggaaagatagctgtagtaaccgggggtgattctggaattggacgaagccgtgtgcaacttgttttcattagaaggtgctactgtgatcttcacctac

SEQ ID NO: 80577 - DNA, 236 bp, Glycine max
  Clone ID: 700961086H1
gaactttgacgccattggccattgagttaagtaagccgcatcctcaaggtgaagaatatggtcctgttagcgaagtctacgtgccttcgagcgaaggagttgaagcttatatttggttattggcaaaggcttatgttgttgtaaatgactcgtgctacaatcaactcgttagccattggctaaacactcatgcggttgttgagccaatcgtcatagcgactatgaggcagcgtgct

SEQ ID NO: 80578 - DNA, 247 bp, Glycine max
  Clone ID: 700961087H1
atacagctaaatttgcatgccaccaaaaagtatctgcaagtgaaggggctgttttcatttgtcaaacattttgaacacaccaatttttgtatgctttactgtttgttgttttggtttagttgtggttgagattcttgagaattgctaatatgttcaaatgttactaatattagatcctatcatgtggcttataaatataatgataagcatggtccacgaccaaaaaaaaaaaaaaagggcggccgcc

SEQ ID NO: 80579 - DNA, 254 bp, Glycine max
  Clone ID: 700961088H1
tttggcatccccgtggcttcaagaagagaatctcaatggaggcccaggagctgaagcgcgtgttccagatgttcgaccgcaacggcgacgggagaataacgaagaaggagctgaacgactcgctggagaacctgggcatcttcatctctgacaaggacctgagccaaatgatccagaggatcgacgtcaacggcgacggttgcgtggacatggacgagtttggggagctgtatcagaccatagcggacgagcgc

SEQ ID NO: 80580 - DNA, 251 bp, Glycine max
  Clone ID: 700961090H1
ttctcctcaagcaaaacctagagctcccacactcctccactacctagaatattaaaagccccttccttcatcaaggtactactgtttcatcttccctcaaagattggaacaacaacaggaacatgggtactctaacaactgttcctgtgctcccttctaagcttaacaagccttcgctttctccgcgtcacaattctctttttccctactacggaagacgcgtcgggaagaagaacaaagcaatggttcct

SEQ ID NO: 80581 - DNA, 245 bp, Glycine max
  Clone ID: 700961091H1
caaaccaaggtgggtgtgtccgagcagagcaggagcgaaggagaaaaagaccctcactctgttttttcttctttccttcctcaaccctaagcaaacagcatggttgtcttttcgcgaagtgcgacgacgacgacgacgacgacgacgacctatacgcgccacaacttaatacgacaaacgaaaacctgcgttggcaataataatagtttgtgttactctgctactaagaaggctcctccgcagag

SEQ ID NO: 80582 - DNA, 246 bp, Glycine max
  Clone ID: 700961092H1
cgaactgttgtttggtctcttctctcttatccatggcttgaacgtttctcaccctaccaactcccttcctacacaaaaccaatgccatcagtttctctaacaagagaccctcatttttgcagaggagctctctgaagattcatgcaattaccaaaaaatgggaacccacaaaggttgtgcctcaggctgatagagttcttattcgtttggaggagctttcagataaaacagttggtggagttttgc

SEQ ID NO: 80583 - DNA, 245 bp, Glycine max
  Clone ID: 700961093H1
attagctaacatatagaaagagagagagagagagagagagagagagagatcacatttcctgagctataggctatagccttccacaatcttataacaatggaggggaccaccagccaaagcacgtttaccttcatccctagcacaattgagacacctagtccaagcatccctgagatttcatcatcatcaccttcccctggcggctctcttgcaagagttgcacaaagttaccctcctggatttcc

SEQ ID NO: 80584 - DNA, 242 bp, Glycine max
  Clone ID: 700961094H1
ggaaaaccgggtgcagcagcactcttagtgaaggtcagcatggatggtgctccctatctgaggaaggtagatctaagaaattatacaatgtaccaggaactgtcttctgcccttgagaaaatgttcagctgtttcactctaggtcaatgtggttcccatggagctccaggaagagaaatgttgagtgagagcaagctgaaggacctcctgcatggttcagaatatgtactcacttatgaaga

SEQ ID NO: 80585 - DNA, 221 bp, Glycine max
  unsure (1)..(221): unsure at all n locations
  Clone ID: 700961095H1
agtgagtggacgtttgaagtttgaagtttgaagtttaaacatagagaaacgaaattgaatgcaacccaacaaaacacattaactcccatttccattcaatcaacgagaatagngattgggggatgaaaagattcttgctaacctcggagatcatgagggatagaatgaccggagtggacatggagcacgagggaggtggatgcgccggtggcgggaatcgg

SEQ ID NO: 80586 - DNA, 243 bp, Glycine max
  Clone ID: 700961096H1
cccatcccacccatgtctgcggcaagatgggttttatatagtctaaccactctgtcattatgtacaacaacacaatgattagcttcaacatgattgaggctgccaggattaacggcattaagaggtttttttatgcctctagtgcttgtatctaccctgaattcaaacagttggaaactaatgttagcttgaaggagtctgatgcatggccagctgagccacaagatgcatatgggctagaga

SEQ ID NO: 80587 - DNA, 252 bp, Glycine max
  unsure (1)..(252): unsure at all n locations
  Clone ID: 700961101H1
agtttttgaaatgttgtcaccccttcttctatttctatgcctaactcttcctttgtttttgttgtccttcttcaaataccgtaaaaccttcaagaatccaccacttccaccaggtcctagactttctcncataatagggaatcttcatcaactagatagtccttctcttcatgagcagctatggcatctctcaaagaaatatggtcctttatttcgccttcaatttggattaaggccagccatagttgtttc

SEQ ID NO: 80588 - DNA, 246 bp, Glycine max
  Clone ID: 700961102H1
ctgagccattcaattcccctcctttattgctttcaagtttcaacactaattttattatctgaaaaaatggctttcaaagtttcgtatttccttgcacttgttctagtttccaatatcctcctccttgatacaacagctgctggacgcagcattggcgaaaactccaactcagaggaaaagaaagagcctgagttcttgttcaagcatgaaggtggggtgtatattccagggattggacctgttgga

SEQ ID NO: 80589 - DNA, 246 bp, Glycine max
  Clone ID: 700961103H1
agaatgcatctgttagcatcatcctcttctctttctccttctctcccttcttcattccctcgcccttctctccatctccaccttcactttccttcccaaactacccagcttcgcctccataccccaccacccctttcttgctcccttaattcttcttcttcttcttcttacgtggaacaatctgcttcatcttctcagatgcagaatggcttgctgtactccagagcttattgggttgctgaatct

SEQ ID NO: 80590 - DNA, 243 bp, Glycine max
  Clone ID: 700961104H1
atcacaatcacatgtgccactttcgcccaagatgttctagaaggaagagcaaaggcttcacaagcacacgatcacaagcatcaaccactaatatttggaccggctagccttgtaaatggaaacataacaactgagagagaaagaatggcagctcaggtcttccaacctagtcataggatgccaactatgagcattgaggaagctgggctaaaagaaatggaaataatgaacaatggcaagaga

SEQ ID NO: 80591 - DNA, 77 bp, Glycine max
  Clone ID: 700961105H1
ggattgtacgcatgtattagccttttatgaaagttaccttttggttttttttttccggaccaaagggtaccttttaa

SEQ ID NO: 80592 - DNA, 244 bp, Glycine max
  Clone ID: 700961106H1
gagagctcagccttgattatggtgtagctgatgagtggacaggcaaactctctatatgtaactgaatggtccatgcacttcttgagttttaggcatggttttgtgaggtaaagcctagttctatcattctactttgttgcttttacaactatcttccttttgtttacatcttacttttgtctggtactctgcgctgtctccaatgtaaactctgtttaccatataccataatgagtgatagaca

SEQ ID NO: 80593 - DNA, 244 bp, Glycine max
  Clone ID: 700961107H1
catagccatggctacttcatcaaccacattattgctatcatcactcatacctgcaagcatcccatcattcaactctggaaaccattcagtttttttgcttcaaaaccgttctttgaatcgacccaagaagagagtttccttcgttgttcaagcagccaagccccctattggtgtggaaattccaaaggtgcagcctcaatttacgcctccgtttcttgggttcactaagactgcagaagtatgg

SEQ ID NO: 80594 - DNA, 241 bp, Glycine max
  Clone ID: 700961108H1
ccatttttggctatccacactgattctgccattaggaaagggcttatttccgaaaatgatcttaaccttgccttggccaaccttatttcggtccaaatgagattgggtatgttcgacggcgaaccgtcaacccaaccatacggaaacctaggcccaagagatgtgtgcacctcggcccatcaacaattggcccttgaagcagctagagagagtatagtcttactacaaacaaaggaaactc

SEQ ID NO: 80595 - DNA, 239 bp, Glycine max
  Clone ID: 700961109H1
cccagatcccggtggccttttccctctctttctctggaaaattcccccgattttctcgagaaagtgaaacgcaattatgagctttcaggacatcgaggctgggcggcccttcagttcgaggcgcgggttgatgaacgggaagcaagacccgacgcaagcggtggctgccggaatattccagatcaacaccgccgtctccaccttccagagactcgtcaacaccctcggaacccccaaag

SEQ ID NO: 80596 - DNA, 239 bp, Glycine max
  Clone ID: 700961110H1
cacggattcattgcatcaccgtcaccaccactttcatcatcataaaacatttttcatataaataaaatatattcattcattcacacatcgtaataatcattatctatcattctctctctttcaattttagacagaagactaaaagagtgaagagaacaaacagagcaatggaaggaggaggagctgctccgccggccgacaccgtgatgtccgacgcggcgcctccgcgcagcaagcga

SEQ ID NO: 80597 - DNA, 235 bp, Glycine max
  Clone ID: 700961113H1
atggaagctcgtgatccaccgcagctgccgatgattgtttgactttgatatcgaaattgctgggagatattcaacgtggatacttacttgtagtgcttagtttgagtctctattaatgaccctatcttgcatggcgcttttggggttaaagattacgattcttctccccattgtagtcttacctgagcagtttaaaattttgggagacgataacttttgtctttataccatgtgt

SEQ ID NO: 80598 - DNA, 88 bp, Glycine max
  Clone ID: 700961114H1
gcatgagagagaacttccctgcccttccatttccctctcgattgcttcgcctttgctttcgatcctttgctagaagagaaccttattc

SEQ ID NO: 80599 - DNA, 229 bp, Glycine max
  Clone ID: 700961117H1
agaaaaacaaatgatggagcaatgttgtttgagaaagtttgaagttaattttggtgaccaagttgaatgtgatgcgttaataagtgaaggtttctctgttagttttgtacaagtacgtataacttaaaaatgctttatgatccttatggtgaaaaaaaaaaaaaaaaaaaaaaaaaaaaggggggccccccaataattgacctcctcgcccggggatttattccgggcc

SEQ ID NO: 80600 - DNA, 245 bp, Glycine max
  Clone ID: 700961118H1
ataacccatgtaacacgacgagtgaaattggatatgagtgtatgagcaaagccaaagtgatcgtgtggcagagcaacgagagagaaagctcttcttgttctgatgtcggatcatcttccgcgagaagtggtaaccgacatcctctcccggttaccggcgaaatccctactccgattccggtcaacctcaaagtcatggaagtcactaatcgacagccagcacttcaactcggtcatctcagcaga

SEQ ID NO: 80601 - DNA, 241 bp, Glycine max
  Clone ID: 700961123H1
cagaaatagatcatctctctgtctagggtttcattctttttcagctttattagttctgtagatccatctagcttcggtgctgcaaatggacgtcgcagtcactgcctttcggtcaccgctgatcgtcctgggaagtccggtcaacgggtccgcctcagctcggtttcggttccacttttgggttctccagaaagctatgcttgacttcagtatttatcccgaagcaagttcgtagaagagg

SEQ ID NO: 80602 - DNA, 237 bp, Glycine max
  Clone ID: 700961124H1
acaaattaaacatcatttgaagccaaaggaaaggaaaatcattctctctctctctctctctctctctctctctcctccagcgcttgattgagagatttggagagggggagggactctgaggaataaaccatctctctacctctttctctgctgagtgctgacagtgttagagatgtgtgggtgtgagtgtttttggtggaacagtgttcctgaatcctacccttctgagcgagagcc

SEQ ID NO: 80603 - DNA, 236 bp, Glycine max
  Clone ID: 700961125H1
cgagtcagttgccatatgctagtctcaacgattaagccatgtatgtgtaattatgaactaattcagactgtgaaactgcgaatggctcattaaatcagttatagtttgtttgatggtatctactactcggataaccgtagtaattctagagctaatacgtgcaacaaaccccgacttctggaagggatgcatttattagataaaaggtcaacacaggctctgcctttgctttgatg

SEQ ID NO: 80604 - DNA, 234 bp, Glycine max
  Clone ID: 700961126H1
tctaaaaccaactttctctctcaagaaccatcaaatctcgatcatcccctctccctgcaagatccggtgatggttccgattgcgcagtagggtttggtctagggtcggccaaggctggcgagtatttgggtgaagtaaatggcggattcgagtggtgcgagcgtggtgttgcggcacggcggcggcgttgatagtgttacagtgcggtggcgattaatgttgtcttcaatttta

SEQ ID NO: 80605 - DNA, 128 bp, Glycine max
  Clone ID: 700961127H1
aaacggtgtagggaacacggcgtcgtggcgacggtgccgccgtcacgcggcgcgtcgttattcctaacgccgtcgcggggcttgaagcggaagataggttgcatcgacaaggccacgcagatggggcg

SEQ ID NO: 80606 - DNA, 233 bp, Glycine max
  Clone ID: 700961129H1
ctaaaacagcgtccgcaatcgcatctgggactttgctgggaacttttgaggataacaggtacaagtcagagtcgaagaaatcagtgcttagttcggtggatattattgggcttggaactggacctgaattggagaagaaacttaagtatgcagctgacatttcttctggaatcattctcggaagggagcttgtgaattctccggctaatgtgctcacgccagggtattggctg

SEQ ID NO: 80607 - DNA, 234 bp, Glycine max
  Clone ID: 700961131H1
cttgctcttagccctcctcctcttcgccgcagtgaccaccgccgcgatggcgtggcgcgtccgacgccgacgacatcctgatccgtcaggtggtgccagatgttggcgaagcgaagaggaggacaacctgctgaacgacgagcaccacttcgcgagcttcaaggccaagttcgccaagacctacgccaccaaggaggagcacgatcatcgcttcggcgtcttcaagtccaacct

SEQ ID NO: 80608 - DNA, 243 bp, Glycine max
  Clone ID: 700961133H1
ggttccgatccattggctcgtcttcagtgtgaaattcctcgctcatcgcgttccgaatcttcctctcttgttatccagcaaccggtttggcggcgcggcttttcacacgcgtctcacatttcgtccacgtttttgttttttttgttttttggataacgagaattctagatctcttgaacgcaccgtttttggcggttatagaggatcgggacgcgaggcggatgacggcgagaggttatcgga

SEQ ID NO: 80609 - DNA, 238 bp, Glycine max
  Clone ID: 700961135H1
accagtatgaatgatatagtagcaatcaaacgccgtttggggggtcgctatccatggttgtctcgagcttatgatccctgtactgagaggtactctaccttgtatttcaatcgtccagaagttcagaaggcacttcatgccaatgtaactgggattccttattcatgggcaggatgcaatgatgttattgtggaaaattggggtgattctccgctatctatgcttccaatatatcaag

SEQ ID NO: 80610 - DNA, 239 bp, Glycine max
  Clone ID: 700961136H1
taatcttcaatcgatttaaatttgttgcttcaaagggaatcaaacttggaccagcatttctcttgacaagacttacaggtggttcaattgtcggggacatggctccttaccaagcattttccattggagggcttggaagtgtgcgagggtatggagaaggagcagttggatctgggcgatcgtgtttagtggctaatagcgaactgacactccccttgaataagatgtggaaggtgcca

SEQ ID NO: 80611 - DNA, 236 bp, Glycine max
  Clone ID: 700961137H1
aaacattttgccttttcagctttcattgcccaaccttgtagtgtggccttgctgttttctcaatgagaaaggcttttactctgcaacgcgcacttttgcgcttctctgttgcgttgttgctggttgccagcttcacttgtgctacttctgttattgcaattcctgaagtttcagggaatgaagttaatacagatgggaatgctgtaaatgaagaactagcaaaaacagccaacaag

SEQ ID NO: 80612 - DNA, 229 bp, Glycine max
  Clone ID: 700961138H1
ttcttttctctctctctctctcgtgttctgagctgctagaagcaatggagaggaaaagaagccatgcttctttcaccatgtttgcaatgcttgttggattgctctctcagagccttgtcattcctgtaatatccaccactgttgcagatcagaagaactactacaccccagatccacatgctggaagtccctccacaggtttctccgattctctgtgctcacacaatag

SEQ ID NO: 80613 - DNA, 236 bp, Glycine max
  Clone ID: 700961140H1
gataattatatcaccacactttgtccacattctcattctcctcactcccatcatcttttccaatggcctccaacggcgacgcgttcatccccacccttccaaaaagatcaaactcttcagcaattccattaactcaactaattcctcgtttatcacccatgccgagatcgaatcggaattctcccaccaccaccccacggtggcgcgcctcaacaacggcgccttcgggtgctgcc

SEQ ID NO: 80614 - DNA, 237 bp, Glycine max
  Clone ID: 700961141H1
ttcatattcatcaaactcatcaaaatgaatctgtaccactcctccaccaccaccaccaccaccaccatcttcaccgtcatattcctcctccttgcaatattattcactctcacaccccacaaggccaacggtgccacgtgtcaccctgaggaagaagcgggcctgttgggcttcaaatccggtatccgatccgacccgtccggcctgctcagtaactggatatcgggtacggactgc

SEQ ID NO: 80615 - DNA, 229 bp, Glycine max
  Clone ID: 700961142H1
gaaaattggtggaaagtagcatcatcaaggagggcttacttgtagaggttttcaaagatgaggaagggtttaaagctgcatggttctcagccaatattttgactttgagggatgataaagcttatgtaggctacacttcacttgtagctgctgaaggtgcagggccattaaaggaatgggtttcacttgtatgtgatggagacaaacaccccagaatacgtctgctgtc

SEQ ID NO: 80616 - DNA, 233 bp, Glycine max
  Clone ID: 700961143H1
attgagaactccacgagatcctttcttttcctcagccaaagcacaaaaccaaaacagaaaccttttgatataatttctgttattcacttccttttagacaccacactaatccagattagacattgtacaaatgggttctctgttgttcttgcttttggttattgttcttccattgtgttattgtgttgatgctgcttgctctaatggaaactgcaaggtaaatgatgagtgct

SEQ ID NO: 80617 - DNA, 232 bp, Glycine max
  Clone ID: 700961145H1
gcacaatattatgagattgcagtagcagtgtttgctttgctcaagtctcagcgatatgatggcagacccagcaagtttcatagcaagctggttaactccttcttacctcttcatcttggtcaacctcgtcataggcaccatagccatcacttctcgcttcagttccacgcccaaaaaccaacaagcccaccacccccaaccactcagctccttcaataccatcatcaccaac

SEQ ID NO: 80618 - DNA, 240 bp, Glycine max
  Clone ID: 700961148H1
ctttgtgatcctgggaaactcatttcattagagtgagagagacgagagagagagagagagaggtatcacagtgaaacacagaagccctaactacgcacgcactcattcttgagaaagctcaatattcattcgtccatggcactctcttctcgtctcttttccaaatccaaattgatctatggctgtcaaatacttctgcaaaaggagcatgctattccagttcgtcacttgctaaagagt

SEQ ID NO: 80619 - DNA, 241 bp, Glycine max
  Clone ID: 700961150H1
cacaaacaaacctctctccctctcgattttaacaaccaactgccaaataattaataatacaataacctaaataaaccgaactctggttaatcattgtgacacgttattttaatttttggtagaaagtaaacaacaaaaaattaaatttgattgttgcttattaaagagagggggagggagacaagatacaccaaagtcgtcgctcatggaagacttactcggccttttaggattcacatca

SEQ ID NO: 80620 - DNA, 53 bp, Glycine max
  Clone ID: 700961151H1
caaaatgaatgacattatattgtgtcttaatccgtgtatcatttggccagtgt

SEQ ID NO: 80621 - DNA, 235 bp, Glycine max
  unsure (1)..(235): unsure at all n locations
  Clone ID: 700961152H1
gcgaaggactttaggttgggatttgggaattagggttattcgcgtggcgaagatgattgaggtggttttgaacgatcgattggggaagaaggtgcgcgtgaagtgcaacgancgatgataccatcggcgacctgaagaagcttgtggcggctcagactggcacaagagccgacaagatccgcatccagaagtggtacaccatctacaaggatcacatcactctcaagattacgag

SEQ ID NO: 80622 - DNA, 238 bp, Glycine max
  Clone ID: 700961153H1
accgaaacaggtttcctataaaatcccgcatgtgccgtagcagttgagctgaaaccgagaagaagaagatggagatgtatcagatctggagcaggagaatagcgttgggagcgttcgcgtttgttctgcttttcctatcggcctcagcagacgacgtcgttgtgctctctgaagataacttcgagaaggaagttggtcaggacagaggagctctcattgagttctagctccttggtgt

SEQ ID NO: 80623 - DNA, 238 bp, Glycine max
  Clone ID: 700961154H1
gggttcacaggtgagactcagattactccaacccatgtatctgatgcagaggcaaaccttttcgccatgcaactagccagtgcctcagtactccctatggttctcaaatcagctcttgagcttgatctgttggaaatcatagccaaggctggccctggtgttcacctttccccctccgacattgcttctcggctcccaacacacaaccctgatgcacccgttatgttggaccgtatat

SEQ ID NO: 80624 - DNA, 236 bp, Glycine max
  Clone ID: 700961156H1
cttcttgttactctctctctgtctctctctacgctttctcgttcgagatccctcaagggatccactaactgaaggagaaatggggttgacattcaccaagcttttcagccggcttttcgccaagaaggaaatgcgaattctgatggtgggtctcgatgcagctggtaagaccaccatcctgtacaagctcaaacttggagagatcgttaccacaattcccaccatgggttcaatgt

SEQ ID NO: 80625 - DNA, 232 bp, Glycine max
  Clone ID: 700961157H1
gttgcgcacttctaaaactgcacaagaagaagaagcttcaaccccacgaataagcacggtttctaaaatgttttgcaattttcacattattcttctaattgctcttgcacttttggtacaaatatcatctcagcttggctccaaggtagaagtgcttcctggctttgaaggccctcttccttttgaactggaaacagggtacgttggattaggagaaaaagtgatgacatgc

SEQ ID NO: 80626 - DNA, 232 bp, Glycine max
  Clone ID: 700961158H1
cgagaagatccccgaggctgaacaatgttgaacaacgacctccccctctgagacgatgtcccaggttgaacaacgagtcaagcgacaaaaaattgaaagacacgagagtgaagaagggcggtgaagctgaaacgaaggaaaatcgtgtcgtttcggacgagggtttcggtggaggaagaaagaagaagagaaacaggaagaggattgaagttgaaacgcaaaaaacggtgtc

SEQ ID NO: 80627 - DNA, 229 bp, Glycine max
  Clone ID: 700961160H1
cattgatcgaaattcgaatgatcgctttctctgatctaaactaactgtgactgtaccggaaaatcaaccacccccaccatcattttcattctcattctcctctctctgttttttctatttcctttctttcttatcgctccccatttacttgttttttcatttttgcagggtttcttttgctcatcaccaccttcttcatattccctctccaaccatggacgtgggatcg

SEQ ID NO: 80628 - DNA, 229 bp, Glycine max
  Clone ID: 700961161H1
gaggaaaaccctagctagtagtctcagttcgtttgagagagaaaaaatggcagagggtctcgttctccgcggaaccatgcgcgcccacaccgacgtcgtgacggcgattgccactcccatcgacaactccgacatgatcgtgacggcgtcgcgcgacaaatccatcattctctggcacctcaccaaggaggacaagacctacggtgtcccccgccgccgctcaccggac

SEQ ID NO: 80629 - DNA, 232 bp, Glycine max
  Clone ID: 700961162H1
acattgttaaaagtttctttatttcaagtgaagttagttagttatatttatatacacaatcatgtcaatgagatcaattggtacaagccttagccttatggtatggcttgtaattgcaacatcagcattagcaaaatctgataaccccccagtcctagacacacaaggcaaccctcttgagcctggcaaagattactacatcaaacctgccataaccgacgtggaggccgcg

SEQ ID NO: 80630 - DNA, 241 bp, Glycine max
  unsure (1)..(241): unsure at all n locations
  Clone ID: 700961164H1
agatgacttaaatcagttactggttgagctagatggattcaagcataatgagggcataattgtgattggtgctactaattttccacaatcattggataacgcattggtgagacctgggcggtttgatcgccatgttgttgttcccaatcctgatgtaaaaggaagacaacagattttggaatcacacatgtcaaaggttctgaaggctgatgatgttgatctaatgatcattgncccgagg

SEQ ID NO: 80631 - DNA, 146 bp, Glycine max
  Clone ID: 700961165H1
gctcgacgcatgaacgtaccctccaccttcaccaccaccacacccaacctcgtggtgtgtcccttccctgagccatgcttcttccgcaagtctacgcatctctacggcgcagcacgcgagatcaccttactatctctcgctctctc

SEQ ID NO: 80632 - DNA, 88 bp, Glycine max
  Clone ID: 700961166H1
gaagagttgattaaatctaacttaattattgatttgcctttgtgtttttagaaacaatgattggggaacagtcttttactatgttaaa

SEQ ID NO: 80633 - DNA, 237 bp, Glycine max
  Clone ID: 700961168H1
tagaggaatcagctttgctttcctgtggtaaattcacagttaatggggccagctggtgcggtttcatctcattacccccggccttatgatgttggccttacagaaggtagcaatagtggtagtgctgagaccagtagaaaatgggcaaggcagggtttagatcttaatgcgggacctggaggttcagacatggaggggagagacgacaattctcctcttccatctggcaactttctg

SEQ ID NO: 80634 - DNA, 127 bp, Glycine max
  Clone ID: 700961169H1
ggtcgttgagtgagtgagtgtggtttcacattggctggtcaaatcaagaatgacattctccctttcattcaccactctgctttcccttatctctgtcattctgcttcatgtcaatgccttccccgtt

SEQ ID NO: 80635 - DNA, 235 bp, Glycine max
  Clone ID: 700961170H1
cttgcttcttaatttcttgatcatgtcacttgctggtaaaatcaccattgaaattggggtgcatgcaagcgctgcaaagtggttcaacctctttgcaacgcaactccatcatgttcaaaaccttaccgaaagagtgcatgaaaccaagctacatcatggtgatgactggcatcacaacgaatcgatcaaacactggacttgtaccatagatggtaaggttacaaatatcacgaga

SEQ ID NO: 80636 - DNA, 232 bp, Glycine max
  Clone ID: 700961172H1
gtaggatcggtggatcaggaatggacctgaggagcaaagcaaggactctcccaggaccagttagcgacccttcaaagcttcccaagtggaactatgatggttccagcacaggccaagctcctggagaagacagtgaagtgattatatacccacaagccattttcagggatccattcagaaggggcaacaatatcttggttatctgtgatacttacactccagtggagaaccc

SEQ ID NO: 80637 - DNA, 163 bp, Glycine max
  Clone ID: 700961174H1
tcaatattttaccgttctttcctctaaagttaaaaattactcttccttcccccagtagatttaaatacatgacacttcatttttttcatgaattttctgttataattccgttaaaaaattattcttaaaacatcatttatactaccgctccacacaacatacg

SEQ ID NO: 80638 - DNA, 229 bp, Glycine max
  Clone ID: 700961175H1
atcaagccaaagaataggagaatcatgggtgctggagtccctgatgatgaggacaacaacaggtggccaccgtggctgaagcctctgctaaaagaaagtttctttgttcaatgcaagcttcacgctgattcgcacaagagcgagtgcaacatgtactgcttggattgtatgaacggtgctctctgctctctctgcctcgcttaccataaagatcatcggctattcagat

SEQ ID NO: 80639 - DNA, 82 bp, Glycine max
  Clone ID: 700961176H1
cggctcgagcggctcgagaatttcaatttaaaagcctctgttatttgtgatattgactcactggtcatccacattatacgta

SEQ ID NO: 80640 - DNA, 233 bp, Glycine max
  Clone ID: 700961178H1
ggcaagccccactcaaccaccacacatctcctcgttcacgctacccctttctgctcttcttctacctttcaagttttaaaagtataaagatggcagagacattcctatttacctcagagtcggtgaacgagggacaccctgacaagctctgcgaccaaatctccgatgctgtcctcgacgcttgcctcgagcaggacccagacagcaaagttgcctgcgaaacatgcaccaaa

SEQ ID NO: 80641 - DNA, 237 bp, Glycine max
  Clone ID: 700961180H1
aacaatagtatcttttcgcttcaaatttcatttagatccaaaatttctgaatcagtgaagaatcttagattctgtgggaaaagcttctcaatctttgacgaagataaacaacaatgtcttcacttgcggctgctagagcagacaacttttactatcccccagaatgggaaccgaatcagggttcgctgaacaagtttcatggtcaacatgccttgcgagagagggcgagaaaattag

SEQ ID NO: 80642 - DNA, 83 bp, Glycine max
  Clone ID: 700961182H1
catgttcatgggcttttcaatggtttaatggcccctctctatgcaggttccacagaagatacgacgcataaatttagtgtgag

SEQ ID NO: 80643 - DNA, 231 bp, Glycine max
  Clone ID: 700961183H1
caagcctgaaccatcttttgagattctgactaatcctgcaagggtggttcctgcacaggagaagtgtattaaatttttgcaggatagcagatatgttccggttaagttggcaccatcaggatttgtgcttctcagagacttgcatcctactgagccagaagtgcttgctctaactgacacgccctcatctaccagttctgctgctggtgggtcagcaacaggatgcagagt

SEQ ID NO: 80644 - DNA, 241 bp, Glycine max
  Clone ID: 700961185H1
ctcagctgtgatcatcgtgttatagatggtgcaattggtgccgaatggttaaaagcattcaaaggctatattgaaaatccagagaccatgttgttgtaagaataaatagaaggctcccatgacgtactaaattcctttcaagtcattctaggcaggggatgagattttgttacacctgggtatttctgtttgggcccattatgggttttgttagattgtatccctgaacagatttttgatg

SEQ ID NO: 80645 - DNA, 231 bp, Glycine max
  Clone ID: 700961187H1
tgtacgaagcgcggtgacgaacaggaagcgcacagcggggacgacgccgtttcggagaatgacagaaagcggaagaatatggtggcacgcaacatggacccggctgaggcgttggccttgacgcggcacgagttcggggagcacggtggcgtaaacatgtcgatcgaggcctcggcgacgttcacggtgatggagccggagaccctcggtcgcatgttcgccggcgagctg

SEQ ID NO: 80646 - DNA, 229 bp, Glycine max
  Clone ID: 700961188H1
cgagagtggtttcagtgagtgatcggtgttcacttgatccttcataagtcgtcatcatcatcatgatcatcaccgttgattgaagaagatgccgatcagaaacatcgccatcggaaggcctgaagaggctactcaccccgacacgttgaaggcggggttggctgagttcatctccgccttgatcttcgtgttcgccggttcaggttccggcatcgcctaaagaagctca

SEQ ID NO: 80647 - DNA, 230 bp, Glycine max
  Clone ID: 700961189H1
agttctagatcgcgagcggccgcccgcgatctagaactcattgatattgcatgttataaacccgatgacgaactcaaggtgtcaagggagcagttacatggaggtggcaaggaaatcaggcaagttcgacgaagcaagtctagagttccagaagaggatgctaatgtcctccggaatcggcgatgaaacctatataccgaaggccgtcatcgcctccacgagaacaccgc

SEQ ID NO: 80648 - DNA, 226 bp, Glycine max
  Clone ID: 700961190H1
ctctgagttctccacaggatcaggaaccgaagcgttggaatgggagaatatgatgataatggcgatgaatcgaatttccatttcctgatgtgaggaacaaagcatcaacaccttggctaggttcttgtagggtttgttgagaatcttatagtttttttttttctttctcgaattcttcttcgcttgatcgggaattggaattgtgagttagatcaggaaataagag

SEQ ID NO: 80649 - DNA, 224 bp, Glycine max
  Clone ID: 700961192H1
attttatatgtatatggggacagctgagtgcactgctattgatgcttttaagcatgctggggaaaatatggtgtttgcaagtggaagccctttcgaaaacgtagatcttggtaatggaattgtgggtcatgtaaatcaagcaaacaacatgtacctcttcccaggaattggtttgggaacccttctgtcaggtgctcaccttataacagatggatgttgcaggc

SEQ ID NO: 80650 - DNA, 229 bp, Glycine max
  Clone ID: 700961193H1
tggaccttcagttgatgaagtcaccactgaatcctcattgttttctctgcatgccaggagcagtgtgccatctcaaccgcttgtttctggacttagggtgagtactgctgagccagtcaacttctcttggcttccttccagtggcaacacctattctgctgtcacaatatcttcaattatgcctgatagaggggatcatcccttttcaattgttgcccaaatgggccac

SEQ ID NO: 80651 - DNA, 228 bp, Glycine max
  Clone ID: 700961194H1
ccttcaatggtttggtcacagttagttctttcatattcttcctcttggtcctttcttgggcttatttatatgcaattcccagttctcaatcattgattcggagtcatgagattcccaacaacagttctgactcatttgttcagagtcatgagattcccaacaacagttctgactcatttgttcagagtcatgagattcccaacaacagttctgacacattgttcagag

SEQ ID NO: 80652 - DNA, 231 bp, Glycine max
  Clone ID: 700961195H1
acagctgtgatcatcgtgttatagatggtgcaattggtgccgaatggttaaaagcattcaaaggctatattgaaaatccagagaccatgttgttgtaagaataaatagaaggctcccatgacgtactaaattcctttcaagtcattctaggcaggggatgagattttgttcacctgggtatttctgtttggcccatttgggttttgttgattgtatcccgaacaatttttg

SEQ ID NO: 80653 - DNA, 238 bp, Glycine max
  Clone ID: 700961196H1
gcagcagtggttcaggcttgccatgatatggttcctcctgatgcagttgaacccttgttcaaacaaatagtaaatcaatttgtacatgaccgttcacgtccagaggctattactgttggaataaatgcagtcagggagatatgcatgcgcatgccattgttaatgaatgaagacttgctacaagaccttgcgctatataagaagtcacgtgagaaggcagtttcaatagcagctcgat

SEQ ID NO: 80654 - DNA, 274 bp, Glycine max
  Clone ID: 700961201H1
gtttaaacctaattctcatttcttcatcgttcgattcttctcctcctaaagatgcagatcttcgtgaaaactttgaccggtaagaccatcacccttgaggtggagtcctccgacaccatcgataacgtgaaagctaagattcaagacaaggaagggatcccacctgaccagcagagacttatctttgcgggtaaacagcttgaggatggtcgaacccttgccgactacaacatccaaaaggaatccactctccacctcgtgcttcgcctcaggg

SEQ ID NO: 80655 - DNA, 271 bp, Glycine max
  Clone ID: 700961202H1
tcgagctcctgaaatgagcttagccacagtgcgagcttatatatggaagaaatcagatgacttggttctaaattacagactagttcaaggcagttgactacaaattgcatatgcatcagaggtgggcggtatttcttttttaactgatgtgaatgttgataaaagtgatcataggttattaataatttattctctttcagattggaggaaagtgagctttaaccatgtcagaatggtcattattggtatcacaagtaacttttgaatgatt

SEQ ID NO: 80656 - DNA, 269 bp, Glycine max
  Clone ID: 700961203H1
cacctactcaatcacgtttcttcctccctccattgaggcgagcaacagaggtcatatatcaccaactgtactggcaatggagaaaggaagtatggagaacaatgagaaacatgtgacagagaatgatcctaagattgactacagaggatggaaggccatgccctttatcataggaaatgaaacttttgagaaattgggagccattggcaccttagccaatctcttagtctatctcactactgtattcaacctgaagaacatcacagcca

SEQ ID NO: 80657 - DNA, 264 bp, Glycine max
  Clone ID: 700961205H1
ctagcattgattcttcgtccagacttccctgaagcaacttgcaatctccttcatacataccagtgtgtatgctgttgggaggatcgtgataaaatgttcaaggaagttgaagcgataatcaggaggcagattaatatgtccgttattcctagtgtccagccattccatgcaatagcatatccacttgacccaatgcttgctctggaaattagccgtaaatatgctgcacactgctcggtaattgcatctcgtttttctcttcct

SEQ ID NO: 80658 - DNA, 266 bp, Glycine max
  Clone ID: 700961207H1
atcgttgttgttctaaagcactcatccacacattctccgtcgccacgacaacaatggctccaaagaaaggtgcgaaaggtggagttgtagcagcaaagaagaaggttcaggagaaggtaacgaaccctttgttcgagaagcgtccgaagcagttcgggatcggaggcgcgctgccgccgaagcgggacctgacgcgcttcgtgaagtggccgaagaacgtccaaatccaacgcaagaagcgcatcctcaagcagaggctcaaggtc

SEQ ID NO: 80659 - DNA, 270 bp, Glycine max
  Clone ID: 700961208H1
cacaaacaccacgccactgttactttctcttctctcctccactcactttcacttcatggcgacggtgctagcgccaccgtccctctccgtgcgcgcttcctctagccgccggcataggaagaagcagcagcagaagcgagcatggggagacttcagccacttggctcaggtggttcgcaaggacatggaatgcctcaagagacgaatcgataacggcgttgcgtgggccaacgagaccttccgcattctcgaggctgccaagaaaatcga

SEQ ID NO: 80660 - DNA, 235 bp, Glycine max
  Clone ID: 700961209H1
ctgaacaaaacgacgacgtcgttttgtgggacgaggagtttcacgcactctgcatcctcaacgcgtacaaagacaatgcctttcacccctgggaaatcgctttctctctcttcaacggcttgaatcaaaggtcaaagactaaggttcctgtggttggaactgcgactttgaatctagctgaatttgcatctgtggttgatcaaaaggattttgatttgaacattccacacaacat

SEQ ID NO: 80661 - DNA, 269 bp, Glycine max
  Clone ID: 700961210H1
cgaaacaatttcatcaagcctgccatggcttcctcgtgtgcttcctctgccattgcagctgttgccatctccacaccaagttcccagaagaatggatcactcttgggaagcacaaaagcttcttttcttagtgggaggaaactgaaggtgaacagttttacagcaccagttggagcacgatccagcactacagtgtgtgcagttgctgagcctgataggcctctgtggttcccaggcagcacccctcctccatggctagatggcagttt

SEQ ID NO: 80662 - DNA, 264 bp, Glycine max
  Clone ID: 700961211H1
ctaaaaaatgatgtaatcattgcaaagagcctgccagaaagtatgatggaaaggagaagaagaaatgaatttcctacatttaagcccacaagttcagcttctctaaacttttacattaaagaaattttaccaaagctaaagaaatcaaaggttatcggattaattattgccaatggtggagctctgcagtcaatactcccacctagcatggctgagattcagaggctaagatgcagggttgctttccatgccctgcaatttcgt

SEQ ID NO: 80663 - DNA, 271 bp, Glycine max
  Clone ID: 700961216H1
gagaaatgcattggagtaccgatgtgtaccatgcatcagaatttagatatagtaatgtccatatcttaccaaaaacaagtcatttatggattttatcaggaaaatcatacaggtccggttcagtctctttttcaatccgaaaagatcaagatcaaatgaacattcattatctttctactggagaaagagatttttgtaaccttttagcaagtaaaaaaaaagtaagacataaattgtttcgtttcaatccttctgataaaaaagaaagaag

SEQ ID NO: 80664 - DNA, 261 bp, Glycine max
  Clone ID: 700961217H1
aaagtgtaataaaggacgaaagttaggctattctttcaaccgtaagtgtgacttggtagccacttctctgaaataacatatgttactttgtcattttccaaaagggagtagctggtggtgccggagagaaacccattccacttggtgagaacgttctgcagaagcatgctgcattctttgacttgaataaagatggtgtcatctacccatgggagacttttaaagggttccgtgatatcgggactggggttttgctgtccg

SEQ ID NO: 80665 - DNA, 263 bp, Glycine max
  Clone ID: 700961222H1
gaaagctctggatacatggcttggggtgatagtgctaattcaagttcttctttagttaattggggtccttcctgcaagagaaaggctcttgaaggtagttctaggcaactgtgttcttgaggaagctcaagcactcttgtacaatccgcaaatggttgctggcctactgatcctgttgatcttaatgcttccagcgacttaaatgattctacacctatagaagatcttcgtgttactagtcctccattatttcagaatgcgac

SEQ ID NO: 80666 - DNA, 268 bp, Glycine max
  Clone ID: 700961224H1
cttcactctgcccgctgcatgaatggcttcagagaagaaactttcgaacccaatgagggagataaaagtgcagaagctcgtcctcaatatctctgttggcgagagtggagatcgtctcaccagagcctccaaggtgttggaacaacttagtggccaaaccccagtgttttccaaagcaaggtacactgttcgttcctttgggattagaagaaatgagaagattgcatgctatgtcactgtcagaggtgacaaggcaatgcaacttttt

SEQ ID NO: 80667 - DNA, 265 bp, Glycine max
  Clone ID: 700961225H1
caaaccaaaaccactcactcttctcattttttctgttgcataccaaatggaataagtttagattatgtccaattgttcatagcgttgaacaaaacaaacacgcagcaaaatgagcacacccttgttccatgaattcaaaaggcaagcttctttcttcttcaaggagaaaatcaagactgctagattagcactaacagatgtcacccctgcagaactgatgacagaagaggcaacaagtggaaatccatgggccccagatgccaga

SEQ ID NO: 80668 - DNA, 259 bp, Glycine max
  Clone ID: 700961226H1
gtcgctccgcaccagtttcaccgcacgaatatcttattgtttggagcgatccgagaaaaactctgtaaacatgttggtttaccaggacctccttacaggtgatgagcctctctctgactccttccgttacaaggaaattgagaatggaatgctgtgggaagttgaggggaagtgggttgttaaaggagcagttgatgtagacattggtgcaaacccttctgctgagggtggaggagaagatgagggagttgatgatgca

SEQ ID NO: 80669 - DNA, 254 bp, Glycine max
  Clone ID: 700961229H1
aatctttgttctttcttgttccattttcccaaacttccctcactctctgtttgctttctcaattttggaaaatgataacgtcgatagtggttaggaaggccgccggaaagcttgaaaatttgccagccgaggcgcccaaaacattgatggacacagttcttacgttagcagaagccataaggttcggttacgccgagacactgggcaaatggcacctcttggacttgccaagagccatcctttactctgtcatg

SEQ ID NO: 80670 - DNA, 264 bp, Glycine max
  Clone ID: 700961230H1
atttttctcactgtcttgtctctccagagaactgtatagacagagatggcagctgcaacatctggtgctgtgttaaatgggttgggatcttccttcttgagtggaggaaacaggagccaaacccttctggccactgctattggaggcaaagttggtgctgctgctgttactgttagtcctagaagactcattgtggtagctgctgctgcaccaaagaagtcatggctccctggtgtcagaggtggtggcaacctcgtcgaccca

SEQ ID NO: 80671 - DNA, 268 bp, Glycine max
  Clone ID: 700961231H1
cttcttctcttttcacgtcattatcctaaacttgcagattttcacatcccaagcaacatgaaggggaggttcatgtttctgtcggtgctcctttgtgccacctttcatgtctccttctccattactgacggcttagtagcaaacggcaacttcgagctgggtccgaagccctccgccctgaaagagaactgtggtgattggtggcagccactcgatcccagaatgggagatctctggcttcgtggagtacataaagtccggccagaag

SEQ ID NO: 80672 - DNA, 269 bp, Glycine max
  Clone ID: 700961232H1
aaaggcttatggtggatcacctaggcacccagagacgaggaagggcgtagtaagcgacgaaatgcttcggggagttgaaaataagcgtagatccggggattcccgatataggtcaacctttcgaactgctgctgaatccacgggcaggcaagagacaacctggtgaactgaaacatcttagtagccagaggaaaagaaagcaaaagcgattcccgtagtagcggcgagcgaaatgggagcagctaaaccgtgaaaacggggttgtggga

SEQ ID NO: 80673 - DNA, 264 bp, Glycine max
  Clone ID: 700961233H1
ctccaatcctttcgttattctcttattcatccttctcttctgaataatccagatctctttctgcccttttctccgtcacgcttttcgtgcccggatctgtatggatttgatcctgatctactcgccgatggtggctttggccgtgtctgtcatagatctggttcgtagaggctcagatctacggtaccgaggtgtgtgattcatgtgcgtcttgctttcggaatctgtttcgtagatagtcgtttggtcttgcatatggcatgg

SEQ ID NO: 80674 - DNA, 262 bp, Glycine max
  Clone ID: 700961234H1
gacaaatagtctaaaccatattaatcttaacccttatgcaaatcatgttttagtttttattaatttggctacagataagaatttttatctatatttagtcggaacctaaatcagggtaaataagtactattatactaatcactgtcattggctgtatttctggtaaaatgttcttccactccgtcttggttttgttgaacgtgaacttaagatgtgttggagcatatccgagtaattaaagtaagaaaaagtggcagaagtg

SEQ ID NO: 80675 - DNA, 264 bp, Glycine max
  Clone ID: 700961239H1
gctcttcatcaatgaactccaatggttaccctgcttcctccttcaaaatccccaccgtcaagttcaccaagctcttcatcaatggacattttgttgattcactttcaggagtagaatttgagacaatagacccaagaaccggagaggtgattgcaaggattgcagagggaaccaaagaagacattgaccttgccgtcaaagcgtctcgtctggctttcgaccatggtccatggcctcgtatgcctgccgtagaaagagcaagaa

SEQ ID NO: 80676 - DNA, 261 bp, Glycine max
  Clone ID: 700961240H1
caagcttggtggaaagaacttgtagaggtgggtcatggggatttgaaggataagccatggtggcaaaagatgcaaactcgtgaagagttggttgaagcttccgctaccctcatatggattgcttcagctcttcatgctgctgttaactttggacagtatccatatggaggtttaatcctgaataggccaactattagcaggagattcatgcctgagaaagggtctcctgaatatgatgcgttagctaagaaccctgagaag

SEQ ID NO: 80677 - DNA, 96 bp, Glycine max
  Clone ID: 700961242H1
gaactctgggacctgttaaaatggagcctcagcattctgatcaaccattatttttgcagcagcggcaacaacagcaacagcaacagtttctccaca

SEQ ID NO: 80678 - DNA, 260 bp, Glycine max
  Clone ID: 700961245H1
acaaacttttggttggaaacaagagtgatctgacagcaaatagagttgtctcatatgacacagctaaggaattcgcagatcaaattggcatacctttcatggaaacaagtgcaaaatatgctacaaatgtggaagatgctttcatggccatgtctgctgccatcaagaatagaatggctagtcagccttcagcaaacaatgcaaggcctccaacagtgcagatcagagggcaacctgttggacaaaaaagtggttgctgc

SEQ ID NO: 80679 - DNA, 265 bp, Glycine max
  Clone ID: 700961247H1
cacattcaaatccaaatggccctttacattacactaatatttgggcctcctagtagacactctagtactctataaatagcatttgcatgcaccttagtcttcaccaaaatactcctcttggcatcttgtgttgtgtccctcttttaagctatgtccttctcttaacacaattggttgtgccattgcatggttggccgaaccaattaacaaaggtatatatatcatcatatcatcaccaaatgagaaatattgggttgttgtgtct

SEQ ID NO: 80680 - DNA, 269 bp, Glycine max
  Clone ID: 700961248H1
agatgaagcttctattctatcactgcagatattgatgagaaagttcccatcccaattcggtggtttatcgcgttaagcaaaaaacccaatcaaaattctaagtctctttgtttacgttgttcgtttccctcattgctttgttctcttctctcttctctctcacattcaacttcaaaggcgtagagtgagatccgaacgatgaagagagtattcggcgtcaagaagaacaaggatcctcctccttccattcaggatgcttccgataggat

SEQ ID NO: 80681 - DNA, 260 bp, Glycine max
  Clone ID: 700961251H1
atcttcttctcttttcacgtcattatcctaaacttgcagattttcacatcccaagcaacatgaaggggaggttcatgtttctgtcggtgctcctttgtgccacctttcatgtctccttctccattactgacggcttagtagcaaacggcaacttcgagctgggtccgaagccctccgccctgaaaggaactgtggtgattggtggcagccactcgatcccagaatgggagatctctggcttcgtttagtacataaagtcc

SEQ ID NO: 80682 - DNA, 262 bp, Glycine max
  Clone ID: 700961253H1
gacagaacaaagggctgcagaaagaaagaagaaacttgatgaatagttcaatgctaatgaagcacaaaaagtgcagctgcataccaaactcaaggagaaatctgagaccgagattattagttaactacgccaaagcttgtgcttcaaagccaggccactgcctgatttttacaaggaaaggaaaacatcaacgaatgagacaaaaaaggatccactgacacattgtgaaacacctagagaccgtaggaaatccaccccgagt

SEQ ID NO: 80683 - DNA, 260 bp, Glycine max
  Clone ID: 700961256H1
cacctctctctcatcgcagtttcaagaatccataaaacacacaaaaactcagggtagggcagagagagagagagaaatgggaggttgggctatcgcggtgcatggtggcgctggtgtggaccctaatcttccactcgagcgtcaacacgaagcgaaacaacttctcacgcactgtctcaatcttggaatctctgctctaaattctaatcttcccgccatagatgtcgttgaacttgtgatgtgacaagtgtttgtgacag

SEQ ID NO: 80684 - DNA, 262 bp, Glycine max
  unsure (1)..(262): unsure at all n locations
  Clone ID: 700961257H1
ggcaagaactttgcagcataccagcatgagcatgaagctcttccagctcttctccctactcccattcttcctctacttctacacaatagaagcaatagttggcccattgcaactgacacacccactggaccccttaactcagcaagaaatcaccctcgtcaaaaccatagtcctaaaaaagtacccaggnccagccaaccgcgtcttcttccactacgtcggcctcgacgatcctgacaaggccgccgtcctcaaatggctc

SEQ ID NO: 80685 - DNA, 112 bp, Glycine max
  Clone ID: 700961258H1
ctttttctcccattcatttatctggattgtgtttttgcctccattcagtcctctggcttgagctgacactctcttttgcattcagcatattatcgtaacctgttccacacaa

SEQ ID NO: 80686 - DNA, 255 bp, Glycine max
  Clone ID: 700961259H1
gacgaggtcctggtgagaaaatctctctacaccgtaatcgctatttggcatcgctgcaacaatctgcgatactctttcctctctccgcttcgaatttcttctcacactctctgcttcgccgcaaacagtgactcacttaacaacttttcgaagcattgagtagtagtgattgggtggtaacaaagagagagagagagagaaaatgatgaaccagaacccgcaatcgagtgaaggaaggaactatgacgattctgc

SEQ ID NO: 80687 - DNA, 257 bp, Glycine max
  Clone ID: 700961260H1
tctcgagccgaatcggctcgagaagaaagacaaagcattccatagcctcccataaaaatgaacaatactatcttctctgctctctttctactttgtgccttcaccacctcatacctatcttcaaccaccgcggtggtcgataccgacggtgatattcttcagaatcctggcacatactttatcttgtccgtttttcgacccggcggcggataagaattcgccgccactggaaacgaaacttgccctctcactgtcgt

SEQ ID NO: 80688 - DNA, 263 bp, Glycine max
  Clone ID: 700961261H1
tagcactctctctttctctctctctacgcttcacttttccgtaataaacccttcaaaagcgaaacaggtttctcgtttttggaccttatctctctttctaaggttcgatttctgcgtactttgggaggaacagacacacatgaaggattcgaattcggatctgtttgacccggtcatggcgatggagtccgagtggtctcgcggcggcaccacctccgatgccgatttcgccttcgccttcaacgacagcaacttctccgaca

SEQ ID NO: 80689 - DNA, 164 bp, Glycine max
  Clone ID: 700961263H1
caatatcgtctagctagctagctagctagcaagtagcaatgttaaaggaccaaccacaaccagattggtcctgagcccattggtccgggttgcagtccttgatccgaagaactgtcgaagagttccaatccctgaatcggtcacatgcagagccttgctagcta

SEQ ID NO: 80690 - DNA, 258 bp, Glycine max
  Clone ID: 700961268H1
tcagaaacacaggcgagtgcaggtatcagaattggataagagaggggtagaagcaaaaattatataagcttttgtgctatcaaatagcaacaactatagcgcatagatcgttttgcagttttgtgtcatgatgatggattctgaaggattggagattgggattgaagagttgaaattgaaggaagagaagggtaatgcacatgcacagccatctggtcaattgcagatcactaccgtttctgaactcgtcaatgatgt

SEQ ID NO: 80691 - DNA, 216 bp, Glycine max
  Clone ID: 700961271H1
tggagactcatttggttttgttgcttgctttgatcttcactgtagttgccggcgttggagcccaaggcccatccacctctcccgcgcctcccacaccccagtcttcgcgagctcccatccagtcttctccgccacctgttccttcctcacctcctccggctcagtctccaccaccagcttccactcccccaccagccccctgcagctctcctcccc

SEQ ID NO: 80692 - DNA, 192 bp, Glycine max
  Clone ID: 700961272H1
aaaattgagaaactcattagtgaattgttaaaaaaaacgaaaactcgacctggcacccaattttgagaaagtgggttcataatatctgtgttgtctggctccatttgcccttccatttgcttgctggtcctgtatcaacaggaagctggtgtaagagaagagggagaaggattaggtactgtctctctcttt

SEQ ID NO: 80693 - DNA, 246 bp, Glycine max
  Clone ID: 700961274H1
gtatgcttatgctttcgtttttaaatcatgagtggtgtggattggactgttgttgattctgaaaacacataaggaaatcctgttgtaactctggagctgaaggatggtccttatagttgtactgtgtgggatttcagcttccatgctttattcaaggtcacactaaatgctaaaagtctagcgactgagttaacagttaaaaatacagacaataaagcattctcatttagtaccaccttccacaca

SEQ ID NO: 80694 - DNA, 109 bp, Glycine max
  Clone ID: 700961277H1
ggtccatgtccagttcaagccatctttggcatgtgccacttggcctctgacacaaaaacttttcttttcggaaccaatcatttgtcatcaaacttccacacaacatacg

SEQ ID NO: 80695 - DNA, 260 bp, Glycine max
  Clone ID: 700961278H1
cctttctctctctgaaaccgtacgttacgtaaccgtaggcgatatcacaaattcacagcacacacagtccccactctctacaatgaccggtcaacgcagctcctacggcaagcgctcccactcgcactccgattccgacgccggctccaaaaacaagcgccgcaaccccgccgccgacgagtcctcctcctccctcatcaccgctgacgacaccgtcttccgctacctctgcccgtccgcaagatcggcagcgtcattgg

SEQ ID NO: 80696 - DNA, 110 bp, Glycine max
  Clone ID: 700961279H1
ggagaattaggtttttagggtttacaccgagcagcgacacctccctcccgcagtagccatggttctcaaaactgaactatgccgattcagtggtgccaagagctaccccg

SEQ ID NO: 80697 - DNA, 257 bp, Glycine max
  Clone ID: 700961281H1
gtttttgtagatagaagccatcagtcatggataggcttctatcatcgtcttcacccccttcttttacatttctcactcgattcgaatctgcaactgcaagattcaatttctctccgtcaacacgttctcactctcacttgaagcggctctcctcaatttgttgccagcatgcaaatccatctcctttttcctcttccactccctttctcgcttcttccaaccaccccattaattttccatccttttcctcttcttca

SEQ ID NO: 80698 - DNA, 256 bp, Glycine max
  Clone ID: 700961282H1
ctataacaaaaccaaaatcccggtggttacttttcgcatcttttcgttttgagctcaccgtggctcttctccattgtcgttttgcttctcccttcttccttcccattcaaaccctaatctgtccctcggatcccaaaattgccccaaattgagaacacgccatggccgcaacgttcgattcggttcgttccctcgcacttctcactcttgcatttgtgtgtagcgtcgcgaattcgatgcggttcgagcttcaatc

SEQ ID NO: 80699 - DNA, 251 bp, Glycine max
  Clone ID: 700961283H1
ggcaacagaaacaaaagtggaagtattaggtggcatcaccgaagtgcagggagctgccaacagcgtcgagatcaacaatctcgctcgctttgctgtagaggaacaaaacaaaagagagaattcagttctggagtttgtgagggtgattagtgcaaagcagcaagtggttgctggagtgaattactacataacattggaagcaaaagatggtgagattaataatgagtatgaagcgaaggtttgggagaggg

SEQ ID NO: 80700 - DNA, 242 bp, Glycine max
  Clone ID: 700961286H1
cacacacctccatttccccaactcgctccgagttgactcactcctttccctttcgagctcaaccgccaccgctacgcctccgcgctccgccgccactgcaacccccgcctcccttctccgtcaatgcaaaattcggcgtccattctcctcggaaccttcttccggtcttccttccccttcgggctttgacttttgtcttcttgcgattgcgatgtgtccctttcgccctttgttgtctcttc

SEQ ID NO: 80701 - DNA, 239 bp, Glycine max
  Clone ID: 700961287H1
tgatagttgggtaggttgtctttcaggtcctggagtaaggtattaataagatttatatggaatgggctagattttctttaacaacttaggtatgatgagatcagggacttgtatttgaggatgctttgttgattgtacaatattaatctttgactcatcaaatataaatttggtgattggaaagtttaaaggactattggaagcaaaaaatctttccagtgatggatttatctttttat

SEQ ID NO: 80702 - DNA, 83 bp, Glycine max
  Clone ID: 700961288H1
tcctcacatgcatgctgtctctgccaaagtgccaagtcacataacatttccattgttaccattctttctttccacacaacata

SEQ ID NO: 80703 - DNA, 213 bp, Glycine max
  Clone ID: 700961289H1
agggtcctcactcctcaatttagtccactggcatttccttttctcttgcctttccgataaccactttcaagtttcaagtgcagcttttctacattgcaaccccctcgacaaaacaaaaccatcaaaatcctcaggttgtgagtgagaaactgagaataatggtttctggatggagaaggacgtttcgcacatctaataccattccacacaaca

SEQ ID NO: 80704 - DNA, 93 bp, Glycine max
  Clone ID: 700961290H1
gtcatgataaaacaccaccaccagagtacttagataatataacccctttctcacaaacaccacttacggaagcaacgacagacactagctatt

SEQ ID NO: 80705 - DNA, 256 bp, Glycine max
  Clone ID: 700961293H1
agcaaacactcttctgagttctgagctagcgaggttgcaatggcgattatctccgatttcaacgaagaggagcagaaacccactcactcttcaccaccgcaaccccaatcctcttcctcttcctcttcctcttcgttcagtgctgcttttgaccggtcaaaccctatcgcttttctggagagagtcttccagttcgtctccgaacacagcgactttctggcgacggagagcgccgagaaggagatagcgttgctgg

SEQ ID NO: 80706 - DNA, 249 bp, Glycine max
  Clone ID: 700961301H1
aaaaaagtgattctgctcacagtcgtttcggggtagcattcttgcgcactcagttattctctctctctctctagagcgtcgtcgtttagttagggcagaaaaccccttttcggatcggtggagcgaacctcgccggcgagacccccgaggctgttcaatcggcgatcgagcaacggcgaaaagcgacgaagatgaaggttttcgtgaagactctcaagggcacgcacttcgaaattgaagtgaaccctt

SEQ ID NO: 80707 - DNA, 243 bp, Glycine max
  Clone ID: 700961302H1
gggagaagtttgttccccaaaattgataattctaacataaatagagcagaatctcaacaagacaacaatattgatggcttgaaggctgaatgggtagaacaatacgagctcggtgtttacatcacatttacaactttgccatgcgggaaaaaaggccttaagcgagtgagatttagtcgaaagcgattctcagagaaggaagctgaaaaatggtgggaagagaatcaagtgacggtgtatcac

SEQ ID NO: 80708 - DNA, 244 bp, Glycine max
  Clone ID: 700961303H1
tcgcctcttccttcatcagctatcttcatctgcttctgtcacatcaagcattctcataccgcttctcagtttctcattttcccaatcgcagctaaaaaatcctttgagccctttaacctattctcaataagcagaaattagggaacgcaacaatggctcaagcggttgaagaatggtataagcagatgcctgtcatcacgcgctcttatctcaccgctgctgttgtcaccaccatcggatgttc

SEQ ID NO: 80709 - DNA, 243 bp, Glycine max
  Clone ID: 700961305H1
attccttctcatcttctttttcttccctttaaaattattattccgtgcaaacacaacaacaacttcatcaccaacacgaagaacaagattagcgttatgggtctcttcctttctaggaatttggcttgcaaattcatatacccttttcttttttccaataaggtttcaaaggatttgttccccaagcagttggagaacatgatgtctctggtctctcctcgtactggcaggcatttgcagcgc

SEQ ID NO: 80710 - DNA, 108 bp, Glycine max
  Clone ID: 700961306H1
caatgccgaagtctcaatttcgaaccccatttctggtttctcttccccttttgttattcatcttcaacctcaccccttcgcacgcactctatggagcatcctcacccg

SEQ ID NO: 80711 - DNA, 247 bp, Glycine max
  Clone ID: 700961308H1
ctattctggtgctggatttggatctaagagcaaatatatgtttgggaaagtgaccatccagctcaagcttgtggagggtgactctgctggaactgtcactgctttctatatgtcatcagacggcccaactcacaacgaatttgatttcgagtttttgggcaacaccactggtgaaccttactcagtccaaaccaacgtgtatgtgaatggcgttggcaacagggagcaaagactcaacctctggttc

SEQ ID NO: 80712 - DNA, 245 bp, Glycine max
  Clone ID: 700961309H1
cgaacctcaaacccaaaatccgaacctccgcttcggatcctaatccagtaatccctgatgggaacggaatgctacacttacatggggcgcagtttgagcgaactccgcatcaacgacgattcctcttcctccgccttcagcgactgcaacagtgacagatctggcgaattcgccaccgcttcttcgcaaacgcggcggtttctcatcgcctgcgccaccgaaaattccgacgacttgatccgcca

SEQ ID NO: 80713 - DNA, 242 bp, Glycine max
  Clone ID: 700961312H1
aagcgataagcaatagaatcagagagagagagaaagagagtctcttgctctgtatctttgatttgatcattccaatcttcaatttttctatatatccatcaatccgctgagtgcaaagttctaatctttcgcctattgggttctactcctttctctcttcgtttccgatcgatccaattttcttcccatggctacgatcggacacaacaatctcaatgccaaattggttcttctcggggaca

SEQ ID NO: 80714 - DNA, 240 bp, Glycine max
  unsure (1)..(240): unsure at all n locations
  Clone ID: 700961313H1
ctcaaaactacaataatgggttcttcttctcctccggacactagcaagaccccaaagctagaccgatacaacagctanatcaggagactcaacagcaccaaactcctcaacgcctcctctaaactcctcttccgtgccactatcttagtcgcactcatcctcgtcttcctcttcaccttcaactaccctccgctcgccccagacttcatctcccaccgccaactccactcccactcccac

SEQ ID NO: 80715 - DNA, 229 bp, Glycine max
  Clone ID: 700961314H1
tgaactcagtttgacaactggaaatgctggtggaagattagcatgtggtaccaaaaaaaaaaatttaaattcgatcagttctcttcttttcatattcacctattcatccattccaacatgatgttatttggtttactctttgcctcaatgttctaagatgaactattttctataacatcatgatcaatttccgttttatgataaaaaaaagtacaacgatttccacaca

SEQ ID NO: 80716 - DNA, 245 bp, Glycine max
  Clone ID: 700961315H1
ctcgagcgtatcggctcatggtaggtactctttggaaatgactgctgttatttacacggactgggttttcactgatcaagcattgcctaatgatcttgtcaagagaggagttgcggttaaggatccatctgctccccatggagttcggcttttgattgaggactatccttatgcttctgatgggctagagatatgggatgccatcaagtcctgggtgcatgaatatgtctcattctactacaagt

SEQ ID NO: 80717 - DNA, 245 bp, Glycine max
  Clone ID: 700961317H1
gcacccttctacatttccgtcaaagagaaccttccagaacctcacttcaatggcgagcgtgttgagcctaagaatcccagaggtgtccttcacgggaagggtttggaggatgtcattcagtttttcaatagtggaagctataaccctagttataacacctctcttgaaggtcgtcggaagttgtttgctattactaaggaggaggtgttgttgttgaacaagcgaatgcccgacttggcaattgc

SEQ ID NO: 80718 - DNA, 242 bp, Glycine max
  Clone ID: 700961318H1
ggattttctttgggaaaagctgagtctgatcgactcaacctcaacctgcttcctgcattgctctctccaaatttctagggtttggttcagagagagaggaacctaaaatgtctcaaaacgggaagctgatgccaaatctagaccagcacagcaccaagcttctcaatctcactgttctccaacgaatcgaccccttcgttgaagaaatctcatcaccgccgcacatgtcaccttctacgagt

SEQ ID NO: 80719 - DNA, 238 bp, Glycine max
  Clone ID: 700961320H1
accaccgccgccgcagagagaacaacaacaacaacacgttccattctcgaggagagactggttgggttcgatggagaaggagttggtggaattgtacgaagcggcgaagaaggcggcggatgctgccatctccggcgacggcaaacatgaggaaagccgatgcatcgatgcgctcgagcagctcaagaagtttcccgttaattacaagattctcgtcaacacccaggtgggtaaacat

SEQ ID NO: 80720 - DNA, 119 bp, Glycine max
  Clone ID: 700961321H1
gtaaactcgtaattcttctcgagcatcatcaatgcatcaacatgtccatgacatttaaaacaactcatttattactatcactctcaacctaatccacctcaactctcttcttactctct

SEQ ID NO: 80721 - DNA, 240 bp, Glycine max
  Clone ID: 700961322H1
gtttagtttcgaaccctttccttttccttccttctccgcctcaccaccctaacccaagcctcgctctttctctctccaaaatctctctccctcccaccgttatttagggtttggcagatctcgatccgtcacaatggtcgttcgcaagcgcggtaggcccgacgtcaaccttaacggcgccgttcagaagaccaagcaagaattggagtccttatcaagtggtgtaggaagcaaatcgaa

SEQ ID NO: 80722 - DNA, 109 bp, Glycine max
  Clone ID: 700961323H1
ctgaaaactaaggggaaaaaaactcaactttgaaattcttaaaaccctaactggtccgaaccattggagccaccgtgcaatagttcctcctctcactctctcccgcaac

SEQ ID NO: 80723 - DNA, 234 bp, Glycine max
  Clone ID: 700961325H1
cttttgactccaaaatttgggagttaacaaaatccaatgctggactgagcttcactaaagatgacttgattgcctcattgactctgaatgacaaaggtgatgctttgaatgctgcatattaccatgtagttaaccccttgaccaacactgctgttggtgctgaagtgacccatagattctcaactaatgagaacactctcacccttggtacccagcatcagttggatccattga

SEQ ID NO: 80724 - DNA, 214 bp, Glycine max
  Clone ID: 700961328H1
cttcttcagtggttgtagctactagaacactagtttgttgagcacttcgatcaggcagtggacggttgcttccgctctccttcttctctggctcctctttctctgtgcagatcaaggtcgaaagtttcaggcgaatgtcgagtgagagtccgacgagcttgtagatcctccgaagttcgagtacaagatcggtgctgtgcctcatggccttgcc

SEQ ID NO: 80725 - DNA, 63 bp, Glycine max
  Clone ID: 700961329H1
gttgggttgttatgataaaaaccagaatttggatattccatttggggggtcactctaattgtc

SEQ ID NO: 80726 - DNA, 242 bp, Glycine max
  Clone ID: 700961330H1
tgagagatgaggtcgctgtcacagcagtcatggtgtacgtcaaggctcataaatcaaaagcctacgtcaagagatatcaagtcgagttcaagagaagatgagatggatgaaccgattaccgtgccaggatgcggttgattaatcaggacaagttcaaatataacactccgaaataccgatttgttgttcgctttagcaacaaggacattgttgcactaatactatctgctagcattgctggc

SEQ ID NO: 80727 - DNA, 240 bp, Glycine max
  Clone ID: 700961331H1
gaagaagatgaagaatctaccaaagggaatgagtatttttctaggcaaaggaatgtgatacagactcctggttccaacacaaaactgaacagaatcaactcagagccaccacctgagagactccgtgcagaatacatctgctccatttgatggccataagcagacataacttcaagctgtatctagtatctatccagaatccagttgaagtaacacctcccccttgtgtccagaaccaga

SEQ ID NO: 80728 - DNA, 238 bp, Glycine max
  Clone ID: 700961332H1
gaaatcgctcttcaaccgcaacaaggacgcgatctcctcccacacggcgtcccgatcgacgtctttatccgtgcgttcacgcacgcgtatggcggatgagctggagcaggtgttcaacaagttcgacgtgaacggcgacggcaagatctcggcgtcggagctggggtcgatcatggggagcctggggcagccggcgaccgagctggagctggacaacatgatccgcgaggttgacggc

SEQ ID NO: 80729 - DNA, 240 bp, Glycine max
  Clone ID: 700961333H1
agacggttgagttcagagttgaaacttgagagagtgtcgttgattccaatttacgacggaggcgtgaggaatcacaatctccaccggcgaaacctgtaactgttggcgacgctcaaaactcgcactacgccgatagtgatggagagtgcttttgcaagcgcctctgcgattactgaccagaggcagaagatagagcagtataagcaaatacttgctgctgtcatttcatctaatgacatt

SEQ ID NO: 80730 - DNA, 241 bp, Glycine max
  Clone ID: 700961334H1
atccaagatttccctcttgtaagagagagagataaaagaaaatcagcgtcctacagcaccccaccatgggaacccaccaagcacttgtttttatcatgtttttccatcctatatatgactcataagcacacacaagtgtcattcacagccattctttatctctcatttttttaggctcataaatcttttttatgggtttcagggtcactactatcctgtctctgctctccctgttttggct

SEQ ID NO: 80731 - DNA, 237 bp, Glycine max
  Clone ID: 700961336H1
gacaaagtgttgaaatggctggatgagcagccaggttcttctgttgtctttctttgttttgggagcatgggagggtttggtccttctcaaacaagggaaatagcactagcacttcagggtagtggggtaaggttcttgtgggctatgcgttctcccccaacctcagacaatgcagacagaaccttaccagaaggtttcttggaatggatggaggaaggtaaaggaatggtatgtgga

SEQ ID NO: 80732 - DNA, 109 bp, Glycine max
  Clone ID: 700961340H1
atacacgcacgcacagttcaaagctctctccatcatcatcaacgtagatttcctcttccattttcacgtgattcccaatctcacacctccaccgattccacacaacata

SEQ ID NO: 80733 - DNA, 242 bp, Glycine max
  Clone ID: 700961341H1
atctctagccacaccttctctaattccacacgccaattcaaataagcaggatcattccaatatgggcaacagaattgttatgggaaatccccttctctttatctctttcttcatcttcagctttagtttcttggaggctcaaaaggctccagcagtttatgtgtttggagactcacttgttgatgttggcaacaacaattacttgagtctctccattgaaaaggcaattcttcctcactatg

SEQ ID NO: 80734 - DNA, 241 bp, Glycine max
  Clone ID: 700961345H1
attgaaatgcatgccaagacagactcggaggtaacaagcctggatgcgtcgtccagcacaaggtctcctcggcgagcagtgtactacgttcagagcccttcccacgatggggagaaaacgacgacgtcgttgcactccacccctgttctcagccccatgggttcccctcctcactctcactcctcctccagccgcttctccgcttcacgccaccgcaataaccataataataaatcttgga

SEQ ID NO: 80735 - DNA, 241 bp, Glycine max
  Clone ID: 700961347H1
ctctctctctcccaattttctctcttattgaggctagcaaaagagagcaaaaaaactaaaaaatgcctgcggtcggaggtataaacaccggacggggcaaggagtaccctggaagcctcactctatttgtgacggtaacatgtatagttgcagccatgggtggtttaatcttcggttacgatatcggaatttcaggtggagtgacgtccatggatccgtttctgctcaagttttttccgtc

SEQ ID NO: 80736 - DNA, 244 bp, Glycine max
  Clone ID: 700961348H1
ctcctaaaacatctcaatgggttcttcttctattacaacatcgccctaaaccatgaccatggctgcgatcgtgctcctgttcacggtctttgccgtttcctccgccctagacatgtcgataatctcgtacgacagcgcccacgcggacaaggccgccacgttgcgcaccgaggaggagctgatgtccatgtacgagcagtggctcgtgaagcacgggaaggtgtacaacgcgctcggcgagaag

SEQ ID NO: 80737 - DNA, 238 bp, Glycine max
  Clone ID: 700961349H1
gaaaaggaaagaaaactctcaaaaaactattatagcaatggcagaacaaaaccaaaaccaaacaactgaagctggaaggcaccaagaggttggtcacaagagccttctccagagtgatgctctttaccagtatattctggagacaagtgtctacccaagagaacctgaatccatgaaagaactgagagagttgacagcaaaacacccatggaacatcatgacaacctctgcagacgaa

SEQ ID NO: 80738 - DNA, 233 bp, Glycine max
  Clone ID: 700961350H1
tgatgacagcgtcctcaataggtcgttgttcactaagttggtgcaagaggggtatatggtaggcgtgctgggtctcgtcaaaaggtgtactgtgaagcagatgaagtgcaggctgctattgtgacttgtgggggtctgtgtcctgggcttacactgtcattagggtattagtgtgtggcttacaccatatgtatggggtgaagtctgtcttggaatcaatggaggatatatgg

SEQ ID NO: 80739 - DNA, 91 bp, Glycine max
  Clone ID: 700961353H1
gcacatcttctattactccgggcacaatgtgcctcagtatggccgtgacattggctcagggtccatctcgctctcactcaccacaattatc

SEQ ID NO: 80740 - DNA, 232 bp, Glycine max
  Clone ID: 700961354H1
aacgaaaagagagcatgaagatgaattgctactggtggcatgccctgataatgagtggttgtgtgttgggcttgtgcgtgggcataggaggttgtgtatgtgtggtggagaacgagaatggaagaatcatcattgatattagtcacaggtaccatcctgatatgcctgcctgggaatccaaggatagccttgggcagtttgtgtggcttacaagaagcatggccaatggttc

SEQ ID NO: 80741 - DNA, 203 bp, Glycine max
  unsure (1)..(203): unsure at all n locations
  Clone ID: 700961357H1
ccaggaggatcaagacgtctttgtcacaattttatagttatagatcgatggctagngggtcttatcggcgtatggaactggtattgctgctaagacgctatagtcaattgggatcaatcgcaaagatgctcgagtggaagtagataatataattggaaggtgtagtggatttggggctgtgtgagagtccatgtattccccgg

SEQ ID NO: 80742 - DNA, 236 bp, Glycine max
  Clone ID: 700961359H1
gttgaatcctataaaaaatttcttggtgggacagcattattcgtgatctatgaattttgtttggaatgaggtctaggagaagggtgtgggggtttcatgatgacaaactcttcagttcttcatttgctaaccttttcatgaatcctttctgctttagaaaatactgagcaatcactgaattggagtactcgcctaaagatagctctcggttctgccaggggattggcttacttgca

SEQ ID NO: 80743 - DNA, 98 bp, Glycine max
  Clone ID: 700961362H1
ggatcttccatttgactcttgtactgaacgacttttcaagagaatcaaaccatggcagttcgagtatacggtccccactgtgcttccagacaacatgc

SEQ ID NO: 80744 - DNA, 243 bp, Glycine max
  Clone ID: 700961365H1
gctcgttctcttgcgaatcggccgacttcaatggaatttggcaaatagtatccatctctccaacgatcccatttcccttgacatctctacgtgaagatccttgtgtcgcatagagctagttaaaatgtctgagggaaatgcagggaaaggaaagagaatcgccatcattggcgtctcagccttattgttggtggctatggttgtggcaatcacagttggggtcaatctcaatgagaatggttc

SEQ ID NO: 80745 - DNA, 232 bp, Glycine max
  Clone ID: 700961367H1
cttgaagagaaaacaaagctcatggaagagcggtggggaaaggcacatggtcttcttgttgagggaggacttacatatgactcataagacaatcagttgctaatgccaacatagctttcagggaaggtgtttgtgaactttttgagtttttggagttgtaattttcaggaaagagatgctcctgtgttgatattctcagcagggcttgctgatatcattgaagaggtcctaa

SEQ ID NO: 80746 - DNA, 231 bp, Glycine max
  Clone ID: 700961368H1
ctgagcccttgtctgtgtttgttgacacttatggcactgggaagatccctgacaaggaaatcctcagcattgtgaaggagagttttgacttcaggcctggcatgatctccatcaaccttgatctcaagaggggtggaaatggcaggttcttgaagactgctgcatatggacactttggcagagatgaccctgacttcacatgggaagtggtgaagccactcaagggggaga

SEQ ID NO: 80747 - DNA, 121 bp, Glycine max
  Clone ID: 700961369H1
cctcgtgcgtgcgtgctccctcgcgtagatcggcaatggcggagaccgagacgtttgctttccaggctgagatcaagcagctcctcagtctcatcagcaacaccgtctactccaacaagga

SEQ ID NO: 80748 - DNA, 234 bp, Glycine max
  Clone ID: 700961370H1
cacttgtattgatgaccaaagaagcaaggcaaagggaaaagttaaagcttctggatttggtctggatgataattctagtaacacagaagagtatttgattggggtgatatctgacatgctaaaggaacttggcaaaggagatagtgtatctacttttgaatttatcggtagtggtgttgttgaagccttgctaaattattgtgcttgtgggtatttctctaaagatcgaatatc

SEQ ID NO: 80749 - DNA, 238 bp, Glycine max
  Clone ID: 700961372H1
gaatttgacaaaaagtagccactgccccaacgatcccatttcccttgacttctctacgtgaagctccttgttttgcataggagctagttgaaatgtccgagggaaatgcagggaaaggaaagaaaatcgccatcattggtgtctcaaccttattgttggtggctatggttgtggcggtcacaattggggtcaatctcaatgagaatggttccaacaatgatatagaggacaacaagaa

SEQ ID NO: 80750 - DNA, 234 bp, Glycine max
  Clone ID: 700961373H1
caagatctaagagagattttgctgctctttgaagaagggtgtttgcttgattttggagatgtcgctgctctcagatctcatcaaccttaacctctcagacactactgagaaggtgatcgcagagtacatatggatcggtggatcaggaatggacctgaggagcaaagcaaggactctcccaggaccagttagcgacccttcaaagcttcccaagtggaactatgatggttccag

SEQ ID NO: 80751 - DNA, 233 bp, Glycine max
  Clone ID: 700961375H1
agataattgagcatactgaaaaggttttcttcaagaaaaccattgataatttgaggcatgttgcagatatatgttgtaaagagttgaaggatattccatacattatttgcccttataaaccagaagggtccatggctatgatggtgaaactaaacctttcacttctggaggatattagcgatgatattgatttctgtttcaagcttgctaaggcaggaatctgtatcattctc

SEQ ID NO: 80752 - DNA, 233 bp, Glycine max
  Clone ID: 700961376H1
cttggcaagaataaaacaactatatttgaacagcgaatggggaacattgacaatgctgttcctttctttggggatgaatttaacaaaatctatccacttattatggttatatacaccattttagttgcaagcaacttctttgataaagtatttgattttctgggaagttggaagagatatattttcaaaactgaagctgaagatatggatggttttgatccatctggattaat

SEQ ID NO: 80753 - DNA, 57 bp, Glycine max
  Clone ID: 700961377H1
aaaagtcagcgccttcttttgtcttttctctctctcaaaaaaattccacacaacata

SEQ ID NO: 80754 - DNA, 235 bp, Glycine max
  Clone ID: 700961379H1
aacaattgtatgtgacaggattgtctcctaggattaccaagagagaactggagaaacattttgctgctgaaggaaaagtgatagatgtccatctggtagttgatccttggacaagggaatcccgtgggtttggctttgtgacaatggagactcttgaggaggctgaacgatgtgtaaagtatctgaatcgctctgtacttgaagggcgtgtcatcacggtggagaaggctaaaag

SEQ ID NO: 80755 - DNA, 236 bp, Glycine max
  Clone ID: 700961380H1
gaaatcgctcttcaaccgcaacaaggacgcgatctcctcacacacggcgtcccgatcgacgtctttatccgtgcgttcacgcagcgtatggcggatgagctggagcaggtgttcaacaagttcgacgtgaacggcgacggcaagatctcggcgtcggagctggggtcgatcatggggagcctggggcagccggcgacggagctggagctggacaacatgatccgcgaggttgacgg

SEQ ID NO: 80756 - DNA, 229 bp, Glycine max
  Clone ID: 700961383H1
tgagtcgaatgggagagagattcatgttcatattttccccttcgtgcccgtcaagtttctgattctctttttcaattcctttctctttcaggtgattttttctccacgataaagttgcgatttcgccggtgtcgttttgccgcaagatggtgtcgttttcgggaatataaaatcagggttgaagttctttcttcagcattgaatcttggttactaggttggttttttag

SEQ ID NO: 80757 - DNA, 245 bp, Glycine max
  Clone ID: 700960673H1
gcagagaattctatttaatacttgttgaatttctattcataagaatagtgacagttactatttttctgttttaatggttctctattcaacaataggttggaatgtcaagctatgggataattttactctgaataggaaaaaggaaaaaagaaaagtagaaagaagtcttttattttaaaacacagttcagtcatgtaataagctcagtcaaatatattcacacatttgatcttgattcagtattt

SEQ ID NO: 80758 - DNA, 243 bp, Glycine max
  Clone ID: 700960675H1
attaaactcactttctctgtagccatagaaattcacattttatcttttgcattgtgcaacttcctcgcgccatggctgctaccatcatcacatgcaagctctcactgcttttaagccttctctcagtttcactattgctgggtgtgagttcatcagatacccttcagaatgtaggggcaattcccccaacatgcaagcgcatagagtgtcccagctatgatgtcattcactttggcaacggct

SEQ ID NO: 80759 - DNA, 239 bp, Glycine max
  Clone ID: 700960676H1
ttcccttttcagctttcattggtgtggcctagctgttttctcaatgagaaagccttcatctctgcaaagcgcacttttgcgctttggggttcccttgttgcttgttatcaccttctgttatgctacttctactgctgcagcaacaactcaagtttcagggaatgcagagctgccaaagacaaacctaaatgggcatgatgaagaagcaaaattcggattttttcatcataaaccaatat

SEQ ID NO: 80760 - DNA, 245 bp, Glycine max
  Clone ID: 700960677H1
gggaaaccaactaaggaataccctttcaaaatggcttcttctgtgtcatccatggtttctaccaccctcctcctaattaccatctgcacactgtcctcacttctgtcagttttatctgcagcaacagaggagggacgaacaaggccattcaaaagggtctatgcctttggagactctttcacagacactggcaactcccaaaatgcagaaggtccaagtggctttggccatgtttcaaactctcc

SEQ ID NO: 80761 - DNA, 246 bp, Glycine max
  Clone ID: 700960678H1
cgtgcctctagggttatcatttctccatttccattttctctctcacttttcaagaatcgtaagctatgggaaagtcttacccaactgtgagtgctgattaccagaaggccgttgagaaggcgaagaagaagctcagaggcttcatcgctgagaagagatgcgctcctctaatgctccgtttggcatggcactctgctggaacctttgacaagggcacgaagaccggtggacccttcggaaccatca

SEQ ID NO: 80762 - DNA, 247 bp, Glycine max
  Clone ID: 700960679H1
gttcaaactcactccctctcccccacctttcatttccaccttctctcccaattaaccaccgacaccaacctaccttctctcggccatgccaccgccgccctcaagctgcaaaaggtctaccggagttaccgtacccgccgcaggttggccgactccgccgttgtcgccgaggagctatggtggcaagccatagactatgtaagactaaaccacagcaccatctcgttctttaatttgccggaaactg

SEQ ID NO: 80763 - DNA, 246 bp, Glycine max
  Clone ID: 700960680H1
atcgaagggatgaacggccaaaaccttgacggccgtaacatcactgttaacgaagctcagtcccgtggtggcggtggcggcggaggcggtggaggtggtggatatggtggtggtcgcggtggtggatatggtggtggtggtcgcggtggtggagggggatacaaccgtagcggtggcggtggaggctatggcggcggcggtggatatggcggtggcggtggcggtggctatggcggtggcagagac

SEQ ID NO: 80764 - DNA, 245 bp, Glycine max
  Clone ID: 700960681H1
aatcaggagaatgaattgagctgtggcactgttcaatcatttgattagttgaatgaatcttttcttgttggcttttagatcaatatcagacgattttcgtatctgaaattttgagaatagcacatttatgactttgctaaatcttttttgctaaggttgaatttttttcgtttttacaagtatgagtggtatattttattacacaacattcccattatttatatgcgtactttctgttctgcaat

SEQ ID NO: 80765 - DNA, 244 bp, Glycine max
  Clone ID: 700960682H1
ctactttcagctcctaagagcacgcatcactgttgcacttcttactcgttctccctcttttttttcttcttcttcttcttcgctaaaccccccctttatttttcctatctcactaacatcgatgggagacgagaataagaccaagtcccctgcttccggcgtgtggtccaccatcaagcctttcgtcaatggcggacctccggcatgctcgccacctgcgtcattcaacccatcgatatgatcc

SEQ ID NO: 80766 - DNA, 245 bp, Glycine max
  Clone ID: 700960684H1
atcgattccggtcgaacatggatggtcaatcgccggagaaactaatactggtgaaccgcgagccaaacggcgtcgcactggtgacgattaaccgtcccggttcccttaactcgctgacccggcccatgatggtggacctggctcaggctttcaagaggctcgaccgggacgagttggtgcgggtcattatattaaccgggtcgggccggtcattctgttcgggcgtggatctcacggccgctgag

SEQ ID NO: 80767 - DNA, 229 bp, Glycine max
  Clone ID: 700960685H1
gccaaatgcatgcttttgagagccattattatccttatcctgttgagaacccacttcattatgttcctatttatatggttgctcacggttaccctcgtgagtattctcaggtctttcagtattttgttgtgatagactttgtggctacttgtgacaaagataaaaacccccatcctcaagacataattcagtttccatctgttatagtgagtagcatcactggccagct

SEQ ID NO: 80768 - DNA, 103 bp, Glycine max
  Clone ID: 700960687H1
aggacttggagctttcaaaacaaagttttaaggaagaaatgcaacagattatggaagaaaacaggactttgcatgaacttaacttctcttccacacaacatac

SEQ ID NO: 80769 - DNA, 241 bp, Glycine max
  Clone ID: 700960688H1
catgtgcaaatttgggcttttgaaaaatagtgctagactggttagggtttgcttgtagaagtttctttttcttttttgggaagggggttgccccgaagccgtttatcgttacaccctaaggtcacaataaggatctcccaattgttgaaacagttagagatgtgcttgaacagtgagacatatttgtcaatactaatcaatctttataaatttgtccttgtgccttccacgtatgccaaag

SEQ ID NO: 80770 - DNA, 242 bp, Glycine max
  Clone ID: 700960689H1
gtgacacaccagatcaaagacacctgagccattcaattcccctcctttattgctttcaagtttcaacactaattttattatctgaaaaaatggctttcaaagtttcgtttttccttgcacttgttctagtttccaatatcctcctccttgatacaacagctgctggacgcagcattggcgaaaactccaactcagaggaaaagaaagagcctgagttcttgttcaagcatgaaggtggggtg

SEQ ID NO: 80771 - DNA, 241 bp, Glycine max
  Clone ID: 700960691H1
catccctcttgatttgtagtttgttttgtgctttagataaaagttctgccaaatcaagaggggttttaagatcatagtgtgtgttttgcaacaatggctaagttctttgctgctatgatcttggcactctttgccatttccatacttcaaacagtggtaatggctgctaatgaacaaggaggccacttgtatgacaacaagagcaaatatggaagtggaagtgtcaagagttaccaatgcc

SEQ ID NO: 80772 - DNA, 85 bp, Glycine max
  Clone ID: 700960692H1
gccgaacccggcctttagggaaaaaagaaagaaagataaaaaaaaaacccttctttcccctccttctctcttccatagggttttt

SEQ ID NO: 80773 - DNA, 256 bp, Glycine max
  Clone ID: 700960695H1
ctcgagccgattcggctcgaggtctgctgtctttgttgcctctacgcttatggagaatggtggtgttcctcagtctgctactcctgaaactcttcttaaggaggctattcatgttatcagctgtggttatgaggataaaactgattggggaagtgagataggatggatttatggttctgtcacagaagatattcttaccggatttaagatgcatgcccgcggttggcggtctatatactgcatgcctaagcgccca

SEQ ID NO: 80774 - DNA, 246 bp, Glycine max
  Clone ID: 700960696H1
cagacaacaatttcgggaatccgctggctatgactgcagttgtggtcgtcccattgggccttctcttcttcgcttccggcctcatcgttaacctcattcaggcaatatgctacgtggttgtgcggccggtgtcgaagaatctgtaccggcggatgaacagggtggtggcggagctgctctggctggagctcgtgtggattattgattggtgggccggtgttaaggttcaagtattcacagatcctg

SEQ ID NO: 80775 - DNA, 210 bp, Glycine max
  Clone ID: 700960701H1
atatattgtagcttaataatttctatttcaaacagtcaaatttattctaatttcatccaaataatcgtgttcgtgggtgcaagtcagttattctttcttatcttaatatacacgcaaaggcaagggaaattttttttcgaggaagcgcacagcagcagctataccacgttgcttgaagaaactgataaaaagcgctgccgttgtgtcttt

SEQ ID NO: 80776 - DNA, 211 bp, Glycine max
  Clone ID: 700960703H1
aactagcaacaattcacaaacacaaaaccgccaccaccaacacacaatggcacgccaagtgattgcaatcgccgctctactcatggtagccattgctggtgtggccctggccgatgaagccccatcagcatcacctaagtcagcaccaacaccatcatcattaccaaaagcaccaacatcatcaccgcagcaccggcaccatcatcctcca

SEQ ID NO: 80777 - DNA, 65 bp, Glycine max
  Clone ID: 700960706H1
caagatactaaggctgcaacagcagggaagaatttgtacattagattcagttgcactaccgggga

SEQ ID NO: 80778 - DNA, 213 bp, Glycine max
  Clone ID: 700960709H1
agaacagagaacaacagttccatctatggttcgaccccaccaaggacttccacacatactccgtcctatggaatcctgcaagcatcatattctctgtggacgggaccccaataagggagttcaagaatttggagacaaaaggggttccattcccaaagagccaacccatgagaatatactctagtctttggaacgctgaggattgggccacaa

SEQ ID NO: 80779 - DNA, 213 bp, Glycine max
  Clone ID: 700960711H1
ttctggcacccgcaatgcaacttctggctgggtcaaagatcattgaagtggacaacaatgtacgagaggaccgagcactgttaaacggagcacagaagcatacttggtactttgatagctgttggtgaggcagttgcctatgttctttcggggatgtatggtagtgtgggcacactcggagtaggaaatgctatcctcatcattatccagctc

SEQ ID NO: 80780 - DNA, 210 bp, Glycine max
  Clone ID: 700960712H1
caaagatcgtgtgatcgaaatcagtgcccgaatggaccctcattctgtggtggacctgactgaggataaagatgttgatgttgagttcatgtacactgcaaaatggaaggaaacagatacatcttttgagaagagaatggataaatactctcaatcttcttctttgccacatcacttggagattcactggttctcaatcataaactcctg

SEQ ID NO: 80781 - DNA, 197 bp, Glycine max
  Clone ID: 700960713H1
acagctgtcaatgttcggaacaagttggatgagagcctcctcattcattggtctgggattcagcaaaggaggagttcgtggcaagatggtgttctacgcacaaactgtcctattcctgcaaagtggaactggacttaccagtttcaggtgaaggatcaaattggaagctttttctacttcccttcccttcatcttca

SEQ ID NO: 80782 - DNA, 217 bp, Glycine max
  Clone ID: 700960715H1
cactcgagcacaatcgcgctcgagggcctatgcccgtccagttgcaggaatccatgtacttgctgacatgcaaaatatggatgttcttgaatttgaagatcgtaaacttgtcccccttccacctgctgatccaccacccccattatacttctggtgaaacccaaggaggagttgaccgaagtgatgtgaaacccttgcagattattcagcctgaagg

SEQ ID NO: 80783 - DNA, 212 bp, Glycine max
  Clone ID: 700960716H1
agcaacttggcacagcgtgtccatgggtcagactcacacccgcaagcaaaagaaatagctcagtctcattgagaaggagcaattgtggcccaaaatgttcggtgtcccaattggaattgaagagtgagagtgagagcaaaacgaagccgtatccagcagaggcatcgaggaccataatggagttggctaaggtgggcacgctgtgtacgttg

SEQ ID NO: 80784 - DNA, 209 bp, Glycine max
  Clone ID: 700960719H1
attcagtgcaagaggcattcacaggtttcactgacaaggaaagggaagacaaattcagaaaccgtgttaagcggtatgtgggcatatggtgttgtgtgccggatcacactcctggtcacatatattatgatatgtactgggatgagaaaccaggatggaaagcagttcctcctcaaacttctgaggatgatcatccaccttattgaaat

SEQ ID NO: 80785 - DNA, 209 bp, Glycine max
  Clone ID: 700960724H1
gaaagaaatgtgggagaagttgagaggtaaaaggctaatgtttgttggagattcactaaatagagggcaatggatatctatggtatgtttgttacaatcagtaattcctgctgataagagatcaatgtcaccaaatgcccatctcaccattttcagagcagaggagcacaatgcgactgtggaatttctctgggctcctcttcttgctg

SEQ ID NO: 80786 - DNA, 95 bp, Glycine max
  Clone ID: 700960725H1
gagcaatgatctagctcgtcctgttcttggagggtctagtgcctatccatatcctcgcaggggaagaaccagtagaaaaccaacaacaaaagact

SEQ ID NO: 80787 - DNA, 208 bp, Glycine max
  Clone ID: 700960729H1
ataaggaataccctttcaaaatggcttcttctgtgtcatccatggtttctaccaccctcctcctaattaccatctgcacactgtcatcacttctgtcagttgcatctgcagcaacagaggagggacgaacaaggccattcaaaagggcctatgcctttggagactctttcacagacactggcaacacccacaatgcagaaggtccaag

SEQ ID NO: 80788 - DNA, 209 bp, Glycine max
  Clone ID: 700960731H1
attttgcaaacaagttggtgcaattttttcagaaggtctgggaggagtcttctggtgaaagtctgctgcagatacagcttcttgttgctctgaggaactttgtggttgctcttggttaccagtcacccatttgctacaatatactactgccaattctggagaatgggattgatattaatagtccagatgaactcaatctcctagaagat

SEQ ID NO: 80789 - DNA, 208 bp, Glycine max
  Clone ID: 700960732H1
cagcgctctattagatatcttacgaaatgctcatgatcttctttcacaatgtgatataagacttcctgagattgaagctaacgagaactatgttgattcgggaccaccatttctcatccttctgcatcctgctctcggtcctctttgggaagtcactaagcaaaaattctatggtggttccatatcagagggctccgagttacaaata

SEQ ID NO: 80790 - DNA, 208 bp, Glycine max
  Clone ID: 700960734H1
ttcacagctttcttggccaaaaatgaaacctactgatgtgcagaagtatacaaaggtgtttatggaaccccctactcccacggataggaaaatcactggggagcaggcacgcagtatatttttaagctggagattacccatagatgtcttaaagaaggtgtgggacttgtctgatcaggacaatgatagcatgctttcattgaaggag

SEQ ID NO: 80791 - DNA, 207 bp, Glycine max
  Clone ID: 700960738H1
atgccgcagagtcccccgcactgtcgcatccgccgcacgaatccgcgacttctacatggagatttctttccacttcgagagctccgtcattcccttcattggtcgcattgcgccttccgacacttaccgcacttggaagcgcggctctaacctccgcgccgacatgacccttgcaggattcgacggcttccgcatacagcgttcgga

SEQ ID NO: 80792 - DNA, 208 bp, Glycine max
  Clone ID: 700960740H1
agcaaattttaggccgctgaaagctactctctctgggcttccagaccgggtttttatgaaattagtagtctgtgcaaaaacaaatgaagttctaggtttgcatatgtgcggagaagatgctcctgaaattgtgcaggggtttgcagttgctcttaaagctcgcttgaccaaggctgactttgatgccactgtaggcattcacccaagt

SEQ ID NO: 80793 - DNA, 206 bp, Glycine max
  Clone ID: 700960741H1
actctctctaagatccacaaattgcttgtgaatgctagaaaccctagacagattcgattgcatgcgccaccatttcacatcaagggcgagcgcattcggttcttgcaagcaagcctggtactaccgctgcctcggcctcgacccctgaatttgaaccattcatcaccacctttcttcattcattcacggttttccttttcgactcg

SEQ ID NO: 80794 - DNA, 207 bp, Glycine max
  Clone ID: 700960743H1
gcccttcagggtcctgttccttcgtttgagaaaggtgtgaagttcactctcgatgggatcaatagtttttgtctgaaagatgttggaccctgcgattctcgtatctccactttgcttgatatcactgcgggtttcgggtatccccttcagttggcgcgttcctggactgggaacgatccttgtgatgattggagttttgttgtgtgt

SEQ ID NO: 80795 - DNA, 209 bp, Glycine max
  Clone ID: 700960744H1
aaagcgcaaagcattctccactacgattcgctcttccagaagcttccagaaaactccagatcacgcgtacaaagcaaacagcccgtaagccgaccggcggcaaggctccccggaagcagctggcgactaaggccgcccgcaagtctgctccggcgaccggcggagtgaagaagccacacaggttcaggccaggaaccgtggccctgagg

SEQ ID NO: 80796 - DNA, 127 bp, Glycine max
  Clone ID: 700960746H1
tccctcgccactttcttcctaattctctcaataagggtttcacttttttgcttaaacccgcggccacggcgacgagggcagcagtggcggcgcgcgcgtttttcggcggtttttctgcacaaaataa

SEQ ID NO: 80797 - DNA, 206 bp, Glycine max
  Clone ID: 700960748H1
gcacaaagttggggattcagccatctcctgtggtggcagcgtttagctctagaggacccaactcgatcaccccgcagatccttaagccagatcttatcgcgccaggtgtcaacatcctagccgggtggtccaaggcggtgggacccaccgggttacacgttgataacaggcgcgtggatttcaacatcatttctggcacgtccatg

SEQ ID NO: 80798 - DNA, 204 bp, Glycine max
  Clone ID: 700960749H1
caaagaccacaatgagttccattatgtatcaaaagatgcagaggattcagatagaaataatgataccaagtggtggttgcctacacctaaggttcccgcaaacggtttatctgatgcagcaagaaggtttgttcagtatcagaaagattgtgtgaaccaagttcttaaagcagctatggccataaatgctcaaactctatcaga

SEQ ID NO: 80799 - DNA, 65 bp, Glycine max
  Clone ID: 700960750H1
ggtgtgcagcagggagctctgccgcctctaacaaaacagagttcagaacacaaaccctcgaaccg

SEQ ID NO: 80800 - DNA, 205 bp, Glycine max
  Clone ID: 700960751H1
ggtcaacgcatggagattgttgaactacctaaccatccttattttatcggtgctcaattccatcctgaatttaaacaaagaccaggaaaaccttctcctttgttcttaggattcattggagcagcatgtggacaattggatgctgtcttacagcgctcttcaattgttgataatggtctctcaaaaggagtcattaatgatatct

SEQ ID NO: 80801 - DNA, 207 bp, Glycine max
  Clone ID: 700960754H1
attctgttgttttttgcaaattcgcaacccacacagcaccccaccagccccctgagtgagtatggcgtctccattatcagctcaattggttcaatgtcagaactcaattccacctcttcagggtccacttagccaagatgtgtctaaggttcaaaggtcgcgtgtggtatgttacggtaccagatcaccgcttggttattatggtaa

SEQ ID NO: 80802 - DNA, 207 bp, Glycine max
  Clone ID: 700960756H1
attttcttcatagcactcacaaaacaacaactcatctcatcattattccctttctcactcagcacaccctaaacactaacaccatcaccaataataatggcatcatcctcatcaaccgttgctttgagaaccatctcctctttctctctgaaacctgccaccacaacaagatcattactcaacactagtacttcatccaccataacc

SEQ ID NO: 80803 - DNA, 207 bp, Glycine max
  Clone ID: 700960757H1
cctaacaacaacaatccccaccacatgtcggtgccagagtgcgagcaccacaaggggacgccagcggcgatcttccggcaagtgttctggtagctagtggcgttgcttttcatcgtgcctggtcacaattcttttgatatgggcaacacttagacccaccaaacccaccttcacgctccaagacgccaccgtctacgccttcaacgc

SEQ ID NO: 80804 - DNA, 205 bp, Glycine max
  Clone ID: 700960758H1
cgaagatctaccactcaacatttcaagagaaatgttgcaacagaacaagatcttgaaggtcatcagaaagaacttggttaagaagtgccttgagctcttctttgaaatagcagagaacaaggaggattacaacaagttctatgaggctttctccaagaacttgaagctaggtatccatgaggattcacagaacaagggaaagatt

SEQ ID NO: 80805 - DNA, 205 bp, Glycine max
  Clone ID: 700960759H1
cgtggaagaggctcacaacgtgagaatagtagggaaggggaatgaaatcgtgattcttgctcatgggttcggcacggaccaatcggtgtggaagcaccttgtaccgcatctggtcgatgattaccaagtgatcttgtacgacaacatgggtgctggtaccacgaacccagactacttcgacttcgaacgttactacacgatcgat

SEQ ID NO: 80806 - DNA, 173 bp, Glycine max
  Clone ID: 700960761H1
ctctccttctacattactatctccctcctacaaatttctaatgcttccattgcttcatctgactccatcatcaatggctctgagactgaaccctatccccacccaaaccttctccctcccccaaatgcccagcctcagatctccccgcttccgcatggcttccaccctccgct

SEQ ID NO: 80807 - DNA, 205 bp, Glycine max
  Clone ID: 700960763H1
aaataaagcacagaacagtcacagtgaatggcataaaaatgcatgttgcagagaaaggagagggtccagtggtgttgttcctccacggcttccctgagctctggtactcatggcgccatcagattctctctctcagctccctcggctaccgcgccgtcgctcccgatctccgtggctacggtgacaccgaagcaccaccttcaat

SEQ ID NO: 80808 - DNA, 204 bp, Glycine max
  Clone ID: 700960764H1
atgagccattcaattcccctcctttattgctttcaagtttcaacactaatttcattatctgcaaaaacggctttcaaagtttcgtttttccttgcacttgttctagtttccaatatcctcctccttgatacaacagctgctggacgcagcattggcgaaaactccaactcagaggaaaagaaagagctgagttcttgttcaagc

SEQ ID NO: 80809 - DNA, 205 bp, Glycine max
  Clone ID: 700960765H1
caggaacacacgcatctacgaaggaattcctgcagaaaaggtgcgtgaaataatgttgattgcttctgtctctgctaagtctgctgaaatgaagagtgggatccgattgacttcactcattcccaaaagcccttcttcttcacagggaaactctactaatttgccttcaccccaatcagtcaagagttccattcgcaggctgcaa

SEQ ID NO: 80810 - DNA, 83 bp, Glycine max
  Clone ID: 700960766H1
attgaggtggaaagctctgacaccatcgacaacgtcaaggccaagatccaggacaaggaaggaatccccccggaccagcaacg

SEQ ID NO: 80811 - DNA, 205 bp, Glycine max
  Clone ID: 700960769H1
gtgaaagtacaagttgcagggatggcctcaacctcctcctccacactctctacatcctactcatccacccttgttgatgccaaggctccaagtccaagacaatccccacaatgtgtctccactacacctgttcactctccttggaagaccactgctttctgtcgcaggattgcaagcaacgttatggcaatggctaccaccagag

SEQ ID NO: 80812 - DNA, 214 bp, Glycine max
  Clone ID: 700960770H1
cggctcgagcgtcgctttgaagcagtgaccgaccgtgcatccctttgtagtttccagcgctcaacacgcgcaacgacgatgatgcaaaccaatatcaccaccacaatcctcatcgcgttctcttcggtcaattcctcgaatgttctaccttgagccatgtccaacctcgttcagattcgcgtcgccgccgacgcaggcgacggcttcgactctc

SEQ ID NO: 80813 - DNA, 206 bp, Glycine max
  Clone ID: 700960772H1
aaactgaaccaaatcatcacacacacatactacgaagcaacaattcttctacaatggatctcctcattctggacaagaccctcataggtctcttcctcgctgcggtggtcgccatcgccgtctccaccctccgcggccggaaattcaagctcccaccgggcccactccccgtcccaatcttcggcaactggctccaagtcggcgac

SEQ ID NO: 80814 - DNA, 203 bp, Glycine max
  Clone ID: 700960775H1
agcaattgacataccaagacatattggcactgccttgtgcatggcagctgcttctaagaaagaccatgaaaatgaggggagagaactggtgcggatactgcttgcagcaggagctgatccatctgctcaagattcccagaatgggaggaccactttgcatacagctgctatgaataatgacgtggacttggttaaggttattt

SEQ ID NO: 80815 - DNA, 204 bp, Glycine max
  Clone ID: 700960777H1
cgtgagcgcgcgatggaagaagaagattttgatttcgagaagaaggtttcgataaaggaatcgatgtcgatgtcgatgtcgacagagcttgatccagccaaagttcttcttctgcttcgtggtttcctccaaattcagcaacgcatggcccaagcacattctaagctcaaaagtgggttttctgactacatggcctctggaggg

SEQ ID NO: 80816 - DNA, 204 bp, Glycine max
  Clone ID: 700960779H1
gagggccattcactccgtcacagtggatggagcttgaacaccaagccttgatctacaaatacatcagttcaaccgcccctgcgccaacccatctcatacccattagaaaagcacttgattctttgggcttctgcaacttttcaactggactcctaaggcccaacgcattgggatggggaggtttccatctgggattctcgaaca

SEQ ID NO: 80817 - DNA, 203 bp, Glycine max
  Clone ID: 700960780H1
ggaaatgatgctctggcagatacaactgatttccagcacacactcaaggaattgccatccccaccggaagtggtttatcttgaaaactatggtcatgttgacttcactttaagcttgcaagcaaaacaagatctttatgaccctatgattagttttttcaagtcatccggaaaattcagtagtacgcaatgtttgcttccttc

SEQ ID NO: 80818 - DNA, 89 bp, Glycine max
  Clone ID: 700960781H1
atcgctatggccactgttttcagaacccccactttccggcgtcagcgtccgcctccgccgcgcgccaccaagtcgccgaagccctcgcg

SEQ ID NO: 80819 - DNA, 204 bp, Glycine max
  Clone ID: 700960783H1
agacttatgtagatacgataaccataaccataccatagcttacaaattaagctccgctcactctctttctctctagactcccatgcagccattggtatgaatggcgtaaaggttgggacgacgtcgtctcagacgtaccttgaaggcaaggcagtgaaggagacgagagcgttgatggctgaactgtgtcgccatttccacaca

SEQ ID NO: 80820 - DNA, 71 bp, Glycine max
  Clone ID: 700960784H1
caaacacactcttttttgttatttgctaacttcccttgttcgtttcactccaacaatggactcccactctc

SEQ ID NO: 80821 - DNA, 203 bp, Glycine max
  Clone ID: 700960788H1
actcttttcaaggatgtgatggaaaaaaatataataccacaggttccactctttaacatactacaagaagtttgatggtgaaactgtcacggaggtggtccgtcctcatatagcaaggatgcagtatcgtgttaccagattgcccaagtatatgattctacacatgcgtcggtttactaagaataatttttttgtcgaaaaga

SEQ ID NO: 80822 - DNA, 203 bp, Glycine max
  Clone ID: 700960789H1
cgtgaagtgttcggattgcggcgacgtgagcagttcgctgcccgcgacgttgtgagaagtccactgaaccttatcattcagaggaagtaaagtcgctggtaggatcatcatctctttgagttgccattgaagaagaagctcagatcggaaaaattcacctctccaatcccaatcccatcgttgcaaatggttccttcgttcat

SEQ ID NO: 80823 - DNA, 202 bp, Glycine max
  Clone ID: 700960790H1
cacctcttcaaaaatctagatctcgctcttcctcaatctacgttacgctttcagtgaccacacctgtatggatctgactcagatctacacgccgatggtggttttggcctggtctttcatagatctgatgcatggaggctcagatctactgtacagagatactgtagataatcgatgagaagacagcagatccagccgcttc

SEQ ID NO: 80824 - DNA, 202 bp, Glycine max
  Clone ID: 700960793H1
ctaacatgagtcacgcatggacattattgttgacccaaattcttctggtggcggaggcaaagaaaaatgtcccagcggtgattgttttcggagactcctctgtggattctgggaacaataacgtcatagccacggttttgaagagcaacttcaagccctatggtcgtgacttcgaaggtggtcgtcccacgggacggttttg

SEQ ID NO: 80825 - DNA, 200 bp, Glycine max
  Clone ID: 700960794H1
attacattatccgattcagaattgtgtggactggaaactcctctgtccccaaacaggacgatgaaggaactgggcttggtttcaatgatgctgatggcagagttgttggacgtgatcgtcaacactctaagcaaagcagccatgaagaagggcatgaatgactttgtattcatcatgtactccaatgccttcgctgcatg

SEQ ID NO: 80826 - DNA, 202 bp, Glycine max
  Clone ID: 700960795H1
ttttcaaaatgacttctagcttctttgtgtttccctacttttatctctcatacattcactcaagagagagagagaagcatgttcaccggcacaaagcaaatctgtctagttttctggtgtcgcattaatttaagattaagattttagggagataagatacctatgaaaatacatcactaacaaataagttggctaatcacag

SEQ ID NO: 80827 - DNA, 269 bp, Glycine max
  Clone ID: 700960801H1
ggccttcgtcgaagaccacttcgaactcgccgtggaccttctttctcaggccattcacctcgaacccaacaaagccgaactctacgccgaccgagcccaagccaacatcaaactcaacaacttcactgaggctgttgctgatgctaacaaagcaattgaattgaattcttctctaccaaaagcatatttgcggaaaggtactgcgtgcatgaagcttgaggaatatgagactgctaaggctgctctagaggtgggtgcatcattgtctc

SEQ ID NO: 80828 - DNA, 267 bp, Glycine max
  Clone ID: 700960802H1
gctgtttcgccacctggaggagatttctctgatcctgtgacatctgcaatcctgagcatagttcaggttttctgggttttggacaaaaagcttgctcagaggaagcactttccttctgtaaactggcttatttcttatgcaaaatactcaacggcacttgaaaccttttatgagcaatttgatccagattttatcaacattaggacaaaggctcgtgaagttctgcaaagggaagatgaccgcaatgaaattgtgcagcttgtgggc

SEQ ID NO: 80829 - DNA, 133 bp, Glycine max
  Clone ID: 700960804H1
gaaaatgggttcttctttgtggactttgtgtctaattttggcttcactagcctcttctgcattctgtgcctatccacggaggccagtggatgttccattcggcagaaactacgttcccacttgggcttttgat

SEQ ID NO: 80830 - DNA, 262 bp, Glycine max
  Clone ID: 700960805H1
acttgtccttctttgcgagattgaatcgtaagcagcggctaccctaatcctctcctcttcctctctactaatttcagctatggccgacgaagctgtggttgttccagatcccacccagatcgatgtcaagctctttaaccgctggagcttcgacgatattgagattactgacatttctctggctgattatatcggagtggcgacatccaagcacgccacgtatggccctcacaccgccggcaggtactcggtgaagcggttc

SEQ ID NO: 80831 - DNA, 135 bp, Glycine max
  Clone ID: 700960806H1
gcagatcttcgtcaagaccctcaccggaaagaccatcacccttgaggtggagagctctgacaccatcgacaacgtcaaggccaagatccaggacatggaaggaattcccccggatcagcaacgttctcatcttcg

SEQ ID NO: 80832 - DNA, 182 bp, Glycine max
  Clone ID: 700960807H1
ttggtaaagacggagatctgagctgaagatgctggaaggacatcccaatgttgtcacacttcatgcacatgccatcgttgatattagtaagacgaaagaagcattcgttgtgatggaattttgtgagaggtctctggttaatgttctggagtatcgaagagtcgattattttgatgagaaac

SEQ ID NO: 80833 - DNA, 260 bp, Glycine max
  Clone ID: 700960808H1
ccgatcgatccaattctcttcccatgtctacgatcggacacaacaatctcaatgccaaattggttcttctcggggacatgggtgctgggaaatccagcctcgttttgcgctttgtcaagggtcaatttctcgaatttcaggaatcaacaataggggcagcgttcttttcacagacgctggcagtaaatgatgcgacagtgaagtttgagatttgggacacagcaggacaagagaggtaccatagcttggctcccatgtat

SEQ ID NO: 80834 - DNA, 261 bp, Glycine max
  Clone ID: 700960809H1
ctcgagccgcaacagcacaaagcgggttactgtctgttcaagctaccatctctctctcactttcttagtgcctccttgccagaagttaaaatggcccaagaaactttcctattcacatctgaatcagtgaacgaggggcaccttcacaagctctgtgaccagatctccgatgctgtgctcgatgcatgcttggagcaggaccctgacagcaaggttgcctgtgaaaactgcaccaagaccaacatggtgatggttttcgga

SEQ ID NO: 80835 - DNA, 254 bp, Glycine max
  Clone ID: 700960810H1
tttctccctgccttgtttcagttctttctttggtcactcactgctctctaacctagttccacatttttccactcatcaagtctctttctttcatctcatatttctcttcattcacatcacttctctgatctgtctcttcactctctttgacccagatcaaattttttaccttttgttcttctctcttactctccgttaatgctttgcttcaaaccattctcagaaaaacaatgcttccatctaggtctaccctc

SEQ ID NO: 80836 - DNA, 259 bp, Glycine max
  Clone ID: 700960811H1
gtgcattgccggtagaaaaactgttgttgaattagacaattagttaggtcttgtatgcacaaacttttcaacaaatacttttagttataggataagaaaatgagaatgtaaaatgaatccaactttgtccacaagttaaaatcaacttattccccttaattttttgcagaagttaaatgattaaatgaaagaacttctaacatgacgtggtgcagaagttgtttttaacttctagcaggatttgagtcatttaggaatc

SEQ ID NO: 80837 - DNA, 260 bp, Glycine max
  Clone ID: 700960812H1
atcatggacacatacattgatgatttgattgacgctgatgggtatttgccatggcaaggaccagagggtccttctggtatggatacttgcttctatgccgagtaccacaacattggccccggttcagacaaatccaagcgtgtgaaatgggctgggatttggaacctcaattcaaaagctgcacgttggttctcaccatctaagttttttcatggaactgattggattgaggttactggaattccttgctttcctggcgt

SEQ ID NO: 80838 - DNA, 258 bp, Glycine max
  Clone ID: 700960813H1
cctggttggttgcaagtggagcgaagaaaactaacggagacttgtttggaagctagtctctggtgagagtgaaggcgcaccatcttcaccttgaagtcaacgatcatggcaaccattaacctttcttccgctactacgtctctcttccaatccaaacaccgaacgaaacgcattccacgcctccctacactccacagaataacaaaccacatcgaaggaactcatcttaactcccccaacggctctcccatccttggc

SEQ ID NO: 80839 - DNA, 257 bp, Glycine max
  Clone ID: 700960815H1
tcggcctctttcgcacatacccaaccctttaaatcaaaacctaagaatttgatatgagagaaagattgtatttccgttagtatatatactcgatttgttgcgtatctactatcttatccttagacataacaatatcatctagctagctagctagctagcaaatagcaatgttaaaaaaccaaccacaaccagattggcctgagcccattgtccgggttcagtccttatccgaaaactgcgaagattcaatccctgaa

SEQ ID NO: 80840 - DNA, 262 bp, Glycine max
  Clone ID: 700960816H1
cgattccgaagccccacataccatttgttattcatataaaaactcgttttccttctccatttctcgtcgcaccttttcctcttctctctctttctctctttctagttcgtgttcttcgtcgcatatccgaagtaggatctctcttgttttttctctaggtttttcgcgatggcgtcgaagcgaattttgaaggagcttaaggatttgcagaaggatcctccaacatcttgcagtgccggtcctgttcatgaagatatgtttc

SEQ ID NO: 80841 - DNA, 266 bp, Glycine max
  Clone ID: 700960817H1
ttcgcacctctttctcaatcagcgaagagcggaggttcgcgtttcgagtggaggatacggaactgtgtcggcaccgaagtcagttgcgtctgatcctgatcagttgaagagcgccagagaccgtatcaaggagcttctcaactccaagttctgccatcctattctcattcgtttgggatggcatgatgctggtacttataataagaatattgaggagtggccacagagaggtggagctaatggtagcttaagatttgaaattgagc

SEQ ID NO: 80842 - DNA, 130 bp, Glycine max
  Clone ID: 700960818H1
ctttgccggtgccacaatccctctctctctccgacgtacatttccatctttttagggtttcatttcatggactccgattcctggatttccacgcgcctctcttcctcttcacgccgccaccattatcgat

SEQ ID NO: 80843 - DNA, 258 bp, Glycine max
  Clone ID: 700960821H1
ttgttgcgcgcccctcccattgttcgtaggcaacttcaacctcaccaaaggaactaagaatttcattgaggctacagaaagtggtgatcaatatgtcaaagaatccaaaagttttctttgatattctaattggaaagatgaaagctggacgagtagtgatggagttgtttgccgatgcaaccccaaaaacagctgaaaacttcagggctctctgcactggggaaaaggggattggatcatctgggaaacctttacact

SEQ ID NO: 80844 - DNA, 248 bp, Glycine max
  Clone ID: 700960822H1
gtgatttgcaagataagccatggtggcaaaagatgcaaactcgtgaagagttgattgacgcctcggctaccctcgtatggatcgcttcagcccttcatgcagctgttaactttggacagtatccatatggaggtttaatcctaaacaggccaaccattagcaggagattcatgcctgagaaagggtctgctgagtatgcagctttggctaagaaccctgagaaggagtttttgaagactaatactggc

SEQ ID NO: 80845 - DNA, 258 bp, Glycine max
  Clone ID: 700960824H1
attaaaaccgagcctcttccccaaaggagacacagtgcgagagagaatcgtaacataagcggtaaccggaataagttgtctctacgatttgagccatggcaacaacaacaccctcaaaccgatcatcagaggcgtttgctctcatggcaatcctcagcactctgctttgcacggcggtggcggcgaaggagagcgtgtacgagatactccccaagtacggcctcccgagcggtctgttaccggacaccgtcaccgact

SEQ ID NO: 80846 - DNA, 258 bp, Glycine max
  Clone ID: 700960825H1
ggatcttcagggctatgaatggcgctttaagcatatatttagaggtcagccacgtagacacttgctcacaactggatggtttaattttgtgacttccaagagattagttgctggagacacctttgtgtttctgagagggaacaatggagaattgcgggttggagtgaggcgcattgctcctgtgcagagcagcatgccatcatctgtgatttctagtcagagcatgcacctaggagttcttgcaactgcatctcatgc

SEQ ID NO: 80847 - DNA, 248 bp, Glycine max
  Clone ID: 700960827H1
agacctatcattaaaccaagcaacgctcggttctcttttctctttcaccatatccattgtcccttaagtctaaggtcatgtctcccctctgccttatacacaccaataatttgccaagaaaccgaacccaacccaaccgcaacaacaatttcgttccatgatttcgacatgatcaccgatacgcggagaaacgagcagaggctcaagatgaagaacatcttccacatcagcgtcgtctccgccgtcct

SEQ ID NO: 80848 - DNA, 164 bp, Glycine max
  unsure (1)..(164): unsure at all n locations
  Clone ID: 700960830H1
caacactttaggtaaacctaagagggtttaacctcgtttccttaatccattctttgctccctcgaactgctgtttggtctcttcactcttaaccatggcatcaacgtttctcaccctaacaaatcccttcctacacaaaactaatgtggntagtttctctgaca

SEQ ID NO: 80849 - DNA, 261 bp, Glycine max
  Clone ID: 700960832H1
aaacaaccttctttctttttctgtgagcctttctttcaggttcttaacttgatcagtgtgcagtgtccaaatcataagggtagttgcaaattgcaatggctaagcatgatgttgagggtggttccttctctgcaaaggactaccatgatcctcctccagcaccgttgattgatgctgaggaactcacacagtggtccttctacagggctttgattgctgagttcattgccacaatgctcttcctttacatcacagtgctca

SEQ ID NO: 80850 - DNA, 263 bp, Glycine max
  Clone ID: 700960833H1
gaaaacactaaagaaaaaaaatgggttcttctctgtggacctgtctgattgttatcacttgcttctgcttccttcgccgccaactcaagagtaccaattgatgtgccatttggcagaaactctgtgcctacctgggcctttgatcacatcaaatacctcaatggtggttctgagattcagcttcatcttgataagtacacaggtactggcttccaatcaaaagggtcctacttgtttggtcacttcagcatgtacataaaatt

SEQ ID NO: 80851 - DNA, 262 bp, Glycine max
  Clone ID: 700960834H1
ctcaaacccccctctctctactcaaactaaccactctgtttctcttgctctacttttaccctgtttccagtggaacaaatcttcatccaaattaggttttgttttggagaaatgtatgcagagactggtcttttcttcccatatttgcacaacgtctctcacggccttcatcagcttgaggagtactgcaaaacccagaagtccaatgcttcaatggatgaccttgttcagtcttctgccatgtcagagtatgatttggcag

SEQ ID NO: 80852 - DNA, 254 bp, Glycine max
  Clone ID: 700960836H1
atgacttagaaaagaatcaagttgcttattcaagaagtgttcacattccagatcacggtgatgctggtagcagtaatcttcttaatgagaatcactattcaagattaatagctttagaagggtgtagttgtagtgcagctgcccagctgcttaatgatcgttggacagctgcactacaatcctacaataatcccaaagattcatctgaaaagccagttatgtattcgagtgggacatcaggatggactccgttc

SEQ ID NO: 80853 - DNA, 131 bp, Glycine max
  Clone ID: 700960839H1
ttgcgtcgttccagacagcttcagcacccagcagagactcccttcgcatccaatgtctacgctcttcatcgccctccaatgctgccaatgctccaccatgcaggtgaagcagaagaagaagagcagcaaca

SEQ ID NO: 80854 - DNA, 121 bp, Glycine max
  Clone ID: 700960841H1
ccacaatctctctgttcagttttcatatggcgaacacactatataacggcgccacatgccgaatccctctccggaaccaatccctggccttctctcgccacgtttccagatccctctcttt

SEQ ID NO: 80855 - DNA, 52 bp, Glycine max
  Clone ID: 700960842H1
taacatttccaatcctcgagtagccttggagcatgcacagttttcaaagctg

SEQ ID NO: 80856 - DNA, 234 bp, Glycine max
  Clone ID: 700960844H1
tgtatatgccattgttgtgcatactggactttcttctacttcagggcattacttctgctatgttcgctcagctccatacacacgtcatactatggctggttcaatggcaactgaggtcgcagtagcaactgcactggctcaggatgcgcacagattgtgttacgcgcgtcagggtacgccagggggttcgcgccatctgcgtgagtacatacaacggattagaccgaagattct

SEQ ID NO: 80857 - DNA, 267 bp, Glycine max
  Clone ID: 700960845H1
gtcggaatcggtcgaggtgcgcggtctcgccgcattgtcgcctccgccgcacgaatccgcgacttctacatggagatttctttccatttcgagagctccgtcattcccttcattaggtcgcattgcgacttccgacacttaccgcatttggaagcgtgctctaatctccgcgcctccatgacccttgacggattcgacggcccgcgcatacagcgttcggactaaacttttttgttcctcggtagaggttatgcctccgataatggg

SEQ ID NO: 80858 - DNA, 256 bp, Glycine max
  Clone ID: 700960846H1
gttgtcgctgcgatggatcgcaagaggggaaggcatgaagctgccttcaatttcaatggcggcgccaagaaatcgaggcctgaaatggactcctttccaactggtttaggaagcaaatcgaagccatgcacatagtttttcagcacctctggctgtccatttggtgaaggatgccacttcctgcattatgttccaggtggattcaaagctgtctctcagctgatcaatgttggtagcaatcctgttattcctcaag

SEQ ID NO: 80859 - DNA, 253 bp, Glycine max
  Clone ID: 700960847H1
ctagttccctggtttatgcgtgttcaatatatattgttctgggaatattagtgttgaaaggtgcacaggcacagcgtgcgttctatctgtttggtcgttctcttgtggataatgggaccaacaactttttggcaactacagctcgagcagatgctcctccttatggcattgatttcccaaccggacgacccactcgccgtttctctaatggctacaacattcctgacttcatcagtccctcacttggggccga

SEQ ID NO: 80860 - DNA, 260 bp, Glycine max
  Clone ID: 700960850H1
ggaggaagcaaggctttttgtgagtcatcgcctgagatatcaacttcttctgagactgagagtgacatgtcattttcaaggtacactcccttaatgcctcatagacatctttttggagatatacaaagagagcgcttctttcatagtgaccatatttcctattctgggcatggaggttcattcagctcttccaactttgttgacctggattggctgtcttcaggaaattcatgtgaagaagagccatttgagaggttatc

SEQ ID NO: 80861 - DNA, 261 bp, Glycine max
  Clone ID: 700960851H1
ccaagggtgatggtcttggtgctgaccttgttggcactttcatccttgtttacaccgttttctccgccaccgatgccaaacgtagcgccagagactcccacgtccccattttggcacccttgccaattgggttcgctgtgttcttggttcacttggcaaccatccccatcaccggaactggtatcaaccctgctcgtagtcttggtgctgctatcatcttcaacaaggaccttggttgggatgaacactggatcttctggg

SEQ ID NO: 80862 - DNA, 261 bp, Glycine max
  Clone ID: 700960852H1
gcggcgatggcttttgcagttacgcccaagataataacggtgtcattcgataagcaaaaccagaggaggagtttcgaaggattgtttaggaaaaggtatcgggtaagggtgaagcgaagtcaagatcattcagtgaagtgtggtattgagcgaagcagcagcgatggaaagaaagggggcggaggaggaggcgtgtcaaattcgaactacgtggtgccgctggacaacatggcgaactcatcctgcataacacgtccttta

SEQ ID NO: 80863 - DNA, 256 bp, Glycine max
  Clone ID: 700960854H1
cttgttgccactgtcatctcaatgtttttggttgacaagtatggtagaagaaaattctttctggaagctggctttgaaatgatatgctgcatgattattacaggtgcagtcttggctgtgaactttgggcacggcaaagaaattgggaaaggagtgagtgcctttctggttgttgtgatcttcttgttcgttttggcatatgggagatcttggggtccccttgggtggttggttcccagtgagctcttcccattag

SEQ ID NO: 80864 - DNA, 253 bp, Glycine max
  Clone ID: 700960856H1
ggcagcagagtgtgctcgtaatgctttgttggagaaggttgtggacaacaaagcagattctgagaaattcaggtcagacttattgaacattgcaatgactactttgagtcccaagattctctcacaggacaaggatcattttgcaaaattagctgtggatgctgtaatgagactaaagggaagcactaatttagaatctatccagattataaagaaacctggaggctcattaatggatccattcctagatgaa

SEQ ID NO: 80865 - DNA, 235 bp, Glycine max
  Clone ID: 700960857H1
gtaatatttcgagtccaagcttctcttggtgctctgtaagggaccaaaaaccaatttcatccactcgtaacatacccctatcggttttagaaaagccaagaaagtttgtgtccaccaacctctattttacacgagtctctcatactatgatactatagctacacttcccactgtgtctcagggtctgtgacacacacagactcacttcaagttcccagcttttgccatttttccc

SEQ ID NO: 80866 - DNA, 253 bp, Glycine max
  Clone ID: 700960860H1
tcgatttgttgtggattggatgatggaaaaaccagcaagcccctttcattgaaagtgtgcagtgaactgtaattgtgaaaaggttggaagatctggccaaagaaggtgatagccctgtagattcgttcccatggtttgatccttcccggtacaacgcggcgtgttcgaattctgatcgcttttacgcgagatagggggaccaccctctaagcctaagtattcctcaatgaccgatagcgtacaagtaccgtga

SEQ ID NO: 80867 - DNA, 95 bp, Glycine max
  Clone ID: 700960861H1
cccacaccacacccatgagactcctcctgctccttattctcctctttcacgcggcggaagccaggggacagtggcagctcctccacacaacatac

SEQ ID NO: 80868 - DNA, 255 bp, Glycine max
  Clone ID: 700960862H1
ttcgaagaactcgccaagcacgacaactggcttcaatgccttgaggtttttagatggatgcaaaaacaccgatggtatattgctgataatgggatttactcaaaactcatatcagttatggggaaaaaagggcaaaccagaatggctatgtggcttttctcagagatgcgtaatactggttgtcgtcctgatacttctgtctacaatgcgctaattacagctcaccttcattcgcgggacaaaacaaaggctttg

SEQ ID NO: 80869 - DNA, 144 bp, Glycine max
  Clone ID: 700960863H1
agagaaacagtgtttcatcatttgggtttcgcagaagagagagaaacccatttctagagagagaaactcgcagtcgcagacatgtcttccttcgatgccttcgccgacgacttgaacgtcaactcttcttccacacaacatacg

SEQ ID NO: 80870 - DNA, 113 bp, Glycine max
  Clone ID: 700960865H1
atttcttacctcttggcatggccattcaaatgtcttcttttgtctttgtttctcttacaattttattttgcttctcttcgttggagaagagttttgccttccacacaacatac

SEQ ID NO: 80871 - DNA, 255 bp, Glycine max
  Clone ID: 700960868H1
ctctgaggaacacactgacatttgcaactggaaaggttgctagaaggaaggagaaagaagcagcagctgcacaaaaagaggcaaacattgctttatccaaacagttaggattgggagctgcttcaatgaacattgaagataaatataaattcatgattactgccacaaacactaaaagagagggagcagcagatagtgcctgggatgattaatgaagtattttgttcttctcatatttgattgatgacaactgct

SEQ ID NO: 80872 - DNA, 257 bp, Glycine max
  Clone ID: 700960870H1
ctttttctcgctgctcttcaaagcaatcgcaagcgcgttttgagtctcttttcatcgcagatcctctgcgtcgccaccagattcactcacgtttcgtgattcgaacgcggcgtcgtttagactcaagcttgcgggagaagagaaaaccctaatcagacatggggaagaagaagccgacggcgagggacgaagagaacgcggtacagcaaggcggcggcggtaaatcgaagaagaaggcagtgttaatcgacgacgac

SEQ ID NO: 80873 - DNA, 254 bp, Glycine max
  Clone ID: 700960871H1
ctagcacacaaaacttgctatagtcgtgagctataactcatttgaggctctgtgagaattgagaaatggctaaagatgttgaggttcaagagcaaggaggagagtactctgccaaagactaccatgaccctcctccagcacctttgttcgacccagaggagctcacacagtggtccttctatagagccctcatcgctgagttcatagcaacccttctcttcctttatgtcactgtgctcaccattattggctac

SEQ ID NO: 80874 - DNA, 243 bp, Glycine max
  Clone ID: 700960872H1
cagctgtctgctgttagatctgtacccgcctagccattgatttggaaaagtccaacttcaaggatgagtaagcttcagagtgatgctctaagagaagctatctcaggaatcatggctgattccaaggaaaagaacaggaaatttgtggagaccattgaactccaaattgggttgaaaattatgatccccagaaggacaagcgtttcagtggcttgttaagttgcccatatctcgccccaagat

SEQ ID NO: 80875 - DNA, 253 bp, Glycine max
  Clone ID: 700960873H1
gaaagagaatccgaggcgaagagaagagaaaaattaagatggaggggaaggagcaggatgtgtctctgggagcgaacaagttcccggagagacagccgattgggacggcggcgcagagccaagacgacggcaaggactaccaggagccggcgccggcgccactggttgacccgacggagtttacgtcatggtccttttacagagcagggatagcagagtttgtggccacttttctgtttctatacatcactgt

SEQ ID NO: 80876 - DNA, 254 bp, Glycine max
  Clone ID: 700960874H1
cttcaattctctttgttgttgtttaggactgtaagaagactttaccaactttgctatgcttaggaggctcattacaacctatcacgcgctctctttctgctcctcttgccccaggtggcgtggaaaagcttattgtcatggatgcctcctatgatatgcttcaagcctgtaaaaatgctcaccacaatgccaccgttgagacccactttcttgttgctgacgaagagtttcttcctatcaaagaaagctctgtg

SEQ ID NO: 80877 - DNA, 256 bp, Glycine max
  Clone ID: 700960875H1
cattcagttcataatttcttccaacaaattatatttttcttacaaaaaaagtggcaggtgaggtggtgaagaaggaagagtctctcaacctgaaagtcactaacaagagccatgttcaatcagaggagaaaattggaagaaaagagtaccaattggtcacttttgatcttccctacttggccttttactacaaccagaagctcttgttttacaagggtgaagatttcgagggcatggtccaaaaactcaaagttgg

SEQ ID NO: 80878 - DNA, 252 bp, Glycine max
  Clone ID: 700960876H1
caaaagtgtcagtattaggtggcatcaccgaagtgcagggagctgccaacagcgtcgagatcaacaatctcgctcgctttgctgtagaggaacaaaacaaaagagagaattcagttctggagtttgtgagggtgattagtgcaaagcagcaagtggttgctggagtgaattactacataacattggaagcaaaagatggtgagattaaaaatgagtataaagcgaaggtttgggagagggaatcccaagagt

SEQ ID NO: 80879 - DNA, 257 bp, Glycine max
  Clone ID: 700960877H1
gtctggaaaccctcccactcatccttcctactaagagatggtttaagatgcaattacctcgctgaaggagaataccggttcgagccaatacgcgattgcgaagttcatcgaggagaagcacaagctgcttccaccgaacttcaagatcaatcttctctaccatttgaagaagctcgtcgccgccggaaaactcgtcaaagtcaaaggctcgttcaagctcccacctaccagacctgctgcatgcatcttcttcttct

SEQ ID NO: 80880 - DNA, 257 bp, Glycine max
  Clone ID: 700960878H1
aggtcctcaaagatctatgcttacctcttcctttgcatgctcttcctctcctccgccactcccattctcggttgtggctactgtggcaaaccccccaaaaagcacaagcctggtaaaacaccaaagacacccacagtacccgttgttaagccaccagtcacagtccctcccattgttaagccaccagtcacaatccctcccattgttaatccaccagtcacaatccctcccattgttaatccaccagtcacaatccc

SEQ ID NO: 80881 - DNA, 254 bp, Glycine max
  Clone ID: 700960879H1
gaattaaaacatattttgttttcattgacgggtctaccgttatggttacatgatattccgggtatcgtattcagatctgacaatgagcaattcaagttccacatgcaaaggttcaccgcgaaaatagccaacttaatgaaatcagccaatctttttgcttcacaaggagggcctatcatactatctcagattgagaacgagtatgggaacgttgaaggggcatttcacgagaaaggactgtcctatattcgttg

SEQ ID NO: 80882 - DNA, 254 bp, Glycine max
  Clone ID: 700960880H1
ggcgcgcgcaccctctgttccagcgactcctaattaagttgggaaataaaaaagacttcaaatttcccagatggctgcagcctttgcttccagatgctctcgtgtgggccgttctctgttctggtggattaagcaacagttcccctggtttatttacctcatcacatggcatgacatgcaacaatttgttttctcagcaacaacgtaccttcatacagatgaggactgttctcaaggttgtcgataactcaggt

SEQ ID NO: 80883 - DNA, 257 bp, Glycine max
  Clone ID: 700960882H1
gcattccatagttctcagatagggcacgtctctcgcggcctcttctctccctcgcgccgcccacactaaaaggttattgctctattattgtttgacgatggctgatgctcatgggactgataagaacattgaggtgtggaaaatcaagaaattgatcaaagctcttgaggctgccagaggaaatgggacaagtatgatttcccttatcatgcctccacgtgacaaattatctcgtgtcaccaagatgcttggtgatg

SEQ ID NO: 80884 - DNA, 120 bp, Glycine max
  Clone ID: 700960884H1
gcaaagggcattttcaacaggagcgtggtcacatccgtataagacgatggtaaggatctcaggtgtggatgctaaatgttgggcgcactaatcccttgcaaaccatggctgagttaagaa

SEQ ID NO: 80885 - DNA, 255 bp, Glycine max
  Clone ID: 700960885H1
ggctttccctttgatcttgattggaggattgttccttctctcgagacgatccggagggatgggaggtcctggtgggcccggatttcctcttgcttttggtcaatccaaagccaagtttcaaatggaaccgaacaccggagtgacatttgatgatgttgctggggtggatgaagccaagcaggactttatggaggttgtggagtttctaaagaagcctgagaggttcactgctgttggggctcgcataccgaaaga

SEQ ID NO: 80886 - DNA, 236 bp, Glycine max
  Clone ID: 700960886H1
ctccctcctcctcctccttcttcttcatgacatggcctcatcaacaaggttttcccctctgccccaatccgaacctgatcgtgacaaccatgaagaccaattacccctctcaatttccgtggaatccacaaacactaggtctggcatttcgtccgaacattattacgccgaagaaatattcagcatcagcgcacgcacatgcgaaatgattcaagacctccttggcctcacgttgt

SEQ ID NO: 80887 - DNA, 100 bp, Glycine max
  Clone ID: 700960888H1
actcacaattacatgccactctttctctctctcccgccctctctctctctgtgcaatggcaatagcaatggatcagcaatgctgctacagagtctgagat

SEQ ID NO: 80888 - DNA, 252 bp, Glycine max
  Clone ID: 700960889H1
tttgcttatcttcgatagcagcttcttgaatctggaagatatatttggctattcaaggcattgtatggtcttctgatgtcgcttcctcaggtatctgcaaacaatttcttcttacctattgagaaattgttgaggcattgatttccttgtatgaacgggatgtgttcaaatatccttctttggagcaaagtgccgcctttaagatactaaaaacgcgtttaaaagctgtgccatcgtattcattcaatggcg

SEQ ID NO: 80889 - DNA, 203 bp, Glycine max
  Clone ID: 700960890H1
ttttgaggtagcaagtgctgacaagatatttgaaagcacatccaaggagcagttgagcagagtaggctcataagaggctcatctcactccataccaagaatgtgtatactttatttcccttggggaaatatattacaatttatacccagttgtattctggaagtttggatttcatacaattccaatcatgtggatgttgcatc

SEQ ID NO: 80890 - DNA, 123 bp, Glycine max
  Clone ID: 700960891H1
gagcataccatggtgatgtgcctgaccgtcctcgggccgtgtcagtggcaacgcaacgagcggacccgcgagagtcccaacttgccaccgcgccgagtcacacaacactggccccggcccaaa

SEQ ID NO: 80891 - DNA, 254 bp, Glycine max
  Clone ID: 700960892H1
gcaaaattcctttgggccaacccgaggagtgatagccacatgctccaatcaagattagtctctaacccagcaccaaaaggcaaaaaaagaagagtcaattcttcaatgtgacaccaaacatctagactatggggagcatggcaccaagttggtctgatcaatggggaagtggagggtttgccagtgaccactatgagaaggaggaagaggagaagacgaagatgaagaagagtgggagcagcaagaagatggca

SEQ ID NO: 80892 - DNA, 254 bp, Glycine max
  Clone ID: 700960893H1
cttcctccctatcaacccacgtttctcttctattatggtgagagaccaagatggtagaatgaaatggaaaagggtacaagtgaagcctgaagagcatgtaaaggttcccaaatttcctgaatgcaattcacctgaattatatgaccaatattttggtgactacgtgacaaggattctaactgaacggacacctcaaaacaaaccactatgggaaatccatattattaattatccaacaagcaatgctgcaggca

SEQ ID NO: 80893 - DNA, 242 bp, Glycine max
  Clone ID: 700960894H1
ctaataaaaattattacttttggttatatcttgagcagtgaactgcatatatagcctgaatatcggatgtattaattaagaaattacaaaatgtttgtctttgacttttactaatgtttgctaccaaccttgtgtcccccttcccctggcccctgcacatcaagaatggaagatagaaaatacacatttttttttatattgatgtccaatattcagttatttaatgtccaaattttaacagt

SEQ ID NO: 80894 - DNA, 152 bp, Glycine max
  Clone ID: 700960895H1
gttggaaccgttcttcgtgttctccattcgctctctcagtccttgcatctacgtgaatcttcgcttccgttccttatcttgtgctttctttcctttacttgtgatcttgctcattgttgtgctcaataacagattgtttcgtgcttgtcttg

SEQ ID NO: 80895 - DNA, 262 bp, Glycine max
  Clone ID: 700960901H1
aatttcttatcttttctcattcccttctcttcttcctcaacacacacaaaacatttcttccaatttcaatttctcgtcgtccctcatcatggctcgtctcgcgatcgctgtcgccgccgtgctcctcgtggccctctccgcctccaccgcgacggcgcgtccctgcaggaccttcataatctcctcctactcgttccgcaaccctaactccaacaccttcgccaccatcaccgagatccgatccttcacccctctctacatc

SEQ ID NO: 80896 - DNA, 111 bp, Glycine max
  Clone ID: 700960902H1
tccatatccctccctgctcattctcctatttttgttgacaagccaagttacttgttatggttcagagaaggaaaagagtaaaactttcataatccaagtccagcacgaagc

SEQ ID NO: 80897 - DNA, 257 bp, Glycine max
  Clone ID: 700960903H1
tgctaaccttcagagattttacttcgagaacaagcttgaaaatgctacaaaggacacaaataatatgaagttcaggaaccccaaatatttgtcaatattgaaccatttgaggttctacttgccagaaatgtatccaaactgcataaaattttgtttttggatgatgacatagtggttcagaaggacctaactgggctatggaagattgatatggatggcaaggtgaatggagctgtagaaacatgttttgggtcatt

SEQ ID NO: 80898 - DNA, 259 bp, Glycine max
  Clone ID: 700960904H1
ctgaaaaatcaaaagatagtcccggtggaccatggcaatttgttggtctgctaccattgtttgatcctcccaggcatgatagtgctgaaaccattcgaagagctcttaaccttggtgtcaatgttaagatgattactggggatcagcttgccattggaaaggaaacaggccgaaggcttggaatgggaacaaacatgtacccttcatcggcattgcttggccaagacaaggatgcttctatttcagctcttccagttga

SEQ ID NO: 80899 - DNA, 260 bp, Glycine max
  Clone ID: 700960906H1
aaaagatccaacatctgacatggctataatatctcgcaaaggatctactcttgttagagaaatccatgagaagcagagtatgaacaagtctcgccaacgcttttgggaacttgcaggctcaaaacttggtgatatcttgggtgttgaaaaaacagcagagcagattgatgcagacactgctgaagtgggtgaagatggtgaaattgattttaaggaggaagctaagttttcacagcatatgaagaagggagaagccgtga

SEQ ID NO: 80900 - DNA, 258 bp, Glycine max
  Clone ID: 700960907H1
actcaatggcttggcactcgttcctcttattagcgacggccattctcgccgttgtgtgctccgccgtgagcggttgctcgccatcggatagggcggcgctgctggccttccggaaggcgctgagcgagccctaccttggcctcttcaactcgtggacgggctccaactgctgcctcgactggtacggcatcagctgcgacgccaccaccggccgcgtcaccgacatcaacctccgcggggagtccgaagaccccatct

SEQ ID NO: 80901 - DNA, 260 bp, Glycine max
  Clone ID: 700960908H1
gtgatgttgtgaatctgagtgaacaggttggggagcttatatcgaatattgtgtgtagaatgatacttggccgcagtaaggatgatagattcgacctaaaggggcttgctcgtgaggttctgcgtttgactggagtgtcaatattgcagattatgttccttggacaggcttcttggatcttcagggactaaaaggaaaaatgaagaaaatgagtaaggcatttgacgaagtgtttgaacaaatcataaaagaccatgaag

SEQ ID NO: 80902 - DNA, 258 bp, Glycine max
  Clone ID: 700960910H1
gggtttagggttttgattcctcagtccaagccgctctccgcaggcgaggttctgggttgcactgcgcccaaggtatcgtcgaaattgctcggtgatgatggtgagagtagtgttttggtttttgtggcggatggaaggttcacttggaggcgttcatgattgcgaatccggggattagggcattcaggtatgacccttacatggggaagttgtttctggaggaatatgatcatttgggtatgaagaggtccaggaaaa

SEQ ID NO: 80903 - DNA, 261 bp, Glycine max
  Clone ID: 700960911H1
ccttcacaagattctcacaaacaactcttgagaaagaaagaatggctgccaacacattgatgagttctgccatctcagccttcccatctctcctttcctcctcaaaatccagatttgccgcagcagttcctctttccagctttgttgtcaccaatgcctcttcttctcgcttttccatgagtgctgactggatgcctggccagcctagacccccctaccttgatggttcagcacctggtgactttggattcgaccctcttc

SEQ ID NO: 80904 - DNA, 258 bp, Glycine max
  Clone ID: 700960912H1
gctgctgcatctattggttacataggtgttggaacggttgagttccttttggatgaaagaggttccttttactttatggagatgaacactcgtatccaggttgagcatccggtgacagaaatgatttcctcaacggattgatagaagagcaaattcgtgtagctatgggagaaaaacttcgatacaaacaggaggatcttgtcctcagaggacattctattgaatgccgtatcaatgcagaagatgcttttaagggat

SEQ ID NO: 80905 - DNA, 260 bp, Glycine max
  Clone ID: 700960913H1
ttgcgcatgctctctactcacctttgtagtcccggccgtcaaaatacccattcccatcgcctttctctctccttcttcctctgccccccaaaaaaatgaagcgcttcatgctcccaagaaaccctctcagcgacgcagagagcttccttcttcgccaagcccaaccccaactaccagctttgccaaactccgtccctcttctcacaaacacaaaccctccaaagagaacgaccttccctccgatcccaatctcgttactc

SEQ ID NO: 80906 - DNA, 261 bp, Glycine max
  Clone ID: 700960915H1
cctacttctacttccctttgttctcaaaccttatcccttatcctcccaaaaccaaaccatgtctacctccgcagcttctctcgcactcccaaccctcactctccgaactcgacaacctctctgttctccccaatgcttctcctcgtccctctccctcacccctaactccaaacccatttccatttccgccgttttcctcaaaacaacgctgtcgtcgtcgtcgccgttgtcgctgtcgtctcgcttcgttccccatgtctc

SEQ ID NO: 80907 - DNA, 243 bp, Glycine max
  Clone ID: 700960916H1
tttaatttccatagttaattaaagcttcaacgtttctgtctaaaaaaacacctctttcttccaggtgctcaacattcctaccaagattaacaagggtactgttgaaatcattacccctgtggagctcattaagaaggggacaaggttggatcttctgaagctgcattgcttgccaagctagggataaggcccttctcgtatgggcttgtggttctttctgtttatgataatggttcagtgttc

SEQ ID NO: 80908 - DNA, 257 bp, Glycine max
  Clone ID: 700960918H1
ctgttgtgtctgacagttggagtgttttctcgtttgctgtgctcagctccttatggagctctcactctctccaacttcacatcgagttccttccacaattcccactttgtattccgctaaactatcatccacctaagccaccaagtcacaacaacctttgttcttaagattttccaaacacttcaactcaattgggttgcaccatcacagtcacagatgctgctcaaatgctgttcccgagagaccccagagaccca

SEQ ID NO: 80909 - DNA, 256 bp, Glycine max
  Clone ID: 700960919H1
aaccaagcttctctgttaaaaaaaaattaggcgtctaaagggccaaagcttagaaagttgaagcttttttgttgaggtgaaagtgaaatggttggcaaggataatctgagggctgaggacttgaacttgtgctttaagaagcttatgatggtggccgggagtgggaacagtgagaaaggggtgaacttgaaggttggggtgatcaccgagtggaaggatattcctgtggagcttctgatgcaaattctgtcccttg

SEQ ID NO: 80910 - DNA, 256 bp, Glycine max
  Clone ID: 700960920H1
gtggctcatgatgggagtggacaggtgaagacaattcacgaggctcttaaattggtgcctaaaaagaacaagaagccttttgtcatttacgtcaaggccggtgtctaccaggagtatattatgatcaacaagcactgacccatgtcaccatgatcggagatggccccaccaagaccagaatctccggcagcaaaaactacgtcgatggcatcggaacttacaacaccgctaccttcggtgtgaacgctgctaactt

SEQ ID NO: 80911 - DNA, 256 bp, Glycine max
  Clone ID: 700960921H1
ctcgagcctttatcggctcgaggaggagatgaaagtatcttatcaatgggctagccctgtgacaagggagatggaaatttcatatcaatgggtcaatcatatgagaaggaagatggcaatttaatatctctgggcactcatataccaagggacatgagaactttataccagttggtccaacctatggtaaatcaggagaaaatttcataactgttgctccttatgacaagggtactgatcatattatatcactggg

SEQ ID NO: 80912 - DNA, 257 bp, Glycine max
  Clone ID: 700960922H1
cgccggaatgcagctcgaggacggccgtaccctcgccgactacaacatccagaaggagtcaacccttcacgttgtccttcgtctccgtggtggcatgcagatcttcgtcaagactctcactggcaaaaccataacctagaggtcgaaagctctgacaccattgacaacgtcaaggccaagatccaggacaaggagggaatccccccagaccagcaacgtctcatcttcgccggaaagcaacttgaggacgggcgcac

SEQ ID NO: 80913 - DNA, 257 bp, Glycine max
  Clone ID: 700960923H1
cgacctcctcactttctaccacttcaactgctcttccctcagcctcctcggtcgtgttcggctttcttcccgcggcgtcaatgtcaccgttggcggcaacttatcctctctcgagatccacatcgaagccctcttagcctacaactctctgtttcacgacactgatttcaagctcgccaattgtcatcagctcttaaacgacaaagtagcccaggaatgtggattcacttctctatctattcggatcgtcgatgaac

SEQ ID NO: 80914 - DNA, 258 bp, Glycine max
  Clone ID: 700960924H1
tggatcgtcttatgaagcagatcacaaatttcatgtctgatattgctgatgagttcaaaattgttgttgttgaagcaataagatcattgtgcctgaagtttcctttaaaatatcgatctctgatgaatttcctgagtaatattcttagggaggaaggtggttttgattacaagaaggcaattgtagattcaattgtgattctcattagagatatccctaatgcaaaggaagctgggttgcttcatctttgtgagttca

SEQ ID NO: 80915 - DNA, 256 bp, Glycine max
  Clone ID: 700960926H1
ctaccccaaagtgcaaaagacatttgaaagagtttcaggttactgtgagcagaatgacatacattctccatatataaccgttgaagaatctgtcacatactcagcatggttgcggttgccaacagaaattgattcgtcacgaaagggaaatttgttgaagaagtccttgaaacaattgaacttgatggtataaaggattgtttagttggcatccctcgccagagtggcttgtctaccgaacaacgtaaaagactaa

SEQ ID NO: 80916 - DNA, 257 bp, Glycine max
  Clone ID: 700960927H1
gggtgggctcaccgttgagcaggctatccagagcaagaagttgttcatcttagatcaccatgactatctcattccatatttgaggaaaataaatgcaactaccacaaagacttacgctgaaagaaccatatttttctgaaaagtgatggaaccttgacgccattggccattgagttaagtaagccgcatcctcagggtgaaggatatggtcctgttagcgaagtctacgtgccttcgagcgagggagttgaagctta

SEQ ID NO: 80917 - DNA, 250 bp, Glycine max
  Clone ID: 700960929H1
aaacaagctgaagaattggattcgaaaatcgtagcgtacgttggtgcgattgaacgatacgatgggaagaggaaaattcaagagcaagcccactggtcgccgccagttctccaccccggaagatatgtctgctggaacctctaaccgtcctcgaacttttagacagaaagaagctgcgcatgaagaggaagaacccgaggaagtatctggagatgaatctggagaagaatctgaagaagaaacttctaag

SEQ ID NO: 80918 - DNA, 256 bp, Glycine max
  Clone ID: 700960930H1
tgagcgtggaagaggaaagagcaagcagcaacagctcgtggcggttccgattatttattaagatcaatgttgcatgcagtatctgcccctagcttttgtttaagctatcccgggaaccttcattatcctccttctcagttcaaaaaacatgtttttctgttcgttgttcggtttcacagacaaaaaatggagctaaagtggaatatactccttggctcattattggcttgggcaatcctggtaacaaataccatgg

SEQ ID NO: 80919 - DNA, 255 bp, Glycine max
  Clone ID: 700960931H1
caatgttggtacatcctgataaaaatatgggtaatgagaaggctgcagaagcctttaagaaacttcaaaatgcatatgagattctaatggattcgttgaagcgaaaagcttatgatgatgagctaaggagagagggattttgagtgtatttcgtagatttcatgatgcttctcgtaagaatggtaggcatggattctttccttcaggatttgcacgatctgatgcagatggcaaggatccatttggtgattcaag

SEQ ID NO: 80920 - DNA, 257 bp, Glycine max
  Clone ID: 700960932H1
gtgccggcgcgcgctgaagtttgctaggttcatgagcaggttcgggaagagttaccgaagcgaggaagagatgagggagaggtacgagatattctcgcaaaacctcaggttcatccgctcccacaacaagaaccgttgccctacactctctctgttaatcattttgctgattggacttgggaggagttcaaaagacacagactaggcgctgcccaaaattgctctgccactcttaacggcaaccacaagctcactga

SEQ ID NO: 80921 - DNA, 256 bp, Glycine max
  Clone ID: 700960933H1
gtcttcgtcgaccccaacaacacaacaaagttcctcgtacccgccatgaagaacgtccacgcttctctaacaaagtacaacctcgacaaaaacattaaaatctcctcacccatcgcactctccgcgctccagaatcgttccccgcctcatccggttccttcaaaaccgaactcgtcgaaccggttatcaaacccatgctcgacctgctccgccaaaccggttcctacttaatggtgaatgcgtatccgtttttcgc

SEQ ID NO: 80922 - DNA, 248 bp, Glycine max
  Clone ID: 700960934H1
gcttttccctcgttgaaatgaaaatgggttcttctttgtggactttgtgtctaattttggcttcactagcctcttctgcattctgtgcctttccacggaggccagtggatgttccattcggcagaaactacttcccacttgggcttttgatcacatcaaatacttcaatggaggttctgagattcaacttcatcttgacaagtacactggtactggcttccagtccaaagggtcatacttgtttggtc

SEQ ID NO: 80923 - DNA, 75 bp, Glycine max
  Clone ID: 700960935H1
cttcgaaggaatttgtcaaagagtagccatcgccccaacgatcccgtgtcccttcacttctccacacaacatacg

SEQ ID NO: 80924 - DNA, 250 bp, Glycine max
  Clone ID: 700960937H1
atatattttcctttttagctttgattagagtggcctagttgttgtttttctcaatgagaagggcttccactatgcattgcgcatattggcgcttctgtgttcccttgttgctacttgctagcttcagttatgcaccttttgttttggcgacaactgaaatttcagggaatgaagtgagcactgatggaaaggttttaaatgaagagttagcaaaacctaatctacaaggacatgatgaagaagcaaagtt

SEQ ID NO: 80925 - DNA, 251 bp, Glycine max
  Clone ID: 700960939H1
atccgaggcgaagagaagagaaaaattaagatggaggggaaggagcaggatgtgtcgctgggagcgaacaagttcccggagagacagccgattgggacggcggcgcagagccaagacgacggcaaggactaccggagccggcgccggcgccactggttgacccgacggagtttacgtcatggtccttttacagagcagggatagcagagtttgtggccacttttctgtttctatacatcactgtcttaacc

SEQ ID NO: 80926 - DNA, 254 bp, Glycine max
  Clone ID: 700960940H1
ctcaagcaatggacaagctcggacaagccgaacgaatcatcgccgacatccgaatcggcgccgaccgcctcctcgaagcgctcttcgtcgcggcggcgcagcctcaccaaggcaacaagcctctccaagtcttctcaaagaagacgcatttatgcgtcagtatcttcaagaccttcggtcgcttggtaaggagctagaagagtctggagttctcagcgaatcagttcgatcgaggaaagacttttggggcttgc

SEQ ID NO: 80927 - DNA, 252 bp, Glycine max
  Clone ID: 700960941H1
tcagcctttgagtccattattagcaaaggtgggagagttgtggaaacagatttgcttaatctgattgagttattgatgaatcaattgcttaaattggatggtatagtggctgatggggatgtgaaactacagggaaaatgcaggtaaaaagaattcaaaagtatgttgaaacacttgatgtgctgaaggttaagaattctatgtctagtagcaatggagaccatgccacagtgcagcttcaacagaagcatt

SEQ ID NO: 80928 - DNA, 254 bp, Glycine max
  Clone ID: 700960943H1
gcaagtcgagcagtgcggacatttcatgggcatgagggagatgttaatgcagtcaaattctttcctgatggaaatagatttggaactggttcagatgatggaacctgcagattatttgacattaggactgggcaccaacttcaagtttattatcagcagcacagtgacaatgagatcccacctgtgacttccattgcattctctgcttcaggaagacttctctttgctggatacacaaatggagattgctatgt

SEQ ID NO: 80929 - DNA, 251 bp, Glycine max
  Clone ID: 700960944H1
ggacaaacttaaggctgagcgtgaaagaggaatcaccattgatattgctttgtggaagtttgaaacaacaaagtattattgcacagttattgatgcgcctggacatagggatttcattaagaatatgattatgggacatcccaagctgactgtgctgttcttatcattgattcgaccactggtggttttgaagctggtatttccaaggatggacagactcgtgaacatgctctgctttcattcacccttgg

SEQ ID NO: 80930 - DNA, 252 bp, Glycine max
  Clone ID: 700960948H1
aattaatcaaacatggctagggttagtgctttgtttcactctttgctcttgatttcttcccttgtattggcttctcaaatccatgtttcctctgggaaactagtccctggactatcatggaattactatttgttgacatgtcccaagcttgagaggattataaggaagcatcttgaggatgtcttcgagaaggacagtggagtagctcctggcatacttcgactcttcttccatgactgctttcctaatgga

SEQ ID NO: 80931 - DNA, 250 bp, Glycine max
  Clone ID: 700960949H1
cggtccaccacctagtaaatggaagggcacctgccaaacttctaaaaatttcacatgcaataataaaatcattggggctaagatttacaaagtagatggattttttagcaaggatgatccaaaatctgtgagggatatagatggtcatggcactcatgtagcatcaacagcggctgggaatccagttagcacagctagcatgttaggccttggtcagggaacatcaagaggtggcgtgacaaaagcacgc

SEQ ID NO: 80932 - DNA, 73 bp, Glycine max
  Clone ID: 700960952H1
ctgtcttagaactttacctttctgtcctcatggagtagtaaagaagtaactaatcaaccacaaacctaaacaa

SEQ ID NO: 80933 - DNA, 251 bp, Glycine max
  Clone ID: 700960953H1
ttcaagccttagaaaccgtaatggaccggttcagatgccttatactgtgcttcttcctaccagtgaggaaggccttactttcagaggaattcccaacagcatctctatctaaggccagagtgcgtttatgtgtggttctctttccaaacctacgttacctttctcgttgacgagtaaatatgcaagcttatgcatgcatataataattgtcttatgcattcttaagtgttgtatgtggacgttatctagtt

SEQ ID NO: 80934 - DNA, 107 bp, Glycine max
  Clone ID: 700960954H1
aactattctctctcgttctctgatttctgaaatccctcgcccatggcttcctcttccctctctctcgcactcgctctcaccctttgccttgtttccactctatgtaa

SEQ ID NO: 80935 - DNA, 248 bp, Glycine max
  Clone ID: 700960955H1
ctcattaattgcaagaatggcacttcgttgcttggtgatgtccctttctgttctcttcactcttggtcttgcgagagaaagccatgccagagacgaagatttttggcatgctgtttggccaaacactcccttccaagttcattgcgagatattctaaagcctggccctgcaagtgttgaaatcgatgatcaccctatgcaaattgaagaaacacagtacccgaaaaccttcttctataaagaagacct

SEQ ID NO: 80936 - DNA, 252 bp, Glycine max
  Clone ID: 700960956H1
ataccaggaaagtaaatcattctagaatgatacactacgaacaagtcactgcccgtttatccccttgtttgttttacctcgttttttgtattcgtttttctcgtttgtagttcagtgttaatttgactttgtagtttggcatgttgaaacaattaatgaagtatctgattcaaaagttgtgtttgggtttttgttttctcccactctaactcaattgcagagattgcaacctctaaaaactaatgaacaatc

SEQ ID NO: 80937 - DNA, 249 bp, Glycine max
  Clone ID: 700960959H1
tttttccctcaccaaagaagaaccaaaacaatggcggatcaactcaccgatgaacagatctccgagttcaaggaagccttcagcttgttcgataaggacggcgatggttgcatcacaaccaaggagcttggaactgttatgcgttcattggggcaaaacccaactgaggcagaactccaggacatgatcaatgaagtggatgctgatgggaatggtaccattgacttccctgagttcctaaacctcatg

SEQ ID NO: 80938 - DNA, 66 bp, Glycine max
  Clone ID: 700960962H1
cttagctcaaacctcacctcaataatctgtcgtgctagctagcttaatcatattccaattccacac

SEQ ID NO: 80939 - DNA, 245 bp, Glycine max
  Clone ID: 700960963H1
attcaacaacgccttaacccgtcgtcatgggcgaaaaagaaaatccttctgcagaatctgcaccaaccacaaccgttcccaccgtttccagaaccacaaaaaaacccaagaaactaaccctaatccctctgatattcctcatctacttcgagttcgcgggcgggccctatggcgagctacccgcggtgcaagccgcgggccccctcctagccctcctgggcttcctcgtcttccccttcatctgg

SEQ ID NO: 80940 - DNA, 247 bp, Glycine max
  Clone ID: 700960966H1
tctggtctcccgaatcagaaaccctaatcagtgtttgggatttcagataaagaaatttaaacagatgaagggtctcttcaagtctaagcctcgcactcctgcagatgtagtgcgccagaccagagacttctgctctttgttgatcgcagccccgaaacccgcgaaagcaaacgtgaggagaagcagatgtccgagctatttaaaaatatcagggagctaaagtcaatcctgtatggaaatagtgaat

SEQ ID NO: 80941 - DNA, 244 bp, Glycine max
  Clone ID: 700960970H1
gtctgaactctgaaacctgatacgctgaagctgagttggagtcacagttgttgttggtagccatggatgcagtagctacggcgaaaccgcttctgtcactgtcgtttttgcttttgctaccgtctttcttccgatcgccgtcgcttacagacccggcgacatcgttcccatgagccgcatgggtcaataccactcctcgcgaaccgtgtggcaggacctcattggccgtcactgccccatcttc

SEQ ID NO: 80942 - DNA, 246 bp, Glycine max
  Clone ID: 700960971H1
ggaactgcaggttatgcgaatgcttgaccatactaatgttctcagactaaaacactgtttctattcaactgctgagaaagatgatttgtaccttaacctagttttggagtatgtacctgaaactgttacagagtttcaaagcactatgtcagaatgcaccaacatatgcctatcattaatgtgcaactgtatacataccagatatgtcggggtttaaattatttgcatcatgtgattggagtctgc

SEQ ID NO: 80943 - DNA, 97 bp, Glycine max
  Clone ID: 700960973H1
ctagtgtaataaaggacgaaagttaggctattctttcaaccgtaagtgtgacttggtagccacttctctgaaataacatatgttactttgtcatttt

SEQ ID NO: 80944 - DNA, 88 bp, Glycine max
  Clone ID: 700960974H1
ctgctttcgagccgtctctcagtttcactattgctgggtgtgagttcatcagatacccttcagaatgtaggggcaattccacacaaca

SEQ ID NO: 80945 - DNA, 217 bp, Glycine max
  Clone ID: 700960975H1
agggttccatcccatctattctatctatttagataaaacacgaaatcccactcttaatcgcaagcaattcctctctctgagagaagttctcgaaattcttctgatactcgtagaattttaatggcttgttcatcatccgattcaaaaaaaccagtgacgtcgctgttgttcttttccttcctaattccgataccttccgattctctttccacacaac

SEQ ID NO: 80946 - DNA, 243 bp, Glycine max
  Clone ID: 700960976H1
gaggacatgttctgccatgaattccatcttgttgaccttagggtcatggataactgcttgacagttaccaagggtgtggaccatgttttcaatcttgctgctgatatgggtgggatgggttttatcagtccaaccactcagtcattatgtacaacaacaccatgattagcttcaacatgattgagggtgccaggatcaatggtgttaagaggtttttttatgcctctagtgcttgtatctatc

SEQ ID NO: 80947 - DNA, 237 bp, Glycine max
  unsure (1)..(237): unsure at all n locations
  Clone ID: 700960978H1
cagtaacaaggacacaactgacaacaaataagnaattgagcatgagtaggataatgtaaattattgtgtactggcttgggtggctaatcatgcaacattaatcaggtgggaagatacatcctggaattggcagggcaagagcatttaggacctctctgcccactgtatgtttttttaataggggtattgcatttttattcccaccaacttctgaagctagaaattcaatgtttgatg

SEQ ID NO: 80948 - DNA, 247 bp, Glycine max
  Clone ID: 700960979H1
ctcttcttcccccaacaatataaagcagaccataccattaagaaacaacacatctatctcagtccccaaaccaagaaaccctaaattaaattcatgtgctcctccaggtctaccagtgctgcaccacaagaccttgttacttggaacaaggccacggcttggcttccttaaaacacatggatgcgtgtcataatcgtgccaacaactttgtctctaggtccatgaccatgggttacggcacttccta

SEQ ID NO: 80949 - DNA, 271 bp, Glycine max
  Clone ID: 700960980H1
cggaattccgctcgacagctcgagctcaaaactgagaacaagaagaagaagaaagagagagagtgaaaacgggaaaagcaaaaagttgtttctgtgattgattctctgcaaccgaatcatcatcagccacttcttcccgtttcatctctccatttcttcttttcttccgctctggttcagtaaggcgaagagggttaacgttattcataatggttgcaacagccgctacggcgtcgtttcttcccgtgcctttgccagacgctggaaaagg

SEQ ID NO: 80950 - DNA, 244 bp, Glycine max
  unsure (1)..(244): unsure at all n locations
  Clone ID: 700960981H1
gttccgtccgaagggactcggcttgagctagccaagccggttgtgaagtcacgactgaagcggctcctcgagcgccaattctctggcgttctcagaaattcggcgccggaaaagattgccggaggaatgaaccgcttaacggctccaatgatttcgagccgagctcggcgtgtttggcgaaaatggtgcagagtttcatcgaggagagtcacgatgangcatccgcttcacaccaccgcaaccg

SEQ ID NO: 80951 - DNA, 242 bp, Glycine max
  Clone ID: 700960982H1
gttttgacgatgaagcaaatcatctcttaatgcacaggaacttgcccgctgtcagatgggttggtggtgtacagttggaattgatagctatagcaactggtggaagaattgttcctaggttcaggagttatctccagaaaagttgggaaaggctggtatggttcgagaaaagtcctttggtacaacaaaagaccgaatgctgtacattgaacattgtgcaaattcaagggctgtaaccatat

SEQ ID NO: 80952 - DNA, 242 bp, Glycine max
  Clone ID: 700960983H1
ttttcattttcttataaatgaacaggtataacagtttgtctgcatatgggcagtcaaagcttgctaatgtgttgcataccaatgagctcgcaagacggctaaaggaggagggcacaaacatactgcaaactcagttagcccgggaccaattgccaccaatctatttcgttatcacagtttaatggaggtgtttgttggtatacttggtaaatatgcgatgaaaaatatacagcagggagcag

SEQ ID NO: 80953 - DNA, 243 bp, Glycine max
  Clone ID: 700960984H1
ttttaatccaaatggccctttacattacactaataattggcctcctagtaaacaccctagtactctataaatagcatttgcatgcaccttagtcttcaccaaaatactcctcttggcatcttgtgttgtgtccctcttttaagctatttccttctcttaacacaattggttgtgccaattgccatagtcaccaaccaattaacaaaggtatatatatcatcatatcatcaccaaatgaaaaat

SEQ ID NO: 80954 - DNA, 243 bp, Glycine max
  Clone ID: 700960985H1
cggctcgagccagttttgaatatatttttattccttctttgtttcttcactttcttccatacaccttacgatattatctcagactgttgtcctcaaagttggtatgtcatgtcaagggtgtgcggagcagtgaacagggttttgggaaaaatggaaggtgttgagtcatttgacattgatctgaaggagcagaaggtgacagtgaaaggaaatgtggagccagatgaagttctgcaagccgtt

SEQ ID NO: 80955 - DNA, 242 bp, Glycine max
  unsure (1)..(242): unsure at all n locations
  Clone ID: 700960987H1
tgcactgcaacttagccacttgaacccccttcgtaagcctcttcacatcttcacttcttcacttcttcttccgcactaatacgaaaatagagggaattcacaaaagaggttaccatgttggacgtgagagagaggagaaggagttggatctcacttctccggaagttgncaccaagtacaagatcgccgcggagattgttaacagggctttgcagttagttatttcagaatgtaaaccgaag

SEQ ID NO: 80956 - DNA, 245 bp, Glycine max
  Clone ID: 700960988H1
ctcgagccgataacaatatataatgtcggttgaggagatgcagtcacagaagaggaatgtgtttgacgcagaaacggcgtcgtccttggtgaaggagctgagggacaacttcggttcgggaaggatcggagttatgaatggagagtgtcacaagtgaaggctctgttgaaggcggtggttgataacgaggaacagatcgtcgacgctcttcgttccgacctagccaagcctccactcgaaaccat

SEQ ID NO: 80957 - DNA, 244 bp, Glycine max
  Clone ID: 700960989H1
atagcagctggaatgacagttaatgattggactgcattttgtggttccgacaccacagcaacagagctatctgtaatcgagagtgttttcaagctgagagaagcgcacctagcgcaattgtggatgagatgaggaaatctctcattgatacctatgtctgaactgtggtagtaatagtgttttgttttatgcaagatattgcactgctcattgttgagatcttctaagttaagttttggtgata

SEQ ID NO: 80958 - DNA, 208 bp, Glycine max
  Clone ID: 700960990H1
ggctcctccatatccctccctgctcattctcctatttttgttgacaagccaagttgattgttatggttcagagaaggaaaagagtaaaactttcataatccaagtccagcacgaagccaagcgtccatattcccaacccacaaacactggtacgactcctccctctcttccatctccaccaccgcttctgttatccacacctaccaca

SEQ ID NO: 80959 - DNA, 242 bp, Glycine max
  Clone ID: 700960991H1
caccgttcgttcatcaatggcggttccgctgcattcctagattgctctctttttcaccaattttcattcgttgcgtgtgtttgttcgctgagtgcgttagttattacagcaatggagttcgagaccccaccgcgacgcctctcaactccgccatgacctacgacgaagcctccatggagcgcacaagagcttcgtcaacgccttgcaggaacttaagaacctgaggcctcaactttattctg

SEQ ID NO: 80960 - DNA, 243 bp, Glycine max
  Clone ID: 700960992H1
ttggtgcttcgtttgagaggtggcatgcagattttcgtcaagactttgacaggaaagaccatcaccttggaggtggaaagttctgatacaattgataatgtgaaagccaagattcaggataagagggtattcccccagaccagcagaggcttatctttgccgggaagcagcttgaagatggaagaacccttgctgattataacatccagaaggaatctactttgcacttggtgttgcgacttc

SEQ ID NO: 80961 - DNA, 242 bp, Glycine max
  Clone ID: 700960993H1
gcatttccctcatgttaaaatgaaattaaaagtttggaggaaggacactgatggtgacaggtctcgcatattatctgttagattagagaagaccaattctagacgacactcttctagagcattgtacctcgatttccaaagataaaagaggaacaatggtggttggttcttggtaatacctctacgtctgagctatatgctttgaaaagagtttctgtttcagatcacttagttacctcaat

SEQ ID NO: 80962 - DNA, 240 bp, Glycine max
  Clone ID: 700960995H1
cagaaacagcaaaggttgcaactatgggcctccttatgagtggcaagtatacagcactctgaatggctgttatggcattccctgggttcattacaagggtcggcaaggagatttctacattttggtcatggacatgcttgggcccagtctttgggatgtatggaattctgttggtcaacaaatgtcaccaaatatggttgcgtgcattgcagtagaggcaatatcaattcttgagaagct

SEQ ID NO: 80963 - DNA, 243 bp, Glycine max
  Clone ID: 700960996H1
cgacccttgttaaaacctcatccacggattccgagcctttaagaaagaattctgcttactgtgtccaacctgcatgtattgagcccccttcctgcatccagccatcctgtgttgctcctactagtgcttttcaccccggctcttctctagcaaatcaaagaaagaccggaagccgaaaactgaaattggtaaccaagtgagtccgttacctgagctcattgcagagcctacggatgctcggtc

SEQ ID NO: 80964 - DNA, 271 bp, Glycine max
  Clone ID: 700961001H1
ctctccctgttttccctgccaaagtaacctcgttagtgacaaacaaaaagctctctcacactgagtgaaagaaagagaacaattttgaggacaaagtgaagagagaaagaaaagaagagtgagttgtttcagacagtagtagtagttagatagagaaggtggaagtggaaaaagggtgtttgttgtattgtgaagtgaaacaaggggtgggggtggtgtgaaacaaaaaaaggtgtatagtgagagagaaagagagagagagatggtgggc

SEQ ID NO: 80965 - DNA, 272 bp, Glycine max
  Clone ID: 700961002H1
gagtgaattttaaataattacagataaaataatcgatagctttgattttaaaaattaatcataatcatcggttaggttgcaacataatacttaattcgcttaattttttaactgcgcctcagagtattcataacatattctattaaattaataagctggtgatgtaattaatattaatatgtagttttggcaatcttattggcagaagatgctaggtggagttcatcaatattctggtaggtataatatcttcatgaatctaatataacgtt

SEQ ID NO: 80966 - DNA, 270 bp, Glycine max
  Clone ID: 700961003H1
ggacgatatctccgatcacttctggcagccgcctatccctgtctccgccgcccaaacttcctcccagatgagccgccgcgcctccgagtgggccttccaacgcttcctccaggaagcttccgcctccgcaccctctcctccgtcttcttcctccgccgccgacgtcgtattcgtcgagatcgaagatcaacctaaacccgcccctccccctccgtcaaacggcgccgttctccccaatgcccctggtcccgtcccccttgactccgacga

SEQ ID NO: 80967 - DNA, 270 bp, Glycine max
  Clone ID: 700961004H1
cgcgattatgggctgggaagaacattggaagtgataagtgataaaacagagtttcgttgaatctgcactaaaaccctacgcacacatcttggtgtaagtccaatcgatatagcagcaatgtctacgcttgaaattgaagctcgagatgtcatcaaaattgtgcttcagttttgcaaagagaattcgttgcatcagacttttcagatgctgcagaacgaatgccaggtttctctgaacactgttgacagcattgaaacctttgttgctgat

SEQ ID NO: 80968 - DNA, 271 bp, Glycine max
  Clone ID: 700961005H1
gaacgaagcaatcgcaagtcatctgttctgtcccgcgggagcagacgacctgtcttcatcgccaaacaacctcaaaaacattcatcaacgttcactattaatccatccatcattaagtaagaaaataaggttcgatttttttatctttgttttgcttctgatccatcatggaggtgccgagttcctgggatgcccttcgcaaacaggcaagaaaacttgaagctcagttggatgagcagatgaattcttatcgtaaattggtttctaataa

SEQ ID NO: 80969 - DNA, 267 bp, Glycine max
  Clone ID: 700961006H1
gtgggaagttgaggggaagtgggttgttaaaggagcagttgatgtagacattggtgcaaacccttctgctgagggtggaggagaagatgagggagttgatgatgcagctgttaaggttgttgacattgttgacacattcagacttcaggagcaacccgcattcgataagaagcagtttgttaccttcatgaagaggtttatcaagaatttgactcccaagctcgatgcagagcaacaggagttgtttaagaagcacatcgagggagc

SEQ ID NO: 80970 - DNA, 271 bp, Glycine max
  Clone ID: 700961007H1
gttctttgaagaagaacccttctctttgcgcgtgtcccgttctcttctccaatcctcctccatccccactgtgtgatctgatcctaaaccctatagccatgactaccatggaggttaagctatggaatgacaagcgcgagagagaaatgtatgacaactttggggagctttatgccattatcaaagccgctgagaggcttgagaaggcctatgttagagatataatctcaccccaggaatatgagttagagtgccagaagctcatagctca

SEQ ID NO: 80971 - DNA, 263 bp, Glycine max
  Clone ID: 700961008H1
cggctcgagcggctcgagatgattttgatgggaataactcatgaatagagattctcctccaagcctagaatgagtactatttacaatatggagggcaataggaacaaaatattaaaatgtcactggaaaagaactgatacttggaggagaatctctattcatgattttgatgggaataactcaccatttggtttactcttgtaactaagataaagtgattgtatacaaattccacgaccaaaaaaaaaaaaaaaagggcggcc

SEQ ID NO: 80972 - DNA, 269 bp, Glycine max
  Clone ID: 700961010H1
ctcccttcatttcgaattttcatatatcacattcccttcactttctattctttcttcttcttcacttcaagacagccaaatgaacgatcttatgaccaaatccttcaccagctacgtggacctgaagaaggctgcaatgaaagaagatgttgatttggaagctggtgttgttgtttcttctgctactcctcgcaacgtggaacttacctcttccacaacacacttggacaccgacatgggtctcttcctcgaagaggctgagaaggtga

SEQ ID NO: 80973 - DNA, 266 bp, Glycine max
  Clone ID: 700961012H1
ctctctttcttctcggtccagtgtctctttcaaagtgctgctgctgccagcattgacctgagctagagcagtaaccgtcatcaccactgccagtacggtaccatggctgtgcttcaatctttcgtttcggtccacccagattctcacttccccatacagaacctcccctacggagtgttcaagccccaatccgcttctcctcctcgtcccggcgtcgccatcggagacttcgtcctcgacctctccgaaatctcttccgctggtct

SEQ ID NO: 80974 - DNA, 263 bp, Glycine max
  Clone ID: 700961013H1
ctcgatacgcttctttgttgtgtcccgagctcagttccttccacccaacatacgacataactctctctctctctctggatatatcatatatcatatatcatgccaccttcccctattactactactactactgttgtgtgacctgagactggttccaagcacagcatttattattattcttctatataagtatactatataagaaagagggtatcaaagccatatcagaaaacacaaaggaataataatatattgcggggggt

SEQ ID NO: 80975 - DNA, 260 bp, Glycine max
  Clone ID: 700961014H1
cgcaagcaaaaagaaagaatcccaggcgaggagaaagatggaggggaaggagcaggatgtgtcgttgggagcgaacaagttccccgagagacagccgattgggacggcggcgcagagccaagacgacggcaaggactaccaggagccggcgccggcgccgctggttgacccgacggagtttacgtcatggtcgttttacagagcagggatagcagagtttgtggccacttttctgtttctctacatcaccgtcttaaccg

SEQ ID NO: 80976 - DNA, 265 bp, Glycine max
  Clone ID: 700961019H1
gcaaatattgcctattcggcaatatggcggaaaatggttcatgtgagctgaacaagtttgtgctgttttgtttgttgttgctaatacaagtggcagtttctgaaatcatttttgaagagcgatttgatgatggatggcgaagtaggtgggtgaaatcagactggaaaagcagtgagggcaaagcaggttcattcaagcacacagctggaaaatgggctggtgatccagatgacaaaggtattcaaacatccagtgatgccaaaca

SEQ ID NO: 80977 - DNA, 265 bp, Glycine max
  Clone ID: 700961020H1
aaaaccactgctttgagcttgcctggactcaaccttgcaacccttgcagctctccctagcaaatgcggggtcaacttgccctacaagatatcccccaccattgattgcaacacggtaaagcactgagcagttgcacgagggtttatgcttgttgactttaaacttgtttcgcagtaataatcagcaaagagagaacaaagatggtttaatttcttccattgtctggatcccactagggagtatactttatactaggatgatgatg

SEQ ID NO: 80978 - DNA, 247 bp, Glycine max
  Clone ID: 700960306H1
agataatcgaaaacagaaaatcttgagaactattcgaaactcagaagaattacgggaaggggccattgaacagctggaaaaagcccaagcccgcttaaggaaagtcgaaacggaagcagatcgttttcgggtgaatggctattctgagatcgaacgagaaaaattgaatttaattaattcaatttatacgactttggaacaattagaaaattacaaaaacgaagccagttcattttgaacaacaaag

SEQ ID NO: 80979 - DNA, 131 bp, Glycine max
  Clone ID: 700960307H1
atcatttttcattcacttcagaatacagcacattgctgtctccttcggcaaatttggggttacaatcccctccaccgattcatccccttaatggtgtgttagaattagatgcggctttatgtagaacagat

SEQ ID NO: 80980 - DNA, 132 bp, Glycine max
  Clone ID: 700960308H1
atcagatcagaaagtaattaaggagaagaagaaagcaaaacgctcgagaaaaaaacagcttgttcaggaagaggagagggttagaggtagagtcagcatgaaggtgtacttgtcatacatggctgcagcata

SEQ ID NO: 80981 - DNA, 258 bp, Glycine max
  Clone ID: 700960309H1
attctctgtctctctctctctctctcgatcaatcatggctttgcccaatcagcaaaccgtcgattaccctagtttcaaactcgtcatcgtcggtgacggtggtacaggaaagacaacgttcgtgaaaaggcatcttaccggtgaatttgagaagaaatacgaaccgaccattggagtggaggttcacccattggatttcttcacaaactgtggaaagattcgcttctactgttgggatactgccggacaagagaagtt

SEQ ID NO: 80982 - DNA, 261 bp, Glycine max
  Clone ID: 700960310H1
gtgcagagtgcgaagattcggaagctacaattggaaactgaaggtgcaataagagaagcagaagagacgaggagaaaagttcaagagctgaagcaagaagttgaaaaatcaagggctgtggctgaagaagcagaggaaaaacttgagctcgttctggtggaggctaaagaggcaaaagcagcagaacaaagagccgttaaagagatgaagattttgtctgaagtgggtagagtcccgtactcaaaattcaatggcaagatc

SEQ ID NO: 80983 - DNA, 250 bp, Glycine max
  Clone ID: 700960312H1
aggctcataaatcttttttatgggtttcagggtcactactactctgtctctgctctccctgttttggctcttgtccctgcaccaagcaagagctgcaaagttccacaatgtgagtggcttgagagggaaaaagccagttgtagcaaatgggtgcaatttgttcctgggaagttgggtggttgacacgtcttatcctctctatgactcttcaacatgccccttcattgatcccgagtttgattgccaaaag

SEQ ID NO: 80984 - DNA, 261 bp, Glycine max
  Clone ID: 700960316H1
ttcggctcgaggaacagatgggatccgacaatccgagtttggctggtgacagcagtatagtagatctattctggaagaattttctcagtacttgttcaatgactctcaacatgcaactacctctgatgaacagcgtgtgatgtcaagggtgaactcactttactgccttctgcagaaggatccttcttcagcagaagacataaacacaatgacaaaaaatggcaatagtctgagagatgcaaatgctttgtcaagggtgaa

SEQ ID NO: 80985 - DNA, 263 bp, Glycine max
  Clone ID: 700960317H1
tcaaggtttggagatgggtggtgagtttgatgttagtggggttactgcccgtgtcaacaatgggtcgattcgtggtggagaagaacagcctgagagtgacatcgccggagaaaataagagggacacacgacagtgccattggcaacttcggaacacctcaatacggtggtagcatggccgggaacgtaatttaccctaaggataacaaaaagggttgcaaagagtcgatgagttcgggatttccttcaaataacccccggtgc

SEQ ID NO: 80986 - DNA, 259 bp, Glycine max
  Clone ID: 700960318H1
attgatgttgactctctcaagggcttgccttatctcagaacgttgagtttcatgaacaatgatttcgagggtgcatggccagagattcaacatttgattggtctcaagtctatttatctttccaacaacaagttttctatgggagattccttccagaacttttgaagggttgcagtggctgaagaaggttcatttgtccaacaaccatttcaccggtgctgttccaacttccctcgtgttgctgccgaggctcatagag

SEQ ID NO: 80987 - DNA, 254 bp, Glycine max
  Clone ID: 700960320H1
gaagatcagaatcagattaattatttcatgcagaaggggagtgacagaagaacaaatacccttcattgtttagagaaattgagttcaatagacgggtagccgcattccatcaggaaggaagcagaccttcctgagaagtcaagttaccaactgacgatcactagtggacataaaatgatatgatactagaaatttatgcaatagcagaatataaccaaatttcaaataacaaaacaaaaaaagggcggccgccg

SEQ ID NO: 80988 - DNA, 257 bp, Glycine max
  Clone ID: 700960322H1
agcaaaacaaattaaccaacaacaacaaaagcaacagatcgaaaacatcaaaagatggcaaacaaaaacgttgcgttgttgttgttggtgtgccttgtagtcgctgccggggttgaggcgaggaggccctacgccgttgtccgagatgaatgcttcggttattgctgacatggttgcatattcccctcatcatactgcaattggtggtgtgataaagtgtgcaaatacccaatagacttcggtgacgatggcctgaa

SEQ ID NO: 80989 - DNA, 257 bp, Glycine max
  Clone ID: 700960323H1
acgaaatgcagcgattaaggagttccttaaaaaaaagtatctcaattcacgggctgccattgaagatacttatttttccaccaaggatacttttgagagacatcgcgtggttttcaccgttggaacttccattgcttccgttgccactgcttggttcggttattccttgcgccatttacatgacaccaaagttgatcaaaggcttcaatctatcgaaaattctatgaaaaacaattccaatctccaacattcccaaa

SEQ ID NO: 80990 - DNA, 257 bp, Glycine max
  Clone ID: 700960324H1
ggcatctttagtacgtggttggaatgtgcaggaacacatagtttttttcatcataaatatgctttcacctccagttcctcctaaatattccgggacagaaagttatttgattagccatgctccttttttgaatgtctttctggtgggaatttcatctgtagacagtgttcagatattctccctacatggcgtggttccactacttgcagctggtttaatgccaatatgcgaagcttttggatcatctgttcctaatg

SEQ ID NO: 80991 - DNA, 216 bp, Glycine max
  Clone ID: 700960325H1
aaaatggcggggatgcagaagctgccatacggcgacgttgattccagtttgagggccttggccggtcgcgccgagggtttcggccgcctcgccattggtggcctccacggtcctctctatttcgtcaccactctttcagatgatggccctgggtcccttcgcgaaggttgtcgtagaaaggaaccgttgtggattgtgtttgaggtttcgggtacg

SEQ ID NO: 80992 - DNA, 255 bp, Glycine max
  Clone ID: 700960326H1
cgcggggaagagttagtttcttctctcttcgatggaaggcggggaagaggttctcccttcggccactgccacctccgccgccaccggcaatcccaccgcttcgcctcctccgctcgctgatcttgtcggtgctcccgatctcgctgctgcctcggacgacgtcgttacccaacctgaaattcacgcgctgatttcagacgaagagcacgatcacgagcatgaacatgacgatgacctcgagcacgagcacgatca

SEQ ID NO: 80993 - DNA, 253 bp, Glycine max
  Clone ID: 700960328H1
gaagaacacgattgtgaaccgtcccttggctgggacagctaaaagggcgaaaacacctgaagaagatgcaaggttagaagcaatactgctgagagatgaaaagcagtgtgcagagcatgtcatgttggttgatttgggacgcaatgatgttggaaaggtttgctatagatacattttaatggatattcctatttatttatcttgttcaaggtgtcttgaagcaatagcttgctcaattatattgtttatttaa

SEQ ID NO: 80994 - DNA, 256 bp, Glycine max
  Clone ID: 700960329H1
aacaacaacgtccaggccgtccataaccaacaggctgatttcaagaactggctcagcgctgtcatctcttaccaacaggcctgcacggagggttttgacgatgccaaagacggtgagaagaagatcaaggagcagttgcagacccagaccttggacaatgttcagaaactcactggcatcacccttgacattgtgagttctttgtcccacatcctcgagcagttcggcttaaagtttaatcttaaacccgcatctc

SEQ ID NO: 80995 - DNA, 256 bp, Glycine max
  Clone ID: 700960330H1
gaacaaagcacttagtgctattcaataattacgaaaaaccaacagcgagtgttgtttttgtttggtccaggctggaccagggaatgaatagagatgagaggctttcggttgaagagaactgagttaagcggcgaagcaaacgcagaatcggcggcagaaattgccaccggaagcacgtcgaagacgggtgaaccaaacacaaaattccatccaccacttctcgcttcaatccccaactcaaatctgtgaagaaaat

SEQ ID NO: 80996 - DNA, 254 bp, Glycine max
  Clone ID: 700960331H1
cggaccgtttattaaagccttttggggtctagtgaggagaagttgcagtgcacagtgtgcttggaggatgttgaggttgggagtgaagcaaaggagatgccatgtaagcacaagttccatggtgattgcattgtctcatggctcaaacttcatggttcttgtccagtttgcaggtttcagatgccatctgaggattcaactcttgaagccaatgtgggagttggaaatggggacaatcagaacagtgagctggt

SEQ ID NO: 80997 - DNA, 255 bp, Glycine max
  Clone ID: 700960332H1
atttttactatggcagatgtttcttcttttgtcccgtgttaaaactgtgttgtcattgtgattaatggctgccataacattaaacatgaatgttttagctatttatgattactcccagatctggaagaagtgttaatatataaaaaaaatgtgaaagtcaaccaatgaatacttgttggtgacatgtttctgatgtttgctgctacatttttatatgaatggatcattactataagtctataataaattacatta

SEQ ID NO: 80998 - DNA, 262 bp, Glycine max
  Clone ID: 700960333H1
tgagctgcgggaggaggctcgtgatcatgcacgtttgcgcaatgcatattttgagcaggcacggcaagcctaccttgttggcaacaaggcccttgcaaaggagctaagtgttaaggggcaactgcacaacgtgcatatgaaagcagcacatggaaaagctcaagaatctatttatcgccagaggaatcctgttgctccagagaatggaagagcgccccaaagaatgatagacctacatggtctgcacgtaagtcgaagcgat

SEQ ID NO: 80999 - DNA, 259 bp, Glycine max
  Clone ID: 700960334H1
gtgattgataatgaggagcagaacaaatcaaattctgtttctgttccagcgccggcaacagttgccacccacaccagaacgattataattatacatccgcctccggacattaggaccattgttgataaaacctcccagttcgtcgccaagaatggtccagaatttgaaaagaggatcattgcaaataacacaggaaatgtcaagttcaatttcttgaactcatcagatccctatcacgcttattatcaacaccggttgt

SEQ ID NO: 81000 - DNA, 257 bp, Glycine max
  Clone ID: 700960335H1
ctcttgttccttctccttgtgatcttcttcaaccttcagagtgagaaaacacattcagaaaccacgtttctctcttcttcttcttcttcttctttttcttctctcgaggtcattattaagtattcaccatggaggcaccatctcccaccaaacccaacgaccaaacaaaaccttccaacacttccaccacccttagtctggaggccggcccggcccaagcgagcccactccgaaaaatgtttgccgtggcgtccatc

SEQ ID NO: 81001 - DNA, 255 bp, Glycine max
  Clone ID: 700960336H1
agaaagagagaattcgtaaaccctaatttcggaaagatcggcgatgactgcctccaaggatcgcgagaacttcgtctacatcgccaaactcgccgagcaggccgagcgttacgaagagatggtggaatcaatgaagaacgttgcgaatctcgacgttgaactgacggtggaggagcggaatttgctttctgttgggtacaagaatgtgattggtgctcgcagacgctcctggaggatcctgtcttccattgagca

SEQ ID NO: 81002 - DNA, 252 bp, Glycine max
  Clone ID: 700960337H1
gtcacgcctagtcctccgaggcgcgagaatgaagatctggaagattatagcaaacctgacgaaatttctgatcgaaacgacggcgccgggaagatcgatacggaggttaaagcaaaaacaaaagcaaaaccggaatcagaatctgattctgaatctgagaaatctgccagtagtgaatcagacgattcgcgttcgaggaagaagagaaggaagggttctgctggttcttcgaggaaatcatatagcgagagt

SEQ ID NO: 81003 - DNA, 249 bp, Glycine max
  Clone ID: 700960338H1
ctcgagcccattcatccaatttatcgatccacgtccatccccgtctttcttctcctattctctctctctctcttgttcttctttttttcccccaaaaaagtgagagaagaacaaagggaattgaaggaagagattgaaaaaaaaggggggatacccagataattaattcggtgaaatttcggattttgattagtgggtgtttctcttttcgtgtttttattacctcagtgcgtgaaggaaggggaaggg

SEQ ID NO: 81004 - DNA, 256 bp, Glycine max
  Clone ID: 700960339H1
aacagttgaagtgaatggcataaaaatgcatgttgcagagaaaggagagggtccagtggtgttgttcctccacggcttccctgagctctggtactcatggcgccatcagattctctctctcagctccctcggctaccgcgccgtcgctcccgatctccgtggctacggtgacaccgaagcaccaccttcaatcagcagctacaactgcttccacatagtgggtgatctcgttgcgcttattgactctctgggtgtc

SEQ ID NO: 81005 - DNA, 256 bp, Glycine max
  Clone ID: 700960340H1
ctacaaccagactcatgaaatctcctcctcaatagttaactaacacatccttaaaatattcctcttcaatctgctcaatcttccactcttgtgttgtcttgtgtgtgtttctccgcctagtcctagatctgtctccccaatggctggtttcttctctcttctaaggcgcctctatctctccctttacaattggaccgttttgtttggatggtgtcaagttctgtattttgttctcaagacattgaacgaatcgggt

SEQ ID NO: 81006 - DNA, 252 bp, Glycine max
  Clone ID: 700960342H1
ctcatgcctatgcaacagttccccgtagaaaacaaagtccataaagtgaaacataacatgctgctattttaaaaaccttaccttcaaacctaaatctcacagttccgagttctctaattcttgactccgttgggttcttaatccacttatatccccaactagaatcagaattactttcttttttcctttatcttgttcaattcattggcattcttctaaaatgattattatagcacgccttatgtttcttct

SEQ ID NO: 81007 - DNA, 250 bp, Glycine max
  Clone ID: 700960343H1
agggtctagaacaacacaacactacggattgaatattgaattaaacgacgctcatggctacggtgccggagaagaaagcgaaggaagcattcttcgacgacgaattcgctctggccgttgatctctactctgaagccatacgattggatcccaacgacgcaaatctcttcgcggacagagcccaagcccatatcaaactcaacgctttcactgaagccgtttccgatgccaacaaagccatccaattaaa

SEQ ID NO: 81008 - DNA, 251 bp, Glycine max
  Clone ID: 700960344H1
gggaaagcaaggaggatggacacaggagacaagaaaaggaaagagataggagctgggatacagtgtttgagagggataggagaagggaaaaggaaagagatagaagtagggacagaacaataggtggcaagagagatagagacccggagaatgaaagggatgataagaatcgggaaaggcgagatgatagatatgggcacaaagatagagacactgcaaatggtaaggataggcatctgcgtcatgaggat

SEQ ID NO: 81009 - DNA, 248 bp, Glycine max
  Clone ID: 700960346H1
tgcaacaatttctaatttcgggcttcactgtttagtgtaactctcaagccatgtctccgggtcccgttcttgacgccggcgccgaccaacaaatccccttcgtcgacgacgcatccctcaagaagaaacctcaccccctggaagatgacgctcctattgtcgaagacgtcaaggacgatgacaaagacgaaaccgaagacgaggacgaggacgacgatgacaaggaagatgacgcccaaggtgctgct

SEQ ID NO: 81010 - DNA, 253 bp, Glycine max
  Clone ID: 700960347H1
ctttctctttctctgccaacctgcacactcttcactcgatcaaacagaacatggcaaagaatgtggggatccttgccattgacatctacttccctcccgcttgcgttcagcaggaagcattggagactcatgatggtgccagtaaagggaagtataccattggtcttggacaagattgcatgtcattctgtaccgaagtagaagatgtcatctcaatgagtttgacagtggttacttctcttcttgagaaata

SEQ ID NO: 81011 - DNA, 254 bp, Glycine max
  Clone ID: 700960348H1
gaacaacaaaaggaaaccttccgggtcgggaaataaaaacccgaacttgaaaagaggcaaaactccgatccacgttgaggttggagcttggagtgagtcaaacacgaaggaagaagaatggcgtctctgaggagtggagcttcttcgttgttgaatcgcctttcgaaatcgcttcttcttcattccaacaaaaaccctaatcctcaatctcagttattactcccttctctctctagactccccggtgcgatttc

SEQ ID NO: 81012 - DNA, 251 bp, Glycine max
  Clone ID: 700960349H1
ctctctctctctctctctgaagatggcttcacgcaggctcgtatcttctctgattcgatcctcccttcgtagatctcaatcgaagccctcaatttccgcatcgaaatcgatatacacgtcatccaaccgtgcctcaccgcacggatacttgctgaaccgcgtcgccgagtacgccaccgccgcggctgctgctaccactcccctggatcctcctcctccggggaagaaggagctcggcggcggcgggaaga

SEQ ID NO: 81013 - DNA, 255 bp, Glycine max
  Clone ID: 700960350H1
ggcctaatagttttgaattagatgacaaagaaaagcagagggaaaagcgaaaaggtcttgatcttgctaccacgcttgaacgtattgagaaaaacttcgtcattactgatccaaggcttccagacaatcctataatttttgcatcggatagcttcttagagcttacagaatatagtcgtgaagaaatcttgggaaggaattgcaggtttctgcaaggacctgaaactgatccagcaactgtgaacaaaattagag

SEQ ID NO: 81014 - DNA, 252 bp, Glycine max
  Clone ID: 700960352H1
ctagtgcaagtaagatgggcaaggaacataaagctgataatgtattggcagatcaaatgcatgaaatgtggagggaaatctgagcgtcaagaaaggatgatggatctgacagtttacaagtgctgagactctggatggagaaaacaagtaccgatgtgtcaggtgtaaatcttatgagaaggccaagaagaaaatgacagttttggaggcacctaatgttcttactattgcattaaagagatttcagtccgg

SEQ ID NO: 81015 - DNA, 246 bp, Glycine max
  Clone ID: 700960353H1
gttggtgcgttgatcagtgatttaataatgtggaaagatgtttcaaaatcgaccctttggtttggtttggggtgtctttgtttcttgtcttcttgcttcactaaaggggtcaactttagcattttctcggccatatcgcgattggcaattctcttgttgggtgtttcattcttctcaaactcagtttgtcaaagaaaccaggttgagaaaaggagttttccaagctgaaagaagatgacattttac

SEQ ID NO: 81016 - DNA, 252 bp, Glycine max
  Clone ID: 700960354H1
aaatagccctcttggccttcaatttcgtccaattccaaatcatggctagctcttcagttttcacgtcttacattgttttgagtctagtgatggcactagcaattagcggtttcaatttcaaaggggcagaggcagcacgtgccttctttgtgtttggtgattctctcgttgacaatggcaacaacaactacttatccaccacagctagagagtgcgctccaccttatggcattgattatccaactcgcagac

SEQ ID NO: 81017 - DNA, 251 bp, Glycine max
  Clone ID: 700960357H1
ctttcttctctccaccatcgttgtgtagtgcgtgtctctccgtaacttgccttcgactgtgacaacacaccgatcgccatgaacatcttcaccaagaaacccacggccaaagaggctctccgtgatagtaaacgacaaatgacaaacgccactagaggaatagaaaaggaaattggagctctacaattggaagaaaaaaagcttgttgctgagataaagagaactgctaagacgggaaatgaggcagcaac

SEQ ID NO: 81018 - DNA, 76 bp, Glycine max
  Clone ID: 700960358H1
ctttgtggcccgggtttgtgaggttgagttagacttgaatatcaaattctaaggtgaacatagagcatattgtatt

SEQ ID NO: 81019 - DNA, 249 bp, Glycine max
  Clone ID: 700960359H1
ctcacactggtcttcgcttctcattcatcatttctcacctaaccttctcctcctctcagtctcagatcagaaacctcagccagccatggcagcgttccagaagatcaaggtcgtcaaccccatcgtcgagatggacggagatgaaatgactagggttatctggaagtcaatcaaggacaagctcattttgcccttcttggagttggacatcaagtattatgacttaggccttccttaccgtgatgagac

SEQ ID NO: 81020 - DNA, 245 bp, Glycine max
  Clone ID: 700960360H1
cttttccctcgttgaaatgaaaatgggttcttctttgtggactttgtgtctaattttggcttcactagcctcttctgcattctgtgcctttccacggaggccagtggatgttccattcggcagaaactacgttcccacttgggcttttgatcacatcaaatacttcaatggaggttctgagattcaacttcatcttgacaagtacactggtactggcttccagtccaaagggtcatacttgtttg

SEQ ID NO: 81021 - DNA, 249 bp, Glycine max
  Clone ID: 700960361H1
gtggatgactgatgaggaatttgctagagaggtgattgccggtgtaaacccaaatgtgatccgtcgtcttcaagaattcccaccaaagagcacacttgatcccacactctatggtgatcaaaccagtaccataacaaaagaacaattggagattaacatgggaggggtcacagtagaagaggcacttagtactcagagattattcatattagattaccaagatgctattaagacatgggttcatgaata

SEQ ID NO: 81022 - DNA, 250 bp, Glycine max
  Clone ID: 700960363H1
gtttgaatggtgaatctgtttgttgattttttatgtgcggaaatttgtatcggtttgcaatatgattgtgtggctgattctgtattgggagtgctgtgtggtgtattggtggggtctgaatgtttcatgtggatgaatttagagcactgcgttgtattgctgtgctgtgccattttttagggatttctccaagtcaattggttaaagcttgaatagtcaatgaaataagactctgtactctggccttaaa

SEQ ID NO: 81023 - DNA, 252 bp, Glycine max
  Clone ID: 700960364H1
cctttctcttctcagttctcttgttagtattcttccaatctccgtcgatcaccactaacaccaccatgtcgtggctcctccgatccaccaagtcaaaactcctctcttcctcatcttcactttctagaaccttcccctctctctcacgctccggccccacacttgacctccctcagatcggagccatctctcccctccccgatctcttccaccgcaacaccgctaccatgcctttcgcgaaggaaaacgctt

SEQ ID NO: 81024 - DNA, 254 bp, Glycine max
  Clone ID: 700960366H1
gtcggacgaagagcaccatttcgagtccaaggcagacgccggtgcctccaaaacctaccctcagcaagccggtaccattcgcaagaacggctacatcgtcatcaaaggacgcccctgcaaggttgtggaagtttcgacttccaaaactggaaagcacggtcacgccaagtgccactttgttggaattgatattttcactgccaagaaacttgaggatattgtgccctcttctcacaactgtgatgttcctcatg

SEQ ID NO: 81025 - DNA, 249 bp, Glycine max
  Clone ID: 700960368H1
gaaactgtctacaaagtttcaaaacactatgttaggatgcaccaacacatgcctatcatttatgtgcaactttatacctaccagatatgtcgtgcgttaaattatttacatcaagtgattggtgtttgtcatcgtgacatcaaaccccagaacctattggtaaatccgcagacacatcagttaaagatatgtgattttgggagcgcaaaggtgttggttcctggtgaacccaacatatcgtacatttgc

SEQ ID NO: 81026 - DNA, 99 bp, Glycine max
  Clone ID: 700960369H1
atttgcaggaagctgtggtaagagaagagagagaagggttaggtttttctttctctctctttctctttgtgtttttgtcttctgtttttgacacaaaaa

SEQ ID NO: 81027 - DNA, 247 bp, Glycine max
  Clone ID: 700960370H1
gtactttgctctccgctggttgcgagttttatttggacgggaattttcactcagcaacctctttataatctgggatgaaatcttttcatcagataatagtaaattggaaaaacatgcagaggacaatgcagactctggttttaggatcttcaattcgtctcgcggagcatttatctcagctatggctgtagcaatgatgcttcatataagatcttcgttacttgcagctgaaaatcctacaacctgt

SEQ ID NO: 81028 - DNA, 251 bp, Glycine max
  Clone ID: 700960371H1
gttcttgaagcatatttcagagttttatcagagaacaaatgggttatattgggactcacggtgttgcagctctgcacagatataaatatagtggagtagatcattcctatgtggccaaatatgtactacaacccttttggagtcgctttgttaattttttccccctatggatgcctccaaacatgataactcttatgggatttatgttcttactactgtctgcattgcttggttatatatactccccacaa

SEQ ID NO: 81029 - DNA, 252 bp, Glycine max
  Clone ID: 700960372H1
aacgctcgctcgcactgtccagatcttaatcaagaggagtgagtcttgtttttccagccatgacgccgctgatcctgcatgctgggaaaaccaacaaaaattcttacaagacactcattgcagccgagtatgctggcgtccaagttgattttgcccctaattttgagatgggtgtctccaataaaactcctgaatttctcaagatcaatcctattggcaaggttcctgtgctggaaacccccgatggtccaa

SEQ ID NO: 81030 - DNA, 244 bp, Glycine max
  Clone ID: 700960373H1
ggaccgcggaggtcgcatatgagcctctaccgggatggccaaacacaagcaatcataaagagcctaaaaaatccaaggaaacgggatcaattcttgagaatgttcgttggaaagcacttggagttcttttcactgtctgggtccttatacttgcctccgagattgcaaaaagtcacacaacaacttgttcagtggaatattgggtacttaatctattacaggtccctgtggcattaggagcgac

SEQ ID NO: 81031 - DNA, 247 bp, Glycine max
  Clone ID: 700960375H1
gtgatactggatataaccaaggatgcaatggaggacttatggactatgcatttgagttcataatcaacaatggcggcattgattctgatgaggattacccataccgtggtgttgatggtagatgcgacacatataggaaaaatgctaaagtcgtttctattgatgactacgaagatgttcctgcctatgatgagttagccttgaaaaaggccgttgcaaatcagcccgtgagcgttgctattgaagg

SEQ ID NO: 81032 - DNA, 245 bp, Glycine max
  Clone ID: 700960376H1
gatttctactgtgtaaaaatctaatttgataaacggtgcattgttacaaactctaggcacactttacaagtttacatcaataacgattagttaaaggtgggctgtgattcacctcgaggccaataatgtagttagaatggggatctaatgggaatggccattaaataggaaataaaaattcattagtagacaagcactaaatcagcgttcacagtactacttcctgataattgctttctaaatgt

SEQ ID NO: 81033 - DNA, 83 bp, Glycine max
  Clone ID: 700960377H1
gttcgtccctcaccaataggtgctgattatgaacagaagcacggcaaagtgagctccagtcctgaaattggtgaattccatgg

SEQ ID NO: 81034 - DNA, 249 bp, Glycine max
  Clone ID: 700960379H1
aaaatatatattgatatatctcatatgtaatatgtatgtgttgtgtggatattaaaagcttaatatagaatatggtccctagttttgctggtttaatctaaaccttgttcttagaatttgtgatccccgcagaatattgtgtaatcagactagtcactaatctctttggttgacaataatagtcaaaataccagtgattgttgcacagaaaatttgcccatgtatttatacctcagcccaccatgaaat

SEQ ID NO: 81035 - DNA, 249 bp, Glycine max
  Clone ID: 700960380H1
aaaatgcccactttttttcttccaacgctcctcctcctcctcatagccttcgccacctctgtctccggccgccgtgacctcgtcggagactttctccggctgccctccgaaactgataacgacgacaacttcaagggcacccggtgggccgtcctcctcgccggttccaatggttactggaattacagacatcaggctgatgtttgtcacgcctatcaaatattgaggaaaggtggtctgaaagaagaa

SEQ ID NO: 81036 - DNA, 249 bp, Glycine max
  Clone ID: 700960383H1
accaaccacactcatagaactacagcaaagtgactcaccaattcacacacataataaacccactgctcttctctctacccctccgaaacccgacccgaaaatgcgatccaaatcggatcccccggtgccccctccctcctcctccggcggaagcgactcctcctccggcgcatccatcgatccgatcttccacctcctccgcgtcctccccttcagcttcctccgcccccctcgcctccgcctcaagct

SEQ ID NO: 81037 - DNA, 238 bp, Glycine max
  Clone ID: 700960385H1
cgaagacgcgcttcttccgccgccgtccgcgctgttcccgcacctgctgacgtggcagatcgtcttctgcgtcggcgagctcaccgagggccccgacgcgccggtagtgtgcctcgacgtcgtcgaggaggacgtcgccagatccagatctgtttactgtgatcagtgccgagttttcggttggagcggccatccggtgtgcgggaaacgttaccattttataatcaaagccgatggg

SEQ ID NO: 81038 - DNA, 248 bp, Glycine max
  Clone ID: 700960386H1
atcgctgtggttatcatcttcttcttcctctttcttagatctcttctttctctacgccgcacgccgaaaccatggccggaaaaggagagggtcctgctatcggaatcgatctcggaaccacctactcttgcgtcggtgtgtggcaacatgaccgcgttgaaatcatcgccaacgaccaagggaacagaaccacgccgtcttacgtcggattcactgacaccgagcgtctcatcggtgatgcggccaag

SEQ ID NO: 81039 - DNA, 249 bp, Glycine max
  Clone ID: 700960387H1
gggccatgctcggggccttgggctgcgtcttccccgaactgttgtcccgcaacggggtcaagtttggagaagctgtgtggttcaaggccgggtcccagatcttcagcgagggtgggctggactacttgggcaacccaagccttgtccacgcctagagcatcctcgccatctgggccacccaagttatcctaatgggtgctgttgagggttatcgtattgctggtgggcccctcggtgaggtcactgacc

SEQ ID NO: 81040 - DNA, 245 bp, Glycine max
  Clone ID: 700960389H1
tgatggaagtcggggacggagaccagtggcccatagattgagctttgttgagatggtggtcccatatggagatcctaatgatcctcactataggaaaaatgcttttgatgctggggaagatggcttgggtaaaaattctcattctctgaagaagggctgtgattgtttaggctatatcaaatactttgatgcgcatttcacaaacttctatggaggtgttgaaacaattgaaaactgtgtttgtt

SEQ ID NO: 81041 - DNA, 245 bp, Glycine max
  Clone ID: 700960392H1
gaaattgtggccatcaagaaagttctccaggacaaacgatacaagaatagagagttacaaattatgcaaatgctggatcatccaaatattgttgccctaaggcattgtttcttttcaacgactgacaaagaagaagtttacttgaatcttgtacttgaatatgttcctgaaactgtgaatcgcattgcgaggagctatagcaggattaaccagcgaatgcctttaatatatgtaaagctttatac

SEQ ID NO: 81042 - DNA, 247 bp, Glycine max
  Clone ID: 700960393H1
cccttctgagctttgattagtgtggcctagttgttgttttctcgatgagaaaggcttcttccactatgcattgcgcacttctgcgcttttgggttcccttgttgctgcttgctagcttcagctatgctccttctgtttcggccacaactgaaatttcagggattgagttgaccccagatgggaaggtgataaatgaagagttagcaaaaccaagtctaaaaggacatgatgaagaagcaaagttcaa

SEQ ID NO: 81043 - DNA, 247 bp, Glycine max
  Clone ID: 700960394H1
gcgagtgagtgtggcgttccggagaatatggaatggcagcggtgagtgagagtgaggtggtgcactctgtttggggatttgggaagttccatgacaagttcaatccattcctttcgcatgcatttctctcaaccttagagcactctgcttccgctgtcagggaaactggatgcatactacaccacatcgtttccaaatccaacaacaccaccattctcgccgttgtcccactctatgttaaaaccca

SEQ ID NO: 81044 - DNA, 247 bp, Glycine max
  Clone ID: 700960395H1
caaggatcccgaaggtctcttcccctgtattctcggccacgaagctgcagggattgtggagagtgttggagaaggtgttactaatgttcagcctggggatcatgtcattccctgttaccaggctgagtgtggggagtgcaagacttgcaaatcggggaagacaaacctctgtggcaaggttcgttccgccactggagttggggtcatgctcaatgatggaaagagccggttctccattaatgggaag

SEQ ID NO: 81045 - DNA, 247 bp, Glycine max
  Clone ID: 700960396H1
atcgagataactagaaacagtgtgatgaaaatgaaggtccttgttttcttcgttgctacaattttggtagcatggcaatgccatgcgtacgatatgttccctctccgaatgaacactggctatggtgcccgtactccggaggtgaaatgcgcaagttggaggcttgctgtggaagcacacaacatctttggctttgagaccattcctgaagagtgcgttgaagcaacaaaggaatacatccatggcg

SEQ ID NO: 81046 - DNA, 280 bp, Glycine max
  Clone ID: 700960401H1
gggaaagagaggaaaactgagaatgctggaggggagtattcaacacccactgcacacggcttcataactaaaccgccatcgctatcttcgactttctgcgccccaaagatgagaaaacgcaccgtttacgcatggcttgtagcacttctttgcttcctagttctcatgatcgtcaccccatccatcccccagtcccaagaataccatgatttcgccgaccaccgcaccttcctcggtattcctaatgcacttaacgtcatatccaatttcccttttctgg

SEQ ID NO: 81047 - DNA, 276 bp, Glycine max
  Clone ID: 700960402H1
agcgaacccaaaactagagctaccttcccttcaaaccttccactcttctctccttttccaatcaagggaataatatttcttagagatattccgaaaccatggctcacgccaatcctatgatttttgttgttggaattctaggtaaccttgtctccttctgttgctttctagcaccagtaccaacattctatcgagtttgtaagaagaaaaccacggaaggtttccaatcacttccttacgtggctgcactcttcacttcaatgctttggatatttt

SEQ ID NO: 81048 - DNA, 271 bp, Glycine max
  Clone ID: 700960403H1
gtgcatacatagctatctagctagcaagtgggacaagagatatatatacgtggtaccctagagtgccattctgtagtttatttctgctcaccaaggcttatcacatcacaatttgtgcattgcctcgtgtcctttttcttctttgcttgccaaaaatcttacacacacaggtatctagcaaatgggttctcaccagcaagaaccatggctattggagaatgggaaaccgagggtgttgaccaaggagaataggcatggccgttctgcacac

SEQ ID NO: 81049 - DNA, 264 bp, Glycine max
  Clone ID: 700960404H1
ggatgtcctaactcctaagacatggtgaggggatgtgaaggatgggctaaatgtgagtattagaactcatcggagaatgggaattgaactggtataaggtgcttcccggaaaattgtgtgctactaccactatgctacaaggccatcattggcacatatatcagttgttttacttgtattcatggtgtatagtagtcagcatgttataattattttctgaaaggtaattattactctgtggcagtcattgctttgtgatcccaa

SEQ ID NO: 81050 - DNA, 270 bp, Glycine max
  Clone ID: 700960406H1
taaaatttgcatgaagtattttccaaactttaatccaaatatagcctttgtcttttggcctctgcgttaatcttgaaaggtatatttgacggaatagggtgtggttgataatgtgatggacatggacagagttcgatttataaaatagctggagcaataccaagtttgatttatattatagcttagagaaattagatcatcacatgtctagattgatgatgtggttatatctgctatggtttctttatgccataagaaatatgatttgtg

SEQ ID NO: 81051 - DNA, 267 bp, Glycine max
  Clone ID: 700960407H1
ctcttcaaactagggttttacagaatataagctctctctatctttggttttcgtcattcaaatccaatccaatatcaaatatgagtcgtcatcccgaggttaagtgggctcagagacttgacaaggtctatatcacggtgcaattggctgattcaaaaaatgccaaggtggatcttacaccagatggtatttttaccttctctggtagtgctggtgctgaagaccatcagtatgagctaaaactggagctctttgacaaggttaatg

SEQ ID NO: 81052 - DNA, 268 bp, Glycine max
  Clone ID: 700960408H1
gatctttcattctcccctcttttctagctcccgtggagtctggaagcgttctcgagccttctcgctttccacgtgttttgcttttttccatttctctctctcccgtggagtttagaagtgtgcgttccggagccttttcgctttccatttctctctctcccgtgctttctagagttggtgctctgggaggagtaacgattcagcggttgaattgcgagaatggaaagcgttttagagagtgtcatgggggcacaaaaaaagttttatt

SEQ ID NO: 81053 - DNA, 269 bp, Glycine max
  Clone ID: 700960409H1
tgcttgcccaagttagatctcagatgctgcagcagcagcagcagcagccaccccaaacaattgaagctcagagcagtttacaatccaacacggtgcctccatcatccagcaacccggcatctgctgatgccgctgctgctgccgccacagctgcagcaacagctactgctgccgccgccaaggctaacagtgctccagtgggatcttagcaggacaagatgccggagatgggtagcaaacataactttgtacggccagattgaaatgtg

SEQ ID NO: 81054 - DNA, 265 bp, Glycine max
  Clone ID: 700960410H1
cagcaatcttgttgtggttcctgaaaagccttttgtttgtgcagatgagaattctccggctgagcttgtgttgaactttgctgagctggattctgttccctcagaaatgcacctaaataagatttttaggcgatttggacctctaaatgaatctgaaacagaagttgatagagggagcagccgggctagagtggtttttaagaagtgtactgatgcagaggttgctttcagtaatgctaaaaacttcaacatatttggatcagtt

SEQ ID NO: 81055 - DNA, 264 bp, Glycine max
  Clone ID: 700960411H1
ctctccctccctcctagggtttcacgtttccatgtgaaaacggattgagaatctctctctcattctctctctattttatattttctttcacgtcaattagggttgttttgctggcgtgattctgaaggcttggatctggatatcttctttgcttctttgctatggaagactcggattcagttgctacactgatagattctactacttctaagatacaacagctgcagaaggcatttgctgaacttgaaagttatcgggctgtta

SEQ ID NO: 81056 - DNA, 256 bp, Glycine max
  Clone ID: 700960412H1
atcacctaccactgataactccatcccttccttcctctttatcatcactgacattttcccttcatgtccctctaactcgaccacctttgtgtatgttcttcttcttcttcttcagatagctccaccccatcttagattcacactcacattttccacacatgggaatattgtgttacttatatagacacttgcttttgctgacacccccaagattcgggggtctcaaagatctggccttttgggtttgttcccttgt

SEQ ID NO: 81057 - DNA, 263 bp, Glycine max
  Clone ID: 700960415H1
taaaaaacgagaacgtcgatctggaacggattgcaatagaggaagtgtttgagcagctgaaatgttcaagagcaggtctaacatcagaggaaggggccaatcggctccaagtctttggagcaaacaaattggaagagaaaaaagagagcaagtttttgaagttcttgggctttatgtggaaccccttgtcttgggtcatggaagctgctgccataatggccattgctttggcaaacggaggaggaaggccaccggattggcag

SEQ ID NO: 81058 - DNA, 278 bp, Glycine max
  Clone ID: 700960417H1
ccgccaaagcaagcctgccctaaaaattgaacagggcagagagcaagggcaagcgagtgaacatgggaacctctgcgaacgctgtcgcaggtggtcgtggcggcgcccctgtccccaaagacgtcgactacgctaattacttctgcacctatgctttcctctaccatcagaaggagatgctctccgaccgcgttcgcatggacgcttacttcgacgccatttttcaaaacaaacgccacttcgctggcaagactgttttggatgtggggactggaagt

SEQ ID NO: 81059 - DNA, 272 bp, Glycine max
  Clone ID: 700960418H1
agaggagctccggaaggtgaatgttgatgcacctgttcttgagtataaggatgcagtacatgaatttgctacgctggacgtccttctgaaaagccctcaggcccaggtttgtgctgaggacattgccatatgggcgaagaaatatatctcacttcgaggtcatgaattctcatattgagtaggatatagcagatgatggttgacaggaagatatttacccaccccaactacaaaattagcttcagatcactcttttgctgctattgcatggg

SEQ ID NO: 81060 - DNA, 269 bp, Glycine max
  Clone ID: 700960419H1
atctggtgtcgtgtcccatttgaattgaattgcatcttgaaagatggcggaggaggagaagccaaatggagaagaacaagtgaaggacaacaacaacaacaacttatacgacgccgttcagcgtctgatcttggaaccttccaagatcaaggcctccctcatccctctcttccccgaagcttctagaacctactctcgccaactcctccactggtcccgtcaaggttctcccctccgacgcatcctcttcatctccattgggatagttg

SEQ ID NO: 81061 - DNA, 268 bp, Glycine max
  Clone ID: 700960420H1
gaagtgttggatgatggtgatgaaccaaaatataaacaacttgtgtactctgactatttcaagtatttcttcagcaaggctcatgatgggaagaaaactattgaatttgccatgatatgattggtgactgtatctatgaatatttggttttgactaagtctaatgacatcgtgggctctatgtagccgacctcacttaatagaataaggcttctgtaattgtatgatttgtgctcattgttggcagtatttaaggtgtttgaaatcca

SEQ ID NO: 81062 - DNA, 264 bp, Glycine max
  Clone ID: 700960422H1
gagaagaagaacaacaacgcaaagcggtgttcgttccgtacgcgctcgcgcacgcacgcacgcacgcacgaggccatgtcgggattcagagacactcacggttttgctcgtccaatcctcgctgtgaatctcgctctcgctcttctccacgccgccgttgcgagcctcgcgttctttcagttgctgagaattcacatgaggaatgcgcagttggttggactcggcaaaaggtgttccatgtattgattggctcttctaatttgg

SEQ ID NO: 81063 - DNA, 265 bp, Glycine max
  Clone ID: 700960424H1
aagtaaaacccaaacccaaacccctagaccttgggaatagtttgtgagttgtgttgaaaaagaatcggttcttgtctcgttttatttcagataagaaagtcttagattcagattcagttgttgacgctttgattcgttttcttctaattagatttgcgagtataggtgaagccctaggtcttatggataggtagtgagttttgttgttgaagaagaagaagaaaatgtctgtggaaaggtcgtttgaggcatgggaagaggtgca

SEQ ID NO: 81064 - DNA, 242 bp, Glycine max
  Clone ID: 700960425H1
gaaagttagtagtagtaattgtgtagttgggatttggcgaagtcggtttagggtggaaaaggataagaatgacggtgtgcgcggtgcgcctttccctcacacacactccctcctaattgcgatttaataaatccacctcactccttcatccattgaatgattctatcttccaatggatcctcctctcatcactgactccacattgtgccccgcttactctctcgccgagatttggcccggaa

SEQ ID NO: 81065 - DNA, 263 bp, Glycine max
  Clone ID: 700960426H1
tggacatttttgaagtaagagttggttatgttgaggactatggtgcttttgttcatttgcgcttccctgacgaatgaatgcaggtctttatcaccttactggactaatacacgtctcagaagtgtcatgggatctaattcaggatgtcagagatatcttaaaagtaggtgatgaagtgagggccaaagttgttggtattgattggggaaaatcaaggattaacctatcaattagacagctagaagaagatccactcttagaaa

SEQ ID NO: 81066 - DNA, 259 bp, Glycine max
  Clone ID: 700960429H1
tctagactcttctttttctctaagtctaaggggtgccctgagatcactttgagcaatggtgaaggctgtggcagttcttggcagcagcgagggtgtcactggaactattttcttcactcaggagggaaatggtccaaccaccgtaactggatctctggctggtcttaagcctggtctccatggcttccatgtccatgccttgggggacactaccaatggttgcctgtcaactggagcgcatttcaatcctaataacaac

SEQ ID NO: 81067 - DNA, 263 bp, Glycine max
  Clone ID: 700960431H1
caacacgaaagcatagccaaaaccttttttcgaagtctctgattttcgctaatggctccggcaaaggcagagaagaagccggcggagaagaagccagcggcggagaaggcaccggcggagaagaagccgaagcgtagaagaagatctcgaaggaaggagggagcgagaagaagaagaagcgcacgaagaagagcgtggagacctacaagatctacatcttcaaggtcctcaagcaggttcaccccgacattggtatttccagc

SEQ ID NO: 81068 - DNA, 264 bp, Glycine max
  Clone ID: 700960432H1
cattcagaacctggagacgattctcatgatcgcgagaggctcagagaaaaaagaggctcatcccgtcatggttcaaagtcccgagatggagacaaggacagaagctctgggggcattagggataggaagagggatagggacagagatcatgagaacaaggataggaagagagaccatggggacaaggatgtgaagagagatagggagagagacagagaccacggtcgtgaccaagaaagggacagaagggaccgtgggagtgag

SEQ ID NO: 81069 - DNA, 92 bp, Glycine max
  Clone ID: 700960433H1
gaagtttttatagctcggaacaatcagatggatgcaatccaaaccgataaaatctatgttgctgttggggatgatgtgcacgatggatataa

SEQ ID NO: 81070 - DNA, 272 bp, Glycine max
  Clone ID: 700960434H1
gataaaagcacacccatggcacaagatattccacaaaaagatgcctccggaagcaattgatcttgcatccaggcttttgcaatactccccaagtctccgatgcactgcgcttgaagcatgtgcacatcctttctttgatgaacttcgagaacccaatgctcgcctgccaaatggtcgtccatttcctcctttatttaacttcaagcaggaattatccgaagcttctccagagcttgtgaacaaagtgatacctgaccacatgaagcggcaaa

SEQ ID NO: 81071 - DNA, 267 bp, Glycine max
  Clone ID: 700960435H1
agcttccattatttacaagattacgtctgcgttggttcaacttatgagattactgttactaaagttgcctgcaagtttgagaatagaactactgatattctagttttttgtacggtatggtagttgacttatttttaaccttgttcctgtgagaaaacatatttagcctatgacttttggcagtttgaggattctgaagctgataccatgccacagattcaatcatttgggtctttttttgttgaagttaaattgtcttattgcgtg

SEQ ID NO: 81072 - DNA, 268 bp, Glycine max
  Clone ID: 700960436H1
ctcttaaaagagcctttgctttttctttaggcctttccgtcttaagtacttgtgtcattttctctcgaagcaagagaaatgttcatcgagagtttcaaggttgagagtcctaacgtgaagtacacagagactgagattcagtccgtgtacaactatgaaaccactgaacttgttcacgagaacaagaatggcacttatcagtgggttgtcaagcccaaaactgtcaaatatgaatttaagaccaacacccatgtccctaaactagggg

SEQ ID NO: 81073 - DNA, 264 bp, Glycine max
  Clone ID: 700960437H1
actcactacccagaaactagggtttaccgtcacaccccaatcgtagccgtcgcactttgcgttttctgcgtcatctccgattccccgacaatggccacccaaatgagcaagaagagaaagttcgtagctgatggagtgttcttcgctgaactgaacgaggttctgacaagggagttagccgaggacggatactccggcgtggaagttagggttacgccgatgcgcaccgaaatcatcatcagagccaccagaacccaagccgtt

SEQ ID NO: 81074 - DNA, 263 bp, Glycine max
  Clone ID: 700960440H1
cagatcgcagcaaaccagagattgaactccgacgatgcctcccgtcgctcctcgatccggcgatgccatattcgccaacgtcgaacgcgtcaatgcggagctgtttactttgacgtatggcgcaattgtgcgtcaattgctcacggatctggaagaggttgaggaggttaacgagcagcttgatcaaatgggttacaatattggaatccgattgattgatgagtttttagctaagtctaatgtctcaagatgcaacgatttca

SEQ ID NO: 81075 - DNA, 261 bp, Glycine max
  Clone ID: 700960441H1
tctggggtgcgtatagagagcagatgtggggcttgttcattgccaagaaaaattgagatgctttattgctatcatatgccttgttctagctatatttagttcctgtgtagccggaataattaattatctctatgtctgttttgttggtttaaaattcatagctttcgaactataatgatgatctgcggagaggagaacgctcttcgatttgaataacacaatggtaacttggcattggctgcgatgctaaaaaataatttc

SEQ ID NO: 81076 - DNA, 259 bp, Glycine max
  Clone ID: 700960442H1
cagcatgttacattattactccattctactttaggttgttgacgaattgagttattctgtcatccgttgaaattgtgttgagagaataaccaaatcgtttgacaatctggtggaggggagatatcaatttggaaaggaaaattgtactttgattaggttgttggtgatgttcttttaccattcttcctccttctgtaaatattagatctgatgaaacgtttagcagtttgtgaatacaggttgctacctgtaatgtaag

SEQ ID NO: 81077 - DNA, 260 bp, Glycine max
  Clone ID: 700960443H1
gaagaaagtaagatatgcctctcgcaaggctagggctgatgtcagaaagcgtgtgaagggccgatttgtcaaagctggtgatgtctatgactatgaccctttgaaccaaaccagaagctactgagtgtacaacttttaaccatgttctgtaaaaaggaaagaatcactctatagttgcaaaagaaaagtaactcttacctgaaaaaatggatgaaatttgatgcattctttctccatgcaatgacaagctgtctgatttt

SEQ ID NO: 81078 - DNA, 259 bp, Glycine max
  Clone ID: 700960444H1
agaccctagagaagataccacagtctttgagctcttcaggacggtttgactttcatataaagctgcctgctcctgcagcttctgagcgcagggctatgttgaagcatgaaatacagaggcgtcagttgcaatgtgatgatgacatcctgcttgatgtggctgtagaatgtgatggttatgatggttatgatctggaaatattagttgacagaactgtccatgctgctgtttgccgttttctgccatctaatgctgccat

SEQ ID NO: 81079 - DNA, 271 bp, Glycine max
  Clone ID: 700960449H1
tacagtttaccttttcttgctcaaaccaacgacgctaacgctgaaaacaatctctacccgtttgtttttctaaacgtcgatggcaacctttttatctttgccaacaaccgcgctatcttgttcgattacaataagaacagtgtcgtgagaacctaccctcaaatacccggtggagatccacggtgttatcctagcaccggttccgcagttttgcttcctcttcgagaacctaatgtggaggctgaggttctgatttgtggtggaccccgag

SEQ ID NO: 81080 - DNA, 267 bp, Glycine max
  Clone ID: 700960450H1
gtgcaatggctgacagatacatcacttgatgctgctcgtcaacgtatccaagaacagttaagtgctgtgacagctgatatggttatgctttctacagatgaaccagagaagaagaaaaaagcagcaagtaacggaaatggcggttctcagaatggtaactcaatgcactatgggaccctggttggggaagtgaaagctaatttgaagaaaggtattggagcgaatgaattgctgtcccatctttcagcacatcctgcacctgctcaa

SEQ ID NO: 81081 - DNA, 266 bp, Glycine max
  Clone ID: 700960451H1
taagaaagccagcttcttcttcttcagctgctgctgctgctgctgcttcaacttcccaacaaatatttcaacacactctctcattgcttcaatttccgttacgtaaagccactttctcaaacctcagtttcctgttgttgtggttgaagttggtgagagacgaatcttggggaattttggatctgtttgccgtgaaaccctaatttcttgcttgtgaggctttggaaattggggttctggttagatggaagctgaggatggaagta

SEQ ID NO: 81082 - DNA, 264 bp, Glycine max
  Clone ID: 700960453H1
acaggagtcgcctcgtgtttccgtttccgtttcaatttcctgctcacaggctttaacgttaccagctcgagataagacatggaccggatcaaaggcccatggagtccggaggaggacgaggctctgcagaagctggtggagaaacacgggcccaggaactggtctctgatcagcaagtccatcccgggccggtccggcaagtcctgcaggctccggtggtgcaacagctgtccccccaggtggagcaccgggccttcacggccg

SEQ ID NO: 81083 - DNA, 261 bp, Glycine max
  Clone ID: 700960455H1
aagagaaaggaaggaaaaatggagttgttcttctacgcggtgttcggcggtttgggagcggttgttgcagtgacggagctgagcaagagcaacaaggaccgaatcaacacctcttccgcattcaattccttcgagaacaactacgtcatcgtctattccctcatgatggctggagattggctacaaggtccatatgtctactacctttacagtacatatggatatgggaagggagacataggacaactcttcattgctggt

SEQ ID NO: 81084 - DNA, 258 bp, Glycine max
  Clone ID: 700960458H1
cagaaaccctaatttctcaaaatcttcagaggacacacagcacaaccaacacctccacagcctctcctacctcccggagccatggccgccgccgactcctccgccgctccatcgcaccagttgtcgcagagggagacggacatccagatgatgctcgccgccgacgttcacctcggcaccaaaaactgcgactttcagatggaacgctacgtcttcaagcgcagaaccgatggtatttacataattaaccttggcaag

SEQ ID NO: 81085 - DNA, 258 bp, Glycine max
  Clone ID: 700960459H1
ggatagatagagtgatacacatcacattttctcaaagtaatttattaattaataaataaatggcggcggcggcggcagtgacggtgctactcccacctaggattccgaccgccaccaacgttacccgctgctctgctttgccttctctgcctcctcgcggcaccaacactaaaaccactttgctcttatcttccctcaaccacttctcagtgtcccgaaaatcttctctgcttcagaccagagcttcttcagaggaat

SEQ ID NO: 81086 - DNA, 256 bp, Glycine max
  Clone ID: 700960460H1
atgagaatcacctaacatcggaccttaaaataagagaaagagaacaacgaagaagttgttgtgtcttaagaaagagagagatggcggcggagataccgtgctgtggaacaaagttttcactgtacgttttggtgatcataggtttggtctgcttcgcgggactaatggctggtctcactctcggactcatgtctttgggactcgtcgacctcgaagttctcatcaaatctggtcgtcctcaggatcgcatccacgc

SEQ ID NO: 81087 - DNA, 254 bp, Glycine max
  Clone ID: 700960461H1
agggattctcttttcaaccaccgtcatcagcgatcggattcggattcggactccgtctcgggaaaattcgagaagatttttcgaatttttcaccactgctttgtgcgcacgatcggtttcggattcgggctccgattttcgcctctcgcgaagagcttgggttcatttgcactaatggaggggaaggaggtttgcggggcggagtcggcggttgatggaagccgcgacgtttggagttcggagccctcgctcgc

SEQ ID NO: 81088 - DNA, 254 bp, Glycine max
  Clone ID: 700960462H1
cacggcgcagatccgaggagtttgggaaaccctaattcattcctctttgcttctatctctattaccctaacaccagtgatggcaggtttggctccagaaggatcgcagtttgatgctcggcagtatgactctaagatgaatgaattgctttccgctgatggacaagaatttttcacttcatatgatgaagtctatgatagttttgatgcaatgggccttcaagaaaatcttctcagaggcatatatgcttatgg

SEQ ID NO: 81089 - DNA, 97 bp, Glycine max
  Clone ID: 700960463H1
cgcgtacgcggactcgggattcagctcgacgtcatattcatggtaagctggcagatgggcataggatgtgtgatgattgtcttttgtccgtcactgc

SEQ ID NO: 81090 - DNA, 256 bp, Glycine max
  Clone ID: 700960464H1
gcgatatctcattttacaaacagaatagttgcattgattgcacaagtgtacacactcaatgattttttactgctcaagagagaagagggagaagagatatgtcctttgtccctaagagaaaatccaagcaaagtccacatcagaagaactctacaagacacaaccaacacacctaccacagttttccccacaaatccaacccggccttcacctgtaatcacacctccagatacaccagacatcatcacagttcctt

SEQ ID NO: 81091 - DNA, 266 bp, Glycine max
  Clone ID: 700960465H1
cggaaacttggaacaatggctgcatggtgatgtaggaccagttagccccttgacatgggatattcgaatgagaattgctattgggactgcaaaagggctagcctatctgcatgaaggtttagaacccaaagttgtgcaccgggatataaaatccagtaacattcttttggataaaaactggaatgccaaagtatcagattttggactagcgaactcttaggatctgagaaaacacacgtgactacgcgtgtaatgggaacatttgg

SEQ ID NO: 81092 - DNA, 268 bp, Glycine max
  Clone ID: 700960466H1
caataacagagcatagagtgagaagtgagaagagaaaaatggcaatctccatacccagtagacacggtttcatagatggagagtggaaagtccctcttctcaacaatcggtttccgatcatcaaccccgctactgaagacatgatagggcatattccagccgctactaaggaagatgttgaccttgcggtggatgctgctaaaagagccttttcccataacaaaggcaaagattggtcttcagctcctggctctgttcgtgctcgcta

SEQ ID NO: 81093 - DNA, 264 bp, Glycine max
  Clone ID: 700960467H1
gttttcatcatggacaactgtgaggagttgatgccagaatatcttagctttgttaagggtattgtggattctgaggatcttcctctcaacatttctagggaaatgctgcagcagaacaagatcctgaaagtcatcaggaagaacttggtcaagaagtgcattgagatgttctttgaaattgctgagaacaaggaagactataacaagttttatgaagccttctctaagaatctgaaacttggtattcatgaggattctcagaac

SEQ ID NO: 81094 - DNA, 259 bp, Glycine max
  Clone ID: 700960468H1
ttctcgtgtttttttctccatactctaataactaggcctcgagggtcaataatcactgaaacatttttgttcttgagctagtggtttggttggttcaagcgccttcctcttgccgtgccgttgaattcttagtgggtgttttcacgttttgactctttgcagcgattcttgcttcaagttccagaaatgggtgtggctcaaaacattcccgatgcggaggagggaaccttggagattggaatggaatacagaactgttt

SEQ ID NO: 81095 - DNA, 258 bp, Glycine max
  Clone ID: 700960469H1
gaaacataatggagaggtttttgctggttggaattcttggttctcatgtaacggttgcttcaaggccaacaattttgaatgctttgaagatgttagaaggggatattgaggtcccaccaattccagataggccactgagtcatgggaactatgtgttgtacagtggtgattgctctgggatgagctcaggatgtggatttgtgagctcatgaaaagttgaatgattcataaaatccatccttgatgagttggacaaga

SEQ ID NO: 81096 - DNA, 261 bp, Glycine max
  Clone ID: 700960470H1
cttaaaagagcctttgctttttctttaggcctttccgaattaagtacttgtttcattttctctcgaagcaagaaaaatgttcatcgagagtttcaaggttgagagtcctaacgtgaagtacacagagactgagattcagtccgtgtacaactatgaaaccactgaacttgttcacgagaacaagaatggcacttatcagtgggttgtcaagcccaaaactgtcaaatatgaatttaaaaccaacacccatgtccctaaact

SEQ ID NO: 81097 - DNA, 260 bp, Glycine max
  Clone ID: 700960471H1
cttcttcttactctcttacgttaattcttcgttgtctatgatggcgttggatatgattgatgttgttcccaggacgaggatggaagaagaaaatatagcaatacaagaagcagcttccgctgggttaaagagcatggagcatctcattcgtctcctttctccttcttcttctcttcacaacaaccttaagagtctcaatctcaaccacctcgactgctccgaaatcaccggcttcactgtctccaagttcaaacaagtca

SEQ ID NO: 81098 - DNA, 258 bp, Glycine max
  Clone ID: 700960472H1
tgcccttcctgattttgatcacctttctctctggaaccatttgttacttcatggttcgcctacaccctggcttctggcactacctcttctttgtgttgtgcctttatgccagtgtcacagtggttgaaagcttaatgatggcaattgctagcattgtccccaacttcctcatgggcatcattattggagcaggaattcagggcatattcatgttggtctcaggctattttaggctcccacatgatatcccaaagccag

SEQ ID NO: 81099 - DNA, 255 bp, Glycine max
  Clone ID: 700960473H1
agcaaatcagagaacgagcttgcagtgagcaattgaagcatttgaaagaagctcgtaatgaatatagagaagaggttattgattgtgttaggcattgtgcttggtaccgcatctctctattttctcgatggaagcagagaggaatgtatgcaatgtgcatgtgggttgtccagttgctactggttcttagcaatatggattcagtgtttatctacatccctgaatattatctggaagctttggttgattgctttc

SEQ ID NO: 81100 - DNA, 252 bp, Glycine max
  Clone ID: 700960474H1
ctcgagccgaatcggctcgagggtggcgtctcatgcccatacatcggtgggaagcatttgggtcatggggttcttctagtaggttatggtgaaggtgcatatgctcccattcgttttaagaacaaaccttactggatcattaagaattcatggggcgagagctggggagagaatggatattacaagatctgcagaggtcgaaatgtgtgtggagtagattccatggtctcaactgtagctgctatatatcca

SEQ ID NO: 81101 - DNA, 250 bp, Glycine max
  Clone ID: 700960475H1
cttcttcttcttcatcctccgacggtcatgaaggattgctcttttcttctgttatatatactcttggacacttttgctcaagtttggagacgatgattgtgtgtatgtgttgaagctcttccttcggtttcaattcacttctgcaacatctactacatattgcagggttcttgaggatgggacaagaattggagtttgatctgaatgacaagtcttgcgtgggtctcagtcctgatactgttcttccaca

SEQ ID NO: 81102 - DNA, 256 bp, Glycine max
  Clone ID: 700960476H1
cactcttcaaccatcaatcatccatcgccttcttcatttcaccaccgcgcgcacaattgcaattacatttccaccccccaaatttcctgttcagaagaaaaaaccaccaccacctcacctctgatccgtgcacctcacgtgcccatggctcctgctacctccgagcgcgtggagttggccaggctctgcgcctccaaggactggtccaaagccattcgaatcctcgattccctcgtttctcattccaacgcaattc

SEQ ID NO: 81103 - DNA, 98 bp, Glycine max
  Clone ID: 700960477H1
ccgacctctgttacagttaatctaaccgtttgattcgctgaggtcatggcgttttggcaccgaatccgaaatcccaacctcaaaaccctctgcatcca

SEQ ID NO: 81104 - DNA, 252 bp, Glycine max
  Clone ID: 700960478H1
gtccagccggaagtacttgctatgatgtgcaggttgatgtgcctcttccacttgagaaggatatgtctgcgttcttggcaagcactgagaggcacaaagatattgatacttttgatgaattgatctctgattcgataaagaagattcgtgaacatcataggagacgggcattctttctcggctttagtcagtccccagcagagtttattaatgccttgatagcttctcagagcaaggatctgaagctcgttg

SEQ ID NO: 81105 - DNA, 253 bp, Glycine max
  Clone ID: 700960479H1
aagaaaaagagaaagaaaaaggatacaacgatggctatgaatggatcacctcgacggtgggacgtgagattagttttgacattttctctacttttaatctcagcctctgtttctgctcttgaacatgtaaaccacaaaaagattgatcccaccaccgctgaaactagttttcttggcaaagtcatgaactttttgtggagctcatctgggtctggatacgaacatacttggccagaaatagaatttgggtgga

SEQ ID NO: 81106 - DNA, 263 bp, Glycine max
  Clone ID: 700960481H1
aatcgacaatcctaatggttccgacaaagctcgacctgagtgtgatctcatgatgtttctgctctaactatgtttgatttggatacccaacaacaaaaagagtgttgtcgtgttgttgtagttaatagtaataggactaagtaagagtagtggaaaacatgaacaacagcagtggcggaggaggacgaggaactttgatgggtttgagtaatgggtattgtgggaggtcgccattcacagtgtctcagtggcaggaactggag

SEQ ID NO: 81107 - DNA, 263 bp, Glycine max
  Clone ID: 700960482H1
cttgcagtcgcagaggaaaaccctagctagtagtctcagttcgtttgagagagaaaaaatggcagagggtctcgttctccgcggaaccatgcgcgcccacaccgacgtcgtgacggcgattgccactcccatcgacaactccgacatgatcgtgacggcgtcgcgcgacaaatccatcattctctggcacctcaccaaggaggacaagacctacggtgtcccccgccgccgcctcaccggacattctcacttcgtccaggacg

SEQ ID NO: 81108 - DNA, 261 bp, Glycine max
  Clone ID: 700960483H1
agcgaacgaacgaactaatcaatacaacgccatatctctgtgcatcgcttccttccctcgtcctcaattcgaatcaatttcctcaaagttgctcccagttttcttcgcatcacaattcggaaggtacagggagagggtttgacaaatgatgggtttattcctcagatattttcatctatgccagctctcaatgatgcagcttcttatcttgcacaaacaacatcattgataactggatgtttctctgattattcagaacct

SEQ ID NO: 81109 - DNA, 259 bp, Glycine max
  Clone ID: 700960484H1
cattactctctcttctcctaaaaatttctaatgcttccattgcttcatctgactcactcatcaatggctctgagactgaaccctatccccacccaaaccttctccctcccccaaatgcccagcctcagatctccccgcttccgcatggcttccaccctccgctccggttccaaagaggttgaaaatattaagaggccattcactcctcccagagaggtgcatgtgcaagtaacccactctatgcgtccccagaagattg

SEQ ID NO: 81110 - DNA, 259 bp, Glycine max
  Clone ID: 700960485H1
gttccctccaccacatgaagatggacagcttggctttcctttgggatcttctaatcatattgatccggatattgttccttctgatgtttctttcggttcaacctcatacaccttttcaaaggaaccattccaagcttggtcaggtcccattggtaatactgctagcattagtgtcacaaagcggaagaaacacactgcaggtgatgcactggatttatcaaaaccatataaaggtgccctcaaggataaggttaaagga

SEQ ID NO: 81111 - DNA, 258 bp, Glycine max
  Clone ID: 700960487H1
gctattcttacctcttggcatgaccattcaaatgtcttcttttctcttagcttctcttgctgttttctttttcttctcctccttggagaagagttttgcctttcaagcagcaagaaaggaggacacagaaagcaacaatcttcatcaatatactcatcttgttcacctcagctcactccttccttcatcttcttgcagctcttctaccaaaggtcgcagaacagaagcatcattagaagtggtacacaaacatgggcc

SEQ ID NO: 81112 - DNA, 256 bp, Glycine max
  Clone ID: 700960488H1
attttccttcttccatggtttgcctctctctctctctctctctctactctcctttcatttcagaaatcatggggaaataaacataattaatctccgaaataaacaaaacatttttcgtgacattcgatgaatgatatgaaggtgagaagtgggttgtgcgtgtggccaaatgtgagacaactttgctttagaaaaggcattctatatgggtttatgcgattgttttctactccgttgaaaacgctgcgtggagcta

SEQ ID NO: 81113 - DNA, 252 bp, Glycine max
  Clone ID: 700960489H1
gaagttctaaggaagacggaatatgcagaatacaaggtgctagttgtctatttgcaataacaacatcagcgatccaaccttagtattcttcaacccagagagatttgtaataataaattacaacaacttaaacgatggcaggaggagcttatgtagattcgggaaatgcaaagcaatttgatgggaaggtcacggcattcgtattggttacatgctttgtggcagccatgggaggcttactcttcggttatg

SEQ ID NO: 81114 - DNA, 253 bp, Glycine max
  Clone ID: 700960490H1
cgatgttcttctccttggtgatggcccctggccggaattcgtaaatagcgtatggtgcataaagatactttctcctcaggaagtgcagcagatgggcaacaatggccttgagctgttgaactcgtttccaattcaaaggctctctaatggcatctgtgatgactatgtgagccgtcaagacccaagaaatttaggcactgggataacaaccgtggggtctttagactactaaatagtcttcacttcttctatc

SEQ ID NO: 81115 - DNA, 253 bp, Glycine max
  Clone ID: 700960491H1
aaatttaaagaaatcaacacacacaaacacaacaacatatggaggtgctaagggtgcaaaccatagcttccaaatccaaagatgctgccatcccagccatgtttgttagggcagagacagagcaaccaggcatcacaaccgttcaaggggtgaaccttgaggtgccaattattgattttagtgacccagatgaagggaaagtggtgcatgagattttggaggcaagtagggactggggcatgttccaaattgt

SEQ ID NO: 81116 - DNA, 251 bp, Glycine max
  Clone ID: 700960492H1
cctttctgaacgagatctcagatctctggttgatgcttcaaagaaccctaatctcatggctattgtttcctgcacttccatcattgcttccaaatgaatgaatgaatgaatgaatatactactctgtctctctctatctctctctctctctcgctcactcactcactcgctatgccatgcttcttgctatgatatgtttctttctttttctttttatgcgacctctggggtccttcactcgctctcttatc

SEQ ID NO: 81117 - DNA, 180 bp, Glycine max
  unsure (1)..(180): unsure at all n locations
  Clone ID: 700960493H1
tctctctctctatatatctctctctcacactccaacaccaaaacccttcatcttctcaatccccttttctccctcacaattccacatatcncacctccaaacatcttcaattttaccgataaatatttcttcctctttacatttcacctctctctatcttcttttatccattacacacaa

SEQ ID NO: 81118 - DNA, 248 bp, Glycine max
  Clone ID: 700960494H1
gtagaaacagttcaatcattcttagccctaagcagacttcacatactcatccacttagtggcagtgttgtctctctgttactaccgcatcacccacttcttcctccaacctccaacaagaccatggcttctcatgactgctgcggacttcttctctcgctgctctggttcttcaaccaagccttccggtggcgaccggtgtcgcggacgtcattgactgagaagcttccgagtgaggagaagctgccg

SEQ ID NO: 81119 - DNA, 252 bp, Glycine max
  Clone ID: 700960495H1
tacaaacatggcaatgaagaagttcttgtgggttgttctgtccctttctttggtccttggagtggccaatagctttgattttcacgacaaggatttggagtccgaggaaagcctgtgggacttgtacgagagatggaggagtcaccacacggtttcgcgaagcttggtgacaagcacaagcggtttaacgtgttcaaagcgaatgtgatgcatgtccataacaccaacaaaatggataagccttacaagctg

SEQ ID NO: 81120 - DNA, 215 bp, Glycine max
  Clone ID: 700960496H1
tcgggatgcggctcgaggcgatatctcaggttacaaacagaagaattgcagtgagtgcacaagtatacacactcaatgattgtttactgctcaagagagaagatggataagagatatgtcctttgtccctaagagaaagtccaagcaaagtccacatcagaagaactctacaagacacaaccagcacacctaccacagttttccccacaagtcca

SEQ ID NO: 81121 - DNA, 279 bp, Glycine max
  Clone ID: 700960501H1
cgtaacctcgccactcggctcgacccacaacaaaacccccaactccccacccaccacctacgcgcacacccaccacaccaccccccaccaccaacaaccaccacacccccaccccaacgcccaaaccaccaagcacaactctgatctctccttcaagccaagctcacaggtaaagggcatcacatcttggagcgcacttcatagtgaactccttcacaatcagaagagcaagaccctcggagctcctcaacgttctttctttcccaccacacaacaaca

SEQ ID NO: 81122 - DNA, 246 bp, Glycine max
  Clone ID: 700960503H1
tccaggtcatccaagacaatccaacaacaatgttcagctcttcacctcaagctcccaagtcatgctgcctcatcctctcatccaatctcttcattcaaccaattcaactcttaatcgacgcattccaacatcacctagttccaaacttcttcattcagataacaacaatgatcgtagccaaccacacaacggtagtagtactactcgttcttgcagctctcatcgtggctcctctctgatgcaaac

SEQ ID NO: 81123 - DNA, 106 bp, Glycine max
  Clone ID: 700960505H1
cgcacgcaagctcggcaactaggctcgcaagtaatcgcaaaatctaggcgtttgtctcgttccgtcgttccgccaacaatcggcgctccagcagattctcacaacg

SEQ ID NO: 81124 - DNA, 160 bp, Glycine max
  Clone ID: 700960507H1
acaacaaaatggtgtgtgaacagttcggttcggacaacgatctagccaacagaatacggtgttttggccctcataccactgcgaccaccatcatggtggatgcatgtaacggagttcagtacctccatgccatgaaggacgctgttcttgctggctttca

SEQ ID NO: 81125 - DNA, 177 bp, Glycine max
  Clone ID: 700960508H1
acactgcaacagcaacagcttccaaatggcacacggacaacgtagagtttgtgtcacgggaggcactgggttcgttggttcacggaccatcaagagatccttgaacacggatatgctgttaacaccactactagatctgactcaggacgcaagagacacgttagcttcctcaccaac

SEQ ID NO: 81126 - DNA, 64 bp, Glycine max
  Clone ID: 700960511H1
ctcactaattgcaagaatggcacttcgtcgcttggtcatgtccgtttctgttctctctcatctt

SEQ ID NO: 81127 - DNA, 66 bp, Glycine max
  Clone ID: 700960513H1
tcggacttcccccccccccaaactcatgcttcacgaaccccccgccccctctttccacctttcctt

SEQ ID NO: 81128 - DNA, 52 bp, Glycine max
  Clone ID: 700960514H1
gcggcaaattgggtatgctcttgtcctatgattgctaggggagtgatgttgg

SEQ ID NO: 81129 - DNA, 253 bp, Glycine max
  Clone ID: 700960518H1
aatttgtacatgctgagctgacacctacacaccctcccaatacaaattatggttactctcagggattctttgggtctgaaggaaagatgtgtggctgttgacactatatctgttgctgctcgaatactgaatagatctaaagctcatctccaatcaatggtcttgcacagtaattcaactatacttgaggatttctcacgttcatctggtggatgctgctacagatcttacagaacatgttcatcggactaca

SEQ ID NO: 81130 - DNA, 144 bp, Glycine max
  Clone ID: 700960519H1
ttactgacgctaatggaactacagctaatattggtgaacatgatactagcactaccaatggccatgatgatgatgatgccatgttattcacttgctgtcgacattaatcaacaactgaggcaagtgccaccaaagcataacgtg

SEQ ID NO: 81131 - DNA, 121 bp, Glycine max
  Clone ID: 700960528H1
cgtaccacctccaacttgccctagcagtaagctataactcatttgaggctctgtgagaactgagcaatggctaaagatgttgaggttcaagagcaacgagccgagtactctgcgacagact

SEQ ID NO: 81132 - DNA, 67 bp, Glycine max
  Clone ID: 700960529H1
cctccacccgcacctcaacctcccaattccgctccacgcacaacccaactccgactgatcacccaaa

SEQ ID NO: 81133 - DNA, 73 bp, Glycine max
  Clone ID: 700960531H1
cttgattagcctgacaagacatgcatgatatgttttaagctggaccaaacagaggcaaactcattcgttgttc

SEQ ID NO: 81134 - DNA, 239 bp, Glycine max
  Clone ID: 700960532H1
caggatctacaccttcagtttctctcgttgctcttcgctttcctgttcttcaatctcgattctttcgttacatccacacaagatctttcggagggcaccgaagaacagccacaatacgacgtactacgaaactctcggcgtctccaacaacgcttcgcacgatgatctcaagaagcgcttacaagaaagccgccattaagaatcaccccgacaacggcggtgatcccgagaagtttaaa

SEQ ID NO: 81135 - DNA, 156 bp, Glycine max
  unsure (1)..(156): unsure at all n locations
  Clone ID: 700960540H1
cacgcgacatctgaactgcttctctgattccagtttcatggccgcattccaaggtattgatctcttgccgacattcagcaatgaatttgcgccattgnagggaacggtcaaaagcttagttgcaacaacgtggctcaaggttgagcaaccaacacc

SEQ ID NO: 81136 - DNA, 220 bp, Glycine max
  Clone ID: 700960541H1
tttcactcgttgaaatgacaatgccgctcttctttgtggaatttgtgtctaattttggattcactaccctctctctgcattctgtgcctttccacggaggccactccctgcctcattcggcacaaactacgttctcacttgggcttttgatcacatcacatacttcaatgcacgttctgagattccacttcatcttgacaactacactggtactggcttc

SEQ ID NO: 81137 - DNA, 61 bp, Glycine max
  Clone ID: 700960543H1
ggacttaaatttctcatgtaagcttcacacagagactcgtgtgaagtgtgatgattttggg

SEQ ID NO: 81138 - DNA, 197 bp, Glycine max
  Clone ID: 700960545H1
ccaattactactctctgcctctttcgccactctctacccatccactgctcaaagctctctgcttccccctctgctctccacgctcttcctctcctccgcccactgccactctccgctccggctactctgccaccccccccaccacgcacaaccctgcgtacaacaccacagacacccacactacccgctgttaagcc

SEQ ID NO: 81139 - DNA, 154 bp, Glycine max
  Clone ID: 700960547H1
atccagcgacttcctctcactcgcctgtccacagaacttgccacctacatggcagctccaacatctggtgctgcgtcaaatgggttcggatcttccttctccagtggacgaccaggagccacacctttggccctgctattggaggcaaagttgg

SEQ ID NO: 81140 - DNA, 104 bp, Glycine max
  Clone ID: 700960549H1
atcacccttgaggtggacagtctgacaccatccacaacgtcaacgccaacatccaggacaacgaaggaatccccccgcaccaccaaagcctcatcttcgccggc

SEQ ID NO: 81141 - DNA, 137 bp, Glycine max
  Clone ID: 700960551H1
cacacaatttcttcaccacacgtttctccaacgcatgctccaactaactatcaacgatcgtgccttcttcttgattgatttacgcagtgagcatcggcactgcatcactgacaacgaccgacagcactaccgcgtac

SEQ ID NO: 81142 - DNA, 90 bp, Glycine max
  Clone ID: 700960572H1
tgaaaacttacagtgcttctgtcctctgtgtttctgtgtgtgttgctatccttttggctactggcactgctgcaagtcaaactccaagaa

SEQ ID NO: 81143 - DNA, 144 bp, Glycine max
  Clone ID: 700960574H1
gaagaaagcagcgattttgaagtctctgcaaacgattatggttgtgttcctgctgatagtactctttagcagcaacaccaaagcagaaaaagaaacaatccacgaccatgcaaacagaaagagctacataatccacatggacga

SEQ ID NO: 81144 - DNA, 106 bp, Glycine max
  Clone ID: 700960577H1
acagtagcgaacaaagaaaagagaagaattagtgtgaccctccacaaaccttgttgcatgaatgaatgatatcatcatcactactaccacaagtccacacaacata

SEQ ID NO: 81145 - DNA, 64 bp, Glycine max
  Clone ID: 700960578H1
tccgaattcggctccaggtctctctcactcaccaccttaccccccctgtttcttgtacacttta

SEQ ID NO: 81146 - DNA, 130 bp, Glycine max
  Clone ID: 700960580H1
atgatttcatatggtgtttccgaacattatcttctcccaacattccagccttccatgcacctgtggtgcctctctactgtagctgctgtcatgtccttcacctactcattcattggacttggccttggta

SEQ ID NO: 81147 - DNA, 149 bp, Glycine max
  Clone ID: 700960583H1
attcggtcgacgtcttagcgacaagacactgtctcccgagtgaacacacgttacagcaatggttcctctgctacaattggcaactcattacgacacacagcaaccacgcacgttagttcacgaactgcgatcacccccttcgttttctc

SEQ ID NO: 81148 - DNA, 107 bp, Glycine max
  Clone ID: 700960589H1
caacctcgcaattagcctccacgtcgccacaccaaatcaaacacacctgccccacttcaattcccctccttctactcgctcttctccgcttcaccactcaatttcat

SEQ ID NO: 81149 - DNA, 246 bp, Glycine max
  Clone ID: 700960593H1
cacttcaacttgttgtgactcagcacaactgtacgaaacgccagctttgcaaacgagctggcatctgcatatactcttgagactccactctccataatcttttgctgttgctgctcgtgatgatgttctgtattgggctccatctcttgcttatgaaactggccttgtagcagcgattatgagatcagacaaaaatagtggtattagacgaaggacctcatttgctttaactggttattaaacgag

SEQ ID NO: 81150 - DNA, 140 bp, Glycine max
  Clone ID: 700960594H1
catcgacaacaaccatcactccaccctccctcctgtctctgcccccctcctctacacccccacacattcactagcatcgccaaggtcaattttgtcaagaatggacgacctagattgcctccgcgggtctcgcctccacc

SEQ ID NO: 81151 - DNA, 171 bp, Glycine max
  Clone ID: 700960595H1
ccacgaagactcgtagtcacttcaacatcatgatggatcacaaaatctacacatgcgagcatctccaatcgcccttacagcgaagttcgcgttggtttccatgatacgtctgctagggacaatcatcaattgaattgtgcatatagaaacagctctgcagattatggtggt

SEQ ID NO: 81152 - DNA, 255 bp, Glycine max
  Clone ID: 700960602H1
attataacatcagcatttgctggcacccgaatttctaaatgggaagaaccaaacggagcaagaggttgttgggtcgtgtatagaacatttggtaacgagatgtttgagcttgtagcatatgagttgatgtcagccaatgatgcaccagaaagggatccactggactggattcttgaagggagcagtgatgacgggatcagctggcaagttttggacaagcaaacctctcagttctttgaagaccgtttccagcgt

SEQ ID NO: 81153 - DNA, 255 bp, Glycine max
  Clone ID: 700960605H1
ctgtgatgtcctcctaaaaaactctatccatgtctatgatgtctctcacaaccgtggctgcattcaagtccctcacaatggcggaatcgtgccttctatccctcccttccctcttctacgccaaaaacaataccctttctctctcaattcccaccaagcccctcaacctccatcttccatgctccaactcttcgctctttcccctcaccaccaaaacaacgcgccactcttctctcctcacattcgtggctcaga

SEQ ID NO: 81154 - DNA, 256 bp, Glycine max
  Clone ID: 700960606H1
agtccgaattgtgaaagtaagcaaagatggctttcacggaatcgtctctcctccttccttcggtttcaggaaccaacaagaacaagaacaaggttccagaagacaaatggtatttagcctacattgtgtattttaccctgggtctcggttaccttctcccatggaacgctttcatcaccgccgttgattacttctcctttctctaccctgacgccagcgttgaccgcatcttcgccgtggtttacatgatagtcgg

SEQ ID NO: 81155 - DNA, 252 bp, Glycine max
  Clone ID: 700960609H1
gtcagtcgttggaagaaacctgagattggttgggtgaagctgaacgtggatggttcacgcgacccatacaaaagttcctccgctggttgtggtggtgttctgagggacgcatcagcaaagtggctccgtggctttgctaaaaaactgaaccctacttatgcagtgcaccagacagagttagaagccattctcacgggcttgaaggtggcttcagagatgaatgttaagaaactaattgtggagtcagacagt

SEQ ID NO: 81156 - DNA, 250 bp, Glycine max
  Clone ID: 700960611H1
aataaagggtcaacaactttggcgaaaataagaacccaagtggtttcagagtgacacgcacaagagaagagataatggcaacaaaatctttgggcttcgctgtgtctgtgactcacctcttcggttccaagtcgccacccaagctttgcgtctttactctcagatgctctgctggcaatggagaaaggccttggaaaacttcaggcgctagacttatgttagaagatggatcaatctggaaagcaaagtc

SEQ ID NO: 81157 - DNA, 247 bp, Glycine max
  Clone ID: 700960612H1
gtcagtcgttggaagaaacctgagattggttgggtgaagctgaacgtggatggttcacgcgacccatacaaaagttcctccgctggttgtggtggtgttctgagggacgcatcagcaaagtggctccgtggctttgctaaaaaactgaaccctacttatgcagtgcaccagacagagttagaagccattctcacgggcttgaaggtggcttcagagatgaatgttaagaaactaattgtggagtcag

SEQ ID NO: 81158 - DNA, 250 bp, Glycine max
  Clone ID: 700960613H1
gcttccacttctgattcagaaactcttaggcattccacattctcaaccccgaaccctaagagcagagcgaaaatgacaaccaccttcgcgaccgtcgcaggactcggtggcgcattactgtcatccacctcatctcgtctcacctcagggtttgtgaaatccccagtgattgctaggaatcccttgaggcaagctgtggcaatgggaaatgggaggattacatgctttgagaggaattggctgcgggcag

SEQ ID NO: 81159 - DNA, 235 bp, Glycine max
  unsure (1)..(235): unsure at all n locations
  Clone ID: 700960615H1
cctctctcttcttcagtggtggaagctactagaacactagtttgttgagcactgcgatgaggaagtggacggttgcttccgctctccttcttctctctctcctctttctctttgcagatcaaggtcgtaagttttangcgaagcgcgagggagattccgacgagcttgtagatccacccaaggtggaggacaagatcggtgctgtgcctcatggcctttcaaccgattcagatgt

SEQ ID NO: 81160 - DNA, 71 bp, Glycine max
  Clone ID: 700960616H1
ggaatgcgactcgagcgcgcatgagaagaagaagaagattgccgatctgagcgagtcttccatcctacagg

SEQ ID NO: 81161 - DNA, 248 bp, Glycine max
  unsure (1)..(248): unsure at all n locations
  Clone ID: 700960618H1
cacaaactctgctatccctgctctgtttctctacatcaccgtctctcccgttatgggagtcgccggggctaagtctaagtgtagtaccgttgggattcaaggtatcgcttgggccttcggtggcatgatcttcgccctcgtttactgcaccgctggcatctcagggggacacataaacccggcggtcacatttgggctgtttttggcgaggaagttgtcgttgcccagggcgatttnctacatcgtga

SEQ ID NO: 81162 - DNA, 252 bp, Glycine max
  Clone ID: 700960619H1
gctaaccctgctagctatgctgattgtacgcattggtgtttgcctggacttccagatacttggaatgagcttttgtttgccaagttattttatccttgaaagtgaatcaaaataaaagatccttgttaactcggttccttgtgtggcatgacatgaaaaattgtaaatgggaggctacaacctacgagctttagaaatggtaaaagagaaagaatgaatgcaaagaggatttgtgtagaataatattacatt

SEQ ID NO: 81163 - DNA, 253 bp, Glycine max
  Clone ID: 700960620H1
atgacttagaaaagaatcaagttgcttattcaagaagtgttcacattccagatcacggagatgctggtagcagtaatcttcttaatgagaatcactattcaagattaatagctttagaagggtgtagttgtagtgcagctgcccagctgctcaatgatcgttggacagctgcactacaatcctacaataatcccaaagattcatctgaaaagccagttatgtattcgagtgggacatcaggatggactccgtt

SEQ ID NO: 81164 - DNA, 253 bp, Glycine max
  unsure (1)..(253): unsure at all n locations
  Clone ID: 700960621H1
agaagatcgatcatggcttctatatcctgtctatcctctttctccctctccaatttctctgcacctcttcccatttccatttgttcttcatcttccaccttcctaactacacacataccatgcaaanccancaaacgtagcaaaccaaaacgccaccacgtttcgaaagtgacatgcaacagttaccaaaacaccccaacaccaaacccagaagaagaaagtccatcatacaacattctaggaaaatatagaa

SEQ ID NO: 81165 - DNA, 252 bp, Glycine max
  Clone ID: 700960622H1
cttagtgtgctccaccctatttataaacttttgttgcctcactatcgtgacaccatgaacatctatggactcgcaagacaatcactcatcaatgctcgtggcattattgagcaatcatttctgcctgggccatttgctgtggagatgtcttcggcagtttacaaggggtgggttttcactgatcaagcccttcctgcggatcttatcaagagaggaatggcagtggaggatccatcctctccctatggcctt

SEQ ID NO: 81166 - DNA, 250 bp, Glycine max
  Clone ID: 700960624H1
ctcgagcgctcgagccgcaacttgaaccctctctcctctcctcatacccatttcttcattctctagcaccctatttttggccttgttccgcatctcctacccctcccctctgctgcctgcaaccatgaagattttcaacccctccaaatgctttctccagaacgtggtgtgtcctttcgacaccctcttcatcattaacaggtttaagcccttcgatctgggtctctcccacctccaccaattccaattc

SEQ ID NO: 81167 - DNA, 250 bp, Glycine max
  Clone ID: 700960626H1
ttcttattcttctgctttcactctctgactcaatcgttctaatccacaaaaaatgaccttaaattacaacattgccctcgccttctctgcggtgctcacgctgctcctctttcccctactgaccgtaggggagctcgtggaggagcagccactagtcctcaagtaccacaacggccagctcctgaagggccgcatcaccgtcaatctcatctggtacggcaccttcaccccgatccaacggtccataatc

SEQ ID NO: 81168 - DNA, 249 bp, Glycine max
  Clone ID: 700960627H1
atcttatcttagcaatagctacccctatcacaacaatactctattaggcaaaaacaccaaatgggagaggaaaaagagcagcctaagaatgaaaccgagaagaagcccgaggaggccgccgcagcccccaagaaagacgacggacccatccctgtcgtttacaaactcgacttgcattgcgagggatgcgtcaagaagatcaaacgcacatgtcgccacttccaaggtgtggaaaccgttaaggcagat

SEQ ID NO: 81169 - DNA, 247 bp, Glycine max
  Clone ID: 700960628H1
gtggatgtgttagagctgcatccgatactgcattacaggctattggacaatactgcaatcagctacaatctttgaaccttggatggtgtgataatgttggcgatgttggagtgactactttagcatatgggtgtcctgatcttaggatagttgacttgtgtggctgtgtccgtataacagatgacagtgtgattgctttggcgactagatgcccccatctgaggtccctaggactgtactactgcaa

SEQ ID NO: 81170 - DNA, 234 bp, Glycine max
  Clone ID: 700960629H1
gcaaaggctaaagtagattctattctcctcaagcaaaacctatagctcccccacactcctccagttcttgaataaaagctaaataaatattaaagcctttccttcatcaaggtactgtttgatctttgaatttcagtcctcaaagattggaacaacaggaacatgtgtactctcacaactgttcctgtgctcccttctaagcttaacaagccttcgctttctccgcaccacaat

SEQ ID NO: 81171 - DNA, 154 bp, Glycine max
  Clone ID: 700960630H1
gaaaaagatggaactggaacatgtgaccagcttgtcaagaagagatcatgaaagaccaaatcccttttttcgagtgagagcagttagcttgggtggttggttggttactgaaggttggatcaaaccttctctcttcgatggcattccacacaac

SEQ ID NO: 81172 - DNA, 251 bp, Glycine max
  Clone ID: 700960631H1
agggaaactccgaatacaggtctagatcgtttgtacagacagacttttagggtgctaacatccaaagtcgagagggaaacagcccagatcgtacgctaaggtccctaagcaatcacttagtgcaaaaggaagtgatcgagcgatgacaaccaggaggtgggcttggaagcagccatcctttgaagaaagcgtaatagctcactggtctagctccatggcaccgaaaatgtatcagggctcaagtgattcac

SEQ ID NO: 81173 - DNA, 279 bp, Glycine max
  unsure (1)..(279): unsure at all n locations
  Clone ID: 700960632H1
cgaacgtcagaactcagctcgacataatcggcctgctgtctttacttggtctggaaactctacaagtgcagaaaaccaggaacttcttgagaggatactggatttgataaagccaaatttacaatccaaaccacaaagggaagcttctgaatctgaacagttttgggattttttaggaggaaaatcagaatatcccagtcaaaagattcttagagagcctgaaagtggatctcacctattctcttgtcatttctcgantacgtaaggataattttttgc

SEQ ID NO: 81174 - DNA, 251 bp, Glycine max
  Clone ID: 700960635H1
agttaatggagcatagatatggtgcgaaggaatttgtgacaagcaaggacagtagccttttatctccgggcacattctatctcactgaagttgactccatgtatcggagattctattcaaagaaaactaaagaaagcagtttgactcacgctgagaacggtgtgattgctaatggcgttgctaatggccactgatgttgagcatgtacaatcagcagtcaacttcgcctagaatgaggaagggtattgtta

SEQ ID NO: 81175 - DNA, 231 bp, Glycine max
  Clone ID: 700960637H1
cttttctgctccccgttgagaaagatttgaatcccaaggagaaataacgctaatggctccacgagacagccgagcccccgcgctcattgggcccggcccaagcctatcaccggcccacaaagagatccgctccagaggcctcaggaaacgcccctcgggccgctacgccgccgagatccgcgatcccggcaagaaaacccgcgtctggctcggcactttcgacaccgccga

SEQ ID NO: 81176 - DNA, 249 bp, Glycine max
  Clone ID: 700960638H1
cacaaacacaagcacagttgaaaatggctctgcttaccctctcttcgctgcaatgaagaaacgtttgttcttcttctccgaagaagaaaaatggctctcggcgacgatgcgcacaccactctccctcgttcctcgatgcccttctctgcgaagagcgagaaaccttcgaggaagactttgatgagaacggttatgagcgtgagaccgaaaacaacgaaccctctgtgataaagtcgcaatctttgccct

SEQ ID NO: 81177 - DNA, 81 bp, Glycine max
  Clone ID: 700960640H1
aagatggggtctccaatggcgccatctcttactctcactattgcattaaccataatctctctcacgttcccatctcaaaca

SEQ ID NO: 81178 - DNA, 246 bp, Glycine max
  Clone ID: 700960642H1
gaaagtagtcaattaacccaggtctatggattttatgatgaatgccagatgaagtatggcaatgccaatgcttggcggtattgtacagatgtgtttgactatttaacactttctgcaattattgatggaactgtgctttgtgttcatgggggcctttctcctgacattcgaacaattgatcagataagggtcattgaccggaactgtgaaattcctcatgagggtcctttctgtgatctaatgtgg

SEQ ID NO: 81179 - DNA, 244 bp, Glycine max
  unsure (1)..(244): unsure at all n locations
  Clone ID: 700960644H1
agcggtcagagcatggcggcggaaccggtgagtgacggcggacccgngcggagaaattgatcagcgggagagaagaatttggtgattcgtccaacttgttcagcgcgattctagcaatggtgctgtggctgggagctattcatttcaacatcgccctgatcctcctcgccgtgttcttccttcctctctccaaatcgctcttggttttcggttttctctttgggtttatggtgcttccacacaa

SEQ ID NO: 81180 - DNA, 94 bp, Glycine max
  Clone ID: 700960645H1
ctttctctgcgttgccatgacggaaccaacggagccatgcacgtcatcttccttggcaagggacccaaccaccgtgatccacccaaggcgcgag

SEQ ID NO: 81181 - DNA, 252 bp, Glycine max
  Clone ID: 700960647H1
ggcttctgtgcctcaaccaaaaatctcccttctaaccttattcttcttctcgtccttcaccatcattgcgcatgcaattgttcctcaaaacgaaaccttcaaatttgagaactcaggtgaacttggaccctacatcgttgagtacggtgcagattacagaatgataagcatcttcaactctccattccaagttggtttctacaacaccaccccaaatgccttcactctagctttgcgtgtagggctccaacg

SEQ ID NO: 81182 - DNA, 93 bp, Glycine max
  Clone ID: 700960648H1
ggaaaagaagcggtgttcgaatttgaggggtgaatggatcaatcgttccttgtaatggtctcgaatctcctccagctccacaactccctggac

SEQ ID NO: 81183 - DNA, 220 bp, Glycine max
  Clone ID: 700960649H1
caaaaacaaaacatttcgtccgaaactaatataacgtgttcctccttggaagaagccatagccataacatagccaccagaaaacaaaacccaccttagttattaaaagaaaagaaaactacataaaattaagctttgttcggtggtgaccatggggagcaccgactcatcaagcggttcacaacaaccgaacctgccacctgggtttcggttccacacaa

SEQ ID NO: 81184 - DNA, 247 bp, Glycine max
  Clone ID: 700960650H1
gttgaaatgaaaatgggttcttctttgtggactttgtgtctaattttggcttcactagcctcttctgcattctgtgcctttccacggaggccagtggagactccattcggcagaaactacgttcccacttgggcttttgatcacatcaaatacttcaatggaggttctgagattcaacttcatcttgacaagtacactggtactggcttccagtccaaagggtcatacttgtttggtcacttcagca

SEQ ID NO: 81185 - DNA, 99 bp, Glycine max
  Clone ID: 700960651H1
ggagcctgcctcgaggaggtatcaatgtgacgcctcagatgcaagagcagaggggaaaaagtgctgcagctggaacagatctcaagccgcgtccagcag

SEQ ID NO: 81186 - DNA, 140 bp, Glycine max
  Clone ID: 700960652H1
gggccatcggcgatgggagacgacagtggcagcaaccggtcaaagccggagtggctgcagcagtatgatctaatagggaagattggagaaggcacctacggtctcgtcttcctcgctcgcatcaagtcttccacacaaca

SEQ ID NO: 81187 - DNA, 244 bp, Glycine max
  Clone ID: 700960653H1
atcgaaggaatgaacggccaaaaccttgacggccgtaacatcactgttaacgaagctcagtcccgtggtggcggttgcggcggttgcggtggaggtggtggataacgcggtggtcgcggtggtggatatggtggtggttgtcgcggtggtggagggggatacaaccgtagcggtggcggtggaggctatggcggcggcggtggatatggcggtggcggtggcggtggctatggcggtggcagag

SEQ ID NO: 81188 - DNA, 79 bp, Glycine max
  Clone ID: 700960654H1
gcactatgatacaagcccaacaaacatggttttaattggtataggcgtgcaaaggtcttgttaattttgagcgttaagt

SEQ ID NO: 81189 - DNA, 245 bp, Glycine max
  Clone ID: 700960655H1
ctggcagtggcaaatctaccttgattcaagcattatttcgattggttgaaccggaggcagggagtatccttatagacaacattaatatttcatcaattggtcttcatgatcttagaagtcatttgagtatcataccacaagatccaaccttatttgaaggcaccattcgaggcaatcttgatcctcttgatgagcactctgataaagagatttgggaggcccttgataagtcacaacttggagat

SEQ ID NO: 81190 - DNA, 241 bp, Glycine max
  Clone ID: 700960656H1
actagaagctccattattggcaacaagctagcagcagaggagaagaatcagaattcagaactgaagcagacacggccgaaggaagaaacgaagacaaagacacaaccatgaagcgccttcttctcataacaaactgtctcttactcaccatcggcacctacggtgggcccctcgtgatgcgtctctacttccttcacggcggccaccctgtctggctctccagcttcctcgaaaccgccgg

SEQ ID NO: 81191 - DNA, 247 bp, Glycine max
  Clone ID: 700960657H1
accgcctctgccactactcatacttctacgccgacggcacctacgccgagggcaacctcgtcagagaaaaactcaccttctccccttcccaaactacccctccacttattctaggctgcgccaccgagtccagcgacgccaggggcattcttggaatgaacctcggccgcttgtccttcccctcgcaagccaaagtcaccaaattctcgtactgtgtccccacccgacaagccgcgaacgacaacaa

SEQ ID NO: 81192 - DNA, 246 bp, Glycine max
  Clone ID: 700960658H1
ctaacaacaacaataaaagaccatgtcggtgaaggagtgcgagcaccacaaggggaagaagaggaagatcttccggcaagtgttctggtgcttagtggtgttccttttcatcgtgctggtcacaattcttttgatatgggcaatccttagacccaccaaacccaccttcacgctccaagacgtcaccgtctacgccttcaacgccaccgtggcgaacttcctgcattcgaattttcaggtcacgct

SEQ ID NO: 81193 - DNA, 144 bp, Glycine max
  Clone ID: 700960660H1
cttcaaactttcaatcgctagcgccgattttgatcacttttccggtatgaatcgtctgcaacaccccctttgttaatttagaaatgctagatctattcatcgtgtcacacgttcgatccaaaacctggttccacacaacatacg

SEQ ID NO: 81194 - DNA, 249 bp, Glycine max
  Clone ID: 700960663H1
gctggagtgggtaaatcggtactgattatggaattgatcaataacattgccaaagctcatggaggtgtatctgtatttggcggagtaggtgaacgtactcgtgagggaaatgatctttatatggaaatgaaagaatctggagtaattaatgaacaaaatattgcagaatcaaaagtagctctagtatatggtcaaatgaatgaaccgcccggagctcgtatgagagttggtttaactgccctgactatg

SEQ ID NO: 81195 - DNA, 247 bp, Glycine max
  Clone ID: 700960665H1
ctttattggcgttagtatgctacctactggagcaaaagagaaccaattacgtgagaacaacagccagaaggtccatcctcaaccaatggaagaggccatgaatcagaatccagaagcaatggaaaccctaatatctaaagtttttacaaatatctcttccttgaagtcagcttatatccagcttcaagctgctcatactccctacgaccctgataaaatccacactgctgataaacttgttattagt

SEQ ID NO: 81196 - DNA, 247 bp, Glycine max
  Clone ID: 700960666H1
cgtgcctctagggttatcatttctccatttccatgttctctctcacttttcaagaatcgtaagctatgggaaagtcttacccaactgtgagtgctgattaccagaaggccgttgagaaggcgaagaagaagctcagaggcttcatcgctgagaagagatgcgctcctctaatgctccgtttggcatggcactctgctggaacctttgacaagggcacgaagaccggtggacccttcggaaccatcaa

SEQ ID NO: 81197 - DNA, 246 bp, Glycine max
  Clone ID: 700960669H1
tgcacgcatggcatacattatgctcaggctcgactatgctggaattgcagccctgatatctacctctttctatcctccagtatattactcttttatgtgttacccctttttctgcaacctttacttgggatttatcactgtattgggcatctccaccatcttgttttctctactcccagtgttccaaaatccagaattccgcaccatatcgaaacatatctcctctggaatgggggtatctggcgc

SEQ ID NO: 81198 - DNA, 248 bp, Glycine max
  Clone ID: 700960672H1
cagcttttccctcgttgaaatgaaaatgggttcttctttgtggactttgtgtctaattttggcttcactagcctcttctgcattctgtgcctttccacgtaggctagtggatgattccattcggcagaaactatgttctcacttgggcttttgatcacatcaaatacttcaatggaggttctgagattcaacttcatcttgacaagttacactggtactggcttccagtccaaagggtcatacttgtt

SEQ ID NO: 81199 - DNA, 256 bp, Glycine max
  Clone ID: 700960001H1
catggccacctctgctattcagcaatcagcattcgcaggtcaaactgctctgaagcagctcaatgagttggtccgcaagaccggtggcgccggcaaaggtcgcaccaacatgcgccgtaccgtcaagagtgctcctcagagcatttggtatggccctgatcgtcccaagtacctgggtccattctcagagcagattccgtcatacctgaccggagaattccccggtgactacggatgggacactgctggactatca

SEQ ID NO: 81200 - DNA, 268 bp, Glycine max
  Clone ID: 700960002H1
gtattcggctcgaggaaaaagcaaaaatcaatgctaggcagagcagagacaccaaccccaacttttcaaatcttcttttgcatcactaacttctttacagcataaagctaagcaaaaaagagactccctttgttatgcttgcccttctatttcaatttcaacgtgtaatcatggcttttgtaacctcaggtagacgaggatgagatttattggagacgcagaaaggaagatgaagagttggaatggacacctaattccactcacttaa

SEQ ID NO: 81201 - DNA, 251 bp, Glycine max
  Clone ID: 700960004H1
ccgcaatggagaagccatcgtcgtcgtcgtcgtcgcgaagaaaatcgagcacgaaggtgaaagcttcaaccgatgcgaacacgaacctgagcatgctcaacgaggaccttctccagaacattctagcgaggcttcctgctctgcatttcgcttccgcagcttgcgtcagcaaatcatggaactctctctgcaatcgcatcctcactcgccccaaactctcttccgcgatttctctcaacccttcgctcccc

SEQ ID NO: 81202 - DNA, 249 bp, Glycine max
  Clone ID: 700960005H1
gaaagtggtgttggctgagggagcagcggttaccgtcaaaggtgcaagatccgttagtcttcggcaacctcttgatttccctcttccgttaaaccgaacggagaatggttttgctaacggtcttttaactttggctgagcatcttcgccatgcttctagaacccagggttctccgattctctcgctgagaatcgttggtcccacatcgctcacagcagcgccttcttccgacataacaacctcaacctc

SEQ ID NO: 81203 - DNA, 249 bp, Glycine max
  Clone ID: 700960006H1
ggagatttttaattgtgagaaaatgaaggatgatgctacatctgctcttgattccttatatgatgaaatacggcctgccattgaagaacacgagagggatagccaagacagtgtatccacgactgtagcagagaagtggatacaggcttgctgcctgaaattaaaggcggagtttgacctttactcatccattgtcaaaaatgttgcttgcactgcgcaaagggcatctggccaagtaaaacctactga

SEQ ID NO: 81204 - DNA, 249 bp, Glycine max
  Clone ID: 700960007H1
accatattggtttcactttggtcttcttcaccctgttagggtttgcatcagattcccccaattcttgtttgattttgcgctttcactagtttttcttcgacatgactcaagatctcgagatgagggatcgctcaacgccttccaactctgtttctttgcctgctccatctactttgcagcatttgaaggagatagcgtctcttatcgagaccggttcgtactcgaaggaagttcgtagaattgctcgcg

SEQ ID NO: 81205 - DNA, 247 bp, Glycine max
  Clone ID: 700960010H1
ccaggattgatcataagtttgacctcatgtatgcgaagagggccttcgtgcactggtatgtgggtgaaggtatggaagagggtgagttctcagaggctcgtgaggaccttgctgctcttgagaaggattatgaggaggttggtgccgagtctggtgatggagatgatgatggtgaaggagatgatgattattagagtgtctgaaatatcgtgtgtttgatgtctactttttcgtcttctgtcggaca

SEQ ID NO: 81206 - DNA, 103 bp, Glycine max
  Clone ID: 700960011H1
cgaggaacttatcttgagctccacaggatagctttcagagatatatgttcattcgctacctacttccactaaagggacttgagctggccaatactgcactttg

SEQ ID NO: 81207 - DNA, 251 bp, Glycine max
  Clone ID: 700960012H1
cggctgcatggtgggatgctgacttgcctaactacacgcccgtgttgtacaaacccgaggaccctaaagggttgaggtttacggtgcttaagccaagccaaattgcgagaatgtaccactccacttccacggtgcttcccagtggaaagatttgggtttctggaagcaacacccacaatacctatagggacgtggataagttcccaactgagacaagagttgaagctttctctcctccttatttggacgcc

SEQ ID NO: 81208 - DNA, 253 bp, Glycine max
  Clone ID: 700960013H1
catcaccaccttgcaataataataataatcatcatagttattattatggttcttcagctcttgcacctcttgcaccaccaccacaacatgtttatgatcaaacaccaccaccacaacaacaacccttgctatcatcatcagcacaagaagaagggtttccaaatctaatgcagtacgcgcacttctttggagtagggatgatgatgatctacagcgtattgcttcaggccttcatcaacatcatcatcacaat

SEQ ID NO: 81209 - DNA, 251 bp, Glycine max
  Clone ID: 700960014H1
caaagttagaaacaaggagaaagaaagaagatggcaggaaagaaaatcccagatgtgttgctgaattcaggacacaaaatgccagttataggcatgggaacttcagtggagaatcgtccatcaaatgagacccttgcttctatctatgttgaagccattgaggtgggttaccgtcattttgacactgctgcagtgtatggaacagaggaagccataggcctagccgtggccaaagccatagacaaaggcct

SEQ ID NO: 81210 - DNA, 252 bp, Glycine max
  Clone ID: 700960017H1
agataagaagcagagtggtaaacaaagagaaacaacaaaacccagaatctagagactaataacggctcttgctttgtgaatagcataccatagcaacaacaacaacacagaacacacaaagaaaaaaggtttcattggatcgtaactggggggcacttgtccaaattggaaaattcccgagtgattagggttttgatcggagggtgtgattgaaaggaagactgtgcttgttcattctctccgtgggggttg

SEQ ID NO: 81211 - DNA, 251 bp, Glycine max
  Clone ID: 700960018H1
cgcgcggattcaaaccttaattcttctattactctctttctctcatgcgttcttgctctcaacaacaatcacacaccgccatcgatgccttcgttcttttcttcttcgttctcctttttgctctcgttcgagggttctttcgtggggaacactgcagatttcaccacccgggtcttattcatccgtgcccatgtccaaagttctcggcttttccggagttgacgatctttgccctatgggatcaatatacg

SEQ ID NO: 81212 - DNA, 249 bp, Glycine max
  Clone ID: 700960020H1
caagaaaaaagatggcgaataacgagaaagacgcatgttcttccttcaccgatttcccagaggacattcaggtgtgcatcctctcgttcctgggcccaccggagatcgcaaccctagcctgcacttcgaagcgaatgggctctctctgcgccaccgactccaagctctggttctctatgtgcgagcgcaggtggggctcctacacccgcatcacccagtgggcccaaggaaaaaaccccactctctcct

SEQ ID NO: 81213 - DNA, 248 bp, Glycine max
  Clone ID: 700960021H1
ccagagcgaatatgtgtccgcacgagacaagcgccgcgaattcgtttccggcttcactggaagtgccggcttggcacttataacaaagaatgaagcactgctgtggacggatggacgatattttttgcaggctgagcaagaacttagtgctcagtggaagcttatgcgtattggtgaagatcctgctgtagatatctggatggccgataatttgccaaaagaggcatccattggggttgacccttggt

SEQ ID NO: 81214 - DNA, 247 bp, Glycine max
  Clone ID: 700960023H1
gccatttgggagttaggttctgcacgctctgcttccagcgagtgttctttcttcgtttcaacaccttaatttgcacacgctgcttcttcagcttgagaaatggcacaagaaacctttctattcacatctgaatctgtaaacgagggtcaccccgacaagctgtgcgaccagatctctgatgcagtgctcgatgcgtgccttgaacaggaccctgacagcaaggttgcctgtgagacatgcaccaaga

SEQ ID NO: 81215 - DNA, 249 bp, Glycine max
  Clone ID: 700960024H1
ttcccaaggccttgagaaatatgttcaagtgcacatttggtgaatattcagaaagggaagggtacaatggatctgaatatgctccaacttatgaagacaaggatggggattggatgctggttggagatgttccatggaacatgtttgtgtcatcctgcaagagactgagaattatgaaagcatcagaagcaaaggggttgggttgtttttgaccaaaataaaaaaacaaagcaggaccatcatgcatgc

SEQ ID NO: 81216 - DNA, 239 bp, Glycine max
  Clone ID: 700960025H1
aggaaagagagattcaaaaactgtggccaagaaggttctgattgaacagttgacatctaatccttggaacaatttgcttttcatgatttactacggattagttgttgaaggccaaccttgggtgaatgtgaaagctaaagttaagaaggattatccatcagtgcagtatacatcatggacggtctggcctgttgtggggtggataaatcacaaattcatgcctcttcatttccgtgttg

SEQ ID NO: 81217 - DNA, 249 bp, Glycine max
  Clone ID: 700960027H1
attactaatacctacagaagtctgggctcttttgaggagttcgtgttatccacttctgggtctcggagtttgccggctggggatccattctcatacacaaatgatttgcatgcaagagtttcttttactgatgatagctcccttggaaaagtgaaatatactgtaacttgctactatgcaaagagatttgaggctttaagaagaacttgttgcccttctgagttagattttgtgcggtcccttagtcgt

SEQ ID NO: 81218 - DNA, 114 bp, Glycine max
  Clone ID: 700960028H1
cttgttggtcttgtaaggcttgtcaatatatactacttatatatatatatatatataaacataaggaaattgttcgtgttttgtatgagaatactttttaagtcatctgtactc

SEQ ID NO: 81219 - DNA, 249 bp, Glycine max
  Clone ID: 700960029H1
tgatccgtggctctggttctggctctggctctgccctttttggttttctctcgttaccgaaaccagaagaaccatttgtggtggatatggatctggaccagtggatctccaaggtcaaagatggccagcatcttcttgaagacgagcttcaacttctctgcgaatttgtaaaagagatccttattgaggagtccaatgtgcagcctgtcaatagtccagtgactgtttgtggtgatattcatggtcaat

SEQ ID NO: 81220 - DNA, 252 bp, Glycine max
  Clone ID: 700960030H1
gtttttgaaatgttgtcaccccttcttctatttctatgcctaactcttcctttgtttttgttgtccttcttcaaataccgtaaaaccttcaagaatccaccacttccaccaggtcctagagacattcccataatagggaatcttcatcaactagatagtccttctcttcatgagcagctatggcatctctcaaagaaatatggtcctttattttcccttcaatttggattaaggccagccatagttgtttcc

SEQ ID NO: 81221 - DNA, 82 bp, Glycine max
  Clone ID: 700960031H1
aaaacagcatgcatctggcaagaaatttcaggagattcttgaagaagcaatagttcgcccccttcatattgaaggcgagtta

SEQ ID NO: 81222 - DNA, 254 bp, Glycine max
  Clone ID: 700960032H1
gagataactagaaacagtgtgatgaaaatgaaggtccttgttttcttcgttgctacaattttggtagcatggcaatgccatgcgtacgatatgttccctctccgaatgaacactggctatggtgcccgtactccggaggtgaaatgcgcaagttggaggcttgctgtggaaacacacaacatctttggctttgagaccaatcctgaagagtgcgttgaagcaacaaaggaatacatccatggcgaacaatatag

SEQ ID NO: 81223 - DNA, 249 bp, Glycine max
  Clone ID: 700960033H1
aagacaccaatcttctctccacgcccttcttgggtaaccgtctgaagtgcagcaatggcagatggattgcattcgcagcatccatcggtagttcagaagttatctggacagtcttatcttgtgtccaggcttgctcctaatcactccagaaactgttctaccactggtagttacttcaatggaggtttgcagtcttcaggtttggttccagtcacggcacacgcgccggctgagaaaggggtgtctgga

SEQ ID NO: 81224 - DNA, 249 bp, Glycine max
  Clone ID: 700960034H1
ataagagtgtctctgataatttgatctttgtttcttctctttctctcctttgagatttttcagcaccccaccaaggttttgtccgaaaagcttgaatttttcgcctaccctttacaatgatctcttcattgagacaacctgttgtagggatcagtggttctgatcttcttttgaggcaaagacatgcaaccctaattaaggcaaggtcctttttaccctctttgtcaagagaaaagggtcaaagatctc

SEQ ID NO: 81225 - DNA, 249 bp, Glycine max
  Clone ID: 700960035H1
atttttggtgcatgatcgtttagggtttgtgcttgttgttgccgccttagtgacaataatcgcgccaactcttgtatgatccatcactcagatccttccaattccgctgtctcgctttgaccgccgccacaccaaactagcatgttcttcagtgtttccctttcagatatttgatgcttggaaacgtagggaaagttgcccaatctattcttagaacccatagaagaagatatttggtcgcaagtagaa

SEQ ID NO: 81226 - DNA, 243 bp, Glycine max
  Clone ID: 700960036H1
cccactttaaagagttgatcctagagcatgcacctccacctccagcaatagcagagtatgctactgctaatttaattaagatgggtttcccacaacgatcagctgagggttctgtcgcaatatgcacatgtcatgaagaggccaagaccggagggggatacacttgtccaagatgcaaagttcgtgtctgtgagcttcccactgaatgtcgtgtgtgtggattgacccttatttcttcacccc

SEQ ID NO: 81227 - DNA, 247 bp, Glycine max
  Clone ID: 700960037H1
aaaaacttaaatcaaaatacttaatagcatggcgatacatttatacaaaacttctaccccaagcacacgcaatggagccgtagacagtcaagtaaaatccaatccacgaaatcatttgatctatggacagcatcgttgtggtaaaggccgtaatgccagaggaatcattaccgcagggcatagagggggaggtcataagcgtctataccgtaaaattgattttcgacggaatgaaaaaaacatatat

SEQ ID NO: 81228 - DNA, 130 bp, Glycine max
  Clone ID: 700960038H1
gttccaacatctatctcacttcttagttctttgtggctctttccatgatggcctctcctacatctccaagagttctcttcttgagtctctttgtaactctttccatgagtttacatttgagttcagccag

SEQ ID NO: 81229 - DNA, 246 bp, Glycine max
  Clone ID: 700960039H1
agatcccaaaaccaaaaggtggagggcgtgggcgagggatatctatcttcattttcgtcgtcgttcatttttttatttttattttctgttttccattcgcttcttctctcagaaaagctcgccaatcgatcttgctctcttctacgcttttcgaattccttccattccattatggacgcagattagattcacgttcacattcacttctcttcgtttgcttcaaccactctgctctgctctgctcta

SEQ ID NO: 81230 - DNA, 245 bp, Glycine max
  Clone ID: 700960040H1
caactagagaaaaaaaaaaagagaagaaaaaaaaacttggttttatcttctttgttattattatattcacttcttcaatatcttggttctttgatattattattcgattgagcaaaaaatgggagttccagagagagaccctcttgcacaattgagcttgcctcctggatttagattttatcccactgatgaggagcttttggttcagtacctttgccgcaaggttgctggccatcatttctctc

SEQ ID NO: 81231 - DNA, 242 bp, Glycine max
  Clone ID: 700960041H1
acttctcggtggagggataagagctgaagagatcaaagaactttgggcagagtatgaaaacaattcttctttagaggcaaatcttgtaaaggattttgacaaggttgagatgattctgcaagcgctggaatatgaaacagaacatggaaaagtgttggatgaattcttcctttcaactgcagggaagtttcaaactgaaatcggaaaaagttgggcggctgagatcatttcaagaagaaaat

SEQ ID NO: 81232 - DNA, 87 bp, Glycine max
  Clone ID: 700960042H1
tgctttggtgtttgcgttaattggggcgttgtggaacttgcagagggcagagggtatccgatttgtgatagacagagacgagtgttt

SEQ ID NO: 81233 - DNA, 248 bp, Glycine max
  Clone ID: 700960044H1
aaagcttcagcaaacatgctagggaacttgttactcgccttcagaagattgacggtgacaactatccagagaccttgaatcgcatgttcatcatcaatgcaggttctggatttaggatactgtggaacaccgtaaaatcattccttgatcctaagaccacggcaaaaatcaatgttcttggcaacaagtatgacaccaaattgctagaaataattgatgcaagtgagttgcctgaatttttaggaggc

SEQ ID NO: 81234 - DNA, 251 bp, Glycine max
  Clone ID: 700960046H1
ctgtcctcacttctgtcagttgcatctgcagcaacagaggagggacgaacaaggccattcaaaagggtctatgcctttggagactctttcacagacactggcaacacccaaaatgcagaaggtccaagtggctttggccatgtttcaaactctccctatggaaccactttctttaaccactccaccaataggtactcagatggtaggcttgtgattgattttgtggctgaagcactttcactgccttactt

SEQ ID NO: 81235 - DNA, 205 bp, Glycine max
  Clone ID: 700960048H1
gtcacatataacccatgccacacaacatagaagttaggagactgaagtgattggctttctcttcccctacaacacaagacactgccattcagaaattaagtatctagcaattccacccatgtcttccttttcggcaaccttctacagggacaaattgtattttaggtactgaaaaaagtttgtgttttatgtagttctccattgg

SEQ ID NO: 81236 - DNA, 247 bp, Glycine max
  Clone ID: 700960050H1
gcctgtggattcacctcaacaacctatgacccttgtgtggatatttcacttaacttggataccaatgtctcttcaacagaaaagggtaaaaaacttaccaaacaaaatgaggatggcagtatgtctacactttttggttgtttagatttattcacaaggccagagacagttggggtcagaccagaaactttactgccggaattgtcgggaaaggcaggactcgttgaagcaaatgtctattagaaag

SEQ ID NO: 81237 - DNA, 244 bp, Glycine max
  Clone ID: 700960053H1
tctatctctcttttccttctcctaaccctctttcctattaagaggagaaggaataacaaaaacaatatacacaatggctttcgctttcactttcaccaaaaccctaattctcttcgtctccctctcctccctcctcctccaaacccacgcggcccgcggcccccgcaccgtccaggcccgcctctacagcctctgcaagcccaccaccaatgttgggctgtgctacaggaccatcctgccggag

SEQ ID NO: 81238 - DNA, 243 bp, Glycine max
  Clone ID: 700960055H1
caacagcacaaagcgggttactgtctgttcaagctaccatctctctctctctttcttagtgcctccttgccagaagttaaaatggcccaagaaactttcctattcacatctgaatcagtgaacgaggggcaccctgacaagctctgtgaccagatctccgatgctgtgctcgatgcatgcttggagcaggaccctgacagcaaggttgcctgtgaaacctgcaccaagaccaacatggtgatg

SEQ ID NO: 81239 - DNA, 241 bp, Glycine max
  Clone ID: 700960057H1
cagaagaagaagaagaagatggagaagtatcagatctggagcaggagaatagcgttggcagcgtttgcgtttgctctgctgttccaatcggcctcagcagacgacgtcgttgtgctctctgaagataagttcgagaaggaagttggtcaggacagaggagctctcgttgagttctatgctccttggtgtggacactgcaaaaagcttgctccagaatatgaaaagcttggtagcagcttca

SEQ ID NO: 81240 - DNA, 246 bp, Glycine max
  Clone ID: 700960058H1
cttcaattcttcttctcatcatttcttttcacacaaaaaggtaccacaggaagggagaatgggactgttgtttcttgttgtattaggtgctgcttgggcatgtgatgcaagggaactggctaactctgaaacttctgaactaagcataaaaccggatgtgtgtgcactttgtgaggaatatattaccaaggcacttgattatctacatgaaaacaagactgagacagagatcattagtatcctgca

SEQ ID NO: 81241 - DNA, 250 bp, Glycine max
  Clone ID: 700960063H1
tttcattttccctcactttctcgctcgccaaacgcccctctctctcctccaatggccgaccagctcaccgacgaccagatcgccgagttcaaggaggccttcagcctcttcgacaaggacggcgatggttgtattactactaaggaacttgggactgtgatgcggtcactagggcaaaacccaactgaggcagaactgcaggatatgactaatgaggttgatgctgatggcaatggaaccatcgacttcc

SEQ ID NO: 81242 - DNA, 248 bp, Glycine max
  Clone ID: 700960064H1
atctccagtgaacttcagttggctgggcctgaatacggacatttgcaggggttttcttctcttccaccagcttttgaatacacaaatttagttctgagctgttagacaagttgtctttgcatcctctcagccaagatatgacaacactgaagacacctactgttactgtggataactcactgagcccagttcataccctgcttcagatacaatgcgttgatcagaagggcttgtgttatgacattatg

SEQ ID NO: 81243 - DNA, 245 bp, Glycine max
  Clone ID: 700960066H1
agcaagtggacttgggcgttgcaagataaataatggaggctgttggcatgatgctcaaaatggacatgcattttctgcttgtttggataatggaggggtcaaatgccagtgtcccacagggtttagaggtgatggtgtaaaaaattgtcaagatatagatgaatgcaaagagaagaaggcttgtcagtgccctgactgtagctgcaagaatacttggggaagctatgactgcagttgtagtggag

SEQ ID NO: 81244 - DNA, 202 bp, Glycine max
  Clone ID: 700960068H1
cacaccaggcgcacgttagcacaaactatcatggccacggcaacagcagctgccacctcgtcctttatggggacgcgtctcctggaggctcactccggagcggggcgagtgcacgcccgattcggcttcggcaagaaaaaggctcccgccccaaagaaagcctccaggggatcgggccgagacaccgacagacccctttggt

SEQ ID NO: 81245 - DNA, 201 bp, Glycine max
  Clone ID: 700960069H1
accaactaacacaaaacctgaatcaatattctcaactagatatcatggtctcttctatttcctctctttctctccttctcccttctctcacaaccctcattctcctccaaattcaaacatgtgtctcttcatcacaaacacaaaaacccctcctactacctctcaaaacacaaacacaaacacctccacgcaagcttgcat

SEQ ID NO: 81246 - DNA, 242 bp, Glycine max
  Clone ID: 700960071H1
ccttttaattcaaccgcagcaatctccgtctctgccccacggcttacgttgagcgaggtagtggttagcattatatattttgggaacttgcagtatgtctcgtggatctgtgaatcggaaacatgttacacgtaaagatgttaagcgggtgcaggctcttattgagcactgtctgacacaaaatatgaataaggaagaagctgttgagttaataagtcaagtagaaatagagcctaatttca

SEQ ID NO: 81247 - DNA, 170 bp, Glycine max
  Clone ID: 700960072H1
cgattctcttagatcgaatttggcataacccacttcgtatctgattgaagcacccactgggttctgtctgagattcaacataagaacagatggagtcggatcttggcaagctcttcattgggggaatctcctgggacaccgatgacgaacgtctcaaagaatattttggg

SEQ ID NO: 81248 - DNA, 241 bp, Glycine max
  Clone ID: 700960074H1
agcgatggctgatgtttcagattcacgagaacaccccgttcttggttcagcgcaactgttggtggagctggaatctgcgctgggcggtgagaaaacggtgacggcgcaggcttcttcttcttccttaggcttggggattgaggttatcgacgaaacggcgttgctagactccgttgcgaagaagaacggaggaaccaagaacaatcaccagaagtctcagccctcaaataagattgggaac

SEQ ID NO: 81249 - DNA, 244 bp, Glycine max
  Clone ID: 700960076H1
gaaagtagcaaagatgtttcctttcgggcaaaagggtcaaaagataaaggggactatggtggttatgcagaagaatgtgttggatatcaacagcatcaccagtgttggagggatcgttgaccaaggcttaggcttcataggcagtgcagtcgatgcacttacttttgcagccaccaaaatctccatccagttgattagtgctaccaaggctgatggtgggaaaggataaattggaaagagtaca

SEQ ID NO: 81250 - DNA, 136 bp, Glycine max
  Clone ID: 700960077H1
gaagaaaccaacacccgtaaaggccaacaaagaacaaggaactccaaaattgttagtgacaaagtcattaccatcatctttatctaatcgagttttaaggactacaaaggtgaatcagtcgtcattggcaccaagc

SEQ ID NO: 81251 - DNA, 246 bp, Glycine max
  Clone ID: 700960078H1
ggacagtgtagtgtagtgccattgagaagcattaatgatactagttagccatatccaagctccttgcgtaggagccatgttttcaaagtgttgttctctattgtctctacccaaattgcatcactgttacaaacccaccaacgttttccaaccctgtacctaatttcatcactagaagaataagctccacaagaccctttcatctcacactcgccaaagcagagggaaacctcgattcagattcac

SEQ ID NO: 81252 - DNA, 119 bp, Glycine max
  Clone ID: 700960079H1
aaaatcttctctcttccctaggaaggttgaatgatttggaaaaatgggttctggcaatgtgaagccagaagaagaagccctagaaaaggagaatgtaggtgttcctgtccctgaaattt

SEQ ID NO: 81253 - DNA, 247 bp, Glycine max
  Clone ID: 700960080H1
gtcataactcgtaagataacaaagctcatcgaatcgaagtccttcattttcattctcttccttgtcactgatcgtcatgtacagagttgcagcatcatcattcagaaggcatctcaagggccatggaggtaacttgggatccactaggttttcaacttcagccgcggtagctgcaaggacttcatcaggtggtttgtttagctggcttactggagagcgttctagtgctcttcctcctctggacatg

SEQ ID NO: 81254 - DNA, 240 bp, Glycine max
  Clone ID: 700960081H1
cagttctactctacgctctaaaccctctctctctctctctctcgatctatcatggctttgcccaatcagcaaaccgtggattaccctagtttcaaactcgtcatcgtcggtgacggcggtacaggaaagacaacgttcgtgaaaaggcatcttaccggtgaattcgagaaaaaatacgaaccgaccattggagtggaggttcacccattggatttcttcacaaactgcggaaagattcgc

SEQ ID NO: 81255 - DNA, 240 bp, Glycine max
  Clone ID: 700960082H1
ggctcacggatcagattctcgccattgctcccggcgacgaggacgcgctccgatgcaaggtcgtcgcgctgataaaaaatgaccgcgtcgaggacacactctccgccattcggtcctctaagaagcagctcgatgattttcatttcctcaaggcatactaaacaaacagacaaaacaagttggatgaagctttggagtctttgaaaagacaagagagcaatgatgaaacaatgcttttgg

SEQ ID NO: 81256 - DNA, 98 bp, Glycine max
  Clone ID: 700960083H1
attcccttcgaatcaaagcaaaacttagcagtttgggttttggtcaccctctgagacacaacctcacctttctgacatatccgtcacaccaatcttcc

SEQ ID NO: 81257 - DNA, 94 bp, Glycine max
  Clone ID: 700960086H1
cggatcgacgatgaagacgaccttctgatccgtcaagtggtgccggatgcggaggaccaccacctgctcaacgcggagcaccacttctccgcct

SEQ ID NO: 81258 - DNA, 240 bp, Glycine max
  Clone ID: 700960087H1
tagggttatcatttctccatttccattttctctctcacttttcaagaatcgtaagctatgggaaagtcttacccaactgtgagtgctgattaccagaaggccgttgagaaggcgaagaagaagctcagaggcttcatcgctgagaagagatgcgctcctctaatgctccgtttggcatggcactctgctggaacctttgacaagggcacgaagaccggtggacccttcggaaccatcaag

SEQ ID NO: 81259 - DNA, 167 bp, Glycine max
  Clone ID: 700960088H1
acttatcaggtcctgtgactccagttaccggtggcatgtcacaagccgcaagtggtactaataatgatccaacaactacaacagtagataatggcactacttgggactttccatctacttcagtagggcagacaactgcatcacccaacaatactagtgtttggtca

SEQ ID NO: 81260 - DNA, 82 bp, Glycine max
  Clone ID: 700960090H1
atcggtgttcacatgatctcatcagaatcgtcagcgtcaattgaagaagatgccgctcagaaacatcgccgtcggaaggcct

SEQ ID NO: 81261 - DNA, 241 bp, Glycine max
  Clone ID: 700960091H1
ttctcatcctcctctgtctctctctctccaccattgccatggattcttacaagctccggccatccagcgccttcaattctcccttctggactacaaattctggtgctcctgtttggaacaacaactcctctttaaccgttggagctagaggtccaattctgcttgaggattatcatcttgtggagaagcttgcaaactttgacagggaacgtatcccagaacgtgttgtccatgccagggg

SEQ ID NO: 81262 - DNA, 242 bp, Glycine max
  Clone ID: 700960092H1
cccttatctacctgccacaactgactcacttgctctcgcaactgaggccaaagacccatctgaggccatctccattctttatcgggtgcttgatgatccttcttcttcaccagatgctctgcgtatgaaagagcaagcaatcacaaacctcactaagcttctcactgatgagaataggggagaggatctgcgcaccttcttactcagttgaggccattcttctccttgatacctaaggcaaa

SEQ ID NO: 81263 - DNA, 151 bp, Glycine max
  Clone ID: 700960093H1
ctctgtcacaagtctcaaaactctgttcttgggttgtctgattctctctgaaccacacagcgtgaccggcgatcttaatctcgccggaaaattgccctacgctcgccggaatctccaacttttccgatttgaactccgaattagattctgt

SEQ ID NO: 81264 - DNA, 286 bp, Glycine max
  Clone ID: 700960102H1
attcggctcgagcacgtttcctttttatctctatctttcttcacatcttaaccttgttcttaccagatggctgcctcagttaaactcttatttttgtcctttctctcgttgttcatctctttctccatagctcaaacctctttcagaccaaaggcacttgttcttcctgtaaccaaagatgtttctgcctcagttcctcagtatgtcacacaaatcaaacaaagaaccccacttgtggcagtgaaactaactgttgatcttggtggtggctacttgtgggtgaatt

SEQ ID NO: 81265 - DNA, 271 bp, Glycine max
  Clone ID: 700960106H1
cgaattgtgagagcgtgtgctttttgcgttctctctctaaatccaacgtttggagtgtttctctctcactcctctctgcaagatccgcaccccaaaccctagcaaacccctaccacagagggagctgtgaagaacaacaacacgcaccgtcaccaccaccctcgctcgcttcttctgatccagttggactagcttttggaaacaattacaatggcaacttcagagcagcaagtccctccccaaactcctgcagctgatattgttggcaatg

SEQ ID NO: 81266 - DNA, 271 bp, Glycine max
  Clone ID: 700960107H1
atcgaactcgccaggaacggaactttctcagattgacacacaccatgaaggaaagtggtttcgagaataatgatacaaagcaagctgctgctgatgtgttgtttctatattcaaaatttgcaatggcatgcattggatgtaaggctcgtccatgtgatttgaggtttcatttgatgaaggagatttcaggtatgccctcttctctaaatagggagtcaccacagaatgcagcatctcctgatgcaatgggtgagtcatccagcacaggaac

SEQ ID NO: 81267 - DNA, 267 bp, Glycine max
  Clone ID: 700960110H1
aaaaaatgaacacttactaaggtctgggcaactgggaatgtgcaatgatccttattgtactacttgccctacctacttcaatgcttctcagcaaagaaatccaaaaccttcgactagatgggatccaaagttccataatgctctttatggggatgccaagagttttgtgagaaaacttctttctttctgctattcgtatgttcctggagttatgaaccctcatgctaaagtcgtacaaaaatggaacaaatttttggccattttttg

SEQ ID NO: 81268 - DNA, 268 bp, Glycine max
  Clone ID: 700960111H1
aaaatctggctcggacattgcagtttaaggaaacctggcatgggagttattactgtttctacctcagctgctaggactccattaagattgaatacaaggttgatcagtcatcagcaggtgcataaacgacccataattttagcttttaaaggaaataaatcgaataaaaccactttggtttcacctcaggagaaaattcctctacccctagaaacagcgaagaaacaccagaaaagagtaggaaagactagtgagtcactgaagagag

SEQ ID NO: 81269 - DNA, 276 bp, Glycine max
  Clone ID: 700960112H1
ttcggctcgatgtccatatcgcggttgatagcatagcatcggtcactaatggaagccttatctgttgtacctgtgcgcgcccctattataaatggagctttctgcattttctagctatctaagcagtttctgatgcttccttgttcccattttcttcgaatcaactttggtgccgatgctctcttcctcttcgtcgccgcgattatggtctctgttggagtcccaagtcaaaaccgtgttttcggatcagaatgtgctcggagaaagcttcgtcgt

SEQ ID NO: 81270 - DNA, 265 bp, Glycine max
  Clone ID: 700960114H1
caacactaaaatggcacttccatacccattttcctacctcctcttcctccttctaattctcttatcttctctcccaaacatttcccaagccacctctcgtgccccaaatcgcatgttagccttggttcaaaaccaaccgcttgtactaaaataccacaagggtcctcttctaaagggcaacatcaccctccatttgctatggtacggtacatttacccccacgcaacgatcaatagtcatcgatttccttgaatccctaacctcc

SEQ ID NO: 81271 - DNA, 104 bp, Glycine max
  Clone ID: 700960115H1
cagattcctcaattcactcacaaataatattccattctccattttccaggaatatgcatttcttgctctgtgctctttcctttactttatactatttatttcat

SEQ ID NO: 81272 - DNA, 269 bp, Glycine max
  Clone ID: 700960116H1
caaatccaattaatctctatagctcatagcaaattcagagcaacaacaattcagaaaatagccaaaaaatcaaccaaagaacatcgttgacgttaatggctcaaagggtttagagaagcctctgtggtatgcgaagacataaacgtacgccgagatgatttttccacagtgattgtgaatcacattcacggcgagatcaaggtgggagaggaaggtgtgaagggagggattgcggtcgccgctagcaacccagtcgggggtggagttga

SEQ ID NO: 81273 - DNA, 272 bp, Glycine max
  Clone ID: 700960117H1
ctttcaccacttgaagattctccttttcaaatttcaacctttttcccccaaaactaacaaacccctcttcttctcaatcattgcatggctcttcactgattctataataataatttcagattcgtttttcgttttttgttaccatggagttgatttcaggtctaccagaggacgtagcccgagactgtttgattagggttccctatgatcaattcccggcggttgcttcagtctgcaaaggctggagcgcggagattcactcgccggacttt

SEQ ID NO: 81274 - DNA, 270 bp, Glycine max
  Clone ID: 700960118H1
tggccgtgggacttcctaaacgtgctcctatagactccaacctactgaagttgctcattccggtggctgtgtgccatgcattaggccacgtgaccagcaatgtctcatttgctgcagttgctgtttctttcactcataccattaaagctcttgagccattcttcaatgctgctgcttcacagttcatacttggccaatcaatccccatcactttgtggctgtcactggctcctgttgttattggtgtgtccatggcatctttgaccgagc

SEQ ID NO: 81275 - DNA, 268 bp, Glycine max
  Clone ID: 700960119H1
aaaacgacacaatttttttctcctctctctctaaattcaattatggcgtttaagaaaacgctagcccagcggcttctcaacatcacaaaaatctccaattaccgcatttcctcctccgtagtccgttccccgaacccgacaaaacctgacattgctccggatcccggagacagccgcaggttcctccacaagagggcctccgtgctcccgccggagctccgcccgccgctgcccgccggcagcctcctccagaggctccgggaaatgg

SEQ ID NO: 81276 - DNA, 269 bp, Glycine max
  Clone ID: 700960120H1
catcatcatcacgtgcgtgcgattaatcgaaacgaaagtacaaaattgcaaactccctgttcaagtttgaggtcttactcagcttccaattcttacactgttatggattcttcttcttcttctacccagtttgaaaattttgtagcttccttggttgctcatgtaagtcacatataggagcaatttgtaactgaggttaccgagaattatgagacaacatgctggggttgtggactgcgtgttttgcttccatcatgtgcatctgcttt

SEQ ID NO: 81277 - DNA, 269 bp, Glycine max
  Clone ID: 700960121H1
gagaaggaaaagcacatgacgataaatttctaagggatgctgtgttcaatctatttgtggctggaagagataccataacttcagctctcacgtggttcttttggcttgttgctacaaacccctcagttgaagccaagattctcgaagagatgaaagagaagcttgggaccaaagaaaagtcgcttggggttttaagcgtggaggaagtgaaaaggctggtttatctgcatggtgctatatgtgaagcgttgcgtctctttcctcctata

SEQ ID NO: 81278 - DNA, 267 bp, Glycine max
  Clone ID: 700960122H1
caaaagagcaagctcatttcttagcacgagctgtgattgatgatgtattggctcctctgaatttagaggaaattagcagcaagttgcctccaaaatgcagtggtagtgaaactgtacggatggctagatcacttgttgctgctcgtcatgctggtgagagactattgagatgttgacgtggtgggactggatgggctgttgaagatgccaaggacaaaatcatgaagctcttggaggagtacgagagtggaggtgttgtgagtgaag

SEQ ID NO: 81279 - DNA, 268 bp, Glycine max
  Clone ID: 700960123H1
gttttgtttcaggagccacccgctcctgcagttttcttttgcagttggagtggaaggccattctcgcaacgtttgagttcagcagatccagaatttttcagaaaacaggtttaggagaatgaagaatacggaacgaattgccaatttggctttagcaggtttaaccttagcgcctcttgttgtgaaagtagatccgaatttaaatgttattttgactgcttccctcactgtgtttgtgggctgttaccgctccgttaaaccaacccca

SEQ ID NO: 81280 - DNA, 268 bp, Glycine max
  Clone ID: 700960125H1
agagttggggcgttgcctcaaatatttgatgaacctttttctccatcaccagcactgaaagaaaaagctcaagtcacagatttaaactctgtaagcttatcagagccaccagtattgagccaaggctcaaccgagcaattagcactgaaaaacaaggctcccagatggcatgagcagctacagtgctggtgtctaaacttcaagggtcgcgtttcagtggcttctgttaagaactttcaacttgtagctgctgttgatccatctcata

SEQ ID NO: 81281 - DNA, 261 bp, Glycine max
  Clone ID: 700960129H1
gaagaaaactaagattgattcttctacattattgtcagagaatatcttggagctgacaatagagcatgtgctcaactgtttagaaaaactatttggagctggtggcatcatgaaaaatcatgatggggattcatgtaatttgcagcctaccaatagaacaaatcaaaatcaaaattccagacaaaggccgagattatctcctacagatgcatgtcgccctagtaaccgtggatctacatacagtgaagccttacaagtata

SEQ ID NO: 81282 - DNA, 263 bp, Glycine max
  Clone ID: 700960130H1
cggtagcagagaaagagaaaatgaagaagtcttcgggaagcgcactgacaagaagagggtgcgacggtcctccgccctagatcccacctccgacgcccctccaaggaaacaagctgtcaagaaagatgtgttccgggtgtttgctgagaaggttagagaccataaagaattggtttcaagatgggctgttctacaggagacgcgtgttgagtattttagagggaaggatttcgtgagcttcttaaaaagccatccggagctca

SEQ ID NO: 81283 - DNA, 264 bp, Glycine max
  Clone ID: 700960131H1
ctttcatcgattctctcccttctctttctctctgcgacaccagatgatggtgacgacggcgaacgaaacgctgtcgttgcgccaatcgcggcgttgttgttggtggtgctactcgcggcgagtgtggtggtggaggctcaggagaactcggacgtgaagacgctggtgaagcacatgcacgggaagaagtactgcgacaaaggatgggaatgtaagggctggtcaatttactgttgtaacctcactattactgattatttccag

SEQ ID NO: 81284 - DNA, 268 bp, Glycine max
  Clone ID: 700960132H1
aaggaacagcggtgggtgagtgagagagggaggaaacatggctacggcgtcggcgtcggcgtcgtgggaggaactgacgctgaaagtgaaatggagcggcaacgaatacaccgtccgcgtctgctgcgacgacaccgtgggcgaactcaaacgtcgaatctgcgagctaaccaacgtcttaccccttcgccagaagctcttgtaccctaaactcgcttccaaactcagcgacgaccctctcttcctctcccagcttcccctcaactcc

SEQ ID NO: 81285 - DNA, 138 bp, Glycine max
  Clone ID: 700960133H1
gtgatttaagagtgatcaataaggaaccctcggaaataccagggaaagtttgttattattactagtttcacttgtggatttatcgtagcataatgttgtacaagaataatttaatatgaacaagatcgtgtgtttgtt

SEQ ID NO: 81286 - DNA, 268 bp, Glycine max
  Clone ID: 700960134H1
gtggagttagaacaatcttttatggaaggggcttacaatcgtgtcttgagtgcacggcagacagtgccacatgatacatacgtttatttcatggatcttttggcaaagactgtcagagatgaaatagcaggttgcagtgagaaggcctatgactatctttcaattaaggatgccaagcaaatgttgctgttctcctcagaccaggaactcctggaatatattaaagaggagcatcctgagtgggagattaagaatgatagtgtctttt

SEQ ID NO: 81287 - DNA, 265 bp, Glycine max
  Clone ID: 700960136H1
cttggtgaatgcatggtggctggccaacaaccctgcacactggaagaagccagaggagttccggcctgagaggttcttcgaggaggagtcgcttgttgaagccaatggcaatgactttaggtaccttccctttggtgttggcagaagaagctgccctggaatcattcttgcattgccaattcttggcatcactttgggacgtttggtccaaaactttgagctcttgcctccccctggccagtcacagattgacactagtgagaaa

SEQ ID NO: 81288 - DNA, 267 bp, Glycine max
  unsure (1)..(267): unsure at all n locations
  Clone ID: 700960137H1
ttctaaagctagtaagtagtaagtagtaagccactatcgtttctctctaacagcaaaaaagttctaacctcaccaaacccacactaccatgggtagagagaatcgcgagcttcacgtattattcttccccttcccagctaatgggcacataataccaagcattgacttagccagagtctttgcttcaagaggaatcaaaaccaccgtagtcaccactcccctcaacgttccacacaactcaagaacgatangaaaagccaacatcat

SEQ ID NO: 81289 - DNA, 265 bp, Glycine max
  Clone ID: 700960141H1
gcaacctagcaatggaggcgattaggaagagtaggattcttatatttggaggaactggttacatagggaagtatatggtgaaggcaagcgtcacgttaggccatccaacttttgtctacactcgccctcttgatgcacaaactccttcctctaaggcacagctttgcaaggagttcaactctatgggggtcacacttgtccatggagaacttgagcatgaccagattctggcagtgattaaacaagtagacattgtgatatgttc

SEQ ID NO: 81290 - DNA, 258 bp, Glycine max
  Clone ID: 700960144H1
cgacgaaatgccaagcaccaccacctctctcctccgccgcaaccggtggctcccctccagcatcaaactgaaaacaacccttttctcagaactctccggcgcggtgggtgacctaggcacctacatccccatagttctagccttatccttagtgaacaacttggacctcaccaccacactggtcttcactgctctctacaacatcgccactggtctcctcttcggcctccccatgccggtccagcccatgaagtccat

SEQ ID NO: 81291 - DNA, 258 bp, Glycine max
  Clone ID: 700960145H1
gcacaaggtttggtcttgttaggttacctctgtgacatttgtgttgttagttcgtagttgcggctgacacccagaaagaaagaaagcaggaaaaaaacaaaaaggcgcagatgggtagcacaggtttctcatggaaattggcggatcatccaaagcttccaaagggtaagactgtggctgtggtggtgttggatggttggggagaggccacacccaatgagtacaactgcatccacaaggctgaaacaccctgcatgg

SEQ ID NO: 81292 - DNA, 257 bp, Glycine max
  Clone ID: 700960146H1
ctccttctcgctctttcagctttgacttttgttggaaactaaggcctaatcaaaatggtgaagttcacagctgaagagctacgtcgtattatggactataagcataatatccgtaatatgtctgtcattgctcatgttgatcacggaaaatcaaccctcactgattctcttgtggctgctgctggtattattgctcaagaagttgccggtgatgtccgtatgactgatacccgtgcagatgaagctgagcgtggtat

SEQ ID NO: 81293 - DNA, 261 bp, Glycine max
  Clone ID: 700960147H1
ctcaaccaaagtgcttgacgcaaaggcgatgaagcaacaaaagcaattgttaaggttgtaacttgtatcatcattcatttcatctgtgttgtgttgtacgtgtgatttccattgccgccaccgattacccaccaactgatatacataacctcttcacctttccctccttccctaatttatcactaaaaaaacaaacaaataaaaaaaaagtccactaagttggggcacgtcacccatctcgcccttcccctcgctcatctc

SEQ ID NO: 81294 - DNA, 263 bp, Glycine max
  Clone ID: 700960148H1
cttgagggtggttccttcgctgcaaaggactaccatgatcctcctccagcaccattgattgatgctgaggaactcacacagtggtccttctacagggctttgattgctgagttcattgccacaatgctcttcctttacatcacagtgctcactgtgattggttacaagagccagagtgatgtaaaggctgggggtgatgtgtgtggtggagttggcattcttggcattgcttgggcctttggtggcatgatcttcattctggt

SEQ ID NO: 81295 - DNA, 265 bp, Glycine max
  Clone ID: 700960149H1
gtactaactcccatttcttatttattattgaattaaccgatcaacttgctttgttatcgaacatttctttttgatttcaaaaattttccggaaaaaatttgaatctatttttatatgcgaatcaatcctactacttctggtcctgaggtttctgcgcttgaaaaaaaaaaatctgggacgtatcgcccaaataattggtccggtactagatgtagcttttcccccaggtaagatgcctaatatttacaacgctctgatagttaag

SEQ ID NO: 81296 - DNA, 266 bp, Glycine max
  Clone ID: 700960150H1
aacgcactctcaactcttcacttgttaatgcttcctcctgaaagttctaaactcaacgcaatggagcttagcaaagtcacgttagagatcttttcaaaattggagcagcaatggctctcgcactacgaagcatcaaccaaaacgcgcattctcagcattgacggcggaggaaccaccgccattgtcgccggcgcctccctcgtccacctcgaagaccagatccgcgcccaaacctccgatcctcacacgcaaatcgccgattactt

SEQ ID NO: 81297 - DNA, 262 bp, Glycine max
  Clone ID: 700960151H1
cagcgcacggcgcctcaacatctcaactttcccttcgatctcattctcaggtgttgttgaagcttcctgtgttggcttggtatccctgcaagttctgctgtagcagattccaaggtgaaggtgtcacgttaaagtttctttcatgtttgaacaggctactatccatttgggagcaactgagctgcttggagagtatttttcttcctctaggaaaaattacagaccctcaccacagagacttagttgtatgaacggttggcca

SEQ ID NO: 81298 - DNA, 261 bp, Glycine max
  Clone ID: 700960152H1
gaagattctccctgtagatttaaagtgtgcttctacaaatcaaaagatatactatgatatgcttcaggcccctaatctcccttctttccaagttgaggaacatgtgcccattaatagtcaaatccctggttttgcccacgattgccttcttaaagatggtagtagtcaatctatgatgacaatggatcctaaacacaaactagattgtgctaaacctccatcgggtgatgacttgttcgatgttttaggggtggatttgaa

SEQ ID NO: 81299 - DNA, 262 bp, Glycine max
  Clone ID: 700960153H1
catagccacaaaccatcctcaatttctcatcaaatcaaaactcatacatacacaaataacacaaaaatgaaatacagtgagatatcccatttcagccacccacagcacaagctgagatttgagtactcagaattccccttcaaatgtgatggctgcaaggaagtaggcataggatcacgttacaagtgctccatctgtgacttcgaccttcacatgcactgtgccatgataacctcccccaccttgctccaccctttctaca

SEQ ID NO: 81300 - DNA, 261 bp, Glycine max
  Clone ID: 700960154H1
ggactttagagattcatatagatggaaatctgtccgaagttgtcttaactggattctggaagtgaaaccacatggagatcgggttggaccattggtagttattggtcttataaacgaatcatctatctctacaaaatggaaagtccctcctgccataaactatcaggagtacccgcctggtaatataattatacctatgggaagtaggacattaaggccttttcacacaacaaatttgacaggtgtttgcacctgaaaatg

SEQ ID NO: 81301 - DNA, 262 bp, Glycine max
  Clone ID: 700960155H1
acccgttccagtttccaagtgttcaaagaaggtgagtgatgagcatggagcatttgccacgagaattggtgtccaacgtgctctccaggttgccagcgaaggtgttgctgctatgcaagtgtgtgtgcaactcctggttcgatctcataaccgatcttcattttgtttccaattactatgttgtctacaacagtctccagagccaagaggagcatctcttggtgatccggagaccctttttctctggcctcaaaacttacat

SEQ ID NO: 81302 - DNA, 262 bp, Glycine max
  Clone ID: 700960156H1
cttattgcgttgatctggaagtttgattttgcacccttcatggttttgattattgccatactcaatgatggtaccattatgactatatccaaggatagagtgaaaccatcaccacttcctgatagctggaaactgagggagatatttgctactggcgttgtgctaggaagttacatggcactaatgacagtagtatttttctgggcaatgaaagataccaacttcttctcgaacaagtttggtgtgaggccattgagagata

SEQ ID NO: 81303 - DNA, 262 bp, Glycine max
  Clone ID: 700960157H1
ctccgacagcatcctttgttgaacgaaaacacctttctattctccagtttgacaaaaaacagtggcacccaaaccaaacggaacctcgtcggatacaaaattcccaacatatttgtttttcttcattttccaccttaataataatattaatacctcctgttgttgttattattaatattatttttcttttttgggtcggtttagattttagaatccttaccatgataaaaactcctacaaaatctcaccagtttcgaaccta

SEQ ID NO: 81304 - DNA, 257 bp, Glycine max
  Clone ID: 700960159H1
gttgaatgagaatcctcctctttgcatgtcgtaatcgatcgcatcaacatttcaattctctttcctttccttttcctccttttctcgatctctccgtcggtcatcatcatcagacccaaacaaattctctacgcagatcgaatcaaagctcctccatccaattccgagatcagcactggcgaccttctcagcatcgaacctctcgaacttaagttcttctttgagctcaagaagcagatatcatgctctcttatatt

SEQ ID NO: 81305 - DNA, 255 bp, Glycine max
  Clone ID: 700960160H1
aaccccaccaatgtgcagcttccaggtatgtacaacaaggaagagaacccccgtgttcccatcattgtcaccggtaacgatttctcaacactctatgcacctctcatccgtgatgggcgtatggagaagttctactgggcaccaacaagggaagaccgcattggtgtttgcaccggaattttccgcactgatggtattcctgaacaggacattgtcaagcttgttgacaccttccctggccaatccattgatttc

SEQ ID NO: 81306 - DNA, 256 bp, Glycine max
  Clone ID: 700960161H1
ctcattcaagattcagcaagtgcgttttggaagcagagaccgaaatacttcgagatggcccgtacaaagcaaactgctcgtaagtcaactggaggaaaagctcccaggaagcagcttgcaaccaaggctgcacgtaagtctgcaccaacaactggtggtgtgaagaagcctcatcgttatcgccctggaactgttgctcttcgtgagattaggaaataccagaagagcactgagctcctaatcaggaagcttcctt

SEQ ID NO: 81307 - DNA, 258 bp, Glycine max
  Clone ID: 700960162H1
aaaaaatcttcaaattctctgagtcagccatcgacaagatcaagtcaacggtcaacgagaaccctccatcggacggctcaaaaccattctcaacatttcaggctctttcctcccacgtttggcgccatgtaagccatgcacgtaacttgaagccggaggattataccgtgttcaccgtctttgccgattgccggaagcgggtggacccgccaatgccggagacttatttcggaaacttaattcaggctatttttaccg

SEQ ID NO: 81308 - DNA, 260 bp, Glycine max
  Clone ID: 700960163H1
caaaaatcatgcatacaatttctagcttttagatataacgaattatttggtagccacgtagctaagaattaatcaaacccgaaattacataaaagctaaaaaatcatgcatacaatttctagagggttgtggctttttcagacaatagtagcagaaacaagtgcctctgagatgcattttctttgagatgcattttatatttttagtgcatagcttgctcaaaagtatggaagctaaattggattatcattttctcagct

SEQ ID NO: 81309 - DNA, 262 bp, Glycine max
  Clone ID: 700960164H1
agggcagcacgcttgtccgggagcagagtagatgccatggaagaactggatagcgaagataaacgagtcttgagtcgaatcaagtgctggtttctatcacactcgcaacatctgaatttctttactattctagtgcttgcttcggttccaaatcctctatttgaccttgctggcattatgtgtggacaatttggcattccattttggaaattttttcttgcaaccttgattggaaaggcaatcattaaaactcacatacaga

SEQ ID NO: 81310 - DNA, 263 bp, Glycine max
  Clone ID: 700960165H1
gaagcgacgcgtgcgcccgccgtccgtttgccgaccagcagtacgtcgcctcggccccccaaaggcacgtgccgttggtgaccctcgtgaggcggattagccctacgagacgccttgaagcgcaattcccatcgagcggcgggtagaatcctttcctgagccaataaaacaatctctctgtcttcccttgaagaaggagaaatggggggaaattaaaagggaaaaaggcatataaccggaaacaatcgcgtttcgaattcaaa

SEQ ID NO: 81311 - DNA, 260 bp, Glycine max
  Clone ID: 700960167H1
cagaacagcaagggagaatcaattcctcatcgctgcaattcttctttcactctctagtttctcttctttctttcttccaacctcttctcttctatacccttcagaaaagaaattaaaaaacgtagcttcagattattctagctcttcatttttccatgtccaatattatgctgtaaatttctcaaactcactgtttcagccacattttggtctaaagatccgtgctttgacccttggcaggttcagcttttgaaggggtt

SEQ ID NO: 81312 - DNA, 258 bp, Glycine max
  Clone ID: 700960168H1
atttaatttgccaaccgcgccagatcgccattactacaacaacatagacgagtgcggtgcattccctcgtttaccatgctttcctaagagaaagagaaaagtaaaacccctcactactgatagattttcattcctccgaggaaaaaaaaaacatgtcggatgctttgatcaatggattggccggagctggaggagggatcattgctcagctcatcacatacccacttcaaactgtaaacactcgccaacaaaccgagc

SEQ ID NO: 81313 - DNA, 258 bp, Glycine max
  Clone ID: 700960169H1
cactattcttcttcgcagcaatggcgcgagtggatctggacgggaaccccatgaaggcacttacgatctgcatgatcggcgctggcggcttcataggctcgcatctctgcgagaagctcatgtccgaaacccctcacaccgtcctcgccctcgacgtctacaacgacaagatcaaacacctcctcgaaccctccgattccccctgggccggccgcatcaccttccaccgcctcaacatctaacacgactctcgcctcg

SEQ ID NO: 81314 - DNA, 257 bp, Glycine max
  Clone ID: 700960170H1
aaatccatcaggtaatttcaaagcaatgcatcgacacatatccaaaggtacatggacattctcaatgcaggatcagggttggcaagtctctgactgcacagcagaaggattaaaggctgcacttctattgtcacaaatgtctcctgacctaataggcgagaaaatggaagatgagaggttctatgatgctgttgatgtgattttatctcttcagagcggcaatggcggcttccctgcttgggagcctcaaagagcgt

SEQ ID NO: 81315 - DNA, 256 bp, Glycine max
  Clone ID: 700960171H1
ctcttttttctctctcttgcaaaacctaattttcatttcttccctcaaatttcaaaatgcgtgagatccttcacatccagggtggccaatgcggcaaccagatcggcgccaagttctgggaggtggtttgcgcggacacgggatcgaccctaccggaaggtacggtggggactcggagttgcagctcgagaggatcaatgtctactacaacgaggccagttgcggtcggttcgtgccgcgcgcggttctcatggac

SEQ ID NO: 81316 - DNA, 258 bp, Glycine max
  Clone ID: 700960173H1
cgcagtcgcagtgagtgaaaaggaaaaccctaattgcggtattctcagtgccttcgagagaaagaaaaaatggcagataatcttgttctccgtggcaccatgcgcgcccacaccgacgttgtgacggcgattgccactcccatcgacaactccgacatgatcgtcaccgcctcacgcgacaaatccatcatcctctggcatcttaccaaggaggacaagacttacggtgtcccccgccgccgcctcaccggccattct

SEQ ID NO: 81317 - DNA, 257 bp, Glycine max
  Clone ID: 700960174H1
gctgacaattatcatggttcctggtggaaaagacatggtgttgttcttgatggtgagatagcagctgtggcttttaagcatggacattttgatcaagctgcaaagtcatatgagaaggtttgtgcactgtatgctggtgaaggatggcaggatttgttggctgaggtccttcccaatttagctgagtgtcagaagagtcttaatgatcaagctggctacttattatcttgtgtgaggttactttctcttgatgaagg

SEQ ID NO: 81318 - DNA, 255 bp, Glycine max
  Clone ID: 700960175H1
ccctccatccgtgtgctgctcttatctttctttttcattgctttgtcacttttttcctttggcaatgtcgaagccagtagaaaacttctggcaccaacattacccgatttggggaattctcttcctcgcctgatatttcctccatttccaccagtaacggactggccagagtataggttgcctcccccattgattcgcacgcttccacccttctcacctccttcagccacaactaccaatccttgagttgaatag

SEQ ID NO: 81319 - DNA, 246 bp, Glycine max
  Clone ID: 700960176H1
gttcatcatgatataaaaataaaaaataaaaaatcatccagaatcggatttcagtgaagaaagacccaaaacgatgaagaagggcgaaaataagggtcggactcggaccttcccggtggatccgaatgttccccgatgggtttgccagaactgccgcaaccctctctgcatcgtaggcgccgattcttacgccgacaagttcttcaacgatccttctcgctacgggatgcaagggtcgtccattca

SEQ ID NO: 81320 - DNA, 249 bp, Glycine max
  Clone ID: 700960177H1
agggactcgttgttcttctcccaggttatttagaaaagcaaaatggtgaagatttgctgcattggtgctggatatgtggggggtcctactatggcagtcattgcacttaagtgcccatccattgaagttgctgttgttgatatctctaaatcccgcattgcagcctggaacagtgaccagcttcctatctatgaacctggccttgatggtgttgtgaagcaatgccgtggcaagaacctcttcttcagc

SEQ ID NO: 81321 - DNA, 255 bp, Glycine max
  Clone ID: 700960178H1
gtctcagaccctttctcaccaccatcttctttctcacactcacagtgctcgaaggtttcagcatcatcctcagtgattttctacaacaagtgccagcacccagtgtggcccgggatccagcccagcgcaggaaagcccgttctggcccgcggaggcttcaagctcgccccaaaccgggcctactccctccagctccccgctctatggtccgggcgcttctggggccgccacggctgttccttcgacgccggcggc

SEQ ID NO: 81322 - DNA, 254 bp, Glycine max
  Clone ID: 700960179H1
cttggatcatatatttcaacctcctcagatttctttcttagcaaaccaattttcaaccacatgggtatccctcactttctcgttataccatatccagttctgggtcatgtgaatccccttatgcaattgtctgaggctctaaccaagcatggctgcaaaatcacatttctgaacacagagttcagccacaaaagagcaaacaacgctggtgctgaactagacaaccttaaggaatcaggaatcaagtttgtgac

SEQ ID NO: 81323 - DNA, 258 bp, Glycine max
  Clone ID: 700960180H1
atggccacctctgctattcagcaatcagcattcgcaggtcaaactgctctgaagcagctcaatgagttggtccgcaagaccggtggcgccggcaaaggtcgcaccaacatgcgccgtaccgtcaagagtgctcctcagagcatttggtatggccctgatcgtcccaagtacctgggtccattctcagagcagattccgtcatacctgaccggagaattccccggtgactacggatgggacactgctggactatcagct

SEQ ID NO: 81324 - DNA, 257 bp, Glycine max
  Clone ID: 700960183H1
atgggatggctgcatatgcagatagctggtggttttgagaaagcaacataattcaagggagattcatagggaatgacagatcaatcagtgtggttggttttacattgaaaaggaaaaaagtcacttgggctggttggttagcatggtctgctctattaacaacctagtcaattgatgcaaaatgttgtaaggtctgtatgttctttgtcatagtatgatatcgattgtaagaaatgcatctaatttcctcgcgcatc

SEQ ID NO: 81325 - DNA, 257 bp, Glycine max
  Clone ID: 700960184H1
cacagacacaaggtttagtcttgttaggttacctctgtgacatttgtgctgctagttcatatatttgcggctgacaccgagaaggaaagcaggaaaaaaacaaaaaggagcagatgggtagctcaggtttctcatggaaattggcggatcatccaaagcttccaaagggtaagactgtggctgttgtggtattggatggttggggagaggccacacccaatgagtacaactgcatccacaaggctgaaacaccctgc

SEQ ID NO: 81326 - DNA, 257 bp, Glycine max
  Clone ID: 700960185H1
caaatgagaagtgtgaagatggtaaaatgatctcaaactcggaccccgtagaaccagtcacggcaaccgccactgccggcgccgacgacgccaccgtctcaacaaccgcctcttcttccaatgaagatcagcctgcaccgccggcggcaccaaacattgtgatgtcctccaaggatcacgattctctcttcagcggtggcggcatcagctttctctctggaagccgaaatggaaggttcagctatggatattccagt

SEQ ID NO: 81327 - DNA, 254 bp, Glycine max
  Clone ID: 700960186H1
gggcgatcgattgttactctttaagaaaagggtgccactatgtttttcccctttcgcgatgttggattatgaagactttgcgtcatctggaaataattgtattgtcatttgaagagaaagcgaagagaaagatatagccttcatttacttgacttcattctgattttgcccaagatacattacctgtatttgtatgtacatctgtatctctgattgttggttttgcatttttgtgagtgctatttgtgttttca

SEQ ID NO: 81328 - DNA, 257 bp, Glycine max
  Clone ID: 700960187H1
ggatgatagcttgacatgtgaaactcagagatcaaaatcacagcgttagcaacccaacgacaaccgaaacagcgtcgctttgaaataaaccaaacctcgccacatttcttctcttcattcttcttctaagctttctagaatcttcacttcagaaccgaagccatggcggatcggttcttccccaacccgatgcccgagttcgtacccgaaacgacgccgtccactcctcaggaagaagaagaagccctcacagtggg

SEQ ID NO: 81329 - DNA, 256 bp, Glycine max
  Clone ID: 700960188H1
cttctcgcaagcggaccccaatttctccttcacgaaccctaattcactcttcccattcgaaatctcgatcaccttttcgattcaacctttctctcctcgctaatctcttcgttcgcctcgcacatcaaggtgagggattgaaattgaatcctcaagatgccagctacagcaggaagggttcgcatgcctgcgaacaatagggttcacagcagtgcagcgcttcaaacccatggtatatggcaaagtgccatcggct

SEQ ID NO: 81330 - DNA, 256 bp, Glycine max
  Clone ID: 700960189H1
aaaaagatgcaatcacttggtcaaaatgaggcatctctagcatgccctcaagggtgttgccctacttctttattgttcaaccctccaccaccaccaccacaatctcagaacacaacagccaaacctagaaacagttctgcagagtgtagacacagctttgcagccacaacagcatcctcaatcttcccaaacaccaaattcaccaaccatgagtcccttccttctctgcatgaatcattcagtgagttcaagaaag

SEQ ID NO: 81331 - DNA, 252 bp, Glycine max
  Clone ID: 700960190H1
tgatgatggagatggcgaacgaaacgctgtcgttgctgtactcgcggcgttggtgctactcgcggcgagtgtggcggtggatgctcaggagaactcggacgtgaagacgctggtgaagtacaagcacgggaagaagtactgcgacaaaggatgggaatgtaagggctggtcaatttactgttgtaacctcaccattaccgattatttccagacctaccagttcgagaatctgttctccaagcggaactcgcc

SEQ ID NO: 81332 - DNA, 250 bp, Glycine max
  Clone ID: 700960191H1
atttgtttatcctggttgggaaggttctgtcaccgactcacgagtgttaagggcagtccttgataacccagatcagaatttccctcaaatacctcaaggaaagtattaccttgttgacaagggatatttaaatacagaagggtttattgctccttaccaaggggttcggtaccagcattatgagtttagaggcgctaatcaattaccaagaaacgcaaaagagctgttcaatcacaggcattgttttctg

SEQ ID NO: 81333 - DNA, 236 bp, Glycine max
  Clone ID: 700960193H1
ggctcgagaattcaacttaagagatcaatatagccaccattaccaagcctccttctaatatatgtttcctccttctgttgcttctagcacacttccatttgggccaaagccaagttgagttgaattactactctaaaagctgcccaaaagctgaagagataatcaaggaacaagtcacacaactatacaacaagcatggaaacactgccgtttcgtgggtcagaaatctcttccac

SEQ ID NO: 81334 - DNA, 251 bp, Glycine max
  Clone ID: 700960194H1
acgtcgtccaagagcttttcagggacctcccaacgcagctctcgatcaagcccgatttggtgacttacaacaccatcatcaaggcgttttgtgaaaagggttcgtttgattcggcgttgtcggtgcttcgggagattgaggagaagggtttgagtcctgattccatcactttcaacactttgcttgatgggttgtactcaaaaggtcgttttgaggagggtgagaaggtgtgggagcaaatgagtgtgaat

SEQ ID NO: 81335 - DNA, 255 bp, Glycine max
  Clone ID: 700960195H1
ctcttataacacaacacaacccatggccaccacctccgcattcctcctccttccactcctcctgctgctccacctcgccatcgccgctcacggcatcggcatcaactacggcacgctcggcgacaaccttccaccgcccgcggcggtggcgaacttcctgaagacgaagacgaccatcgaccgcgtgaagatctacgacgtgaacccggacatcctgcgggccttcgccggcagcggcatctccgtgacggtgac

SEQ ID NO: 81336 - DNA, 254 bp, Glycine max
  Clone ID: 700960196H1
gggagaaagcctgctgctcaaaatgccaagaaggcacctgctgctgctgccaggaagagaaacgtaggtggcaagcaatctcagtttttgggtcagaaactcataactgatatgttggagagtacagggatatcaccagagaagaaagtgaggaagatgagggcgtctccatttaacaagaaaagcagttctgtattgggaagggttgctgctgctgacaaagatgaaagtgtaagtaaagacttgtctggtgg

SEQ ID NO: 81337 - DNA, 282 bp, Glycine max
  Clone ID: 700960201H1
ccgcacagcactcggaaatttctggcgatctctgcgttttcccctattttttctgaatcccacagaatggcatccaacaggggtcaaggtggaattcagcagttgttggctgctgaacaagaggcacaacggattgtgaatgctgcaaaaaatgaaaaattggctaggttgaaacaggccaaggaagaggctgaaaaggagattgctgaataccgagctcaactagaggctgagtttcaaaagaaagtgtcagacagtactggagattctggagctaatgtc

SEQ ID NO: 81338 - DNA, 284 bp, Glycine max
  Clone ID: 700960203H1
gttactgtgccaacgcattgtgaggccacaagtacctaacacccaactaagcttttggaacttagagttaagcagttaccttcctccaactataatatctcaaccaatcaaaatcctttttctcaattctctctctctctctctctgactctctcgacaataagtgttgattttttcctaaataagtgaaagtgtagttacaccttattttagtgttttaccacttttgtgtgccagagttttctgagtctcataggaggaatatatgacagaagaacaaacca

SEQ ID NO: 81339 - DNA, 281 bp, Glycine max
  Clone ID: 700960205H1
atgagtggtcattggtgaacaagcagaagcctatttggatgaggaaacctgaagagatcacaaaagaagaatatgctgctttctacaagagtcttaccaatgattgggaagagcatttggctgttaagcacttttctgttgagggtcagctggagtttaaggctgtcctctttatccccaagagggcaccttttgatctttttgacactaagaagaagcctaacaacatcaaactgtatgtccgccgtgttttcatcatggacaactgtgaggagttgatg

SEQ ID NO: 81340 - DNA, 280 bp, Glycine max
  Clone ID: 700960206H1
tagcaaacgatccaaactcttttttcatttgcagcatcaaaatgagtggtagcaacgatggtagcggcagctggagctctaggtttttgaaggtggctagtgcagctgccgctacagccgccgttgccggcggtttatatgccattctttcatcctcaacctctgctagctctgagatggaagtgccgtttggcagcgcacggcgtgagagcaaagaacgtgacgatggtggctccgggtctcatcctcgcgagggtgccaccacggtcagtcgttggaa

SEQ ID NO: 81341 - DNA, 74 bp, Glycine max
  Clone ID: 700960207H1
ctcgatttgaaagtacccaacacaccacacaaacaaacccatgtccccccttttttttcttcatatcattccac

SEQ ID NO: 81342 - DNA, 266 bp, Glycine max
  Clone ID: 700960208H1
gtcgccggagaaaattttccggcaagttcgtgcaaccggaaactcatcggcgcgaggtggttctcaggcggatacgaagccacccacgggaagatgaacgagaccactgagttccgctcgccatgcgactccgacggccacggcacgcacactgcgtcgatcgccgccgggaggtacgtctctcaggcgtccacgttggggtacgcgaatggcgtcgccgccgtcatggcgccgaatcgggactcgcggtgtataaagtctgctgg

SEQ ID NO: 81343 - DNA, 99 bp, Glycine max
  Clone ID: 700960209H1
gcccgttcacgtcctcatctcgatgtgacgtcgtttcactcccaaacccagatgtttcccagaagcaccaccacgtattacacctcctattcgattcag

SEQ ID NO: 81344 - DNA, 280 bp, Glycine max
  Clone ID: 700960210H1
gctgaaactgcaactaactgccaccatccaggtgttaaagaaagccggtcgcccatctgaacgtctggtaagccatgagaattgcaaatttacaaagccagcagagcatgagtgtgttcatgttcaggagattacagaagcttctgggactgaagaagcagaagcagatgctgagtatgacaatgctctaaaagaagctattagaggtgtccaggatgctgtcatggccataaatgaacgtatggaagaagtcagatatgaaattgctgcccttgaagca

SEQ ID NO: 81345 - DNA, 281 bp, Glycine max
  Clone ID: 700960211H1
ctcgagccgaatcggctcgaggttctcttaggtctgggtgtagcaccgatgatgctggaaactgctctcaaactacttcagtatatgggtctaagcttagttcatgggttgagaatagtagtaattttaaacgtgaaagcagtgtttcaactggatactccaagcgaccagatgaagtttgcaaatcaaatcgtaaaagacttaaaccaggagagaaccctaggcctaggcctaaagatcgccaaatgattcaagatcgtgtgaaagagttgcgggaaatt

SEQ ID NO: 81346 - DNA, 280 bp, Glycine max
  Clone ID: 700960212H1
cacaaatattgtttttgaaaattgtgatcatcatccaagggtaaaatggatttagtttctgtaggctactgtttgtgataacattgagatatgacatggaaatccctcatttcctatgaattcataattctactgtaggagtgtagtgtccaattacgttctccttccatcttaatttaaaaaaaaaaaaaacattcttcttccatcttgattaaaatgctatatgttgtgacaagttgttggctctcactatgcacctgaaaaacaatgctatgagatg

SEQ ID NO: 81347 - DNA, 280 bp, Glycine max
  Clone ID: 700960213H1
caaaaaagtagccactgccccaacgatcccatttcccttgacttctctacctgaagctccttgtttcgcataggaggtagttgaaatgtccgagggaaatgcagggaaaggaaagaaaatcgccatcattggtgtctcaaccttattgttggtggctatggttgtggcggtcacaattggggtcaatctcaatgagaatggttccaacaatgatatagatgacaacaagaaagatcatgttgcttcttccataaaagccgtccaaaccctttgtcatccc

SEQ ID NO: 81348 - DNA, 279 bp, Glycine max
  Clone ID: 700960214H1
atacattacagcagcaaaggaaggttgtggtaagtaaatagtagtaacctaacccttgcgtttgcgagtgaggctgaggttgggtttggaaggcaaaggctggtgttgtcccaatccaagagagaagtaaagtaaagcaaaggaatggcgaacatagacatcgaagggatcttgaagcagcagcctgatgatgggcgcgttccgaagacgaaaatagtgtgtactttgggccccgcttctcgatccgtggaaatgactgagaagcttcttagggctggg

SEQ ID NO: 81349 - DNA, 78 bp, Glycine max
  Clone ID: 700960215H1
atcgatttccatacacttcagcacagagcacaccgcagtgggcttcggccaattcgggagtacgatccacaccaccga

SEQ ID NO: 81350 - DNA, 279 bp, Glycine max
  Clone ID: 700960216H1
ctctcctcagttatccctccaacagaagatagcacatggttctagttgcaagtcatggcgaggaggaaaagggggcagaaggcattgctgctgttgattttcgaggtcaccctgtggacaagacaaaaactggaggatggctagcagcagggctcatcttaggtactgaactggcagaaagaatatgtgtaatgggcataagcatgaacttagtgacctacttggttggagttttgaatctcccttcagctgattctgccaccatagttaccaatgtca

SEQ ID NO: 81351 - DNA, 282 bp, Glycine max
  Clone ID: 700960217H1
attattatttaaatgggtctcacattttttgtttgttgtgttattactttctaaaatgagagaaatcaaacctgaaggaataattttaccaagtttcaaaaattaaacattaataactgcgaaatttgagtttaattgatagtcaattttgattaagaataattaaaattcttttattttactattgtttttaatgaaataaatgagaattttaatatcattttaattcttaaccagcaagattcaaaagaagaaagattataagtactttgaagaaaaatt

SEQ ID NO: 81352 - DNA, 285 bp, Glycine max
  Clone ID: 700960218H1
ctcgagccgcgttaccttacatattccatttgtctctgatcttccaacaccttattcctcacgcgaagagacaaaatggatcaccatttcacttcagaaacctctctcattattcttctcctcatcacatccctctcctcccttgccaccgccaccaacatcaatatcctccaccacgacctccaatccgacatcaccgaattctgcaagaaaaccaccaaccccgccctctgtgccgagaccatccatccccacttcctcaagaacagaatcgatgccttcaag

SEQ ID NO: 81353 - DNA, 281 bp, Glycine max
  Clone ID: 700960219H1
aaaatgggttcttctttgtggactttgtgtctaattttggcttcactagcctcttctgcattctgtgcctttccacggaggccagtggatgttccattcggcagaaactacgttcccacttgggcttttgatcacatcaaatacttcaatggaggttctgagattcaacttcatcttgacaagtacactggtactggcttccagtccaaagggtcatacttgtttggtcacttcagcatgaacataaagatggttcctggcgattcagctggcacagtcac

SEQ ID NO: 81354 - DNA, 277 bp, Glycine max
  Clone ID: 700960220H1
gttcctcgtatcatattctgggtttatggttaatacgaaaagcacctctgaaactttcagcagcatttatctgtcataaagtaacttttggctcatagttttgtataataaagtcgtttggcagtatatatatagcgatcagcaatcattcaagtgcttcctcatcagatatatgctgataacgtagagcagatgaaagaggagatagagaagatggtggctagtaacagctcagatgatagcataggaacacctctagtaataaggggatctgata

SEQ ID NO: 81355 - DNA, 278 bp, Glycine max
  Clone ID: 700960221H1
tggaaatgggactgaaacaggacatataattgttactaccattggtggtaaaaatggccagccaaagcagacaataagctatatggctgagcgagttgttggaaatggatcatttggtgtagttttccaggcaaagtgcttggagacaggggaaactgtggctataaagaaggttcttcaagacaagagatacaagaaccgggaactgcaaaccatgcgtcttctggaccatcccaatgttgtaactttgaagcattgtttcttttcaacaactgaaa

SEQ ID NO: 81356 - DNA, 277 bp, Glycine max
  Clone ID: 700960222H1
aaagaaaagaaaaaaaaccgaagatgatacacagcgaaggaggggccgctaaaagccaaggttgtcggaattggatttgattcttcttcacttgcgcgatttctccgatcaaagttcctcactttctctccctcgatcgacacccaccacgcgttagagagagcaaaaaaaccccgagagatcggaaagatgggtacgcttcagtcttggagaagagcctacggtgcaatcaaggataccaccaaagtgggtcttgcccatgtcaatagcgattacg

SEQ ID NO: 81357 - DNA, 278 bp, Glycine max
  Clone ID: 700960224H1
ctcgcaaggaccttcttctagttatttgcggcttgctattactctcttcccttgttgcctttggagggtacagggcctccaacgcgccgcatgccgacgtggcatcggcaacatcgaacgatgagcaacgtagtccgacatcggtgccttctccgaaatggtacccggtttcgcgaggtgtttcttccggggtgtcagagaagtcatcaagcatgttgtttgcggttaaagatggagcttcgaaggcatttccatgggacaacagcatgttgtcttgg

SEQ ID NO: 81358 - DNA, 278 bp, Glycine max
  Clone ID: 700960225H1
ctccgttatgagaagctgaaccttcctctgcacaatctccttcaaaaagcttctcatccatggcgaaaacgctcatttcgtctcaatcgttcatcggcacaccgctcccctcactccctcgccaccacctcccccaccgcaccaggctcgtcgccaccaaagtcctcgtcagcctccacgaaattcccccaatccactccataagccgcaacattgacttcgccggaatcgtgactagagccgaagccttctctacacgctcgccgatgctgcggttg

SEQ ID NO: 81359 - DNA, 279 bp, Glycine max
  Clone ID: 700960227H1
cacatcctcaaccatggcagcaccatcttcagagacaatgtcaccatcatcctcgaacacgcagcttccgctgaaaccaatcccaggcagctacggaatgtcgttttttggagcaataagcgacagacacaactacttctaccaccaaggacgcgacaagttcttcgcgacgaggattgaaaaacacaactccaccgtgatccgaaccaacatgcctccggggcccttcatctcctcggaccctcgtgtcgtcgcgttgttggacggtgcctccttccc

SEQ ID NO: 81360 - DNA, 277 bp, Glycine max
  Clone ID: 700960228H1
tcttgacacagttcgttagccgcaaccctttggctcctccttccactctcactctcactttgttttcatcgtcctcaaccaacgccatgtgctcttagttagacctcccagaggttcttcgtagacaacacagaagaacgatttgttccgttgttttagtagctcttgaaatgaaaccacaaaccaatgggatgtctagagctcataaggcaaataataatacacagtttgaagggcctaactggcttatttttgctgctggtgctttgttgagtac

SEQ ID NO: 81361 - DNA, 275 bp, Glycine max
  Clone ID: 700960229H1
ctcatgttgaatttggaaagccgcaaaggaatcttcattgctgcctactcgtgccttgctcttggcttccttgggctgacttggactgctgttgtggaaagaaacttacgttcaatattgtttcttgtttgtgcaattatttgtggctatatatatcagtgtccaccattgcggttaagctaccaggggctaggagagcccttgtgctttgcagcatttggtccttttgccacttgtgctttttatttattacatgccagtgcaagggtgaagaa

SEQ ID NO: 81362 - DNA, 277 bp, Glycine max
  unsure (1)..(277): unsure at all n locations
  Clone ID: 700960230H1
gcgacggctgaacctctttgttctctctgtctaagaagaagaagaagaagaagaagaagaagaagaatcaaatatccttgagccagacatgtacaggaacgctgcttcacgtcttagggtcatcagtgcccgttcgtgcagcagcagcaggatacctgccagtgccagatttgcaagttccgttgccacacaacaatctcatgcgccgnttgggtggtttatttggatggctcactggagaccgatccagttctttaccatctctggatttcccgct

SEQ ID NO: 81363 - DNA, 276 bp, Glycine max
  Clone ID: 700960231H1
gagaacttcaactgagggtgagagtgacacaaatctagggagcactactctaaaagttctattagattcttcaaaacatgaccatgcatcgcgagtcttgggcttttgtcttcggcgttatgggcaacatcatctcctttggagtgttccttgctccattgccaaccttttaccaaatctacaagaagaaatccactgaagggttccagtcacttccttatgttgttgcactgttcagtgcaatgctttggatttactatgctttcgtcaaaaggg

SEQ ID NO: 81364 - DNA, 277 bp, Glycine max
  Clone ID: 700960232H1
atcaaatcaatccatccaacctacacatttctcatcttctccaaattaacaaaaatggtagctgggaaatacccttcccccacatacttcatcttcctgctcataaccataacacgtttgatctccacagtgggcaagacctcccaatggatgaaggccctaacgccgcctccggaactcgcctcggtctccctcgatgacaccatcttcagcaagctccgcaacgacccagaggccctccaggggagggcctccagggactacgggaacctcgtcc

SEQ ID NO: 81365 - DNA, 278 bp, Glycine max
  Clone ID: 700960233H1
gagcctcccctcccctctctctaagatccccaaattgcttgtgaatgctagaaaccctagacagattcgattggatgcgctcccatttcacatcaagggcgagcgcattcggttcttgcaagcaagcctggtactaccgctgcctcggcctcgacccctgaatttgaaccattcatcaccacctttcttcattcattcacggttttccttttcgactcgatttgctgtttttttagttttgtttccttgacgatgttgacgatgagcaagcagaagaa

SEQ ID NO: 81366 - DNA, 278 bp, Glycine max
  Clone ID: 700960234H1
cccttagaaatctaaaagcaaaatttgtcccttccaaagtattccaacacagagaaggctcaaccaccaacatgggaaagaaaatggaagaacatgtatccaaaaggcttgccaaagaggaaagaactaagctcctcagcgaggttgtggagctgaaggaaaaagaaatcaagcctattgaaaatgagaaagctccaggaggtaaggtaaaactgcatagtcatgtcagtcacaaatcacatgtaaatgaaactgttgataaaaaagctaaggtaaag

SEQ ID NO: 81367 - DNA, 180 bp, Glycine max
  Clone ID: 700960235H1
gcaatttatggtagtagaggttctataatttctgcatggtttttatcttttgtttgcataatgcagttataactgcgtgataaatttaccctttaggttttggctggtaacgttatttagtcttggcagatttctaaagtctgttttttgttgtaatatatgaaaattaaatgttttggt

SEQ ID NO: 81368 - DNA, 198 bp, Glycine max
  Clone ID: 700960236H1
ctttgacagcgcgattagcacgaagaaaaaaaggcattgaaagcaagaaaagaagcaaacattattctcgtgagtgcatgcctgagtaactgagtgagtgagtgagtgagtgagtgtaacatcgttttctcgtttgtgttttttcctttaaaatggaaaaccacatctacgccgcctcttacagcccttccacacaac

SEQ ID NO: 81369 - DNA, 271 bp, Glycine max
  Clone ID: 700960237H1
aaaaatacttgctctacctctgccactttctgagtacaatacaacactgccatggctgtctcagtctccactattggagctgtctacagagctccactgagcttgaacagctctgaagctggagattcggttcccagttcagccttctttggcacaagcttgaagaaggttactgcctcaagggtccctaacgtcaagatttcttctggaagtttcaaaatcgttgcggcggagaaagagattgatgagcaacaacagacaaacaaggaca

SEQ ID NO: 81370 - DNA, 272 bp, Glycine max
  Clone ID: 700960238H1
atatagcccaagccctatacaaccaaacccttacacacacccatttgattcagtttccatggctagcctcaaggttgcatttttggctgcagtgctctgcatggttgtggtgagtgcacccatggcacatgcagctatcacgtgcgggcaggtgacgaatagcctgatcaattgcatcggttacctccagaacggaggaacgccgccgtcgggatgctgcaacggagtgaagagcctcaatgccgccgccaagaccaccgccgaccgccaga

SEQ ID NO: 81371 - DNA, 272 bp, Glycine max
  Clone ID: 700960239H1
caaagttgcaagaactaagacaacagctgtctttgtcaaaaaagcatagtgaggaaatgctgtggaaactacaagatgctgttgatgaaactgagaaaagaaaaaagtcagaagcttctcaaataaaaattaatgaagagttggggatgaagatcttggaattggaggctgagttacaggctgtactttctgataaacgcaatttgttaaatgcttatgacctgctaaaggctgaaaaggagtgttcagtgataagccttgaatgttgtaaa

SEQ ID NO: 81372 - DNA, 272 bp, Glycine max
  Clone ID: 700960240H1
ctacaaaccacaatgtcatgagaggaattgacatgttatttattatattatatatctgtcaacattatatattatatattgcaactatttgatagttacccttaatagagagattaaacagactcactatacagctccaaaagatttgtattttgtttaataaacttagtaaagtaccatatgatcagcagttattagtaatttgggttagttattgtgctaatatgcatcttgcattttatggggaaagatagaggtaaggcttaagaatt

SEQ ID NO: 81373 - DNA, 272 bp, Glycine max
  Clone ID: 700960241H1
caagcttctctgttagaacaaaaaaaataagaaaaattggcgtcataagggccaaaggtgggaaagttgaagttttttgttgaggtgaaagtgaaatggttggcaaggatagtctgagggctgaggacttgaacttgtgctttgagaaacttatgatggtggctgggagtgggaacggtgagaaaggggtgaactcgaaggttggggtgatcaccgagtggaaggacattcctgtggagcttttgatgcagattctgtcccttgtggatgat

SEQ ID NO: 81374 - DNA, 269 bp, Glycine max
  Clone ID: 700960243H1
aataagaatattgaggagtggccactgagaggtggagctaatggtagcttaagatttgaagttgagctgaaacatggagccaatgctggacttttaaatgcattgaaacttcttcagccgatcaaagacaaatattctggtgtgacatatgcagacttatttcagttggctagtgctacggctgtggaggaagctggaggccccaaaatccctatgaaatatggaagagtggatgtatctggacctgaacaatgccctgaagaagggag

SEQ ID NO: 81375 - DNA, 228 bp, Glycine max
  Clone ID: 700960244H1
atgatcatgaagttctctttaaagttaaattattatcatcaaccatccaaggatttaagacgaaaggaacaagtacaaccctcgaaagtgaattaggaagaaaacacaaggaaggttgatgatcatgaagttctctttaaagttaaattattatcattttgtgcatgctctctctctctcacttggtccacaacaattgaattgaatgtagtatcattattcgggtct

SEQ ID NO: 81376 - DNA, 196 bp, Glycine max
  Clone ID: 700960245H1
tagatgggcgttcacaatggtaacttgggtgacccagacaaaccgaaatggctgtctctgtttccgagtctgcgtttgtgcttgtttcagagagagagagagagagagagagagagtgttgatttgttttttttttctcttgtttaaattaaaaaattaattcataaagggttccttcccttcctttgcgacacaa

SEQ ID NO: 81377 - DNA, 268 bp, Glycine max
  Clone ID: 700960246H1
tcgagacacagatcatagtgatcattttttaatttctcagatttatccgacgtcgctgcagatccaccaaccgttatggctgccttcagcggtgatgaaacggcaccgtttttcggcttccttggcgccgcagctgccctcgtcttctcctgtatgggagctgcctatggcacagcgaagagtggcgtgggcgtggcttccatgggtgtaatgagacctgagctggtgatgaagtcgattgttcctgttgtcatggctggagttttgg

SEQ ID NO: 81378 - DNA, 269 bp, Glycine max
  Clone ID: 700960247H1
atcacttactggaagccttgttgtgagtaagagaaaaggcttcctgcaccgagcacaccaacttgatacctctgattctttctttgcttagaattccacagaatatggagacgctccttttcaatcactccccacctttggaattcaagggtttgagccaggaggaggaagactcattgctagggcaagtggaaatatggagtcctttggacatgcttcacggactccgtggccttgaaagctgtcatagagcttcgtatagcggacat

SEQ ID NO: 81379 - DNA, 272 bp, Glycine max
  Clone ID: 700960248H1
gttacagccgcagcttgaaacagcgcagagcgaccttgaagagctatggctgtcggaaagaataagaggatttccaagggaaagaagggtggcaagaagaaagccgctgatccctttgccaagaaagactggtacgatatcaaggccccttccctcttccaggtcaagaatattggcaaaaccctcgtctctcgtacccagggaaccaagattgcatccgaaggactcaaacatcgggtttttgaggtctcattggctgatctccaagggga

SEQ ID NO: 81380 - DNA, 274 bp, Glycine max
  Clone ID: 700960249H1
attcaggggggtgaagcttttttcaggggtgtgttggaaagtatgcaatctgtttacttgaacagaaatcgtactgctaaggccatattggaccttgttcactctgctgagaataactcattatgctatgatcatcttgcattcaggacatttggggtgaatggttatggaattgattccatggctagtttttttctggattatggctatacacaaagggaagagttgaggtttccagccaaaaagttgagggctttgtggttttctcctcctg

SEQ ID NO: 81381 - DNA, 271 bp, Glycine max
  Clone ID: 700960250H1
acactttccacttgtctccgaattagttatcttgagaaacattattcccattgctatatattatggctagcatgaaggttacatgggtggttgtgatcatgtgcatggccgtggtgggtgcaccgatgatggcgcaaccatgacatgcaatgatgtgacggtgaacatggcacagtgcctatcctacctgatgcagggaggaacaccttcaacactttgctgcagcggagtcaagaacattcttggctctgctgtcaccaccgttgacaaa

SEQ ID NO: 81382 - DNA, 272 bp, Glycine max
  Clone ID: 700960251H1
cttagacactcatttttattagttttgttgctgagtgtgtgtgaaactgtgaaagagagttatggcaggaggtggtggagctccagcacctaagaatgatgagccacaacctcatcccccgaaggatcagttaccgaatgtttcttactgcattacgagtcgtcctccatggcctgaggccatacttcttggttttcaacattatcttgtgatgctcggtacaactgtgctaattcccactgctcttgttctcctgatgggaggtggcaatg

SEQ ID NO: 81383 - DNA, 269 bp, Glycine max
  Clone ID: 700960252H1
ctcatcctcggtgatggcttatacaactttgtcaagattttagtttcctcaatccttagcgtacatgaaaaaattaagaaccgtaaaaatgcttcaagtgcggatcaacagagagataacgctgaagagcttaaacaaaaagaagttttcctgagggacaacatttcgatgtggatcggaaccggcggatacatagttttgtcggtgatttccataattgtaatccctttaatgtttcctcagctgaagtggttctacgtggtggtcgc

SEQ ID NO: 81384 - DNA, 270 bp, Glycine max
  Clone ID: 700960253H1
caacggtggcggcaacgacgacgacgacgaaatcgaccccttggatgccttcatggaggggattcacgaggagatgcgggctgccccgccgccgaaggagaaggcggaggaccggtaccgcgacgacgaggacgacgatcccctggagagctttctgaaggcgaagaaggatttagggttgactctcgcgtccgacgcgctgcacgctgggtatgattccgacgaggaggtttatgctgctgccaaagctgtggatgctggtatgattga

SEQ ID NO: 81385 - DNA, 269 bp, Glycine max
  Clone ID: 700960254H1
ctgtcatcacatggacttgtctttctcttactctgacggggtccttccttttcttcttctccttcatattttctctctcaccattctcttcttcttctccctttcttagattctccctcttttctctctgccctccgccatgactgaggataaggagatgtcttcctctgtcaccaatggacgatgattccctcactggtcacatcatatctacaactattggaggcaaaaatggggaaccaaacagactattagttacatggcagaac

SEQ ID NO: 81386 - DNA, 271 bp, Glycine max
  Clone ID: 700960255H1
cgcatggccacctctgctattcagcaatcagcattcgcaggtcaaactgctctgaagcagctcaatgagttggtccgcaagaccggtggcgccggcaaaggtcgcaccaacatgcgccgtaccgtcaagagtgctcctcagagcatttggtatggccctgatcgtcccaagtacctgggtccattctcagagcagattccgtcatacctgaccggagaattccccggtgactacggatgggacactgctggactatcagctgacccggaaa

SEQ ID NO: 81387 - DNA, 269 bp, Glycine max
  Clone ID: 700960258H1
acctggtgacccaaaattcaatgcctaacatgtgtgtgatcacgtattaggcattgaattaaaccattccaagtggtgggacttagcagctctatttgtgattctcatatgttacagacttctcttctttactagttctcaagttcaaggagagagcatccccattatttcagacactctatgccaagagaaccatccaacagcttgaaaaaagaccctctttcaggaagatgccatctttcccttcacagaggcatcaatccctccat

SEQ ID NO: 81388 - DNA, 270 bp, Glycine max
  Clone ID: 700960259H1
gggttgttgagaaggggttttagaagtccacatttttcagatttgattcgcgttcctcttctctcttctcatcatcaatggcgacccccattcctccccctcctgccgccgccgccgccgccgccgccgacaccaaggtcgattacttgaaccttccatgtccgattcccttcgaagagctccatcgcgaagctatgatgtctttgaagccagatctttttgagggcatgcgttttgatttcaccaagatgctcaatcagaagttctccc

SEQ ID NO: 81389 - DNA, 249 bp, Glycine max
  Clone ID: 700960260H1
agaaaatataatatttatttattttaatatatattaatcatttaacagagggagaaaaagattaaccaattgccaaagttgaaggcagatctggcttaacaaaacatagcatactgatgctaattacggtaattatttagcattttacattcacttgctcaaaatcaaacacgctagtaatatatatttgagtcagcaacagagcaattaatttccgacgcataatggtagtagtagattcaaacgtgg

SEQ ID NO: 81390 - DNA, 266 bp, Glycine max
  Clone ID: 700960261H1
gtttgctggaggaggctttggaccttaaaacccaaatggtccacaaagggattaagcttgacgtctttacctacaccacccttttgtccggattcgagaaggccggtaaagatgactttgccatccaagtttttctggaaatgagagctgtgggatgcaagcccaatatttgcaccttcaatgcccttattaagatgcatggcaaccgaggaaagtttgccgagatgatgaaagtttttgatgatatcaagctctgcaattgctcc

SEQ ID NO: 81391 - DNA, 264 bp, Glycine max
  Clone ID: 700960262H1
tgaagattccgcaacagagagtagaaaagatggcgcggttgatcacagtggtgtggtgcgcggtggcggtgctactgtgcgccgcggcgggcgcgtcgtgggtggaggaggcggcgaacccgatacgaatggtggcgggggtggaggcggaggtggttcgggtgatagggcagtgccggcgcgcgctgaagtctgctaggttcatgagcaggttcgggaagagttaccgaagcgaggaagagatgagggagaggtacgagatat

SEQ ID NO: 81392 - DNA, 268 bp, Glycine max
  Clone ID: 700960263H1
attttaaactttcaaactaatcagtacctcaccttgaactggttgcaggtgggaccaatatgatgtgcaagtttcatcggtcgatatagacaatgcccgtgcagggatctgttggggtttttgttcaaccagttcaagctgaggttctgattttaaactttcaaactaatcagtacacctttccaaagttcctgaaagagatgagtaaactaaaagttctgacagtcatacatcatggtttccatccttctaaaatgaacaattttga

SEQ ID NO: 81393 - DNA, 265 bp, Glycine max
  Clone ID: 700960264H1
cataaatgtctttatttgattagtcagatttttatttttttttttgaatggcctcttgggtttgcttctggatcctgattttggggtacacacaatgtcatacattgctttctcccttttttcttgttctggaacacgatcacatgtttttgattgaaaagtggaagcagtgttagaaaatctcatgagaaataacacggctctgaaggcagccttgggagttttctcctttttgaagcttcttgcggcggagggagacaaagag

SEQ ID NO: 81394 - DNA, 272 bp, Glycine max
  Clone ID: 700960265H1
ctaaaactcgtcagtgcaatagtataatggacaacttcgaagatgctacagagccagtgagtcctagtggacgattcttcaacaccacggtgctatgtgcgtatgtttttggcttcttagaatcagaagttccaattgaattctctcaagccaagtatttgttcgaagatgtctttctacccgtcaatccacacttttcttccataatggtgagagatgaagaaggagaaatgaaatggaaaagggtagaggtgaagttcgaagatcacgta

SEQ ID NO: 81395 - DNA, 267 bp, Glycine max
  Clone ID: 700960266H1
gggtgcaagggaagagatcatataattgctttgcttatttgcgatgcttagatggaagaacatctcactccattggctgttacacatctccttcaacacactctcagaagtttgtgcatccatgacaattctcaatgggtctacgcagtcttctggaggatcttgcctagaaactaccctccacgcaagtgggaaggacaaggggcttatgctagatcaagaggaaacagaaggacttggatattggtgtgggaagatgggttctgc

SEQ ID NO: 81396 - DNA, 270 bp, Glycine max
  Clone ID: 700960267H1
agcttattaaattgatattaatattatttcattgaaagaagatgctaggtggtgttcatcaatattctgaaaggtaaaacgattttggtttttaatgataatataaccatgaatctaacatcagatattgaacgctacacatcaaaaataaatcgagccaacgcatttaattgtaagtgtcttcatattacctgtgttctgtcacatctttttgcataatattggcactaagtcttttttgatagaaattgtgaagatgtactgttatca

SEQ ID NO: 81397 - DNA, 269 bp, Glycine max
  Clone ID: 700960268H1
ctttggtttcggagggaaaactctaaaacctcaaaattttcagtctcaatcaacttaacatctgtgattccaatcgatcacattcaataccacccttcaggattaggtattaattctgttcccttaaataaataacatgagcaccacagtgcaaagaactccaagatccagtaggcagtctttatttttccaggatttggcttcacctgtttctgcccgtagaggaaaattttcgagtcccagtcaggcagctgcagtatcttcactat

SEQ ID NO: 81398 - DNA, 266 bp, Glycine max
  Clone ID: 700960270H1
cttaaagctcatctctctgaggatgcctttgttacttgtgcattactagacatgtatgctaaatgtggatgcatggaacaatctcagaacatttttgacagggtaaacgagaaggatgaagcagtatggaatgttataattgcaggatatgggattcatgggcatgggctgaaggctattgagctgtttgaattgatgcaaaataaaggcggcagaccagattcttttacatttctgggagtgctaattgcctgtaaccatgctgg

SEQ ID NO: 81399 - DNA, 93 bp, Glycine max
  Clone ID: 700960271H1
gttctcccacaccacacccatgacgctcctcctgctccttattctcctctgtcacgcggcggaagccaggggacagtggcagctcctccacac

SEQ ID NO: 81400 - DNA, 267 bp, Glycine max
  Clone ID: 700960273H1
attctcataagagacaatggggagcaagttgggatgagcaattttccatactattttggagaggaatcaaagaacggaggcatgactattttagctggttgagaatcacccaagttttatccactgctgtcatcttaggattactttggtggcaatcagatactaagaacccaaaagatctgcaagatcaggcaggattactattctttattgctgttttctggggattttttcctgttttcactgcaatattcacatttcctcaag

SEQ ID NO: 81401 - DNA, 267 bp, Glycine max
  Clone ID: 700960274H1
attttggtctgaaaatcgttgctttgcagagtataagatcttgctcccacgtctctgattacttgcaagcttcatctgcactcatggatcccaaccagcctgtgggtgaaaactacgccaatcccaggacttgcttctttcatgtcctcttcaaggctgcagccttggcattttacattctctcggccctctttattgataactttgtcatcattttcgtggtgactgtccttcttgccgcccttgatttttgggtagtcaagaatg

SEQ ID NO: 81402 - DNA, 267 bp, Glycine max
  Clone ID: 700960275H1
agacaatcccgatggtaacgccgctttggtgaactccttctgcgaaatcacttcctcttccaaggaagaagctcttttctttttggagagccacaatttcgacctagacgctgccgtttcgactttcctcgacaacgccaacatccccctcatccctctcaacgacgaccttgccattcccaaccccaacgccgtttcccctccctcagattctcactctccggacttcaacccttctcgctcgccgtctccgtctccttcgcccac

SEQ ID NO: 81403 - DNA, 268 bp, Glycine max
  Clone ID: 700960276H1
ctccctcaccatggccgagtcctgcctcctctcttctccctcctcactcttccacaccaaatccaaactccctctctttacacccccctccaaacccctcacactccaattttcatgcctcaactcctccgtctctctctccctcgccgcaccaactcacgtatctccccttgtaactttcgtggcccaaacttccgattgggctcaacaagaagaagaacagagcctcgctgaaaccgaagcgggcctggaaagttgggagcccaac

SEQ ID NO: 81404 - DNA, 264 bp, Glycine max
  Clone ID: 700960278H1
cacagttctgtataattctgatgacaatgtcttagttgctgctccaacaggtggcggtaagactatatgtgctgagtttgctattttgaggaatcatcaaaaagggcctgatagtgtcatgcgtgtcgtttatgttgcacccgttgaagctcttgtcaaggagcggtatcgtgattgggagaggaaattttgaggtggtcttaaattgagggtggttgaattgactggagaaactgcgaccgacttgaaactgcttgagaaagg

SEQ ID NO: 81405 - DNA, 265 bp, Glycine max
  Clone ID: 700960279H1
cttttcgtggttatcgactcgggtctgtggttttactgttctaaattttgataaattaaggcaaagacgatgactaagaagaagaatcccctggtgtttatggatgtgtcgatcgatggggatcctgttgaaaggatggtttttgagcttttctatgatgttgctcccaagactgcagaaaactttcgtgcattatgtacaggagaaaaaggcatcagtccaaatactggaaaatcactgcactacaagggttctttcttccatc

SEQ ID NO: 81406 - DNA, 264 bp, Glycine max
  Clone ID: 700960280H1
catttgcaaaggaatcattttccatttgccaatcaaccttcttcatccctctagatcgaaaggccaaatttttctttttcttttcctttttcattattatttcatatttttttccccttttcaattcttcaaaaaattctcgcgactaaattcacgtcagtacacggaaacataaaattcagtttttttttattaaaatttgttggcaaacaaaaacaaaaaaaaaattgaaattttgatccgttttgccgaattggaccgcgc

SEQ ID NO: 81407 - DNA, 269 bp, Glycine max
  Clone ID: 700960281H1
cttgttcacccttcttccctttctcacttaccactctcccccttctttccaaaacactccctttccctttctattcacttcccctacccttccgtgatgatgtagatagagaataaaaagagaccagtgtgcagtgagaaagagattgctcacttcttgtgtgggtttgttttgttctttgtgttggaatttgttcatgggtgaagaaggagaagaggtgtcaagagagaaggaacaatacatgggagtttatggaaatgagtggttgt

SEQ ID NO: 81408 - DNA, 265 bp, Glycine max
  Clone ID: 700960282H1
catcgacaatcctaatggttccgacaaagctcgacctgagtgtgatctcatgatgtttctgcactaactatgtttgatttggatacccaacaacaaaaagagtgttgtcgtgttgttgtagttaatagtaataggactaagtaagagtagtggaaaacatgaacaacagcagtggcggaggaggacgaggaactttgatgggtttgagtaatgggtattgtgggaggtcgccattcacagtgtctcagtggcaggaactggagca

SEQ ID NO: 81409 - DNA, 265 bp, Glycine max
  Clone ID: 700960283H1
attgtgccctccctctttctagctatttccctctcttaacacaattaacaaagatatatcatatcatatcaactccaaatgatgaaaaatattgggttgtttcttcttgtggtggtggctacttttgtggtggcagccacagctggtagcttttaccaagactttgaaataacatggggtggtgagcgtgccaaaatctatgaaaatggaaatcttctcaccctctccctagacagagcctctggctctggctttcgttccaaaa

SEQ ID NO: 81410 - DNA, 259 bp, Glycine max
  Clone ID: 700960284H1
aaacaaacgcagtttctctctctctctctcgtagttcaattcaattcaattcaatatgatgcagagactctcttctgccactactactacttcttctcgctctgccttgctgcgctacggtggcggcgcacttcgccgggacgtgcttgctcccatttcctcttctcacttagcagctaagtcacaggcgggtgaaaatgacaccaaagcagctagatggttttctattatgagctctgatagatccacatttgattcc

SEQ ID NO: 81411 - DNA, 261 bp, Glycine max
  Clone ID: 700960286H1
cagctttgcttacagttcctataatttttttttctccattagattaccaagctctgcaactttgcttctctccatggagtatcgtctcctacccatttttactttactcaatattgcactggtggcaacccatgctgctttaccccctgaagtttactggaagtcggtgcttcctactacgccaatgccaaaagccatcactgatatcctttactctgattgggtggaagagaaaagcagctcagtgcatgttggaggtgg

SEQ ID NO: 81412 - DNA, 262 bp, Glycine max
  Clone ID: 700960287H1
gaaaaagaaaaaactgtccgatacttttttccttaaacttatatgataatgctttgacatcatgttcttaatgttaatttgtaaagggtactcttaagtatacttatgcctcaacattgtgggatgtccatataatcctaaacatatgatatctgattggaacttttttttcttgatttatctgttctgaacttctagatgctaaaaagcgtaagagatgttcacgacctctggtattacataagaaaaagaggagattgtt

SEQ ID NO: 81413 - DNA, 264 bp, Glycine max
  Clone ID: 700960289H1
gttattgttgaatcagcctcattccacaaagaggctaacatcaatcctcccaaaaaaagtcctgttcctcccacttttgtgaaaactttcaccattgcatcccttcaacagtatacaaatagcttttctcaagacaatcttataggtttaggcatgctagggagtgtgtatagggcagagcttccagatggaaagatacttgctgtgaagaaactagacaagagagtttctgatcaccaaacagatgatgagtttcttgaattg

SEQ ID NO: 81414 - DNA, 264 bp, Glycine max
  Clone ID: 700960292H1
gagtactattgttttacgattgggaagacgtgcgcgtattccattccaacgagcattagcaacgcagagtaacaataataacactctggtgtttatccctctccctcgctgcctcagcgcaacgcggtcgtttcactttcagcgcaattcaccgtttggattctccagcgggcatgggcaacgcaggagcatgttcatccaaacgcagcccacgccaaatccctcgtctctcatgttttatcccggcaagcccgtcatggaagt

SEQ ID NO: 81415 - DNA, 264 bp, Glycine max
  Clone ID: 700960295H1
atcaagaatacaataacatagcatagagtgagaagtgagaagagaaaaatggcaatctccatacccagtagacaacttttcatagatggagagtggaaagtccctcttctcaacaatcggtttccgatcatcaaccccgctactgaagacatcatagggcatattccagccgctactaaggaagatgttgaccttgcggtggatgctgctaaaagagccttttcccataacaaaggcaaagattggtcttcagctcctggctct

SEQ ID NO: 81416 - DNA, 264 bp, Glycine max
  Clone ID: 700960302H1
ctctatctgtcatcgaccatatcactttggtcaccttcagatacattcgtcgcattcatccatttaacttccacaaattcctacaaattctaaccaaacccttcactactccaaatcccacaacttctctcttttttttccctccttcttttccctttttctgttgtccgatcttctgcctcctagatcttggtatttgggattgatcacctggagttggaaatggttaaaagttatggagtgttctgatttgcgaaagatatc

SEQ ID NO: 81417 - DNA, 260 bp, Glycine max
  Clone ID: 700960303H1
aatttttcgcatttcaattcttctttcgtttatattttctgttttagtggaatcgcatagtattctgcttctgttgtttgctctactgttccatgcgttatacataagaaaaatacaggggaagaagaaaaatggtgattataaaccttgtgaagaagaagaagaagagcgagagagaaggaatgcgacttgggaaatacgacttgggtagagaacttggtgagggcaattttggcaaagtcaagttcgctaggaacact

SEQ ID NO: 81418 - DNA, 259 bp, Glycine max
  Clone ID: 700960304H1
ctgaccccaatttctgtggcggctctctctctacttattttctcttctgagattgagatttggatccaccctcttccccttctttcggtctttgatttgatcttttccttacctttctttgggtttgggtctgggtcttcagcttcaacttcaacaacaacaaaaaacatgctatggttacccaacaacagccacagccacagcttcaggttcagcctcagcagtcgacaccaccctcttcacaagatgaggccttgaa

SEQ ID NO: 81419 - DNA, 255 bp, Glycine max
  Clone ID: 700960305H1
ggctgcgcggaggggctttcgccgccgctgagtccgtgcaggtcgccggtgctgcgggcggatctgtcggcggcgtgacaggcattcacggcggaggtggcggaggaggagtacgttgccggagggaaggaggagaaggggaaggggaaggagggagtgccggtgtttgtgatgatgcctttggacagcgtgacggcggggaacgcggtgaaccggaaaaaggcgatgaacgcggcgatggctgcgctgaagagc

SEQ ID NO: 81420 - DNA, 223 bp, Glycine max
  Clone ID: 700959694H1
gcttaggggctaatgggtaactgcctagattcttcagccaaagtagaagctgctcacagttccagaaccccttctggaatttcaaaaactagtccttcatctgttccttccaacttatctattctgtcatatagtgaagcaagtgatttctcaaatcttccaacaccaaggtctgagggcgaaatcttgtcttccccaaatcttaaggcctttaccttcaatg

SEQ ID NO: 81421 - DNA, 225 bp, Glycine max
  Clone ID: 700959695H1
atggcgtccatggccactttcttcacccaaacctccttcccctcccactctctctccaaaaccttcgatacccatttcgccccatccccgaaagtcaacgtatttgcgaacttcccggcgaggaggcacgtgggggttcgagtttcgaacgcgctgatcgaaccagacggagggaagctggtggagcttgtggtgagggataattcagaaagagacttgaagaag

SEQ ID NO: 81422 - DNA, 289 bp, Glycine max
  Clone ID: 700959701H1
aagaagaagggtgagctaaagtcaattttccttcctttcctttccactagtcacataatcccgctagtggacatggccagactcttcgccttgcacgacgtcgacgtcaccatcatcaccaccgcacataacgccaccgttttccaaaagtccatcgatttagatgcgagtcgcggtcgccccatcagaacgcacgttgtcaacttccccgccgcacaagtgggtctccccgttgggatcgaagccttcaacgtcgatacgcctcgggaaatgacccccagaatctaca

SEQ ID NO: 81423 - DNA, 283 bp, Glycine max
  Clone ID: 700959703H1
ctatgcaataccataaccttatctatcgcaaccacctcccaaatcactctcatccaacttcatctctctcttcccccagttgccagatctgaatcacaccttcactcttgcgatttaattactgagtagttgaggatggctccttttgcttttgcaacattgccctcttctcacatctgccgcctcccaaagcccacaaacttgaagtttcgagttcgctgctctactgccgcgtcttctccttcttcggtttccactagatcaaaagctgctggctttgatt

SEQ ID NO: 81424 - DNA, 278 bp, Glycine max
  Clone ID: 700959704H1
ttcaaaacatctctaaacgcttgtaaagatctccatctcccattgatcctcctgaagtttttgtattcaaccatggctacctatagttggtcaactgagatattttcatttttggttctaacgttgttgtcgacaagcagtcacacaatggttgctggagcacgcaatcttctcgaatcaaccttgtcaaaaccagaagtgccaacacttcccaaacctcatgagttgccaccattgccggaaatccctgaattgcccaagtttgagtcgcctaagat

SEQ ID NO: 81425 - DNA, 279 bp, Glycine max
  Clone ID: 700959705H1
cctccttctgatcccgtcgccttttttagggttcaagtcggtgtacaatctccccaagcaatcaccacttctcgactattactacgcagatttagtgatttcgtcaatctcttttctcaactgaaaaaggaatttcccataaaagatctgcctacacctccacccaaaaagataccaagaattaaaagtcacactgtgttggaagagcgacgccttttattagctgattggatggaaaagttgttatcggacgttgatgtatcaagaagtgccccggtg

SEQ ID NO: 81426 - DNA, 272 bp, Glycine max
  Clone ID: 700959706H1
agcggttctcattgttgtttctgagagtccttcagtctgtgttgtcgcttctggttcttcagcaattcttctcatcgtaggggaaaacatgaagttctgcaaaaagtatcaggaatacatgcaaggccaggagaagaaacttccatgtgtaggattcaagaagctcaagaagattctgaagaagtgcaggagaaactcttcatccctgaaaccccttaatgcatcccttgccgccaaaacctgccccgaccattgcccaggtaatcaaaatg

SEQ ID NO: 81427 - DNA, 259 bp, Glycine max
  unsure (1)..(259): unsure at all n locations
  Clone ID: 700959707H1
gaatgtgatctaggaattaggctgagggtccatcaacagggctacaaaaggagctgcaacgcctatcagttgaagattagaagtccatgctaaccccttcctttaaaatcttctaccctttatccattttctactaccccatctctctccctttcccatctacttctaaaccttcatcaaacataactctcttcctagagggacatanatatttttgtagcataggacttatttgattctcgttaattcacaccacaag

SEQ ID NO: 81428 - DNA, 272 bp, Glycine max
  Clone ID: 700959709H1
ctaatttctatcttcttctcttcgcgtacgcgtcgtcccccgcaacgacgtcgtttcatggtcgcgttgttgttgtgctggttctctatgcgaaaatcttctgagggcttctcggcgatgagtggagtaattcattctctggtgtttgattccgcatttccatttttaaatttctctgtctcccatgtaagaaatgtttgattggaacgacgaagagcttgctaacatagtatggggtgaggtgggtgagggtgatgatcatattgtgcctt

SEQ ID NO: 81429 - DNA, 271 bp, Glycine max
  Clone ID: 700959711H1
ctcgttttcaatatgcagatcttcgtcaaaaccctaaccggtaaaacgattacgctagaggtcgagtcctccgacacaatcgataacgtgaaagctaaaatccaagacaaggaaggcattccaccggatcagcagcgtttgatcttcgccggtaaacaactcgaagacggcagaactctcgccgattacaatatccagaaagaatcgacgctccacctcgtcctccgccttcgcggtggcatgcaaatcttcgtcaaaaccctaaccggta

SEQ ID NO: 81430 - DNA, 266 bp, Glycine max
  Clone ID: 700959712H1
ccgttttctaaatctcattcttcacctgcaactatttggattgctgatttttgttaataccatatttactgatattggcgcatttctttgagaaagttactaattcctagatagaggcaaaaatgttgggaattttcaaggagaagttggttaaagcacccaaagagctgaacagtccagcttcgttgaattcatgcactaagcctaagctaagtcacgaaatccttcaggatttcatgtcctgcaattcctccaatgctttctca

SEQ ID NO: 81431 - DNA, 265 bp, Glycine max
  Clone ID: 700959713H1
gagaaagagagagagagagagagaaactgagagaaattcgcaaaccctaatttcggaaagatcggcgatggctgcctccaaggatcgcgagaacttcgtctacatcgccaagctcgccgaacaggccgagcgatacgaagagatggtggaatcaatgaagaacgttgcgaatctcgacgttgaactgactgtggaggagcggaatttactttctgttgggtacaagaatgtgattggtgctcggagagcatcgtggaggatcctg

SEQ ID NO: 81432 - DNA, 263 bp, Glycine max
  Clone ID: 700959714H1
gccacgacacacaacacaaaacatcaagcattggtattcgttgagttggagaagcaaacatattgcgatcttaaagttctgaataacacagagaactacgttgcctttaaggtcaaaaccacttcaccaaagaagtactttgtacgacctaataccggtgttgtacatccatgggacctatgtatcatcagagtcaccctccaggctcaacaagaataccctccagacatgcaatgcatcgacaagtttctcttgcagagtac

SEQ ID NO: 81433 - DNA, 268 bp, Glycine max
  Clone ID: 700959715H1
ctcgagaaaaatcacgagccaactcctgaggaggttgccagaatacatagccaatttgttgaagcacttcaagatctatttgaacgacacaaagctcgagctggatatccaaaccttgagttgagaattgtttgatatggtcgtaacttcgacccatagtttcatgggggtaattacacttttcttctcttaggttaggctttatttgggagttttgaagatggagtggagtgattggttcatgattaattggatttgaatggggtga

SEQ ID NO: 81434 - DNA, 270 bp, Glycine max
  Clone ID: 700959716H1
gtaaacttctattatgtagattattgaaataaaactttaattttgatcaaataacaaggttataaggagcctaaagatttgtatgtaagttttgttcgttgctaaatagtaagttgtccaaacacaagggaaggacataccttttcaatatggtaatatattctattgtctttcactcccatatgagcgatcagccaaaagtaaaggaactccttgtatataatatggtgatgtcttgttgagttattactgagagatattttcaatgtg

SEQ ID NO: 81435 - DNA, 242 bp, Glycine max
  Clone ID: 700959718H1
ataaggcattacaaaaacagttgcttttaaattgtgagctggtatgcagtaattgctggtgggatatacgtgcctgttatattgaagtatcagcgtcatacccactgataccgtaatgctaacgatatgcctagatatgcattcaaggagtatcctccaatttgttacttatcttaaaattttattaactgatacatttggaatacaactgccttccaaaaaagagcaacccacttgggaat

SEQ ID NO: 81436 - DNA, 277 bp, Glycine max
  Clone ID: 700959720H1
ggaacataatggagaaccctgcttggtacactcagtatacaccttaccaggctgagatatctcaggggaggcttgagtcattgctgaattaccaaaccatgatcaccgacctcaccggcttgcctatgtcgaatgcttcattgcttgatgagggtactgctgctgctgaagcaatgtctatgtgtaataatattcagaaagggaagaagaagaccttccttattgcaagtaactgccaccctcagacaattgatatttgcaagacaagagctgatgg

SEQ ID NO: 81437 - DNA, 276 bp, Glycine max
  Clone ID: 700959721H1
ctttctccgatggctaatccctcactcttgttcttcagtctcctcctattatccgccaccgtagccgccgccgaacggatctacgatgaagacgaccttctgatccgtcaagtggtgccggatgcggaggaccaccacctgctcaacgcggagcaccacttctccgccttcaagacaaagttcggcaagacctacgccacgcaggaggagcacgaccaccgcttccgtatcttcaagaacaacttgctccgcgccaagtcacaccagaaattggat

SEQ ID NO: 81438 - DNA, 275 bp, Glycine max
  Clone ID: 700959722H1
ctggatgaatgcttgtttcactgatggtatccatttagcagctgagggaagcaaaattgtggttaaggagatattgagagtgcttaaggaagcagaatgggagccatgcctccactggaaatccatgcctactgaatttgcagaagactcaccatatgatcttgttgctgctgatgggaaaactacactgaatccttctgagtggactttttacagagagattcagtgggattaggttgttaggttatcaactttaatcataatcatttgctctg

SEQ ID NO: 81439 - DNA, 272 bp, Glycine max
  Clone ID: 700959724H1
tctcgctttctttcttcccaccttttctctgtctcttcttcttcttccattagttcctgctgatagtcctaacacaacaccacccttcttcatcttcttatgtttttgacttgtggccaccactgtgacccatttctgtatcttctggcaaggttctatccgtttcttcttttggatcacccttttcactgttcgactccttcttgctatctgcttcgtcaatctgattattcatgggtgaaaagctaatttgttcacttgaataggtgtac

SEQ ID NO: 81440 - DNA, 269 bp, Glycine max
  Clone ID: 700959725H1
ggtgaaacgattcaagatatttcaacaggacaacctgggacgccgtttgattacggtgccggacacgtcgatcccgtggccgctcttgatcctggtctcgtctacgatgccaacgtggacgattacttagggtttttctgcgcactaaactactcgtcatttcaaatcaagcttgctgcgaggagggactatacgtgtgacccgaagaaggattacagagtggaggattttaattatccttcttttgcggttcctatggatacagcttc

SEQ ID NO: 81441 - DNA, 267 bp, Glycine max
  Clone ID: 700959726H1
aagatttccaaccgattggacaacactccttgtgtagtggtaacatcaaaatttggttggagtgctaacatggagagaatcatgcagtctcaaactttgtctgatgctagcaagcaagcatacatgcgcggcaagagggttcttgaggtcaatcctaggcaccctattatcaaggagctccgagagagagtagtaaagaaccctgaggatgagggtgtgaaacatacagcacagttgatgtaccagaccgcactcttcgaaagtggc

SEQ ID NO: 81442 - DNA, 265 bp, Glycine max
  Clone ID: 700959727H1
cggctcgagttcacacccaccattggatccaccaatctccaacctttcttctccactgttccgtttctctctccaacggtaactgcattgcccctttctctctctagagttctttcctatttcaatctgttgcatttgttttcatgttcattttttcctgtgtgattctgttgcattgcacgtggtcatgctaaaaatctgtttttgattggaattctgagggccccagaagctcatttgatctgggtttctcttgtttttgtgt

SEQ ID NO: 81443 - DNA, 264 bp, Glycine max
  Clone ID: 700959728H1
atttcccttctgagctttgattagtgtggcctagttgttgttttctcgatgagaaaggcttcttccactatgcattgcgcatctctgcgcttttgggttcccttgttgctgcttgctagcttcagctatgctccttctgtttcggccacaactgaaatttcagggaatgaagtgaacacagatgggaaggtgataaatgaagagttagcaaaaccaagtctaaaaggacatgatgaagaagcaaagttcaaaggattttttcca

SEQ ID NO: 81444 - DNA, 265 bp, Glycine max
  Clone ID: 700959729H1
gatcaacaatcggcggcgaaaatgccttcccacaagacgttcagaatcaagaagaagctcgcgaagaagatgaggcataacagacccatcccttattggatccgcatgagaaccgacaacactatcaggtacaatgctaagcgcaggcactgggcgccgcaccaagctcggattttaaggtccatgtcaacctccgactcgagatttttatattgtttttgttattctagaatgttactagcaatgtgtaaactggaaaggtttt

SEQ ID NO: 81445 - DNA, 266 bp, Glycine max
  Clone ID: 700959730H1
ctcttggcatcttgtgttgtgtccctcttttaagctatttccttctcttaacacaattggttgtgccaattgccatagtcaccaaccaattaacaaaggtatatatatcatcatatcatcaccaaatgaaaaatattgggttgttttttcttggtggtggtggctacttttgtggtggcagccacagctggtagcttttaccaagactttgaaataacgtggggtggtgagcgtgccaaaatctatgagaatggaaaccttctcac

SEQ ID NO: 81446 - DNA, 268 bp, Glycine max
  Clone ID: 700959732H1
attattatttctgttgtagatattgtaatgcagagctttttgactgatggttttatcccaggtcctacttcatttgcaccaatcgttgaaatggccatgacaatagttgagcagactggaggccagtaccatgttttggtgatagttgcggacggccaggtaacaagaagtattgacactgagcatgggagactaagtccacaggagcagagcactgtggatgccattgttgaggccagtaaatttcctctttcaatcatattggttg

SEQ ID NO: 81447 - DNA, 278 bp, Glycine max
  Clone ID: 700959734H1
cgtggggaccttcgattctcgaagaaggaaaaggtgagaagcttgagtgcggtcggaacgccgtcgtcgaccttccaaatggcttgtattaatgtctctgaacagcaaacacatgaaccttcttcgaccgtcatcgccaccaccaacagattccgtctacataagaatttttttaataactgcaacggtgcctctgttccacggaagctacgttccgtgacgaaaaaacggggtcgcgaatccatgttacttgattcagaaaagttgaagcatacgat

SEQ ID NO: 81448 - DNA, 280 bp, Glycine max
  Clone ID: 700959735H1
aacacacacatttctagtccccaaaccctaaactagaagagaaaaagagaaagtgcaacatcataacatcaaattcgtatgtgcttttgcttaccctaaaatctccatccctacaaaaagaagaagaaaaacaagaagaagtttaacatgtcagctgccgtggccgcttccgctgccgccgctaccatgtcgggttaccaccacaactcctcctcgagacaacaacaacacatagaccatgaattggccttaacaccacaacgagtgtgtgtctctccac

SEQ ID NO: 81449 - DNA, 277 bp, Glycine max
  Clone ID: 700959736H1
gttcaacaatcggcggcgaaaatgccttcccacaagacgttcagaatcaagaagaagctcgcgaagaagatgaggcagaacagacccatcccttattggatccgcatgagaaccgacaacactatcaggtacaatgctaagcgcaggcactggcgccgcaccaagctcggattttaaggtccatgtcaacctccgactcgagatttttatattgtttttgttattctagaatgttactagcaatgtgtaaactggaaaggttttagcttttggtcat

SEQ ID NO: 81450 - DNA, 275 bp, Glycine max
  Clone ID: 700959737H1
gcgggattgagagctgctattggactttcagaacacgggttcaatactgcttgtattaccaagctcttcccaactcgttcacacactgttgcagctcagggtggtataaatgctgctttgggaaatatgactgaagatgactggaggtggcacatgtatgacactgtcaagggaagtgattggctaggagaccaggatgccatccacctaatgtgtagggaagcaccaaaagcagtcattgagctagagaattacggattaccattttcccgaac

SEQ ID NO: 81451 - DNA, 271 bp, Glycine max
  Clone ID: 700959738H1
atccagtctctttagttagctcctgctccttttcttccagaagattcaaggaacaacaacgaacatgagacttggatttgcttcttggagattcatcctatgcaccctagttgtctttttgattctacaagacagtgtagctagaaagatagctacaacatctgggaatgaagttcaactgaaggcagtatcctatgatttgcaaaagcttgcaacagagggtcttgtacttgacagtattattcagcttgaaggcgctgatataaaaagg

SEQ ID NO: 81452 - DNA, 266 bp, Glycine max
  Clone ID: 700959739H1
atccctaacacaacagatgattgttcagcatgtacggaaagaataatcaaatcacaatagttgaattttcaaaaatcaaggaagtttgaagagagagaaattctggtggcatagtaaagaagcactaacttacattgctcatgcatatcttgattaagtccctgtgcaagaccttgtctggaatatcttgttcactggcctacattggctcatgttgagtgtcatttgtttttattattatacatctttgtggtcccctctcttct

SEQ ID NO: 81453 - DNA, 271 bp, Glycine max
  Clone ID: 700959740H1
gagacacctgatagggttttgggtgctttggctgataagtatggacccatattcaccatcaactatggtgtcaaaaaggctttggtaatcagcaactgggaaattgctaaggaatgcttcaccaaaaacgacatcgtcgtttcgtctcgccccaagcttcttgccattgaactcatgtgctacaaccaagccatgtttgggtttgcaccctatggtccttattggcgcgagccaagaaagattacaacgttagagatccttacatctcgca

SEQ ID NO: 81454 - DNA, 273 bp, Glycine max
  Clone ID: 700959741H1
tctcgagccgaatcggctcgagtgggcagtcgctgctgttgcggcacattggtgccaattttaggtgtacctgatgctcttgactcctgttgatcttccagtcagtcaaataaatctatttcctggggagacgactgctctttggatatccattgagtgttccaagttctcaacctccaggacaatatgaaggagagattgccattactgctataaaagcagatgcagaatctcctgttcaaattttaagcaaggttgagaaacatcagttgt

SEQ ID NO: 81455 - DNA, 262 bp, Glycine max
  Clone ID: 700959742H1
ttggcatcttgtgttgtgtccctcttttaagctatttccttctcttaacacaattggttgtgccaattgccatagtcaccaaccaattaacaaaggtatatatatcatcatatcatcaccaaatgaaaaatattgggttgttttttcttgtggtggtggctacttttgtggtggcagccacagctggtagcttttaccaagactttgaaataacgtggggtggtgagcgtgccaaaatctatgagaatggaaaccttctcac

SEQ ID NO: 81456 - DNA, 261 bp, Glycine max
  Clone ID: 700959744H1
gggagatgtgtagtagtagtagtgggtggtaacagagaagaaaatagggggtttggtttggtgagttacccaagagaaaggatgaagagggaacgcgagcagcttggttccatcgcagggacctcaagctgcggttattcaagcggaaaatcgaatctttgggaggatagaaggaggcatggacgagcttcttgcggtggtgggttacaaggttaggtcatcggacatggcggaagtggcgcagaagcttgagcgtctcga

SEQ ID NO: 81457 - DNA, 266 bp, Glycine max
  Clone ID: 700959748H1
attatgatgaggcatctgaaggcaatgcttggaggcttcttgcagaggtgtccctctctcaagagaggtttcaagaagtcaatgatcttatttttgaagccattggctgtggtgaattggaggatgtcaacgttgaaagtgtcaaagaagttgatgcagtcagcacaagcgaacaccctactgtggtggtagctggttcacaagaatgtgtgattctacactaacaaggctctaaaattatgaacaaattcagcaaatccgtagtg

SEQ ID NO: 81458 - DNA, 270 bp, Glycine max
  Clone ID: 700959749H1
gagaatggatgaagtctgctatgtgtgcagtggtggttgtagcacttcttcttctggcggaggtggggcccatggctgaggctgtgacatgcaccccaacagagttgagtccgtgtcttccagcaatcacttccggtgctaaaccttccaatgcttgttagcacgaagctgaagcagcaaaaaccatgcttatgtggctacctcaaaaacgctagcttcaagcagtatgttaactctcctaatgcccgaaaaaccgttgcttcttgtggg

SEQ ID NO: 81459 - DNA, 279 bp, Glycine max
  Clone ID: 700959750H1
gctcatcaagtccaagaaccaacctaccttttgcaatctcaattcaatggcgtcctctctcattgcgaacgcttcctctcctcttctctcctctccaggtccctccttcgccccgccgcttccgcttcccaccgctctttcaacaccaacgccatgggccagtatgacaaccgcgccgacgaccacagcaccgacatcgatcgtcactccgaacgctctttccctagcactgcgcgccgcgacgatatcttctcagatgtgttggatccattttttccg

SEQ ID NO: 81460 - DNA, 273 bp, Glycine max
  Clone ID: 700959751H1
cgcatccctccccaacccaaaacggaaccaggtgattttgatgacaagtcagatcctcctttatccgcacaaaatgacatacaagaatctgatatagagttggataatgctgatgttgttgaacctgataatgaccctcctcaaaagatgggagatccttctgctgaaataacggaagaacaaagggatgctgcacaactagcaaaatcaaaagcagtcgatgctatgtcacaaggtaatttggatgaagcactggcccaactgacagaagcc

SEQ ID NO: 81461 - DNA, 275 bp, Glycine max
  Clone ID: 700959752H1
ggcaaatcctgagttcgtcgtgagtcagagctatctaccttcacttcactcactctttcactttgtgtttcagattcagcagcaactctgcccgcatgcgtgcgtgaggtaagatgaaaactacttcaaatcaaggttgttgtacacacatatgtaaaatatcttgaattcgaagtgtgaaggatttgctgagtttcccaaagacatgtggtcagcctgttttcggcagaaatgaagaactcccagagcacacaagaattacagtccccggctca

SEQ ID NO: 81462 - DNA, 269 bp, Glycine max
  Clone ID: 700959754H1
gtggtaccagcagcagagcttgtatacgtcgccgcttcagcgtacaacatgatcattcccgagaagaaccgtaaagagatctgcaaatacctcttccaagagggagtttgctttgcgaagaaggacttcaatctggcgaacacccggagattgatgtgccgaatctgcaggtgataaagctgatgcagagcttcaaatccagagagtacgtgagggaaacatttgcgtggatgcactattactggttcctcaccaacgatggaattgag

SEQ ID NO: 81463 - DNA, 268 bp, Glycine max
  Clone ID: 700959755H1
agaagatggatgcaaccggggaagaaataatttgaactctgactaattagcctcaatattattaggaaaaatatcttgttaagtttaaggtccatttcccttcattagttgactatgttctgaaaaaagagtcaggagggagtgaaggagagattaataacatttgtgaaagaaaaggggaggagaaaggaaatgaaaaaaaaaatccaaaaaaactatacttgtttgtatgtagtgctctctcttcctctctctctttaacacttgt

SEQ ID NO: 81464 - DNA, 270 bp, Glycine max
  Clone ID: 700959756H1
cgaaaattgaaacagaattaaaaaccaaacactaccctgttgctttggtgatagcttaaaactcaacaagtaaatgattagactaaatgtctactgttcgctaattccaagtgcaagacaagccagacctggcagcagctatggctccttgatgcatccataatcacaaagcttcaaaattttctcatcggatttccatcaaggctaaggccataaaagatgagatggacggagaaacaagcggatcttcaggacgtagctgggatcctg

SEQ ID NO: 81465 - DNA, 264 bp, Glycine max
  Clone ID: 700959757H1
gagagagagaaagagaagtgtgtagttggtgaagtttttgagaagaatatggaacgaagtgacggaatggtaacggggtcgcatgaaaggaacgaacttgttagagttagacacggttctgacagtgggatttgtcaaatatgtggtgacaccattggattaacggctactggtgacctctttgttgcttgtcatgagtgtggcttcccactttgtcattcttgttacgagtatgagctgaaaaatgtgagccaatcttgtccc

SEQ ID NO: 81466 - DNA, 262 bp, Glycine max
  Clone ID: 700959758H1
gggtctgattctgatcgaaacccgcgccatggccatgttcgattccatcttcaacaaaggctttaaggctgccaaatgtaaaacactgctgaagttgacaattccacgtataaagcttctaagaaacagaagagagattcagttgaaaaacatgcggcgtgagattgccaagctgcttgagactggccaagaagccacggctcgaattagggtagaacatattataagagaggagaacatgatggctgctcaagaaatcatt

SEQ ID NO: 81467 - DNA, 262 bp, Glycine max
  Clone ID: 700959759H1
ccataacacaaggcagaaagcaagctcatcctagagttttaaaaatggcagcagcctcctccatggctctctcttccccatccttggctggcaaggccgtgaagctgggcccatcagcccccgaagtcgggagggtcagcatgaggaagaccgtcaccaagcaggcctcctccggaagcccatggtacggcccagaccgcgtcaagtacttgggcccattctctggcgagcccccgtcctacctcactggcgagttcccagg

SEQ ID NO: 81468 - DNA, 105 bp, Glycine max
  Clone ID: 700959760H1
cggcgagctctagtacttattccttaagtatgtgcaataattttgcccctatacaagacaaagggttggtctagttaatgtatagtagcaaagtgttacaattca

SEQ ID NO: 81469 - DNA, 260 bp, Glycine max
  Clone ID: 700959761H1
gccttgaagatcctgaacttcttgctagagagactgtgttcagtgtaagcgaaatagaagcactttacgagctcttcaaaaagattagcagtgctgtaatcgacgatgggttgattaacaaggaagagtttcagttggcattgttcaagacaaataaaaaagaaagtctgtttgctgatcgggtatttgatttatttgacacaaagcacaatgggatactaggttttgaagagtttgctcgtgctctctccgtttttcat

SEQ ID NO: 81470 - DNA, 260 bp, Glycine max
  Clone ID: 700959762H1
gtctatgctggaatcggttgggttatctggagaagcaaggaggacttgcctgaggaactcatctttcacatcaactatcttggtgctgatcaacccaccttcacccttaacttctccaaaggttctagccaagtcattgctcaatactaccaactaattcgccttggttttgagggatatagaaacgtgatggaaaactgcagagacaacatgttggtgctgaaagaaggactagagaaaacagggagattttcaattgt

SEQ ID NO: 81471 - DNA, 262 bp, Glycine max
  Clone ID: 700959763H1
aatatgtccaaaattgaacacactcagcattgaagcaccgtttatggtttcacttgagttgaaaggatgtggtgtactatctgaagcattcattaattgtccactcttagcatctctcgatgcttccttttgcagccaactaacggatggctgcttgtctgcaacaactgtctcatgcccactgattgaatcattgatattaatgtcatgctcatcaattggttcagagggtcttcgatctctgtattgtcttccaaatttg

SEQ ID NO: 81472 - DNA, 260 bp, Glycine max
  Clone ID: 700959764H1
aagatgtcgaagcgtggtcgtggtggttcggcggggaacaagttccgcatgtcgctgggtcttccagtggcggcgacggtgaactgcgccgacaacacgggggcgaagaacctctacatcatttcggtgaaagggatcaaaggccgtttagaaccgtcttccctcggcctgcgttggcgacatggtgatggccaccgtgaagaagggaaaacccgatctgaggaagaaggtcttgccagctgtcatcgttcgccagcgca

SEQ ID NO: 81473 - DNA, 278 bp, Glycine max
  Clone ID: 700959765H1
gtcgccaccttcaaagcccgcaagaacgacttgcccctcaagacgaaaatcaccgtgtgcgaggtgcgtgaggaggctggcttcctcgacggtgacgtgttgattttccccgacatgatcaaatacaggggtttggaggaatcaaatgttgatagctttttcgaagatgttttggtgaatggtaaaccatggactgctggagttccggaggtgtttcgtggttcacatgtttatgtgtgtgctcatggaagtcgtgacgtgagatgtggtgtttgtgg

SEQ ID NO: 81474 - DNA, 272 bp, Glycine max
  Clone ID: 700959767H1
agcaagtggacttgggcgttgcaagataaataatggaggctgttggcatgatgctcaaaatggacatgcattttctgcttgtttggataatggaggggtcaaatgccagtgtcccacagggtttagaggtgatggtgtaaaaaattgtcaagatatagatgaatgcaaagagaagaaggcttgtcagtgccctgactgtagctgcaagaatacttggggaagctatgactgcagttgtagtggagatcttctgtatatgagggaccacgata

SEQ ID NO: 81475 - DNA, 270 bp, Glycine max
  Clone ID: 700959769H1
gataaacattcataccaggaaaaagagatggagaagcaatctaaatctgaggttgttccgtctttgagccagagtcagagttttgcaactaaagtgcatcatccaaaccctgattcttctgctgcccttaaatttcgtgtcttggatgcaaccaatctggaggaactatcttgcttgaatatttccactgatatgaacaagcctaatgcaatgacacctgaaggaaaaggtggtcaaaacctggatagcttcatcaataattattttgtt

SEQ ID NO: 81476 - DNA, 270 bp, Glycine max
  Clone ID: 700959770H1
atgggaagaaagtgagaaggccaaagcagagaacagagctcaaaaacatctctcagctatcgatgcttgggaaaacagcaaaaaggcagctcttgaagctgagcttaaaaaattggaggaacaactggagaaaaagaaagcagaatatggtgaaaaaatgaagaacaaggtggccttagttcacaaggaagcagaggagaagagggcaatgattgaagccaagcgtggtgaagagattctgcagacagaggaaatggctgcaaaataccg

SEQ ID NO: 81477 - DNA, 267 bp, Glycine max
  Clone ID: 700959771H1
attgcatacccttttgagttttgattctctctcctcgcataactaggtgaaatcgaatatttttggggtgtgtcaaagtttgtgaaggaacttgaagaagtaaatgcatggatcgaggggaccaaatgacattacctggctctgcatcttgactatatgcagagaggaatacctggtgctggaaaccaacctgtactgcacaattcacctaatattggaccattgtctaaccctaatctaccatgtcaatcaagcattgggggtggt

SEQ ID NO: 81478 - DNA, 96 bp, Glycine max
  Clone ID: 700959772H1
gctattcaatcccaaagccacagaaatgatattattcagattttagagactgaaaacatcatggccaacctcgacctcgacccattccagacaagc

SEQ ID NO: 81479 - DNA, 257 bp, Glycine max
  Clone ID: 700959773H1
acttgctggagcaggataacccaaaccggaacagaagcaaaagcagaaacgaagatgggtggttccgttttcactcacttcctcgttctcccctcctcttctactccttctctttccactctcttcccatccaaattccccaccagacccatcaatgaatcttttcccttcacccttacctgcaaccaattcccttccaaactcactacttcgcggccttcccaattctcagctcctcctagttactcatgctctgt

SEQ ID NO: 81480 - DNA, 261 bp, Glycine max
  Clone ID: 700959774H1
ccctaaacgactctatctctcttcgttttgttcttccttgcgctcctcctcgttcgttcgttctccctcgcgtagatcggcaatggcggagaccgagacgtttgctttccaggctgagatcaaccagctcctcagtctcatcatcaacaccttctactccaacaaggaaatcttccttcgtgaactcatcagcaacgcctctgatgctttggacaagattagatttgagagtttgacggacaagagcaagctcgatgctca

SEQ ID NO: 81481 - DNA, 259 bp, Glycine max
  Clone ID: 700959775H1
gcacgcggcaccgttcgttgctgtctgagaacagcaactccccagttgcttctctagacaaagctgatggccttccttcttggatgaaccatgaggaccgaagggtattgaaggctatggataacaaacctgcacctaatcgtcaccgtggctaaagatggcagcggagacttcaaaaccatctctgaatgtttaaatgctgtccctcaaaattttgaaggacgttatgtgatttttgttaaagaaggagtatacgatg

SEQ ID NO: 81482 - DNA, 258 bp, Glycine max
  Clone ID: 700959776H1
ggaggatctgacagaggttataacatcagcagaatttcaccctacacattgtaatacattggcatatagcagttcaaagggttcaatccgtcttgttgacttgcggcaatcagcattatgtgattctcatgccaaactatttgaggaacaggaagctccagggtccagatcatttttcacggagattattgcttctatctcggacataaaatttgggaaggatggtagatacatacttagtcgtgattacatgacttt

SEQ ID NO: 81483 - DNA, 257 bp, Glycine max
  Clone ID: 700959777H1
attatagcacaccacacaaaaaagcaaacaagagagaacaactgttactcacacacgccatgggtaaatgaatggtttttgagcaacagcagttaaaagagaaaagggattcagcgaagatgacatcggttggtgtggcaccaacttcgggtttgagagaagccagtgggcatggagcagcagctgcggatagattgccagaggagatgaacgatatgaaaattagggatgatagagaaatggaagccacagttgtt

SEQ ID NO: 81484 - DNA, 254 bp, Glycine max
  Clone ID: 700959778H1
tataacaaagcattgcgatggtccctgcggatgttgacgcaatgtgatttctgcccagtgctctgaatgtcaaagtgaagaaattcaaccaagcgcgggtaaacggcgggagtaactatgactctcttaaggtagccaaatgcctcgtcgtctaattagtgacgcgcatgaatggattaacgagattcccactgtccctgtctactatccagcgaaaccacagccaagggaacgggcttggcggaatcagcggg

SEQ ID NO: 81485 - DNA, 260 bp, Glycine max
  Clone ID: 700959779H1
aaaatgcccactttttttcttccaacgctcctcctccttctcatagccttcgccacctctgtctccggccgccgtgacctcgtcggagactttctccggctgccctccgaaactgataacgacgacaacttcaagggcacccggtggggccgtcctcctcgccggttccaatggttactggaattacagacatcaggctgatgtttgacacgcctatcaaatattgaggaaaggtggtctgaaagaagaaaatattattg

SEQ ID NO: 81486 - DNA, 261 bp, Glycine max
  Clone ID: 700959780H1
cgcaacaaaaagaaagaatcccaggcgaggagaaagatggaggggaaggagcaggatgtgtcgttgggagcgaacaagttccccgagagacagccgattgggacggcggcgcagagccaagacgacggcaaggactaccaggagccggcgccggcgccgctggttgacccgacggagtttacgtcatggtcgttttacagagcagggatagcagagtttgtggccacttttctgtttctctacatcaccgtcttaaccgtt

SEQ ID NO: 81487 - DNA, 273 bp, Glycine max
  Clone ID: 700959781H1
atcaggcacaagcttgagctgcatgtcaattgtttgtgttctctggggcctactcatgacgaaatagagtttgagtttttgggtaacttgagtggtgatccttacactctccacacgaacgtattcatccaagggaaagggaacagagaacaacagttccatctatggttcgaccccaccaaggacttccacacatactccgtccactggaatcctgcaagcatcatattctctgtggacgggaccccactaagggagttcaagaatttggag

SEQ ID NO: 81488 - DNA, 270 bp, Glycine max
  Clone ID: 700959783H1
gagtgagcgagcgagcgaggtagggttttcgttgttcccccgtctttgaattcagttcgcgacgatggggtccatccccgatccaggcgagttgagcgagttgactcagccgagcttcgacgagttccagcgccaaacttccctcatgaccagctgcaccctcctctggaaggagctctccgaccacttctcctccctcgagcaagacctcaaccacaaatccgaagacctcaaacgcaagattcgcaccctcgacaacactacttccga

SEQ ID NO: 81489 - DNA, 267 bp, Glycine max
  Clone ID: 700959784H1
gaattgtctacccttggtaaccaaatgtgtgatgttgcatatagctgtatgccttatattgcagatattggacctgaaaaagtacatgaaggtatagagcattttggattacctgagggaatcccttcattaccagaatatttggctgattactgctctttggcacgaagaaaatggcctgttgctgaatggaagttctatgttgccttttctttcttccgggcagcttcaatttatgcaggagtgtataatagatgggttaagggt

SEQ ID NO: 81490 - DNA, 251 bp, Glycine max
  Clone ID: 700959785H1
ataattgctgtggatgctagttccagctgcatgtccaaaatcaaattgtgactgcatgttaattgcaaaagagaggaatttctacacatgttgaaactaatatgctcttggtgggggttgggggaggatatatgatctcctttgcctttaaattattactctctccttttctttttatctttgtctcactggtttcattttatcttatttcaagatttttacgtaaaaattaaaaaaatgttataattttt

SEQ ID NO: 81491 - DNA, 261 bp, Glycine max
  Clone ID: 700959787H1
gttggaccatgggaggagagacctgggcactttggtgatgtttggatgtactggactgatgatggacttggctattatgagtttctccaacttgcggaggacttgggtactgcaccaatatgggtatttaataatggtgtcagtcataatgatcaagttgatacatctgcggtcttacctcttgtgcaagaagcccttgatggacttgagttcgcgagaggtgatcgcacttcaaaatggggctcccttagagctgctatg

SEQ ID NO: 81492 - DNA, 263 bp, Glycine max
  Clone ID: 700959788H1
aagatgatcaacattattggagcacttgttctactctttgcatttctcttcctcagttgtgtgtatgcacaagacacaacaacccttgtgcctgcaatcataacttttggtgattctgctgtggatgtagggaacaatgactatgcttcccacccttttcaaggctgattaccctccttatgggagggactttgttaaccaccaacctactgggaggttttgcaatggcaaattagctactgatttcactgctgacacattgg

SEQ ID NO: 81493 - DNA, 259 bp, Glycine max
  Clone ID: 700959789H1
cccaaagtgcttctctcctctgtctttttctctctcttgctatccttttggctagttgcactgctgcaagtgcaactccaagaagcgcagtgccaagccaccatgtttcaacattcaacagaagcctttttccttccacttttctctttggaattggttcttctgcttaccaggcagaaggagcagcaagtgtagatgggagaggaccaagcatatgggacacctacactagacagcatactgaaaagatttgggatca

SEQ ID NO: 81494 - DNA, 257 bp, Glycine max
  Clone ID: 700959790H1
gccaatttagatacttcaccaaaggctactaatcatgagatgaaccaagcaatttctgagaaccccgattccaacaaaatgaagggcagaaaacctgtagaccgttcctcatgtggttccaacacaacctctagcagtgaagagactgagttactagagaaggatgagaaagaaaaggaagagcccaaaacacctgatgcgaacgttttagataccgagcttagtaatcgtcgaagtagaagcattagcaaccttac

SEQ ID NO: 81495 - DNA, 255 bp, Glycine max
  Clone ID: 700959791H1
ggaatttggtgctgaatcatcagtcattgccacaagtagttcaaaagatgagatgcatgagggaaatagattgaaagctgcaatccaggcagctttgcttagaaggcctgaaatacacaagaggaaagaagctcctgaccaaactaatgagtttcctacatcaagcactggtttgaaacgagaagtcacttctcaaaagcaagtgttggtttccagcactttgaagaatggtatatctgctgaagaaagcaatat

SEQ ID NO: 81496 - DNA, 253 bp, Glycine max
  Clone ID: 700959792H1
cagaaattgcatagcccttgaatctgcagttaacggagcttgtggtccaacttgtaatcatccagctgattgaactgtacagaaagaaagcgcaaatgcaaggcaaagtagcgagacagttttttacttgatccattatttaatttattgagaatgagcccaattgtaaatgactatgtaccatatcaaccaacacaagctgcaattttaagggaaaatgcagcgacctgtggttactgcagctgaagctgct

SEQ ID NO: 81497 - DNA, 253 bp, Glycine max
  Clone ID: 700959793H1
gaaagattggagagaagtatggagtggagtattcggaagatgagatactgttcagatatagaagagcgtatggtcagccttggggaaaatctcgtctcagatatgttaatgatggtaggcccttttggcaatacatagttagttattctactggctgctcagatcctcaatactttgaagaactttataactattatacgacagacaaggcatggcacctcaatgatcctggcgcagaagaagtattcagagc

SEQ ID NO: 81498 - DNA, 256 bp, Glycine max
  Clone ID: 700959794H1
tctcctatctgaattcctcttattcaggaatttggagagactgttgatatagaaaggtaggataaaccagtggccaaggaatatatggcgttttctatggttttcattgttagcaacattatgctgcttttcagttcagcatttggccaaaactgctagtcctacctctctgagcccaactccagcaccagccccggcacccgactacgtgaacctcaccgagttgctcagtgttgctggtccatttcacaccttc

SEQ ID NO: 81499 - DNA, 253 bp, Glycine max
  Clone ID: 700959795H1
caacaactactactactactacctctaaccgtgccgtttgtcaggtgcaagattgtagggctgatcttagtaatgccaaggattaccaccgtcggcataaggtttgtgatgttcattctaaggccactatggcactagtgggaaatgttatgcaacgtttctgtcaacagtgtagcaggtttcatgttcttcaagagtttgatgaagggaagagaagttgtcgaaggcgtttggcaggccacaataggaggag

SEQ ID NO: 81500 - DNA, 259 bp, Glycine max
  Clone ID: 700959796H1
gtacaacatgttcttcagcttcacctctcgggaggcacggtcccacactatagcttctcgattgacatcccctgatgcaaacattgaaaggtctggggaataacgtatgacactaatagcacccctatgtttctcaaggacagcctcttctacaagagtatcgccagaaatagaatatatgtgcaatttgggaaatatttgttggatttcaaatttcttcctttagaaggcttctaaaagtcaagactggtgaggatgt

SEQ ID NO: 81501 - DNA, 260 bp, Glycine max
  Clone ID: 700959801H1
gttttatcttatgaagacagtgactcctaaatttcttgtctttttctatatgtttcttgtccatttcttaggctgctgagttgtccattttcatgaacgataggaggataagtactcaagtcaaagcctcagcacaagcgcgacaagtgggacgacaaatatccatatcaagtcctggatttatctatgaaccctatgaacctcgtgagaaaatcccattttggaagagatggttcactagaagtggttggagaagaaca

SEQ ID NO: 81502 - DNA, 102 bp, Glycine max
  Clone ID: 700959802H1
gcgtacggactctcggctttcggctctaagctgacaatgctagtgcttgtcttgcttgttgctacagttctggtagcatatgaatgccatggctcagactac

SEQ ID NO: 81503 - DNA, 74 bp, Glycine max
  Clone ID: 700959803H1
cactgggagaagttccctagcgctcctttcaagatggagatctgcgtcaagaccctcaccggaaagaccatcac

SEQ ID NO: 81504 - DNA, 249 bp, Glycine max
  Clone ID: 700959805H1
aactcactcaaatttattttttctcttcattttctcttcgtgttattgttgttgctgcctggattcaattgtttcaggttcgtgctttcgcccctgctgtgctggattcaattgtcacatttggattcgattgtttcaacccctttcaggtttgcagacacatcatgtagatatttgtagttctatgttcctcagtttttaaaatacaccagtgacaggtaaggaaccatgttttagctttatgtgtga

SEQ ID NO: 81505 - DNA, 253 bp, Glycine max
  Clone ID: 700959806H1
gaggaacgaagcaatcgcaagtcgtctgttctgtcccgcgggagcagacgacctgtcttcatcgccaaacaacctcaaaaatcattcatcaacgttcactattaatccatccatcattaagtaagaaaataaggttcgatttttttatctttgttttgcttctgatccatcatggaggtgccgagttcctgggatgcccttcgcaaacaggcaagaaaacttgaagctcagttggatgagcagatgaattctt

SEQ ID NO: 81506 - DNA, 251 bp, Glycine max
  Clone ID: 700959807H1
gagagttgaattttctctacgatccacacatcctgatctataataatcttttccattttaagatttttgcttctaagtgtgtgtatctaccgctcacttatagtttccattataagtaattatttcttctttttttttcttttctgttttgctgttttctcaatgaaatcttcccctcttcatgatctgtctcagctatatattgattttgctgtttgtttgtttgtgatcaaaattgggttgattccatt

SEQ ID NO: 81507 - DNA, 253 bp, Glycine max
  Clone ID: 700959808H1
gtttttctcttttatccacttggtaacttcggctattgtcgaatccgtaaggcgaaggagagcaatcaaggagggatatcttaacaatgccaatggtgtgttgcatatgtctgcaatgtggcttttcccacaactttgcttgggtggaatagctgaagcattcaatgcaataggccaaaatgagttctattacacagagtttcctaggaccatgtccagtgttgctgcttccctttctggactgggaatggct

SEQ ID NO: 81508 - DNA, 247 bp, Glycine max
  Clone ID: 700959811H1
gggaagacttacctacttagaatcatcaatgctgccctcgatgacgagcttttctttgccattggtggtcacaacttgacagtagtggaggttgatgcagtttacacaaaaccattcaccactcaaaccattctaattgcacctggtcaaaccacaaatgttctagtcaaggccaaccaagtagcaggaagatacttcatggctacaaggacctttatggatgcaccaataccagttgatagcaaag

SEQ ID NO: 81509 - DNA, 250 bp, Glycine max
  unsure (1)..(250): unsure at all n locations
  Clone ID: 700959813H1
cgaatgcgnaaaaaggtggtgaattagtttttggtggtgttgacccaaagcacttcaaaggaaaccacacttatgttccaattactgaaaaaggttactggcagattgaaatgggagattttttcgttggaggtgtttcaacaggtgtttgtgagggtggctgtgctgctattgtggattcaggaacatctttgcttgctggtccaactcctgttgtggctgaaatcaaccatgccattggagctgaagg

SEQ ID NO: 81510 - DNA, 255 bp, Glycine max
  Clone ID: 700959814H1
aaaattcctaatcagaaaaaaaaaaccctagtaatgccgccgatggggaggaagcgaaaggtagcacccaaatcttctctatccaccgagccacctctcaagcagcaacaaccaaaacccgaaaatccccctcaagaatacgaagaagtcgaagaggaagttgaggaagaagaggtagaggaagaggtcgaagaggaagaagaagaagaagaggaggacgaggaagaagaggaggaggaagaagaagaagaagaa

SEQ ID NO: 81511 - DNA, 253 bp, Glycine max
  Clone ID: 700959815H1
gaaatatgtaccgagaagaaaacgattctgtcagttgaagacatcattgctttgattggtgataagtgtgatggagttattggacagctgactgaagactggggagaacagttgttctctactttgagcaaagccggagcaaagctttcagtaacatggctgttggttataacaacgtggatgttgatgctgcaaacaagtatggtgttgctgttggaaatactcctggagtgctcactgagacaacagctga

SEQ ID NO: 81512 - DNA, 245 bp, Glycine max
  unsure (1)..(245): unsure at all n locations
  Clone ID: 700959816H1
gattatttagaatataatctatagaagaggcgtttaacagtaagaaaattgggggtttaaggtttaaggaggtgttggacatggcatggtagtactagtagaagcaactaggaagcactgaagcagttgatgatggtaaataaatgattatgattattccgtactctctctctctatctctctctgcatacttatgccgtgtctcccactccactctacactaattaagcgngctcacactgcca

SEQ ID NO: 81513 - DNA, 258 bp, Glycine max
  Clone ID: 700959817H1
cagaaaacagagatctatcattaacttcttggtgaattgtacagcagggacaatgttctataaatcaattgatccatccaattttgtgaaatctggtgaaaagacatttgagttgttggactctattgtggaagagattggggaggaaaaggttgtccaagttataacaggcaatggaagcaactatgttttggcaggtaaatttcttgaacgaaaaaggtcacatttatattggattccttgtgcagcccattgcat

SEQ ID NO: 81514 - DNA, 258 bp, Glycine max
  Clone ID: 700959818H1
actcgagccgaatcggctcgagcttgcagtcgcagaggaaaacccacagctagtagtctcagttcgtttgagagagaaaaaatggcagagggtctcgttctccgcggaaccatgcgcgcccacaccgacgtcgtgacggcgattgccactcccatcgacaactccgacatgatcgtgacggcgtcgcgcgacaaatccatcattctctggcacctcaccaaggaggacaagacctacggtgtcccccgccgccgcctc

SEQ ID NO: 81515 - DNA, 253 bp, Glycine max
  Clone ID: 700959819H1
cgtgaatgcgtataaaaggaaaataaagaaattagcgtcaaaatgttgggtgtgttcagcagctccatagtgtcgccgccggacgagctcgtggccgccggcagccgtactccgtcgccgaagatgacggcggcggcgctgcggaagcggttcgaggagaagaacccctccgccgtgtcggtggaggtcggagagcatgtccagctcgcttatacccaccacaacgagtcgccgtttcagcccagatcctttg

SEQ ID NO: 81516 - DNA, 251 bp, Glycine max
  Clone ID: 700959820H1
gagagaacaaagcacttagtgctattcaataattacgaaaaaccaacagcgagtgttgtttttgtttggtccaggcaggaccagggaatgaatagagatgagaggctttcggttgaagagaactgagttaagcggcgaagccaaacgcagaatcggcggcagaaattgccaccggaagcacgtcgaagacaggtgaaccaaacacaaaattccatccaccacttctcttttcaatccccaactcaaatctg

SEQ ID NO: 81517 - DNA, 82 bp, Glycine max
  Clone ID: 700959824H1
aacagttactagcaccatcaccagcaccaccatgtcccttgaagagtcgctaagatctctttctctggattacctcaacctc

SEQ ID NO: 81518 - DNA, 251 bp, Glycine max
  Clone ID: 700959825H1
caaaaattcgatccgaatgtattagatctcaaatcatttctactgaaaactacagctatcgaattccctgcaattaacataagcataacccctttccaacctttctcctcttcagatcggatcagatcagatccaccgccatggatttcatgaaggtcttcgatcaaaccgttcgagaaataaagagagaggtgaatctgaaggtgctcaagattccggaaatcgaacagaaggtgctggatgctactgat

SEQ ID NO: 81519 - DNA, 248 bp, Glycine max
  Clone ID: 700959826H1
gtggatgatcatgaatcacaggacctttcagaggaggaaataaatgtgcatcacttgttgagattggctaggaaactttggctgcctgcttttttctttcttaccgtttgtcaaacttggacgactcaattacaaatattattcattaaacttactctattcctcctcagtacaaagcccaaccctttctctgtctatgtatttgttgataagttgtgccaacgatatatgcaccaagaaactcgatt

SEQ ID NO: 81520 - DNA, 249 bp, Glycine max
  Clone ID: 700959829H1
cattactgaaaacctttcactttgtttttttaatccggattgccaatttatgtatatctttttgattcaattaattctcatcttgatgattgtatgagctagattttgttggagattctggtcaattgcattcgaagcgacttgatcaattttttgaaaaaaaaaaaattggggatgtagtttgtattgaatattcacacacccaataaaacaaataaagagttccagtaacagaaccttttaggcttt

SEQ ID NO: 81521 - DNA, 250 bp, Glycine max
  Clone ID: 700959830H1
ttcagttccaaacaaaacttatcaaaatctcatatactgattcagttctatacataaccatcgaaatttactatcaaaccaaaaattctcaaaatctcttcacctctgtgatgaccatggaatacagaaccttagaactcaacatcatatccgcaaaggacatcaagaacgttaacctcttctccaagatggacgtatacgccgtcgttacgctctccggcgaccctctccaccctcagggcgccaccac

SEQ ID NO: 81522 - DNA, 251 bp, Glycine max
  Clone ID: 700959831H1
accatgttttgtttgccgggaacaaggagtccagagttttttgatcaacaaagtataggtccatcattatctttctggtttcgtaacaagttccctgtcatggatctctgttttgttattggaccaatgggtaaggactctattttgtttagacccatcatgaccatcaatggcaacacaatggagacacagttaactgaaaagaggtgttgtttagacttccgagcattagattatcatatacttatcat

SEQ ID NO: 81523 - DNA, 255 bp, Glycine max
  Clone ID: 700959832H1
gctttgataaccctcccttcaattgggtcacacgtgtttacaataaccccgtcactgtccctcatgcatgttgctatgtcgtggaatagtttataactctgactcgcacggtcgcgcacttctttcggaagatctaaaaggtcaatttttggtaaccctgggatgcttaaatgcgtgttgaggtctttgatggattttgttgtggtttcgtgaatgactgggagttggagaaaggttgcaagagatgaagcgccg

SEQ ID NO: 81524 - DNA, 257 bp, Glycine max
  Clone ID: 700959833H1
agcctctgcatctcgaacctctacccactgatgaggttcatacagtgggacaagcccccaatcaattcattcagtggccaagaagacttgtgaagtctatgtcagccaaggctgttgtcgaatctagcaaagatgctccacacaaaaggttggaacctcaacttgatccgctcgaacgcttgttgataatagtaagcaaaattaggaaggatcatgtacaactaccttgggatccggatgtactaagcaagccctct

SEQ ID NO: 81525 - DNA, 253 bp, Glycine max
  Clone ID: 700959834H1
aagaaattggtgttctttaatgtgaaagggttggaacggtttttgattttaaccctgcaaagagccttcctttgcggtttttcttcttgagaagaagaaggctctttgttgttgttgattttgaagaaggaaagaaggaaggaagaaaatgttgaggctatggatttcttatctgcaattggtggaactttttgtgagttcattggttcatatgctttatgggttttacatatttagctccgctgtggctggg

SEQ ID NO: 81526 - DNA, 248 bp, Glycine max
  Clone ID: 700959836H1
caccaaccaaacctcactctccctttctcccctgaccctctccctgccatggtcatgggagcctttggccacttcgaaccggtctccaaatgcagcaccgagaaccggtctaaccaaaccgtggcctcggacttggacggcaccctcctggtgtcccccagcgcatttccttactacatgctggcagccatcgaagccggcagcttcctccgtggccttgtcctccttgcctccgtccctttcgtgta

SEQ ID NO: 81527 - DNA, 247 bp, Glycine max
  Clone ID: 700959837H1
caagatcatcatctccatgaaaaccctaaccctagaggtggtcccactcttcttcctcctccttaccaccaaacagctcctcacatgtcagccacagcattgctgcagaaagcagcccaaatgggtgcaacgatgagcaaaaccggctccatgattaggacccaccaacagcaggctcacgtgtctgccaatgctgctttgaatttgtcctcacgtgaccaccagatgaaccccactccccatgact

SEQ ID NO: 81528 - DNA, 73 bp, Glycine max
  Clone ID: 700959838H1
cttcttttgtagtacctcatgagagtggtgcctgtcattggcatgctacatgagaggaaagtgttcaaacctg

SEQ ID NO: 81529 - DNA, 246 bp, Glycine max
  Clone ID: 700959839H1
ctgatccggagcgatgagtgagagtgagaagcagagggtaacggggaaggtgaagtggttcgatgaccagaagggttttggcttcataaccaccgacgacagcggcgaggaattcttcgtccaccagtcctccatccgatccgacggcttccgcagcctcgccctcggcgagtccgtcgagttccttattgactccgatcccgaaggccgcaccaaggccgtcgacgtcaccggccctgacgaatc

SEQ ID NO: 81530 - DNA, 249 bp, Glycine max
  Clone ID: 700959840H1
cggctcgagatgactagctctagcttgttcttctcctcaccacccctctttctcaatccccacccacctcgctctttcctccccttcagacctctcaaaccactcttcaacccctctcttctcctccgccctccctccaaatctcgccacaaccctttcctaacccgcgccgacgatgacgacggcgacggcggcggccccgaccactacgagatggacgaggacgaaatggaggagctcgacaacaag

SEQ ID NO: 81531 - DNA, 248 bp, Glycine max
  Clone ID: 700959841H1
aagaactgcttcagatgcagccattgcaatggccttcttgcgataagcaattactcatccaccgaaggagttttgtactgcaaggtgcactttgagcagcttttcaaggaaactggaacctaccccaagaaatcccagtcgtctggaaagcctccactcgagctgaatagagcaccaagcaagctttctgccttcttctctgggactcaagagaaatgttcaaaatgcaagaaaaccgtatatccatt

SEQ ID NO: 81532 - DNA, 243 bp, Glycine max
  Clone ID: 700959843H1
gaacagatgatcaatgtgcaaaacaagaactcctcatactttgtcgagtggatacctaacaatgtgaagtccagcgtgtgtgatatcccacctaagggtcttaaaatggcatccacttttattggtaactcgacctcaatccaggagatgttcaggagagtcagtgagcagttcacggccatgttcaggcgcaaggctttcttgcactggtacaccggggaaggaatggacgaaatggaattc

SEQ ID NO: 81533 - DNA, 248 bp, Glycine max
  Clone ID: 700959846H1
aaagagtacttgttcggaaaaattgacatgcagctcaagcttgtgcctggtaactctgctggaacagtaactgcctattatttatcttctctggggcctactcatgacgaaatagactttgagtttttgggtaacttgagtggtgatccttacactctccacacgaacgtattcccccaagggaaagggaacagagaacaacagttccatctatggttcgaccccaccaaggacttccacacatactc

SEQ ID NO: 81534 - DNA, 108 bp, Glycine max
  Clone ID: 700959848H1
taagattatttggtgaagaaaaagatgcataacactgctaaagcattcatgacagaagggaaggtttctcctgatccagtagcaattgatactcctggaggttttctt

SEQ ID NO: 81535 - DNA, 251 bp, Glycine max
  Clone ID: 700959849H1
accaaaaattgatgtagtagggttttgctttcttgatcttgcgttaaactatgaacctccagagtcccttgtaaaatggcttgaagaaggagacaaacctatttacattggatttggtagcctgcctgttcaagaaccaaaaaagatgacacaaataattgtagatgctttggagatcactggacagaggggcatcatcaataaaggatggggaggtcttgggaatttggcagaaccaaaggactctatat

SEQ ID NO: 81536 - DNA, 248 bp, Glycine max
  Clone ID: 700959850H1
gattggatcacaacagggcattgggccaaatctctgaaagactgaccgttcaggtttctgatgtaaagaatgtcattatctggggcaatcactcatcaacccagtatcctgatgttaatcatgcaactgttgcaacctcagctggggagaagcccgtccgtgagcttatagctgatgatgcctggttgaatggggaattcattactactgttcaacaacgtggcgctgcaattatcaaagctagaaag

SEQ ID NO: 81537 - DNA, 79 bp, Glycine max
  Clone ID: 700959851H1
cttcattccatttcctctttctctttccattgttctactttttcagtcccaccacgaatggcactgcatgatctaccct

SEQ ID NO: 81538 - DNA, 244 bp, Glycine max
  Clone ID: 700959853H1
cacttgcgttattagggttttagttagacagtggcggggcagtgatacagtgtgggcataaaattttcgaagttgaagcgagaacttgccatttcaagggttttatggttagggttttctcatattgcaaggacatgggtttcaaccttcaaccatatgggattcaatccatgctcaaggaaggccataagcacctttctggcctcgacgaagcggttctcaagaacatcgacgcttgcaaaca

SEQ ID NO: 81539 - DNA, 244 bp, Glycine max
  Clone ID: 700959856H1
ctacttctgccggcaacatgcgccggcagcttcacggcggttccgctctcagcctctgccgtcgccgcccctcgtctcccgcaaccatttctcgcagcgaattccttgccctcattccctctcaatttgactctttcttcttcctcatttactaactctatcgctcgtcaaccatggacgaagcttcccttcaccgcaagcgcttcttcgcaagtatctccggctttcactccctccaacgacg

SEQ ID NO: 81540 - DNA, 245 bp, Glycine max
  Clone ID: 700959857H1
cgtggccccaccatggtcgccaacactctccacgccgccgctattgctctgacggagagtgatgactgggattggttcattaatctcagcgcctccgattaccccctcgttacccaagacgatctgctgcacgcgttctcgcatttgccacgcgatcttaacttcattgatcataccagtgacattggctggaaagatcatcaacgggcgaggcctataattattgatccggggttgtatatgac

SEQ ID NO: 81541 - DNA, 242 bp, Glycine max
  Clone ID: 700959858H1
aaagtcctcttatgggaaatttttcactggagactcctatgtgatcttaaagacaactgcctcaaaaagtggtgctctgcgccatgacatccattactggcttggtaaagacaccagtcaggatgaagcgggtgctgcagctatcaagacagttgagctggatgcagctcttggaggacgtgctgttcagtatcgtgaagtacaaggccatgaaactgaaaagtttctgtcttatttcaaac

SEQ ID NO: 81542 - DNA, 243 bp, Glycine max
  Clone ID: 700959860H1
cttcaattcttcttctcatcatttcttttcacacaaaaaggtaccatggaagggagaatgggactgttgtttcttgttgtattaggtgctgcttgggcatgtgatgcaagggaactggctaactctgaaacttctgaactaagcataaaaccggatgtgtgtgcactttgtgaggaatatattaccaaggcacttgattatctacatgaaaacaagacttagacagagatcattagtatcctg

SEQ ID NO: 81543 - DNA, 243 bp, Glycine max
  Clone ID: 700959861H1
gttctagataagaatggaaggcgtcccttactccaattactacatcctaatagttcacgttatttcagtcctgatgatcttgcttctctgaatttatctataccttctctgtctctcaaggatcagtcagaagcaagctctctgacagaaacttcgaaggtttcacttggtgacaaggaatccaaggatgacatagagttggcattgaacgaagtaataaagataaaacttctgtggatgatt

SEQ ID NO: 81544 - DNA, 249 bp, Glycine max
  Clone ID: 700959863H1
agaagaagaagaagagaaggtggtaccgccttcaattctctttttctctctccatttctcatcctcatcatcttattattcctcttccatctctattctccataacacccaccacaccacttgtgaaacccctcattaatatcacacactgacatgtatctctgagctccaatccaatacaagaccacaccttgtcgtgtcggacgaaccttggtgtctgttttttttttttttttccataatttcccc

SEQ ID NO: 81545 - DNA, 251 bp, Glycine max
  Clone ID: 700959864H1
aaatgatgataatgaatcctcaatgtttccttcttccaagggatttagatatatactaaatgagcagcaggaactgtctcaacagcaccttaatggcaatacttttgctgataaattaaggttttccaattcaacctacaggaatgagccatcttcagcaagcattttgaactcatcagcaaagccttgggataggcaaatcaggaatactgatttgcatgttagcagtggtcaagaggcacttgtttatg

SEQ ID NO: 81546 - DNA, 246 bp, Glycine max
  Clone ID: 700959866H1
caacaagggatttccatggaagtctcaaaagaagaagctcgagtggcacccgcaccggccctagtggcgatgctgccatcccctggcatgggccacctaatcccaatgatcgagttcgcaaagcgagtggtgtgctaccataacctggcggtgagcttcgtgatccccactgacggcccaccttcaaaagcccaaaaggcagttctggaggcccttccggactcaatttcccacaccttcctccct

SEQ ID NO: 81547 - DNA, 246 bp, Glycine max
  Clone ID: 700959867H1
ccttcttgtgctcatatcaaacccagaagaatttctacctcaattcgggcaatgggttcctccgcttcttcccactcccagtcacaatatgcagacagcgttgaatctgaagcaggagctgatactattgactataaatctttaaccgatgaagagtggaagaagcggctcacaaatgaacagttctatattactcgtcagaagggaactgaaagagctttcactggggagtactggaatactaaa

SEQ ID NO: 81548 - DNA, 243 bp, Glycine max
  Clone ID: 700959869H1
gaattatcgtgttttgatcagaatctgaggagaaaatcacataatttcgaatttgagttttcgtgtagaaaaaggaagagaagaaaatggaatcggaggatttggtcaaacaggaattggaggaattgcagaaacaattggggaagaagcaaaagtttgaagcttctgtttcgtctcttaaaacccttctccaacgcacttacccatcagcttccccggcgcttcgtaaatccttttattcag

SEQ ID NO: 81549 - DNA, 222 bp, Glycine max
  Clone ID: 700959871H1
cttggcaatcgttcttcgtatatatatcacatgtaatatgaggttccagcagtgcagcctccaagacttggtgagtgtcactgctgaagagagaaccacgcagaactgacgcaatgggaagcacaagtttgcttcatctattacttggtgttgttttggctctgctgagtgtgtctcttgtggaaggagaagatgcatacaaatactacacgtggactgtga

SEQ ID NO: 81550 - DNA, 241 bp, Glycine max
  Clone ID: 700959875H1
cggctcgagctattccctatatccgcttccaatttgttaattttcattctgatacgattctgggtatcgccaaatttctcgattttccgcatattttggatttagaggggtttgaagaaataaccgaactttggaaggaaaaacacaaccccatatgatgcaacgcttggttgatcatgttcttgctgttactaaagagtcattgaaggcaattacttatgagtccttaaatattgtgagg

SEQ ID NO: 81551 - DNA, 245 bp, Glycine max
  Clone ID: 700959879H1
gtaggaagggttgcacgtacatctgtcggcacccggatttggcgttgtaaaaccgcatccttgtttgtctgcagaagcatgggctcataacagattcaagaataataatacacgagaaagacaaatctatgcatgatgatctaatttcttatttccctctcctctgttcctttctctgcatgcatacacagcagcagcatttattactaacaacaatgactatcatatacgcacaatgaagcatt

SEQ ID NO: 81552 - DNA, 265 bp, Glycine max
  unsure (1)..(265): unsure at all n locations
  Clone ID: 700959881H1
cggaattcggctcgaggcgaagagtactgatcaaaagccaaacacaccaagatcaaaacactctgcaacagaacagcggagaaggagcaaaattaatgacagattccaaatgctaagagagcttattccacacagtgaccaaacacagggacaaagcatcttttttattggaggtcgttgagtatattcattttttacaagagaaggtgcacaagtatgaaggttcatttcaagggtggagntaacgagccagaaaaattgatgc

SEQ ID NO: 81553 - DNA, 246 bp, Glycine max
  Clone ID: 700959882H1
attggtataggcttgccaaggtcttgttgattgagcgttaagtgctttaactaatcaatcccaagaccttggtttaccttgccacacaaaaaaatatataaaaaggcaaaataataataaaaaaaagagaaggcttggagccaagaaaataaactcaaagcccaagctgatgaagcacaaaaaattgctcttgaggcctatgtcccagtgccagaagatgtcaccgacgaactcaatttccatgtt

SEQ ID NO: 81554 - DNA, 241 bp, Glycine max
  Clone ID: 700959883H1
atattctttcatcttcttgggttagggttctacacttgcaatctcctttcacacccacccacccttcaaccatttcaattccttccctcacccaaaccgcactatcgttcttcgacacggtcctgtttattaagcggtttggataaaagaatagaagcgtaaaatggccttcgtagcacatcaacctcagggtttgtttgtgacatcttcctcgaggcgtttgccatggagcaaaaggctg

SEQ ID NO: 81555 - DNA, 240 bp, Glycine max
  Clone ID: 700959884H1
acaagtttgtacaacaacaacaacaatttctcttcacaccatcttcctaatactcaaaatcacaaacacacccacaaatttttatttcccagtcttgatttggttcactacttcacttaagtcattagtccatagtccatagagtcattattattgttattgttattttattatttgttacttgttccttgatagtcactattattgttgcataaaatagagcaacatgaagaacagaac

SEQ ID NO: 81556 - DNA, 240 bp, Glycine max
  Clone ID: 700959885H1
ctcacgcatttcctcgtttttttcttcccttttctctttctccggcgacgatctcagattccggccactcctctcgccggcgagcccttactcttccctcctccgtcgagccctctccgattcgaatcgttcccagcctcgcaccaccatgaatcccgaatacgattatttgttcaagcttttgctgattggagattctggtgtaggcaagtcatgtcttctcctgaggtttgctgatga

SEQ ID NO: 81557 - DNA, 81 bp, Glycine max
  Clone ID: 700959886H1
tgaactttgcttatttattctctgagtgagactggtggcaacaatcaagaatggaagaagggaattgggttctcttcctaa

SEQ ID NO: 81558 - DNA, 239 bp, Glycine max
  Clone ID: 700959888H1
tgccaatcaggcatttgtgaatctagttcttactctctgtgatccgggtgattctgtggttatgtttgctccttactacttcaatgcgtacatgtccttccagatgactggcattaccaatattctagttggtcctggtagctcagacacactccatcctgatgcagattggttggaaagaatattatcagaaaataaaccggctccaaagcttgttactgttgtaaatccaggcaatc

SEQ ID NO: 81559 - DNA, 238 bp, Glycine max
  Clone ID: 700959890H1
ctaaactcatattccaaaacgcagagccaaaccatgtcgttccccttcaaccactctcacgccacccacacccaccaccgcaggacgacgacgacgacgaacgacccaccgtttacactccgccgggaaactccttcagcaacccgccacctccgttctacggcgtccctcaaccaccaccccctcagccggagacccacgtgttccattcgcctcacgtgacaccaggacacgtgtc

SEQ ID NO: 81560 - DNA, 241 bp, Glycine max
  Clone ID: 700959891H1
ctaaactcatattccaaaacgcagagccaaaccatgtcgttccccttcaaccactctcacgccacccacacccaccaccgcagggacgacgacgacgacgaacgacccaccgtttaccctccgccgggaaactccttcagcaacccgccacctccgttctacggcgtccctcaaccaccaccccctcagccggagacccacgtgttccattccgctcacgtgacaccaggacacgtgtccc

SEQ ID NO: 81561 - DNA, 239 bp, Glycine max
  Clone ID: 700959892H1
ttctctctctctctctcgtgttctgagctgctagaagcaatggagaggaaaagaagccatgcttctttcaccatgtttgcaatgcttgttggattgctctctcagagccttgtcattcctgtaatatccaccactgttgcagatcagaagaactactacaccccagatccacatgatggaagtccccccacaggctcacacaatagtagtcctccatctcatggccatgggagcactcc

SEQ ID NO: 81562 - DNA, 240 bp, Glycine max
  Clone ID: 700959893H1
ctggacaacacatatttccggacacggagagatcattcagttgggtgttatccatcaatcaatcataacagttgttgttgttgttgtggttgttgttgttgttggggatgggatcgtgcctctcggtgtcgggggcatcggcctccgtagatgcttttgatgaatcatcttccaattccagttccagaactgcctctgattataacatggaaatgcggctccacagagttcctggcagat

SEQ ID NO: 81563 - DNA, 244 bp, Glycine max
  Clone ID: 700959895H1
gaagaattcttcccacttcggctggagtattatgagagaagaaagaaacatatactgaacaaccttgaacaacttctgttgatattggacaacaaagttaggtttatattaggggttgtgaatggagaaattgtcgtgagcaacaggaaaaaggctgaattgttgattgagctgcagcagaaaggttttactcccatgccaaggaaaggtaaatctgcagaaccccaagttgctggggcaaatg

SEQ ID NO: 81564 - DNA, 266 bp, Glycine max
  Clone ID: 700959901H1
gaatatgccaattgatattgatttacaagcacctgtaagtccagaaaacaaggagtgttctccacccagaggagaatctgatgaaaaccagcttgagatgctcttgcaattggcagggcaggagcaggagcaggaacaggaacaggagcaggatctggaagaacaagaagaccaaaccggaattgcagctgaggctttggtttccatatcaaaaactgtggcctatgatgacctccaaatgacaacttgtccatcatctgaatctt

SEQ ID NO: 81565 - DNA, 264 bp, Glycine max
  Clone ID: 700959902H1
gtggcacaccagtcaaattcagcatacctgggataagccctggaatcatctttacaggtactccacttgaaatcgagttcgcagagaaaccttattgtgctgaatcctccaaatgggtggcgtttgtggcacaatgaaatccaaaaggcatgtgtgggtattggtggtcctgaaggtcatcctggtcaacaaacatttagtggcacatttagcattcagaaatataaatttggatacaaacttgtgttctgtatcactggctca

SEQ ID NO: 81566 - DNA, 230 bp, Glycine max
  Clone ID: 700959903H1
ggaaaacgtggagtagatgctagacagaatagagaagctggtggcaagttctcagaccgaaggaagaggcgtaaccctcttgagagcatacaacaataatggaagaggacacccacacaagatccccccaagccgagggcatggtggaacacagtgtcatgagcattgtggaacgtcaggctacaagtcgagtttacactgccgatgcgtattaacgacgaggacgagca

SEQ ID NO: 81567 - DNA, 261 bp, Glycine max
  Clone ID: 700959904H1
gcaaaaaaaaatctcaaaataaaacaaccaaaccacacacctcacaccctcttcaacatcctcagcaagaacaagaagaagaagaagaaacaatgtcttgctccaatctgacaatgttggtgtcctcaaaaccttccctttccgacccctcgaacctctccttccgctctgtcctgaacccttttcagctccctacacaaaacccagcttcatgcaccccttcacgctcctcaagcacccaaattcagtgtggtctgagag

SEQ ID NO: 81568 - DNA, 259 bp, Glycine max
  Clone ID: 700959905H1
tgatgttggaacggctgctcttatgggcctctttaactcaattgcttatggtctcaattcttctgttcgtagagcaatttgtgaaagactggacaagttctggcctgagagattaaacagatggctccctaacagtttaaagtacaagaacctacagcaagaaagtgaactagttttgttcaaaactgaagatcaataacagtgaatggacaaattgtgatcctccatgccaagtgacatttcttattctagtttacta

SEQ ID NO: 81569 - DNA, 258 bp, Glycine max
  Clone ID: 700959906H1
ggcacccagctcatttaaggtgcttcaacagcatcatctgcatcaatatcatcgtccttaattgtggagacacaacatcatggattctcctttgttgtcacaagaccatgttttgcccaacaaacacacatggaagatgagcctttgtgctatcgtggctatcacaattgttggactagtagtcagaggcaacactagctatggaatactgtccggagcagaaaaatataatgatggaatcgcaaccaatcagggaga

SEQ ID NO: 81570 - DNA, 258 bp, Glycine max
  Clone ID: 700959907H1
gaaagacgaaaggtttcatcgatctctgttgaacttcaaacactgaggaagaagagccacaaaattcttccttctgcagggtgcaaggtactgcttcaatgggaaattgctggggtcctccacctcacaaccccaccccaacaactaccggtaaccttagtagtagtacaggtacaacggggacatctcaggcgatcagcagcatcagctatactactactacgactactaattcctctggaagtgggagcagctcca

SEQ ID NO: 81571 - DNA, 255 bp, Glycine max
  Clone ID: 700959908H1
ccacgttcaagctcttcttgtgcagcttgcaagttcttgaagagaaggtgcatacccaattgcatatttgcaccttactttcgctctgacgagtgcaagaaattcgccaaggtgcacaaggtgttcggggcaagcaatgtgagcaagatcctcgttgaggttcctgaggaacagagagaggatacggtgaattcgcttgcttatgaggcggaagcacggcttcgggacccggtttatggatgcattggtgccata

SEQ ID NO: 81572 - DNA, 258 bp, Glycine max
  Clone ID: 700959909H1
ctctgtggacatggtgctatcaccaccctctgctattggccaatgtccttttcttcttcaatgtcaatttcctcttctggctcatcggcctaatccaatccagccactggatgattgacccgtattggacagtgatacctgtgatgcttgttcattactgttcaactcaccctttggcacagtatcagtggtggaggtcgaggatcgtaacgttgttgacttgggcgtggagtgttaggctgatccacaactacttca

SEQ ID NO: 81573 - DNA, 249 bp, Glycine max
  Clone ID: 700959911H1
tacactcattaattgcaagaatggcacttcgttgcttggtgatgtccctttctgttctcttcactcttggtcttgcgagagaaagccatgccagaaacgaagatttttggcatgctgtttggccaaacactcccattccaagttcattgcaagaacttctaaagcctggccctgcaagtattgaaatcgatgatcaccctatgtaaattgaagaaacacagtacccgaaaaccttcttctataaagaag

SEQ ID NO: 81574 - DNA, 249 bp, Glycine max
  Clone ID: 700959912H1
attgtgtttgtgagtgtgctataaatccttcgtggtttttggtgacactttgggttctatagtgagtgcaaggtaacccactttggattggaaggttgtcgcaatggggaaggttgtgttgttgtttctttgcatggtgttggtggtggtgtctttggcttgtgctgattcaattgagaagcttgaggttcagaagcacttgaagaacttgaatagacctcctgttaggtccatcaagagtcctgatgg

SEQ ID NO: 81575 - DNA, 251 bp, Glycine max
  Clone ID: 700959913H1
gaatagtcagcgatggcacagaagagattcatcatcgaggtcgagaaggcgaaggaggcgagcgaaggaaggccttcgagaggacctgtctatcgtagcctcttcgccaaggatggattccctgctcctatccaaggtctcaatagttgctgggacgtttttcgattgtctgttgagaaatatccatcaaatccaatgcttggtcgccgggaaattgtggatgggaagccgggcaagtacaagtggctaac

SEQ ID NO: 81576 - DNA, 261 bp, Glycine max
  Clone ID: 700959915H1
cggtgattcatttgggggaggaggatggaaagacagtgaataactttctggaaatggataggggggaaggagtgaatgatggtttttctggacctggaccaaatgattcacttattcctggtcttattgatgatgtagccttgaattgtcttgcttgggttagtggatctgattatgccgtgctatcgtgtattaataaaaggttcaataaactgatcaatagtgggtatctatatgggttgaggaaacaattgggggctg

SEQ ID NO: 81577 - DNA, 269 bp, Glycine max
  Clone ID: 700959916H1
aagttaatgccagagacagccaattcttcagcaaagtcacccctctcaacaacaacattaaagagactgaggttcccaaaaatgaaggccaagtaaacaagccagaacaacaaccagttttcaccccagaaacagaaaacagctatggtctatatggtcatgagactggtctgcaccctcccaccactacaataactaatgctgctccctacaccaccgccaccacctacaagccatacaaaactaccacagctgaagaggacactgcc

SEQ ID NO: 81578 - DNA, 257 bp, Glycine max
  Clone ID: 700959917H1
cttttcccccaggtaagatgcctaatatttacaacgctctgatagttaagggtcgagatactgttggtcaacaaattaatgtgacttgtgaagtacagcaattattaggaaataatcgaattagagctgtagctatgagtgcgacagaaggtctaatgagaggaatggaagtgattgacacaggagctgccctaagtgttccagtaggtggagcaactctaggacgaattttcaacgtgcttggagagcccactgat

SEQ ID NO: 81579 - DNA, 258 bp, Glycine max
  Clone ID: 700959918H1
ataatttcaaaagtctagttcaattgcaggggatagagaagaacctgaacagaaattgtaccagagcactgtactttccagacttgtgcttctttccacaatatgcgttgagatacatatcaacaccatattttatcttgaactctgcctatgatgtattccagcagttcactcatatattggtgccaccctctgctgatatgcgcggacactggaaacactgcaaggcaaacctggcagagtgtacaacagaacaaa

SEQ ID NO: 81580 - DNA, 256 bp, Glycine max
  Clone ID: 700959919H1
ctctttgacacctaaaatccttaaatgacaccacttttgtcttagcctcgtcttctcaacactctctctgctctctcaggttgcctgcccttgctatttggagaacacaaatcaggggtttcctttctagttaaacatgataaaacggtttccaagtaggaacaataggtccaaaggcatcaaggtaaagcatgttctgcaaattgttctgttgcttggtgtttgcttctggttgatctaccaggttaagcacaat

SEQ ID NO: 81581 - DNA, 106 bp, Glycine max
  Clone ID: 700959920H1
caatttccccccttcgttcttcagctcatgacgacgtcgttcggaggaccagccaccacctcagcgccgctcaaggacaccaagcttcagatcccaagcttccatt

SEQ ID NO: 81582 - DNA, 248 bp, Glycine max
  Clone ID: 700959921H1
attttatacctatcctcttgtatagattagataaccacgggtttatcttacaatagttgtaaagtatctatatattatagcatgtatctcagaacagttctttgtgtgataaaaaaaaaaaaaaaaaaaaaaaaaaaaaaaaaaaaaaaaaaagggggccccactaaaattggcctttccccccgggatttattttccggagggaacacttagagctacaatatttccccaaaggggaaccatttaac

SEQ ID NO: 81583 - DNA, 254 bp, Glycine max
  Clone ID: 700959922H1
agggactagggattgtttcacagaacacctctgaacttcaaatcccttttttttgtttgatattaatctatggtaggatatagaatctgaagctgaaaaaaggggttaattgttttgcagaatcagtataattgtagagagcgagatggatcactatggttcttctggaggaagctggacaatgatcccaacccacaattcccaatcccaatcgaaccaggaccctaacctctttctgcaacaacaacaacatt

SEQ ID NO: 81584 - DNA, 256 bp, Glycine max
  Clone ID: 700959923H1
ctcaaacttgcaagggatattaactaccagtttccacagcttgccggtgttaatctatctgctttgattccgtctgctagtgatgatgcaatcagccttattacatcactttgctcctgggatccctgcaagaggccaacagcttcagaggctcttcaacatcctttcttccagagttgcttttacattcctccatcccttcgcaacagagcagtagcaagaactcctccacctgctggaaccagaggagcactgg

SEQ ID NO: 81585 - DNA, 255 bp, Glycine max
  Clone ID: 700959924H1
aacggcgtctacctccgtaacggcgccaacccattgttcaagccaaaagcgggccaccacctcttcgacggcgacggaatggtccacgccgttaaattcaatgacggcaccgccagctacgcgtgccgcttcaccgaaacgcagcgtctcatgcaggagcgcaaattgggaaaacctgtgtttcccaaggcaatcggcgaactccacggccattccggcatcgcgaggttgatgctgttctacgcaagaggcttg

SEQ ID NO: 81586 - DNA, 247 bp, Glycine max
  Clone ID: 700959925H1
gagtaaccaaaaggagagtgcaataactcgttgtacattcctagtgtgtgggagagacatggctaagatgtgtgttttggtgttggttcttgctctggctgtggccacaagtgccagaaacgttcccaaccccaaggatgctggtcttaaggaccagaagaacttcatcagctatggtggagttggtggttattccgggattgggaacaatggactgccttttggaggagctggtgccggaataggt

SEQ ID NO: 81587 - DNA, 113 bp, Glycine max
  Clone ID: 700959926H1
ttcggcttcgagccttatgctggcaccttggaggaatggacagtggttcaacctgctcaaattgtgactgcagttgagcaactctgcaagtgcttgctacaagacactagcaa

SEQ ID NO: 81588 - DNA, 251 bp, Glycine max
  Clone ID: 700959927H1
ctggtagttgatcctctggacaagggaatcccgtgggtttggctttgtgacaatggagactcttgaggaggctgaacgatgtgtaaagtatctgaatcgctctgtacttgaagggcgtgtcatcacggtggagaaggtataatacttacctagcaatgccctattttgtggggcctggacttttattagctatgatttttttattcaactccaatgcatggaaattatatgggggatttcttctttagttc

SEQ ID NO: 81589 - DNA, 251 bp, Glycine max
  Clone ID: 700959928H1
tggggactagacagtagaaacacaaagagaagacgagtcctcgagattcctaaaccaactttgcaatcgcacctcgaatcaatcgacactcagcggaaaccctagaaagtaataataataataataacaatagaatgcgaatttattagagattgcaaaaggtgggaagaggaatggcgaacattcggtggcaatggcgaagaagcggtggctgataatgttggcggcattcctgtccgtctcaacagtga

SEQ ID NO: 81590 - DNA, 262 bp, Glycine max
  Clone ID: 700959931H1
atttaggttggagagaagaaaagatgccgttgaaggtgttagaggcgacagtgtcgagtttcgatgtggtttttgagaagttccgatcagaggctccacaaaacaaggccaatctcatcctcttcttggcggacaatgacccggctacctctctcagctggtgccctgattgtgtgagagcagaacctgtgatatacaagaagctggaggcttcacctgatgacattgcactattgagagcttatgttggagatagaccaac

SEQ ID NO: 81591 - DNA, 279 bp, Glycine max
  Clone ID: 700959932H1
ttcggctcgagcattttctacattgcaacaccgcgatatgaacgatgcaaaatagtttcagatacgtcgcgttgattgattgatatgaagtggttgactttctggaactgcatatctatcctcgtgttgtcttttgctttcttcttcttctattgtcacacatacacatctactcctttcctcatggctgagcaatcttccaagtccatttacgatttcacagtcaaggttcgtttttttgcttctaaaattgttgcctgctcatacccaactgttgtt

SEQ ID NO: 81592 - DNA, 256 bp, Glycine max
  Clone ID: 700959934H1
attattttctgcgtcaattttgctgaaaaccttaagtgggtatcctgaaaacactagattttcgattcgtttggtaagcggatttttaggtttgattattacgtttttctgttcttgttggatatggaggtttcggtgattggaagctctcaagcgaatctgggagcgtcggaattggcatctagggaagttggattttgcaatcttaagaacaatttaagggctttgaatgatagagttagttttggtaggaata

SEQ ID NO: 81593 - DNA, 253 bp, Glycine max
  Clone ID: 700959935H1
acgagattgcaaaatgaagttcaacattgcaaatcccaccactgggtgccagaagaagctggaaatcgatgacgacctgaagcttcgggcattttgggacaagaggatctcccaggaggtccttggtgacgccctgggtgaggagtttaaaggatatgttttcaaaatcactggtgggtgtgacaaacaaggattcccaatgaagcagggagtgttgacccctggtcgtgttcgactcttgctccatagagga

SEQ ID NO: 81594 - DNA, 255 bp, Glycine max
  Clone ID: 700959936H1
gaaacggggaatcattgtctgcgtctgtaaattgtaaattgcatcatccctgaagctgaacctcaaaaccctagctgtccgcctgtctgcaacggcgtcgttatgatcagttgagaatccaaaggaatcgagtcgaatcatctgaccggcgacagttatgtacagagagcgaggaggcgtcggatccaaatcggaggtaacttccgttgatcggaagcgaatcaacgacgtcctcgataaacagcttgaacgttc

SEQ ID NO: 81595 - DNA, 254 bp, Glycine max
  Clone ID: 700959937H1
gtgaggacacgacaatcaagaggtggaggatttcagactccaaatgcttggaatcaatccacgcccacgacgacgccgtgaacgccgtcgtgtgcggggacaggggcgtgatattatccggctcggcggacggcaccgtcaaagtgtagcagcgggagcccgaagggcaaggcctgacgcacgtgccgatgaagactctgctgaagcaggagtgcgcggtgacagcgctggcgatggacgcggcggaggggtcc

SEQ ID NO: 81596 - DNA, 254 bp, Glycine max
  Clone ID: 700959938H1
cctttctagtttctactatctgcttcttcttcttcaattagggttttccccttctccgagatcagcgccaacatcatgaacatgaatatcttcaagaagaaaacctcacccaaagaggctctgcggtcaagtaagagggaaatggctgttgcaaccagaggaattgaaagagagatagcatcacttcagatggaggaaaaaaaattggtggcagagattaaaagagaagcaaaaacaggaaatgaggctgccac

SEQ ID NO: 81597 - DNA, 249 bp, Glycine max
  Clone ID: 700959939H1
ctggttatttatttatcctaaacccaggctggaagaaacaagctaggtttaggataaataaataaccaggctttgagtaacatgatgatcatttattatgtttattaattgttgcagaagataggagtcgactgagtgtagctttaatctagctagtttgatttggcttgtagtgcctctttgtgttagcctttgtatgggatgtaaaacagtgtcctcttgaaggacagtaaaaaaatagttgttctc

SEQ ID NO: 81598 - DNA, 255 bp, Glycine max
  Clone ID: 700959942H1
ctttctggctgtgttaatatgcgtttcagcactgtcactgagtccttctgttgcgggggaagggcaaaataatggccttgttatgaacttctacaaggaatcatgccctcaggctgaagacatcatcacagaacaagtcaagcttctctacaagcgccacaagaacactgctttctcctggctcaggaacatcttccatgactgtgctgttcagagttgtgatgcttcactgttgctggactccacaagaaggag

SEQ ID NO: 81599 - DNA, 257 bp, Glycine max
  Clone ID: 700959944H1
acagttcctataattttttttctccattagattaccaagctctgcaactttgcttctcaacatggagtatcgtctcctacccatttttactttactcaatattgcactggtggcaacccatgctgctttaccccctgaagtttactggaagtcggtgcttcctactacgccaatgccaaaagccatcactgatatcctttactctgattgggtggaagagaaaagcagctcagtgcatgttggaggtggaggcgtga

SEQ ID NO: 81600 - DNA, 260 bp, Glycine max
  Clone ID: 700959945H1
ctgcgtccatggagttttggggtgttgaggtgaaaagtggagaatctctcaaggttgatccgggagatgacaagattatccacctttcaaatgcatgcctgggggatgtcactaaggataaagaaggtctaccagtagccctgtatgtcaagtttggtaaccaaaagcttgtacttggaacgcgttcttctgaagcttttcctcagatatcttatgatttggtatttgagaaggaatttgagctatcccataactggaaa

SEQ ID NO: 81601 - DNA, 256 bp, Glycine max
  Clone ID: 700959946H1
gccgtaggttcaggcttggggcaagagttgtggacaactttgatggtgttagaataagagaagcaaagacagaatcattcattgtcagtgatcacagaggagaattgtacaagaagcaccatcctcctggtctgtctgatgaagtttggagattggaaaaaataggcaaggatggagctttccacaagcgcttgagtcgggaaaagatcgttactgttagagagtttctcacacttctgaatctggatccagcaaa

SEQ ID NO: 81602 - DNA, 250 bp, Glycine max
  Clone ID: 700959947H1
actggttatttatttatcctaaacccaggctggaagaaacaagctaggtttaggataaataaataaccaggctttgagtaacatgatgatcatttattatgtttattaattgttgcagaagataggagtagtctgagtgtagctttaatctagctagtttgatttggcttgtagtgcctctttgtgttagcctttgtatgggatgtaaaacagtgtcctcttgaaggaaagaaaaaaaatagttgttctc

SEQ ID NO: 81603 - DNA, 258 bp, Glycine max
  Clone ID: 700959949H1
cacaattttcagttccatgtcttcccatgattttcaccctttttctctctctcactttctgtggacttttctgtggtttccttttcagtgaaataaaaaaaaaaccactctggcttattactgtctatatagattcttctgaatccagttctttctaaaccaaaccaaaaaaacattccctctccaaccaagttttgttttttttttttttccatgtaaaatttaaaatcgaaaccgcaatttaaacccttggtgttt

SEQ ID NO: 81604 - DNA, 254 bp, Glycine max
  Clone ID: 700959950H1
attcttttctacaattattgtaatctacccaatattttagtgtttcgacatattccccatcaattcaataacttgccgtgtaaattgatccattctaaacaatatctcccttcttagccaaaaagatcaaagtttcgttatttatagccaaaggctttctgggtcgttgtgagtcttgtgtttgagagattaagacctttttgcattgcaaatggctgctgcaactgctggagttgttggtggaaatggttcgt

SEQ ID NO: 81605 - DNA, 253 bp, Glycine max
  Clone ID: 700959951H1
caaggtcactgccgttttgcaacaagcttctagccatggcttaactgttgctagaacttgggctttcagtgatggaggttatagagcccttcaggtttctcctggttcctacgacgagaaagtattcaggggattggactttgtagtatcagaagcgggaaaatatggggtgcgtttgatactgagcttggtgaacaactggaaagattttggtggcaaaaatcagtacgtacagtgggtgaaggaacatgga

SEQ ID NO: 81606 - DNA, 251 bp, Glycine max
  Clone ID: 700959953H1
ctttaaagtctggttctgcagttggaccttggaactacaccaatgctgaatcgttaatacgatacacagtcagaaagaagtacaccattcatggttgggaacttggtaatgaattgtgtggaaatggaataggagcaagtgttgcagcagatcaatatgcttttgatgtaggtgctttaagaaacatagttgaaaatgcatatagagggtttgaacataataagccactagtcattgcacctggaggcttc

SEQ ID NO: 81607 - DNA, 251 bp, Glycine max
  Clone ID: 700959954H1
tggaagattaatctccctttcattttctctgcatctgtactctcctgaatgccgtccttagaggaggagctcttcccttcaaccccaggcaagttcaagatcgagcgggcccaccacatgaaccgccagctctaccgctgcttcgcctccaccagcaccatgttcctgtgggccctctctttaatcgccctcaccgcttcatatctcagcttccaaggcttcgttgattccggcagccgctacctctccgc

SEQ ID NO: 81608 - DNA, 251 bp, Glycine max
  Clone ID: 700959955H1
ggttttcaggaggaattgagatttatctttcagtgcttaccagaaaatcgacaaaacctgttcttttctgcaacaactacaagtaatctgcaaaagttgcgtgggcgttaccaagataagatgtatgtctatgaggcttatgaaggctttaaaacagttgaaacacttaagcaacaggctatattcatccctaaaaaggtgaaggatgtatatttgatgcatattttggataaaatggaagatatgggaat

SEQ ID NO: 81609 - DNA, 248 bp, Glycine max
  Clone ID: 700959956H1
ctggaattgaggtctattttgatatgatgagaagctttcggacagagtttgatgacctgtttgcagaaggtttgatttctgctgtggaggttggacttggagcatctggagagctaaaatatccttctttctcagaaagaatgggatggaggtatcctggtatcggtgagtttcagtgctatgataaatacctgcagcatagtctgcgcagagcagccaaattacgtggtcactctttctgggctaga

SEQ ID NO: 81610 - DNA, 255 bp, Glycine max
  Clone ID: 700959957H1
cagcagttgtcaaggcagatgcaaaaaccatccggtttagagaaaaagtcttaaagaagggtgggatctggaaagatatttatggaactgatgaaaagaaggttgctgacatggttagacaagatcaagttgatattttaatagaacttactggtcacactgcaaacaataagctgggaatgctggcatgccgacctgctccagttcaggtgacttggattggttatcccaatacaacaggattgcctacaattg

SEQ ID NO: 81611 - DNA, 256 bp, Glycine max
  Clone ID: 700959958H1
atggaattctgttggtcaacaaatgtcaccaaatatggttgcgtgcattgcagtagaggcaatatcaattcttgagaagctccacttgaaagggtttgtgcatggagatgtgaaacctgaaaactttttgcttggtcaacctggatcagctgaagataagaagttatatcttattgatcttggtctggcttctagatggaaggatgcatcatctggtctacatgttgattatgatcagagacctgatatattcagg

SEQ ID NO: 81612 - DNA, 255 bp, Glycine max
  Clone ID: 700959959H1
gcacaccacacaacataaaaaacaaaaagaacaactgttactcacacacgccatgggtaaatgaaaagtttttgagactcagcagttaaaagagaaaagggattcagcgaagatgacatcggttggtgtggcaccaacttcgggtttgagagaagccagtgggcatggagcagcagctgcggatagattgccagaggagatgaacgatatgaaaattagggatgatagagaaatggaagccacagttgttgatgg

SEQ ID NO: 81613 - DNA, 258 bp, Glycine max
  Clone ID: 700959960H1
atttttcagtttctcagtttcttattcgttaatcgttagatctcatcttacactcaccggcgagtccatctcgcgccaccgtcgactcagctccggccatcgccgttggttccctcactttctcactcttcttcttcttcttcttcttcttcttcttcttcttcttctcagcggaaatatgccttctcagaaggttgaaacgggtcatcaagacacggtccatgatgttgcaatggattactatggtaagaggctggc

SEQ ID NO: 81614 - DNA, 253 bp, Glycine max
  Clone ID: 700959961H1
gaaggcacaaaaaatggcactgctttctttaagtgccatggacatgagcaatttgagatgacgggtttggatcctgagtataataggttgttcaatgagggcatggtgtgcactgctagggttgtgtccaaggctgtgatcactggctacaaagatgggttcaaccagattaagtccttggttgatgttggaggtggcattggagggtctctttcggagattgttagggcttatcctcatatcaatgccatca

SEQ ID NO: 81615 - DNA, 100 bp, Glycine max
  Clone ID: 700959962H1
gccgcccttttataatttttatttttttaatatctttaataaagataacggaaaaaaacaacaaagggaaacccccccccctctcccccttcgggggaaa

SEQ ID NO: 81616 - DNA, 291 bp, Glycine max
  Clone ID: 700959963H1
tacgtaaactcaggctcggactccagctcgagcactttttttcttccaacgctcctcctcctactcatagccttcgccacctctgtctccggccgccgtgacctcgtcggagactttctccggctgacctccgaaactgataacgacgacaacttcaagggcacccggtgggccgtcctcctcgccggttccaatggttactggaattacagacatcaggctgatgtttgtcacgcctatcaaatattgaggaaaggtggtctgaaagaagaaaatattattgtttttatg

SEQ ID NO: 81617 - DNA, 265 bp, Glycine max
  Clone ID: 700959964H1
taaaattcctaatcagaaaaaaaaaaccctagtaatgccgccgatggggaggaagcgaaaggtagcacccaaatcttctctatccaccgagccacctctcaagcagcaacaaccaaaacccgaaaatccccctcaagaatacgaagaagtcgaagaggaagttgaggaagaagaggtagaggaagaggtcgacagaggaagaagaagaagaagaggaggacgaggaagaagaggaggaggaagatgatgaagaagtagtaaacga

SEQ ID NO: 81618 - DNA, 256 bp, Glycine max
  Clone ID: 700959965H1
acaaaaacaaagaaaaaaaaaaacccttagccaacacaaccatcatggccacctctgctattcagcaatcagcattcactggtcaaactgctctgaagcagctcaatgagttcgtccgcaagaccggtggcgccggcaaaggtcgcactaacatgcgccgcaccgtcaagagtgctcctcagagcatttggtatggccctgaccgtcccaagtacttgggtccattctcggagcagattccatcatacctgaccgg

SEQ ID NO: 81619 - DNA, 254 bp, Glycine max
  Clone ID: 700959966H1
tttctccagaacagcaagggagaatcaattcctcatcgttgcaatttttctttcactctctagattctcatctttcctctcttctaccccttcagaaaaaaccatgtcttcatattatatgtatatctagctcttcattttttcttgctcaagattatgctgtaaaattctgaaactcacagtttcagccacattttagacttaaagatctgcgcgttgacccttggcaggttcagcttttggagttgttcatc

SEQ ID NO: 81620 - DNA, 252 bp, Glycine max
  Clone ID: 700959967H1
tatgtaggggtttctttgtttgcagcccttggctttcttctctacggtggaagactattcttgatgctgcaacgctttcctgtggaatccaaaggtcgacgcaagaagctacaagaggttggctatgtgactaccatatgcttttcatgcttccttatcagatgtgttatgatgtgctttaatgcatttgataaagccgccgaccttgatgtcttggaccatcccattctgaattttatatattacctgttt

SEQ ID NO: 81621 - DNA, 251 bp, Glycine max
  Clone ID: 700959968H1
gtttgttgttgttgttggaagccaaaaccctagcagccggcgagaatggcagacgttgaggttgatgtggcggcggcggcggcggcggcggctgcagggcagccaaagaagagaacgttcaagaagttcagcttcaggggggtggatctggacgcgcttctggacatgtccactgacgaactcgtgaagatgttcagtgctcgcgcacgcagaaggttccagagaggtctcaccagaaagcccatggcctt

SEQ ID NO: 81622 - DNA, 248 bp, Glycine max
  Clone ID: 700959969H1
catgatgcttgtgaagaatcctgcacttttcgatgtactagtgatgcctaacctttatggtgatattatcagtgacctttgtgctggcttgattggaggattgggcttaacaccaagctgcaacattggtgagggcggtattgcacttgctgaggctgtacatggttcagcacctgatattgctggaaagaatttggctaatccaactgctttactgctgagtggtgttacaatgttgcgccatttgg

SEQ ID NO: 81623 - DNA, 246 bp, Glycine max
  Clone ID: 700959970H1
caagattcagcaagtgcgttttggaagcagagaccgaaatacttcgagatggcccgtacaaagcaaactgctcgtaagtcaactggaggaaaagctcccaggaagcagcttgcaaccaaggctgcacgtaagtctgcaccaacaactggtggtgtgaagaagcctcatcgttatcgccctggaactgttgctcttcgtgagattaggaaataccagaagagcactgagctcctaatcaggaagctt

SEQ ID NO: 81624 - DNA, 248 bp, Glycine max
  Clone ID: 700959971H1
atacactacaatggaaacatgaaaccgtggcttgagataagttttcccaagttccgaggttattggacaaagtatgttgactatgatcttgtgtatttgcgagaatgcaacatcaatccataatagatggatctcgtggcatgtgtagggcttgtaatttatattaaagcattatgacaatttttttatagattttcaaagtcaggttttaatttgggcatctctgtacttgtaaatgaaatgtgtct

SEQ ID NO: 81625 - DNA, 245 bp, Glycine max
  Clone ID: 700959972H1
gggactgtaactagccgcagcacgaggagcagcctcaggaggagaaggatgtctcacaggaagttcgagcacccaaggcacggttcactgggatttcttcccaggaagcgtgctgctcgtcacaggggaaaagtgaaggcattccccaaggatgacccatccaaggcacccaagctcactgcattcttgggttacaaggccggtatgactcacattgttagagaggtcgagaagccaggatcaaa

SEQ ID NO: 81626 - DNA, 253 bp, Glycine max
  Clone ID: 700959974H1
ccttatgctggcacattggaggaatggacagtggttcaacctgctcaaattgtgactgcagttgagcaactctgcaagtgattgctacaaaacactagcaattaggatatggtttttggtaaagctattgtgcttgtcaaattaagcttgaattttcatcatgactttcttttccttttatttctgaagtctatagcccgtaactttaaattgttgtttaatttctgataatctttgcaattttttttaaaga

SEQ ID NO: 81627 - DNA, 254 bp, Glycine max
  Clone ID: 700959977H1
atggacttgaaatatgggatgctattaagacatgggttcatgaatatgtctccttgtattacccaacagatgcagcagttcaacaagatactgaactacaagcatggtggaaggaagctgtggagaagggtcatggtgacttaaaagaaaagccttggtggcctaaaatgcagacaactgaagatctcattcaatcatgctctattatcgtttggacagcttcggctctccatgctgctgttaattttggacaa

SEQ ID NO: 81628 - DNA, 253 bp, Glycine max
  Clone ID: 700959978H1
ggcgctgcttcctctgttcactcttctgtttcctccgtcaactccgttaacagcagcagttaccgttccacaagccgtataagacaaaaagatctgatcccctccgacgccgtctacgacctccgctgcatcgccgagcgcatgctctcctccggctacctccgcgagtgcatccaggtctacggcagcgttcgaaaatcctccgtcgacgcgagcttccgcaagctccacatcgcaaagctcagcatcggag

SEQ ID NO: 81629 - DNA, 252 bp, Glycine max
  Clone ID: 700959981H1
ctgaatctctgaaagattacgaggaggattttgaaaatcctgaaaagaagcccagaaggaacaagtacgctttcgcatgtgctattttggcttcaatgacttccatcctactaggttaccatattggagtgatgagtggagcagcactgtacatacaaagagatctcaaggtatcggacgtgcaaattgatatcctgatcggtatcataaacctctactctcccgtcggttctttcatcgccggcagaactc

SEQ ID NO: 81630 - DNA, 251 bp, Glycine max
  Clone ID: 700959982H1
taaaccgtttcctctgatcgtgtcagaaatataaaagtttatttcctctgatcgtgtggtttctgagttctaagcactcacctctttcatacacgtttgttcgcttgttgagaagccatgggcgaggatttcgagttcccaagtgctggcaacatggaaatgcctgaggaggaagagtttgagagtccgatcctgaaggttggggaggagaaggagcttgggaaaatggggctgaagaagaaattgctcaa

SEQ ID NO: 81631 - DNA, 247 bp, Glycine max
  Clone ID: 700959983H1
tggagaagcatggagcaaagcttctgatggcccctatgcatgttaatcatgcacgtgaagtcccagagtatgaaatcaatcctaaagagcttgattttaccaacagtgtggagataacaaaggggactttctgtattgcactgtggcgtggaacagaggttgcagtaaaaaagcttggggaggatgtaattagtgatgaggagaaagtgaaggctttcagagatgagcttgctctgttccagaaaat

SEQ ID NO: 81632 - DNA, 93 bp, Glycine max
  Clone ID: 700959984H1
cagcaattgcatagcccttgcatctacagttaacggggcttgttgcccaagttgcaatcatccagctgagtgaactgtacagacttaaagcgc

SEQ ID NO: 81633 - DNA, 246 bp, Glycine max
  Clone ID: 700959985H1
gagagctacgccatgcccacaaaacaatggcagaagcatttcccaaccaagcacattacatgctgaccgatgattcgcagggtgttgaatcacacactccaggagtgccttgtccaaattattccgagtctgagcatgcagagaaagcagatagtgaagttcaaaccttgaggaaagccctggccaaaatacagtctgacaaggatgctatctttcttcagtatcagaagagtatggagaagttat

SEQ ID NO: 81634 - DNA, 95 bp, Glycine max
  Clone ID: 700959986H1
ggcaatttgacatgacaagttacatcatttgtactacaaatgctgtagcttgacgcgacatataggccaattgatgcttagaagttacaataagt

SEQ ID NO: 81635 - DNA, 246 bp, Glycine max
  Clone ID: 700959987H1
agcgactgttggagagtgtaaatgaacaattgactgagaaggatgtatacatatcataccttccacttgcacatatatttgatagggtcattgaggagacattcatatggcatggtgcttcaataggtttctggcgtggggatgtcaaattgttaattgaagatgttggcgaactaaaaccaactattttctgtgctgttccccgtgtgcttgatagagtgtactcaggtttgacgcagaagattt

SEQ ID NO: 81636 - DNA, 245 bp, Glycine max
  Clone ID: 700959988H1
gtgaaataataatgtaatacaaagataattttttaaatctttctctaatacttttattatttctgtttattatatgaaatagtaaatatcatctctgtttgagttatttctgttatatatttgaagaagtaaaaagacgagtatgatggtgtaaaacctaatctctgataatgggaagcgggaagtattagtggtgaggtttgagtccagtatgttctggaatgcgttggtaaatccgattcata

SEQ ID NO: 81637 - DNA, 250 bp, Glycine max
  Clone ID: 700959990H1
ccagataaaggatgaagtgaggactggcttgaatttcatcaattatgtctataagatatttggtttcacgtatgagctgaagctttcaacgaggccagagaaatacctaggagatattgcaacttgggacaaagctgaaagtgctcttaaagaagctttagatgattttggcaagccttggcagttgaatgaaggggatggtgcattctacggaccaaagatagacatcagtgtatctgatgcattgagt

SEQ ID NO: 81638 - DNA, 249 bp, Glycine max
  Clone ID: 700959991H1
gtgtattggtcactgatctatcttggaagagttttgaagtttaaaccttcaaacccttttgcctttagattctgattctgagtctctgctgctatatatggcgccacgcgtatttcttgtgttggggatgttgctgatggtgtgccttgttaaggtttcgtctgatccaaagagagaagaagaaatactggaagaagaactacattttcccgataacgagccacttattgtgagagacgggaacagaag

SEQ ID NO: 81639 - DNA, 253 bp, Glycine max
  Clone ID: 700959994H1
atacaagacaattctcttgttcatgttgccaagtctaatttgagtggaaaagtcttgccaactatcattggagataatgtcactgtaggtcatagtgctgtgttacaaggatgtacagttgaggatgaggcatttattggcatgggtgcaaccttgcttgatggtgtatatgttgagaaacatgccatggttgctgctggagctcttgtcaggcagaatacaaggatcccctatggagaggtttggggaggta

SEQ ID NO: 81640 - DNA, 259 bp, Glycine max
  Clone ID: 700959996H1
aaacattgtgacaacagtttcacctacttacgcccaagaagtgagaacttcagagggagggcatggtctccattcaacactctctgcccactccaaaaagttcattggtattcttaatggtattgatactgatgcatggaatcctgccaccgatgcatttcttccagtccagtacaatgcaactgatcttcaagggaaagcagagaataagcaagccttgagaaggaactaggtctttcatctacagatgttaggaggc

SEQ ID NO: 81641 - DNA, 248 bp, Glycine max
  Clone ID: 700959385H1
gttgaagactttttcttgcttcctcaaattattgggaacttaatctggcatatcaattgcaaaccactcagaaaactatattttattggaatcactctggtcagacttcttcctcacatatatgactagcattcgagctccagtttcaaatccttacttttatgaggaatctgaatttgtcaatcctaatttggatttttactcaaaatttggggatattgccattcctgtgactgctatcgttcttg

SEQ ID NO: 81642 - DNA, 250 bp, Glycine max
  Clone ID: 700959386H1
gagtttatgtggttgcgcctctgcctgtaagagtgaaaaaaccttctcttttccttctctcaagtctcaagagatttcatcatggctccaaagaaggacaaggctccaccaccttcctccaagcccgccaaatctggcggtggcaagcagaagaagaagaagtggagcaagggaaagcaaaaggagaaggtgaataacatggtgctgtttgatcagggcacctatgataagctcctttctgaagctccca

SEQ ID NO: 81643 - DNA, 248 bp, Glycine max
  Clone ID: 700959388H1
tgtttttctaaaaccttgtttgggagtttttgaataactaaaatcatgaggtaggctatccagattttatggataaaggaaatctttagctgaatgttatccatcattgaagcggcatttggcatggtagaaacggaaagaacgtgattgctttttttttttttttctgttttggaaaaattgtccatgtattgaccccctgactgtttgatttgacgttttgtttttttgggtatcgacagagaaga

SEQ ID NO: 81644 - DNA, 243 bp, Glycine max
  Clone ID: 700959389H1
ctcttggcatcttgtgttgtgtccctcttttaagctatttccttctcttaacacaattggttgtgccaattgccatagtcaccaaccaattaacaaaggtatatatatcatcatatcatcaccaaatgaaaaatattgggttgttttttcttgtggtggtggctacttttgtggtggcagccacagctggtagcttttaccaagactttgaaataacgtggggtggtgagcgtgccaaaatct

SEQ ID NO: 81645 - DNA, 245 bp, Glycine max
  Clone ID: 700959391H1
ccactttcttctccctccgatttctccagaacagcaagggagaatcaattcctcatcgctgcaattctcatctttcactctctagattctcatctatctttcttccaacctcttctcttctatacccttcagaaaaaaataaaatagaaaccatagcttcagattattctagctcttcattttttttccttgttcaatattatgctgtaaaattctcaaactcacagtttcagttcagccacatt

SEQ ID NO: 81646 - DNA, 242 bp, Glycine max
  Clone ID: 700959392H1
cgaccgagtaattttcatctatgaattgatgtataggtgtaaattaatgtacaccatgcaatgtttgacgtgaataggataaaatataataattactgagtttatggaattgcaactaccattctataccagtgtcagaaatggaccacacggtaccagcatagttataacacttacacatgaagatgccaatttcaattgcagcagtacaatccaaccggtaatgaaattctagaaaaatt

SEQ ID NO: 81647 - DNA, 243 bp, Glycine max
  Clone ID: 700959393H1
aaaaaatagcaacaaaaacaagaaaaaaggttacctctttcaattttatcccttgttgtgagcttaattcaatttctgctcacacataatggcttgcacgctcgctgattcattactcctattcaagggttcttatcagaaaccagttctgaggagagacattgctgcccggtactccccgggtatatttagtctaaacagtaatgggcttatccagaaaaggttcaggcgtcaaaggaattt

SEQ ID NO: 81648 - DNA, 246 bp, Glycine max
  Clone ID: 700959395H1
cgggtcgacctggtggactcgactcgtttaaaaactactccgagggagagaatattccggtgaacgatttccggcgatatagtcgcgactccgccgggcataaagatggttttctgagctacggcacgaacggcaacgtggtgcagcagagcttccatacctacgccgccggagccaccggcggcaccggcgagttcaagcactacgccgacgaaaccaacgtcccgaacctcggcttcacctcct

SEQ ID NO: 81649 - DNA, 248 bp, Glycine max
  Clone ID: 700959396H1
gatggaatcaaggttggtcccagtatcgaacaccagttcattccgagcttcattgggcggtctccattgcataaaaacagcatacaggacagaactgcaacagagaacttgtcttcattgaggaataactgtgatgaagatttgtgtgtttcactgcagctgggtgacaatgaagcaaagagaaggcgttctgaagcctcaactagtactgaggaacctcagtgaaacagattatttgcataagctgg

SEQ ID NO: 81650 - DNA, 265 bp, Glycine max
  Clone ID: 700959401H1
taacttcaggaaaacaacactgaagcttgctcctattgcatacttcagtatgtaccgtggatcaatatctcatttaccgactagctacatgtggagtcctcatgttgttcccaaaccaagtgactggggccctttagttgatgtgttggttattgtttcttgagccttgcatcaaagtatcaaccccaggaagattttgtccaatggattcaaaaaggaccacctcctttatattttgggtttgggagcatcctcttgaagatcc

SEQ ID NO: 81651 - DNA, 275 bp, Glycine max
  Clone ID: 700959402H1
ttcggctcgagcaccaccattgcttgttgatgacgtgcaggatggggctctgaatggccttgaattgaaaaacgtaacttgcaaaacaactgctacagttggcgataaggcgtatgtcattggtggagctgatgatggaactttgtccattgagttcaaatttttgaccgtagtcttggagaatgggttcgtcccactgtgcggggcaccaaacctgtgtcgtgcaatggcctctcagctgtgcctttggaagaccgaatactgattcttaagaa

SEQ ID NO: 81652 - DNA, 265 bp, Glycine max
  Clone ID: 700959403H1
ccgactcggttgctatcagcgagtgagagtgagtgagtggttctcttgcagcaacaaggtttagtgacaccaaacagacgggaaatgggtcgtggggtcagtgctggtggtggacagagttccttggattatcacctttggcatggggtacctgccagcagtgcaaatggtgctcgcactcaaaatgcaagtgctccttcaccaccggttgataagcaaagtccagcaccagcaccagcaccagcacctgcacctgcagcagcag

SEQ ID NO: 81653 - DNA, 263 bp, Glycine max
  Clone ID: 700959404H1
gagagagaaacccatttctagagagagaaactcgcagtcgcagacatgtcttccttcgatgccttcgccgacgacttgaacgtcaactcttcttccactcgccagcacgaacatgacgaggacaacttctctggctacggcgctactcctccttcaccggaggattctccgccgacggagatgtcgccgtcgatcactccgcgcccgcgtcgccggagatctacggcttcactgattcgaatcgcgcttactctcagtctccc

SEQ ID NO: 81654 - DNA, 259 bp, Glycine max
  Clone ID: 700959406H1
cattttcttcccaaccactactactcgctcactgcagatctcaattgcatcgctgtccatggctaccatcgttagcatcaaggcccgccagatcttcgacagtcgtggcaatccaactgtcgaggtggatttgacttgctcgatggtacatttgccagagctgctgttccaagtggtgcatccactgggatttatgaggcccttgaattgagagatggaggatctgactaccttggaaagggtgtatcaaaggctgttg

SEQ ID NO: 81655 - DNA, 261 bp, Glycine max
  Clone ID: 700959407H1
ggatatgttccgtctaatactgaaaagtatccccttggaggcatcatctctgccattgagaatgcttttcacgcatctcctcaaatagtttgctcgaaagattctgttgaggaacttcgcctatgcttttataaggacttcagccacgagattgtgctcttggatctgacattaaaatcaacatggttacttctaaaaaatcttgtcccaaatatgttagcttgccggagccggtatcagtgagtaagacaggcacaatgg

SEQ ID NO: 81656 - DNA, 260 bp, Glycine max
  Clone ID: 700959408H1
ctttcccccctctgaattaaacagatttggacgacaccttgtacccgtcaagcaccggtattgacaagtgcgtcaagaaaaacatccaactctttctcatccagaaatgcggattctcagaatccgaagccttcaccctccggttgatctcttcaaaacctacggaagcacccttgccggtttaagagcactaggccatgatatcaccgcagaggagtaccatggtttcgtgcacggaaggctaccttacgactccatca

SEQ ID NO: 81657 - DNA, 267 bp, Glycine max
  Clone ID: 700959409H1
aataacaaaaaacgtccattcaacgatcacactcacactcctcgtcgtcgcttgcccaaatcgcttatcgctcttcaacaccatctccctcgtacgaaatccccttcactccctccgaccacggcctccctcccaacacggagacaccgactccatcccctaccacctcgtcattcgcctcatccaagcctccaccaccctccaaccagccttcaaaaccctcatccaaaacatcctcttccaaaaccaaaaacatcaacttttaat

SEQ ID NO: 81658 - DNA, 263 bp, Glycine max
  Clone ID: 700959410H1
taataacagcaacaaccatcaccaccttcagttctcacctgtctttgatggccgcttgcaactctgctatggcgatggaacaaggcattctgaccacaaggggaagggaaagaactaattaagttcccccgaggaacaccactttcttcctggaattttgttctgtgtttttgtaggagcaacaagctgtgtccccttcccttctgcaaaatggaggataagttgttgtcatcaagtgttggtgtttcttcttggatcattta

SEQ ID NO: 81659 - DNA, 264 bp, Glycine max
  Clone ID: 700959411H1
aaagatgttgctggttgtgatgaggcgaacatagaaattatggagtttgtccacttcctcaagaacccaaagaaatatgaagaactcggtgcaaagattccaaaaggtgctctcttggccggtcctccaggcacaggaaaaaccttttagcaaaagctacagcaggggagtctggtgtaccctttctttgtttatctggttctgatttcatggaaatgtttgttggtgttggaccatctagggtgagaaacttgtttcaggaag

SEQ ID NO: 81660 - DNA, 265 bp, Glycine max
  Clone ID: 700959412H1
cttggttttgcggaaaaacaaagtaacaccacaacacagcatccgatattacacacatattcttctttatcttcttcttctctctctctctctctctaaatatttttctctctcttcagcgaattcgtttttctcttcaagcttcgctatggcgtctggatcctcgggtcgcggaaactctgcctccaaaggcttcgatttcgcttccgatgacatcctctgctcctacgacgactacgccaaccgcgattccacttccaacggc

SEQ ID NO: 81661 - DNA, 267 bp, Glycine max
  Clone ID: 700959414H1
cggctcgagcaagagagaggaagaaaggtgagaagaagaagaagaagaagaaaagaaaacccactcacacacactctctgcccctgcacatgcacatgcaccattctcactaatcactagggtttattcatccatccatggagctaccgttttctctctcttcttcttcttcttcaccttccaccttccctcctgcttctcaggacaatcgagctccatggaatcagtgcctgatcttcagaacactatgtacgctcccatcgacgg

SEQ ID NO: 81662 - DNA, 179 bp, Glycine max
  Clone ID: 700959415H1
gtctcctcctttcgcctcttcaactttctctctctctccctagttgcatgtgttcccatgttcaataataataataattctgactaatctcaaccttgttcagtattcagtttgattaatgacaccaagatccaagcacaaagttgtttcttttttcatttatttgctgttctgcctgt

SEQ ID NO: 81663 - DNA, 280 bp, Glycine max
  Clone ID: 700959417H1
acgtaatttcggtcttgagctcgctgtttttcagaaatattagtatatatttatatgcatacaatgatgcaaacaaacaggaaccgtttggcagcttaatgcttcaagatctattatttgttacttcttccaatttatctgtaacttgtactcccctgcccttttaagaatacttatttacttattattttatttgcagtaatttcagctccttctgatgtcaaaaaacatgagcagaaagatgataaccttccagttgacatcaaattgcctgttaagc

SEQ ID NO: 81664 - DNA, 262 bp, Glycine max
  Clone ID: 700959418H1
agaacatcgaagcatctaggatgacactgcaccgctttggcaacacctctagcagcagcatttggtatgagttggcttacatggaagcaaaagagagtgtgagaagaggagaccgcgtttggcaactcgcatttggctcagcttcaagtgcaacagcgtggtttggcgcgccatgcgccgagttaccaagccttctaggaacccttggcttgattgcatcaacagatatcctgcacctctcaacaactgaagcaaaattcta

SEQ ID NO: 81665 - DNA, 259 bp, Glycine max
  Clone ID: 700959419H1
ggcattgttgggtatatttgcttagccttattgttctttccggtcacgagagggtcttcaattttgcggttcattggcttaacttcagagggaagcatcaagtatcatatctggctaggacacattgcaatgaccctctcacagcccatggtctaggttatattattttttggggaaagacacatcaaatcttggagatattcaaatggaacaaaattggcgtctcaaatgtggctggagctgtttctctgctagctgg

SEQ ID NO: 81666 - DNA, 257 bp, Glycine max
  Clone ID: 700959420H1
attttcagttaaatgtggagtaaggggtaacactggtccagcctgcaatgtggttggaatgattgatcgaatgatattgggtatacaacacctgtacaagagaccaatatatgcgcggatgcctgaatgcagtattaatctcccaactatggaccattacctcctgatgctcctgcttggtgtcaggccccttttgatcctgaaggactcctaagttcagtgatggctattgtcacctgcttgattgggttgcacta

SEQ ID NO: 81667 - DNA, 258 bp, Glycine max
  Clone ID: 700959421H1
gatgtctaataggtgcagcattttcctatcctggcaaatgtaaaaaaacaggtattggcaaacagaaacaccctttctagcatagggatttgatctctccaccttggtgaaagccttgtgacccattaggcttttacaaaggtgggattttgactagctgggtgtttggctgttgagtttatggagggccaagttccttgttgaacagtgtttgtgttgcctttatctgcagcttttaattgaaccaatcctaccctc

SEQ ID NO: 81668 - DNA, 258 bp, Glycine max
  Clone ID: 700959422H1
agtttttcttgtcagctcgctgcaatatggaccagcaaaatgcatctcattgctttgggcttttcttagcagtgcaattcaagggatcagtatctcttcatgttgactatgaatttgctgctagatcaaaatcgactgagagtatataagcaggtgcaagggagattatactttcacggcgggcaaggctgtagggtataggaacctgtttggtattccatggactgcattcatagcagacgatagccatttattcat

SEQ ID NO: 81669 - DNA, 258 bp, Glycine max
  Clone ID: 700959423H1
acacaaacacatacattgtagtatcacttttgtctcggaatttgttcttttgagttatggcaagcttaaaggttgcatgtgtggttttgatgtgcatggctgtgatgagtgcaccaatgatggtgcaagccgtgtcatcaatgatgtttctgtgaacctagcaccgtgcccatcctaccctattgcagggttgagatgttccagaatcgggctgtagcggagtgaggaacattctgggttctgccagcaccacctttt

SEQ ID NO: 81670 - DNA, 257 bp, Glycine max
  Clone ID: 700959424H1
ggaaacttaatcttgtccagagatcctgcaacccccctcatcaaattgagtggagagggtgacaatcaggaaaatcccattaatgttgattgaattggcatcagatatctgttgcatgatatgttccagaggtttgccgttggcattattcttcagatttcttctttcttcatggtccatacagctgaacaattttattgaacaggctagggctggaaggagtttgtatagtcttggactcgtgtacatatgctcat

SEQ ID NO: 81671 - DNA, 177 bp, Glycine max
  Clone ID: 700959425H1
ccagagaggttcacggcttcactttcacatcaccaaacacctctctcaaggctagctagcttcaatctctttccttctgcttctttttcctctcctcactgcatttattttcttttggacttttccactcatgcaccctcattcccctctatttaaccctctctatcttcttctcct

SEQ ID NO: 81672 - DNA, 177 bp, Glycine max
  Clone ID: 700959426H1
gaagattccaatcggagctcagaaaaaagaaacctaatcgtcgatcgcgtcgccgtcgcgccgaaagttcgttgttgtgctgtgaaattgccggttttaattgttcgttttgtgataattctgagaattagtaacaattatttggtttttttttctgttaggtaacgttgctgtggt

SEQ ID NO: 81673 - DNA, 178 bp, Glycine max
  Clone ID: 700959427H1
aaatcatgctgatgcggtgactagtgatttaagagtgatcaataaggaaccctcggaaataccagggaaagtttgttattattactagtttcacttgtggatttatcgtagcataatgttgtacaagaataatttaatatgacaagatcgtgtgtttgttattgattttttcaaagtt

SEQ ID NO: 81674 - DNA, 206 bp, Glycine max
  Clone ID: 700959428H1
aaatcatgctgatgcggtgactagtgatttaagagtgatcaataaggaaccctcggatcataccagggaaagtttgttattattactagtttcacttgtggatttatcgtagcataatgttgtacaagaataatttaatatgaaaagatcgtgtgtttgttattgattttttcaaagttatatagtccgtacttattcggcattgc

SEQ ID NO: 81675 - DNA, 258 bp, Glycine max
  Clone ID: 700959429H1
acaagctcaagcaagcatgcaccgcaagctctcacctttgaagccccaaattttaaaagatataactggcctgacagaaactgagaggatgacacgtaatagtgtttatccctctgcacttaactgtgatgacatcttgcatggatcctacttcgaataccaccaccaactatctccaacttaattatcgtatcaaaaatatggttgcgtgtgatatgcagtccttcatttcgtcaatgctacttgaggcaatgggga

SEQ ID NO: 81676 - DNA, 264 bp, Glycine max
  Clone ID: 700959430H1
cagttccctacctctcctttcaagatgcagatcttcgtcaagaccctcaccggaaagaccatcacccttgaggtggaaagctctgacaccatcgacaacgtcaaggccaagatccaggacaaggaaggaattcccccggatcagaacgtctcatcttcgccggaaagcagctcgaggacggccgtaccctcgccgactacaacatccagaaggagtcaacccttcaccttgtccttcgtctccgtggtggcatgcagatcttcg

SEQ ID NO: 81677 - DNA, 270 bp, Glycine max
  Clone ID: 700959432H1
ggcattgttccaaatgatcacttctgctgttctcttctaaatgttctgactcaaacaccaaaagaagagcttggtaagctaacagattgcattgagaaggctaatacaaagcttgggactgtggtaagatatttgatggaagagctgagggtgatgaagcctttagaaaggaagcattagaacttttaaattcaattgatgctgaagtaaagaagcctttatgcaattgtctaattgatctttgtgtcaagctgaatgtgcctgaaagag

SEQ ID NO: 81678 - DNA, 261 bp, Glycine max
  unsure (1)..(261): unsure at all n locations
  Clone ID: 700959434H1
caaatatctctccgttaatgctctcaccacaaacttcaatagattagccaaaagctaacaccaactataggccaaatcaccaataaatattatttcccgttcttttggcgtgttggccacccactgaacacatttgcatcacacatagaatgagagagaggccattggttggtttcagagatgggaagcatgcacatagaaaccccagaaacttttgctgatggtagcaaaaacttcgatgaganggggacgagctaaaag

SEQ ID NO: 81679 - DNA, 260 bp, Glycine max
  Clone ID: 700959435H1
ttccggtttctctctctctctctctctcatggcgaatctagcacacttctccaagagagccctaagaagcgcacacgcgctcgcaaggcaccacgtgcagccgcagctgctggcagcggaacgcgcttttgcgacggagcggcgaaatcgatatccccgtcggcggatcgcgtgaagtgggactaccgagggcagaggaagataatcccgttaggcagtggctccccaaagtggccgtggatgcttacgtagcacccaac

SEQ ID NO: 81680 - DNA, 255 bp, Glycine max
  Clone ID: 700959436H1
atcttgccaagaaaatctggtgctttggccctgagacccttggacccaacatggtggttgatatgtgcaagggagtccagtatttgaatgaaatcaaggattctgtggttgctggattccagtgggcatcaaaagaggtgctttggctgaagaaaacatgagagccatctgctttgaagtatgtgatgttgtgctgcacgctgatgctatccacagaggaggtggtcaaatcattcctactgccaggagagtctt

SEQ ID NO: 81681 - DNA, 123 bp, Glycine max
  Clone ID: 700959437H1
gtttcgtctgtcaaaatcttgacaatatatgtatctcagcatatgaacttactcaacttggtcagtgctgacttatgttaataattacttcagacttgtgtagtagtaaatgctcctaatgtc

SEQ ID NO: 81682 - DNA, 254 bp, Glycine max
  Clone ID: 700959438H1
agattccacaacagtgggagagagatccaaaaagagagagtggaaaagatggcgcggttgatcacagtggtgtggtgcgcggtggcggtgctattatgcgccgcggccggtgcgtcgtgggtggaggaggcggcgaaccgatacgaatggtgtcacgcgtggaggcggaggtggttcgggtgatcggggagtgccggcgtgcgttgaagtttgctaggttcgtgagcaggttcgggaagagttaccaaagcgag

SEQ ID NO: 81683 - DNA, 256 bp, Glycine max
  Clone ID: 700959439H1
gctgctgcgtcttcgaatcctcctcattgctctgcttctcatgttgtgcgccccattttcatcttcttccaaacccaaagaccccttcctcggcgtcgcccccgaagatgacgactattacaagtcttccgatgtaaaagttgtaaagatggatccggaaaattcaccaaggctcagttcaatgatgatttctgcgattgtgctgatggcaccgatgaacctggtacatcggcatgtcctggtggaaaattctatt

SEQ ID NO: 81684 - DNA, 255 bp, Glycine max
  Clone ID: 700959440H1
ctttagtactagagtttgcagactgagtggctcggtgagttagtgagcgaaaacgatagatagcattaccatgttggttggataactgaagtgagtgatgatttcaacttcaagcatggctttgctttctttactaccaaaacggcaccgcatgccctttccctcacaaacccttcctcttccactcccctcatcttacctttcagtttccaatgtttgcctcaccctcttccttctcctctctcttccctcaaa

SEQ ID NO: 81685 - DNA, 258 bp, Glycine max
  Clone ID: 700959441H1
gagacggaatttggacatggcaccgtataaaccgtctgtttaattggcttcctctagcagccctaattgagaaaaaaattatttgcatgcatgggggtattggtcgttcaataaatcatgtggaacaaattgagaatatcagcgtccaattacgatggaagcaggatcaattgtgcttatggatctattatggtctgatcctacagagaatgacagtgttgaaggactgcgaccaaatgctaggggtccaggattagt

SEQ ID NO: 81686 - DNA, 256 bp, Glycine max
  unsure (1)..(256): unsure at all n locations
  Clone ID: 700959442H1
caagcttcagaccagagccccaatcagcaaattcaagcagtactagtaccaataggcaactaaattcccctttccaaccctaatttttctgcttaattaattccatttaagtcctttaatatgcagaccctcaccccacctaccccaaccctctcaactatctcacggtngcgcgtcagtcggtcattcgggtggctcggacgcgtttcagagtcaaatgcggttgccggttcgaatccgggagtttctcgcaggg

SEQ ID NO: 81687 - DNA, 262 bp, Glycine max
  Clone ID: 700959443H1
atttaaatttaatcattatgtctgtttcttcaatcggaatcacgaacaacatggaagtgagaattgggcaaagggtttctcgcggaatgctccctatcctcgctctccacaccttcagcgagacaaaacgctccgaccacaacctccggtcaccgccgccctcatcgccgccaacaccctcatctacctccgcccctccttcctcgaccccctatgtccccccatcgaacaagtctggttcaaccctcacctcatcctcaag

SEQ ID NO: 81688 - DNA, 154 bp, Glycine max
  Clone ID: 700959445H1
gtttttacctatggtcttgtgttgtgcacttgtgcgtgtaactgtattctaaaataagggtcacttggatcagtggttgtaacgatatcaatgttttgcgagagttttaatttactcttacagttattagtgaaagattggcggtctcatcttc

SEQ ID NO: 81689 - DNA, 263 bp, Glycine max
  Clone ID: 700959446H1
cagaaattaagctagagcttcatagtttcttcttcttttctcaccttccttctctcccttcagacaaagggacaaaaaatcagtgtgtgagagagagagagagaaattccaaaaccatgtcccacagtcatctaagtttcgctttgggattctaggtaacattgcctccttcgtgtgctttctggcaccactaccaacattttatagagtttgtaagaagaaatcaaccgaagggttccaatcaattccatatgtggctgcac

SEQ ID NO: 81690 - DNA, 263 bp, Glycine max
  Clone ID: 700959447H1
gaaggggtcaatttcagtgtattgcatcaaccaccctagatgaatacagactttattttgagaaagacacggcattggctcgacggtttcaacctgtttgggttgatgagccgagtgaggatgacgcaatcaagatacttatggtctacgtgagaaatatgaggcacatcacaaatgcagatacactgcagaggctataaaggctgcagttgattgtcagcgagatacatagtgataggtaactacctgataaagctattgac

SEQ ID NO: 81691 - DNA, 269 bp, Glycine max
  unsure (1)..(269): unsure at all n locations
  Clone ID: 700959448H1
ctatttttgccttctccctcttctgcttctccctccactccactggagagatgagaagagaagagagagaaacacagattctttctttcccttccacacaacatacgatatcaatcgntctcttgccgattccgccatttctcattcggattcgagattgttgcaggtgcattgcttttgcctctcgatggtatgttcccgggaaagtgggagaatggaagtcatggccaggcttctcgctgctgagactttctctcacactgtagcag

SEQ ID NO: 81692 - DNA, 259 bp, Glycine max
  Clone ID: 700959449H1
atcttctctctcatccaagaaaaaacttcttcatcttctttactttctttttctttctgtccgagagttcttgaagttttgtattgaggctccagaaactttatgagttctgttgattgattttcaacttggcaattaatgaaagagcatttcatgtagattttcttcaccactatctgctctatgcacttcttgtgctttctgcagttctgaattattcaagtaactggttcagtttaacatatgatttagtataaaa

SEQ ID NO: 81693 - DNA, 250 bp, Glycine max
  Clone ID: 700959452H1
agcaaacatcagttgttctatattacattgttggagactattagggttacgatggattctgagaagtatgagtatgtagagaacgcagttgaaaaccctcaagctaagcacatggctaatggtggggacaaaagtggaaatctgaagagagaggagcgaatggtagttcaaagcataagggtgatgatgatgaggatgttgatctccatcccaagcattcaaaacctggacacgattctcatgatcgcga

SEQ ID NO: 81694 - DNA, 101 bp, Glycine max
  Clone ID: 700959453H1
ccaaattctccagccatggcagtttcttctgcatctgcttcctccaaacttatactattctcccatgcttcatcttcttcccttatctccacacccttccg

SEQ ID NO: 81695 - DNA, 255 bp, Glycine max
  Clone ID: 700959454H1
ccctgttcctctgtatcttcagcaaatgagagttcaataacaatgtctgtgccactgggaaatccatgtgccttcaaggagattacaccttccgtgaaagaggtaatagcacgagatgaaaaaactgaatctttttcactgttgaacctgaaaatgggaagttggagatcaatgatggaaaacagactaatggcactagtaaagactccaggttagaggattctgatgctttacatatgaaattggttcaaaatg

SEQ ID NO: 81696 - DNA, 256 bp, Glycine max
  Clone ID: 700959455H1
ccgatttctccagaacagcaagggagaatcaattcctcatcgctgcaattctcatctttcactctctagattctcatctatctttcttccaacctcttctcttctatacccttcagaaaaaaataatatagaaacatagcttcagattattctagctcttcattttttttccttgttcaatattatgctgtaaaattctcaaactcacagtttcagttcagccacattttggtctaaagatccgtgccttgaccct

SEQ ID NO: 81697 - DNA, 257 bp, Glycine max
  Clone ID: 700959456H1
cttttcttctctttacccgttgaaacatccttagttttcagattctgaaatcttgattctgaattcatcacaatgaattcgtcaactacagtgaggaagttgcaggtggtgtcccctgttcctgcggacatagacacgcaaactccgttgaaccagttcatatctcccagattgccaaagagctcaaccttagtcccaatcactatgacctttacggtaaatacaaggctaaggttttgttgtcggttcttgatgag

SEQ ID NO: 81698 - DNA, 259 bp, Glycine max
  Clone ID: 700959457H1
ctttttctctctactctcatttcctttcctccaagaacttgattttccatgcccccttcaaaggaaacaacaacaccaagcaattcactttttccaaagccgcaaatctcttgccgttgcagccacggttaaatgtctcttttcttcttcaaaggatgcaggctccagtgacaacacaccgtgcaacttttgcattattgaggggccagagacggttgaggattttatgcagatgcagctgcaggaaattcaagacaac

SEQ ID NO: 81699 - DNA, 77 bp, Glycine max
  Clone ID: 700959460H1
attttgaacagcatttccgccataaatatgaaaagctttgtaacagacggtgttttatattagtttgacatctattc

SEQ ID NO: 81700 - DNA, 260 bp, Glycine max
  Clone ID: 700959462H1
ctcgagccgtttttctctctcccttagtcaaagggattcatcgttcttcttcccaggttatttagaaaagcaaaatggtgaagatttgctgcattggtgctggatatgtggggggtcctactatggcagtcattgcactaagtgcccatccattgaagtcgctgttgttgatatctctaaatcccgcattgcagcctggaacagcgaccagcttcctatctatgaacctggccttgatggtgttgtgaagcaatgccgtg

SEQ ID NO: 81701 - DNA, 265 bp, Glycine max
  Clone ID: 700959463H1
aaacacaacaacactctctcttctcgctcttggcttttcgctcttcactcactctcattcattcatttccaccgttcatggatcctgtaagcgtgtggggtaacacgcccttggcgacggtggatcccgagatccatgactcatcgagaaggagaagcgccgtcaatgccgcggaatcgagctcatcgcctccgagaacttcacctccttcgccgtcatcgaggccctcggcagcgctctcacgaacaaatactccgagggcatg

SEQ ID NO: 81702 - DNA, 250 bp, Glycine max
  Clone ID: 700959464H1
agaccagatagaggcttgaggagttgatgttttaccctataaagtatgtcaatatcaagaagcttccctaccaaagttaaattggtgttcgcattacaaacttatattcagaaatcaaaaaaatgattgtggttatttccatcgttaaaagtttacttttggagtagatttattagaaagactttttagctgactctggcatgggccaggggagttttaaaattgcaatatcaatgagacaatgacttcc

SEQ ID NO: 81703 - DNA, 256 bp, Glycine max
  Clone ID: 700959465H1
gtttcaccgcacgaatatcttgttgtttggagcgatccgagaaaaactctgtaaacatgttggtttaccaggacctccttacaggtgatgagcttctctctgactccttccgttacaaggaaattgagaatggatgctgtgggaagttgaggggaagtgggttgttaaaggagcagttgatgtagacattggtgcaaacccttctgctgagggtggaggagaagatgagggagttgatgatgcagctgttaaggtt

SEQ ID NO: 81704 - DNA, 256 bp, Glycine max
  Clone ID: 700959466H1
atcttcttcaattccagcaaggatgtcacagcaaggcgaatcatcggacccgaaatcggggaagaaggacttctcgaccgcgattctggaacgtaaaaagtcgccgaaccggcttgttgtggatgaggctgtcacgacgacaactccgtagtgaccatgcacccccaaaccatggaaaagcttcagcttttccgaggggacactatccttatcaagggtaagaaacgaaaggatactatttgcatagctcttgctg

SEQ ID NO: 81705 - DNA, 253 bp, Glycine max
  Clone ID: 700959467H1
aattgattcatgggaatttggtaggattgaagacaaagctgtttgttatattcaattttgtttcattggatcttattcttgcatgatgtgctataggtaatgagttgagtgggaagggcattggggctagagtggtgctgcacagtatgggaaagacttgataaagcttaaagaaattttacgcacattatacaaaaactccacgttcaaaccttcccttgtagcacctggaggattctataataaggagtgg

SEQ ID NO: 81706 - DNA, 255 bp, Glycine max
  Clone ID: 700959468H1
gttctcgctctcttattcctttctctcttgtcttctctccgaatccacgtcctagatctgttgttctcttcccacagttctcactgaatcaggatccattttgataccaagttgctgtttagagatctgtttcttctagacaacggtctgtgctatctgttattttagttgaatcgaagctgcaacaaaatcttcctgatctttgctttgaggttatggcatcggcgggtgtagcacctgcttctgagggtaaga

SEQ ID NO: 81707 - DNA, 249 bp, Glycine max
  Clone ID: 700959469H1
gatcgagataactagaaacagtgtgatgaaaatgaaggtccttgttttcttcgttgctacaattttggtagcatggcaatgccatgcgtacgatatgttccctctccgaatgaacactggctatggtgcccgactccggaggtgaaatgcgcaagttggaggcttgctgtggaagcacacaacatctttggctttgagaccattcctgaagagtgcgttgaagcaacaaaggaatacatccatggcgaa

SEQ ID NO: 81708 - DNA, 253 bp, Glycine max
  Clone ID: 700959470H1
gaaatttcccgaaggaggaggaggttctgatcttctttcttttttgtctggttccctttcttccttcaaccaatttcgagatccgaaaccggcatcagatccgatccgaaatgtacggattcgaagctctcacttcaacatccacggcggcttcctagaggccatcgtccgcggccaccgcgccggcctcctcaccaccgccgattacaacaacctctgccaatgcgaaaccctcgacgacatcaagatgcac

SEQ ID NO: 81709 - DNA, 250 bp, Glycine max
  Clone ID: 700959472H1
ggaggagtgacattgtggaagaaagactgaaggtgttcgcgatcggagactttgaaaccctcctttcacccatttatcccaagcattcaacaatgtctccgttatcgaagctctcgttgctgatactgatggtttcatctcctccgcgatggcctcctccgacgagagagtgagcgaattgctctccctgcaatccagatccaaatcgggcgtaatccggctgaacgaccaatccctcgcccgcttcctc

SEQ ID NO: 81710 - DNA, 257 bp, Glycine max
  Clone ID: 700959473H1
gaagatactgaggatgcttgcaaatacataagttggacgatacttgatgatcgtcccattcgagttgattttgattggggatttcaggaaggaagacaatggggtcgtgggaggagcggtggccaggtgcgggatagtaccgcactagattatgatcctggtagaggtggctacgggaagctggttcagaaagagttagaagtacaaaggcagcttgtagattatggtgctggttctttgggttcttttccaccagt

SEQ ID NO: 81711 - DNA, 255 bp, Glycine max
  Clone ID: 700959474H1
ggtgttatggagatctgattcttcaacgtcagcatcagcatcagcatcatcttcatcatcatcatcaccaccagaagtggcatgttctgacatgggtgagttggagctgctacccagtgacatcttgatgcacatctgagacttttgggtccaaaagaggctgcaaagttgagtgtggtttgcaaggctttgagatcccttgtgtctgataacagactttggattcactttcttcagacccatcaggctgagccc

SEQ ID NO: 81712 - DNA, 257 bp, Glycine max
  Clone ID: 700959475H1
ggcttctgtgttcaaggacgtaagataagtgatgtagggaaaatagatatttgaaggtttcaatgaagaggtatctgatgatttgtgtatttgatgagcttttatattaatttgctatagagattctataaccatttgattattttctacctgtttttagggtctgactcttttaggccagttttatgtgaacatggttgtcttggcagtggcaccaaatataatcagaactttgaatgttgattaaaaaaggatgt

SEQ ID NO: 81713 - DNA, 256 bp, Glycine max
  Clone ID: 700959477H1
ctttctaaaaaccagaaacaacaaacacaaaccgaaaaggcgaaaggggttttccgagtgagatctagggtttccatcgattcggagagaggatattgatagaacgacctcaacgagcaaggtcaggaggtggagtctagaacatggattcggtgccttcgaattcgcatggaaacctcgatgagcagatttctcagctcatgcagtgcaaacccttgtccgagcaagaggtaagggtcttgtgtgataaggcaaa

SEQ ID NO: 81714 - DNA, 258 bp, Glycine max
  Clone ID: 700959478H1
gcaaaattaagcacaaaagcccaaccctctctctcgctgctggtctcccccatttggcattcgcagatcgaatacgagtaatttcactgaatcttattgaagatgtttctcacaagatctgagtatgatcgatgtgtaacaccttttctcctgaaggccgtttatttcaggttgaatatgcaatcgaagccatcaagctgggatcaactgcgattggattgaagacgaaagagggtgttgtccttgcagttgaaaagc

SEQ ID NO: 81715 - DNA, 253 bp, Glycine max
  unsure (1)..(253): unsure at all n locations
  Clone ID: 700959479H1
gtttatcgtgcgtgtgtttaacattcacatttacaatgaactccatctcatcactgacccttgattctcacgcaatatgcaacttacagcgcnacatctccctccgccaagttcgccccaccactcgaaacgtcgtcggtgctccgcgaagcccgtcgcgcctccccccaccaagctcggtcgccgccgaaactccggctgccgcatcggcgaactgagccaggtctccggcgtgcttggctgccattgggga

SEQ ID NO: 81716 - DNA, 262 bp, Glycine max
  Clone ID: 700959480H1
ggaagccgaaccaacgaaccaaccccaaacccctctttttccagaactttcatgtccatcttgccctcacaaacccaagccgcatcttcgtcttcttcctctgcgccatctcctaaccctaattcccaacatggaatcggatccctattcctcaacccttcccttctctttccccctcaccaatcaacctcactttcggatctctccagatctccgataccccaggttcatcggcttcagctgctcaagattctggtggatc

SEQ ID NO: 81717 - DNA, 251 bp, Glycine max
  Clone ID: 700959481H1
ctgaaatctgattatcattggaggatctgatttctgacatctgattctgattatcattggagggaatctcaacccaaagtttagttttttatttttattattattattattgttgttatttctgccacaactttaggggtgcattgcaaatggcttccattgttgcaagcttgccgccaccattgctgctccctgctagaaaatatcatccgggcaacttcccaagttcccctttttctcttctttcaggg

SEQ ID NO: 81718 - DNA, 119 bp, Glycine max
  Clone ID: 700959482H1
gccgtttacattctcgctctgcactctctctttctcatcctattctcttcgcttctctgttcgtgccacttcttctcgagcagtggcatctcatattgttggttatccacacaacatac

SEQ ID NO: 81719 - DNA, 249 bp, Glycine max
  Clone ID: 700959483H1
ctagaagctaaagattccttggtgatagaactaaattcaagagtgagttccttaactattgagaacaataattttaggagtaaatgtgatgtcatggagaaggaatacaatgatctaaagttcagtgctgaaagaaggctgctttggactctaaggttttaagagaaaaagaagaggagcttcatcagctaaaggatcagtttgaacttgccctaggtgaagcaagcaaaagccagatcgtcattgctg

SEQ ID NO: 81720 - DNA, 247 bp, Glycine max
  Clone ID: 700959484H1
ctactgtgtaaatttcacccattaatatgaatactgtctaattgaatgtgttgcttgcttttaatttacagaaaagagatgatgagaaatggatgaaacatactttggggtaagtcatgtttcatttaaatgttatttacatcagtagacatttggatttagccggttctcttcatttctagtgggaatcctgacccttttagtgtatacaagctttttttttttcttaagtgcatcagagtttgag

SEQ ID NO: 81721 - DNA, 187 bp, Glycine max
  Clone ID: 700959485H1
aaacagtaccaaataaaaagcgttacagaagatcgatctgcaccataacataaaatttgacttattttgattttttatgattgatactagtgtgagcagttgataagagagatgatgatgaacgtgaaggatcgaccatggtgcggccggcggaggaggtggcgcggcgggtggtgtggaactccaa

SEQ ID NO: 81722 - DNA, 248 bp, Glycine max
  Clone ID: 700959487H1
agaaaactacaaagctatgggcaccatcatcgactcccatttcttggccttcactgcccttgtcactattgcctatcagtttttgtttttcgtcgtcactgcgctcctcaaattcgacaaagtcactgatttgctggaagtacgaatttcattataattgctgcattgaccctggtcatcaaaggctcctggtattttcgacagataatcctcactttgtttgttgggatatggggaattcgcctcgg

SEQ ID NO: 81723 - DNA, 252 bp, Glycine max
  Clone ID: 700959488H1
cggattggaaggacagggcgtgcgggatcaactggcttagctacttcattttacaccgatcgtgacatgttcctcatggcaaatataaggaaagcaatagctgatgctgaatctgggaacacactgacatttcaactggaaaggttgctagaaggaaggagaaagaagcagcagctgcacaaaaagaggcaaacattgctttatccaaacagttaggattgggagctgcttcaatgaacattgaagataaat

SEQ ID NO: 81724 - DNA, 252 bp, Glycine max
  Clone ID: 700959490H1
cgctctttcagctttgactttggtggaaactaaagactagtcaaaatggtgaagttcacagctgaagagctgcgtcgcattatggactataagcataatatccgtaatatgtctgtcattgctcatgttgatccggaaaatcaaccctgactgattctcttgtggctgctgctggtattattgctcaagaagttgcaggtgatgtccgtatgactgatacccgtgcagatgaagctgagcgtggtattacaa

SEQ ID NO: 81725 - DNA, 256 bp, Glycine max
  Clone ID: 700959491H1
tgatgcacccgttatgttggaccgtatattgcgcctattggcttgctacaatatcctctctttttctctccgcactctccctgatggcaaggttgagaggctctatggtctcgcccccgttgccaagtacttggtaagaacgaagatggtgtctccattgctgcgctcaacctcatgaaccaggacaaagtcctcatggaaagctggtactatttgaaagatgcagtccttgaaggaggcattccatttaacaagg

SEQ ID NO: 81726 - DNA, 257 bp, Glycine max
  Clone ID: 700959492H1
atcttatcttagctaccccatcacaacaaccacgatactatttctcatactctattaggcaaaaacaccaccaaatgggagaggaaaaggagcagcctaagaatgacaccgagaacaagcccgaggaggtagccccaagaaagacgacggacccatccctgtcgtttacaaactcgacttgcattgcgagggatgcgtcaagaagatcaaacgcacctgtcgccacttcgaaggtgtggaaaccgttaaggcggatc

SEQ ID NO: 81727 - DNA, 246 bp, Glycine max
  Clone ID: 700959494H1
ggctgcaacacccactccctcccctcccttcaatccctaattccgccactcacttccgctctcagctcagggtattacgtagtacgtggagaatgggaagtactgaaaagatcccaatcagcgctgaaagttcagaaccaccatcgagataaaaattaaaacattggattctcaaacttacaccctcagagtggataaacagatgccagtccctgctctgaaagaacagattgcttctgtaactgg

SEQ ID NO: 81728 - DNA, 194 bp, Glycine max
  Clone ID: 700959495H1
aataattcagaaatgttactgcaaacattagctatccctacaatactccttgtgatattcatatgggtggtacaaccaaagcaacgtcatgggaagattgcaccaggtcccaaggcgttgccaattattggtaaccccacatgctagggaaactcccgcaccgcacccttcaaacctttgcaagaaaatatggc

SEQ ID NO: 81729 - DNA, 259 bp, Glycine max
  Clone ID: 700959496H1
acagattgaaaataaagcaaaggatgctactgaatgtttggtacaagaaggagcacagtttgctactaggttgactggtattaaagagaatactaaatttcaaaagaaattacagaacaatgagcagatgtcaggtcgaagcatctagtacatggagcaaagcagcatcacaatgtgaaaaatgtatatgtatggcatgcactagctggttattggggtggagtgaagccagcagcaaccggcatggaacattatgaca

SEQ ID NO: 81730 - DNA, 264 bp, Glycine max
  Clone ID: 700959501H1
ggcatggcatgaaaggggcgaaaaggtcaagtcacgggtaatcctaattccccaccaagtcactacaaaccaaatattcttcgtcctcccgctcgctcttctcactcgtcatcttcgaattcgtctgcgccctaacaaaattcatttcaattccaactcctctgatcaaaatcctaggctcgttcttgaatccctaattcgatctcctcctcctcctccgaagaataaaaggaggatcgatgtgggcagcatcttgcctggcgt

SEQ ID NO: 81731 - DNA, 107 bp, Glycine max
  Clone ID: 700959502H1
attcggctcgagtttcaactcaatggttcttccctcaggttttgtttccatgttgatactttttggcatggttttggtagttggggtgaatattgtcccaggggttg

SEQ ID NO: 81732 - DNA, 83 bp, Glycine max
  Clone ID: 700959503H1
ggtttgggtttctcttcctcccttggagaaaaagaagagccaccgctgcgacgccgttcgtgcatttttgaggtgccgctgtc

SEQ ID NO: 81733 - DNA, 256 bp, Glycine max
  Clone ID: 700959504H1
aaacacgccgacatgtctaattggtatctcatggggagcagtgcgggggccacaatcgcctacttcgcgggtctacgcgcgaccgacacggcgagcgatctctcgccgttgaagatcagagggctgatattgcggcaggtgttttccggtgggacccagaggagcaaatccgaggttaggctggagaacgacgaggttcttccgctgtgtgtgacggatttgttgtgggagctggcgctgccggttggcgttgacc

SEQ ID NO: 81734 - DNA, 257 bp, Glycine max
  Clone ID: 700959507H1
caagattcaaactcactcttgaacctaaaaatcatagagaggttgcaactgtgtgctgcactgtggctagaactacatgttctgtggttcccttcatgctttgcactgtggctggctcctgttctgtcaattttcactctctgggggttcagtttgagttagctcaagataaagacatggattctcagaggtttctcatttgacaaaaattgtcttgtatttctttgagggaagaagaagtagatcaagttaaaaga

SEQ ID NO: 81735 - DNA, 206 bp, Glycine max
  Clone ID: 700959508H1
agagaagaaaaaaaaaaaagagagaaaagaaaaaatttgttttataactttttaacttattgttcacttcttcttcttcttcttcttcaatatcttggttctttgatattattctattgagcaaaaaatgggagttccagagagagaccctcttgcacaattgagtttgcctcctgggtttaggttttaccccacagatgaggagc

SEQ ID NO: 81736 - DNA, 120 bp, Glycine max
  Clone ID: 700959509H1
ctctacccacacccaaacccaaaccaagttctttctttctaattcccttgataatgtaaaatcacagaaaaacaaaaaaagctactcaaaacttggctccaattagcctttctttttttg

SEQ ID NO: 81737 - DNA, 257 bp, Glycine max
  Clone ID: 700959510H1
gagagacaggaaacaagaaaaaaaaaaaaacttagaaaagaagagggagagagaaagagaaaataataagaaaaagaaaacttgaaaactttgagggattgattagaaaaagggacatggagattctcatcttccaatgatcccttcaaccccacaaattttcccgtttggatttggtgtcacagcttgattctccattgctgcgattccaacatcaacagctaaaccaaacatctctttctttctctctctctctg

SEQ ID NO: 81738 - DNA, 250 bp, Glycine max
  Clone ID: 700959511H1
ggccaaactgatgctgagggtggttttgattccaatgctgtggcaactgcaaacatcttggagagttcaacgcctgtcattgatgggaaacagtactacagtttgactgtgttgacaaggacagctgatggagatgaaggtggcaagcaccagctgattgcagcaactgtgaaagatggcaaactatacatttgcaaggctcaagctggagacaagagatggtttaagggagcaagaagatttgtggaga

SEQ ID NO: 81739 - DNA, 253 bp, Glycine max
  Clone ID: 700959513H1
aaactaccagaggcacttcctgaagggaaagctttacattcatttctcagtggaatttcctgataccctgagtcttgatcaggtgaaagctttggaggctactctgccactaaagcctacatcgcagttgacagacatggagctggatgagtgtgaggagaccacactccatgatgtgaacatggaggaagagataaggaggaggcaacaagctcagcaggaggcatatgaggaggatgaggatatgcatggt

SEQ ID NO: 81740 - DNA, 257 bp, Glycine max
  Clone ID: 700959516H1
aagagaaggtgtagacaaacacaatctctaatggcactcaggatgtgggcttcttccactgccaatgcactcaaagtctcttctacctccagacctcatctcttgcatcctttttctttctccagatgcttgtcttccgtcttggatggacttaagtatgcagattcacacgaatgggtcaagcacgaaggctcagtcgccaccattggtatcactgaccatgcccaggaccatcttggagaggttgtgtatgtgga

SEQ ID NO: 81741 - DNA, 88 bp, Glycine max
  Clone ID: 700959518H1
ggctcgacggtgaattttgtgcttctccaaagctcaagcgatcctgctctgacctggaaagaagggatgtactaagggagacttgtca

SEQ ID NO: 81742 - DNA, 255 bp, Glycine max
  Clone ID: 700959519H1
tttcctttcaaatagtaacactagagaacaaaagctctagctagaactgataatgtatatacaagccatcattcagaacaattagtgcatcctctttcatctgaagaacttgtttagtttgctcctaaaatatgtgtctgaggatgtggtgcagaaatcctttacccttccttctttattaaagcttatagcatctgcaatcattaatttcttattccttcaaagtggcgatcacactatcattcagctgatttt

SEQ ID NO: 81743 - DNA, 256 bp, Glycine max
  Clone ID: 700959520H1
gctcctttggacggtgaatctgagtttgtgcagggtgctgctgatcagaatcagaagaagaacaacctgctggatatggcatctgtgcaagatgattctgcaaaaactctttctgaggagcttgcagacattgaatcccagctgaagttctttgagaccccttcttttcttgatgaagcctgggctgatgctgcattggcgtctttgctcagtgaagatgcatctcaggatgctgctggaaaccctatgaaccttt

SEQ ID NO: 81744 - DNA, 255 bp, Glycine max
  Clone ID: 700959521H1
attttcttcttctgcaggaccaaattgatatacaagatcattgttttagagagagagagagagagagagagagagagagagaggatgtttggttcagagaaaactcctctgagagatgctaaacctacctctgttgaccatgcccataacccctttgattctgatgaagatacaaaagataacaagtataattcttctaaggagactttgaccaacaccaacccctttgatgatgatcatgttaatgccactggc

SEQ ID NO: 81745 - DNA, 194 bp, Glycine max
  Clone ID: 700959522H1
ggaatcagaggcctttgcaggggagctttttgatgcgctttctaggaggaggggaattcaaggggattccattaacaaggccctgttgaaggacttctgggaccaggtttctgaccagagtttcgattctaggctcagaacattctttgacatggttgataaagatgcagatggaagaatcacggaggaagaaa

SEQ ID NO: 81746 - DNA, 255 bp, Glycine max
  Clone ID: 700959523H1
atcaacagctcccccgacggtgaggtcgacgacaccaccggcctcatcctcaaactcaagtccttctgcctccgcatggacgcattcgggttcttcgccttcgtcagcgccaagacgaaggagctcgacggcctacgcgccgagatgcctgtggctctggcggagtgcgttgatccggcgaaattcgtgctggaggcgatctccgaggtgtttccggtcgacaagagaggggacaaggccggccacgacttgggc

SEQ ID NO: 81747 - DNA, 253 bp, Glycine max
  Clone ID: 700959525H1
cgtttattctatagccctgaagatgtgaagtgaggataggaacaaaatcaaattgagaacttttcttttcctcctctgttcttctgatttgaagtttgtccatgaatatttcctgttatatctaccttgcaaacttgcccttgagactttagtaaccttgggatatagaggaggattcaaatgttgctgcttctgcaaatgtttcacttcaaatgaaagcagacttcttatagattatttcattggtctaccc

SEQ ID NO: 81748 - DNA, 250 bp, Glycine max
  Clone ID: 700959527H1
gaagaatgagcatatctgtggaaggcctttgggactcagatttgacaagaaaacaggtgatttgtatattgcagatgcatattttgggctcctgaaggtaggacccgagggtggtttagcaacatctcttgtaactgaggctgaagggattccattgagatttacgaatgatgttgatgttgatacggaagggaatgtttattttacggaaagcagtgctctttatccaaggaggaatttccttcagctg

SEQ ID NO: 81749 - DNA, 70 bp, Glycine max
  Clone ID: 700959528H1
tattactccttattcattcaccaccctatccaacatggctgacgagactccaaaccagacaaccacacca

SEQ ID NO: 81750 - DNA, 254 bp, Glycine max
  Clone ID: 700959530H1
cactcattaattgcaagaatggcacttcgttgcttggtgatgtccctttctgttctcttcactcttggtcttgcgagagaaagccatgccagagacgaagatttttggcatgctgtttggccaaacactcccattccaagttcattgcgagatcttctaaagcctggccctgcaagtgttgaaatcgatgatcaccctatgcaaattgaagaaacacagtacccgaaaaccttcttctataaagaagaccttca

SEQ ID NO: 81751 - DNA, 254 bp, Glycine max
  Clone ID: 700959531H1
tgtgaattaaaatatattcaattttgcgtttctctgcctaaaaggattgaaagatgggtcaagcattcggttgctaccaagtcgatcagtcaaatgtggctatcaaggagcattttggaaaatttgatgatgtcctagagcctggatgtcactgcctgccttggtgtcttgggtaccagattgctggtagtctgtcgctgcgagtgcagcaacttgatgttcgatgtgagacgaaaaccaaggacaatgtcttt

SEQ ID NO: 81752 - DNA, 259 bp, Glycine max
  Clone ID: 700959533H1
agattttatccaattgaaattttaaaaatgactgggataaacttaagacttcaattattgaaattgaataagtaaacaatttaattggattggtcgaatggtatcaaaaaaatggagtactaactcccatttcttatttattattgaattaaccgatcaacttgctttgttatcgaacatttctttttgatttcaaaaattttccggaaaaaatttgaatctatttttatatgcgaatcaatcctactacttctggtcc

SEQ ID NO: 81753 - DNA, 252 bp, Glycine max
  Clone ID: 700959538H1
cttttcaagtcttttctctctctctctctctataataagattcttccctctcccttctctctctctctctagaacttcgtcctccctctgcttctttctttcttagttgcagcgcgattgctgcatcgtcctccaataagagctcgctgctagtgaaccctaacacggcggcaacgagaggtgttcggttgaagctcagatcagcgatggcagcagcaacccgcacttctctgcggttcctcctctcagtct

SEQ ID NO: 81754 - DNA, 69 bp, Glycine max
  Clone ID: 700959539H1
gttcacaggttgtaaaaatatatccaaattctgacaactttcgtaaagaacacatattctctttaagtg

SEQ ID NO: 81755 - DNA, 141 bp, Glycine max
  Clone ID: 700959540H1
gattgatttggtgtgtttgtattgtgaggtgttgtgagtatatataaataggttactttctcagttgttgctgtttagggacactatcgagtttatagttcagatggggggtcaagaaaatgcaatgggggggtttccaca

SEQ ID NO: 81756 - DNA, 253 bp, Glycine max
  Clone ID: 700959541H1
atgaattaacacgcaagtatgagcgggtcagtgggggaacaagttctttcttttattattgtgaaagagatggtggccccgcaaattgaaaggaaaatgactgagcagttgcagcaggggtgattgatgatgatgatgatgatgatgggtcttgctcgatctaatctgaatatgaagcagcgattgttgagactttgttactattgggtctctctgattccgcaactattgcgtctcctccaaatgctttgct

SEQ ID NO: 81757 - DNA, 132 bp, Glycine max
  Clone ID: 700959542H1
ctaccaactattctctctcgttctctgatttctgaaatccctcagccatggcttcctcttccctctctctgtcactctctctcaccctttgccttgtttccactctctgctacgctcacacatcttccctaa

SEQ ID NO: 81758 - DNA, 65 bp, Glycine max
  Clone ID: 700959543H1
gtgacaccatgaacattaattcacttgcccgtgaatccttggtcaatgccgacggtattatagag

SEQ ID NO: 81759 - DNA, 250 bp, Glycine max
  Clone ID: 700959544H1
cacaaggcagaaagcaagctcatcctagagttttaaaaatggcagcagcctcctccatggctctctcttccccatccttggctggcaaggccgtgaagctgggcccatcagcccccgaagtcgggagggtcagcatgaggaagaccgtcaccaagcaggcctcctccggaagcccatggtacggcccagaccgcgtcaagtacttgggcccattctctggcgagcccccgtcctacctcactggcgagtt

SEQ ID NO: 81760 - DNA, 130 bp, Glycine max
  Clone ID: 700959546H1
acaagacgggatacgtccacatatgtttaaatccgtaatagctgccagccatcctgaattttcatctccgaggcaacaggacgccttagaatttttcctacattttcttgatcaagtcgagcgagctaat

SEQ ID NO: 81761 - DNA, 254 bp, Glycine max
  Clone ID: 700959548H1
aacaataataaggttgaaccctcaaccaagaagccatatggaagtattgtgaaggatcttgtcacaatcaagtcgtttgcatcaggaataatggtcccaaaagaatacatatggccagttaaaccagacaaatatctaggacttcccacaacacttgtggctgatgcccataaatcaggactagaagtttatgcttctggttttgctaatgacttctttactagttatagttatgactacgaccctgttgccga

SEQ ID NO: 81762 - DNA, 163 bp, Glycine max
  Clone ID: 700959549H1
tggagaggaaaattttgtcacacctgcttctagttccattaactcttttggggaatgtgatactacccaagttcaaaggtgtcccgagtatcatactcctcaagattcattaaccttcaatgaagctgcagtcttcaatgaggatgatattcacactagcaat

SEQ ID NO: 81763 - DNA, 161 bp, Glycine max
  Clone ID: 700959553H1
cttcaacagtgttagctgattgacaccattgttctctcttctcgagcaaaatagtgtcatcaaaggctctcatcattgctaagctactgattcaaaaaagcactccatgaataacaaactacattagactacaaatcagaagccaaggtgagactttttta

SEQ ID NO: 81764 - DNA, 140 bp, Glycine max
  Clone ID: 700959554H1
gctgagaagcatgctgccatagaaggtgatttagttgtgcagccatcagatgatcacttttggtttcaccggccccgtgttgtcctctttttgattcactttatccttttccaaaatgcttttgagatagcatttttttt

SEQ ID NO: 81765 - DNA, 250 bp, Glycine max
  Clone ID: 700959555H1
gaaacaaattagaagagtgtgttgtgttgtgttggagtagcaagctagcaaagatgtttggcatcttaggaggcaataaggggcacaagatcaagggtactgtggtattgatgagcaagaatgtgttggacttcaacgaaatagtgtccattactcagggtggtttggttggtgatgccaccggcatcttcggtgctgccaccggtattgttggtggagttgtcgatggtgctattttcatcttcagtcg

SEQ ID NO: 81766 - DNA, 250 bp, Glycine max
  Clone ID: 700959556H1
tttctttccattttccttcgttttctctctctttctcagtttctcagtttcccagtcatcaccatcgcagcagcaagatgtggaaccaaccattcggaaaaaccgatttggaaagcggttctcggcctctgtatccgatgatgctcgagagccctgaactgcggtggtcgttcatcagaaaagtgtactccataatcgccatccagttgctcgtaaccatcgtcgtcggcgccgtcgtcgtcaccgtccg

SEQ ID NO: 81767 - DNA, 246 bp, Glycine max
  Clone ID: 700959557H1
ttctacatccctggctctgttccgtcgatgacgatggcgtttagggtgcgaaaccctgacctccgctttctcattcttctctctctcttgtccatcacttccgccaaggtcttcttcgaggagcgtttcgatgacggatggggaaatcgttcggttaaatcagattggaaaaaagatgagaacctggctggggagtggaaccacacctctggccaatggaatggagacgctaacgacaaaggtatt

SEQ ID NO: 81768 - DNA, 245 bp, Glycine max
  Clone ID: 700959558H1
cttttctctgtttctccctttctctctgtctctctctcgctcttcttctcatccagcaccgagtcacagactcaccgatcttccgattccctttcgtcttggtttattagctcgaaggagagacccactcttggtggcacgcggattaagacccgcaaacggaatattgctgcgccgctggaccctgcagcattctcggatgcagtggtccagatttatttggataatgctggtgatctggaact

SEQ ID NO: 81769 - DNA, 248 bp, Glycine max
  Clone ID: 700959560H1
caattgctgaatttgcacttcaacaggtaaaggctcttttgaaggatcggttaagtggaaaagcaacaggaggatctagtgaaaagacagaaaccagttcttcagtagaattaaactctggcaactttgatgaattggtgatcaaaagcaaagaactctggattgtggaatttttcgcacctcggtgtggacattgtaaaacattagctccagagtggaagaaagcatccaataatttgaaagggaag

SEQ ID NO: 81770 - DNA, 248 bp, Glycine max
  Clone ID: 700959561H1
gaggaagaatcagagctcagcgataagcagaaagtggagatcgcgcaatggttcctcctcaactctcctcccggagaaatccaatacgttgccaaagatgtgaaatcgattctcaacaacgacgatttgtacaaggaagccgcttccgaggcttttccctattacaacaaatcgcacttgatttccattccaatgcccaaccgaagcggagacgtactggttacttcgttcggtgagcttgagggtaa

SEQ ID NO: 81771 - DNA, 247 bp, Glycine max
  Clone ID: 700959562H1
caaaccctaatctcccaaaaccctacgcatggcgtcgtcgttaattcacctccgccgcaccgtcagagcactctccggcgtcgcccagtctttctctgtgcatgcggcatcgtattccgtccccattcggtgcggtgtttcatggagtttgcagtcaccgaagggtgtggttcagccccgttcattcaggtcaagctcaatttcacttctctcttttcgatcctcgcagcggcagagtcgcatcccc

SEQ ID NO: 81772 - DNA, 250 bp, Glycine max
  Clone ID: 700959563H1
atctttcaccattctcttattttctaaccatatttttgttttctcaatttccaagggacatttggattcttagttttcacttttataccatatttcttgaaaccttgtgttaaaaattgtgtccttttgaacttcaataacaatttggacttttttgtagtttcatacccacatacccgttgttggatttgcactggttttacttgctccatggctcttcacataagcagtggttgttttactgtgatgt

SEQ ID NO: 81773 - DNA, 250 bp, Glycine max
  Clone ID: 700959564H1
tctctttcaacaatgacaaacttgaagcctctaattctcttagccattattgttatgatttcaataccatcaagccactgcagaaccttgcttccagaaaatgaaaagctgatagagaacacttgcaggaagacccccaactacaacgtttgccttgagtctctgaaggcaagccctgggagctccagtgctgacgtcacagggctagctcaaatcatggtgaaagagatgaaggcaaaagctgactatg

SEQ ID NO: 81774 - DNA, 85 bp, Glycine max
  Clone ID: 700959565H1
aagacttgctctgcctctgccactctctgagtaggactacactgccatggctgcctcagtctccactgttggagctgtcaacgga

SEQ ID NO: 81775 - DNA, 118 bp, Glycine max
  Clone ID: 700959567H1
ccggagagtatgaaatcttcagtaggttctaggctcccaaaattcacaaaagctgaatctgaaggtctaaaaaattccatagattttcttggtgtgaattactacaccacttattatg

SEQ ID NO: 81776 - DNA, 249 bp, Glycine max
  unsure (1)..(249): unsure at all n locations
  Clone ID: 700959568H1
gttcctgctccttccanccttgagagcgagaaaccacgtttctctcttgaggttaattcttattattcattgagtattgagcatggaggcgccatctctcaccaaacccaacgacccaccaagaccttccaccacttccagcacccttagtctgcagggggggccgggcgaacgagcccactccgaaaaatgtttgcggtggcgtccatcgccgccggcatacagttcgggtgggctctgcagctgtct

SEQ ID NO: 81777 - DNA, 249 bp, Glycine max
  Clone ID: 700959569H1
gttcgagtatgtacttcagatgattcatgtagatatggaagagttactgagctttatgtgtatgacaaattcaatagggtccctgcaaataaggtggaggcaggagatatatgtgcagtatgtggaattactgatattcagatcggggagacaattgctgataaagtatctgggaaaccactaccttcaatcaaggtggaagaaccaacagtgaaaatgtctttctccataaacacttcaccttttgtt

SEQ ID NO: 81778 - DNA, 51 bp, Glycine max
  Clone ID: 700959570H1
aaaattagggaaacaaggaagcaaaatgacacaatagtccttcttccctgt

SEQ ID NO: 81779 - DNA, 248 bp, Glycine max
  Clone ID: 700959571H1
tggaccagaagaatacatcatagcttctttctcatttcacacacacaataacctccctcgagcatttcttcttcgtgttattttggttgttaaccatctgcggtgcctccatcttttacgtgacgtgtaggaaccatttggggtgctatgctatgctacctaagacatcatgaagatttcaagttccaagcaattggctgtgggatttgcacttggaaatgaaggataggcaacgttggagagctgaa

SEQ ID NO: 81780 - DNA, 106 bp, Glycine max
  Clone ID: 700959572H1
ctcgaagggggttttaggttgctcttcttcttcaaccttagccatggagtctctcccaaaaattcgtcattctcacatctcactcaatcactcactacttcaacga

SEQ ID NO: 81781 - DNA, 244 bp, Glycine max
  Clone ID: 700959573H1
tgggaatttgacaaaaaagtagccactgccccaacgatcccatttcccttgacttctctacgtgaacgtccttgttttgcataggagctagttgaaatgtccgagggaaatgcagggaaaggaaagaaaatcgccatcattggtgtctcaaccttattgttggtggctatggttgtggcggtcacaattggggtcaatctcaatgagaatggttccaccaatgatatagaggacaacaagaaag

SEQ ID NO: 81782 - DNA, 245 bp, Glycine max
  Clone ID: 700959574H1
cagttatccagaaacagaaaccgtagacaacccgaatcccttattaagcaggggtttcgcggcgcgagacggtgacactggcagagtggaatttccgccgccattcgaagctacagcgatggccataaccgccaccatttccgttcccttcacatcccccagtcgccgcactctcgcctccgtcaatagcctctctccgcgttctacccgatccactttgcccacaccgcaacgcactttcaaat

SEQ ID NO: 81783 - DNA, 242 bp, Glycine max
  Clone ID: 700959575H1
atttctcgattcatctctctcattgagctgcattgcaacactcactcaccaatggcactctgacccatcgacaacgctcttccaacaaccccagagagacctaaaaaacaacccaaagtcgctcttgcaacccaaaagcaacaagaccgtgctggcgtcaatggcgaaaacatagttccattgccctcatctggggatgccactgttgactatgtctcctccgacaaccttaagcccttgtc

SEQ ID NO: 81784 - DNA, 241 bp, Glycine max
  Clone ID: 700959576H1
gagaatgactgttactgatgagagcttggagtttctggctctcaaattccccaatttcaaagccctttcccttctcagttgtgatggattcagcactgatgggctggcttcaattgccactaattgcaagaatttgactgaacttgacatacaagagaatggtattgaggataagagtggcaattggttgagttgtttccctgacagcttcacatcattggaagtattgaactttgccaat

SEQ ID NO: 81785 - DNA, 245 bp, Glycine max
  Clone ID: 700959578H1
ggcgagacatcgattccaaaggtgcgtttctgctgtgctagggtttctgcatcttccacctccgtcgcgatgcaaccaggcttcatctgattccgatttcccttcgctccttctcctccttaacattcatcttcttcgattcctctacaaattatgattattattatgatgaactccatcttcgcctcgcataaccttcgcgtcttcggtcccggcttgaatcccttcgcaccttattgcatcgc

SEQ ID NO: 81786 - DNA, 65 bp, Glycine max
  Clone ID: 700959580H1
gcgagaatggaatttcgctgctcagtcaacgctgttaccattctcttctctcttgcggttgcagg

SEQ ID NO: 81787 - DNA, 66 bp, Glycine max
  Clone ID: 700959581H1
accgtcaccaagcaggcctcctccggaagcccatggtacggcccagaccgcgtcaagtacttgggc

SEQ ID NO: 81788 - DNA, 236 bp, Glycine max
  Clone ID: 700959583H1
cccttttcttttgttttctctcttactactacttaccgccgaatgagtaatgagtcactactactacgtaacattagttgagttgaggataaggttgcagatccttgaggtaccttcaagccaatcgtgcatcaccacctctcccggatcagaatgcagcctttcagaacttttcaaagatattgaaaaaacaaaaacccatttaagttagttttcttttctgcatacatagcata

SEQ ID NO: 81789 - DNA, 244 bp, Glycine max
  Clone ID: 700959585H1
agttgttggtggtggtggtggatttggagccggtggtggtggttttggagccggtggtggtggggttggtagtggtgaccctgctcaaattgtctccaaagccttgctctgtgtcaatgataagaatatttatcgcagctgcgaagagacgtgtagattgaacgagaatggaaacctgaatgtgcctgtagagaaaactgatacattctgccaaggaccatgtttgtcagagacaaacttggtc

SEQ ID NO: 81790 - DNA, 246 bp, Glycine max
  Clone ID: 700959586H1
ctaaatctctcacatctcttatctttctctctctctcttataatacaagaccctagtcctctctcacgccccaaccaccgccatcaccaaaccttcctctctcgatttcccttcaattcccttctgggctttgcaattcggccaattgggtccccaaatctgcaaccttttcctctgtctaacgcgaaacggaagagaaacacccacatagagaaagagaaaaaaacggagaggaagaaacaattt

SEQ ID NO: 81791 - DNA, 80 bp, Glycine max
  Clone ID: 700959588H1
gtggtgctggtgggctcaacaggacacacactgaatgggctcttgacaccatcaccacgaccacacccctcctcctccca

SEQ ID NO: 81792 - DNA, 132 bp, Glycine max
  Clone ID: 700959589H1
gacggtaggtattaacattacaacacctttttattattgcacctctctctctctctctctcattgccatagatctgagacacagatcacagggttaacgctttttgacccttctctccattggtcattccac

SEQ ID NO: 81793 - DNA, 242 bp, Glycine max
  Clone ID: 700959592H1
aacaaatccaagagatagcgccgagatgcatgctatttgcagatgacatagtcctccttggagagtcgagggaggagttgaatgagaggttggaaacttggagacgagctctagaaacacatggctttcgcctaagcagaagcaaatcggagtatatggaatgtaagttcaacaaaagtaggagggtatctaactcagaggtgaaaataggagaccatattatccctcaagtcacacggttt

SEQ ID NO: 81794 - DNA, 241 bp, Glycine max
  Clone ID: 700959593H1
cttgatcggtggtgtatttgacttttcaggtgctcatattcttatgatgatcatcaaactgcaaatatagtgagcccattaagctattactgaaatttgttgcagatttgaaattcttctaagatggatacttcttataggactggtggagtcaagtacgagtgcttgctttttgatatggatgacactctttacccattgagcttaggtctcaatttgttttgtcgcaagaacatacaag

SEQ ID NO: 81795 - DNA, 161 bp, Glycine max
  Clone ID: 700959594H1
tcttgtccgaactggagagctttataggctgaggcgacagatgggtatcatagagcattgggtttacttctcttgtaatctccctgaatgggaggcattcgatccaaacacccgtcgatggatgcgcttgcctagaatgccctctaatgaatgctttatct

SEQ ID NO: 81796 - DNA, 162 bp, Glycine max
  Clone ID: 700959595H1
aatcattgttcattcggcgaattatcctattcaaccactcattgcctttcgatctctctctctctcctgcgacacaacatctcattctaaattcccttcaatttcatctctcacacatccatacctcttcaaaccataaaaaaaaattaaaatgattcacct

SEQ ID NO: 81797 - DNA, 110 bp, Glycine max
  Clone ID: 700959596H1
gcaggaggctccttccacttagtcaactgccctgtcggtcagagcgttgaagctgtatcattctctgaacttgaagttggtgcagatgacagggctgttctggatcaaat

SEQ ID NO: 81798 - DNA, 239 bp, Glycine max
  Clone ID: 700959601H1
gtccgtatgactgatacccgtgcagatgaagctgagcgtggtattaccatcaagtctacaggtatctcactctactatgaaatgactgatgaagctctcaagagttttaagggagagcgcaatgggaatgagtatcttatcaatctcattgactcccctgggcacgttgacttctcatctgaggttactgctgcactccgtattactgatggagctctagttgtggtcgattgtgtgga

SEQ ID NO: 81799 - DNA, 220 bp, Glycine max
  Clone ID: 700959603H1
gttgaaaatcaacaaaaacttatcaatctctctttttctctttctctctccggcacctcttgttaaaaaattgttcttttcaccgaaacccgtaaagggtcctgagctagcttcttctccatccatggtcctgatttttttcttcctcttgttttcagcttctatatgcaaaagggggtgggaccaatgcctgcaaatattgataatgtagttactcact

SEQ ID NO: 81800 - DNA, 237 bp, Glycine max
  Clone ID: 700959605H1
ttcttcttcaaggtgttgggagacatgcctagcaaacagacttatagcttttgcttctgacttccgccggcgtttcaggctccccgtgtcggaggccccgccggagataaggacccttttcgaccgttactccgatcagaatggcgtcatgacagccactcacctccgaagtttcctggctgaggtgcagagggaagacaatgccactgaggaggaagcacaaaccatcatcgatgg

SEQ ID NO: 81801 - DNA, 235 bp, Glycine max
  Clone ID: 700959606H1
gaaaaacgttgttgttaccatctcttcggacaaaggtctttgtggtggaatcaattccacgtctgtcaagataagcagggttttgtacaaattgaattctgggcctgataaagagacaaaatatgtcatattgggagagaaggctaaagctcaattgttgcgtgactcaaggaaacacattgtgctcagccttactgaattgcagaaaaatcccctgaattacactcaggtgtct

SEQ ID NO: 81802 - DNA, 236 bp, Glycine max
  Clone ID: 700959607H1
caacaacattcattcattcacagctgtcacgccgtgaacggaaaatggcaacggcgagacgcagtttcccgcctatcaccgaatgcaacggaacgacaccgtgcgagtctgtggccgccgacctcgacggtacgctcctcatctcccgtagctcgttcccgtacttcatgctcgtcgccgtcgaagccggcagcctcctccgcggcctcatcctcctcctctcccttccgttcgtc

SEQ ID NO: 81803 - DNA, 233 bp, Glycine max
  Clone ID: 700959608H1
cgcatttcctcctccgtagtccgttccccgaacccgacaaaacctgacattgctccggatcccggagacagccgcaggttcctccacaagagggcctccgtgctcccgccggagctccgcccgccgctgcccgccggcagcctcctccagaggctccgggaaatggacattgcgcggagcggatccggctagacggtctcgctccgccggagactgaacaaacggtggcgccg

SEQ ID NO: 81804 - DNA, 235 bp, Glycine max
  Clone ID: 700959609H1
ctcagttctccaactctctgatctcaacttccacttcagcttcaagaccaatggccaacgacgattgctgcgccacgcaactcatcgacggcgacggcgagttcaacgtcgccggcctcgacaactttatcagaaccgtcaatctcgcctcctgcggcctctcctatgccgtcgtcgcaatcatgggacctcagagtagcgggaagagcacgttaatgaatcatcttttccacac

SEQ ID NO: 81805 - DNA, 230 bp, Glycine max
  Clone ID: 700959611H1
gttatctactcttttctgcatgtttgttctctcaacgactcctccgcgaaagagtattattcaatattttggttgggttgaatcccggggttgaagcgttgcagacatcacggctattctaagagtgtctcgctccctcattcatgtccgatctgtacgacggaggacgggtagttgcgtaactgccgttaacccttcgccgcacggtgggcgtggtgctttgccttctg

SEQ ID NO: 81806 - DNA, 231 bp, Glycine max
  Clone ID: 700959612H1
tttgaacgattcggctacttccctcacgcgccgcccttctcgaatttctccgatgaattcgacgacgcgctcgaatccgccatcaaaacttaccagaagaacttcaacctgaacgtcactggcgtcctcgacgacgccaccgtgcagcagatcgtgctgcctcggtgcggcgtcgcgatataatcaacggcacaaccacgatgaacgccgccaaggagaacgagacggcgt

SEQ ID NO: 81807 - DNA, 233 bp, Glycine max
  Clone ID: 700959613H1
aaacacaacgcacaacattcgtcattcaccgccttgtcttgtcttcttctgtctatcaaatcacggaatctctctgaatcgcgggattaagagaggaatatgcaacagaggctaaagttgcagcaacaacaggccctcatgcagcaagctttgcttcaacagcagcagatgtaccaccctggcatgctcgccgctgctatgtctcagatggagcctgttccaagtggaaatgt

SEQ ID NO: 81808 - DNA, 232 bp, Glycine max
  Clone ID: 700959615H1
aaagagatcacatagcagaatggcttctactcaatgtttcttgcaccaccatgctcttaccacccctgccagatccccatcacaacgcatcatggttagcaccaagcctaaccagcttgtttgcaaggcacagaagcaagaggatattgatgtcagcccaatctctcgccggttagctctaaccgtgctcattggtgctgctgctgttggctccaaagtccaacctgctgat

SEQ ID NO: 81809 - DNA, 224 bp, Glycine max
  Clone ID: 700959617H1
acgtgagtcaaatgtttactcttcatggtggccttggttgttgttcaacatgtgaagtgtggggactcagctcgcatgttacttcagcacggtggcttcgttcaacgaattggcaccaacttcgttctgagtaacaggcatttctacttcaacggattcaacgcgtactggttaatgtacatggcatctggcccagccacaaggcccaaggtcactgccgtttt

SEQ ID NO: 81810 - DNA, 227 bp, Glycine max
  Clone ID: 700959618H1
gtttaaatttccaggtggagggaccatgttccctcacggagcagatgcatatattgatgaacttgcgtcagttattccaattgctgatggttctgtcagaacagcactggacactggttgtggggttgcaagctggggagcctacttgctaaagagaaatgtgctggctatgtccttcgctccaaaggacaaccatgatgcacaagttcagtttgctctagaacgag

SEQ ID NO: 81811 - DNA, 232 bp, Glycine max
  Clone ID: 700959621H1
tagaaacagtgtgatgaaaatgaaggtccttgttttcttcgttgctacaatttatgtagcatggcaatgccatgcgtacgatatgttccctctccgaatgaacactggctatggtgcccgtactccggaggtgaaatgcgcaagttggaggcttgctgaggaagcacacaacatctttggctttgagaccattcctgaagagtgcgttgaagcaacaaaggaatacatccat

SEQ ID NO: 81812 - DNA, 231 bp, Glycine max
  Clone ID: 700959622H1
cctaattctcatttcttcatcgttcgattcttctcctcctaaagatgcagatcttcgtgaaaactttgaccggtaagaccatcacccttgaggtggagtcctccgacaccatcgataatgtgaaagctaagattcaagacaaggaagggatcccacctgaccagcagagacttatctttgcgggtaaacagcttgaggatggtcgaacccttgccgactacaacatccaaa

SEQ ID NO: 81813 - DNA, 66 bp, Glycine max
  Clone ID: 700959623H1
gttctagatcgcgagccgccgcccttatgcagtcgttcttgtaccagtggcaaaaccggaacgggc

SEQ ID NO: 81814 - DNA, 231 bp, Glycine max
  Clone ID: 700959624H1
cttggaattccatgattgcgggaatgatgttaaataaagagagtgagagagctgttgatatgtttcaaaggctggaatctgaagggttgaagcctgattcagctacttggaattccatgatcagtgggtttgcacaactaggggagtgtggggaagcttttaagtactttgggcaaatgcagtctgttggtgtggctccatgtttgaaaattgttactagccttttgtcag

SEQ ID NO: 81815 - DNA, 231 bp, Glycine max
  Clone ID: 700959626H1
gttttgataaagctgacagaaagcgcctgttcactatgattaatgatttgcctacaatatttgaggttgtaactggatctgcaaagaaacagacaaaggagaagtcatcagagaacaatggcaacaaatcaaagtccagttcaaaagggcgaggatctgaacccccaaagtattcaaagctagtgaaggatgaggaggagggattggacgaagaagacgatgacgagcatg

SEQ ID NO: 81816 - DNA, 230 bp, Glycine max
  Clone ID: 700959627H1
aaacccgtgactcagcccactcttgctttgcttggctcaaccgctaaccaaaccaaagctctctcaatggcttcggagcaacacgacgccgttttccgcgaagaagacatggacgacgacgacgacgagtctcaggaggacgaagagtacgaagaagacgacgacgaagaaaacgtgccctctccctccaccgctctcgctgtcaccgtcgccgtccccggttccgccgt

SEQ ID NO: 81817 - DNA, 70 bp, Glycine max
  Clone ID: 700959628H1
cggctcgagcggctcgagggcaggaactggtttctccacctcctgtctttccacttccagacactaaggg

SEQ ID NO: 81818 - DNA, 230 bp, Glycine max
  Clone ID: 700959629H1
tgtccacaacacaagaaaaccaacctaattccgagaagaagaaaaacattcattgtttccataaaaaagaaaatggaacgctctacaaaactcttctcggcggcgttggttctctgcgtggttgtgatggcacaccagacagcagcacaggaactaaaaggaaataacctaatcaacaaggtttgcacaatcaccccgagcagagacctctgcgttgggatcctctcatc

SEQ ID NO: 81819 - DNA, 230 bp, Glycine max
  Clone ID: 700959630H1
cttcggacatgtaatgaaatgagacgtaaggaaacgaaaaccctcttgttgttcatcttatactgaacttggaattatgtgcatcaccgtcgccaagtctcaatgaacgctgtttggagtctcgaatttctcgggaaacaaacacaatcaatcgtccgaactcaaacctaaacgacaactaatcgtggcgaatggcggtttctgaagaagaatgctcttctgcgaattca

SEQ ID NO: 81820 - DNA, 231 bp, Glycine max
  Clone ID: 700959631H1
cgaaaccctaaccctacctcctcgcccccatgcccatggctaagaaacgaaagcttcgatcctccaacccagaacccaccaaacccgtcgagccacagcaacagaaccacgagactgttgaactcgaccaacagcaacccatccccgaaccaaccctagaagactccaacaccatggccatccgcgaaccaaaacatgaacaagaagaagaaccgcaaaacgccgaaagcg

SEQ ID NO: 81821 - DNA, 233 bp, Glycine max
  Clone ID: 700959632H1
attgcaatcaaattagttcattctctttgcgcagttccctacctctcctttcaagatgcagatcttcgtcaagaccctcaccggaaagaccatcacccttgaggtggaaagctctgacaccatcgacaacgtcaaggcaaagatccaggacaaggaaggaattcccccggatcagcaccgtctgatcttcgccggtaagcagctcgaggacggccgtaccctcgccgactaca

SEQ ID NO: 81822 - DNA, 59 bp, Glycine max
  Clone ID: 700959633H1
tgtccgtatgactgatacccgtgcagatgaagctgagcgtggtattaccatcaagtcta

SEQ ID NO: 81823 - DNA, 77 bp, Glycine max
  Clone ID: 700959634H1
atatttgttacttatattttcttcgttcagcatggactcgccgaagcggcaggggcagaactttctggtggcggtga

SEQ ID NO: 81824 - DNA, 237 bp, Glycine max
  Clone ID: 700959635H1
cagccacaggttggcatgcctcctcccccctctggacagaagcaccctaagttcatggacttcaatcagcagaagtagctaataatagttgtagcagtaaatgattgattacatgcaatattcatcacaagtaacatcctgtgcatatgaatgtataactaactggtgagacttgtgaaggatatattgtgcagttcagtgtctttagtcatgtgttgtttatctttagttctagga

SEQ ID NO: 81825 - DNA, 233 bp, Glycine max
  Clone ID: 700959636H1
gggtgttcaagaacagcaatgacttgggagtgaagttcccatttaaccaaccaatgaagatatacaacagtttgtggaatgctgatgactgggccacaaggggtggtttggagaaaacagattggtccaaagcccccttcatagcctcctacaagggcttccacattgatggttgtgaggcctcagtgaatgccaagttctgtgacacacaaggcaagaggtggtgggatcaa

SEQ ID NO: 81826 - DNA, 228 bp, Glycine max
  Clone ID: 700959638H1
gagaatggctcccaagggtctaacctttctggctgtgttaatatgcgtttcagcactgtcactgagtccttctgttgcgggggaagggcaaaataatggccttgttatgaacttctacaaggaatcatgccctcaggctgaagacatcatcacagaacaagtcaagcttctctacaagcgccacaagaacactgctttctcctggctcaggaacatcttccatgactg

SEQ ID NO: 81827 - DNA, 219 bp, Glycine max
  Clone ID: 700959639H1
atttgggagttacggtgtttgctcaaagatgattactaacccttcattgcatgcttcaacattgccaagtgctttatcttcatctctgattactctacatggaagttctgtaaagtgtatgccctgccttccatttagagccctaagaaaaatcaactggataagagctacatctgctgcagatggagggcctattgagtcatcgccagctttgggatc

SEQ ID NO: 81828 - DNA, 229 bp, Glycine max
  Clone ID: 700959640H1
cttcctcacgcatttcctcgtttttttcttcccttttctctttctccggcgacgatctcagattccggccactcctctcgccggcgagcccttactcttccctcctccgtcgagccctctccgattcgaatcgttcccagcctcgcaccaccatgaatcccgaatacgattatttgttcaagcttttgctgattggagattctggtgtaggcaagtcatgtcttctcct

SEQ ID NO: 81829 - DNA, 230 bp, Glycine max
  Clone ID: 700959641H1
ctcactctgtgactgtcgctggcagctcaggtgttccttgtatagatctgtggtttggttttcgggagggaacaaaaaaaaaaggaaaagatgaatagctacagctactatgggtaccaagagaagaacaccttgacaagctgtgaggagacgaggatggaatcagtgatttgccccaaacctcgccgattgggtctcataaaccactcttccatcaacacagaagtcgg

SEQ ID NO: 81830 - DNA, 227 bp, Glycine max
  Clone ID: 700959642H1
aacaccatctatctaaggcagtcaagagccatgaacccttttcaaggagttatgtatgattatatccgtttagaacgacctccattaacacagatttgattgtgtccaacttctagttgacaaagtcaaaacatatatgtagactttatgcatttcgttttattctttttcaaactagagttagtggaaaaacatgattagctagaaagaagttactgatatataga

SEQ ID NO: 81831 - DNA, 229 bp, Glycine max
  Clone ID: 700959643H1
taatggttccacgccaacggaagcgagcaaaccttcatcagcctctccagcatcatcgaacacttcaaagacagggaacgactatgatttttcctccttaacacaaggaatgtttgcaaaacactgattggcctttgcttaacatcacctgctatgtcatataccacagaagattagttaaaagttacagaaaagtgcactcttcttctttcccttgacccgtatactt

SEQ ID NO: 81832 - DNA, 227 bp, Glycine max
  Clone ID: 700959644H1
ttcacttttaagttaaatagtttttcattgtatcatttaatctacaatggctgcttcaacaatggctctctcttcatcatcattggctggccaagctatcaagcttgccccctccacccctcagcttggtgttggaagggttagcatgaggaaaacagcctccaagactgtttcttctggaagcccatggtacggcccagaccgtgtcaagtacttgggcccattct

SEQ ID NO: 81833 - DNA, 229 bp, Glycine max
  Clone ID: 700959646H1
aataggtttcacaccacactaaagccaattagtccctctcttctccctttccttttctctatccaataatagagccttagaagatagatagaaagccatgcaagcatgttcctcctcagacgctccactctccaagaggttagatggcaaagtagcactcataaccggcggagccagtggcatcggtgaagccaccgccaagcttttccttcgccacggtgccaaggtc

SEQ ID NO: 81834 - DNA, 224 bp, Glycine max
  Clone ID: 700959647H1
ctggattcaaagtatggaggatggaggggtctcgatgcagcaacaagcgacaataacgtctctttatggtggggagatctaaaattagctcttcaccatccccaacatgagattgttacaggagggttaacgtggaaggtggggaatggagccaaaatcaagttttgggaggatgtttggagctatggagacacaccgcttctggcaaaataccccagattgta

SEQ ID NO: 81835 - DNA, 238 bp, Glycine max
  Clone ID: 700959649H1
tatctcgagccgtatcggctcgagccaccattggatccaccaatctacaaccttcttctccaatgttccgtttctctctccaacgggaagaactttttttttgtgtgtgtttttggtggtgagtttgtaagaagcaatggcacgcaagaagatcagagagtatgactccaagagattgttgaaggagcactttaagagactctctggccaggacttgcccatcaagtccgcacaagtt

SEQ ID NO: 81836 - DNA, 232 bp, Glycine max
  Clone ID: 700959650H1
ctcgagccgttccctgccaagctttctggattttcctgaaaatggctctattgataataatcgggtagaaagtagtgcctgccctataatggcatctgaggagtattctaagcaaaatgattggcaggagtgggctgagaggctaatcagtgatgatgacactttgactactaattggaatgaccttcttgctgacaacattcaagatcttgagccaaagattccaggacat

SEQ ID NO: 81837 - DNA, 232 bp, Glycine max
  Clone ID: 700959651H1
atttgttattatcttctcacataaacaagtgctttcactagagttgcttgaagagtaactttaaaatattttctgtctttatgcttcatttttttaaagttatactaactaactcatctttgtctatcatattaaaaaaaaaaaaaaaaaaaaaaaaaaaaaaagggggggcccccgtaaagggggccgttgaaccggggatttatttcgggccgggcactggggggggaac

SEQ ID NO: 81838 - DNA, 230 bp, Glycine max
  Clone ID: 700959652H1
gattggaggagatagagaaatgggaatggaagcggaaacctctaattgagttgccattcccaccaccatttcccatggcctctgtttggacactgcactttcgctcgctttctcttcgtccatgcctctacattagtcgcagtaacagtagcactgccactagaaattgcattagcatcagaaatggaatctccaattggcgctctggcacccaacaactcaaacacgat

SEQ ID NO: 81839 - DNA, 230 bp, Glycine max
  Clone ID: 700959653H1
tcagttaccatgttgagccatgtgattcagactcatctggttcaaatcctctggacaacttactcaccaaggatagtgattttgatgtagagcaatcgtggccagtggtagccccgtcgcccctatttttcagcgggtcgacgccgagcagagctgctaaccctttgattcaggatgctcgatttagggatgcgaatttttgcccgctctcaccaccgtcgtaggtggtg

SEQ ID NO: 81840 - DNA, 226 bp, Glycine max
  Clone ID: 700959654H1
ggaagttaccactgccagagtctgatgaagaactttatgaggtctatgaagatgctacattggagaagattgcacacaccaaccaaatgaggtttctagatagagcaagcattcatcaggaaaacatcgagtcacagcaatggaaagtttgcacagtgacacaagttgaagaagtgaagatcctaaccagaatgttacctatactagccagtaccattataatgaa

SEQ ID NO: 81841 - DNA, 228 bp, Glycine max
  Clone ID: 700959656H1
gaactacatggacacaacacacacaaacagtgaatatgaagattggaagagcattgatatagcagattctatcttaagttatggtgaattgggagacatggaagaaaatgaatggcagatggtgcaaacgaaaggaaaccaatttgtggtgaacgaccaacctttctatgttaatggattcaacacatactggttgatggtatttgctgcggatgagtccacaagagg

SEQ ID NO: 81842 - DNA, 208 bp, Glycine max
  Clone ID: 700959658H1
ttcagatggtgatgtatttgatgtacagaaacgccaccccagtggcactagaggagccagtgaaggctcaagaattgaatgggcacatcattgacgttgtgaagataggaacaatggaaccgaatcacggtggtgctgttggcaaagtttgatatgatttcgtcattgagattatatgaatgtggagaaacaagggatcaatgacaag

SEQ ID NO: 81843 - DNA, 80 bp, Glycine max
  Clone ID: 700959660H1
caaaacagtgaaagagagaaaacaaaaacactgcacaaaacaatggctcggaatttgattcatcgaccatccactaaacc

SEQ ID NO: 81844 - DNA, 235 bp, Glycine max
  Clone ID: 700959665H1
ggtgctgggtgtaatttccattactcccaaggcccaagcagcagtgacatgcaaccaggtggtgagcaacctcaccccatgcatttcttatgtgctcaatggtggcaaaaccgtgcctggcccttgctgcaatgggatcaagaccctctttaacctcgctcactccacaccagaccgccaaaccgtttgcaagtgcataaagaacgctgttagtgcgttccattatggcaagtca

SEQ ID NO: 81845 - DNA, 232 bp, Glycine max
  Clone ID: 700959666H1
caagcatggcaacgaccccaagcaccacacagaatggtacagagttattaggaaaggagtctgatggaaaagatcgggtttctgccaaaagttcgaagggtgtgtctacaaacagtggttccaaagcaggagacaatggaaaggcaggctcaggttctggaaatgatggtgtctcacaaagctacaaacaagaaagggagttttaaccaaatgcttgttgatggagccaatg

SEQ ID NO: 81846 - DNA, 230 bp, Glycine max
  Clone ID: 700959668H1
caaagagatagctcgactgaagaaattgattggatattggaaggagcaagcaggaaggagaggagaggatgaagatttagaattttaaggagagatagtaacaagtattctttctcgttgaaggcatatatgttggaattatatcaagatacacttgtagatcttctgttaccgaagaatgcaaagcgtttaaaattggatattaagaaggattccaagggaatggtagc

SEQ ID NO: 81847 - DNA, 226 bp, Glycine max
  Clone ID: 700959670H1
ggatttcatagaagatgcttacagggggagaaacaagtttgataggccacccccaccggactgggataatagagatcgtggaagagatggcttctctgatgaagggaaaggatttgaaaggaggccactgtcaccccctccacctcttttgccatcacttcctcaccatcgtggtggtcgatgggctcgagatgttagacagagaagccgctctccaataagaggt

SEQ ID NO: 81848 - DNA, 220 bp, Glycine max
  Clone ID: 700959671H1
acttagtaagagaaacacaaagacattcattcttgtaccactggcaacagaagaagcacccatccacggcgatatcttagcggccatattctcgcacgtgccactcatccaccttgtgcccgcctctcacgtgtcgaattcctggaagcgtgcggtgtcctcctccctcgcccacgtcatacccatcaagccgtggttaattgtcctcacccagagcctc

SEQ ID NO: 81849 - DNA, 225 bp, Glycine max
  Clone ID: 700959672H1
gggcataaagtcgttgacagtgaaaaacaaactcctctcactcttccttccatctcttcttcaacattccaatccaatccaaaacgctgcgttttattttgtattcaattctatcaatcccaaaattcctcgccggagatagagaatcttaacaattccaccactttccggcgagacatggccgtcgccgtctccgtccccgtccgccagaagccgagctccgac

SEQ ID NO: 81850 - DNA, 226 bp, Glycine max
  Clone ID: 700959673H1
ctcacccagtcaccaaccccgttgtccggagccaccattttgcgctccggcaatgttcttcccggtggccatcgtcccttaaacccaccacacttcaaagtcatgggtattccatgggacgacgtcgttgtgatacagcaagggaaggatcacaatgagccctgcatcgtcaccgtcaattgccccgacaaggctggtctcggctgtgatctttgcagaatcatcc

SEQ ID NO: 81851 - DNA, 80 bp, Glycine max
  Clone ID: 700959674H1
ctcgagccgctcgagccgattcggctcgagagccataatagcattgggttctatctctaggctctgtcctaccacaaaaa

SEQ ID NO: 81852 - DNA, 223 bp, Glycine max
  Clone ID: 700959676H1
aaaggattttgggacatgtacgatccagagggatattctctgtggttctgtgattacaaatacaattgtgagaacacagtttcctttgttacgttaaacaaggttggtggatttcttcagaggatggatctggctcgcaagtatgcatttggaaagatgctggtgattggatcacaggcaccatttaaggtgaaggggttgtggcttttccgtggacaagaga

SEQ ID NO: 81853 - DNA, 214 bp, Glycine max
  Clone ID: 700959677H1
aatatgcctggatatatatgaggccatatagcaaaaacgttggtaccaaaaccaacatattagaagagagagcacttcattttagctagctagagaaaaaaaacaaagtgatagtgagaagatgttagctatggagggtaataagaagactaagcaatatggtcttgactctgccacttcttggtttggaagttgcatttcttcatgttcatca

SEQ ID NO: 81854 - DNA, 224 bp, Glycine max
  Clone ID: 700959678H1
atagaaagaaagacagtgcaacttcctctgttttgctcccctgtttaagccttatcataagcttagaatggcacacaaggaattttccattgccctagtgactctcattgttctctttgtcaacacgaacctccaaggtgccacggctgactatggtggtggttggcagagtgctcatgccactttctatggtgggggtgatgcttctggcacaatgggtggag

SEQ ID NO: 81855 - DNA, 226 bp, Glycine max
  Clone ID: 700959679H1
caagaagctgcctcaaaaagagttcatccaacattgcatttacctgcaaattcacagccctcaacccaagttgctgggttgtttttcagttctgggactcaagcagcattgcctgccccacagacagctgcatcaacttcatctttgtcatcaggaagtggattatctctttttagcacaccatcttctgctccatcatcttctatgttgtcatctctgtttgcaa

SEQ ID NO: 81856 - DNA, 185 bp, Glycine max
  Clone ID: 700959682H1
gtcggagctcggctcggctcgaagactgttaaaatctccccgattagaaagattgtatctgaagattcgggtactttatgagatgtagtgactgtgcctgttgagcaaactaatgtggaagattcaccaggaagaattcctgatgctgaaaatgaagcagagttgtcatttgctgttgtaaatga

SEQ ID NO: 81857 - DNA, 222 bp, Glycine max
  Clone ID: 700959684H1
ctctgtgaaaaagggggagtttcttattccttctagacgcttccattgatcggcgatttctgatacatggcggagatcacgaacacgaggaagtgaagggtgagtccttgttggagaagatttctgggaagatccacgaccacgattcctcgtcttcgtcggattccgacaacgacaaaaccagcgccactgattccttcaagtctaatgttttcaggcttt

SEQ ID NO: 81858 - DNA, 226 bp, Glycine max
  Clone ID: 700959686H1
ctgcgttcctgtgaacagcggaagaatacaccgccacacgctgcaagccctttaccttgtgcttcctgcgttcctgtgagaacccacgttctctaacgcgcttctccttcaaagttcaaattcctatacatttgcgtaatcgcttctcaaatctcaacaaaagtattcccaaaaaaccctaattattattattaaacatgaggccgattctgatgaaaggccacga

SEQ ID NO: 81859 - DNA, 221 bp, Glycine max
  Clone ID: 700959687H1
ctaaaactttggaacccaaatgatgtcttccgaatctgttcttcctctccccgaaaatcccatcattgtggggtttggtggggttggagtcgattttcttgcagtagtggcatcttttcctaaacccgactccaagatcagaaccactgaattcacggtccaaggtggtggaaataatggaaatactatgacatgtgctgcccgtttgggcttaaagccaa

SEQ ID NO: 81860 - DNA, 222 bp, Glycine max
  Clone ID: 700959690H1
ctcacatacctcattgcctttgcattgttctctctctctctctctctctcttttctctgtgtgtgtgcgtggattggtgaatttgagattgaagaagatgatgcaggctggacccggcggcatggcccaacaagcgaaccagctatacgcacagcaacagcaacaacagcaacaacaggcctacatgatgatgccgccgcagcctcagccccctcagatgtg

SEQ ID NO: 81861 - DNA, 223 bp, Glycine max
  Clone ID: 700959691H1
ttcactttcaatctctttcccttcctttccttgtctttttatttttttacatcaaaattaaaataataacacccatcaaacaaaccacacttctccccctcactttgaaaacacctcaatcaatctcgatgatcatggcagcactcaattcaagcacttgtgccaaacctcaattccctcaccctctctcctcctctttctcttcttcttcatcattaacaag

SEQ ID NO: 81862 - DNA, 257 bp, Glycine max
  Clone ID: 700959065H1
caaggagctcacatgcagtggagggaaatcagctattgaagttgcaaactacattcaaagggttcttgcagggactttgggatttgagtgcacaaatttgactaggaagagcaaatatgccatgcttgcaggcacagatgggacagttccatctaaggagaaggcttgaaaagggagagaaattaagttctcccttttgattattctgtattggtgcccaatgtgtttccaaaacacttagaattatgatagaaata

SEQ ID NO: 81863 - DNA, 257 bp, Glycine max
  Clone ID: 700959066H1
gcgaatgaaaattcgttaatccaaatttgtcttctatttaccatatttatatggtaaatagaagacaaattaatatctatatctatctatatagatagatatagatacataacataaataaagacacgcattatggtatggcattgatactaatgcactgatatataccttagataaaaaaagaatccacaaaattatgttttttttaagtataccattttttatggtgaatctataaaaaaagtctcctttatatc

SEQ ID NO: 81864 - DNA, 254 bp, Glycine max
  Clone ID: 700959067H1
gcaccaacgcatagccagaccatggtgaaagaactggtggtttttatgcttgcaatcgttatgaagcagctaaacaagaaggagtgtatgatgatactgaaagaagaagggaaatggcaaagaattcgctggagagatacactcattattatgagcggtgggccagcaatcaatcttcaaggcaaaaagctcttgcagatctacagcagatgcaaactgttcatattgagaagcttagtgacatacagtgtcag

SEQ ID NO: 81865 - DNA, 146 bp, Glycine max
  Clone ID: 700959068H1
gtcaattcggagcactattctcaatctcatcatgctgtggggcgaaacagcattaagggccactcaattttcaatggcccttgtctttttgtgggtctaggtccaaaaggcttgttggattctgatgcagttaggagccccacttc

SEQ ID NO: 81866 - DNA, 252 bp, Glycine max
  Clone ID: 700959069H1
gaagaaggtgtgttggagaatgaaaactgagacagagccaaatgaaaccgagtcagatttcagcgagttgactcgcgagtgcctcatcaacatcctctctcgactcagcgtcgaggatcgatggcgcggcaccatgctcgtttgcaagtcatggttcagcgtcttcaaggaaccctctcttcacttcgtcttcaacctcgaccctcaattcgactcgcccaccgaatcaactcgctggtggacccccgagtt

SEQ ID NO: 81867 - DNA, 254 bp, Glycine max
  Clone ID: 700959070H1
cagaggctttcagaggaagaggagcgcaagaagctgagaaaaacatgtgagacaccagggtgtttcagaatcatcaaccactcaattccactaacactcatggccgacatgaagtcagtggttaaatacttgcatgaccttcccacggaaatcaaaatgcgcaacaaaccctccgtccctgagagtggctatagggcggcaatgccaacaagtcctctatacgagggcatgggaatatatgacatgcatgcctc

SEQ ID NO: 81868 - DNA, 255 bp, Glycine max
  Clone ID: 700959073H1
cagaaaaaaaaaatgtcctaattgctctacaccctcttatatataaagatggtgattttaatctctaggccacaaaaatgaaccagatttgagaacatcccttgtattgaagaacaccctctttggatacccttttgttaaagccaagacttttctcagatttgagaagaagaagaaggtgggggaggagatagtaatagggaaaacatatgtgagagaaaaataaagcacaaacgtgaggccgttgttgaaaca

SEQ ID NO: 81869 - DNA, 257 bp, Glycine max
  Clone ID: 700959074H1
aaaccagagaaatctatgaagaatcctgtgaaattgaaattgaatgatagctaaatcaaaaaaatggatcaatcacagaatcagagaccagcgacatcaacaaccacaccctcgcgctctttccagttccacccccttcgtgactcaattttcgatctcttcaacctctacttaggactcggccgaaacagtcgccagaaacccgatgactcacttcgcgacccaccgaacaagagcactatacgcgtacacgccct

SEQ ID NO: 81870 - DNA, 243 bp, Glycine max
  Clone ID: 700959075H1
gcactatgctacaagcccaacaaacttggttttaattggtataggcgtgccaaggtcttgttaattttgagcgttaagtgctgcaactaatcagatcccaagaccttggcctaccttgccatacagaaaaaaaaagagcattaaaaaggccagggtttggagccaccaaaattagccccaaggcacaagtcatggaaagaataatggttggaagtgcatcaaaggttgctttcaccctcttgg

SEQ ID NO: 81871 - DNA, 256 bp, Glycine max
  Clone ID: 700959077H1
gaacgccccattctttgcattaataattgtggcttctttggaagagcagctaccatgaacatgtgttccaagtgttacaaggacatgctgttgaagcaggagcaggacaaatttgcagcatcatccgttgaaaacattgtgaatggcagttccaatggcaatggaaagcaggttgtggctactggtgctgttgctgtacaagttgaagctgtggaggtcaagattgtctgtgctcagagttctgtggattcgtcct

SEQ ID NO: 81872 - DNA, 261 bp, Glycine max
  Clone ID: 700959078H1
ggttatctctaaggtcctaaacaatcctctttcaaaaacataccgagacaagtgtggaaatgacgacaccatcattggtagagtctctagttcttcaactccatgagatctcagctgtcaaatttggcaacttcaagctcaaatctggcatcttctcaccaatctacatagacctccgcctcatcatatcttacccttctctcctccaacagatctctcaaacccttatttcttcagtctcttccacttcctttgacctcg

SEQ ID NO: 81873 - DNA, 263 bp, Glycine max
  Clone ID: 700959079H1
gaagaatcagaagatgagtcaaccaataagaaagataagcttctcatgggaaaagaagcctggtgtctccaaagtaacaactactactcatggtgaaaatctgatcccaaaagaggaagagtttttggccaagttgccaccaccaccttgcacaccagaagaatcaagtgctactcatcatcacaaaaaccaccaccctcttcttgattttcaaattccacttcctccttgtgcttttcagcctcccttttatagaacttcct

SEQ ID NO: 81874 - DNA, 246 bp, Glycine max
  Clone ID: 700959080H1
tggtctcaaatcaaaattgtccgagcattggatggatgtctacaggacagctggaggcaaagatattagttcacctaaacagaagatatttttctccctttgcagcagttaccgggatatactttactgtaacaagaggcctttctatctcaaaggtcttgaagacacaagcatcatggatgcatacataatgcatctctcaaacatgtcttcagaactagagactgcgtgaaaaaaaatgattcc

SEQ ID NO: 81875 - DNA, 258 bp, Glycine max
  Clone ID: 700959081H1
acagtttggaggggttaacggcattgctttttatgcaagttctatattcatctctgctgggttttcgggaagtattggaatgatagcaatggttgctgttcagatcccaatgacagctttgggagtacttttgatggataaatctgggagacgaccacttctgctgatctctgcatcgggaacatgcttaggatgcttccttgcagccctatcattcaccttacaggacctacataaatggaaggtaggaagtcccat

SEQ ID NO: 81876 - DNA, 235 bp, Glycine max
  Clone ID: 700959084H1
ctctagtggtgctaaagtcgaacttaatcactctgtttctctcgttaccgttctctatctatgcccatctcttcaggtaagcaataatttctgtttgttgtttatatgtttttttacactactttctgctctcatactcgtttatcgatgggtataaattagtgtgttgaaattgcaaaacagaaaatgtaaaactggtgttgtgatttgtggcatcgtaaattgactctttaag

SEQ ID NO: 81877 - DNA, 251 bp, Glycine max
  Clone ID: 700959085H1
gtttctgctgatcctgacgtatttaacaaaagaaatgtctcagtaaataaaaatatatattctttgttgaattttgttgatggaagaaggttacaataactaaagaacggatgcagtactaagataaagaaccattgaggaaaattcattttcaggtttagtgttacaaaagtaacttagaagggtcagaaaaccactgggtggcgttcacagaattaatgccactgaagggttttttggctgcatatctc

SEQ ID NO: 81878 - DNA, 249 bp, Glycine max
  Clone ID: 700959086H1
tttaaatttaaaagacttgtcaatacagagatctcagactgatttgtaatgcttcatgcctccattttactctcttgattgtcagtattgaagaatttataccattgttgagggaccgcatgaatgtattgaatccatatgtccatcagtttttggtaggatggattactgtattggacagtgtcccggatattgacagcctggctttcttcctgattttcttgatggtttgtttaatatgttgagtga

SEQ ID NO: 81879 - DNA, 253 bp, Glycine max
  Clone ID: 700959087H1
gttattcccaaagccgatacttccttttcaagtcttttctctctctctctctctataataagattcttccctctcccttctctctctctctctagaacttcgtcctccctctgcttctttcttgcttagttgcagcgcgattgctgcatcgtcctccaataagagctcgctgctagtgaaccctaacacggcggcaacgagaggtgttcggttgaagctcagatcagcgatggcagcagcaacccgcacttct

SEQ ID NO: 81880 - DNA, 216 bp, Glycine max
  Clone ID: 700959089H1
ttttcctccatctgtttgcgattatgcatttggtttatagcatttcatcactatacctaattgtggtgtctttgatatccagtttggtccatgatctatcagataagctttggctatacccaaaaatcacaagcatgcagacttagtatttgcagactgattttcgtttcagatttcacttaatttgagatgttttgtcaaattttgggaaataaa

SEQ ID NO: 81881 - DNA, 256 bp, Glycine max
  Clone ID: 700959090H1
gttggctatggcactcgcatttgttgacgtgtcaagggatgctatggccttgtctccaccggatttcattgcggcctgtgagatgctcgagagggcgttgaagcttttgcaggaagaaggggcaaccagcctagctccagatttacaagcacaaatagatgagacgctagaagagataaccccacgttgtgttttggaacttttagccttgcctcttgatgacgaacatcgagcgcggagggaggcaggtcttctt

SEQ ID NO: 81882 - DNA, 257 bp, Glycine max
  Clone ID: 700959091H1
atcttaaagataaggtggaggcttcacaaaaagaacctctaattgggccatcttccatgacctctagaactcgagatctgaaagagaaaagagaaattactcatagaacaaccaggacctcagaatcttctcagagatcagtcgagtcaaatgctgccaagtatctaaagggacagtctttgaacagaagctggaatggatctgcggatacatctgtatccgtcaaatctcctacaaacgaggaagaagattcttct

SEQ ID NO: 81883 - DNA, 244 bp, Glycine max
  Clone ID: 700959092H1
cgaagaataccgcacaaagcttaggactttttttttggtctctggagttacaccacagccacggaggcacccaggagaggctttaatgaatggcggttctgcatctagtaacttaagggcagctctctcccattgcgtacaacaagtgcgaagttatgattatcatcactatctttgccttctcgagctgcctccgtctatgcggaaggctgcatttgcactccgtgccttgaatgttgaaaca

SEQ ID NO: 81884 - DNA, 259 bp, Glycine max
  Clone ID: 700959093H1
ataactagaaacagtgtgatgaaaatgaaggtccttgttttcttcgttgctacaattttggtagcatggcaatgccatgcgtacgatatgttccctctccgaatgaacactggctatggtgcccgtactccggaggtgaaatgcgcaagttggaggcttgctgtggaagcacacaacatctttggctttgagaccattcctgacgagtgcgttgaagcaacaaaggaatacatccatggcgaacaatatagatcagact

SEQ ID NO: 81885 - DNA, 261 bp, Glycine max
  Clone ID: 700959095H1
cagaaaatctgaatcatgtcgtggcaagcgtacgtggatgatcacctgctgtgtgaaatcgaaggtaaccacctcactcacgccgctattatcggccacgacggcagcgtttgggctcagagcgccaacttccctcagttcaaagctgaggaaataactgctatcatgaatgactttaacgagcctggatcacttgctccaactggattgtttctcgctgccaccaaatacatggtcatccagggcgagcctggtgccgtc

SEQ ID NO: 81886 - DNA, 236 bp, Glycine max
  Clone ID: 700959101H1
catgaatctcttacagaggcacatcctggtgacaatgtgggattcaatgttaagaatgttgctgttaaggttttgaagcgtggttatgttgcctcaaactcaaaggatgaccctgcaaaggaggctgctaacttcacagcccaagtcatcatcatgacccaccctggtcagattggaaatggctatgcccctgtcctcgactgccacacttctcacattgctgtcaagtttgctga

SEQ ID NO: 81887 - DNA, 102 bp, Glycine max
  Clone ID: 700959102H1
gacgatgaatggcaaaatggtggtaagcaaacctctgtatgtgactctagcccaacggaaagaagataggagagctagactgcaggctcagtttgctcaaat

SEQ ID NO: 81888 - DNA, 108 bp, Glycine max
  Clone ID: 700959103H1
attcggctcgagaaattaacatgggaaacgtgccaaatgtggttgtgttgtgtttctgtctctggaccctgttgtatcctcttgtgttctgtgcacccaacgatgggt

SEQ ID NO: 81889 - DNA, 240 bp, Glycine max
  Clone ID: 700959105H1
ggctcgaggtactcagctgggataacaagcttgctggtgctcaggttcttctgagtcgtttgaggttgttcttgagtcctgggtatccatatgaagaaattttgaggacctttcacaatcagacaagcataatcatgtgctcctatctaccagttttcacaagctttaacagaaccaaaggtggcttgattcaattaaaccatggtaggcctcagcctctccaatatgtggtcaatgcgg

SEQ ID NO: 81890 - DNA, 243 bp, Glycine max
  Clone ID: 700959108H1
acaaattctgcccttataatacagttctgttttctcatagtgatccatcaatcaatactgtgttgacagcaccaactgataaacctggagtggcattgcttgattttgtcattttcccacccagatggctggttgctgagcatactttccggcctccatattatcatcgcaattgcatgagtgaatttatgggcctcattcatggtggttatgaggccaaggctgatggatttcttcccggtg

SEQ ID NO: 81891 - DNA, 161 bp, Glycine max
  Clone ID: 700959110H1
tctcgctcttgcaattagtcctcttccaacaatccgcacctaaactctagggttctgacatggacactggtggaaagatcaagaagggcgccggaggaagaaagggcggcggcccaaagaagaagccggtttcaaggtccgtcaaggccggtctccaattc

SEQ ID NO: 81892 - DNA, 235 bp, Glycine max
  Clone ID: 700959111H1
tggaagaagcagaagaaaggaatgtgaagtgtgtttgttggacttggttggtgtgaagaaagagagatgggtggtgtaacttcttctatggcggcgaagatggcgtttttttccgcctagcccgccgtcgtacgaggtggtggaggaagcggcgacgggggcgttggtgttggaggcatttcctcggcgcgagaacgtgagggtggtgaaattcgggactcgacgtggaagtgag

SEQ ID NO: 81893 - DNA, 243 bp, Glycine max
  Clone ID: 700959112H1
cataaacgagaaattgagagagaatgtctcgtatctctacactctatcttctcgcttacaactcctttcaggccattggctggacgatttccttaactaagattttgtacaatcttctcgtcactgcatccatcaaaggaacctatgcttccgccgccagcttaatctgttttctgcaatgcgctgcattcttggaagttatacacggagccattggcattgtgcccagcggggttttgcttc

SEQ ID NO: 81894 - DNA, 98 bp, Glycine max
  Clone ID: 700959114H1
cgctcgtcaaccatggacgaagcttcccttcaccgcaagcgcttcttcgcaagtatctccggctttcactccctccaacgacgaatacaaaaaggcca

SEQ ID NO: 81895 - DNA, 247 bp, Glycine max
  Clone ID: 700959116H1
tgatatttctgaccagagtagcgagaagattcataggaagcagatcaagcatttgttccttgacctattcgttgcggggccggtggtggccgtgaagaggttgaaggatgtgacaatttccgagaaggaatttaaggagaagattgaggcggtgggagcgatggatcacgagagtttggtgcctctcagggcttactatttcagcagggatgagaagctccttgtctatgattatatgcccatggga

SEQ ID NO: 81896 - DNA, 97 bp, Glycine max
  Clone ID: 700959117H1
aatcaagctgatgttactaacatcacacttaaaccaaccactaatgcagttttaagcgcttaattagtaggctttggcctatttgttgtcccttcct

SEQ ID NO: 81897 - DNA, 242 bp, Glycine max
  Clone ID: 700959118H1
ggagcagctcatgtggtggttgagattccaagcaatacgacggagagcaatacaaacgagaagaaaaatgagttatccactacctttgagattggaaaggctgaagtaatacgtggccaagggcactgtaagctttgtgacaagagaatttcttgcagaactgcagtaggcaggtctttggtatacagacctgcaatgctctcaatggtggcaatagccgctgtctgtgtctgtgtggccct

SEQ ID NO: 81898 - DNA, 94 bp, Glycine max
  Clone ID: 700959119H1
gttccatgtgaacggcacttgcacatgggttagtcgatcctaagggacgggggaagcccgtctgatagcgctctgtgcgcgtactccgaaaggg

SEQ ID NO: 81899 - DNA, 94 bp, Glycine max
  Clone ID: 700959120H1
agacagaggaactgagagaaattcgcaaaccctaatttcggagagatcggcgatggctgcctccaaggatcgcgagaacttcgtctacatcgcc

SEQ ID NO: 81900 - DNA, 223 bp, Glycine max
  Clone ID: 700959121H1
gagagagggacattaaagatgatgtaggacccactatcttttataatttccaagaagagaatgtgttcaaaagagtgtattgttggcatttctgttgtataattgtaagagatttatgagaaattttctgtatcttctaagtgaattgttttgttgaataattgcagaaacaatagtgctttgttgaaaaacatattctcatcataaactgggataggtttgt

SEQ ID NO: 81901 - DNA, 240 bp, Glycine max
  Clone ID: 700959122H1
ggattagatgccagagaccaccaatttgatcttcaacttggaggcagaatgttctacaatactcaagacatgctgtggcggaggaagctggaggagcaggctgatttgcagcaagctcttgagctacaaagtaggaggctaatgggtctgcaacttcttgacatcaagaagcatcaccagcgtgcactctgcactggaagcccaattccttcccccacccattctcctaacatgttcaac

SEQ ID NO: 81902 - DNA, 240 bp, Glycine max
  Clone ID: 700959123H1
gaaaggctgtggttatccatgtcccctacagactaaggaaaggattccggaagattcatgtcaggcttgtgagagaacttgagaaaaagtttagtggaaaagatgtaatcttgattgccaccaggaggatagtaaggccaccaaagaaaggttctgctgttcagcgcccccgcaccagaacactcactgctgtacatgaggcaatgctggaagatattgtattgcctgctgagattgttg

SEQ ID NO: 81903 - DNA, 231 bp, Glycine max
  Clone ID: 700959124H1
cttcttcttcttcttctttctaacgccatgtctgggagccaccaagagcagccactgttagagaactcgttcatagaagaagacgagccgcaagaaacagcttatgattcgtcggagaagatagtggtggtcggagtcgacgagtccgatgacgaggagaattgggggagagtgccccgattctcgtggaagaagctatggctgttcaccgggccgggctttctgatgagc

SEQ ID NO: 81904 - DNA, 126 bp, Glycine max
  Clone ID: 700959125H1
gggcaagacaagataagaatataagacaacttgatatcggccagtagaataaaaatctagttttggttaaaaaaaaaaaaaaaaaacaaaaaaaaaaaaaaaaaaaaaaaaaaaaaaaaaaaacaa

SEQ ID NO: 81905 - DNA, 242 bp, Glycine max
  Clone ID: 700959126H1
gcaagatttctcgcagagtatagatttgatgtctcaaaattggagccagtggtggccaagcctcattctccggataatcgtgctttggcaagagagtgcaaggatgtgaaaagtaacagagtatacataggatcttgtacaggtggcaaaacagaggatttcatggctgcagcaaaagtttttctggcatcaggtaaacaggtcaaagttcctacatttcttgtgcctgcaacacaaaaggt

SEQ ID NO: 81906 - DNA, 158 bp, Glycine max
  Clone ID: 700959127H1
ccacattcaaatccaaatggccctttacattacactaataattggcctcctagtaaacaccctagtactctataaatagcatttgcatgcaccttagtcttcaccaaaatactcctcttggcatcttgtgttgtgtccctcttttaagctatttcctt

SEQ ID NO: 81907 - DNA, 241 bp, Glycine max
  Clone ID: 700959130H1
gttgaaacaatttgcactaagggcattggctagcacacttaatgaaggagagttgtctgatctaaaagatcagtttgatgcaatagatgtggacaaaaatggttctattagtcttgaggacatgagacaggctcttgctaaagatcaaccttggaagttgaaagaatcacgtgtgctagagatattgcaagcgatagacagcaacacagatgggctagtggatttcaccgagtttgtggca

SEQ ID NO: 81908 - DNA, 158 bp, Glycine max
  Clone ID: 700959131H1
agaatccataaaacacacaaaaactcagggtagggcagagagagagagagaaatgggaggttgggctatcgcggtgcatggtggcgctggtgtggaccctaatcttccactcgagcgtcaagaagaagcgaaacaacttctcacgcactgtctcaatc

SEQ ID NO: 81909 - DNA, 239 bp, Glycine max
  Clone ID: 700959132H1
tcggctcgagtacagattctctgtgttgtgttgtgtacttgtgttaattgtgttgttgttgtaggaaatttaagtgaagagagaatgatgatgaagtctgctatgtgtgcattggtgcttgtggcactggttgtggttgaagtggggcccatggctgaggctgcggtgacttgcaacccaacacagttgactccttgtcttccggcaattaattcaggttctgcaccttcgagtgcttg

SEQ ID NO: 81910 - DNA, 245 bp, Glycine max
  Clone ID: 700959133H1
cgactcgtacggactccgatcccccccgagtcacactcagccagcaccaccgcccgatccgacgatgtctcgcgcctcttccgccgcctccggcgagatcatgctgttcggggtcagagtcgtcgtcgattcgatgaggaagagcgtcagcatgaacaacctctcacagtacgaacatcctttagacgccaccaccaccaacaacaacaaagacgccgtcgccgccggctacgcctccgccgacg

SEQ ID NO: 81911 - DNA, 240 bp, Glycine max
  Clone ID: 700959134H1
ctttgcgcagttccctacctctcctttcaagatgcagatcttcgtcaagaccctcaccggaaagaccatcacccttgaggtggaaagctctgacaccatcgacaacgtcaaggccaagatccaggacaaggaaggaattcccccggatcagcaacgtctcatcttcgccggaaagcagctcgaggacggccgtaccctcgccgactacaacatccagaaggagtcaacccttcaccttgt

SEQ ID NO: 81912 - DNA, 90 bp, Glycine max
  Clone ID: 700959135H1
attagccacaacaaagatcacaacaattgttcgagaacattatataagccacctaacattcccgttcagaagcaggatcacagtcggaga

SEQ ID NO: 81913 - DNA, 89 bp, Glycine max
  Clone ID: 700959137H1
tgagtttcatgaacaatgatttcgagggtgcatggccagagattcaacatttgattggtctcaagtctatttatctttccaacaacaag

SEQ ID NO: 81914 - DNA, 238 bp, Glycine max
  Clone ID: 700959139H1
tctggtcagacatatgacagacctttcattcaaaaatggctaaatgctggaaataggacttgccctcgtacacatcaagtcctttcacacactgtgcttaataacaaatcatctaataagggaaatgattgagcaatggtctaaaaaccaggggattgaattgtcgaatactgttcaatatattgatgaggaaggtttaaacgaagccgaccgtgagcattttctttgtttgcttaag

SEQ ID NO: 81915 - DNA, 237 bp, Glycine max
  Clone ID: 700959141H1
ctctcattccccatttcctcacctccttcaaccgctgctaaattctagggttccgaaatggacgctggcggaaagatcaagaagggcgccggaggtagaaagggcggcggcccaaagaagaagccggtttcaaggtccgtcaaagccggtctccaattccccgtcggaagaattggccgttatttgaagaaaggaaggtacgctcagcgtgtcggtaccggtgctcccgtatacttg

SEQ ID NO: 81916 - DNA, 75 bp, Glycine max
  Clone ID: 700959143H1
tcgaggttagaacctttgagagggttggaaccaacatgtgtgctgctttcatcactaacaaccacaccatagagc

SEQ ID NO: 81917 - DNA, 67 bp, Glycine max
  Clone ID: 700959144H1
agcagcctccagttcgtgccactctcttcaacatggtcgttacctgctcgagtctccacacaggatg

SEQ ID NO: 81918 - DNA, 122 bp, Glycine max
  Clone ID: 700959146H1
ccgaatctcccagtctcaaacctcgccgacgcgtttgacttggcctcgaagctttccgcggaacggccatgaacgcgtcgccgtttatttggaaactaaaacgactcctcaacgtaggttcc

SEQ ID NO: 81919 - DNA, 238 bp, Glycine max
  Clone ID: 700959148H1
taccacaactgcgacgccgtttttgactgctacgcggagatacccgcgcactccccctcttgtccctgaagactgccacagtgactgcgactcttcctcctccgtcgttgacgacggcgacgacaacatcgtttcgtcgtcgtttcgacctcccttgccgtttgatctcaacgcgctgccgtttgatgatgctgccgcggatgatgatctacgccgcaccgcgctttgtctctgatga

SEQ ID NO: 81920 - DNA, 236 bp, Glycine max
  Clone ID: 700959149H1
gagattcttttttaatgaccaaaggaaacagaggcaccagaaaaagcaatcatgaagtgtttctccttatcctcaatttctcttttcattctcctctttctctgttccgagagtgtgtcctctcaaaatgtatccgagagtgagcagcagcaagctagcattcctccaagaggttggaactcctatgattccttttgctggacaatttctgaaggagaattcttacagagtgctga

SEQ ID NO: 81921 - DNA, 84 bp, Glycine max
  Clone ID: 700959150H1
cttcctcagtaagcaatgtcttctcccgcggagttttatcactctcttccgccaataacgaaggacaatggcaccgtttgcctg

SEQ ID NO: 81922 - DNA, 88 bp, Glycine max
  Clone ID: 700959151H1
gggaaaatgacttcgaggagggaaatcacttataccgtttcctcgagcatgaaccctttatccccatatgctttaattttcatggtac

SEQ ID NO: 81923 - DNA, 235 bp, Glycine max
  Clone ID: 700959152H1
gaagaaaaaacaataaaacatgtcccattttggtcggaaactcagccgctcctccaccgtccggcgacggttccaccaccgcgtttccctgctccagcggtgcctcctccgcgtcctccaccgcatcctcctctgctccgggagcaaggccaccaatgccacgtatagcatgctgccgccggcattgccctctccgccgccgccggtgagctccgacggcgagcttggccgtgaa

SEQ ID NO: 81924 - DNA, 235 bp, Glycine max
  Clone ID: 700959154H1
caaaaatggaggtgggatgccagagggtaagaatggaaacagcaaaaataatggtggtggtggaattccaaataacaatgggaatggaggtaaaaagggtaataatggaatgggtgaaggtgttcaagctatgaacatgttcccaaacatgggtggtcataatcctagtatggttggggctaatatgggccccatgaataacatgagcatccctatgggcaacatgcccatgacc

SEQ ID NO: 81925 - DNA, 235 bp, Glycine max
  Clone ID: 700959155H1
atttctttccacctttccaaccatcattacttacaagagctagaggaggacctctgattccagctaaactccctccaagatgtgccaggcttgttgtttacagtaggaaaacaaatgagactagtatatggattgttgagttgtcgcaagtacatgcggtaactcgaggtggtcatcaccgagggaaagtaatttcatcacatgttgttcctgatgttcagcctccaatggatgc

SEQ ID NO: 81926 - DNA, 236 bp, Glycine max
  Clone ID: 700959156H1
ctgggatgggaaccaaaggtcaagttgcgtgatggccttcctcttatggaagaggatttccgtcagaggcttggggttcccaagagcaactaagcttgttttactccttcacttcatatcatataatcataatgaatattttgatagtaactgggatgaatctgtacagtgttaagatgatttatattgaaaattatgtagaggattgcttctccacccaacttctatggtaaata

SEQ ID NO: 81927 - DNA, 236 bp, Glycine max
  Clone ID: 700959157H1
ctcaaagtcctcctccaccatctcccactcctcatcctccctactactacaaatcccctccaccaccaacgtcgcatcctccaccttaccactatgtgagccctccaccaccttctccatctcctcctccaccataccattacacatcaccacctcctccttccccagctcccgctcccaagtacatttacaaatcacctccacctccagtttacatatatgcttccccacctcca

SEQ ID NO: 81928 - DNA, 89 bp, Glycine max
  Clone ID: 700959158H1
ttaaggaagaacattttaacaatggtttcaaatctatgccatagttcttatctccctataaataccaaatcccaatttctttctctcca

SEQ ID NO: 81929 - DNA, 119 bp, Glycine max
  Clone ID: 700959162H1
cttgggatagacttagcattagtcgtgagacgtatagacaaactagactagagcagtacaagaactatgaaaatatacctcattcaggcgaacggtcagaaaaggaatgcacaccaaca

SEQ ID NO: 81930 - DNA, 90 bp, Glycine max
  Clone ID: 700959163H1
gggtggacaagcgtacgaggcaatgaacaacgctggttttcttgacaccaatcttattataatcttaaacgacaatgaacaagtttccct

SEQ ID NO: 81931 - DNA, 155 bp, Glycine max
  Clone ID: 700959164H1
gccgtctccgcttcaaagctttgatgagttgaaatcaagatataactgtccttcatatttgttgcgcaatctgaaggaacttggatttagagaaccaacacctatccaaaggcaggctataccagtacttttacaaggtcgtgaatgctttgctt

SEQ ID NO: 81932 - DNA, 154 bp, Glycine max
  Clone ID: 700959165H1
ttggcatcttgtgttgtgtccctcttttaagctatttccttctcttaacacaattggttgtgccaattgccatagtcaccaaccaattaacaaaggtatatatatcatcatatcatcaccaaatgacaaatattgggttgttttttcttgtggt

SEQ ID NO: 81933 - DNA, 128 bp, Glycine max
  Clone ID: 700959166H1
tgatcaaggccacgttcttgaggcgtgtaaagacagtctcaagaagcttcagttaacgtatctagatttatatcttgttcactttcctgttgccgtaaggcatactggggttgctaatacttctagtc

SEQ ID NO: 81934 - DNA, 75 bp, Glycine max
  Clone ID: 700959167H1
atcgttcttccatcatggttggcagaccggtgaagcggcggagcaaatggttgcagagattccatacaagatacg

SEQ ID NO: 81935 - DNA, 232 bp, Glycine max
  Clone ID: 700959168H1
ggaaaactgtcttggttgacaacgttgatttcttggaagaactgaagtgaagagcaagctttatatgaaataagtagtcctgctgcttttgtatgaataagttgtctcgcattttatcattgtgcgttttgtatcagtaccagtcatcaacttgttttcttgcttttatgagttcttttgttgacttaaaaccgcaattgaaacctcattctgcatgctacctatgattaat

SEQ ID NO: 81936 - DNA, 150 bp, Glycine max
  Clone ID: 700959169H1
aaccattgaagccaaattttctctctcttcttcttctctctgtctcttttcttttccttctctcaatcattctctgctacttttcactctctggggtcagggccaatcattgccacgctcttgctctgcacccttctctccatctctcta

SEQ ID NO: 81937 - DNA, 230 bp, Glycine max
  Clone ID: 700959170H1
gggaaagtctttataaggcggtaagactcaccgttaccacacgaaatgaattacagttgccattctcatcctcctctgtctctctctctccaccattgccatggatccttacaagctccggccatccagcgccttcaattctcccttctggactacaaattctggtgctcctgtttggaacaacaactcctctttaaccgttggagctagaggtccaattctgcttgagg

SEQ ID NO: 81938 - DNA, 232 bp, Glycine max
  Clone ID: 700959171H1
ctctctctctctatcccctttctgccgacgattttgtttgtcccctttggatcagttcgtgcccttgttgttggtttgtagcttttgctgaaatctagcaataatgaagaaggttattggtcaaactgttagggaccttaaaagagaagtaaataagaaagtgctgaaagttcctgggattgaacagaaggttcttgatgctaccagcaatgaaccatggggtcctcatgga

SEQ ID NO: 81939 - DNA, 233 bp, Glycine max
  Clone ID: 700959172H1
ctgatctaagatatgtctacatctgataagtcagaagtggtggaaaggggtgctaaggatgatgaaaagccaaaggaagaacatgagaagggtggatttcttgatacagtgaaggatttcattcaagacattggtgagaagattgagggagcagttgggtttgggaagccaactgcagatgtcactgggatacacattccatcaattaatcttgagaaggcagagctagttgt

SEQ ID NO: 81940 - DNA, 231 bp, Glycine max
  Clone ID: 700959173H1
gttgaaacattgatcacagtttgggctagccattattttgagccatgtgattcgtttggcggattggatcttaagcccaattaaaaagaaaagtttaaatttatattttggaatgaaatggaaagagctgggttgaatttgtgttaaggtgttgctaggtgcacctaacatttttttcaaaatgtcaaagttgtccctcatttgtgttgggtgtgcatgagaggttggttt

SEQ ID NO: 81941 - DNA, 86 bp, Glycine max
  Clone ID: 700959174H1
gacatttagagattggaatcatccgtgttcctctctctcatctctctttctctctgttccctcggtttccttactttgaagtttaa

SEQ ID NO: 81942 - DNA, 70 bp, Glycine max
  Clone ID: 700959175H1
ggcatcttgtgttgtgtcgctcttttaagctatttccttctcttaacacaattggttgtgccaattgcca

SEQ ID NO: 81943 - DNA, 149 bp, Glycine max
  Clone ID: 700959176H1
gttttctagagttcacaatagcgtccatcctgctatctggtataattttgtagggaggtggctccatgccactataatatagactatagaataattaaacttttttttttatgtattcatagttttattcaactagtctcttctgggtt

SEQ ID NO: 81944 - DNA, 118 bp, Glycine max
  Clone ID: 700959177H1
tgggtctccaaaatttcgaggactaccaggtttgtgctatcacagtgggtgtggttggtgatgtatgcagagccttggaggagaaaatactgccttattgtgatgggataatgaccca

SEQ ID NO: 81945 - DNA, 86 bp, Glycine max
  Clone ID: 700959178H1
cgaaaagactcttttgtccctctgttccgaaactgcctccaggagtcgttcgcggagattgaggaccagttgagtaaaaacaccat

SEQ ID NO: 81946 - DNA, 151 bp, Glycine max
  Clone ID: 700959179H1
cttctcttcttcaattcattctagttctggattccgactcgccgcatctgactcggtccgggttggggtcgactcagttcggtttttcattctctcgcgaatctaatctataggaaaagctaagggcacatcacaatgaaggcattgattc

SEQ ID NO: 81947 - DNA, 86 bp, Glycine max
  Clone ID: 700959181H1
cgcaagaagacattgttaatttgagagatggcgagttacgaggctattaagaactttgatgatgatgatgatgatgatgatgatgt

SEQ ID NO: 81948 - DNA, 229 bp, Glycine max
  Clone ID: 700959182H1
cgttttggaagaacaagggcatgtgagaaaaaacatactaatcagattaaacagcgaagaagagtttcaaatttattgcttcgaatctccagcttcgtcagggaaggaaaacagcataacgtgtggtctcgggggaaccaaaaactgtgaaattctgaagccactaggccttttaaaaaccaaactaaggaagacggtttagacagagagtacttcaagctaagaaaat

SEQ ID NO: 81949 - DNA, 227 bp, Glycine max
  Clone ID: 700959183H1
cctttacatactctgatctctctcagagcaatagcaacaatggcttccctcaccccaggcaccctgctgaaaatgctgcaggccatgaacaccaacacccgcgtcaccggcgaccaccgctccccgctcctccaggtcatcggcatcgtccccgccctcgccggctccgacgtctggtccaaccagggcttctatttaaacctctccgactccgtcaactccaccta

SEQ ID NO: 81950 - DNA, 148 bp, Glycine max
  Clone ID: 700959184H1
aaaataatcactgaagaatcacaaaacaactctggaagattgcaggtccaattgttattgctaatgagaacttgaatccaaatgatactaggcggaagacagttaattacttgcaaaaagctgccgtggcatatggtcctggaaagcc

SEQ ID NO: 81951 - DNA, 230 bp, Glycine max
  Clone ID: 700959185H1
gaatcatgtcaaaggagaaaagatgattctagtgtggaattttgcgagtcctcagatgccgatgatgtctggtataagaaaatggaggcctgcattactcccactcctaaagttactggcgggaatcttaaaccatttccaagcaggctatatgccattcctcccagaattgctagtggcttagttcctggactttcctctgagacataccaggatgataacaaaaagtg

SEQ ID NO: 81952 - DNA, 228 bp, Glycine max
  Clone ID: 700959186H1
gatcgagataactagaaacagtgtgatgaaaatgaaggtccttgttttcttcgttgctacaattttggtagcatggcaatgccatgcgtacgatatgttccctctccgaatgaacactggctatggtgcccgtactccggaggtgaaatgcgcaagttggaggcttgctgtggaagcacacaacatctttggctttgagaccattcctgaagagtgcgttgaagcaac

SEQ ID NO: 81953 - DNA, 230 bp, Glycine max
  Clone ID: 700959187H1
aatttatgttgcgcaccgagtatgactcgccaatcgcttctctgaacaattctggataatttcaggaaaggagtatttttggagagaaaatacagtgagcaggtacatttagaaagtaaggaggtgattttagcatttggagcccagtgttcacgaacccaacaacaacaataaacagagaaaaaaattaatttgccctatgtctagctttacgacatcgttttgctctt

SEQ ID NO: 81954 - DNA, 230 bp, Glycine max
  Clone ID: 700959189H1
aaagaagagggaactagtttctgcattctctgtttctggtgttgttcacttgttctcttcatttcaagtttcaaccttaatccttccgaaccaacacataaacatccaacactctcttcttcttcttctctctccgcgggttcaattgaacctcacaaaaccctctttctctctctctagatctgttcaaatcccgaatcatttccgctccaatttcaatttccccgaac

SEQ ID NO: 81955 - DNA, 229 bp, Glycine max
  Clone ID: 700959190H1
aacggagcacctctcttcaggtcgccatctagactgcaatcatggctgatggaccacagcatccatcagttgttcagaagctagctggacagtcttacctggtatccaggctaagccccaactttaactctgggaattattcctcgactggttcttacttcaatggaggactgcactcttctgggttggctgttgtgtcgcctggatctccagttactgtgcatgctcc

SEQ ID NO: 81956 - DNA, 217 bp, Glycine max
  Clone ID: 700959191H1
cctacttcatctcctggttacagcccatcatccccaggctatagtccctcatcacccgggtacagtcccacttcacccggatacagccccacgtcacccgggtacagtcccacgtcacctgggtacagtcccacctctccgacttatagtcctagctctccgggatatagtcctacaagtccagcttattcgcctaccagtccatcctactctccca

SEQ ID NO: 81957 - DNA, 206 bp, Glycine max
  Clone ID: 700959192H1
gaaaaaacagaagatcccccagtttgctcttttagcaatgaaactagagtcctaacaccagctccagaggatgagagtcagaggcatggtggctctggaagcagaagtataaatgctgagctgggaggagaacattgtgagaaatctgaatgtgattctcattggggaacgggatctgtacacagacccgttaatcctgagctgca

SEQ ID NO: 81958 - DNA, 231 bp, Glycine max
  Clone ID: 700959193H1
gtgagttttgtttatttgaaattaacaagtagcaaagatgtttggaatcatcggaggaaacaagggtcacaatataaaggggaacttggtgattatgcgaaagaatgtgttggatatcaacagcattaccagtgttaagggtgtcatcggaaccggcattaacatcattggaggagtcgtcgacaccgttactgctttggcgtcccacatctccatccagctcattagtgc

SEQ ID NO: 81959 - DNA, 84 bp, Glycine max
  Clone ID: 700959194H1
ctttaagaagctgcgtttgtgatattttctcctaccatttctgagcttgtttgaactttcactcgcagcttcttattcttgtga

SEQ ID NO: 81960 - DNA, 150 bp, Glycine max
  Clone ID: 700959195H1
ctcctcataatccatctctcaagtctcaactcaactcaaccctttaacacaccaaccaccacaacctcaaaaatggccattagaaaatcaaacaaacttccccaacacgcagtagttttgaagcaaatcctaaagaggtgttcgagccta

SEQ ID NO: 81961 - DNA, 226 bp, Glycine max
  Clone ID: 700959202H1
ctgaaacaagaaccaaaatggagaattcgaccgaagaatcccatctccgatcggaaaactccgtcacttacgagtccccttaccctatctacggcatgtcattctccccctcccacccccaccgcctcgccctcggcagcttcatcgaagaatacaacaaccgcgtcgacatcctctctttccaccctgacaccctttcggtaactccccacccttctctctcctt

SEQ ID NO: 81962 - DNA, 263 bp, Glycine max
  Clone ID: 700959204H1
ctctcgtgccgattctccaccactattcccttcaccccaatcacactttccgctattagtgtagaagatgagtacgctggatgcaacaagggctgaacttggtcttcttgttttatatttgggcaaggctgaagcaagggacaaaatatgcagggcaatacaatatggttccaaatttttgagtaatggggaacctggtactgctcagaatgtagacaaaacaaccagcttggcacgaaaagtcttccgtctctttaagtttg

SEQ ID NO: 81963 - DNA, 260 bp, Glycine max
  Clone ID: 700959205H1
attaattgcaagaatggcacttcgttgcttggtgatgtccctttctgttctcttcactcttggtcttgcgagagaaagccatgccagagacgaagatttttggcatgctgtttggccaaacactcccattccaagttcattgcgagatcttctaaagcctggccctgcaagtgttgaaatcgatgatcaccctatgcaaattgaagaaacacagtacccgaaaaccttcttctataaagaagaccttcatccaggcaaaa

SEQ ID NO: 81964 - DNA, 261 bp, Glycine max
  Clone ID: 700959207H1
cttgaactatcgtgtcttcttggctttctctgttcaggatcaacatggatattgtatcacgagctttgctatttccgttggctatacttgtgctcatattaagcacaccttgctcaggtgcttttgggaagagtggaactaatgtgaaaacagctatttttctgtcccccaagtttgaacttggaccaggatcggtagccaataaatatgattatgacgctgattttccaagaggtcatatagcacttaagagtttcaatg

SEQ ID NO: 81965 - DNA, 259 bp, Glycine max
  Clone ID: 700959208H1
agcaaataaagcacagaacagttgaagtgaatggcataaaaatgcatgttgcagagaaaggagagggtccagtggtgttgttcctccacggcttccctgagctctggtactcatggcgccatcagattctctctctcagctccctcggctaccgcgccgtcgctcccgatctccgtggctacggtgacaccgaagcaccaccttcaatcagcagctacaactgcttccacatagtgggtgatctcgttgcgcttattga

SEQ ID NO: 81966 - DNA, 260 bp, Glycine max
  Clone ID: 700959209H1
cgacacgacaccaaatattctcactcgtcgtcttcgtctgcgccctaaccaaattcaattcaaactcttctcatcaaaatccaaggctcgttcttgaaaccctaattcgatatcctcctcctcagaagaagaaggatcgatgtgggcagcttcttgcctggcgtcatgctgcgcggcctgcgcatgcgacgcctgcaggaccgtcgtatcgggaatcagccgccgttccgccaggatcgcctactgcggcctcttcgcct

SEQ ID NO: 81967 - DNA, 138 bp, Glycine max
  Clone ID: 700959211H1
caacgggactccagtggcagttaaaaagatactcaataacattggtcaagctgagaagatttagagtggaagttgagctattggtcatgcgcataaaaacttggtcgactttgggtactgcattgaggggatcacagt

SEQ ID NO: 81968 - DNA, 255 bp, Glycine max
  Clone ID: 700959213H1
tgcaaatccagcggtgtccaaaagaacttcttcaggtccagcagtgggttggcctccaattcgttccttcaggaagaacattgcaagtggaagcacttctaagttgccttctgggtcccaccagcaacatcaaaatgttgttccatacaaggttgctagccaaaaacctactgacaaatctggtaaaggcttgtttgtgaagatcaatatggatggtgtccccattgggagaaaagtggacatcaatgcttatga

SEQ ID NO: 81969 - DNA, 256 bp, Glycine max
  Clone ID: 700959214H1
aacttaagagatcaatatggccaccaccactacccagactccctctaatatctgttttttccttctgttgttgcttctagcacactttcatttgggcataagccaacttgagctgaattactactctaaaagctgcccaaaagctgaagagatcatcaaggaacaagtcacacaactatataaccagcatggaaacactgccgtttcgtgagtcagaaatctcttccacgattgcgtggttaagtcatgcgatgca

SEQ ID NO: 81970 - DNA, 256 bp, Glycine max
  Clone ID: 700959215H1
tgatgatggagatggcgaacgaaacgctgtcgttgcggcactcgcggcgttggtgctactcgcggcgagtgtggcggtggatgctcaggagaactcggacgtgaagacgctggtgaagtacaagcacgggaagaagtactgcgacaaaggatgggaatgtaagggctggtcaatttactgttgtaacctcaccattaccgattatttccagacctaccagttcgagaatctgttctccaagcggaactcgccggtg

SEQ ID NO: 81971 - DNA, 266 bp, Glycine max
  Clone ID: 700959216H1
actagttctagatcgcgagcagccgccctaaacagcaccaacgtcttcgccgccctcggaagcctcaagaagaagaagaagaagcccgagaaggaccaccagggcccgtccaagcccaaggacaagaaggacgtcttttgggcccccgcgcctctcacctccaagtcatgggccgatgttgacgacgaagatgacgacgactactacgccaccaccgctcctcccgaatctgtttgggccgcgccgaccgtcactcaaaacgacgc

SEQ ID NO: 81972 - DNA, 264 bp, Glycine max
  Clone ID: 700959217H1
tggggatgtaagatccgagtggaagtcctataagacgcgtcagaaggaacatgatgagaatgtgaagaaggttatcaaacgtctcaaacagaggaatccatcaaaagatggtcttgtctgtactgctcgtaagccctggattgctgttgggatgcgaaatgttgactataagagagcccgtcatttcgaagttgatttgtctgctttccggaatgtacttgagatcgacaaagaacggatgattgcaagagttgagcccctagt

SEQ ID NO: 81973 - DNA, 260 bp, Glycine max
  Clone ID: 700959220H1
agagagagaaactgagagaaattcgcaaaccctaatttcggaaagatcggcgatggctgcctccaaggatcgcgagaacttcgtctacatcgccaagctcgccgaacaggccgagcgatacgaagagatggtggaatcaatgaagaacgttgcgaatctcgacgttgaactgactgtggaggagcggaatttactttctgttgggtacaagaatgtgattggtgctcggagacatcgtggaggatcctgtcttccattga

SEQ ID NO: 81974 - DNA, 84 bp, Glycine max
  Clone ID: 700959222H1
cttacttgaagttgtgctattcaatcccaaagccacagaaataatatgagtcagattttagagactgaaaacatcacggccaac

SEQ ID NO: 81975 - DNA, 257 bp, Glycine max
  Clone ID: 700959225H1
ggacaagagcgtttacggcgggaagggtgttcttaacgccgttaggaacatcaacgaggtcttggctcccatactcgttggcgtcgacgttaggaatcaagctgatgttgatgctattatgcaggaaattgatggaactcctaacaaatcaaaactaggggctaatgcaatattgggagtttcgctgagtgtatgtagagctggtgcaggggcaaagggagtgcccttgtacaggcacatccaggagatttcaggaa

SEQ ID NO: 81976 - DNA, 256 bp, Glycine max
  Clone ID: 700959228H1
aatcacaccactcatcttacaatttacgagaagagttgtttactcaaccttatgatatagttaattggaataaagcgcgtcaccaatgtgtaaatcaagatctttactatccccatcctttgatacaagacctaatatgggatagtttatacatattcactgaaccgctacttactcgttggcctttcaacaagttgattagagaaaaggcccttcaagtaactatgaaacatattcattatgaagatgagactag

SEQ ID NO: 81977 - DNA, 114 bp, Glycine max
  Clone ID: 700959229H1
tgaaagttaagaagtagcaaagatgtttccattcgggcacaagggtcaaaagataaaggggactatggtggttatgcagaagaatgtgttggatatcaacagcatcaccagtgt

SEQ ID NO: 81978 - DNA, 255 bp, Glycine max
  Clone ID: 700959230H1
ctgcaacagttattttagtgtgaaggtgcagccatagctcagtcacttaattcatcgggtatagttagtgtgaatgacaaacagatttacattcagttgaaaatctcattataatgtgcactttggcaacaatataagcagaaagcatgatgactacaaaagtgagttccgacaacttccaatccttcgacaaatgcatcacagttttgaattcatgctatactacaccaggacaaatttgttttgaaatctctg

SEQ ID NO: 81979 - DNA, 261 bp, Glycine max
  Clone ID: 700959231H1
gaaacaaccttttccatgtgttcagttcattggaggggatggaggagatgttggattttacatgtttagatcagagaatgatgctaagaaaatgacagggtctagagagaccattcatgttccaaatgttgagcttctgagggtcacatatgaagtggagtctttgatgttcccttctaaccggaagatgatcaagtctttgtcattggaagcatcaggctcagatcggtttccagttattgatgttgcacgatgcacgcc

SEQ ID NO: 81980 - DNA, 266 bp, Glycine max
  Clone ID: 700959233H1
tattatttgacagagtaaatttggagaagctcaagcaaaagagcacaaggccaaacaagcacagttggcaaaggcaaaggctgctcctgatataaatcctaacttaatagaaataacagagagagttgtaattaaagaaaagcccaaggaccaaattccagagattgagtggtgggatgtgcctcttctgcattctggaaattatggtgatgttgataatggaatcataggcgaagataaactgaaaatagaaaaaatcaattttt

SEQ ID NO: 81981 - DNA, 264 bp, Glycine max
  Clone ID: 700959234H1
tatagcctctgctccccttttgctgggtccttcaatctcacttggggaacctccgtgcattaacccaaaagagttcatggacccttaattaaaaaatattttgcctagaaccaaaacctgcccttactctataacatttaccaaccgggaattcttcctggacgttttgttttttgattctagacacttggaagaagaatgagttgttttccttttttcaaagactaagagaaccaacagcaagagggagcagcaaggcattat

SEQ ID NO: 81982 - DNA, 259 bp, Glycine max
  Clone ID: 700959235H1
cactcttctccgccacttctgaatctattgaatcaacaatcatgtcggacgaagagcaccatttcgagtccaaggccgacgccggagcctccaaaacctaccctcaccaagccggtaccatccgcaagaacggctacatcgtcatcaaaggccgcccctgcaaggttgtggaagtttcgacttccaaaactggaaagcacggtcacgctaagtgtcactttgttggaattgatattttcactgccaagaaacttgagga

SEQ ID NO: 81983 - DNA, 258 bp, Glycine max
  Clone ID: 700959237H1
ctcagggaagcactcagtgatcctggtgattttctgctgagtgatttttcgaagtttgatcgcccacctctactgcatttagcattccaggctttggataagttcgttactgagatagatcgcttccctgttgctggttcagaggatgatgcacagaaacttatatctattgccagtaatattaatggtagcttaggtgatggaagattggaagatgtgaatccaaaacttctacagcaatttgccttaggcgctagg

SEQ ID NO: 81984 - DNA, 261 bp, Glycine max
  Clone ID: 700959238H1
gtgcagtatagaatgcacccccagattcgggatttcccttctaggtacttctatcacggacgccttactgctagtgaaagtgtggctaaattgcctgatgagccatactacaaggacccaagacttagaccatatatattctatgacatcagacatgggcgcgagtctcacagaggtggatcagtgtcttatcaaaacatacatgaagcacaattttgtctccgactgtatgagcatgttcagaaaacagtgaagtctttg

SEQ ID NO: 81985 - DNA, 253 bp, Glycine max
  Clone ID: 700959239H1
aaacacttcaactttaggctccatctcaaagaaatgggtggtttagctagcaatcttcctctaattgatatgctgggtctgcaaattcattatgcagcacttgctatattcacaagagccgctttgttagatggattgagtacgacggtctttgtagtgtacaggcaaggcatagccacttgggcattggcgcctatggttttctctcctaagcggagacaatcagtgaaagactctttgggattcaggagct

SEQ ID NO: 81986 - DNA, 255 bp, Glycine max
  Clone ID: 700959240H1
gttcttcatatttctggcattgaccatatacactgccatgaatcttaattcgctacagcagtttcctgacatgctcaagaaggccgacctgcacaaattacaatcagaaatcttgacgtgtctcccttccatgcctgatttgcacatactcagggagggaatctcaagttggcatattaaagaatatctgtacaattgtttgccagtaagattttccagtagcaatcatactgatgcatgtgttctgcatagtgt

SEQ ID NO: 81987 - DNA, 255 bp, Glycine max
  Clone ID: 700959241H1
aagtacttatgattatcatattatgtaataacagtcacatgcattaatatgaatatatagtttgagtttgagcacaagccaggttgagagatggagggaagtatccggtgctctgccaactacgttcctctcactccaatcagcttcttggaccgcgccgccgtcgtttaccgcgacagactttctcttgtctccggtgacgttacctacacgtggacccagacacaccaacgctgcatcaaacttgcttcttcc

SEQ ID NO: 81988 - DNA, 253 bp, Glycine max
  Clone ID: 700959243H1
catgaatgaaagccttgattcattctttggtgcacttttaaatgcccagacttctctcatggagttcattcctcgatatgaaagaggtctcgagcaacgccgtgaagaagaaagaaaagaggattttaatacttctaattttcaaccgattttgcaaactaaagaaccagtggaagaacaatttagaaagctttacactcttactgttttcaaaatatttcaaaaagagcttttgcagtgctttagctatctt

SEQ ID NO: 81989 - DNA, 253 bp, Glycine max
  Clone ID: 700959245H1
tatagcttcatcccaaaaagctcttttccttctaaatttgattccttagttcagcattctattattatatatggcttcttcaccttcctcagaaaacaaaaacctagagggagtagctggtggtgccggagagaaacccattccacttggtgagaacgtactgcagaagcatgctgcattctttgacttgaataaagatggtgtcatatacccatgggagacttttaaagggttgcgtgaaatcgggactggg

SEQ ID NO: 81990 - DNA, 262 bp, Glycine max
  Clone ID: 700959248H1
gcaacccatccttgccgagaagacggcgagacgcgggtttaagattaaacttcaacccgaacttctcgaggatgttggacaaaccactcacaatgtcaagggtgatgccagtgagtttctgaacattgtccaaggtctcggtatgaaactgctccttgatcttcttctcaccttctttgccatcgtcaaaaccctccatgcaggcctgttggtacgagataacagcgctgagccagttcttgaagtcagcctgttggttatg

SEQ ID NO: 81991 - DNA, 259 bp, Glycine max
  Clone ID: 700959250H1
gttggacactattcaaggcctgaagtgcttagcttaattgtaaaggaccatccaacgaaccccgttacttttacatcaacatcgacaaaaattgaagacaagaccaagtagtttcttcctttcatggtcaacaacttccaaacctctagttctggaccttgtccatatacccttatttgaccccttgtatgttaactcctatctccatatatgaaaggttatttgggcttaccttatacaataagcggttgcattttgg

SEQ ID NO: 81992 - DNA, 217 bp, Glycine max
  Clone ID: 700959253H1
gacctatcttggtagagcatttgaagtttaaaccttcaaattaatcaaaccattttaatttgcctatagattctgagtcactgctgctatggcgctacgcgtacttcttgtgtttcggatgttgctgatgttgtgccttgttaaggtttcatctgatccaaagatagaagaagaaatactggaagcagaagaagaactgcagtttcccgataacgag

SEQ ID NO: 81993 - DNA, 69 bp, Glycine max
  Clone ID: 700959254H1
caataacaatattattctcctcattccttcatttttaaacctagctccatctccctccacacaacatac

SEQ ID NO: 81994 - DNA, 254 bp, Glycine max
  Clone ID: 700959255H1
caagctcaaattctgcaagaaccactccagattgatcgctatcgacgatgacaaccttcgaactgtcgaactccctcctcgtatttctatccctaatgtccccaaatccatcaagtgcgataaaagtgaccgcatgagattgtgctccgatgtcctctcttttcagcagatgtcagagcagttcaaccaggacttgtcactgtctggtaagattccaacgggccatttcaacactgcctttggggttacaggag

SEQ ID NO: 81995 - DNA, 255 bp, Glycine max
  Clone ID: 700959256H1
gttctgtgatcctttttccatttctatggacgcaaaagaattattctccacaaatttgatagatggaaaaataaaaataacatgagggaacaacaatatagatgaggctcagttaccagttaccacgctcctttagacaaaaataacaagctcatgggtcccattatctgtttcatatgatacgagattctatttgtttgagttggtttgtctgtcaatttcagacttccatattgaaaggaaaagcactgttac

SEQ ID NO: 81996 - DNA, 254 bp, Glycine max
  Clone ID: 700959257H1
atctctctctctctctctcttgggagtatctgcaattcgtaatcctatccacttgttgaatctgaatatttccaattcaacattttccaaatggcatcctcgtcctctatgatctcaaacccggttccgaacacggaccggtcacgtgacgcgaaacggaggaagaagaaagcgcagctgaggcagcagcaacaacggcaagaggatcagagcaatcccaagtggaaatcccaagcgcacaacaaatctactcc

SEQ ID NO: 81997 - DNA, 213 bp, Glycine max
  Clone ID: 700959258H1
gagagagagaaaatatagcacgccgaaaaacacgctcccacttgtaacttagtataacgacctccaacaactgatacatacaatctcctttccttcgtgttggacaacaacaatggcggcgaaatctagttcgagttcgacaacaaacgtggtgactctgaaggcggcgtgggttctcccgcagcgcacgcagaacatccgtgaggtgtacga

SEQ ID NO: 81998 - DNA, 251 bp, Glycine max
  Clone ID: 700959260H1
cagaaaacactctctttctctctctttctttagattatactactatcataagatcgttgttttacttagaatctgaactcaactcgccggagccaacacatctcgccggaatattcctccgggaaatggggtttctgaaaaactactgagaattaacaaaaaatgggcgacgaagaagtattcgccggagcttcgggtctccggcgagcggtggagctaatcttttccgtgctctcactctcgcactcgat

SEQ ID NO: 81999 - DNA, 252 bp, Glycine max
  Clone ID: 700959262H1
aaggaatcgacgcttcatctggtgcttcgtctccgcggagggatgcagatcttcgtgaagacgctcaccggaaaaacgattactctggaggtggagagttctgatacgatcgataacgtgaaggcaaagattcaggataaggaggggattccaccggatcagcagcgtcttatcttcgcagggaagcagcttgaggatggacgcacgcttgcagattataatattcagaaggagtccacgcttcaccttgtc

SEQ ID NO: 82000 - DNA, 261 bp, Glycine max
  Clone ID: 700959265H1
gcgttggtgcaaagcatccttcgtttcaatttctctctctcagcgctttctgcaatcgaacctttcatctccaaagggatccacaggccgaaggagaaatggggctgacattcacaaagcttttcagtcggcttttcgcgaagaaggaaatgcgaattctgatggttggtcttgatgctgctggtaagaccactatcctgtacaagctcaagctcggagagatcgttaccacaattcctaccatcgggttcaatgttgaga

SEQ ID NO: 82001 - DNA, 259 bp, Glycine max
  Clone ID: 700959266H1
gcaggaactatgcattgttttgctgcaatatttgtacgaaagaggtttaggtattatggctagctgtgatgtagtaggtggtactattagcggcttacttacgacacgacacccttctgttgttactcgagccttgtgattctctgatttggcatccacttaaagggagacataattcatcaagggggatctatgcatcccataatatttccttaaatgtactactttatgtaatattatatacgcttctgtacgtgac

SEQ ID NO: 82002 - DNA, 80 bp, Glycine max
  Clone ID: 700959267H1
ctccttgccccttctcagaacgcctattctgttaagtcccaaaacacaaaccctaaccctaaccctaaccttagctattc

SEQ ID NO: 82003 - DNA, 255 bp, Glycine max
  Clone ID: 700959268H1
gtaacacctcacgtactggaccgttgggttgttcttcgagaccctctctgactcgccgggttgactcgctcgatcttgggggtttctgattcacccggggacggatctcaattttgtctcagactgttctttctaatttaagttaccatctttagctgcattcgtgtcacgctcctttgaatgcccgtcacctcaggaaaagcaaagggcatcatattactatgaaggcactaattcttgttggagggtttggaa

SEQ ID NO: 82004 - DNA, 254 bp, Glycine max
  Clone ID: 700959269H1
ctgggatctgcttccttctcttctctttctcaattctcattcataattctaattcattcctccgatctgcgactttctatttctccctcaacacaacacgagacacaatgttcctctttgactggttctatggcattctcgcttccctcggtctctggcagaaagaagccaaaattctcttccttggtctcgataatgccggcaaaaccaccctccttcacatgctcaaagacgagagattagttcagcaccag

SEQ ID NO: 82005 - DNA, 255 bp, Glycine max
  Clone ID: 700959270H1
gaggccttctgcaatccagcagaggggaattgttcctttctgcaatggtctggatgtgattcagcaggctcagtctggaactggaaagacagcaacgttctgttcaggaattttgcagcagcttgactatggattggttcagtgtcaggctttggttttggcaccaacaagggagcttgcacagcagattgagaaggttatgcgagctctaggtgattaccttggtgtcaaggttcatgcttgtgttggtgggac

SEQ ID NO: 82006 - DNA, 251 bp, Glycine max
  Clone ID: 700959271H1
gagataatgctgaggaagaggaccaggtcaatccagaaagatcaacaccacactggtcaaatggaaatctctgataccaattctgagtctcatgctttggggagcaatggcaaaagcaactcaattttcaattcccctcttctgtttgtgggcatgggtcataagggcttgttggattctgattcagttaagagccccacttcaccattagattttggtttcctttcaaacctaagcaacccctttagaac

SEQ ID NO: 82007 - DNA, 111 bp, Glycine max
  Clone ID: 700959273H1
cttacttgaagttgtgctattcaatcccaaagccacagaaataatattattcagattttagagactgaaaacatcatggccaacctcgacctcgacccattccagacaagc

SEQ ID NO: 82008 - DNA, 249 bp, Glycine max
  Clone ID: 700959275H1
aaataataacatcttaattttcattcaaaccgttttgttaggaaaaatgggtccgaaattggcgaaaacagggtctttccgtcacggtttggcggagaagaaggacaagcttctctctgcgtcggcgaagagtagtagtagttattctgagataggtattgacataaccacgcgagaggaagacgaagagcaatcgtggtggaacacgtttaagcgcgtggctgggaacgcattggaaatgggtcgctc

SEQ ID NO: 82009 - DNA, 250 bp, Glycine max
  Clone ID: 700959276H1
ctttaacctggaaaagaataaggaaagacacgtttatattttagatttagatttttagttcccaaaggccacacacaaatacgtagaatatcgtattttacattctctcttacggggaaagcaaagcaaacccaatcaataataataccaagaaccaatgccgtgtgggttgtggtcgtcctcatgactcatgtgagtcatgggggtatgttaaaaatgttaatgtgctatttcactttcttctttccca

SEQ ID NO: 82010 - DNA, 251 bp, Glycine max
  Clone ID: 700959277H1
gcagaaagcaagctcatcctagagttttaaaaatggcagcagcctcctccatggctctctcttccccatccttggctggcaaggccgtgaagctgggcccatcagcccccgaagtcgggagggtcagcatgaggaagaccgtcaccaagcaggcctcctccggaagcccatggtacggcccagaccgcgtcaagtacttgggcacattctctggcgagcccccgtcctacctcactggcgagttcccaggt

SEQ ID NO: 82011 - DNA, 249 bp, Glycine max
  Clone ID: 700959278H1
cgggcattgagaaggaaggatgctttcagaggcgaaaggccatggggagataccgtctgtgatccatggatctccgatcgggaaaccgtatccaagctccgcggctagtctgcgctctttggacttttaaaacttagcgaactgaaacatcttagtagctaaaggaagggaaaagcaaatacagaaaaaaagagtcaagcggcgagcaatggcgacatcgctggtgcgatcgggttttcttcgaagcgc

SEQ ID NO: 82012 - DNA, 214 bp, Glycine max
  Clone ID: 700959279H1
gtccctttccatttcccattagcttcttctcctcacgcccgctcatgcgccaccatcgcaacaaccacgctgcgctcactgtttcaaccggcgatgcgaatcccgatgactgtcaccaaccggtcgatgctcccctttccgcagcagaacagattagggttagggtttcatcggaggacaacgcggcacccgcatcctccaccgccgatcgctt

SEQ ID NO: 82013 - DNA, 235 bp, Glycine max
  Clone ID: 700959280H1
tgcggaagaaattggcaacgtatgctgtaacacttgttatcgttatcattaaaataaaagatagcgagtgtgactcgggttccactcatgtgagcctgttattgtattagtttctgtttcagatactctctagtctttgttgtttcggtgtgattaaatgtatcttagttgattgttgctcgcaacaattaatcacgtatttgatataataattccaagctactttgattgttgc

SEQ ID NO: 82014 - DNA, 258 bp, Glycine max
  Clone ID: 700959281H1
aaacaacaacaacaacaacaaaaaaaagccctagaaaagattttggagaagcaattcctcactcctgaaaatctcatcctcttcttttacatttgttttggataaaacattttgctgatattgaatttttattttctcttgttttcgtttcttttcgacattttcttcttcttcttctgcttcggtgttttcagggagatagggataggagtaacaaagggagagtgcaatcagtttggttcttcgcttcgggactcg

SEQ ID NO: 82015 - DNA, 256 bp, Glycine max
  Clone ID: 700959282H1
ttttattcccactcaccactcactcactaacctcaattttttcaaattaaagtttcctcctttcactgctccaatctccccctctttgatctctcacttcaaccacgagatgctcaaaacttccgcttttcaagtttgccactttcgttcgaattctcgagaaagcaaagtattttaaatttgtggagaggcttgtaatgctgaatgttgttgccaaccagtggagtagggatgaattctgcaatggatgatatga

SEQ ID NO: 82016 - DNA, 253 bp, Glycine max
  Clone ID: 700959284H1
attcactacttatgcggagaagaggattgtggaggctgtccaaggagaacaaagagccgcgttgaatattggaatcggttggaggggtttgaatgaggacgttgagaggttcaaggacaacttggagtttacaaagctcaaaaataatcaggaaggaattgaccctgataatgtctattctcaggttccctatgagaaaggttttcagttcttatggcgcattgagcgacaggttgggagacctgcatttgat

SEQ ID NO: 82017 - DNA, 77 bp, Glycine max
  Clone ID: 700959285H1
gaaatagagagtaagcctgagatcatggaaaaagttggtgtggctgtaaatagcaaaaatcaagaatccaaagcaac

SEQ ID NO: 82018 - DNA, 250 bp, Glycine max
  Clone ID: 700959287H1
cctctttctagctatttccctctcttaacacaattaacaaagatatatcatatcatatcaactccaaatgatgaaaaatattgggttgtttcttcttgtggtggtggctacttttgtggtggcagccacagctggtagcttttaccaagactttgaaataacatggggtggtgagcgtgccaaaatctatgaaaatggaaatcttctcaccctctccctagacagagcctctggctctggctttcgttcc

SEQ ID NO: 82019 - DNA, 245 bp, Glycine max
  Clone ID: 700959288H1
gtgatgatggaattggaagtcgacgagaacgacttgaaagccgccggtgctgagctcttcgtcgacggtggtcggcgcggcattcgcatcaatggctgggtgatcgagactcggaggcactccatactcaactcttccacactccaagagtggaaacagaatctcgatacgtctcatttaccagaaatggtttttggggaaaacactttgattctaaaacacttgagcagtggcaccaacattca

SEQ ID NO: 82020 - DNA, 249 bp, Glycine max
  Clone ID: 700959289H1
ggaacctcctctggttacagcaaacactgttctttcaatcttagccatggattacccggttgataagatatcatgctacatttctgatgatggagcttcaatgtgtacatttgagtccttatcagaaactgcagagtttgctaggaagtgggtaccgttttgtaagaaattttccatagaacctcgggatcttgagatgtacttcagtgagaagattgactacctaaaggacaaagtgcaacccacctt

SEQ ID NO: 82021 - DNA, 247 bp, Glycine max
  Clone ID: 700959290H1
ggaactttgagttgtttttctacacccaccaattatatgtagtctttattgtctttttggccctgcatgttggtgactttgttttcactatggctgctgggggaatatttctctttgtgcttgatcgatttctgaggttctgccaatcacgaaggacagttaatgtgatctcatctagatgccttccatgtggcactgtggaattggttctgtctaaacctcaaagtttgagatacaatgcactaag

SEQ ID NO: 82022 - DNA, 248 bp, Glycine max
  Clone ID: 700959293H1
caataattatcaaacctaaccagtaaaaatggtgaccgtggaggaaatccgcaacgctcagcgttcccatggacccgccaccatcttggccttcggcaccgccacgccgtccaactgcgtctcccaagccgattaccctgactactacttccgcattaccaacaaactacacatgactgatctcaaagaaaagttcaagcgcatgtgtgaaaagtccatgataaagaagcgatacatgcacctgacgg

SEQ ID NO: 82023 - DNA, 106 bp, Glycine max
  Clone ID: 700959294H1
gcttctgctatctttgttgtagttgaagtcgctcccctcattcttctttcgttgctacttctactggttcttcctccgatccctcattgacgcaaatgactcctcc

SEQ ID NO: 82024 - DNA, 268 bp, Glycine max
  Clone ID: 700959301H1
ccttttgtgtctccccacaacatattagtgtcaacagtgaatggcactggatcattcattgaaatcatatacgtgttaatcttcatcgtattggcaccaaggaaggagaaggctaaaattcttggtctcttcaccttcgtgctctcggtgttctctgcagttgttttcgtgtccctttttgctcttcatggcaattccagaaagctcttctgtggcttcgctacagccatattttccattatcatgtatggctcgccactctcaatta

SEQ ID NO: 82025 - DNA, 256 bp, Glycine max
  Clone ID: 700959302H1
ctttgttccacgaaattgcgatattggaagtgaaatggaggccaggcacatctcattcttctcttgatatttctgatggcactcgctgcaaacaaagtttctagcagtcctattgtgactaaaagaacagctctttgcagatcacatgaaaaacactatttttcctacgtcaacaaggatcaatagaatacggttgtcaagacatagactggaacatggacatctgaactatagatgtctccacacacagagatca

SEQ ID NO: 82026 - DNA, 261 bp, Glycine max
  Clone ID: 700959303H1
ggaacagagaacaacagttccatctatggttcgaccccaccaaggacttccacacatactccgtccacatggaatcctgcaagcatcatattctctgtggacgggaccccaataagggagttcaagaatttggagacaaaaggggttccattcccaaagagccaacccatgagaatatactctagtctttggaacgctgaggattgggccacaaggggtgggcttgtgaaaacggattggagcaaggccccattcacagcc

SEQ ID NO: 82027 - DNA, 260 bp, Glycine max
  Clone ID: 700959304H1
atcttaaggaaattgcggagaagaatcttactacagcggttgtggattgttgcattggaatcccggtttattttactgatctgcagagaagggcggtgctggatgcggccacgattgctggtctgcacccacttcggttgattcaggaaatgactgccactgccttggcctatgggatttataaaacggaccttccagaaaacgatcagctcaatgttgcgtttgttgatgttgggcatgctagcatgcaagtgtgcatt

SEQ ID NO: 82028 - DNA, 261 bp, Glycine max
  Clone ID: 700959305H1
ggagaaaacaaggtcctcagaccaagttgttgtcttcctcgaccagcataaccctaaaccaccctccatggaatccgaaaaccatcaggacaaacccaaacatcccttaaaagtcagagctcttaaccgtctcagcttctcaaaacccaaatcccgaatcctagaatacaactataatgtcccccgcaacaaagttgctgaagagagtgacattattcaacccacctataagttctcttccaacgatgacgatgacgatga

SEQ ID NO: 82029 - DNA, 260 bp, Glycine max
  Clone ID: 700959306H1
cttactactactttcttctttctttctccacctgaagtagttctccacaacttggaaggtgatcatctccaattttccatcatggctactgagccttctgcatctgatcatgcttctactactgatgagcattatgtgaagaaggaaaaggacgagtccattgcacaaaagatcgcttctttagcaaatgaagatgaagtcaaacatgacaatactccttcatctaagacagaagaagatgtggtgaaggcagagcttgc

SEQ ID NO: 82030 - DNA, 180 bp, Glycine max
  Clone ID: 700959307H1
cacctctctctctctctccctcctctcgtctctgcaactcccggtggttgagaaaccctaaccaccgttgaaacgccgttgtttcactcccaaacctcgctattcacgcgcgtttcccgccaccgttccgaagagaagtgatttccacacaacatacgatgcacgattcttcttcaaccc

SEQ ID NO: 82031 - DNA, 266 bp, Glycine max
  Clone ID: 700959308H1
ccaccatttaagcctatgaagaaatctcaggttgctaagcttactaaagagcagcagaaagcatattttgaggagtacgattatcgggtgaaacttctacagaaaaagcaatggagagaggagttgagaaggatgagagagatgaagaaaaaaggtaacactaaagaaaatgactatggttacacggaagaagatgatcaagagaatggaagtccagcagcagtgccagttccattgcctgatatggccctgccaccatcctttga

SEQ ID NO: 82032 - DNA, 257 bp, Glycine max
  Clone ID: 700959310H1
tacagagccgccatagctgagttcatagcaacactcctttttctttacatcaccgtgttgaccattattggctacaagagacagagtgacaccaaaatccccggtaacaccgaatgtgacggcgttggcattttgggcatcgcttgggccttcggtggcatgatcttcatccttgtttactgcactgccggaatctctgggggacacatcaaccctgcggtgacattcgggttgttccttggacgcaaggtgtcttt

SEQ ID NO: 82033 - DNA, 259 bp, Glycine max
  unsure (1)..(259): unsure at all n locations
  Clone ID: 700959311H1
ctttatttctattgctacttactttttatttctatccaatcctccatcccnccagaannccaaacaccaacctccgctgaagaagtggtgcctgctcctgcggacacgccacccactacccaatcccaagctgaagctgaagttgaagcaaatgcagaaagcatcgaagaagtggtggcggaagcagagaaggcccagagtggtgtagaagacaagatttcccaatctgaagctgaagctgaagctgaagttgaagcaa

SEQ ID NO: 82034 - DNA, 256 bp, Glycine max
  Clone ID: 700959313H1
cagaaatgcttggaaaccccgtgagcctgagaggcgccaccaggtctgctccatcaccgtctacacctgttactttcaagaccgttgcgcttttctccaagaagaaggcagcaccacctcctccaaagaaaaagcctgctgctgtatcccccgccaatgaggaactcgccaagtggtatggtcctgacagaaggatcttcttgcctgagggtctcttggaccgatcagagatccccgagtacttgaccggagaagt

SEQ ID NO: 82035 - DNA, 256 bp, Glycine max
  Clone ID: 700959314H1
gtttcctctgcgtcgatggcttcgaattcgatcgacggcgacgccgttacggggtcgggactgtgcataaacgacgtgttaagggacgacgagctgcgttccatatctggggcgagtggagagcgagaaggacaaggaaacgttcgggttggtctgcaagcgatggcttcggttgcagagcacggaaaggaagaaactcgccgcacgtgcgggtccccacatgctccgaaaaatggccgataggttcacacgctta

SEQ ID NO: 82036 - DNA, 254 bp, Glycine max
  Clone ID: 700959315H1
gttccttcaactcctcgctggcaacaacagcagtactaccattagccgcgtttttcaaaagtgattttcgagaattagcgatgggaattgaaagaggaggcttcaagggattcaggagcgcctggagcgtgccgcccaagccgtgcgattcctgcaagctggcctcggcggcgcttttctgccgccccgattccgcgtttctctgcatcgcctgcgattccaacattcactgctcgaacaaactcgcgtcgcgc

SEQ ID NO: 82037 - DNA, 259 bp, Glycine max
  Clone ID: 700959316H1
gcctcttcgggtgttctccgatttggcctcaattccgccattcctttttttcttttcttttattcctcttttaatttctttttctttttcatggaccgcagatacagagactatcaccatcgtcctgctcatttggcacatgcttctccccctgaatactttgtccgcctggagaacacaacttacaaagacgatctatatttaaggaagaggacaaggatgcgtcggtggctttgttgtacttgtcaggtggaagagt

SEQ ID NO: 82038 - DNA, 263 bp, Glycine max
  Clone ID: 700959317H1
aggtgttacttacaggtttcagaagccttccaccgttgtttgcagatacacctaatgcagttcatgaattaacaatagcaagggatatatacgagcatgctgttgtccttagtgtgaaaaatgaggatcaagatgcttttgaaagggatttcttccagttgaagccttattatacagatgcctgcaatcgacttccaccatctcctcaggagtacccaattctgggtctcaacctgttgagattacttgtgcagaataggatt

SEQ ID NO: 82039 - DNA, 255 bp, Glycine max
  Clone ID: 700959319H1
gttatctactcttttctgcatgtttgttctctcaacgactcctccgcgaaagagtattattcaatattttggttgggttgaatcccggggttgaagcgttgcagacatcacggctattctaagagtgtctcgctccctcattcatgtccgatctgtacgacggaggacgggtagttgcgtaactgccgttaacccttcgccgcacggtgggcgtggtgctttgccttctgaaggtggtagcccttcagacttgct

SEQ ID NO: 82040 - DNA, 257 bp, Glycine max
  Clone ID: 700959320H1
ccaacgttgaaatgcgtgcttcttagttcttcatcactcttaacattcgaagacgtcgttttagtccaacgatcaaacccacaattcagaaacaaaagccctatttctctctctctctctctgattcagaccacatcctcagaattccattctgctgcatattccagtttctgttttttctttgactaaatggaggttcaaactcacaccttggacattcatcagccccaatttcggagctctgaatacccgaatcc

SEQ ID NO: 82041 - DNA, 258 bp, Glycine max
  Clone ID: 700959321H1
agcattttcagaggaaaatggcgggtacggtttcgacttgtttcttcttcgtgtttcttctttctctccttcttccttttcagatctccgctgaggaatcctcggagaaggagttcgtactcacattggatcactctaactttcacgacactgtcagcaagcacgatttcatcgtcgtcgagttctacgccccatggtgtggtcactgtaagtggcttgctccggagtatgagaaagctgcttctatcttgagtagtc

SEQ ID NO: 82042 - DNA, 259 bp, Glycine max
  Clone ID: 700959322H1
tctactttgaggcctccgttgttggtgggtgggtctttcttctctcaaaatggccaccggagtgaacagactgatttctgctgcatcagctcgggcccacaccagaagggcaaagaaaaccaattccgctttccctcccatcgggaattcttggaacagcactagcagtgttgtttattgggtttttagcatgggcttatcaggttattcaacctcccgctcccaagatatgtggcacttctgatggaacgcctataac

SEQ ID NO: 82043 - DNA, 261 bp, Glycine max
  Clone ID: 700959323H1
gagaaagataagaagtaaggaggtagtaggcagtgtgtttgtttgtgttgtgttgggcgttaaggatggtgttgaattgcaaaagcaaaaacatcctccttttagttttgttagccatagcaatagaaacgggatggtcatcagaagaagaaagcagcatcatatcacgattccagcaatacctgaaaatcaacactgcccaacccaccccgcgttaccacgaagccgccgatttcctgatatcccaaggtaaagccctct

SEQ ID NO: 82044 - DNA, 262 bp, Glycine max
  Clone ID: 700959324H1
caacacaccacttttgcacaagcaattgcaacataccaacgttgaatagtgtctctctctttttctttttcttatttttttctcatagtgtctctttttttctttctcttatttaactctcatagtgtctctcttgttcttcaatcaagagaagaaagaatacaccctgaagccatggaaggtggtgtgccagaagctgatatgtctgccttcagagaatgtttgtctctatcatggaagaatccttatgttcttcgccttg

SEQ ID NO: 82045 - DNA, 256 bp, Glycine max
  Clone ID: 700959325H1
ttcgatcccgctggtgctcacttcgatcccgttggcgctctcttcgattcagtttagcaggttgtgctgaggcttaattgacccttgaagcatatttcggagttttatcagagaacaaatgggatatattggggctcatggtgttgcagctctgcacagatataaatatagtggagtagatcattcctacgtggccaaatatgtactacaacccttttggagtcgctttgttaattttttccccctatggatgcct

SEQ ID NO: 82046 - DNA, 256 bp, Glycine max
  Clone ID: 700959326H1
gaaacaagaagaggattgtccgtatattgatttggaggcaaatattgaaaatcaagaaacagttgctgcaagcaattttagtagggatcaaaattcagtaacaattgttgttgatgaagatcagcaaaggcccaagaggaaacagaaagatcgtcattatattgacttggaggcaacacttgaagatcaagaaacaggtgctgtaaccaatatatgtgaggataaaacttcagaaaaaatggacgttgaggaagat

SEQ ID NO: 82047 - DNA, 256 bp, Glycine max
  Clone ID: 700959327H1
ggagtttctgaaagagaacccgaacatgtgcgagtacatggcgccatcgctggacgtgagacaagacgtagtggtgatggaggtgccgaagctgggaaaacaagccgcaacgaaagcgattaaggagtggggtcaaccaaagtcaaagatcacacaccttgtgttctgcaccacttcaggcgtggacatgcccggagcagattaccagctcacgaagcttctcggcctgaggccctccgtgaagcgcctcatgatg

SEQ ID NO: 82048 - DNA, 251 bp, Glycine max
  Clone ID: 700959328H1
tgagaggtggacatcaagcacgggtaggttcactgtcttggaacaatcatattctcacaacaggagggatggatggtagaattgttaacaatgatgttagagtgagacatcatattggtgaatcttataggggacatcagcaggaggtttgtgggctcaggtggtctccctccggacaacaattggcaagtggaggcaacgataatgttattcacatatgggacagggctatggtttcctcaaattcaccg

SEQ ID NO: 82049 - DNA, 250 bp, Glycine max
  Clone ID: 700959330H1
agattttcttgtatatattcctagcattttggtttcagttgctttccataataattaagaagaatggtcgttctcatcgagcaatcagagctaacaagaccgcaagctgaggagaacaatgatgatttggtattggatggtggtttttccttgctcaaatcaccttcacatgttggatttacagtccctgatatcaattcatatggtcactccttcagaaattattatgatgaaagcgaaaggaataagt

SEQ ID NO: 82050 - DNA, 255 bp, Glycine max
  Clone ID: 700959331H1
attagttaccgtttgacttgcatgccagagaaccaactattataaattacgcttaaattgaacttttatttagacaccacaatgaatcaattatttaaattgcatgtgctgaaatttagtttttatttagaataacgaggacagtaaggattgattaaattaatattctaatatcatcttataaaactgattgagaaaactttaacactttggtgaaagcacataaatggttttatttataactttgtaagtttt

SEQ ID NO: 82051 - DNA, 258 bp, Glycine max
  Clone ID: 700959332H1
ctccaccagaaagaaaatatagtgtctggattggaggatcaatccttgcatccctcagcaccttccaacagatgtggatttctaaaggtgaatatgatgagtctggcccatccattgtccacaggaagtgcttctaacttctaagtacaaaatatgcttcaatggtgaaatatttttcgcaccagttgtttttatgggtctgtgtcatgtcatgttaacgatattgccatggataagaggtgaggaagtatcattaaa

SEQ ID NO: 82052 - DNA, 253 bp, Glycine max
  unsure (1)..(253): unsure at all n locations
  Clone ID: 700959335H1
gttgattctctctccaccacactccatagatttagnagcttncaacccatactctggaatggagaanactanactcactcttttaaatcttgtgcacaaaattataattataaattttaacattaaaaattgttcaaatctttttgactgtttgtacatgtgtacatgtacttctcgtatcgccacgtcctagaaccagatctcttcagcagccaacagacacaggatttacaagaccggtttttgctcctta

SEQ ID NO: 82053 - DNA, 253 bp, Glycine max
  Clone ID: 700959336H1
cgccaccattgccatagatctgaaacagagatcacagtgttagcgcttttattctccattggacgttcccccgaacaccccgcacctataatccagcaccaatccaacccgttttcgctcggatctaggacctcagtgtctaagtgaataaggttggggtttgcgatggctccgacgacgatccggaaggcgattggggtggtgaaggaccagaccagcataggaatagccaaggtcgcaagcaacatggcgc

SEQ ID NO: 82054 - DNA, 255 bp, Glycine max
  Clone ID: 700959337H1
gatttgtcgttggattgagttgcgcctttactagcgagaaagttattctggaagctgtcatattgactgctgtggtggtgattggtctgactctatacacattttgggctgcaaggagaggccatgatttcaacttccttggccccttcttgtttggtgctgtgctagttctcatggtctttgctctgattcaggttctgtttccactgggtaaattgtccgtgatgatctatggttgcttggcagccattatat

SEQ ID NO: 82055 - DNA, 203 bp, Glycine max
  Clone ID: 700959338H1
agaaggcccagatgaagacgatgtatggcctcatctcgacctacaagttgaaccgccaattcagatggatatcctctcagatgaaccgcgtgaggaacggagagctctaccgtgtcatctgtgacacaaggggtgcctttgtgcagcctgcagtttatgaggcctttgggttgactgtggttgaggccatgacttatgggtta

SEQ ID NO: 82056 - DNA, 256 bp, Glycine max
  Clone ID: 700959340H1
cagaaacacaaaatggctgagcagaggcaaaacaacgtccacgttcttgttctgccataccctgcccaaggccacatcaaccccctcctccaattcgcaaaaagattagcttcaaagggcgttaaagccacagttgccaccactcactacactgcccactccatcaattctcccaacatcacgacctatgccatctccgatggcttcgaccaagcgggcttcgcccaaacaaacaacaacatgcagctcttcctgg

SEQ ID NO: 82057 - DNA, 205 bp, Glycine max
  Clone ID: 700959341H1
atataaggcataacaagagatagatggattctctgaatatgttgaaaggttatggtaaagtagaacaccacctcgaagatcatcgtaaccccaaacccaaacctaaattctcaaaacccttcatcgccgcaatttccgtcttcgcaatcctcttccttactctcaccttcgcattcgccctagcatccatgctccaccacagtta

SEQ ID NO: 82058 - DNA, 248 bp, Glycine max
  Clone ID: 700959345H1
ccgaaacaggtttcctataaaatcccgcatgtgccgtagcagttgagctgaaaccgagaagaagaagatggagatgtatcagatctggagcaggagaatagcgttgggagcgttcgcgtttgttctgcttttcctatcggcctcagcagacgacgtcgttgtgctctctgaagataacttcgagaaggaagttggtcaggacagaggagctctcgttgagttctatgctccttggtgtggacactgca

SEQ ID NO: 82059 - DNA, 170 bp, Glycine max
  Clone ID: 700959347H1
gaatggttcaaaacaggatacaagccaacaacttttgtagaggaagaggatgtcaatgtagatgatgttgctgctgctttcaatgattctaaggtgaatcttgtgacagagagagcagagagaccagtgtcaatgaatgcttatgagctcatatctaggtcacaaagttt

SEQ ID NO: 82060 - DNA, 255 bp, Glycine max
  Clone ID: 700959348H1
atctcaatctggattaagggacacagcaaatgatggaactactcttgaggggcatactccgaagctgattgttaagatccaaaaccgaagtcgaagtcctgcacaaagtgccactgcaggttcttctgatgatcctgcaatcatgaacagtcgagcttcatctcctgttctttcagagaagcacgatcagtttgaccgctgctcaaaggaaaagagtgatttttatcgagctaatattggtgcagacatttatac

SEQ ID NO: 82061 - DNA, 255 bp, Glycine max
  Clone ID: 700959349H1
ataaaattatagtattttgagtactgtgtatgtgaagaaatcagattttggtgtggcggcgtgcatagcgacttccctggcagagaaattcaagagcccaagcaagcattaagcacgttgtcgcttcggtctcgtcggactctgtctttgttcattggagccgggaactgagcaatcaatgactggaaaggatttggaaattgaaggatacacagttggggggctgtccattggaggccatgaaacatgcgtcat

SEQ ID NO: 82062 - DNA, 251 bp, Glycine max
  Clone ID: 700959351H1
caagtgtacattaaattacacatgtcaatatggttttatgtgttacccctttgccacaccgtgtgtattgttgttggtcaaccttagctgctcgacttgctccagctgaaacaagcaatgcaattgtaggagcaggtgcagaagcgccatccattgttttcttccctttttcattcttactctttttttttttgcctttttcttcctttggtccttcccatctcatcccccccccccaaaccaattcatat

SEQ ID NO: 82063 - DNA, 251 bp, Glycine max
  Clone ID: 700959353H1
aagcaataagatgaaaatgaaagtgcttgttttgtttgttgctacagttttggtagcatatgaatgccatggctcagactaccagaagttccctctccaaatgaaaactgggtttggtgggcaatacagcaatgaggtggcatgtgccagttggaggcttggcgtggaagcaaacaacgtagtcaagtggcaaactgttcctgcagcttgcggagagtacatagctgactacgttctaggagaccaatata

SEQ ID NO: 82064 - DNA, 253 bp, Glycine max
  Clone ID: 700959355H1
tctcctcctcctctgtctctctctctctcttcacacttgaatgaatattctttcttgaattctcatctgggttcattccttttctcatgcgttgacaaaatcttcacactttcaaagttggtacctgataaaacttgaaaataaatcttccctttttgtgtcacaaccatgggttgttgtatgagtaaaaaagggtcagagccagaagaacacattgtttacagacatgttgcgggtgctgggggtgctggtg

SEQ ID NO: 82065 - DNA, 248 bp, Glycine max
  Clone ID: 700959359H1
gtcatctttgtcatattccaaaattaagcttgcattattcaccagaatggctaattcatatgaaaacaacttcccccctcagaagcaagacactcagcctggcaaagagtacctcatgaatccaccaccccaatacaagcagctcccaatacaagccatcaaataaacttcagggaaagatagctgtagtaaccgggggtgattctggaattggacgagccgtgtgcaacttgttttcattagaaggt

SEQ ID NO: 82066 - DNA, 242 bp, Glycine max
  Clone ID: 700959360H1
atgcgacgtaagggactatatacaaagatccagactatcttgagtttctcaaactaattgcaatccctcaagagcatcttcctagtgcagaggtacaattggcaagataagaagctgagcaagctggggctaacaaggaaacacgaattgtcacacccctgatggaatttgttcgtcagagacgtgctgttgacagtggtatgcaggcttcatcagcggtggcaaaagttagcagaagatcc

SEQ ID NO: 82067 - DNA, 246 bp, Glycine max
  unsure (1)..(246): unsure at all n locations
  Clone ID: 700959362H1
aaaactcagcgacagatcatatcatatcatgtgataagctagcttatatatacacacaacatacaatttataanggaaaactcnnncagaaaatagcttgactaagatatatactctataaacaattatgctttttccatctggtattctgaaatagcaattataatttatttgtggaaagagatataaagcaagtattaaacacatgggtaggggtaaggtggagctgaagaggattgagaacaa

SEQ ID NO: 82068 - DNA, 95 bp, Glycine max
  Clone ID: 700959363H1
cggctcgagctcgagcggaatcggctcgatcggactcgagcggctcgagggtcagcacagcacagcactcgtcaagcatcaatcatccatcgcct

SEQ ID NO: 82069 - DNA, 270 bp, Glycine max
  Clone ID: 700959364H1
attcggcattcggctcaagaaagctgtggatcatagcgtagaccttttgttctataaccacacctcattccatttccatcttctgccacctgtttctaactccccaacccaagaaatttccttttacccctttcccctctcctcttttcttattcatcaaaattcctctttggtgtcctctccctcggtcaactccgtttactataaatatgaccactcttttcttcctcttcttcaacttcaatactcacctttgaatggattctaatt

SEQ ID NO: 82070 - DNA, 247 bp, Glycine max
  Clone ID: 700959367H1
caatgtcgttcgcagtggcattgtgtacaacgtcgtcgttcttcccttcccgttttgaaattcgcaatccaaagcagcttcagcttccacctctcctttcaatgtcactgtcgtcgaagctaccgttgcatttctccggcaatgccatattcaaccgcaaccacccaaccatgttttctattcgagcctcaaactcttcatccaaactcgtcttattgagctccactatcgtcgtcacaacagcggt

SEQ ID NO: 82071 - DNA, 247 bp, Glycine max
  Clone ID: 700959368H1
ggagaagagagggtatgagctagttgaggagggtgatgatgtacagcaccatcttacacagacaaagaaacctaaactacccgttttagccagtgtgattgtggaagctttaaaggtggatagtatgcagagactttgctcatctttggaaccccttctcagaaaaattgtcagtgaagaagtggagcgtgctttggcaaaactcggccatgctaaactggctgaaagatctccaccaccaagatta

SEQ ID NO: 82072 - DNA, 72 bp, Glycine max
  Clone ID: 700959369H1
cggatatggcgaggaacacagctgacctcgtaacgcagctcaacgttgctcatcactttccacacaacatac

SEQ ID NO: 82073 - DNA, 247 bp, Glycine max
  Clone ID: 700959372H1
tttcgatgctcagtcatctcttttaccattctcttctctcttgctcttgcaggagagagccatgtccatgcatcgctacctgaggaagattattgggaagctgtttggccaaacactcccattcccactgcactgcgagagcttctaaagcctctccctgcaggtgttgaaatcgatgaactccctaagcaaattgatgatacacagtacccaaaaacattcttctataaagaagaccttcatccag

SEQ ID NO: 82074 - DNA, 248 bp, Glycine max
  Clone ID: 700959373H1
attcttgtgcctcaacctctatagtcaaattagtcattttcttatttttggggtgaaaattaaaatacatttttctcttgtcttattattttcattttcatggtctattaactttaaaatagttatctttaatatcttgaagtattcgttttatataaataacaaattggtttttccgttttaaccatgttaattttagatgatacaataacatttatatagtttgacttttttcataaattaatcaa

SEQ ID NO: 82075 - DNA, 242 bp, Glycine max
  Clone ID: 700959374H1
cgctcgagccgattcggctcgagcaagcttctaacgagggaagacagacgtcaatgggttttgtgtacgagcaatttatatgggcatttcttgttgggtgcacgttcattagtgtattatctcatcctgatgaagcagctccaaagtacacatttgtagaagaagctgcatctgctccagaaatcttaacttatgactacgtagtgattggtggaggaacatgtgggtgtccactagcagca

SEQ ID NO: 82076 - DNA, 248 bp, Glycine max
  Clone ID: 700959375H1
ggcagaatcacgcttcttggccactatccatcactgcttacaaactttacacttcccacaacactctccacctgaaagagacactcaacacacaaaacaaaaatttggaagagaaaaagagagagaagaatggagaaaaaggttctgatattgtgctgtgttgtggccttcttggggctgttgtcggctgcaactagcttcggtgctgaagcgacaaggattaaggtttctcaggttcattttgttgc

SEQ ID NO: 82077 - DNA, 244 bp, Glycine max
  Clone ID: 700959376H1
agagttggttaaaagtaggaaatgaaagtgagggagagagaatggaggaagaggcagggatctaccgtctagcggaggacagcctccggcagatattctgcaggctgccactgagggaaataatgatatgccgctcagtgtcaaaattcttcctgcagctgctctcaacaccttcgttcctccgggtcctctccagctcccatccgcccctccagctcctgggcctccgcaaccgccaccacac

SEQ ID NO: 82078 - DNA, 95 bp, Glycine max
  Clone ID: 700959377H1
ctaagataaaacctgattaggtacctgaacattataccagttgaatttatgtatttttcacttgttaattgctcaaacacaaacttggatactgt

SEQ ID NO: 82079 - DNA, 246 bp, Glycine max
  Clone ID: 700959379H1
caattgcaaagaaggagattatccaccgtttcctctgccctggctgagactgcagcgtcaatggcagtagctgtaactgtcgttggtgcagcagctacccttcttgtaaagagatccaaaacttctgagtcatcacaggttaataatttatctttattgtttgtattaattattaactcagcaatatgccagtgtgccactaaaaaatccaccttgtttttccgtgcaagagcatgaacatctttg

SEQ ID NO: 82080 - DNA, 267 bp, Glycine max
  Clone ID: 700959381H1
ctttatctctgttcgacgaaattgcgatcttggtcatcgagaaggactccacgcagatgtccgtgctagctctctatggttcaggtcttcgtgaagctcgtgaactaccagcacctcatgcccacgcgctacacgctcgacgtggatctaaaggacgctgttacccccgatgttctagccaccaaggacaagaaggttaccgctctcaaggagaccaagaagcgcctcgaggagaggttcaagaccggcaagaataggtggttcttc

SEQ ID NO: 82081 - DNA, 245 bp, Glycine max
  Clone ID: 700959382H1
ctcatcaaaatgaatctgtaccactcctccaccaccaccaccacctacaccatcttcaccgtcatattcctcctccttgcaatattattcactctcacaccccacaaggccaacggtgccacgtgtcaccctgaggaagaagcgggcctgttgggcttcaaatccggtatccgatccgacccgtccggcctgctcagtaactggatatcgggtacggactgctgcacatggaccggagtagaatg

SEQ ID NO: 82082 - DNA, 75 bp, Glycine max
  Clone ID: 700959384H1
ctcaccttctatctgccaattctcttctattaataacacccacctctttggttcctcttcccttcaattcatcac

SEQ ID NO: 82083 - DNA, 247 bp, Glycine max
  Clone ID: 700958690H1
gagagaagagtgagggtagtggaaatgacaattctttgaattctattggaaatgctgctgatagaggggcaaaattagagaatgctgttttgtcatggtcaaagggcatctctaaggacacacgcagggtggggctacagaaaaatccgatcagaatccaaatgctggtaaatttcctccattaaggagaagaaaacatctgtttgtcattgctgtggattgtgataccacttcaagccttcttgaa

SEQ ID NO: 82084 - DNA, 251 bp, Glycine max
  Clone ID: 700958691H1
acagaagcgtaaaaacaaaaggcttgactagagaaagagagagagagagcttcgaatcgaaactcagacgtagaaagaaacacaaatcacaatcgctatggctaggtacgaccgagcaatcaccgtgttctcccctgacggccatctcttccaggtcgagtacgccctcgaagccgtccgcaagggcaacgccgccgtcggcgtccgcggcaccgacaatgttgtcctcggcgtcgagaagaaatccaccg

SEQ ID NO: 82085 - DNA, 246 bp, Glycine max
  Clone ID: 700958692H1
gcgtgagtgaggggtagtgatagaaggataaggtgaggtgacgataaaccgtggaaagtggaaacggtggtgtagtctgtgagtgtcattgtgaagttggagacaatgttagcgccttctctctccttcctcattcttgttcatcttcctctttcttattgtcaatttcacttcctaatcccaaaccctctcattccctacctttcgtgctcgaagccaaagacaggacccgtagggaagacaggt

SEQ ID NO: 82086 - DNA, 251 bp, Glycine max
  Clone ID: 700958693H1
gtcacttttatacaaaatcaattagttaatgatgaggtgctttctaccttgctttcgtacttctaaacggaggaaccacttgcgttccgccgatgaagcccaaaaccatgtgggagaaggagctgttgaagactcattgattccatagcagagtcaaagtaagcaatccattcattcctttagtattgtgataatatatatttattatcctgtcatttacgctttcagaacaacaaatgaagagcaattga

SEQ ID NO: 82087 - DNA, 253 bp, Glycine max
  Clone ID: 700958694H1
ctttaaacagcttgaagcttctaattgattattgcttctactaattttttttttagcaatgtgtagtgttttatgaagtctctttcagttatcgatatagattcataggtccatgcaggactaagtgaaaaaggaagataagtatctgtagtacactgaaccacgagaagctgtcagctgaacttttgaggcatcttactcgaagcttggtgtttccttcagacgcaaaaccaagagcttatgttactagaca

SEQ ID NO: 82088 - DNA, 256 bp, Glycine max
  Clone ID: 700958695H1
catatttttttttttcactctcaaattaatgcacatgaacacctactctgaagccaccacatcacaaccaatgccacccaccatggatgaagatttggagaacaacacggaggattgcaataatgcaatgactcgatggtgagaaagaagtcagaactagttgtggtcacaaataatgactctcgtttccaaatgcttagaaatttcatgaccaatttgcaagaggtcatcttcggtactaagcttgtggtgcttt

SEQ ID NO: 82089 - DNA, 258 bp, Glycine max
  Clone ID: 700958696H1
gaaagctctcgtctccgccaccgacctctccggcatcaccaaaggaaaggttcgccacttccccgatactcctccctcctctaccgccacacgacgccacgacgctgctgcgtctagttccgttgtttttttctccgacgacattccttcttctcaatcccattctacaccgacaacaacctttacagtaacaaatattgacgatgttgccaagtcttcttccgacgcaaatcacgatttaaaggaggagaaaagtga

SEQ ID NO: 82090 - DNA, 244 bp, Glycine max
  Clone ID: 700958702H1
acaaaaacaaagaaaaaaaaaaacccttagccaacacaaccatcatctccacctctgctattcagcaatcagcattcactggtcaaactgctctgaagcagctcaatgagttcgtccgcaagaccggtggcgcggcaaaggtcgcactaacatgcgccgcaccgtcaagactgctcctcagagcatttggtatggccctgaccgtcccaagtacttgggtccattctcggagcagattccatca

SEQ ID NO: 82091 - DNA, 242 bp, Glycine max
  Clone ID: 700958703H1
cgaaacagacagagtggaagattcaaaacgagtacgtacgcgtcggttcatggtttcatcatcttcactgataataacaccaacagaatcgcacaactcaaccgtatctccacgctttctcaattgcgtcttcctgccactacttctacaaaacaacaaaaacaatctttgttttgtttcttcatttgtttttcctccaccaccttctgaggtcaccttgaaagtgatttcattggaagcaa

SEQ ID NO: 82092 - DNA, 206 bp, Glycine max
  Clone ID: 700958705H1
gtcttccaaatcaccaaaagctggaataatagccattgcggtcacatcataagcctcaaaccttgcctccccacattgaacgatagttgaattgattggtgttcatgaaatcaaattccttctggcaacaagaaaacgaatcataagcaccagccacctcatcctttttttaacaaatggaaaaatcattatgctccacacaacat

SEQ ID NO: 82093 - DNA, 249 bp, Glycine max
  Clone ID: 700958708H1
catagagatggcaaagctatttttgaaacaggcaaagcaatacgcagatgcaagaccaagctatcctccacaactcttccaattcattgcttccaagactccctctcactacctcgcttgggacgtcggcactgggacggccaagctgccaaatctttagctgcaatatacaagaatgtgatagccacagatgctagtgacaaacaacttgaatttgcagccaagctcccaaatgtgagataccaacac

SEQ ID NO: 82094 - DNA, 249 bp, Glycine max
  Clone ID: 700958709H1
ctcaaaccccaatcgttactcagtattcttcttcttgttcttgtttctgtttcgtcattttttatcttatgttccttgaatcaattgtgatgcttagaatttgttgcacttgcacgcgttgacggacaatgaagctcctgtgcgttacttgattgttattttgaccttcatctgcaccttggtttgctacatcgaacgagttgggttttccatcgcgtacacagttgctgctgacggtgccggagtgaa

SEQ ID NO: 82095 - DNA, 249 bp, Glycine max
  Clone ID: 700958711H1
gtcatgctttccttgtttgatggaaaaacaatttatggcatagatgcggataccatcatcaaatccaatttactgacaataatttcaggaggaactgaatcaatcactactactcttacatgggcagtatgtttgatatgagaaatcctattgtattggaaaaagttatagcagaacttgacttccaagttggaaaagagagatgtataactgagtctgatataagtcagttaacataccttcaagctg

SEQ ID NO: 82096 - DNA, 247 bp, Glycine max
  Clone ID: 700958713H1
cttatcttagctaccccatcacaacaaccacgttactatttctcatactctattaggcaaaaacaccaccaaatgggagaggaaaaggagcagcctaagaatgacaccgagaaaaagcccgaggaggtagcccccagaaagacgacggacccatccctgtcgtttacaaactcgacttgcattgcgagggatgcgtcaagaagatcaaacgcacctgtcgccacttcgaaggtgtggaaaccgttaa

SEQ ID NO: 82097 - DNA, 244 bp, Glycine max
  Clone ID: 700958714H1
aagcgaattagcgaagaagcataagatcgtcgatggatagtctcaagttcgcatctttgacgctgcctccttgttctcgacgctctgggatgctaggaaagaggttgaattcccctttacttattattgattcttcgcacagttttgctattgcaagactgatcttgctgccgcatcatcaagtattccactgccaaatatgagtttttcttgtagattttcaccaagtgtagcagcagaaaca

SEQ ID NO: 82098 - DNA, 249 bp, Glycine max
  Clone ID: 700958716H1
caagagcacctgtttcgcgattggcctgctcccggcgttgacgacgaccacaaaaatgcgttcttcgaccagctgactcgactagattcgagttaccctggcggtctggaagcatacatcacaaatgctaaacggctcttggctgattctaaggctggcagaaaccctttcgatggcttcacaccttccgttccaacgggtgagactttggcgtttggtgatgagaactacatcaaatttgaggaagca

SEQ ID NO: 82099 - DNA, 243 bp, Glycine max
  Clone ID: 700958717H1
cattgttttactgtcagtagctgagtccaaaaccattgatttaaaaaagaatatagaacagagaggaagagagacaaatgggtttgggaatgagaagagagtagaaacaaccgagagaaacacatagaaaaggaggcatagccaacctattcaaaccatgatgcaaggctgtgaggttgatgccattggcataaactacacgatccacacacacaaatcgacgctaccttttaaaatcttcag

SEQ ID NO: 82100 - DNA, 244 bp, Glycine max
  Clone ID: 700958720H1
ggcaacttgaatgagttgcaactgttgggatgtctagctggtgtggagatgatactgaaagatgtgggctatcctgtaaagcttggaagtgtgagttgctgctgccagtgcatacttacaggacactattccttgatcccttccaggatttgagtcacaagtcattcttgtctttacttcctttttttctgctctttcggaaattctgtaaaatatatattaccctcttttacactcctttgaa

SEQ ID NO: 82101 - DNA, 246 bp, Glycine max
  Clone ID: 700958721H1
caagccccactcaaccaccacactactctctctgttcttcttctacctttcaagtttttaaagtattcagatggcagagacattcctatttacctcagagtcagtgaacgagggacaccctgacaagctctgcgacaaatctccgatgctgtcctcgacgcttgccttgaacaggacccagacagcaaggttgcctgcgaaacatgcaccaagaccaacttggtcatggtcttcggagagatcacc

SEQ ID NO: 82102 - DNA, 246 bp, Glycine max
  Clone ID: 700958723H1
cgagatatggcttcaactctgcttcccctggcaaccttcttcttagttctctccgcttcttatctccagattgctggggcgaaagcacaaccgttgactagtctcaagcttaactctccgatccttcaggagtctttgctaaagagatcaatgaaaatcctgaggcaggatgggaggctgctataaatcctcatttctccaattatacagttgaacaatttaagcgccttcttggagtcaaaccaa

SEQ ID NO: 82103 - DNA, 245 bp, Glycine max
  Clone ID: 700958724H1
ttttcgttctgttttggcttcttcgctgcaactctctaccttccctctttttccgaatctgaatagaaatggcttcggagactgagacgttcgcttttcaggccgagatcaaccagctcctcagtctaataatcacaccttctacagcaacaaggagatgtttcttcgtgagctcatcagcaatgcctctgacgctttggacaagattcgatttgagagtcttacagacaagagcaagcttgatg

SEQ ID NO: 82104 - DNA, 248 bp, Glycine max
  Clone ID: 700958725H1
atgaagcaattgtttacattttccgtcaaccaaaatgctacaaacgaaaccagagattcgtaattgcacattctcttttgttgtctccagctcatagaatattataaactcagattcattcagaatttcagattcactttttcttttcttctctaccttctttttcctctgacagctttttgcagaaagttgtgatttttccttgaaagatggcatctttgagcatgatccagatcagaattgggaat

SEQ ID NO: 82105 - DNA, 245 bp, Glycine max
  Clone ID: 700958726H1
ccgagaggcgtgtctcagagtcttggtgctgtgcactattttcctcaaggaggctgcggcttatggcctttgcctcgctgaaattggtgagatgatgactagggagttccgcagggtgaggaggagcccagtgacttgaagttgtttgtttggaggcaaggaagatagtggcggagagggacagggaggaactgtctcccggggctgagatgagagatgatgagtttctgtttgatatagattat

SEQ ID NO: 82106 - DNA, 248 bp, Glycine max
  Clone ID: 700958730H1
cggctcgagggatcatctgtcgaaggacaaagtgcccgcagaggtatagaaatcaaggaagatcaagaaaacataaatatcgtgctggaaatggaatgggccatggaagtacaccatcaactcatgctgccgaagcacgaagccaccccctggaccaagaatgccagatggaacacgtggcttcgcaataggacgaggtcggtttcctgtccctgcttcgaattagcaaagattggacgccacaaatg

SEQ ID NO: 82107 - DNA, 241 bp, Glycine max
  Clone ID: 700958733H1
ccctcttcttccccaccatcacaccaaccaaacctcactctccctgccatggtcatgggagcctttcgccacttcgaaccggtttccaaatgcagcaccgaaaaccggtttaaccaaaccgtggcctcggcttggacggcaccctcctggtgtcccctagcgcctttccttactacatgctcgtcgccatcgaagccggcagcttcctccgtggccttgtcctccttggatccgtcccttt

SEQ ID NO: 82108 - DNA, 241 bp, Glycine max
  Clone ID: 700958734H1
cacaattattccacaaaatttccctcacttatttctcaccatcatcaccccctttccttctctcaagaaaaaaaaaagttaatttcttgaacccaatggcttcagagacagaggtgccggatattatttctctgttttcgaaaggtttcaacaaaacagagacatgtctctgtttctgcccttcctcttcggcttctctgacgccaccccaggacgaaatagcgacgacccagatcacgaa

SEQ ID NO: 82109 - DNA, 238 bp, Glycine max
  Clone ID: 700958735H1
caaatacttctcttggcattttgtgtcccttctctctttctcttgctcgatattttccaaccaaaatatattttaaaaccaaacgtagctaggcaccactgctaggcatggcaagtgagatatttcttgccttctgatcacaacctttgtggttgcagcctctgctggtaacttcaaccaagactttgagataacatggggtgatggtcgtgccaaaatcctcaatagtggggaactt

SEQ ID NO: 82110 - DNA, 243 bp, Glycine max
  Clone ID: 700958739H1
ataaaattttcgaagttgaagcgagaacttgccatttcaagggttttagggttagggttttctcaaattgcaaggacatgggtttcaaccttcaaccatatgggattcaatccatgctcaaggaaggccataacacctttctggcctcgacgaagcggttctcaagaacatcgacgcttgcaaacaactttccactattactcgaaggcgcctcggtcccaatggaatgaataagatggttat

SEQ ID NO: 82111 - DNA, 246 bp, Glycine max
  Clone ID: 700958740H1
attcccaattcctaattgtttaaacctaattctcatttcttcatcgttcgattcttctcctcctaaagatgcagatcttcgtgaaaactttgaccggtaagaccatcacccttgaggtggagtcctccgacaccacgataacgtgaaagctaagattcaagacaaggaagggatcccacctgaccagcagagacttatctttgcgggtaaacagcttgaggatggtcgaacccttgccgactacaa

SEQ ID NO: 82112 - DNA, 246 bp, Glycine max
  Clone ID: 700958743H1
caaaaggttgaagaatttgacagagtgagagtgtaaggtagagtcagtcagagatatagaaatggcttcgtggtgcagtgttcgaagcttccaggttccggcgatggaaggcagcgcactgcgcaaccgtgcttcttggccgccagagtggggtgtttgtccgtggccggcacctccttctggcgttcctcttcgtcaccgaagcactctttgtcattcacatgcttgagcatttcttccgaaact

SEQ ID NO: 82113 - DNA, 175 bp, Glycine max
  Clone ID: 700958744H1
ggcaatttcgtgctagtgtggtagtgtggtacccttaccctgaggtgcaagacaaagtaacctaacggtgcttacaactattaacagcggaagaagtgaagggcccagacggccaccgtctagggtagggttaggttttaattttcgccacacaacatacgagatcgaaattgcc

SEQ ID NO: 82114 - DNA, 242 bp, Glycine max
  Clone ID: 700958745H1
gcaagagaaaatgaccaagatcttctttgtattgctgctatgtctaatcatagcatcttcttctgggtttgtgaattgctctgatgttgagaaggaggaaaagattggaatatttgagctcaagaaaggtgactttctttgagggtcaccaactggggtgcttcaattttgtccctggtgattcctgataagaatggaaagttgggtgatgttgttcttggatatgattctgttaaggatta

SEQ ID NO: 82115 - DNA, 247 bp, Glycine max
  Clone ID: 700958748H1
gtttaaatatgatattgctctttctctgtactctattttctcccaccgtcacacatggctacggctgcgtaggataacatctaacaaacctagcgcacgatagtcttccttcacccatgcttggagtactctgcgcactcgccccaaaccttggcttctctccctcgtccacgtccacgcttccctgcctcgcctacctcattcccctctatcaccttcagcctcgccgccgccccgtcgccgccat

SEQ ID NO: 82116 - DNA, 238 bp, Glycine max
  Clone ID: 700958749H1
gtggtttgtccaacatcctcgagaagttcgggttgaagtttaatcttaaacccgcgtctcgccgtcttctcggcaaggatgggttgcccacttggttctctgctgctgatcgtaagcttttgggtcgtgatggagatcacgtgtcaagcccaatgttgtggttgcccaggatggcactggtcagttcaaaaccgttgccgatgctattgcttcctaaccaaaggataacaaaggtaga

SEQ ID NO: 82117 - DNA, 237 bp, Glycine max
  Clone ID: 700958750H1
aatgcccactttttttcttccaacgctcctcctccttctcatagccttcgccacctctgtctccggccgccgtgacctcgtcggagactttctccggctgccctccgaaactgataacgacgacaactcaagggcacccggtgggccgtcctcctcgccggttccaatggttactggaattacagacatcaggctgatgttattcacgcctatcaaatattgaggaaaggtggtctg

SEQ ID NO: 82118 - DNA, 239 bp, Glycine max
  Clone ID: 700958754H1
gccgaactcggtcatgtaacacaaaatgaaataagtgccagaggtcagccagagccatctggatggttaattggtggcttacagaaccttgggtttgacaattttcatcttggagttttgtgcttgataggaactgcatttgcatggctgcatttctagccattcaggcatcggtattaaaaaaatatcctgcaaacctatctgtcacagcgtgttcatacttctttggagcttgactg

SEQ ID NO: 82119 - DNA, 240 bp, Glycine max
  Clone ID: 700958755H1
gcaaaacctctcttcttcttctgattgattccacctcgcgattgatctgttttcgtttgtttgcttctttttcggtttctgatctgaactcgattcgattcgctattgccggaaaatgagtcctccggcaaggtccggtgatgatcgctccctcgagaggttgttgaggttatcgttgttgttcttcgaagtcatggtttcgatctgaggttttggcgctctcgagttcgttttggtgag

SEQ ID NO: 82120 - DNA, 243 bp, Glycine max
  Clone ID: 700958756H1
gagaaagtcgtactgattcctcttcatctttcgttaaagcgagtacttttcgttcttgatctgttggttacgatgtcgtattcaaggagatctaggtattctccttctccttctccttctccatacaagcgatcggttggtctgtgtccaggtcattctcaatatcaagatccagaagccgttcaaggagtttatcaagagatgcagaaaatccaggaaacaatttgtatggtgacaggattg

SEQ ID NO: 82121 - DNA, 244 bp, Glycine max
  Clone ID: 700958759H1
gaagtagtgaagaaaatgaaagtcattgttttcttcgttgctataataattttaggtgcagaatggcaatgcaatgggtcagagcatgagcatgagcatggccacagctaccaaattttccctttgcgaatgaaaccggccccggtggccactacattccggaggtatcgtgcaaaagttggaggcttggtgtggaagcacacaacgtcattgactggagaaccattcctcaagattgcgaggg

SEQ ID NO: 82122 - DNA, 244 bp, Glycine max
  Clone ID: 700958761H1
aattgtggatggaatcaaccacgttatcctctcaatatttctctctctctctctctctctcctctgtaaccaaatcaaaaaataaaaaaaggagctaactaaacataattctgatatcgcagtaaagtatcaacaaaccaacaatccaacaccatgaaactctctgttttccaccatcagcaccatcctatgattctcaattgcccccttaccttgacaagaacacacaagagacttaacaaca

SEQ ID NO: 82123 - DNA, 244 bp, Glycine max
  Clone ID: 700958763H1
tgaatcgtgaaaatgttcagaaaccagtacgacacggacgtgacgacatggagcccggcggggaggctgttccaggtggagtacgcgatggaggcggtgaagcagggctcggcggcgatagggctccgatccagacccacgtggtcctcgcatgcgtcaacaaggctaactccgaactctcatcgcaccagaagaagatcttcaaggtcgacaaccacatcggcgtcgccatcgccggcctcac

SEQ ID NO: 82124 - DNA, 245 bp, Glycine max
  Clone ID: 700958764H1
attaattaaattttgtcttataacatcccactaacaaaaactagtaactaatatttgtgaataataaaaaaattgtcttatgacaatattcagcataagagctttatgatcccaggcctggggtttgtagtctatccacatatctttaccaatgccagtgcaaggaattcactgccagtgtcaagcataggactcaaccttgtaaataccaacttagattactaattgatttgttgtagttgatg

SEQ ID NO: 82125 - DNA, 239 bp, Glycine max
  Clone ID: 700958767H1
gtgctctattgagaaggcatctgatttataaagctaggtagatatattcagcgtcaagtgtcaactatattatggcaagccttctcatgattccttgccagcatctattgctaaagaagttgcaaaggattgtcatagaaaggcagcatcaaactccattaggagtgagaaaacttcctcattcagtttcagaagcaatgccaatgttccttttcatgaattgcctggggcttcctttg

SEQ ID NO: 82126 - DNA, 240 bp, Glycine max
  Clone ID: 700958768H1
ctcatcttacactagatggcattcccttgagagcccattggacccatcactgagggacgcattatacgccaatctaaatgagaaggagcctcagccaattatgcatgagcccagaagaaggaagatgagtcaaaccacaaacttgtgtttgactatgtcaatgctgcactattggaacttgttggttatgggtcagaaaagtgcttaaagagaagtaagagccactacagggtccaagtc

SEQ ID NO: 82127 - DNA, 241 bp, Glycine max
  Clone ID: 700958770H1
gcgcagagctttgctggcatacccaccgtgacgaaattaacctctctacgtaacagcacacagcgatttccccaaatcatcgaaactccaactcgcgattcccaatcgaaaccctaactcgggatggcgatttgctgggcgaaattcttcaatcgctggagctgtggctgaagctgatcaagaacccgcagccgcagccctacgtaaaccctaatctggaccccgttttgctggtgcccgg

SEQ ID NO: 82128 - DNA, 243 bp, Glycine max
  Clone ID: 700958772H1
tgaaacttgagagagtgtcgttgattccaatttacgacggaggagtgacgaatcacaatctccaccggcgaaacctgtaactgttggcgacgctcaacactcgcactacgccgatagtgatggagagtgctttgcaagcgcctctgcgattacttaccagaggcagaagatagagcagtataagcaaatacttgctgctgtcatttcatctaatgacattgttcaggctaggaaattcataga

SEQ ID NO: 82129 - DNA, 244 bp, Glycine max
  Clone ID: 700958773H1
gttacctttgtttatccagagaccgtgaagcttattctatctaaaggaaaccctcattttgtgtgtgatgcacgagtgcttgttaagccttacaaggagaagggcaaagtcccagacaagatgctgcagcagagcaggtagatagaggagatttttcaccatgtggtactcctactggattagatgccagagaccaccaatttgatcttcaacttggaggcagaatgttctacaatactcaaga

SEQ ID NO: 82130 - DNA, 242 bp, Glycine max
  Clone ID: 700958774H1
gaggcacaagccaagcctcccacagcgaaggggctatcatataacttctacgacaaaagctgtcctaagcttaaatctatcgttagatcagagctcaaaaaggtcttcaacaaggacattgctcaagctgctgcttgcttcgccttcacttccatgactgctttgttcagggttgtgatgggtcagtgttattggatggatcagcaagtgggccgggtgagaaagaagcaccaccaaacttg

SEQ ID NO: 82131 - DNA, 241 bp, Glycine max
  Clone ID: 700958778H1
atgcctcctaagaacatggaggcctgtttttccttgtgggggcattattaaacggcttcgccgtcaacattgaaatgatcatcatttggaagcccatgttaagtgcaaatcttatcaactatggaacttccaactagaaaacggatggagaatttctttgggtgtcggagctgttcctgccgtcttgttatgttttggagctcttttcttaggagacacacctaattccctgattgaaaga

SEQ ID NO: 82132 - DNA, 177 bp, Glycine max
  Clone ID: 700958779H1
cacaaaatgaacagacttgtcttgcaaaaacccattaattaaaagccctaaaaagttaggttcttataggatttgaacttcattttagaggttcaaatttaatcttttttttttttggttcaactcacaatatatgcaacctacattggagtcaaaaaaaaaaaaaaaaaaaaataa

SEQ ID NO: 82133 - DNA, 238 bp, Glycine max
  Clone ID: 700958781H1
ggaaaattaatctccctttcattttctctgcatctgtactctccaaaatgccgtccttagaggaggagctcttcccttcaaccccaggcacgttcaagatcgagcgggcccaccacatgaaccgccgctctaccgctgcttcgcctccaccagcaccatgttcctgtgggccctactttttaatcgccctcaccgcttcatatctcagcttccaaggcttcgttgattccggcagccg

SEQ ID NO: 82134 - DNA, 240 bp, Glycine max
  Clone ID: 700958785H1
cagactagagagagtaagagtaagagaagagatggaaagagtagcatcagtatctcggccactgaaaatatacttgctcccattcttctcaccggggcacctaatccctctggtccagctggctcgcttgtggcggcacgaggccagcacgtgaccatcatcaccacccccgccaacgctcaactcttcgaccagaacatcgacatggacaccgcctccggccaccacatccgcgtccac

SEQ ID NO: 82135 - DNA, 241 bp, Glycine max
  Clone ID: 700958787H1
aacaaaaacaacaaccaaggtggtggtgctggtgctggtgctggcgggttctttggccctggaggagggttcagcatacccggttttggaaacgggtttggaaatggcatcataggaggaggatacggatcgggtatggaggtccgaatggaggctcctctaaaggtggtatcattagaccaaccgttgtgtgcaaagacaaaggcccttgtttccaaaagaaggttacttgtccagccaa

SEQ ID NO: 82136 - DNA, 243 bp, Glycine max
  Clone ID: 700958788H1
gtgaaagagaatccgaggcgaagagaagagaaaaattaagatggaggggaaggagcaggatgtgtcgctgggagcgaacaagttcccggagagacagccgattgggacggcggcgcagagccaagacgacgcaaggactaccaggagccggcgccggcgccactggttgacccgacggagtttacgtcatggtccttttacagagcagggatagcagagtttgtggccacttttctgtttcta

SEQ ID NO: 82137 - DNA, 241 bp, Glycine max
  Clone ID: 700958789H1
gaaaaagctagatgggagatattatcaggtgagattgattatttgtaatgttgtaacaagagtttatgcattataggttttttatatgctgttttataatgcctgatttgagcctagaagtcacttcaagatgcaaccgatccttcattgacttctactttcagattaatgaattcatttgccaatagtatagttatttttttcttgtaagattaattctgacctgttatttatttattta

SEQ ID NO: 82138 - DNA, 241 bp, Glycine max
  Clone ID: 700958790H1
attttgtggggttgcagagatgattggacctgttgacttcaataaggacatggacttttggcagcaagataaatggagtgggagcttccctgtaaagtggcacatcataaaagatgtgccaaatgcaaatttaggcacattatactagagaacaatgagaacaaacctgtcactaatagcagagacacacaagagataatgtatagtaaaggtttggaaatgctgaaaatattcaaaaacc

SEQ ID NO: 82139 - DNA, 242 bp, Glycine max
  Clone ID: 700958791H1
gtttcctcggaaaataacaacagtgacctaatgcaagcacagtctgagccatctctcccagtgaaggaatcttccaagagtcaagcaaaaagggaaatggtaaaaaataagagtccttctgattcaagcacagaaaggaaactgaaagtaaaatcaattcaagcaaacagaaaaagacatctttcactggaggcaaggaaaaaccaactccaccaagtcttcccttgtccccaaaacacaat

SEQ ID NO: 82140 - DNA, 238 bp, Glycine max
  Clone ID: 700958793H1
aacaaaacagagcaaagagagagtgtgtgaaaagtgaaacaaaggacagaacaacaatggcgacacttaaggttcctcagcctcttccccccgttgcagatgattgtgagcagctccgaaaagccttctcagttggggaactaacgaggagctgattgtatcgatcttggctcataggaatgctgctcagaggaagcttatcagagaaacttatgcccagacctatggagaagatctc

SEQ ID NO: 82141 - DNA, 241 bp, Glycine max
  Clone ID: 700958795H1
ggaaaaactgtgcttattatggaacttattaacaatgttgcaaaagctcatggtggtttctctgtgtttgctggtgttggagaacgaacccgagagggtaatgacttgtacagagaaatgattgagagtgtgtcattaagcttgatgataagcagagtgaaagcaagtgtgctacttgtgtatggtcaaatgaatgagccccctggtgcccgtgcccgtgttggtcttactgggcttactg

SEQ ID NO: 82142 - DNA, 243 bp, Glycine max
  Clone ID: 700958796H1
tgacattcttcgaacaagaacaatgagggtcgatgctctatcaacaatgagtagccttaagcttctctaccttggatattggaacgttggcttcgaaatcaatttttcaggaacacttgctaagctttccatgaattaggatatcttagttgggaaaagtatccttttgagtgtttgccaccaagttttgaaccggacaaacttgttgagttgagactaccttacagcaacatcaaacaactt

SEQ ID NO: 82143 - DNA, 261 bp, Glycine max
  Clone ID: 700958801H1
ccagttggtattcatgatgatgtcattaagaaatcaggttctgctcttcatcctggttattttggaccaggtcctggatatgcgagacatcatatggatggtatagctccaagaagtcctgttagtgaatatgctgagatgtcctcccggagattggggctgcactctggcagtcttgttggtaagtcaggtatagatgattttgatgacagagttgcacgtcgttttggtgaattccgtgatagtcggtttcctcatttg

SEQ ID NO: 82144 - DNA, 258 bp, Glycine max
  Clone ID: 700958802H1
attcgtgaaaatgtggggcgagtgcttacattggactccattgttgctggaaatgcgtggaaaggcatggacatgctgattttcaactcgtggcattggtggacccacactggaaaatctcaggggtgggattatattagagatggacccaatcttgtgaagaacatggaccgtttggaggcctacaataaaggattaaccacttgggctaattgggttgatcagaatgttgatccctccaaaactaaagtcttcttt

SEQ ID NO: 82145 - DNA, 257 bp, Glycine max
  Clone ID: 700958803H1
aaaacgatgagggcaccaggtgggccgttttagttgccggttccaatggctactggaattacaggcaccagtctgatgtttgccatgcatatcaactactgaggaaaggtggtgtgaaagaggaaaatattgttgtatttatgtatgatgacattgctttcaatgaagagaacccacggcctggagtcattattaacagtccacacggaaatgatgtttacaagggagttcctaaggattacgttggtgaagatgtt

SEQ ID NO: 82146 - DNA, 254 bp, Glycine max
  Clone ID: 700958804H1
ctcgagccgtttgtcggaaaccaaaccccgagcaacctctctcgcccaccttcgcggtctgattcagctgagagtggttgggctctgcaaaaattagctgcatgagctggtttgggaaactccgtttattctccaatttcaatccctttcacttcattacttctttgttaatttttaccctccatttttcaccccaatcgcgcttttccctccaacccctgttattgatccacgctaaaaccaatctcaatcgt

SEQ ID NO: 82147 - DNA, 252 bp, Glycine max
  Clone ID: 700958805H1
gcgaatgtgagtcttcttccattgtcagcctcagactcagggtttccactttccgctcacaataaaaaataaagagatccggtgtagaaatctcgtttctcagtcatcttaatctcaatggaatctattggtaaagaagaaaaaattgcttgtgtgatcggtgaccgatcaactagtgatgttgttgttaggctacgcacacaggaaggtcgagatgattggctgtactgccattcagagattcttgtgaag

SEQ ID NO: 82148 - DNA, 255 bp, Glycine max
  Clone ID: 700958806H1
aagagttctttcaaaatgcaaacagccttaaccttcgctgcccccaacgttgtgccattggcacccacaaagagtgtctcccatattaccatctttcctaccaaattgaaagccccgcgctcctcacctcgttactctccgattagggttgcaaccgtggagcccgacacttcaactgtcgactacaactctgcgttctcagtgtttcctgcagaagcatgcgaaactgtaggaggggaagcctgcatggcggag

SEQ ID NO: 82149 - DNA, 248 bp, Glycine max
  Clone ID: 700958807H1
caatcacttaacagctgcctcccactgcccgtacatcttgtatctctcctttgtgggaattcactgtgagtagatgctactaacacatctttaaggagcatcattcatcattgttttttttttccttttgtgttcaatgtggaaaagtgctttaactaaacagctgtgaaggcttgtcactgaaataaagcactgcattaaggccaagccaccactctcctcttttccattggtggatctttttttct

SEQ ID NO: 82150 - DNA, 254 bp, Glycine max
  Clone ID: 700958808H1
gggttcttcttcccctccggacactagcaagagcataaagctagagcgatacaacagctacatccggagactcaacagcaccaagctcctcaacgcctcctccaaactcctcttccgcgccactctcttggtcgcactcatcctcgtcttcctcttcaccttcaactaccctcccctctccgccaccgactccacccaccgccacctccacgcccactcccactacttcctctcctcctcctccttcggcgcct

SEQ ID NO: 82151 - DNA, 249 bp, Glycine max
  Clone ID: 700958809H1
ctcagacgatgcatataccgtgggatgaagctgggtgtttatgccttgtgggtgacttgtttaattatgatgcacctggaatggagccatctggcattgaggatttagagcattttctatctaactcttccatccatgatactagcttattaaatggagataataatataatggtagatgcagaccaccttgattctcactcagagattaacagatggttggtttgaggaagatgttaatgcatattgc

SEQ ID NO: 82152 - DNA, 248 bp, Glycine max
  Clone ID: 700958810H1
ggaagactctgttagagaatgatcagttgtgtatagagcagaggcaaggtcgagtctttgaaggatggaatgaagggaaaatatattttcctccgacttataagtattcagacaattcagacagctatgcaggtgatgacagacgctcaaaacaaaagtgaagaactccagcatggtgtgatcgtatcttgtggtatggaaggggccttcaccaattatcatatgttcgtggggagtcaaggttttct

SEQ ID NO: 82153 - DNA, 246 bp, Glycine max
  Clone ID: 700958811H1
atactcttgatttttcgaaattcgcttttgatgcaatgttgtatgtgtggatattatgtgaattttgttgtttggtgtttcaattgtttagttttggatcttgatatggttggttaccttgttgactggtaatgaacattttgagggtgaattaggcaatttgcattgtcgatgtgttgttttgagtttaggccttttgtgttacgcaggttgctgagaagacataaaaaatggtaaagatttgct

SEQ ID NO: 82154 - DNA, 249 bp, Glycine max
  Clone ID: 700958812H1
cttataacacaacacaacccacggccccgacctccgcattcctcctccttcccctcctcctgctgctccacctcgccatcgccgctcacggcatcggcatcaactacggcacgctcggcgacaaccttccaccgcccgcggcgtgtccgaacttcctgaagacgaagacgaccatcgaccgcgtgaagatctacgacgtgaacccggacatcctgcgggccttcgccggcagcggcatctccgtgacgg

SEQ ID NO: 82155 - DNA, 246 bp, Glycine max
  Clone ID: 700958813H1
tgtgattcctccctccttttgtcttcgcttggttcaagttgttacagtgttaaatttgagggacatgaagaagtaagaaagggcagcgggtgttggtggctcatataaaacggccaacaacaatgcgtaatttcttttctgctcttcagagtcggcttcattttgtggttgctccctccttttctcttcgcttggcaagtaaatgatgaatgagcgagcgcatagtgcagtgaatttaagaggaaa

SEQ ID NO: 82156 - DNA, 252 bp, Glycine max
  Clone ID: 700958816H1
ggactgaatgatgtgagacagtttcaattttctggagtagaagatcatgaagagtatgggggaattgactcattttactcaaattttgggttcttcccagatgatccatcagaagaagggtaccttctatccactaatcaccaaaagtatcaccaaatatttgatgattatggactattggatgataaccttcagtttgacatggtatctccaccactccaatttgatgaacaatatagaaccatggttcca

SEQ ID NO: 82157 - DNA, 256 bp, Glycine max
  Clone ID: 700958817H1
attcattctagttctggattccgactagccgcgttgactcggttccgtttttcattctcgcggatctaatattaaggaatagcttaagggcacattacaatgaaggcattgattctggttgggggatttggaacaaggctgaggccactgacactcagtttccctaagcctcttgttgattttgctaacaagcctatgattttgcatcagatagaagcccttaaggccattggagtgactgaggtagtgctagcca

SEQ ID NO: 82158 - DNA, 256 bp, Glycine max
  Clone ID: 700958818H1
tggaacttctgatgcagttagttacagaacctttggcgtggcatggactcgtaatccagtcttgtctgagatcctgttttccatctggtaaaaagaaaaagaacagcggatcagcttatcagtctagtgcgaatctggctcatgcaatcacagattctgtcatgcatttatttcatgtgttagaggttgttttgaaatggataactgaatggaacaaaagacctgaagatgagcatctggagaacattcttttgct

SEQ ID NO: 82159 - DNA, 255 bp, Glycine max
  Clone ID: 700958819H1
cagaaagctaaaacagaagaagcaaagatgatattgcagttcttcgtgctttcacagagaggcgataacatcgtctaccgcgactatcgtggtgaagctcaaaaaggaagcgctgagacatttttccgaaaagtaaagttctggaaagaagatgctgagggagatgctccacctgtttttaatatagacggtgtgaactacttccacgtaaaggttgctggattgctatttgttgctactactagagtcaatgtc

SEQ ID NO: 82160 - DNA, 252 bp, Glycine max
  Clone ID: 700958820H1
aaccaagcttctctgttaaaaaaaaattaggcgtctaaagggccaaagcttagaaagttgaagctttttttgttgaggtgaaagtgaaatggttggcaaggataatctgagggctgaggacttgaacttgtgctttaagaagcttatgatggtggccgggagtgggaacagtgagaaaggggtgaacttgaaggttggggtgatcaccgagtggaaggatattcctgtggagcttctgatgcaaattctgtc

SEQ ID NO: 82161 - DNA, 250 bp, Glycine max
  Clone ID: 700958822H1
attaattaagcactctaaaacatatctttatttccttgtctacatatcttgaaaaactcaatcatggctagtgtttcttcggttttagctccatttagaaggcttgatgggaaggtggcgattatcactggtggtgcgagtggtctaggtgcagccactgcaagactcttctctaagcatggagcatatgtagtcatagctgatattcaagacgacttgggtctctctgttgccaaagagttagaatctg

SEQ ID NO: 82162 - DNA, 252 bp, Glycine max
  Clone ID: 700958823H1
ttccaatggaaaagtgagaagtgaagagaatgcgggttgtttgttgctccaattcaggcgtgagtgccactcttccatctttcccttgtcccagattccctccactcattgcaatttcttcgatccgctttctaaattccacacccctccgttcccctgcttcgccgcgacaagttacaagaatggcttcgaagaatgctcaacaagacacgcgcttagccagaatcgcctctgcgatccgagtcatccccg

SEQ ID NO: 82163 - DNA, 250 bp, Glycine max
  Clone ID: 700958824H1
gcagatcttcgtcaagaccctcaccggcgagaccatcacccttgaggtggaaagctctgacaccatcgacaacgtcaaggccaagatccaggacaaggaaggaatccccccggaccagcaacgtctcattttcgccggaaagcaacttgaggacggccgtacccttgctgactacaacattcagaaggagagtactcttcacctcgtcctccgtctccgtggtggcatgcagatcttcgttaagacactc

SEQ ID NO: 82164 - DNA, 248 bp, Glycine max
  Clone ID: 700958825H1
cttgtatgtggctgcagatatccaaagcttaaattcggtcctcgaatctttctgatcattggttgttttttattctttcaaatacattccaaaatctcttggaaattgcgagattcactgcttatcctagcagcagattttgggttctgacccaattattcattttccccaactgggtcttgtggatttttctgttggggttttaaatttcgtgttgctgggtttgaaagttatttcctttcttcccc

SEQ ID NO: 82165 - DNA, 244 bp, Glycine max
  Clone ID: 700958829H1
gcgaaacaatggcgacggtggagctctggtggatgacgtgctttctctaacaactgctcttagaaaagagagagagaatggcggtggagtacacatgctgctcaacggcgttcttcgttcacatagtggtaatcgtgctgctggtgctgttcgcgggcctcatgtcgggcctcaccttgggcctcatgtcgctcagcctcgttgatcttgaggttctcgctaagtccggcactcctcaggatcg

SEQ ID NO: 82166 - DNA, 250 bp, Glycine max
  Clone ID: 700958831H1
gagagaacaaagcacttagtgctattcgataattacgaaaaaccaacagcgagtgttgtttttgcttggtccaggctggaccagggaatgaatagagatgagaggctttcggttgaagagaactgagttaagcggcgaagctaaacgcagaatcggcggcagaaattgccaccggaagcacgtcgaagacgggtgaaccaaacacaaaattccatccaccacttctcttttcaatccccaactcaaatct

SEQ ID NO: 82167 - DNA, 247 bp, Glycine max
  Clone ID: 700958832H1
gaaaattgttgcctatgaagctgtgcaccctattagcaaccttctagatcttaagagaagactgggaattggccgtcgttgttttggatatttacatccagctattcctggtgaacccctaattttcattgaagttgcactactgaaggatgttgctcagactatacaggaagttttgtgggatagtcctcctatacctgaaggtgaggcaacatgtgccttgttctactccatatcatcaactcag

SEQ ID NO: 82168 - DNA, 255 bp, Glycine max
  Clone ID: 700958833H1
gcgagtgagagtgagtgagtggttctcttgcagcaacaaggtttagtgacaccaaacagacgggaaatgggtcgtggggtcagtgctggtggtggacagagttccttggattatctctttggcagtggggtacctgccagcagtgcaaatggtgctcgcactcaaaatgcaagtgctccttcaccaccggttgataagcaaagtccagcaccagcaccagcaccagcacctgcacctgcagcagcagcagcacca

SEQ ID NO: 82169 - DNA, 252 bp, Glycine max
  Clone ID: 700958835H1
caagtttttctgtggtgggaggctggtttttggtccggatgtagcttccctgtttcttacaacattcctaattgctggacctgcaattgcattttgtgtaaagatatatcttaaaatcaagaagaccgatggtcttattcatgattactggtttcctgtattgattgtgggttcaattctcactgttttggatttaatattcctccttttgacttctgggagagatcctggaattgtccccagaaattcaag

SEQ ID NO: 82170 - DNA, 246 bp, Glycine max
  Clone ID: 700958837H1
ctggagagaagatgttcttgtcctttcttgttctgacagattccttcggctatccttgcagcttccttctagatactcaagttggctgtcttctggactgactgctcgcaaaaaccataacacaagcactagccctgggtgtgaatgggccgtttcagctgtcatagatgactttatttttgttattcatgatataagatatttggaggagcaggttcatggtgattaccttcaacatgtgcttca

SEQ ID NO: 82171 - DNA, 250 bp, Glycine max
  Clone ID: 700958838H1
ggtcttagttgtggctcatgctatgagataaggtgtgtgaatgaccataggtggtgcctccctggctccattatggtcactgccaccaatttctgccctccaaacaatgccttacccaacaatgcaggaggctggtgcaaccctcctatgcaccattttgacctctctcagcctgtcttccttcgcattgcacaatacagagcaggaattgtgcctgtgtcctacagaagggtaccctgcaggagaaggg

SEQ ID NO: 82172 - DNA, 249 bp, Glycine max
  Clone ID: 700958839H1
accagtgcctggcgtcgcggacacagaacagagcttgcagaagcgatttctcatttctcattcttaacaacacacttcaacaatggccaaaaccttcaaatacatcatcctcggaggaggagtttccgctggttatgcggcgagggagtttgccaaacagggcgttaagccaggggagttggctatcatttccaaagaagcggtagcaccttatgaacgtcctgctctgagcaaggcttacctttttcc

SEQ ID NO: 82173 - DNA, 246 bp, Glycine max
  Clone ID: 700958841H1
caaactcacagatagattagcacttagcatttactaagataggataaaggaaggaacactttcgttacatttctccgcccattcctaccttgttcctccttttctccttttctttttcgtattcggggttgctgctttctttcgactctattgtcttcttaataaatacagaaagaaacaaaaaagaaaaaagtttataggtgcctagaagaacagacaatatagtgtggagcaattacgtttgat

SEQ ID NO: 82174 - DNA, 242 bp, Glycine max
  Clone ID: 700958842H1
gttacatcgaaggcatcggacgaggatggggactttgccgagctaatagtgtttaaatggacatcacttctcatccctcctacaacagtgcttattgtgaatttggttgggattgtggctggtgtatcctatgccataaacagtggttaccagtcttggggtccactatttggcaagctgttctttgctatctgggtcattgcccatctatacccattcttgaagggtctcttgggcaggca

SEQ ID NO: 82175 - DNA, 252 bp, Glycine max
  Clone ID: 700958849H1
ctcgagccgtttgatgtatgggtaggaaatgtgcgtggaacaggtggagccatgggcatatatctttattagagaagaaaaagcaattttgggattggagttggcaggaattagccctgtatgatgttgcagaaatgatcaattacattaattcagtaacaaactcaaagatatttgtagttgggcattcacaggggacaattatatcttttgctgccttcactcaaccggagatagtagaaaaggttgagg

SEQ ID NO: 82176 - DNA, 249 bp, Glycine max
  Clone ID: 700958850H1
ctggaagcttgttgtgagtaagggaaaggcttcctgcactgaagaccaagttgaaacctcttgattctttgcttagaattccacagaatatggagaagagtcttttcaatgactccccacctttggagttctagggtatgagcaaggaggaggaagactcattgctagggcaagttgaaatatggaggtacatgacatgcttcacggactccgtggccttgaaatccgtcatagagctgcgcatagccg

SEQ ID NO: 82177 - DNA, 247 bp, Glycine max
  Clone ID: 700958852H1
cggagctgtgtctggggaaatttgcgttgtttttcgcggtacagctcacacacactgaacggtaagtatggcggacaaggctgttacaatccgaacccgaaagttcatgaccaacaggcttctttccaggaagcagtttgtcgttgatgttcttcatccagggagggcaaatgtttccaaggctgaacttaaggagaagctagctaggatgtatgatgtgaaagaccctaatactgtatttgtcttc

SEQ ID NO: 82178 - DNA, 245 bp, Glycine max
  Clone ID: 700958854H1
tctcgcaagcggagcccaatttctccttcacgaaccctaattcactcttcccattcgaaatctcgatcaccttttcgattcaacctttctctcctcgctaatctcttcgttcgcctcgcacatcaaggtgagggattgaaattgaatcctcaagatgccagctacagcaggaagggttcgcatgcctgcgaacaatagggttcacagcagtgcagcgcttcaaacccatggtatatggcaaagtg

SEQ ID NO: 82179 - DNA, 243 bp, Glycine max
  Clone ID: 700958855H1
gtcatcgcttgtgtgggaaaactgccttctattcatgtgcatcatcctgtattaaatatataacgttttaaggtggttgtgttatcgttcacatggagaaaatatacagtgggggttcttccatcagaaggcgttcattgagcatatcaagtcacataagccatcatacagacaatgatgatgatgctgaatgtgagagtgtttcagaggctggagacattggagatcgtgttactattcgaa

SEQ ID NO: 82180 - DNA, 245 bp, Glycine max
  Clone ID: 700958856H1
ttccctcactaaatgccagaaagaagaggattggttcattatcaatcagtctggtaaaccaggaaatgagaatcaaaaccgagatttcagcatgtttaatggcatttccaattcatcggcagctactgattcttttcatgtagagaagaacaagaaagacattatgactgatgactctttcatgattcaagctcgatcatcagaagatccattcaattctcagtcagcagctgatctaagtttgg

SEQ ID NO: 82181 - DNA, 241 bp, Glycine max
  Clone ID: 700958857H1
gacaaggagccaaaactcgcaggattcggccttagcatacagggaccgcaatttaattcgaagaagccgaaacaaattaatgcagatcatattatggatactcttggttacatgcctttggagtatgtcatgaatggttctgtcactgataaatgggatgttttctcatttggtttggttctgctacgagttgtgtgtggaatggattatttcataatggcagcagagaggaaacgtatgg

SEQ ID NO: 82182 - DNA, 241 bp, Glycine max
  Clone ID: 700958858H1
atcaagtcctgaatctggtgggcaaatatggagctttgttggcaaacatccatccatggttcttgaagaagcatggagataaaggggtgtgagagggtcctcaccactcacactcctccacttaaaacagtttgttttggcttagctttggcttctctaatcatcaagggatgtgttctaacattctctcttgagtggcagaagcagatatgcattctccaaaggaggagaggctttggct

SEQ ID NO: 82183 - DNA, 107 bp, Glycine max
  Clone ID: 700958859H1
attgcctgccgaccagtttatcaagggatgaattttctgtgaaagggctttatgcgaatactccaagttcaatgggagatgaagactgtacctttcctccactggat

SEQ ID NO: 82184 - DNA, 240 bp, Glycine max
  Clone ID: 700958860H1
gacagttgcagaaagcatttgtaacaggggtccccaagttgaatcggggagcgctggaaacagcctgtgaagatttcagcaatattattaatagtcttgatgaatgcaccgtatacaaaggaacactatccagtggagtcgagattgctgtcgattcaactattgttgcttctgccaatgattggtcaaagaacatggagacagcctatcgcagaaagattgctgcattgtcccgtgtta

SEQ ID NO: 82185 - DNA, 245 bp, Glycine max
  Clone ID: 700958863H1
cttttattctctctctctctctccttttcttcctctttacttctacactaaatatatcacaatccccaccccccatttctttgttgccagttcaggaaaacaaataaagttctcctttgaaacttctctgggctatgttattttgaaagaagttacttcgcatcaataatgggttcaggtgattggtttaagacaataattagcttaagaaaatcaaaagaaggcagatcaaagaaagcaaaggg

SEQ ID NO: 82186 - DNA, 242 bp, Glycine max
  Clone ID: 700958864H1
attagagaagggtgttcctccaccatggtggccaactgggaatgaagaatggtggcctcaaattggtctacctaaagatcaaagccctccaccttacaagaaaccacatgacctaaagaaggcatggaaggttggtgttctcactgcggtcatcaagcatatgtcccctgatattgccaaaattcgcaagcttgtgaggcagtctaagtgtcttcaagacaaaatgactgcaaaggaaagtg

SEQ ID NO: 82187 - DNA, 245 bp, Glycine max
  Clone ID: 700958870H1
agaaaacataataatgggttcacaaaattgtatggataggaagcactatgttctggtgcatggggcatgccatggagcttggtgttggtataagctcaagccacgcttggaatctgcaggccataaggtcacagtacttgaccttgcagcttctggaaccaacatgaagaaaattgatgatgttgatactttctcagagtattctgcgcctttgttgcagctaatggccacaattccctcaaatg

SEQ ID NO: 82188 - DNA, 240 bp, Glycine max
  Clone ID: 700958871H1
ctcaaatggcactcgatgttctcaggcttggtttcttgattgactttatgtcccatgcttccattgtcggattcatggatagagctgccattactattgcactacaacaacttaacgcttttcttggcataaaaacattcaccaagaacactgatattgtttctgtcatgcactcggttttcaatgcagcacatcatgggtagaattgcaagacaatagtcattgcagtagcattcttgg

SEQ ID NO: 82189 - DNA, 243 bp, Glycine max
  Clone ID: 700958872H1
tcggccacaactgaaatttcagggaatgaagtgaacacagatgggaaggtgataaatgaagagttagcaaaaccaagtctaaaaggacatgatgaagaagcaaagttcaaaggattttttccaaaaccaattcctatagttaaaccaattccaaagccaattcctattattaaacctattccaattccagtttataagcctattccaaaaccaattcctattgttaagcctattccaaagtca

SEQ ID NO: 82190 - DNA, 240 bp, Glycine max
  Clone ID: 700958873H1
gcaaatgttctctgttattgtcagctgtctggatcataatcaaggcaaccgttgaagtctatcatcacataactgaacacctgtttctcatgtgtatgttatcattaatatttatgtttcgtctgtcaaaatcttgacagtatatgtatctcagcatatgaacttattcagcttggtgagtgacttatgttaataatgactttgtcagacttgtctaataagtagttaatggccataatg

SEQ ID NO: 82191 - DNA, 235 bp, Glycine max
  Clone ID: 700958874H1
gggttggggagaaatcagctacagttattggtgccacttttcagtggtttttgagagatctaactggtatgcttggaggaatcttattcacattttaccagggatcaaatcttgatagcaatgcaaaaatgtggcgattggttgcagatcttatgaatgatctaggaatgctaatggacctcatttctccattgtttccatcagcttttgtatttgttgtttgcttaggaagcat

SEQ ID NO: 82192 - DNA, 239 bp, Glycine max
  Clone ID: 700958876H1
aactcacttgccttatttttggttttgagattgagctaaaggccaactcaaccatcgaatttgttggtgattgaaagagaaggaagaagaagcaggaaatggaagcagtgagagctggtcgagaaggagcaataggtctaggtcaaggtgatggcgtagccaaggacagcactgagactgaactcaccaaaatccgtctcctcagggcaattgttgaaacccgtgatccctcttccaag

SEQ ID NO: 82193 - DNA, 238 bp, Glycine max
  Clone ID: 700958877H1
gaaaaaggggagtttcttattctttctagacgcttccattgatcggcgatttcttagacatggcggacatcacgaacacgaggaagtgaagggtgagtccttgttggagaagatttctgggaagatccacgaccacgattcgtcatcttcgtcggattccgacaacgagaaaaccagcgcttctgactccttgaagtcaaaggttttcaggcttttcggcagagaaaagcccattcac

SEQ ID NO: 82194 - DNA, 241 bp, Glycine max
  Clone ID: 700958878H1
cagaaagcaagcctccaagcttcgagaacaggtcgctcgccagcaacaggctgtcctgaagcagtttgggggtggcggttatggaggttcagataatgtggttactgatggagtggagctccagctacacccgagacttgagaaactttatatatcgacacgtgcggggaagcattatcaaagggatattgttcgaggtgtagaaggttatattgttaccgggtccaagcaagtggaaata

SEQ ID NO: 82195 - DNA, 241 bp, Glycine max
  Clone ID: 700958880H1
tgaaacttgagagagtgtcgttgattccaatttacgacggaggagtgaggaatcacaatctccaccggcgaaacctgtaactgttggcgacgctcaacactcgcactacgccgatagtgatggagagtgcttttgcaagcgcctctgcgattactgaccagaggcagaagatagagcagtataagcaaatacttgctgctgtcatttcatctaatgacattgttcaggctaggaaattcat

SEQ ID NO: 82196 - DNA, 246 bp, Glycine max
  Clone ID: 700958882H1
atgatgcattgaagtctgcgttcaagttttcatctgctgaagcaagtccgttgaaaagtatatctgattataatatagacacaaatgaaaacatagaaggtctgccaattaatgacgggaacgttaaagcatctcctattgataaaaaattgaggtctccaatgaatgccaatcatgatggaattccttcttcactatcaacattccatgaatcagccatgaaatctggtaatgcagatgacttga

SEQ ID NO: 82197 - DNA, 244 bp, Glycine max
  Clone ID: 700958883H1
cttctttcatttttttcagcattttccacgagggaaaaagaaggaaaacatcgtgagaagatagaggaatcattagcagcagaagggtgtgtggatttggaacaaaatggcgagagaagcattcattttcaaggaaagcgccttgttatctctcagagcgttgaagagcttgttgatgttgatatttgcggttgctatgctgctgctgctgccattcagagggcggaggagggtgccaccggcc

SEQ ID NO: 82198 - DNA, 241 bp, Glycine max
  Clone ID: 700958884H1
tttgaagggaaacagacacgtggtgggttggaataaaatttgccatgtttacgacaagctctgtaggcatgttggtgcctccatagcagtggctttgtttggaagcgttgtgacagtcttgctcatttggctttcagcttacagcattcatagccgagtccccaagtagatggaaggaacatggatcatgcattctgcatatttgatcatacatcttcatttattgtttataaagttagtg

SEQ ID NO: 82199 - DNA, 239 bp, Glycine max
  Clone ID: 700958888H1
tctcgagccgaatcggctcgagcgcaaggaggtgcagaatggctgatgcaggtgcagaaggagcatcttcttccacggtaggccaaatttacgttttctggcacgaagggatgctgaagcatgacacgggcaatggcgtgtttgacacggggatggatccaggcttcttagaggtgttggagaagcaccctgaaaactcagacagagtgaaaaacctagtgtctattctcaaaaggggt

SEQ ID NO: 82200 - DNA, 237 bp, Glycine max
  Clone ID: 700958889H1
tatatagccaaccagaaaagggctgggtatttttgagtgtgtgagagagcgagcgagcgagcagtttcaaagagaggatttgggattgggaaggcgagggattgcgctgcgtctcttcctcttctctttcgattcatccctcattcataatcttccaatccaacaacctcagcctcacactcacacatacacacatctgaacgcgtatcgtccctcccatggcttcaaagcgcatcc

SEQ ID NO: 82201 - DNA, 237 bp, Glycine max
  Clone ID: 700958890H1
ctgcttctcactgatctccattcccattccatggcttccactgaatcatcccctttcaagaaaattcagattcaaagggatgacactacatttgacgcatatgtggttggaaaagaggatgctcctggaattgttgtgattcaggagtggtggggtgtggattacgaaattaagaaccatgccgtgaagatttctcagcttggtagtgggtttaaagctcttattccagatttatac

SEQ ID NO: 82202 - DNA, 236 bp, Glycine max
  unsure (1)..(236): unsure at all n locations
  Clone ID: 700958891H1
ctcttcttctcttgcggctacggttttagcgcacntcttctagatttaaggaagatgggtaaggaaaaggttcacatcagtattgtggtcattggccatgtcgactctgggaaatccactaccactggtcacctgatttacaagcttggaggcattgacaagcgtgttattgagaggtttgagaaggaagctgctgagatgaacaagaggtctttcaagtatgcctgggtgctgga

SEQ ID NO: 82203 - DNA, 237 bp, Glycine max
  Clone ID: 700958892H1
gcagaagagcgtcgcagttgtaaccctaatcagaagaagcgcagttgcaagcgagtgacagccaccagccatgggtcgtatgcacagccgcggtaagggtatatcctcttctgctttgccctacaaaaggacacctcctagctggctcaagatctcttcgcaagatgtcgaagaaaatatctgcaagtttgcgaagaaaggtttgaccccgtctcagattggtgtcattctcagaga

SEQ ID NO: 82204 - DNA, 234 bp, Glycine max
  Clone ID: 700958893H1
ctcttccttttctcttctctgtctaaggggtgccctgagatcacattgaacaatggtgaaggctgtggccgttcttggcagcagtgagggtgtcactggaactattcacttcgttcaggagggaagtggtccaaccaccgtaactggatctcttgctggtcttaagcctggtctccatggtttccatgtccatgccttgggggacactaccaatggttgcctctcaactggatc

SEQ ID NO: 82205 - DNA, 118 bp, Glycine max
  Clone ID: 700958894H1
ctcacgaaaaagagaagaaaaaccagaaaccctttccccgtgaaaacatcagcctcaaaccctcttcatcaccctcaaaccatacccacctaaaccaaaccctagttcctttcacttt

SEQ ID NO: 82206 - DNA, 242 bp, Glycine max
  Clone ID: 700958895H1
cagacacaatgggcgcgaagaagaagaatggcaacaacaaggagaacgaagacaacaccaccaccaccgtcgtcttgaaggtccaaatgcattgcgacggttgcgcttccaaaatcatcaagcacctccgcgctttccaaggtgtggagacggtgaaggcggagagcgacgccgggaaggtgaccgtgaccgggaaagtggaccccacgaaagtgagggacaacctggcggagaagataagg

SEQ ID NO: 82207 - DNA, 240 bp, Glycine max
  Clone ID: 700958896H1
aaattattgtggaagttcaatttagacttagaggcaatttctgctagtagctctgaggtcccatcaatattagagttcctgcagcggcggaagttggaagctaacaaggctaaacaattgtgcttgggtataacacgtacacttattctagagcataggcctgtgcctgtggttgccaaggctgtaaatgtactagtcacctcatactcccattcaattaaaaccggtagctatcttaag

SEQ ID NO: 82208 - DNA, 251 bp, Glycine max
  Clone ID: 700958901H1
ctcgcaagcaaaaagaaagaatcccaggcgaggagaaagatggaggggaaggagcaggatgtgtcgttgggagcgaacaagttccccgagagacagccgattgggacggcggcgcagagccaagacgacggcaaggactaccaggagccggcgccggcgccgctggttgacccgacggagtttacgtcatggtcgttttacagagcagggatagcagagtttgtggccacttttctgtttctctacatcac

SEQ ID NO: 82209 - DNA, 246 bp, Glycine max
  Clone ID: 700958902H1
cacaataatcaatcctttcactaagtatgctgtactaatcaccccaatagctaatgctattgaggaaaaatggcttctctgcaaaagaaagcctattgccattttggttagaacaaccattttggtcagcaccgtgcttatggcactattcatgccgttgctcggttatgttatggcatttattggtgcattttttagcgtgacaatctcattgttgttcccttgcatctgttacttgaagatgaa

SEQ ID NO: 82210 - DNA, 245 bp, Glycine max
  Clone ID: 700958903H1
cacaaattagtactctcgttaattattttgctaattgctaattgggcacaatggaaaagcttcatgctgtgtgcatcccatacccagcacaaggccacataaacccaatgctcaagctagcaaaactccttcatgttagaggcttccacatcacctttgttaacacagaatacaaccacaaacgccttctcaaatcaagaggttctgattccctcaatagtgtcccatcatttcaatttgaaacc

SEQ ID NO: 82211 - DNA, 242 bp, Glycine max
  Clone ID: 700958904H1
atttaataagctggtaatgtaaaatactgctaatgttaatatgaagtttggatggtcttattggcagaagatgctaggtggtgttcatcaatattctgaaaggtaaaacgattttggtttttaatgataatataaccatgaatctaacatcagatattgaacgctacacatcaaaaataaatcgagccaacgcatttaattgtaagtgtcttcatattacctgtgttctgtcacatcttttt

SEQ ID NO: 82212 - DNA, 238 bp, Glycine max
  Clone ID: 700958905H1
agcttttccctcgttgaaatgaaaatgggttctcctttgtggactttgtgtctaattttggcttcactagcctcttctgcattctgtgcctttccacggaggccagtggatgttccattcggcagaaactacgttcccacttgggcttttgatcacatcaaatacttcaatggaggttctgagattcaacttcatcttgacaagtacactggtactggcttccagtccaaagggtcat

SEQ ID NO: 82213 - DNA, 241 bp, Glycine max
  Clone ID: 700958907H1
gaatgtgagtcttcttccattgtcagcctcagactcagggtttccactttccgctcacatggaaaattaaagagatccggtgtagaaatctcgtttctcagtcatcttaatctcaatggaatctattggtaaagaagaaaaaattgcttgtgtgatcggtgaccgatcaactagtgatgttgttgtgaggctacgcacacaggaaggtcgagatgattggctgtactgccattcagagatt

SEQ ID NO: 82214 - DNA, 245 bp, Glycine max
  Clone ID: 700958909H1
cctcttcctctcagggaatgggtggaagatggagaaccctctctttgatctataaccgcataaacacttcttcttcttccaaaccccactttccctccttctaccgctccctctctctcgccgccgcaacttctgaaatacccgacccggatccaatcgggttcggagccccggaactcgacccctgcgtcaaaatccccgtcaaagcttatttcctctccaccagtataaatttgaagggcatt

SEQ ID NO: 82215 - DNA, 245 bp, Glycine max
  Clone ID: 700958911H1
caagaaacatattccaattccagtatataaacctgtaacaaagccatttccagtgtataaacctataccaaagccagttccagttccagtgtacaagcacattccaaagccagtgtataagcctattccaaagccagttccagtgtacaagcctataccaaagccagttccagttccagtgtctaagcctattccaaagccagtgtacaagcctattccgaagccagtgtataagcctattccaa

SEQ ID NO: 82216 - DNA, 243 bp, Glycine max
  Clone ID: 700958912H1
ggaaacaatattgatggcccgaaatggaaggagcccaggtaatcaacaaattagatcacgcaatttcttcaacgaaatgcttacgtgtcgcacattgattggttgagatgacgaaagaaaagcgagactttctcatatatataaggacaatccccaacatcgtttattgtgtctcactcacatcacacacactctcatagctgtagcggcgacactaagatcggagaaagaatggcgaaaacg

SEQ ID NO: 82217 - DNA, 245 bp, Glycine max
  Clone ID: 700958913H1
tgctcgagcgaatcggctcacggctcgaggattgctagaatggaatttcgatgctcagtcatctcttttaccattcgcttctctcttgctcttgcaggagagagccatgtccatgcatcgctacctgaggaagattattgggaagctgtttggccaaacactcccattcccactgcactgcgagagcttctaaagcctctccctgcaggtgttgaaatcgatgaactccctaagcaaattgatga

SEQ ID NO: 82218 - DNA, 260 bp, Glycine max
  Clone ID: 700958917H1
attcggctcgacgtcttcttctcctttccttaccacagaagaatagtagcaatcagagactgaagacgagcttccccttgcgccgaagggccaccgatggttgaaaccgagatggatgcagaaactgttgcaaatgtggttccaccaaaggagactccaaatagtgtttccatttctcatcattcctcacaccctccccttaatgagaggattatttcatccatgaccaggagatctgttgctgcacacccatggcatga

SEQ ID NO: 82219 - DNA, 243 bp, Glycine max
  Clone ID: 700958918H1
gtaaccttcttttctctctctctctctcgtgttctgagctgctagaagcaatggagaggaaaagaagccatgcttctttcaccatgtttgcaatgcttgttggattgctctctcagagccttgtcattcctgtaatatccaccactgttgcagatcagaagaactactacaccccagatccacatgctggaagtccccccacaggctcacacaatagtagtcctccatctcatggccatggga

SEQ ID NO: 82220 - DNA, 240 bp, Glycine max
  Clone ID: 700958919H1
cacgatctcttttttctctgagaaatacttgtaccaatactatgtctcaatctgataattcctctccttttaccacacccagattggttttcaagaaggttttggccaaatctcaacatgaaggggatggagctgttgtcagaagaggcattggaaggagcgagttgaagaacttggatcccttcctaatgttggatcacttctcagtatctcccccagcaggatttcccgatcatccac

SEQ ID NO: 82221 - DNA, 103 bp, Glycine max
  Clone ID: 700958921H1
cgaatactctgagagcgaaagccagaagagagacgttagtattttggtaataataccttcaaaactagaaatcaaatttgtggttgtatgcactgcattgcag

SEQ ID NO: 82222 - DNA, 241 bp, Glycine max
  Clone ID: 700958924H1
cccatctaatgagattgattcgagaccatcaagctgacttccttcgcctgataaatgaacctgcagaaggtgctgaagggaacatattggggcagatggcttctgcgatgccacaagcagtaaccgtcactcctgaggagcggcaggcaattgaacgtcttgaagcaatgggttttgatcgtgcaatcgtattggaggtgtacttcgcttgtaacaaaaatgaggaattggctgccaacta

SEQ ID NO: 82223 - DNA, 243 bp, Glycine max
  Clone ID: 700958925H1
agccgcctcaacatctgaaacagactctatccctaatccctatcttcttctctgctctctccgcacgctttggctcctctgatctcagtttctggttttgaattgtaggtgttgttggcttggtatccgtgcaagttctgctgtagccgatttgaaggtgaaggtgtcaccttaaagtttctttcatgtttgatcaggctactatccatttgggagcaactgagctgcttggagagtattttt

SEQ ID NO: 82224 - DNA, 245 bp, Glycine max
  Clone ID: 700958927H1
cattctctctgtgtatttccctacctctcccttcaagatgcagatcttcgtcaagaccctcaccggcaagaccatcacccttgaggtggaaagctctgacaccatcgacaacgtcaaggccaagatccaggacaaggaaggaatccccccggaccagcaacgtctcattttcgccggaaagcaacttgaggaccgccgtacccttgctgactacaacattcagaaggagagtactcttcacctcg

SEQ ID NO: 82225 - DNA, 246 bp, Glycine max
  Clone ID: 700958928H1
tgctaagcttatagattttttagttgcccctcatgcaaccacaactgtgttacttgcagaaaaagagaagcccagtaagggaacaaagcgcaagcgtagttgtaaaatggggttcatcaagatctgggacaacttcaagacgttctgtgaagagtcagaagaaaaatgaagattctaccgtagtgcggagaaagagtgcatctgacacagatgagtcagaggaagacaagaaagatgaagaaaacg

SEQ ID NO: 82226 - DNA, 244 bp, Glycine max
  Clone ID: 700958930H1
caatcatcaagataggaaaagaatggaggccatttgttccaagcaccttatgacatcccttgtcataattcttgcttctagtttgaccttatcacagggtgccaagaaaggcagtgacagtgaaaggccataccaagaagcgagcacggtgttcattagaacatcttgcagctccacgacctatccaagactctgctacagctccttagtgaagcatgcagacttgatccaaacaaaccgtgtg

SEQ ID NO: 82227 - DNA, 252 bp, Glycine max
  Clone ID: 700958932H1
aaaatgccttgcagaaggtaaaggaccagcttattttgtctgaatcatgcaagaagcaagctcagcaagaagctgaggagtccaaggagcaactactagccctatctgcaaaacttgaagagccacaaaaacaagttctggatctttgttctactggagaagctcgcgttcttgagctccagaatatcgtagaagaacgtgatatggcatgccaatctgagcttgagtctgccataaagcagctctcagttg

SEQ ID NO: 82228 - DNA, 247 bp, Glycine max
  Clone ID: 700958933H1
gtttgtccaacgtggcaccgtggataacaactgtgggagcgggaactatcgaccgcgatttccctgcttacataaccctcggaacagggaaaacatacaccggagcttctctttatagcggtaaacccttgtcggattcgccgcttcctcttgtttacgctgggaacgcgagtaactcttctgtagggtatctatgtttgcaagattctctgattcctgagaaagtttcagggtcaattgttatatg

SEQ ID NO: 82229 - DNA, 245 bp, Glycine max
  Clone ID: 700958934H1
agctcgagcgattcggctcgagatccggtttcccagatctgctcacttcctcaccccacaggctgatactagactgtaacactcagaagtcagttgaagagcatgggtcgtggagttagcagtggtggtggtcaaagttccttgggttatctttttggcagtggagaggcccctgccgcaaaaccggcaacaaacaatgccccagcccaacctgaagtgcaggctgtaaataatgcgcctccttc

SEQ ID NO: 82230 - DNA, 243 bp, Glycine max
  Clone ID: 700958935H1
ttgaaagttaggccctaaaaccccattcggtgctgcctcaacccagacagcgtttctgctaccaacagctacaacagtttttcccaactccgaactaatcgaagaatatgactcgcggcataaaacaccgtcagaaagccaagagcaagaagaagggctcgaagaaagagggtggttcttcttcatctttggcgccagaaattccagcgaaggtgtggcaaccgggcgtggataagttagagg

SEQ ID NO: 82231 - DNA, 240 bp, Glycine max
  Clone ID: 700958936H1
atcaaattttagacgtgctagaagagtagtgcttgacatggctgaatgttgcccgttgtcaccacagtttgcatcttcactttctgcaattgctagttcatctagtagcatgcttgttgagagtggaatgcgatttatgcacatagttgaagagatattggaacagctaacgccaacggttagtttgcatttcggaggaaatgtactgaacagaatcttacaactatttgataaatacat

SEQ ID NO: 82232 - DNA, 232 bp, Glycine max
  Clone ID: 700958939H1
ggaaaagtgaagtaaaaacgtagtgtttcatctcttccatttcgctctatcgctcaacggatctaaggcttcagtgtagtctgtaatcatgtcaggcaagtatatcatttctgctattcttggatcatttggagttgcatgggtttgtgattattatgtttcagacaaaaagctatttggaggttctacccctggaactattacaaacaatgagtgggcagaagagactgac

SEQ ID NO: 82233 - DNA, 243 bp, Glycine max
  Clone ID: 700958942H1
cccatctccaccacccccagtctacaagtacaagtctccaccacccccagtttacaagtacaaatctcctcctccaccctataagtatccatctcctccaccaccaccatacaagtacccatcaccaccacccccagtttacaaatacaagtctcctcctcctcctgttcattcaccacctcccccagtttacatctatgcatcccctcctcctccatatcactactaggttatttctgaaga

SEQ ID NO: 82234 - DNA, 100 bp, Glycine max
  Clone ID: 700958944H1
gcttcaggggtgtagatcttctcctgtttttggagacttgagtgtttgagctagtagttgaagttgtacaattatttgttgtctatatttttctattaat

SEQ ID NO: 82235 - DNA, 248 bp, Glycine max
  Clone ID: 700958947H1
atggtacttttgatagagaaacttacaaaacattacttcaagctggacaatcaccaccatgccatcacacaccttcaaccagaggagttatcatcctcactgcttgcatttaaatcccatatgtccaaatcaattgaccaactagcatcggatttgaaacccggatcagagacccccctgtccttaacatggtttggaaagtgtttcggcctcttgcccttcatcaacaaggcttttggaaagcttgt

SEQ ID NO: 82236 - DNA, 243 bp, Glycine max
  Clone ID: 700958949H1
gttctttctctcgcaatcttcactacattcaccggttagataccctctctctctctctctggaaagcatttgcattcacattgaatatggctgagactacacaatctaatgctgagttgttggagtggcctaagaaagataagcgccgcttcctgcatgttgtgtatcgtgttggtgatcttgatcgcaccattaagttttatactgaatgttttgggatgaagcttttgaggaaaagagata

SEQ ID NO: 82237 - DNA, 239 bp, Glycine max
  Clone ID: 700958951H1
ctcatcaagggttgtgaaagcagagaagtgagatacactaagttatcctcataaatacactctaattaggtggcaagataagtgtctaaccttagtaacattgccacatattgtgttcattttggaattgtgccactaaaattctattcaattcatctatggctgcctcttcttatgctatgcaatcaatcctggcaaaccctttgatccgcatttccagcgggtctagggtgaaccaa

SEQ ID NO: 82238 - DNA, 238 bp, Glycine max
  Clone ID: 700958952H1
gtgagtgctgaatcgaatcgaatcgattctccgaacatggcggcgagcgatcgcacagtgttgcaattctcttcatcatcttcttcttcttcgcagatcttgtccgcgaaggtccaccctctggtcatcttcaacatctgcgattgctatgttcgacgccctgaccaagccgaccgcgtcatcggaaccctactcggctccgtccttcccgacggaaccgtcgatatccgaaattcct

SEQ ID NO: 82239 - DNA, 234 bp, Glycine max
  Clone ID: 700958953H1
gctcttgacccttcttcccacctttttctggtccctcctagaaatggcttccaattccattcttcttctttgtatctttcttgtggttgccacaaaggttttttcctatgatgaagatctcaagacagtggttcctgcacctgctccaccagtgaaggcaccaactcctgcctctccagtgaaatcaccatcttaccctccagggtcagtgaccacaccaactgttaaggtgcc

SEQ ID NO: 82240 - DNA, 225 bp, Glycine max
  Clone ID: 700958954H1
tctttgtttaagaaagagaagcatcttttttttttcttttttaaattaatacaaattttcttattgtctttttttttctatatcttccattgaacaatgacttttttactagaaaaaaaaaaaaaaaaaaaaaaaaaaaaaaaaaaaaaaaaaaaaaaaaaggggggggccccgcacaaggggtctcgcgccccggggaattattgcgggggggggctcgggggg

SEQ ID NO: 82241 - DNA, 240 bp, Glycine max
  Clone ID: 700958957H1
gtgagggtgttcctcgggttctggcatgctggggatgtaatctactcggtgtacagtccaacaagattgtcgctgaagggtaatcccagaggactggagtggacatgaatggtgctaatgacggtgtcttattgatcattgaaaatcccgtcacgggtaatggagatatctttaatgtgggataccctaacgatgaggttacagattggcagcttgctgaaatgatgactcaggtttatt

SEQ ID NO: 82242 - DNA, 240 bp, Glycine max
  Clone ID: 700958958H1
actccctcctcttcacacattttcttagctctctccaacaatccctctcgttcacactttcagattgtgtgaagatgggggctggtggccgaactgctgttcctcctgccaacaggaagtcagaggctgaccctttgaagcgggtaccttttgaaaaacctcagtttagtctcagccagattaagaaggccattccacctcactgtttccagcgctctgttctccgctcattctcctatg

SEQ ID NO: 82243 - DNA, 245 bp, Glycine max
  Clone ID: 700958963H1
cgagataactagaaacagtgtgatgaaaatgaaggtccttgttttcttcgttgctacaattttggtagcatggcaatgccatgcgtacgatatgttccctctccgaatgaacactggctatggtgcccgtactccggaggtgaaatgcgcaagttggaggcttgctgtggaagcacacaacatctttggctttgagaccattcctgaagagtgcgttgaagcaacaaaggaatacatccatggcg

SEQ ID NO: 82244 - DNA, 248 bp, Glycine max
  Clone ID: 700958964H1
cacaagacccagaagcaccaccgcgaccggcgaatccagccaccgtgtgcggcttcgaattgagtccgagaacgcagttagacaggctttatattgaaacttgagacttgaagggaagctgttataattggtcagtcttcccatggcgtatcccttctcagatttcaagtactcagatggcctcactgtagtgggtatctccttctgcacagctattgtctgtgaggctatctcatgggttcttatct

SEQ ID NO: 82245 - DNA, 239 bp, Glycine max
  Clone ID: 700958966H1
attcttcttccctccttgttggtggtggtggttcgtgtcccccgccgcctcctgtgccgcctcccaagccttccgtgacggggaacttgaatccgaggaggagtgtgtccgggagtttgaattccggcattgtgggatcctcgaggagggcgtggccggttgtttcggctaggacttcgcctgctgggtctaggccgtcttctcccaggtcacataatgaaagtgaggggtacaacagt

SEQ ID NO: 82246 - DNA, 181 bp, Glycine max
  Clone ID: 700958967H1
tattcttcaacccagagagatttgtaataataaattacaacaacttaaacgatggcaggaggagcttatgtagattcgggaaatgcaaagcaatttgatgggaaggtcacggcattcgtattggttacatgctttgtggcagccatgggaggcttactcttcggttatgatcttggaataa

SEQ ID NO: 82247 - DNA, 100 bp, Glycine max
  Clone ID: 700958969H1
caaacactcacactctctctttctttgcttcctgctgctacaatatggagcctctctcttccacacaacataagaaacaaaaagccaagccttcctccct

SEQ ID NO: 82248 - DNA, 236 bp, Glycine max
  Clone ID: 700958970H1
gtagagctctcttctgatggtgggactcaaatttcacatcgtgatattgaagctgagttgcgtgaaataaggttgagtttattgatggagatagagaagcggaagcaagttgaagaatcccttaacagcatgcaaagccagtgggagagacttaggcaacggttatctcttataggaattgtattgccttcagatcttactgctgagggtgggcagctgagttctgatcctatgga

SEQ ID NO: 82249 - DNA, 239 bp, Glycine max
  Clone ID: 700958972H1
gctggtgaatttcaactttttcaagtcctagttcagagattcatagagaatgagccatttcaaggccctaggctacagaactatgtcaagaaccgttgtgtgattcgcaacttgctccaagttccaggcattaaagatgatagtaaaggggatgaagaagaggatgctattgcaagtggaaagttggcagatatcatcaaggaatcaatgagggtgttctgggaatttgttcgagcaga

SEQ ID NO: 82250 - DNA, 239 bp, Glycine max
  Clone ID: 700958974H1
ctcacttgccttatttttggttttgagattgagctaaaggccaactcaaccatcgaatttgttggtgattgaaagagaaggaagaagaagcaggaaatggaagcagtgagagctggtcgagaaggagcaataggtctaggtcaaggtgatggcgtagctaaggacagcactgagactgaactcaccaaaatccgtctcctcagggcaattgttgaaacccgtgatccctcttccaagga

SEQ ID NO: 82251 - DNA, 238 bp, Glycine max
  Clone ID: 700958975H1
caaaaacctgattgaggtttttgccaagggtgttgagaaggactatgttatccttcttgctgcaagggcttctaggactgagcatcaggatgctatagatgctgcaattgttggtatgcttgctgatccaaaggaggcacgagctggtatcagggaggtccactttcttccattcattcctgtggagaagaggactgctctaacttacattgattctgatggaaattggcatcgatct

SEQ ID NO: 82252 - DNA, 241 bp, Glycine max
  Clone ID: 700958978H1
attagcaaagaaactccaactccactagtgaagtacagaaaagaagaattggaaaatctaagaggagatggaaaaggagagcgcaaggaatatgataggatctatgattatgatgtctataatgatttgggtaacccagacaagagcaatgatctagctcgtcctgttcttggagggccaagtgctaatccatatcctcgcaggggaagaactggtagaaaaccaccaccaaaagactcta

SEQ ID NO: 82253 - DNA, 245 bp, Glycine max
  Clone ID: 700958979H1
tctcattccatatttgaggaaaataaatgcaactaccacaaagacttacgcttaaagaaccatatttttcttgaaaagtgatggaaccttgacgccattggccattgagttaagtaagccgcatcctcagggtgaaggatatggtcctgttagcgaagtctacgtgccttcgagcgagggagttgaagcttacatttggttactggcaaaggcttatgttgttgtgaatgattcgtgctaccatc

SEQ ID NO: 82254 - DNA, 240 bp, Glycine max
  Clone ID: 700958981H1
aaaaccctctctccccaaaaacccaaacccttggcggctgcgagacccgttgtgttctctcttctctctctcttctttttttttctctttccctctcttcttcgctccttttagggttttctcaactcttcgatttggggcttaaaccctctccgattcagattcggatttagggcttccctttctctattccgcctccaaagaaaaatagatctcgtggttggttcgtcatggccaccg

SEQ ID NO: 82255 - DNA, 237 bp, Glycine max
  Clone ID: 700958984H1
cagctgtagttttctaccctgcacctctcataggtcacttagtctccaccatagaactatgccagttcatcctcactcaccaaccatccctctctattcacatcctcataaccatagcaccctacgacacatcctccacttcccactacatccccaccctctccaccaccctcccttccattactttccacaccctccccaccttcgacccccccacaaacccttctctcttcctca

SEQ ID NO: 82256 - DNA, 234 bp, Glycine max
  Clone ID: 700958987H1
ctcttggcatcttgtgttgtgtccctcttttaagctatttccttctcttaacacaattggttgtgccaattgccatagtcaccaaccaattaacaaaggtatatatatcatcatatcatcaccaaatgaaaaatattgggttgttttttcttgtggtggtggctacttttgtggtggcagccacagctggtagcttttaccaagactttgaaataacgtggggtggtgagcgtg

SEQ ID NO: 82257 - DNA, 239 bp, Glycine max
  Clone ID: 700958988H1
aacgaggagaacaacaaccactctcccccttctttccaaaacactccctttccctttctattcacttcccctacccttccgtgatgatgtagatagagaataaaaagagaccagtgtgcagtgagaaagagattgctcacttcttgtgtgggtttgttttgttctttgtgttggaatttgttcatgggtgaagaaggagaagaggtgtcaagagagaaggaacaatacatgggagttta

SEQ ID NO: 82258 - DNA, 235 bp, Glycine max
  Clone ID: 700958990H1
gtaatgctggggagcaattgacctcagagcaagtggaatctggtcatcctcctgatactgctggaccttacagagttcttcttaagcatcatgaatcagatgggaaaaatgaaccaacaaattgggagaattcagagacaaccaatgcaacacatgttgatggcaggggtcaaccaagaatgactgtttgggagaatgagcagagatcaaattacagaaagaatgaggaaaggga

SEQ ID NO: 82259 - DNA, 237 bp, Glycine max
  Clone ID: 700958991H1
gtgctgggattatttgaagataatagatacaaatcagaagcaaagaaatcaacactaaggtccattgactttattggtcttgggacaggacctgaactggagaagaaactgaagtacgcaggagatgtttcttccggaattatctttggaagggagcttgtaaattctcctgctaatgtgctcacaccaggggtgttggcagaagaggcagctaagattgcttccacctacagtgat

SEQ ID NO: 82260 - DNA, 243 bp, Glycine max
  unsure (1)..(243): unsure at all n locations
  Clone ID: 700958994H1
aagcattgcattctgctattcaattccactacgtacacaaaacaaaaactcaaagacaacaatggcaccaacagccaagactctgactcanctggcccaggagaaaaccctagaatcgagcttcgttcgggacgaggaggagcgtcccaaggttgcctacaacgaattcagcgacgagatcccagtgatttctcttgccggaatcgacgaggtggatggacgcagaagagagatttgtgagaa

SEQ ID NO: 82261 - DNA, 245 bp, Glycine max
  Clone ID: 700958996H1
ggccaacggctttcaagcttttcacaggttcggcatggatggcactgtcaaaatctttcattgattactgcatatggggatgggacaacctacctcgaaccgtactcatgtactattcaaatttcatatcttcccctgaaggatacttccacacagttatttgcaatgcacaagagttcaggaacacaactgtgaacagtgatttacatttcatttcttgggacaatcctcccaagcagcatcct

SEQ ID NO: 82262 - DNA, 268 bp, Glycine max
  Clone ID: 700959001H1
atcatattaagccatggccacctccaacttctcaattgttctctctctctccctagccttctttctagtgctactcaccaaggcaaactcaaccaacaccgtttctttcaccgtcagcaagttttccccacgccaacaaaaccttatcttccaaggagatgctgctatctcaccctccggggtgttacgactcaccaaggttgacagcaacgacgtgccaacgacgggatccctaggacgtgccctttatgctgccccaatccagatt

SEQ ID NO: 82263 - DNA, 267 bp, Glycine max
  Clone ID: 700959002H1
ctctcttgttcctttccctattcaagcattcccatgctgcaggaatcgctatctactggggccaaaacggtggagaaggcaccttagcagaagcttgcaacactagaaactaccaatatgtgaacatagccttcttgtccacttttggcaacggccaaactccacaactcaaccttgcaggtcattgtgaccccaacaacaatggctgcactgggttgagcagtgacatcaaaacttgccaagaccttggcatcaaagtgttgctct

SEQ ID NO: 82264 - DNA, 263 bp, Glycine max
  Clone ID: 700959003H1
agctcaactacattgagtccaaggggaggatgaagaagggtgatagggtgtggcagatagcgtttgggagtggctttaaatgcaacagtgctgtgtggaagtgcaacagaagcattaagacaccggttgatgggccttgggctgattgcattgatcgttacccggtcgatattcctgagatcgttaagctctaggatggagaattgttcaagaacaagaagataattgcttattttatgaaaaaaaaaaatagatgagttctc

SEQ ID NO: 82265 - DNA, 262 bp, Glycine max
  Clone ID: 700959004H1
tggtgagagaaacaggctttgatatttcagttgctagtgagattatggctgttttggcactgacaacatccttagctgatatgcgagagaggcttgggaaaatggttattgggaatagcaagagtggtgaccctgtaactgctgatgatctaggtgttggaggtgctttaacagttttaatgaaggatgccattcaccctacccttatgcagactctggaaggaactcctgttcttgttcatgcaggtccatttgcaaatat

SEQ ID NO: 82266 - DNA, 261 bp, Glycine max
  Clone ID: 700959006H1
agcttttcaattattcctcgaattattttgaaggaatcatccaaactgcttgaaatattcatcatcaacaacctcacgctgttatagatattctctctctctctctccctctctctctctctcacacacacacacacacagatccagacatggccgaagaacaccgatgccaagctcccgaaggtcacagactctgctccaacaactgcggtttctttggtagccccgccaccatgaatctctgttccaaatgctacagag

SEQ ID NO: 82267 - DNA, 263 bp, Glycine max
  Clone ID: 700959009H1
gaaaactgtacacaagagggattccaaaaccaagtgctgagaaaagggtgtcaaaatcttggcctcaaagttgactatgtgccaagaaactcctcagggaatcactactgtggctcatgtggttatggctgtccgaaaggagagaaacaagggactcaagctacatggcttgtagatgcagttgaaagagatgcagtaataataacaggatgcaaagctgagaggttcttgttggaaagcaacaggagtggaaatggcagaaa

SEQ ID NO: 82268 - DNA, 261 bp, Glycine max
  Clone ID: 700959010H1
gcttcatggatatacagtaagagcattatacagagcatttcaaacgtcagctgaacaggagactctagttcgagttacagtgtggtgcattggggagtatggtgacatgttagtcaatatggtgggattgctagacatagaagatccaataacagtgactgagtccgatgcagttgatgtcatagagattgctatgaaacgccatgcatcagatcttaccacaaaagcgatggctttggttgcactattaaagctctcttc

SEQ ID NO: 82269 - DNA, 264 bp, Glycine max
  unsure (1)..(264): unsure at all n locations
  Clone ID: 700959011H1
ctcgcacattaagttatataacacatatttgcttgcttagaaatactattattgaagatatggggagtgtagattatgagtaccctttgggcatgaacaactttgagagagtgcaccaagtcgaggttccaccgccacagccgtacttcaagtctctaaagtactctttgaaggagactttcttccctgatgaccctttgaggcagttcaagaacaagccagcttccaagaagttctgnttttggccttcagttcttcttcccc

SEQ ID NO: 82270 - DNA, 258 bp, Glycine max
  Clone ID: 700959012H1
gtgtcatcatgttatgtgtaaaaatgtcttcttcttcttcttctcctgctgttctctcaaaatgcaccgttttccctcaccggaactccactctgggggacctcaagctctctatctccgaccttaacatgtttttatctcactacatccaaaaaggctgtctcttcaccactccttcacttccctctcactctcacactctcatccctcacctcaaaaacgcgttttcccaaaccctctctctcttccctcccctcg

SEQ ID NO: 82271 - DNA, 269 bp, Glycine max
  Clone ID: 700959014H1
aatcaccggaattgccgtaaatgccgcctatgacaacacgctgcgaatcgacaaatcaaatgcctccgtggaccactcaggtcctctttcccatttccactcttcaattcaatcaatatctcacacacacacactctctctctcatacacacacaaagttccctctccaaacatggcggcaattttctcttcttcgctcttcgtttcttcgcctcttcccaaaccactttcttcctcctattcccgaatccataaagctccacaacttt

SEQ ID NO: 82272 - DNA, 269 bp, Glycine max
  Clone ID: 700959015H1
atcactttcttccccatcgtatgtgtgtccctgtcagagtatgatatgagaaactctataaattaactattttttctcccactttctgaatcaaacacaacacacacacgtaacttcatctgggtttcaggaaaaaagaaaaaggaaaacaatgggttccgataatcaccagaacttggagttcttgaaggagatcggtttgggctcttccaacattggctcttacattaatggccagtggaaagccactggttcttctgtcacttctg

SEQ ID NO: 82273 - DNA, 267 bp, Glycine max
  Clone ID: 700959016H1
tattcaacgagaacgatgcagttagtactaggaaagctccatatgaggattcttctggcatattttgggataatgacagtttatcagctttattggcattggaattaaaagctgatcttcttattttgttgagtgatgtagagggtctctatagtggccctccaagtgatccacgttcaaaacttattcatacatacattaagtccaagcatcaaagtgaaattacttttggagacaagtctagagtgggaagaggtggaatgactg

SEQ ID NO: 82274 - DNA, 264 bp, Glycine max
  Clone ID: 700959017H1
ctttaaacagcttgaagcttctaattgattattgcttctactaattttttttttagcaatgtgtagtgttttatgaagtctctttcagttatcgatatagattcataggtccatgcaggactaagtgaaaaagagaagataagtatctgtagtacactgaaccacgagaagctgtcagctgaacttttgaggcatcttactcgaagcttggtgtttccttcagacgcaaaaccaagagcttatgttactagacaaagccgaatg

SEQ ID NO: 82275 - DNA, 260 bp, Glycine max
  Clone ID: 700959019H1
cagctcttccagttgatgagttgattgagaaggctgatggatttgcaggagtatttcctgaacacaaatatgaaattgttaagaggctgcaagagaggaagcatatatgtggaatgacgggagatggtgtaaacgatgcccctgcattaaagaaagcagatattggaattgctgttgccgatgctacagatgctgctagaagcgcttctgatattgtcctcactgaacctggtctgagtgtcattattagtgcagtgctc

SEQ ID NO: 82276 - DNA, 255 bp, Glycine max
  Clone ID: 700959020H1
tccagatctggcagactagtatccgatcctctgtcctctcgaagctttcatcgttcaacatattctcaccatctcagtcatcggcctgctatcttgttttaggtctaccgtcctgtgaaaatgttccaaaggaagctctggcatgtcaagattcctgtatacgaacaatcttcaacgaaacttgatttcgtctggtggcaatgaatcgtattatgggtattttaacaggagatcatacacttcactttatatggg

SEQ ID NO: 82277 - DNA, 258 bp, Glycine max
  Clone ID: 700959022H1
ctcaatcaatcagttttagatacttgatacagcgctccgcatcttcagcagattccattgtaacaaaagcaaaaccacgagaaatctgctgaagatgcggagcgctgtatcaagtatctcaatcaatcagttttagagggtcgttacatcactgttgagcggtcacgaagaaaacgtgcaagaactccaaccccagggcaccatcttggactgaaaaacacaagggagtatggctatcgtggtgaccgaggtggtgac

SEQ ID NO: 82278 - DNA, 257 bp, Glycine max
  Clone ID: 700959023H1
ccatcttcttctcttttcacgtcattatcctaaacttgcagattttcacatcccaagcaacatgaaggggcggttcatgtttctgtcggtgctcctttgtgccacctttcatgtctccttctccattactgacggcttagtagcaaacggcaacttcgagctgggtccgaagccctccgccctgaaaggaactgtggtgattggtggcagccactcgatcccagaatgggagatctctggcttcgtggagtacataa

SEQ ID NO: 82279 - DNA, 260 bp, Glycine max
  Clone ID: 700959024H1
atgctttctcggagaaagctttttttctttctttgttgacttcacctagcaagcctcgaatccaaatcctttctactttctgctcttacgctatttcgtctttctatagaatacgaagagaggaccttctttcgggctgtctacgaacccttcttctcgtatgcaattttctattctttcttttaaccaaaagagaaagggaaaacactggccaatttcacactttctgaatgtgccatttgaccgaatgtgaaagcgaa

SEQ ID NO: 82280 - DNA, 232 bp, Glycine max
  Clone ID: 700959025H1
aattaactttctctctctctctctacaaaacttagctctgtttttaattattccttgcattctcttgtattaagatggaagcaactaccatcaccaatgggagccaaaacggttcgttttgcttgtccaattactaagggaagtagtgatccgttaaactggggagcggcggcagaggcgatgaaggggagccacctggacgaggtgaagcgcatggtggccgagtaccgca

SEQ ID NO: 82281 - DNA, 258 bp, Glycine max
  Clone ID: 700959026H1
gtgagctcaagagacaacttgaggattttaatgaatcttcttagagagtcaagcaagagcatacagattgaagcatttcatgttttcaagctatttgctgccaaccaacataagccagctgatatcgtcagtatatttgttggaacaacagtaagatgctgagactattggaagacttcaaaattgataaagaggatgaacaatttgaagccgacaaagctcaagtgatgagggaaattgaagctctttaaacaaggg

SEQ ID NO: 82282 - DNA, 262 bp, Glycine max
  Clone ID: 700959027H1
gagttcttcaaggatgcactgaataaagttctgccatatatggactacgtttttggtaatgagactgaagcaagaacattttctaaagctcaaggctgggagactgataatgttgaggaaatagctttgaagatttctcagttgccaaaggcatcggaaacacataaaaggattacggttatcacccaaggtgcagatcctgtttgcgttgccgaggatggaaaagtgaaaatttaccccgtgataccgttacctaaagaga

SEQ ID NO: 82283 - DNA, 258 bp, Glycine max
  Clone ID: 700959028H1
cttcctcttcccctctcattgctcctctgattcattcacccagttttttttttctgtcctctttacctctcagaggagcctctgagtctgctcaggtgttccttgtgaagagatccttttgtttttgaggtgtgaagggaaagataaaaaaaaaagatgaatcagtgtggttatctgcagaagaatgctttaacaatctgtgaggagatgaggatggaatcagtggtgtgccctaaaccacgaagattgggcctgttg

SEQ ID NO: 82284 - DNA, 268 bp, Glycine max
  unsure (1)..(268): unsure at all n locations
  Clone ID: 700959030H1
tcaaattggtctcttgtcttcctcctcatctctacactactccacatacagnccagcctctcaagcccaagcccaagcccaagcccaagcccgttcataaaatcctcctgcagcagcacccagtacccagccctctgcgtctcatccctctccgtctacgcctccagcatccaacaggaccctcaccaactggttcagacagcactctccctctccctgaaccgcacccaagccaccaaaaccttcgtggctaactgcaacaaattca

SEQ ID NO: 82285 - DNA, 267 bp, Glycine max
  Clone ID: 700959031H1
ctcgagccgcttggaggttcgtagagaacaagttgagttcttagttccaattatagaacaacgaagaagagcaatccaaaacccgggttcagatcacaccgccacaacgttttcctacctagacacactttttgatctcaaagttgaagggaagaaatcagcaccttctgatgcagaattggtttcactgtgctcagagtttctcaacggtggcacagacacaacagcaacagcggttgagtggggcatagcacagctcatagcaaa

SEQ ID NO: 82286 - DNA, 265 bp, Glycine max
  Clone ID: 700959032H1
ctttgccattatctcttcccttgtccttcttcctactatactatattttctctctctaatcaatcatagttctgattttcatacacttaccctgaaacctccattctcagatcaagcttgcaccaaaatacatacatagctatggacaataatactagtgcctgtgcctacccccaacttgagtcagaagaagcatcttcagagcccaatcagaaactccaacattcaaggacaaggaaatgggttgagaaaacagttgtggcag

SEQ ID NO: 82287 - DNA, 260 bp, Glycine max
  Clone ID: 700959033H1
agaaaagcatggcatgttggtccaatgtttcttttcaacagggttaaagaagaaaaagcacatagaggaatggatgcatctattaatgatgagcatgagtgcttaaagtggcttgacacgaaggaaccgaattcagttgtttatgtgtgctttggaactacaacaaagttaactgattctcaacttgaggatattgccattggtctagaggcttcagggcaacaattcatctgggtcgtgaggaaaagcgaaaaagatgg

SEQ ID NO: 82288 - DNA, 260 bp, Glycine max
  Clone ID: 700959034H1
gagagagagagagagagaggagagagtattggcgcttcatcaagatgggtatttctagggattccatgcacaagaggcgtgccactggtggcaagaaaaaggcttggagaaagaagagaaagtatgagcttgggcgtcaggcagcaaacaccaagttatcaagcaacaagacaatcaggaggattcgtgttagaggtggcaatgttaaatggagggcattgaggctggatactggcaattactcatggggtagtgaagca

SEQ ID NO: 82289 - DNA, 257 bp, Glycine max
  Clone ID: 700959037H1
tctttttccaaactctataaatttttagttccacaataccaaaccaagctggcagcagcctcggcctcatccaccatgatatcaacaccagccttatctccaagcacaagcatccaaaagcaccatcatttgatgccatccatcgtgtgctttcaaggccttagacccctcactaggttcacaaccaaagtgatcagctcctcccatgagggttattccaaatggtggtgtcggtgttagagctgtactcatctccg

SEQ ID NO: 82290 - DNA, 257 bp, Glycine max
  Clone ID: 700959038H1
tgaagcgtgcgatatatgggtcctaattgccaaaattgtgaatggagggaatacgacaacatattcggagccgacaaataagtatgcaactcaacacatccttccacacggagaattcatcttcggtaggaagggcgtagatcattcagctatgagttcatcccagtagaaggccaaaggggcgagaaaccctactttttcccattcttatacgaaacgtcagacatagatgagaacaatctctacccttttgtgca

SEQ ID NO: 82291 - DNA, 254 bp, Glycine max
  Clone ID: 700959039H1
tgaaacttgcttttgttcccgattttctcaaattgctttcggttttcgttctgattctgcaaaatcatggagatggagcgcatcgttgaattccctcacacctacatggatcgacccccaagaaagagagcgcgtttgggctgggacatcgctgaggcccccaaggctcaggtaggattgttttgtggacaagaggttgagaatatttcaagctatgctccttcagaacatccccctagttctctgtttaaggg

SEQ ID NO: 82292 - DNA, 151 bp, Glycine max
  Clone ID: 700959042H1
ttcctttgtgtgatttcatttgactgaattgcattaacatttcccctcttgttctttttcttctggtcattgttgatatggcattggccattgccacccatgaaatgtgaatcattcaatcccaggatttagcattagcactagtgattgc

SEQ ID NO: 82293 - DNA, 260 bp, Glycine max
  Clone ID: 700959045H1
ccatagtaataatgatgttaatagtgaattatcattttgtacatcaaagcaatctgcaatggcctctgcaaaaaatcatgaagcttctattcacaatgtgcatactattaattcagaaggctatttgatggatcagctctctcttgtcagagaggacaaacaccattctttgagttcatcatcagggatatgtggtatgatgtcctcaaaaggtgtctcatctacatttcatagttcaaatagtggacagcttgaaaggt

SEQ ID NO: 82294 - DNA, 265 bp, Glycine max
  Clone ID: 700959047H1
gagactgagacagtgatatggcgtatctgagattctcacacgcagcaccacagccacacctcacactaggctttccttcaccacctcaatttctctctattgctgctccaaaattctctccctcgtcttctaccatcaggtgcaaaggttttagtagattgatagtgaatcagaggtggtgacctgtttttgcaacaaatcccaactctgtaggtgaaaaatcacccacagaaggatcagatgtaaatgaaactagcaatgctgc

SEQ ID NO: 82295 - DNA, 263 bp, Glycine max
  Clone ID: 700959048H1
tgaagggcaaaatcccaaatggaatgagaaaaaatttctataattagagtctcactctcatactcgttgtatgtatggctacgctctctctcactctcaactgttggagtaccgtggaacttgctcacaccagattttcttctaccttcacctccctcggtcgcaggagtagatatagcatatgttcttttgccaagaagtcattgaagaaatccagaagagatgtaacagaggcagctggagatctcttagatgataagttt

SEQ ID NO: 82296 - DNA, 257 bp, Glycine max
  Clone ID: 700959051H1
ggctgataagattgcactaaagttagttggaccaggtggatttgtagttactgaagctggttttggtgctgatattggagctgaaaagtttatgaacattaagtgtcgttatagtggtttgacacctcaatgtgcgattattgtggcaactatcagagcactaaaaatgcatggtggagggcctgcagttgttgctggaagacctcttgaccatgcatatttgactgacaatgttgccctggttgaggctggttgtg

SEQ ID NO: 82297 - DNA, 101 bp, Glycine max
  Clone ID: 700959052H1
gactatggaaaattactatgattctggctggcacatgggcaccagcaactgggctcaatgcagtgatcattcttcttcttcttcctttgcagtgcccacac

SEQ ID NO: 82298 - DNA, 147 bp, Glycine max
  Clone ID: 700959053H1
ggacattcctatgaatccagtggttggtcttattgtttgccctgctgtccacagggatttgggcccgctctgaacttcaatgctgaggtaaaccctcctgctgaccatgtaaaaacttttggggacaaaattggtccctatggtgaa

SEQ ID NO: 82299 - DNA, 254 bp, Glycine max
  Clone ID: 700959055H1
cttatctcacccttctttgactgttctcccacaccacatgcatgacactcctcctgctccttattctcctcttacacgcggcggaagctaagggccagtggcaggtcctctacaaaatcatctgtactgtcgccatgtacatactgcttctccacaacgaccgcgtcatcatcttctaccgctccgacttcggactctccaacctaacgctccacgcagaaatatgccgtaacgaggcatacgagttgctcgtc

SEQ ID NO: 82300 - DNA, 207 bp, Glycine max
  Clone ID: 700959057H1
ggtggctttgcggatattgaaacgagttacacgtgtgtcatgaagtttggcggctcctctgttgccaatgcagaaaggatgagagaggttgccaaccttattctgagcttcccggaagagaggcctataattgttctctctgccatgggaaagacaactaacatgctgttgctggctggagaaaaagctgtaagctgtggaataact

SEQ ID NO: 82301 - DNA, 261 bp, Glycine max
  Clone ID: 700959061H1
gtgaagttggggtcagaggtgtctaaacagatggagtgaagaaagacaatccagacagagaggatgagtctgtccgagctgaatagcagcgtagaagactaccctggctccgactaccgtccccaagacagaaaaaactggatgtcccatctcgaccctacagaaactccgcatcaaccaaatcggctggcccggcatccacgactccgcaaccaacaaaattggcatccctctcctcactcgccccttcgcgcagtgcca

SEQ ID NO: 82302 - DNA, 262 bp, Glycine max
  Clone ID: 700959062H1
accagttcggcattggttaggtcgatttcgtttttccggtttggatatggattcggaggatttccgatccattctggagagcgcgggcgtggacgtttgggccctcatggacgcggccatcgcggtggcctccgccgaccacgctcacgagttgacgcgccggagagatggaatcgttgagcgcctttacgcggccagttcaccgccgccgctgtgtcggaactgcgacgccggcgacgggggagaaatcaggacgcagagc

SEQ ID NO: 82303 - DNA, 263 bp, Glycine max
  Clone ID: 700959064H1
ctcagtgaaagagaatccgaggcgaagagaagagaaaaattaagatggaggggaaggagcaggatgtgtcgctgggagcgaacaagttcccggagagacagccgattgggacggcggcgcagagccaagacgacggcaaggactaccaggagccggcgccggcgccactggttgacccgacggagtttacgtcatggtccttttacagagcagggatagcagtttgtgggccacttttcctgtttctatacatcactgtctta

SEQ ID NO: 82304 - DNA, 252 bp, Glycine max
  Clone ID: 700958334H1
atccccttcttcaacccctctctctctctccaaaacgccaaaccaaaaaatggctcagaaggccgagaaaaacgacaccgactttaaggtccccgaaaccatcatcaccccctgcaccaccaccaccgccacctcgattaccgaaccttctagattcttcgacgcaaccacccccgccacgtcatcgcgctcccccaagcgatccctccccctcgacgacgaatctcagacggaccaaacggcgtcgtcgga

SEQ ID NO: 82305 - DNA, 246 bp, Glycine max
  Clone ID: 700958336H1
aataatttgtgacattgtacacaaactatatccatggcctctgcagcttccatttcctcatcacaaccagaagccgcaaaggttcatgcatctgatatttctagcatcaaagcctttgcagaatcaaagtgagcctctctgatcccttacacctaccactccatcacagagcgccatgatgatgatgtagcagatgagcttgctgcttccgtcccagtcatcgacttgtctctcctcacttcgcat

SEQ ID NO: 82306 - DNA, 242 bp, Glycine max
  Clone ID: 700958339H1
ggaaaccgttcaaaagagataccttacaatcgttttacaatgcagcataagaacaactaacagtagcacgctactctctttttctctcgtgtgtgtaatcctgcaagtaaatggcaagagcagcttgcaatcaccttcacttggttcccagtttagttcatcctctaaagtcaaccctcttcataaatcacactctttccaccacacgcactcgtcctgatggcattcaccgaaggttctct

SEQ ID NO: 82307 - DNA, 117 bp, Glycine max
  Clone ID: 700958340H1
gtaagggtccaagagtgcctcttcctccctatgcttatttagtacatgctttagctgaataagcgtagggaggaacaggcactcgtggacccttacgttgagcggttttcaacgcat

SEQ ID NO: 82308 - DNA, 240 bp, Glycine max
  Clone ID: 700958341H1
tgatggcgaagtttggcgagggcgacaagcggtggatcgtggcggacgtcccgacggcactaacgtgcacaactggcactgggcggagaccaactgcctcgagtggtccagaaccttcttcaagaacaatttcagtaacgtcgccgtcggtggcggcgacggcgatgccaccatcacgatcaagaaggtggagaagctcgatggcgaggcctacgtgaacgtccgcaaggggaaggtgat

SEQ ID NO: 82309 - DNA, 240 bp, Glycine max
  Clone ID: 700958342H1
tttttctaaagaaccctccgaaattcagcgtcgtccgtcatcatatcataatcatcaccaaaccaaaccaatcttttaattcaaagctcgcatttccggagacgccgtcgattcggcaacgccggcggcgcctcctacaccactacccatggccgccgcagttaaagcgaagtcctcgacggcgacgacgctctcgctcgccgtgagcgtcgttgttctggccatcgcctacatttacgt

SEQ ID NO: 82310 - DNA, 242 bp, Glycine max
  Clone ID: 700958346H1
cagacttaacaacagcacaaagcgggttactgtctgttcaagctaccatctctctctctctttcttagtgcctccttgccagaagttaaaatggcccaagaaactttcctattcacatctgaatcagtgaacgaggggcaccctgacaagctctgtgaccagatctccgatgctgtgctcgatgcatgcttggagcaggaccctgacatcaaggttgcctgtgagacctgcaccaagaccaa

SEQ ID NO: 82311 - DNA, 255 bp, Glycine max
  Clone ID: 700958348H1
attagagatccactcagccacttggaccgatccgccgtacgataccgcgacaggacttctcttgtctccggtgacgttacctacacgtggacccagacacaccaacgctgcatcaaacttgcttcttccatttctcaacttggtgtcggtctttctcccctcgatgtcgttgctgtattggcccctaatgttccagctatgtatgagctgcattttgctgttcccatgtcaggggctgttctctgcacgctaaat

SEQ ID NO: 82312 - DNA, 250 bp, Glycine max
  Clone ID: 700958349H1
cacagctaagcttttggaacttagagttaagcagttaccttcctccaactataatatctcatccaatcaaaacccttttctcaattgtctctctctctgactcactccacaataagtgtcgattttttcctaaataagtgaaagtgtagttacacctttttttgtgtgtttaccacttttgagtgccacagagttctgagtttcataggagaaaaaaaatgacagaagaacaaaccaaaacggttgagtc

SEQ ID NO: 82313 - DNA, 67 bp, Glycine max
  Clone ID: 700958350H1
caatggccatggttgagctctggtggattacgtgctttctctaactactgttttccacacaacatac

SEQ ID NO: 82314 - DNA, 242 bp, Glycine max
  Clone ID: 700958352H1
cccaccttcctctccttctttctttctgcttaaggtctacacaagttctctgcggcttctccccctattgacctttggtcatcacatgcgaaaacccacttctggatcttctggtgtaaaggccattagaagctttagaaattttctaattgagttggtgtatagtgttgaagggggtgaaatctggagcccagtttgttagttgttactcacttcatctgtaagctcataggttgaaccct

SEQ ID NO: 82315 - DNA, 243 bp, Glycine max
  Clone ID: 700958353H1
aaaccacaaacacttaatttctcatctcatcatttctaattctacctcttttctcttgcactaacaatccaagatgaataccaacaacgacaccgaaaaaaaccaatcatttccagaagcacaaggagcatcatcatcatcatcttctccacccaatgttgggactgagaattggggaactcacataatgggcacccctgctgttccaagcagccacccagataacaaaaaagcagctttaca

SEQ ID NO: 82316 - DNA, 242 bp, Glycine max
  Clone ID: 700958354H1
tcttatttccagagacgaggaaaacaaaaaccgatgactgaaccctaaggggaaaattgccgatgcggcaccgtcaataccatttcccaattctagcactgttggctggggcaaattcctcacccaaaacgacatcatgtttggggggccattttgatttgaggtgcgttgagacagaaaacattaggccaccatagttctcttctctctcgcaatttccatctggtctcaatttttctcgt

SEQ ID NO: 82317 - DNA, 241 bp, Glycine max
  Clone ID: 700958355H1
aaaccacaaaacacaactcgtcacatcacatcacatcacatctattttcattacttcatcattttcactgcaattttcacaccacacacacacgacaatcatggaagttgatagtaggtttctgatcactggcctcctccttgtggccacaatccttgtggtcaagctcatctcagccttcatagtgcccaaatccagaaagagggtacccccaattgtgaaggggtggcccttaattgga

SEQ ID NO: 82318 - DNA, 240 bp, Glycine max
  Clone ID: 700958356H1
tttatattctccggtggcggtaacgcgattgctaaccagcaaacacagtccatcaaaatgatcctaggtgaccggaacttgctggagttgactggtgaagatcacagccgagtcagaggtgcacttgtcccattcttgaagccagaatccttgaagagatatgtgggaaaaatggatgaagaagttaggaagcaccttgagatgcattggcaggggaaacagcagatcaaggtattgccc

SEQ ID NO: 82319 - DNA, 131 bp, Glycine max
  Clone ID: 700958358H1
cccgtcttggtgttttggaactaagtttaaaccatttgaatggaccaattcctctgttcaaggtcactaaatttgcctcattatactatttggacctttccaacaatgaattgagtgggaagctttcatag

SEQ ID NO: 82320 - DNA, 237 bp, Glycine max
  Clone ID: 700958359H1
aaacgacattcattcatctatggctaaccatattgctccgagcaaccactctccccaagaagacgctgaggctctcagaaaggctttcgtcggatgggggactgatgacaaaactgtcatagtaatattgcgccacgcaactgtttatcagaggcagcaaatcagaagagtctatgacgaaattttccaggaggatcttgtgaaacgcctagagtctgagatcaaaggagactttga

SEQ ID NO: 82321 - DNA, 238 bp, Glycine max
  Clone ID: 700958361H1
gcgagtgtgcccaacttctgcgaaatcagttttctacaatgggaaggaaaaagacagacgatgctggcccatctgcgaaggtaaaggctggtagcaaagatcctcctaagaaggaaaaaatttctgtgtctgccatgctggccagtatggatgaaaagcctgataaacctaaaaaggtcccttcttcctccagtaagccgaagcggaaatctgctccaaaagcttccacatacaccga

SEQ ID NO: 82322 - DNA, 243 bp, Glycine max
  Clone ID: 700958362H1
atccagttgggcctgcaatggttcacccatctgagaccgcttcaaaagggccaagttggaaagctcttcttgaaccaggggttaagcatgcattgattgttggagttggaatacaaatacttcagcagttttcagggataaatggggttctatattacacacctcaaatccttgaagaggctggtgttgaagttcttctttcagatataggcattggctcagagtctgcatcattccttatca

SEQ ID NO: 82323 - DNA, 245 bp, Glycine max
  Clone ID: 700958363H1
aaaaaatgggttcctctttgtggacttgtctgattttgttatcacttgcttctgcttccttcgccgccaacccaagaacaccaattgatgtgccatttggcagaaactatgtgcctacttgggcctttgatcacatcaaatacctcaatggtggttctgagattcagcttcatcttgataagtacactggtactggcttccaatccaaaggatcctacctgtttggtcacttcagcatgtacata

SEQ ID NO: 82324 - DNA, 255 bp, Glycine max
  Clone ID: 700958364H1
cggatcaacttttgaagatgaaccatctcaaaatggaagttcagtacatgctcctcaaaatggggtacataatagacctcagacagttgttaatcaaactatgtctatcttacctatatctaccacaagtgctcctggagcagttcctggtcccacaactaatttaaatataggaatggattattggggcacaccaacttcgtccaccattcctgcattgcatggaaaggttccttctactgcagttgctggagg

SEQ ID NO: 82325 - DNA, 249 bp, Glycine max
  Clone ID: 700958365H1
ccccaccctatctgtgccttttcctatgtgtgtgaatttaaatgataactgaagaaaactaaggaaggaaggaagagtgagcgtgaaagatgccttgggtgaggctttcagagtctccaaggctcgacgttgctattgacatgggtaatccatttctcaatctcactgttgatggtttccttaagatcggagctgtcgcagccacgcgatcagctgctgaagatacttatcatattatccaaaagggta

SEQ ID NO: 82326 - DNA, 242 bp, Glycine max
  unsure (1)..(242): unsure at all n locations
  Clone ID: 700958367H1
aaacgacattcattcatctatggctacccttattgctcccagcaaccactctccccaagaagaccgtgagngtctcagaaaggcttttgaaggatgggggactgatgagaaaactgtcatagtaatattgggtcatagaactgtttatcagaggcagcaaatcagaagagtctatgaggaaattttccaggaggatcttgtgaaacgcctagagtctgagatcaaaggagactttgagaaag

SEQ ID NO: 82327 - DNA, 239 bp, Glycine max
  Clone ID: 700958369H1
gaatgcttgatgaattgacggatatataaatgatacctcattaatcgagactggtatatgtaatgtcattgactcattgtggttcttgtctacgtcaacactatgttacgaatggcagtgaatgagcacggtactatcgatatgtatgaatgaataatatatgtctggatgaagattcgttgaaagcaagcataaatattgctttcaaacgtataaacctaagaaaatgtactacttga

SEQ ID NO: 82328 - DNA, 238 bp, Glycine max
  Clone ID: 700958370H1
gtgtcgttcaccgataagatgtcgtattcaaggagatcaaggtattctcgttctccttctccatacaagcgatacagtaggtctgtgtccaggtctctctcaaggacaagctccagaagccgttcaaggagtttatcaagagatgcagaaaatccaggaaacaatttgtatgtgacaggattgtctcctaggatcaccaagagagaactggagaaacatttttctgctgagggaaaag

SEQ ID NO: 82329 - DNA, 238 bp, Glycine max
  Clone ID: 700958371H1
cgctcattgttctaccgattgaaagcacgtcgaataagcgcttttaggatttaaaggggaaaacttgaagtgcctctggataagtggtggagtttgtttgtttgattgattttgcaaatcagttgaatggtaggatccccaatcacccaacaagatcaggtgtgattgaaggaaaaaggggcataggggaagttgaagtgaaaaatgctgagtgatagagatgggaaagaggacatgg

SEQ ID NO: 82330 - DNA, 236 bp, Glycine max
  Clone ID: 700958374H1
caccttcagacccgaaccctaaccctagatcagagatatgaacccacaacacacgatcgagtactaccaactagggtatttgtcatggctagtttgcaaactagggttttcttgatggcccttctgtgcctgctggctcttggtgcaaccattattccaatggcacaaggggaagtgtcatgtggccaagttgtgagtaacctgaccccatgcatctcctatgtgctatatggtgg

SEQ ID NO: 82331 - DNA, 235 bp, Glycine max
  Clone ID: 700958375H1
ttacgttcttagttctccacgccaaatataacagaagtgctgattggccatatagctattggcatattcaattacctttttaaaagcaaagtccaatggccaaatagactagtgttgtttatcaatataccagcaaatcacaagttcggggtgagaattttgatcataagaaccttgtaataacaacagcagctgataatggaaagaaggagagtaatggagcacctaaagacat

SEQ ID NO: 82332 - DNA, 236 bp, Glycine max
  Clone ID: 700958377H1
gtcactccttgctcttagccctcctcctcttcgccgcagtggccaccgccgcgatggcggtggccgcgtccgacgccgacgacatcctgatccgtcaggtggtgccagatgttggcgaagcgcagaggaggacaacctgctgaacgccgagcaccgcttcgagagcttcaaggccaagttcgccaagacctacgccaccaaggaggagcacgatcatcgcttcggcgtcttcaagt

SEQ ID NO: 82333 - DNA, 235 bp, Glycine max
  Clone ID: 700958378H1
gttataaatgggcttttggtttggtggatgatagagggttatttttgttctaatgttggtcatacgatagagttccctattttactttctttcttgactttgtgaacattgattcgatttgggggtgtggatttttcttctgatttcttcgccaagttcgggttttgaccaattgggtcgctgattctcgcctcactttgatctgggtcgttcccttttcttcaatctcagttgt

SEQ ID NO: 82334 - DNA, 243 bp, Glycine max
  Clone ID: 700958379H1
aactcagtgaaagagaatccgaggcgaacagaatagactgattacgatggacgggaaggagcaggatgtgtcgatgggatcgaacaagttcccggagagacagccgattgggacggcggcgcagagccaagacgacggcaatgactaccaagagccggcgccggcgccactggttgacccgacggagtttacgtcatggtccttttacagagcagggatagcagagtttgtggccacttttct

SEQ ID NO: 82335 - DNA, 258 bp, Glycine max
  Clone ID: 700958381H1
tggaaacaagccgagaattcatctgtggtgtattttgtgtgttgatgttttattaaacttttgtactcttgctttgaaactagttggttaggcaagttttagttttctattttatttcagacttttcaggtgctcatattcttatgatgatcatcaaactgcaaatatagtgagcccattaagctattactgaaatttgttgcagatttgaaattcttctaagatggatacttcttataggactggtggagtcaagta

SEQ ID NO: 82336 - DNA, 243 bp, Glycine max
  Clone ID: 700958382H1
tggacatctgtctccttctcttaaagaatcatcttatgcatcaaacatggagagttcccatggtaatgactttggaggctgtggccttgaaaacaaaagagaatagagaaaagttgtataattgctgtgatggacccctaaatagtagtttcaaaaatgaaaatacaccaaatcaaatgccattttgcagtccgggttcagctcagcaagtaggtcatcattttgaaaatgaaaatgaaggtc

SEQ ID NO: 82337 - DNA, 239 bp, Glycine max
  Clone ID: 700958383H1
ctatcctatcgtagcaaagaaagaaagatagaaaaccctagcttaccttttcaactttcaagatgcaaatgtttgttaagacactcactggtaagacaatcacccttgaggtggagagttcagataccatagataatgtaaagtccaagattcaagacaaggaagggatcccaccagaccagcaacgtctcatttttgctggcaagcagcttgaggatggacgtacacttgctgattac

SEQ ID NO: 82338 - DNA, 239 bp, Glycine max
  Clone ID: 700958384H1
cttcttcaccctcttagggtttgcatcagattcccctaattcttgattgattttgcgctttcgctagattttcttcaaaatgactcaagatctagagatgaaggatcgctcaacgccttccaactccgtttcttcgcctgctccatctactctgcagcatttgaaggagatagcgtctcttatcgagaccggttcgtactcgaaggaagttcgtagaattgctcgcgctgttcgcctta

SEQ ID NO: 82339 - DNA, 63 bp, Glycine max
  Clone ID: 700958386H1
atatcatctagctagctagctagctagcaaatagcaatgttaaaaaaccaaccacaaccagat

SEQ ID NO: 82340 - DNA, 237 bp, Glycine max
  Clone ID: 700958388H1
gggtcctgcaaaaacatcagagatcccttggattgcattgatcggtcaatctgtttcaatagctacggcacagtctggatctgctggttctgaaaattcattagaaactgcatggagagcagagagtgaaagcctcaagtccatattgacaggagctgctccgagtaaacttggaaggattgctttagtggatgccctggcacaccagattcagaatcgtatgaagcttcggcttcc

SEQ ID NO: 82341 - DNA, 234 bp, Glycine max
  Clone ID: 700958389H1
cgtgattccgttagagagacttggatgcctcaaggtgaacaacttctccaattggagcgggagaagggaattgttatcagattcatgattggtcacagtgcaacttccaacagcattctagatcgagctattgattcagaagaagctcagcacaaagacttccttcgcctagaacatcttgaagggtatcatgagctgtctgcaaagataaagattttcttttccactgctgtt

SEQ ID NO: 82342 - DNA, 129 bp, Glycine max
  Clone ID: 700958390H1
cccatcttgatgttttggatctaagtttaaaccatttgagtggaccaattcctatgttcaaggtcactaaatttgcctcattatactatttggacctttccaacaatgaattgagtgggaagctttcat

SEQ ID NO: 82343 - DNA, 233 bp, Glycine max
  Clone ID: 700958393H1
acactctctctctctcttcttcttcttcttcttcttgcacgtattgttctaatccacaaaaataatggccttaaattacaacattgccctcgccttctctacggttctcacgctgcttctccttcccttaccaacccttggggagctcgtgcaggagcagccactagtcctcaagtaccacaacggccaactcctgaaggggcgcatcaccgtcaatctcatctggtacggca

SEQ ID NO: 82344 - DNA, 243 bp, Glycine max
  Clone ID: 700958395H1
cggctcgagaagaagaggactaacaggtccgcgaaattgaagcagtacaaaatcgatgcgcgccgcgagcaatggttatctcaaggtgcggtgaagagcaaggggtgcaaggacggagtggacgatgacggccacgcaccgccgccgtctccagcggtggtgaaacactcgttggagccgctgaacacgaggcgcagaggcgaagaggacgatggattgatccatcatgacagcgattcggag

SEQ ID NO: 82345 - DNA, 243 bp, Glycine max
  Clone ID: 700958396H1
atctcattgaggagaaagaagaagaaggatgtggcacgaggcgagaaggtcggagaagaaggtccacgacatgatggacgcggctcggaagagagcgcaacgacgcgccgtttacctcgccaagagacgcggcgatcctcagcaatccattcagctcgtcggctttcctagccgaacctatcgcgacgacgctctctaccaagcctcacaggatcagcagggcctgataccttggaatgggaa

SEQ ID NO: 82346 - DNA, 259 bp, Glycine max
  Clone ID: 700958401H1
tgagttccacctgcagtgcattcttgaatggtgtcagagaagctcccagtgtcctatgtgttggcaacctatcagcttgagggatgctaccagtcaagagctgcttgaggcagtagagctggagaggagcttgagagatactccatcaagaaatgctgcgatttttcatcatccaacacttggtgattttgaattgcagcatttacccatgggtgtgaatgaggccgatattgaagagcgaataattcaacattaactg

SEQ ID NO: 82347 - DNA, 257 bp, Glycine max
  Clone ID: 700958403H1
aacggggactgccagcttgttgagtttctaggtttgtgtgaatatttctgttcaatgaattgagaagaaatattcacacaaacctagaaactccacaaacggggactgccagcttgatttacttgacttgacccatatttcctcaatggactttgggccggaatcataccagttgcaaaatgatagggtagttcctggtgaaagtcacgacatggtgaatattccgtttcagacttcgatggggttaggtgttgcaa

SEQ ID NO: 82348 - DNA, 260 bp, Glycine max
  Clone ID: 700958404H1
cattctccctttcctctccgaaccctcgatcactctcacgcgctcctatattcgctcctccaccgtcgctctctcgaacaaccacaacaccatcttcatcacatggcaaacgcagcatctggtatggcagtccatgatgactgcaagttgaggtttttggagctgaaggcaaaaaggacacaccgtttcatagtttttaagattgaggagcagcagaagcaggtcattgtggagaagcttggtgagcctgcccagggcta

SEQ ID NO: 82349 - DNA, 127 bp, Glycine max
  Clone ID: 700958405H1
cgctctccgtttcgccatctctctctctcaacactctcttcttcgacaaagcgcttcctctatctcgtacctcacttctctctctccctctccccaaatccctcctctctctctccacgcgccgccg

SEQ ID NO: 82350 - DNA, 193 bp, Glycine max
  Clone ID: 700958406H1
ttcaacttccaaccaacagtagctgtagattctatggtctccaactacaacggaaagaagggaaaagtaattcactttccctttcaccaaccaaaggaaaaagtaaaagttagttaaagtcgaaaattttcagttagattccccctcactttgatttgatctctatgcccttcatctcatgctccgaaccttt

SEQ ID NO: 82351 - DNA, 174 bp, Glycine max
  Clone ID: 700958407H1
agaaccttctgaggttaaagcaaaaaacaaagagagagagagagagaaaatgatgaagccatcgatgctcagatctctccactccgccgccacccgcggcgcctctcatctcttccgccgtgggtacgcctccgagccggtgccggagcgcaaggtagccgttctcggcgccgc

SEQ ID NO: 82352 - DNA, 260 bp, Glycine max
  Clone ID: 700958408H1
caaaaccaagggatcttccagtacctgggcgggagctgtcaggagttcattttgctatggagtttcttcatgcaaatactaaaagcttgcttgatagcaatctccaggatggcaacttcatttctgccaagggaaagaaagttgtggtcattggtgggggtgacacgggcacagattgcatagggacatccattcggcatgggtgtagtagcattgtaaatctggaacttctccctcagccaccacaaactagagcccca

SEQ ID NO: 82353 - DNA, 205 bp, Glycine max
  Clone ID: 700958409H1
atcagactagagagagtaagagtaagagaagagatggaaagagtagcatcagtatctcggccactgaaaatatacttcctcccattcttctcaccggggcacctaatccctctggtccagctggctcgcttggtggcggcacgaggccagcacgtgaccatcatcaccacccccgccaacgctcaactcttcgaccagaacatcg

SEQ ID NO: 82354 - DNA, 262 bp, Glycine max
  Clone ID: 700958410H1
gataaggcaatgaatctgatgcaggcggttcgctacgacgcctacgggggtggtcctgccggcctcaagcacgttgaagttgccgttcccagtccaaaggcaaatgaggttttaatcaaactggaagcagttagcattaaccctattgattggaagattcagaagggtcttctccgtcctttatttctccccagaacctttccccacataccttgcactgatgtggctggagaaatagttgagatcggaactcaagtcaaag

SEQ ID NO: 82355 - DNA, 262 bp, Glycine max
  Clone ID: 700958411H1
gagaagcaatagtggatggccccgatttaggtcgaagtgtatgactactgaggaaattgagaatattcttagaatgcagcttgtagcaacacacagtaatgatccatatgttgatgactattaccaccaaggctgtcttgcgaaaaagtcatctggtgctaaattgaggcatcacttttctccagctcaaataaaggaactccctctacgaccctcttctaatgctgaaccacatgcttttcttcaggttgatgcactaggg

SEQ ID NO: 82356 - DNA, 263 bp, Glycine max
  Clone ID: 700958412H1
gttccttttgtatgggagaagactcctggaagacctaagaatgacagcaaactacaaacaagggctgtcgaacggccttccgttgctccaaagcttccacccgggagggttttgaaagttgaacagcaatgttctgataaagttcctaaaggtgcatcagttactcaatccagaacaggaagcagtgtttcagattctccgcgtactgcatctctagataataaagtgacaaaacatgaaagcccccaagaagtaattgagga

SEQ ID NO: 82357 - DNA, 262 bp, Glycine max
  Clone ID: 700958413H1
ccggcgttgactatctttctttgagagagtaacgcaatggaacaaccactcaccgaagccgtggaatccttatccgtctccgaccctgagatcccccaatcatccaatcccaatccaactcatctgttgacccccgatgagaagtttcaaattgtgaggagcgtcggagaagagtgcattcaggaagacgaactccttaacctcctcaccaaaaagcccgaacccgtttgctacgatggcttcgaaccctccggacgaatgc

SEQ ID NO: 82358 - DNA, 266 bp, Glycine max
  Clone ID: 700958414H1
cgacacccttaacacttctcataataaaatgttgcgccccacctccaaggaacaagtggtggggtggccgccggtgagggcaagcaggaaaaatgctatgaagatgagttgcaagttggtgaaggtggcggtggatggagctccttatctaagaacagtggatcttgaaatgtacgagacttatgagcatttgatgagggaattagagaccatgttttgtggcttagccattcgtaatcatttgatgaatgagaggaaactgatgg

SEQ ID NO: 82359 - DNA, 267 bp, Glycine max
  Clone ID: 700958415H1
aaggatcagtggcagttagcatgtcaattgaaggaacaagtttttgttttgtagcagcacacctagcatctggggagaagaagggtgatgaagggagaaggaaccatcaggtagcagaaatttttaggagaacctctttttctaggaccacaaaagaccatcatcattttcctctaaccatcttaggccacgaccgtatattctggttcggggatctgaactataggctatacttggaggacaattttgcgaggcatttgataagaa

SEQ ID NO: 82360 - DNA, 182 bp, Glycine max
  Clone ID: 700958416H1
ggaagaacgctcgctcgcactgtccagatcttaatcaagaggagtgagttttgtttttccagccatgacgccgctggtgagtctaagcctttctctcagatttacgcttaacagagttacagtcactcagtaatctactccttttctagatcctgcatgctgggaaaccaacaaaaattctt

SEQ ID NO: 82361 - DNA, 270 bp, Glycine max
  Clone ID: 700958417H1
ttcggctcgagaaaatattattaagatgatcaacattattggagcacttgttctactctttgcatttctcttcctcagttgtgtgtatgcacaagacacaacaacccttgtgcctgcaatcataacttttggtgattctgctgtggatgtagggaacaatgactatcttcccacccttttcaaggctgattaccctccttatgggagggactttgttaaccaccaacctactgggaggttttgcaatggcaaattagctactgatttcac

SEQ ID NO: 82362 - DNA, 256 bp, Glycine max
  Clone ID: 700958418H1
gtgcatacatagctatctatttatctatagcaagtgcgtcaagagacacgtggtaccctagctagagtgccattctgtggtttctttctttctttctttctgcatcacatcacaatttgcattgcctcgtgtcctttttcttctttgctctccaaaaatctcacacacacaggtatctagcaaatgggttctcaccaacaagaaccatggctcattggagaatgggaaaccaagggttttgaccaaggagaccagg

SEQ ID NO: 82363 - DNA, 250 bp, Glycine max
  Clone ID: 700958419H1
gttccctacctctcctttcaagatgcagatcttcgtcaagaccctcaccggaaagaccatcacccttgaggtggaaagctctgacaccatcgacaacgtcaaggccaagatccaggacaaggaaggaattcccccggatcagcaacgtctcatcttcgccggaaagcagctcgaggacggccgtaccctcgccgactacaacatccagaaggagtcaacccttcaccttgtccttcgtctccgtggtggc

SEQ ID NO: 82364 - DNA, 257 bp, Glycine max
  Clone ID: 700958420H1
ggacaaagaaaatttttgtaggtggaattccttcaaatgtgactgaagatgaatttagagacttctttacacgctacggcgaagttaaagatcaccaaataatgcgggaccactccaccaaccgatctcgtggctttgggtttatcacatttgaatctgaagaagcagttgatgatcttctgtccatggggaacaaaattgactttgctggagctcaggtggaaatcaagaaggctgaaccaaagaagccgcactca

SEQ ID NO: 82365 - DNA, 259 bp, Glycine max
  Clone ID: 700958422H1
aacaaaacaaattaagtaataaattacttatcatagaaacatggcagccctcaaacaagtttcatccctcttgctattccctttgtttctcattttttccctattcaaatcctctcatgctggtgggattgcagtctattggggtcaaaacggcaatgaaggctccttggaagaagcttgcaactctgacaactaccaatatgtgaacataggtttcttgaacgtttttggcaacaaccaaatcccacaactaaacctt

SEQ ID NO: 82366 - DNA, 263 bp, Glycine max
  unsure (1)..(263): unsure at all n locations
  Clone ID: 700958424H1
ctaaaacatctcaatgggttcttcttctattacaacatcgccctccaancatgaccatggctgcgatcgtgctcctgttcacggtctttgccgtttcctccgccctagacatgtcgataatctcgtacgacagcgcccacgcggacaaggccgccacgttgcgccccgaggaggagctgatgtccatgtacgagcagtggctcgtgaagcacgggaaggtgtacaacgcgctcggcgagaaggagaagcgcttccagatcttc

SEQ ID NO: 82367 - DNA, 260 bp, Glycine max
  Clone ID: 700958425H1
ctttgtcgtcttcagggttgttgctctctaccattcgcaaaatccaattcagcgatctccgaagagctccatttgttgcactccaattggaaaaaagaagtgaacttgcgatctgggtatccaatttttgaactctttcgatggggaatgatgcagggtcaccgcagggtccggttacgtgtgggtcgtggattcggaggcccgagaattagaatttggtggtgttgggaaggtccagacgtggcagttcttgtccttct

SEQ ID NO: 82368 - DNA, 258 bp, Glycine max
  Clone ID: 700958426H1
ggaatactaataatgctgttgggaggtggctggtggctttgcaagatggggatgggaaggggaggggtattgagcttgtgatggaggaggagatggaggtcagtgggagagataggagtaattgtcagaggaggcatgtgtttgaggacattgatgtggatttggtggtgggagaggaggaacagaagaagcatgaggaggtagtgggtggagaggacgaagagaaagctagagttagcatatgtattcctcccaaga

SEQ ID NO: 82369 - DNA, 261 bp, Glycine max
  Clone ID: 700958427H1
ctgagccagaatagatttgagggaaatattccttcagatattggcaatctgaaatatcttacaagtcttgatctcagtggaaatttgctgagtggaacaataccacccacgcttggaggaataaaaggcttagaaagattgaatctctcacacaatagtctttcaggtggtctctctagcttggatgatatgataagtctgacatcttttgatatatcatacaatcagtttgagggtccacttccaaacattctagccctc

SEQ ID NO: 82370 - DNA, 258 bp, Glycine max
  Clone ID: 700958428H1
gacgaagcggacgcgtggggataaagagggacgaagcgtgccacaatcttgtgttcatgttatcgttcaacgcgcagggtgggttagtgaaccagtttccgattttgatcaagtggctaggactggctggggagggtttacacaagcagctcgcggaggagatcaggaccgttgttaaggacgaaggaggggtgagtctccgggcgttggatcagatgactttgaccaaatcagtggtgtatgaagtcctgaggatag

SEQ ID NO: 82371 - DNA, 263 bp, Glycine max
  Clone ID: 700958429H1
gaaagacaagacaaaacaagagagaatgagtggcggaggaggaggagaagaggaagcaactctggagttcactccgacgtgggttgtggccgccgtttgcacagtcatcgtcgccatatctctcgctgctgagcgcctccttcattatggcggaaagtttctcaaagccaaggaccagaagtcgctctacgaagctctccagaagatcaaagaagagctgatgcttctgggcttcatttccctgcttctcacggttacacaaa

SEQ ID NO: 82372 - DNA, 264 bp, Glycine max
  Clone ID: 700958430H1
caataataactgcaggcagctctgacttcactgcaagcatcaaaacaaaacattgcttcaattcagcgtttctgcaaattccaattttccaaaataaaaaacaaaaacgggcgtttgaaaaaaagctgttattaattcgggagcgatatggaggtcgtactcaaagagttgcacgccgatcttcaatctctgagccaatcgcttcccgatccatctcaccatgatttgctccgcaagattcaattgcgtgttgaggaccttgcg

SEQ ID NO: 82373 - DNA, 265 bp, Glycine max
  Clone ID: 700958431H1
aagtttgattgtcctagctttgagcaacatcatgaagatctccattctctttatcacaatcttttcttgtggttttcttggaaatcgttgtttcaaatgctagtcctcttccatatgaagctatttttaactttggtgactctataagtgatactggaaatgctgctcataaccacccacctatgcctggcaatagtccttatggttcaacatactttaaacatccttctggacgtatgtcaatggacgactaatcatagatttt

SEQ ID NO: 82374 - DNA, 260 bp, Glycine max
  Clone ID: 700958433H1
gaacatccacaccgcatcgctctgccgttccatcactttgtgtctgtctctctcttcggacacaaagcaacactttccatgtccatgtctctgtctcttcttcgtatcttctcttcgccccacctttccacctctctcttctttccaactccaactctttcttccctctgcccttctttcctttccaaattaccaaatgccccctctcccctcattgttttatgccacagggacgcctcagcttcgaagcaaggtcacct

SEQ ID NO: 82375 - DNA, 256 bp, Glycine max
  Clone ID: 700958435H1
cttcccaaaaaatatacagcaccatggaacaccaaaaagaggagcaactagaaccagtgagtcctgtgggacaatacttcaacagctctgtgctatgcatatacatcattggagttttagaattcgaagttccaatagatgacttgcaaacatatgctcttcttaaagatgttttccttcccatcaatccacgcttctcctccatgctggtccaagataaagatggagagaaaagatggaagcaagttgatgtaaa

SEQ ID NO: 82376 - DNA, 208 bp, Glycine max
  Clone ID: 700958436H1
gcctgctgggagctctactgcctcgaacacggcattcagcctggtgggcagatgccaagtgctaagactgttggtggaggtgatgatgctttcaacaccttcttcagtgaaactggggctggaaagcacgtgcctcgtgcgatttttgtagatctcgagcctactgtgattgatgaagttaggactgggacataccgccaactatttc

SEQ ID NO: 82377 - DNA, 255 bp, Glycine max
  Clone ID: 700958438H1
aaaaaagggttacttcagcttccacatatcttgaagaattgatcaatgggcaagtctgtagttgagaagctactttggatggcaattgtgtgcttggtgctgggtgtaatttccattactcccaaggcccaagcagcagtgacatgcaaccaggtggtgagcaacctcaccccatgcatttcctatgtgctcaatggtggcaaaaccgtgcctggcccttgctgcaatgggatcaagaccctctttaacctcgct

SEQ ID NO: 82378 - DNA, 254 bp, Glycine max
  Clone ID: 700958439H1
cgcacacgaggagcagcctcaggaggagaaggatgtctcacaggaagttcgagcacccaaggcacggttcactgggatttcttcccaggaagcgtgctgctcgtcacaggggaaaagtgaaggcattccccaaggatgacccatccaaggcacccaagctcactgcattcttgggttacaaggccggtatgactcacattgttagagaggtcgcaagccaggatcaaagcttcacaagaaggacacttgtgagc

SEQ ID NO: 82379 - DNA, 259 bp, Glycine max
  Clone ID: 700958440H1
cgtacgtaaactttttacgcaccgtgtgaaaggatcaatatatacgttagattaaatggacagcttagattttttttcctttttatattttttcttttcttcttttctgtctttccagatttgtccctaatctttctctcacattccaattcaaacaacttccctcaatacagcggagacggcgaggaagccgccgccgtaggtccggtggtttccgccagcgaggcggcgaatcactctcggcctctcggaagcccag

SEQ ID NO: 82380 - DNA, 257 bp, Glycine max
  Clone ID: 700958441H1
cacatccatctttgccttctgcatgttggttctctgtaaacagatactgcaaaagaagaataatattgaatatttggttgggttgactccctgggttgaagcgttgcagacatcacggctattctaagattgtctctttctctcattcatgtcccaactgtacgacggaggacaggttgcgtaactgccaccaacccttcgccgcacggtgggcgtggtgctttgccttctgaaggtggtagcccatcagacttgct

SEQ ID NO: 82381 - DNA, 257 bp, Glycine max
  Clone ID: 700958443H1
agaatacataaatgaactggtagaagttgataaagaaggggggaagcagctttgtggtgggacatttttgaaccctggatcatgggatgctgcacttcttgctgctgggactacactatctgcgatgaagcatttactgaatggggatggaaaagtttcctatgcattggttaggccccctggtcaccatgctcagccttctcaggccgatggctactgtttccttaacaatgcaggtctagctgtgcaattggctt

SEQ ID NO: 82382 - DNA, 250 bp, Glycine max
  Clone ID: 700958444H1
ccgtgatagagatggtagactgtgggtacgtgtagttaagctgagagaaatgccattgctcgtatccaattgcgctaaatcctttatcctctccacgctcccaaagtccaagcaaatgtcccgtcaagctcccggcgtcgtcaaaacgcgcctgatgggcgtcgttttcgacatggacggcaccctgaccgtcccggtgatcgattttccggcgatgtatatggcgatgctgggcgacgacgcatacctg

SEQ ID NO: 82383 - DNA, 261 bp, Glycine max
  Clone ID: 700958445H1
aaaacttttcctcctcttggtaagcataaaaataggaccgggaaggaaaaaagtggtctcacttaaattctcaattttgtctaaattggacaaaaaaaaaagaagaaccacaacttaacttcttgtatggattataaagcaaatgcgaaggaaacaaaaagaatgagaagattgcatctaaaatgacaacatcatccatctcttacacgtttattgtgcaagaatgagaatgagaatgaaacaaaaagaaattcgaagata

SEQ ID NO: 82384 - DNA, 262 bp, Glycine max
  Clone ID: 700958446H1
acttggtcccataccctagaatccatttcatgctttcctcctatgcaccagttatctctgctgagaaggcctaccatgaacagctctcagtggcagaaattaccaacagtgcttttgagccatcgtccatgatggccaagtgtgatcctcgtcacggaaagtacatggcgtgttgcctgatgtaccgtggtgatgttgtgcccaaagatgtaaacgctgctgttgccaccatcaagaccaagaggaccattcagtttgtgga

SEQ ID NO: 82385 - DNA, 235 bp, Glycine max
  Clone ID: 700958447H1
agaatatgcaaagcttccaccagggcctcgtccatttcctatcataggaaacatcttggaacttggcacaaatccacacatagcactcagcgaattctcaaagatttatggacctcttatgacttttaaacttggcagaataaccaccatagttatctcctctcctcaagtagccaaagaagtactacttgaaaatggtcaagtcctttctagcagaacaattccacattcagtc

SEQ ID NO: 82386 - DNA, 197 bp, Glycine max
  Clone ID: 700958449H1
taaaaactgatattcagcaacgatatggctttcgtgtgtactatctgtctgctcagatcccacagatctgcatcttcttattcttcctttccatattgtgtgtgtgaattagaattctgcaagatcagatctctctctgcgagtacatcagatctccgatgtctcagtcatgcgctcaggtggtccacttcgacaac

SEQ ID NO: 82387 - DNA, 169 bp, Glycine max
  Clone ID: 700958451H1
caaaattaagtaccataatttcccttaatttagatgattttcaatccattgaggttgagctgccaaaattaaggatatatattatattgtttaaatatttgatgtaaaatcttttggttacatgtatgtggatatgaaaggaagattgaagacttcaatctcttttgtc

SEQ ID NO: 82388 - DNA, 254 bp, Glycine max
  Clone ID: 700958452H1
tgcaggcggttcgctacgacgcctacgggggaggtcctgccggcctcaagcacgttgaagttgccgttcccagtccaaaggcaaatgaggttttaatcaaactggaagcagttagcattaaccctattgattggaagattcagaagggtcttctccgtcctttatttctccccagaacctttccccacataccttgcactgatgtggctgtagaaatagttgagatcggaactcaagtcaaagatttcaaagtt

SEQ ID NO: 82389 - DNA, 253 bp, Glycine max
  Clone ID: 700958453H1
ctcgagccgggaccttttcatgaatggtgcaaagttcgtcacttcaggctcacccatcaagatgacatacaaaaagggtctcatcatgaagccaagagatggaactcatgtcagcaggttgacacgacatgctggtgccctaaactgcttcgttggcaagccttgttagagaacaacaaacattaatgttgttgttgttgttcgctttttctttttttttttggaaagaaaaaaaaaaccacattgcccagaa

SEQ ID NO: 82390 - DNA, 257 bp, Glycine max
  Clone ID: 700958455H1
agtaaattaactatgaagcctaccctactattatccctttccttcctgcctctctttgctttcctggctctttcagaagatgttgaacaagttgtggacataagtggcaaccccattttcccaggtggcacatattacattatgccatcaacttggggcgctgccggtggtggattgaaactaggccggacaggaaactcaaactgcccagttactgttttgcaagattactcagaaatcttccgtggcacaccagt

SEQ ID NO: 82391 - DNA, 256 bp, Glycine max
  Clone ID: 700958456H1
cccaccattactcagcactgccattcttcaatcacactactggctgtcaccttctcagatcttcacaccgaagagggcatcaaatccctcgatcaattcctttctgggaaaacctatatctctggggatcaattgacaaaggatgatatcaaagtgtatgcagctgttgtggaaaagccaggagactcttttcctaatgctgctaagtggtacgatgccgtctcttctcaacttgctccaagcttccctgggcacg

SEQ ID NO: 82392 - DNA, 192 bp, Glycine max
  Clone ID: 700958457H1
ctgcaatttagcttggcgtcccatgccatgatcgtctttgatttacaattcaatttctttgcaccacagatcaattgattttaacactgtttgacattgtaaatattactactcaaatgattccgagtgcaattcaaaactcaagccttaaacataaaaaaaaaaaaaaaaaaaaaaaaaaaaaaggggggg

SEQ ID NO: 82393 - DNA, 257 bp, Glycine max
  unsure (1)..(257): unsure at all n locations
  Clone ID: 700958458H1
gaatcggtggacgggcgtcgccgccgccatgtggatccagtggagctgcggcgcatcgtacaccttcagcatctactcctccgtgctcaagtccacgcagggctacgaccaatccacgctcgacaccgtccctgtcttcaaggacatcggcgccaacttcggcgttctctccggcctcctctactccgccgtcgccccctacacaacccaccgctcgtnnncctccaagtccatatggacctcctctcacgggccct

SEQ ID NO: 82394 - DNA, 255 bp, Glycine max
  Clone ID: 700958459H1
atttatctttttattttagcaaagctaaactattgtttctcgggaaatttaagataattcaattggataacatgaacgaaaatctcaattttgtgctgttgtcggagtgactcaggaaaatgcaatgcacgattccaacagcattgtttatgatacattttctgttgtccaaggttaattttcagttttggttttttgggcggctccaatggcaacctctcaaatcactgcatcattgaggaacttgcctgcatt

SEQ ID NO: 82395 - DNA, 230 bp, Glycine max
  Clone ID: 700958460H1
cacatcccttgatttccttccttcaccgcacccacttatatctcttaccttagttttccaatgcagaaagcagggtacggtggcgatggaatatacaggtctctaaggccttgtttggttctcccaaatgaccccaacctctccctcgtctcattcctcttccaaagcgtttcctctttcccatccaaaatcgccctcgtcgattcccactcttcccaaacacttacctt

SEQ ID NO: 82396 - DNA, 260 bp, Glycine max
  Clone ID: 700958462H1
cctcgagccgattcggctcgaggaggagttgagtgaacgagtcgacgagtggacaaagaatatgaatacgacgatgatgagtgcattaaacatctatggctatgtcgttgcggctgttgttgtgttccttatattattgctttggcagcggaacagatttttcttcgcttcatctccgtcgtctccatccgcttccttactgctttccgattctatcaattcaaactcaagctccagatgcagaacctcaaattttgtga

SEQ ID NO: 82397 - DNA, 260 bp, Glycine max
  Clone ID: 700958463H1
cggtgagttcccaggcgactacggctgggacactgctgggctttccgcagacccagaaaccttcgccaagaaccgtgaactcgaagtgatccactccaggtgggccatgctcggagccttgggctgcgtcttcccggagttgctgtcccgcaacggggtgaagttcggagaagccgtgtggttcaaggccgggtcccagatcttcagcgaggtgtgctcactacttgggcaaccaaggcctgatccacgcccagagcatc

SEQ ID NO: 82398 - DNA, 263 bp, Glycine max
  Clone ID: 700958464H1
cgaacatcaagcttcagaccagagccccaatcagcaaattcaagcagtactagtaccaataggcaactaaattcccctttccaaccctaatttttcttcttaattaattccatttaagtcctttaatatgcagaccctcaccccaccgtaccccaaacctctcaactatctcacgcgggcgcgtcactcggtcattacggtcgctccgacccgtttcacagtcaaatgcggtacaggcttcgaatccgcgagtttctcgcagg

SEQ ID NO: 82399 - DNA, 249 bp, Glycine max
  Clone ID: 700958465H1
aaaaactttaggaaatcacatgaagagagagaagatggcttgtgtttacccaggacagcttctcttgttgtgtctgatactgagcgtggttccaatagcagtttccgcaggcaatgacgcagcacccctgaccaaccatgggggacgcttgctgactggaaagttgaacgttggcatcttatggtacggcccaattccaaaggcccaaaagaaagcgattttgtccttcttcaggtccctgaacatgaa

SEQ ID NO: 82400 - DNA, 251 bp, Glycine max
  Clone ID: 700958466H1
aagaaccatgccaaatagaagcatgcctgcctcaccttatcccacaccaggtgcccttctaatgggagatgccttcaatatgcgtcaccctttaaccggaggaggaatgactgtggctttatctgacattgttgtgctaagggacttacttaaaccccttcatgatctccatgatgcttctgctctttgcagataccttgaatcattctacaccctacgcaagcctgtagcatctacaataaacacactag

SEQ ID NO: 82401 - DNA, 250 bp, Glycine max
  Clone ID: 700958467H1
cgctcgagccgattcggcccagcaattggaacgagggaagtgttcacgccatgggaatggagcgagtgcagtgtgcctatgcctctctggacgaagcgttcgaaatagggaaagaggcgtatcaggggcagcagtacagccagatttacttcgcgcgccttcatttgctgcgaacacttttatattccctcgttcctcattggaggcccaattttcccgtgtgcacagtgctgggattggaagaagggaa

SEQ ID NO: 82402 - DNA, 173 bp, Glycine max
  Clone ID: 700958470H1
cttatgtattacatggataagattaccaaaatataggtccctccaggtttcagcagtctgcaaagtaagaaaataggcataattagtgagaattttgaaatgaagtgtgtgactattaaaaacttctgttcaaaactgcagaaatttattctcagtacagtctatacaacata

SEQ ID NO: 82403 - DNA, 250 bp, Glycine max
  Clone ID: 700958471H1
aaacaaccaaaccacacacttcacaccctcttcaacatcctcagcaagtacaagaacaagaagaaacaatgtcttgctccaatctcacaatgttggtgtcctcaaaaccttccctttccgatccctccaatctctccttccgctctgtcctcaacccttttcagttcccttcacaaaacccaatttcatgcactccttcacgctcctaagacacccaatttcagtgtggtctgagagatctcagcccccg

SEQ ID NO: 82404 - DNA, 253 bp, Glycine max
  Clone ID: 700958472H1
ctgacttgtacaagaattctgatctatataggagacacaagcagcttatacaagaactgggtcagcccgctcccggttcaaaggatctttatttccctactcaatactctctgtcattcttggtccaatgccaagcttgcttatggaagcaacgttggtcatattggcgtaatccaccatacactgctgtgaggtttttcttcactactttcatagccctgatgtttggaacaatgttctgggacctcggaag

SEQ ID NO: 82405 - DNA, 252 bp, Glycine max
  Clone ID: 700958473H1
attcattcaagattcagcaagtgcgttttggaagcagagaccgaaatacttcgagatggcccgtacaaagcaaactgctcgtaagtcaactggaggaaaagctcccaggaagcagcttgcaaccaaggctgcacgtaagtctgcaccaacaactggtggtgtgaagaagcctcatcgttatcgccctggaactgttgctcttcgtgagattaggaaataccagaagagcactgagctcctaatcaggaagtt

SEQ ID NO: 82406 - DNA, 252 bp, Glycine max
  Clone ID: 700958475H1
ctcgagccgctcgagccgtgcaagttgagattttgattggtgtttggctcccaaattcccaaaacagtgaaggtctcaagtaaaagaaatgtttttggcaccaagggggaaatgggtatagatttcatggttttggtgttatcagtgtcatggttttgtttgactagtatatgtgtctctgctacaaaacaagcatacccgccaacaccacaaccgaaccagaacttaaggtttgaccaaaatggagaattc

SEQ ID NO: 82407 - DNA, 255 bp, Glycine max
  Clone ID: 700958477H1
gatggtttctgcgtggcgtcgttgtctttcttttgtttccaaatcagattcttgtgctatcttgttctggattttccatttgagtaaaaagcaagaactgttttcaattgttggtgcagtgtgttgttagttctgcatttgcctgttaaatttgaggaatcggtgttataccaagacagaaagagggaaacttagataaaaataagagctttctggggagcatagacacttcacatacatgtttccataagagaa

SEQ ID NO: 82408 - DNA, 258 bp, Glycine max
  Clone ID: 700958478H1
aaccaaacttgccaaagtcttttatttccgtaatttggaaatatctatgtagttggtttcttaatttaattaaaggtggaatgaaaactctccctcacacgtcacaactttgtatgatagctcaaggtttgtatcttctggctcataaatttcaaggttgtctgcttcagcatgataagggaacaaggaaacacactgtacatggcttagcgttctacgctggtattcatccggaagaagtttggatagaacaagttc

SEQ ID NO: 82409 - DNA, 251 bp, Glycine max
  Clone ID: 700958479H1
ccaaaccccaaaacctctcttcaccttccgccgcctttctttccccaatctccgctctcctccacgacaactccgacgccctcgtccgccacctcccacccaccgccagtttactggaggctatagatgttatgcacgaaggggtgcagaacctggtgataccaatacaaatccagtttgaatctttgaactccaacaacgtgcaccacaatgacaacaccacctactgttggctaactcaagaggacgtg

SEQ ID NO: 82410 - DNA, 75 bp, Glycine max
  Clone ID: 700958480H1
aaaagaagtgcagttcccaaatggcaataatctttctttcaagctccgcaattcttcttccaagtcttgctttct

SEQ ID NO: 82411 - DNA, 248 bp, Glycine max
  Clone ID: 700958481H1
taaatatctcattcccgttgtgcgtttccaaccgatcaccggttaaatggttccggccaccggtgaccggcaacacccccactttgattccggggagcccttaccataaccctaaccactaacaagctcttttcatattcatggatcctccggattctcagtcccaggaacaggaagcgcccaagaagaacggcgtcgtttttgtcattctgcgatggatcctcgcgattctttttcctttcctcctc

SEQ ID NO: 82412 - DNA, 249 bp, Glycine max
  Clone ID: 700958482H1
cccaaatggactcaaagtggcctctgaaacatcaccgagtcccactgcgtcaataggtttatatgtagattgtggttcaatatatgagagtccgataagttttggggctacgcatctgcttgaacgaatggctttcaagaccactagaaaccggagtcactttcgggtagttcgtgaggtagaggcaattggtggcaatgtgcaggcctcagcttctagagagcagatgggttacacttttgatgcttt

SEQ ID NO: 82413 - DNA, 249 bp, Glycine max
  Clone ID: 700958483H1
cttaaaaaccccaaacgcataaaaaacacagagacagtgttcttagcgccgccgttgccctaccatcttcatattattctattgcctttctttcacgtttttctggtttttaagcccttccagtgccctatttacgcttatacccttctggttatgatagcttccattcggcgtcagcagcagagccgaagctcttggcttccacacatactttcggtgccgtcgattgagatacaaagcctccaagcc

SEQ ID NO: 82414 - DNA, 161 bp, Glycine max
  Clone ID: 700958484H1
tgtttcttcgtctttacaagaaaaaggagtaattaactgtgacacgttcactaaaaaaaaatccttttgtagcgaatcatttattaagaaaaataaataaacttaacacaaaagcggaaaaagatatattaataacttggtcaaaagcatctgccattata

SEQ ID NO: 82415 - DNA, 249 bp, Glycine max
  Clone ID: 700958485H1
attttcttgtgtcgaaaaaagagagcgagagcagaagagaagagtgcagcgcaagcttagaagagcaaagtgtgtgatgtggttggacattcagtcccaatcacatggcttcttcttctccttctcctccatcttatctcacacaccttcctcttcatccctctcaccaaggtgagagtgagaagcgcgtggaggacgatgaatcgcgcgttccgattcacatcgtgaccgcggcgacgcaacttcccg

SEQ ID NO: 82416 - DNA, 252 bp, Glycine max
  Clone ID: 700958486H1
tgatgttccatgatgagcagatagcatgattgagatgatagtgttcctcttccttgtcttgcttatatcccttatcttgagcagcagttccaataatagcctccagcttcccccaagcccaccaagcattcctctgctaggtcacctccaccacctcaccccttccctatacaaatccctctacaccctctcatccaagcacggtcccctcctcctcctccgcctcggcccctcccgccgcctcctcctcct

SEQ ID NO: 82417 - DNA, 253 bp, Glycine max
  Clone ID: 700958487H1
gattagtcgaaaatggaagccatttacaatacaaagtacaatttgattgggtgcatcaagaggatgacacagaggaaacaaccatgtctaatgcctggtatgaagtattgtcagttttgcacttgatggcaatgctattactgtcacaggctaatttattacttcttcccagaacatccactgatagtcatcagccaaaagtatcagaagctagcagacgagcttctgttgatatcttcttaaaggcagctgg

SEQ ID NO: 82418 - DNA, 254 bp, Glycine max
  Clone ID: 700958488H1
ccatcatcatcaactacctcaaaattctaagcacaatttctctgagttgttttgtgagataatagcacatagcataacaagggaaggagtattaacaaccgcaaacctgaagagaaaaagagcagcagaagaagaaacaccaacgatgggtgtggattactacaagatcttgcaggttgataggagcgccaaagacgatgacttgaagaaggcttataggaaacttgctatgaaatggcaccctgataagaacc

SEQ ID NO: 82419 - DNA, 244 bp, Glycine max
  Clone ID: 700958489H1
tgttgtgttatgttcagttcgttgcatgcaaaaacgattatgaagacgccaaaacgccactcgccgccgccaaattcttccctgcgagtggagtctgattccggcgaaatcgtcacgaggttcaagaacggtcgccggagaagaattaaaatcaagcgaatgaaatacacttgccagacgaagatccgcgtcaggaatgacgccggcgccggcggcgtgtctcaacttctggcggtggattctg

SEQ ID NO: 82420 - DNA, 247 bp, Glycine max
  Clone ID: 700958490H1
catctcactcccacgagtgacgttaactaaattggacttttgcttttagaaattgtgacagcccgccgtcctgttgagttgaagaaaactgttgcagagcgggttacactcagatgggccttcaggaagtataatgaaggaagtgtggtggaacttgtggatcctttaatggaagaagctgtaaacggagatgttctgatgaaaatgcttatcttggcgtttcaatgtgcagcccccattcgaacag

SEQ ID NO: 82421 - DNA, 249 bp, Glycine max
  Clone ID: 700958491H1
ctttctctctctctctctacaaaacttagctctctttttaattataccttgcattctcttgtattaagatggaagcaactaccatcaccaatgggagccaaaacggttcgttttgcttgtccactactaagggaagtagtgatccgttaaactggggagcggcggcagaggcgatgaaggggagccacctggacgaggtgaagcgcatggtggccgagtaccgcaagccggtggtccggctcggcggag

SEQ ID NO: 82422 - DNA, 252 bp, Glycine max
  Clone ID: 700958492H1
gtgttagatctgtacccgcctagcaattgatttggaaaagtccaagcttcaaagatgaggtattcattctctcatcttcaacttatctttgttcaaatttcttagtttgttcgtacgttttattgtgaaagcaatgttgttgattgtttttcgttgatagctgatgtgtactttgcgtggtcttactgtgtatgatgttaatgagaattgttcggtgaaaattgtgcatttggaaaatctatgttttgtgtt

SEQ ID NO: 82423 - DNA, 254 bp, Glycine max
  Clone ID: 700958493H1
ctcgagccgctcgagccggcagtttggactggggataacactgctgattgggatcacctaagagtttctatcccaatggttttgacccttggtcttactgggatgtcattctctggtgctgatattggtggattttttgggaatcctgaacctgagttattggttcggtggtatcagctaggagcttactatcctttctttagggcccacgcccatcacgacacaaaaagacgcaccccatggttgtttggaga

SEQ ID NO: 82424 - DNA, 253 bp, Glycine max
  Clone ID: 700958494H1
ctcgcaagcaaaaagaaagaatcccaggcgaggagaaagatggaggggaaggagcaggatgtgtcgttgggagcgaacaagttccccgagagacagccgattgggacggcggcgcagagccaagacgacggcaaggactaccaggagccggcgccggcgccgctggttgacccgacggagtttacgtcatggtcgttttacagagcagggatagcagagtttgtggccacttttctgtttctctacatcaccg

SEQ ID NO: 82425 - DNA, 239 bp, Glycine max
  Clone ID: 700958495H1
tgggtagaggagaagatcgagaaggggtcgcagtagccgggggcttcttctggtcctacacagacgaaccccatgccacacgacgtcgtcagatcctctccaaataccctcaaatcaaacaactctttggccccgaccactctgctttcttcaagattagtggagttgttctgcttcagcttgtacgggtgctttacttcatgatgctggctggctgaagatatttttagtagcatact

SEQ ID NO: 82426 - DNA, 255 bp, Glycine max
  Clone ID: 700958502H1
ttcggctcgagggaaaatcggtacaaggtgccatctttgtttgttatacatgaccatggccatgcccctgtttctgatgttccttcttctgcacatagcttgggtggcatcgtcggatctccgacctgggttttactcaaaaacatgtccaaaagcggaactcatagtccgagatgtgatgaagaaggcccttatgagggaacccagaagtgttgcctctgttatgcgcttccagttccatgattgctttgtcaa

SEQ ID NO: 82427 - DNA, 243 bp, Glycine max
  Clone ID: 700958503H1
tgcccgtaaaatacataacaggtgagttggacatggtatacaactcgctgaacttgaaggagtatatccacggcggagggttcaagcaagatgtgccaaatttagaacaagtgattgtgcagaaaggagtggctcacttcaataatcaagaagcagcagaggaaatcgataattacatatacgattttatcaacaagttctgatcttgtccaaaaacgaattcaaccagatataaagtcgcag

SEQ ID NO: 82428 - DNA, 233 bp, Glycine max
  Clone ID: 700958504H1
ataaaatattatttaacaattttaaattaaaaagaaggggaaaagcaaagaaacaaaaacaaggcaaaaacctgagttgcggaggaaagaaacataatctggaattcgagaagctaatcaatcgtttgcggttgctttgttcctcctctcgcagatggttaggggaggaaggtttagcggcaaacgcaatttcaggaaaagggttcggtcaaaggagggaggttctgatgatt

SEQ ID NO: 82429 - DNA, 242 bp, Glycine max
  Clone ID: 700958505H1
ctctctcatcactacctctgcatttttctctcgctctctgccttccatcaccctcgccatttcccttcccaagatagtagaagatggcagacgctgaggatattcaacctcttgtttgtgacaatggaacaggaatggttaaggctggttttgctggagatgatgccccacgtgctgtgtttcccagcattgtaggtcgtcctcgtcacactggtgtgatggttggcatgggccaaaaagat

SEQ ID NO: 82430 - DNA, 241 bp, Glycine max
  Clone ID: 700958506H1
ctctctctctctcttgtatcgtggcaaagtaaaagtctctccctcacgggacagtggttttagctgagctctctctcactgcaatgcaatctctctctggatttgtccttttcttcctctgagcgataatggcgaaagagcttctcctgcaacttcgtctgctgcttcttcttcccgaacaacggtgtcgatttgcacctcctctgccaatgctcaacaacttcgcattctccgctttgtg

SEQ ID NO: 82431 - DNA, 238 bp, Glycine max
  Clone ID: 700958509H1
atcggaacagcgatgggttgtgtaattgctcctctcacattctggatgttttggactgcctttgatattggctcacctgatggcccttacaaagcaccatacgctgttatattcagggaaatggccatacttggtgttcagggattctcagagcttccgaagtactgcctggaaatgtgtggtggtttctttttggcagccttagttatcaaccttctaagggatgtcactcctaaga

SEQ ID NO: 82432 - DNA, 237 bp, Glycine max
  Clone ID: 700958511H1
gatttttccttcccttttctccataaacgaggtgcttcagatttgctcataataggagggaatcgaatcgaatcgaatcgaaaggaaagtgcagaatggatgacatgccgttgccggcgctctttgagcaagcctgcaagatccacgccgcagccaccgattccggcgccgaccaggaggttgtgaagaaggggtgcgaggctctgcatagatgcgaggacatggtcaataatctag

SEQ ID NO: 82433 - DNA, 238 bp, Glycine max
  Clone ID: 700958515H1
ccagtgcatcaaattcaaagatcagcatccccataattgacctcacagtcatccatgatgatcctattttgagagatcatgttgtgggaaaagttagatatgcatgtgagaagtggggcttctttcagattatagccccaagcggcatatgaggtggatatcctttggtatatagttgaggttaatttcactgccactgcctacaaatcgaccaaatagcattgaccctgcattgaaa

SEQ ID NO: 82434 - DNA, 244 bp, Glycine max
  Clone ID: 700958517H1
tacaaagcaagacgcaagccactcatgaacatcaaaggttatgtactcgcgagcccagctgttgacgggtttcgagagcagaacatgaaagttttatatgcataccaaaggagtcttataccagaagcgctctacaagtcaatgaaagaaaattgtaacggggattatataaacattgatccagaaaacacaaagtgtgtctcagattatagtgtttatgttgagcttgttcgttacataaacg

SEQ ID NO: 82435 - DNA, 241 bp, Glycine max
  Clone ID: 700958518H1
aagaagttctaaggaagagggaatatgcagaatacaaggtgctagttgtctatttgcaataacaacatcagcgatccaaccttagtattcttcaacccagagagatttgtaataataaattacaacaacttaaacgatggcaggaggagcttatgtagattcgggaaatgcaaagcaatttgatgggaaggtcacggcattcgtattggttacatgctttgtggcagccatgggaggctta

SEQ ID NO: 82436 - DNA, 239 bp, Glycine max
  Clone ID: 700958522H1
caaagagacaattcaacttaagagatcaatatggccaccaccactacccagcctccctctaatatctgttttttccttctgttgttgcttctagcacactttcatttgggcataagccaacttgagctgaattactactctaaaagctgcccaaaagctgaagagatcatcaaggaacaagtcacacaacagtataaccagcatggaaacactgccgtttcgtgggtcagaaatctctt

SEQ ID NO: 82437 - DNA, 239 bp, Glycine max
  Clone ID: 700958525H1
agaacctcctcctcacagctccaaagctacaagcctcctccgacctccccgaaggcaccaactggcgctacagcgagttcttgaacgccgtcaagaagggtaaagtcgagcgagtcaggttcagcaaagacggttccgccctccagctaaccgccattgacggccgtcgcgcctccgttattgtccccaatgacccggacctcatcgacatcctcgccatgaacggcgtcgacatttcc

SEQ ID NO: 82438 - DNA, 236 bp, Glycine max
  Clone ID: 700958526H1
gaaaaagactaaggaaaggaacatagcattgctcttaatatcctaactcctagattcccatctctggcttctcaccttgcataatggctacaaaagtgaaacgcaagactttttcaattgctgcagcaacatggatggtcttgtgtatcatcactatgatctgcaatgtcagtttagcagatagaattttgaaagaaaaagaattaggaaatgatgttccgaaagagagacaagga

SEQ ID NO: 82439 - DNA, 236 bp, Glycine max
  Clone ID: 700958527H1
tggttctgcagataaaatacttgagattatttggtacttaagttaacacagacagtgactgtgaatgatggatgttgctgaggttgaggaaaatctgtttgccgcaagtgatgccaagttacatggacagatgtgcaagactctttctataatctattgcaaagtactgtctgtatttccttctttagaagctgctaggcctaggagtaaatctggtattcaggcattatgttcat

SEQ ID NO: 82440 - DNA, 238 bp, Glycine max
  Clone ID: 700958530H1
gggagagggatgtgaaaaatgagtttgtaagacagaaaagaaggaacgtaagaagggaaattcaattcccttcttgttgttcccctagcacggccaattgatcttgcggtgaggggcaataattaaaacacatgaagcaaaaatcttaactcaatacaacgcaacacatgcatgtgagtttttgccaacaaacgtgatcattgccgcaacaacgaagactcaatattatcataggcca

SEQ ID NO: 82441 - DNA, 242 bp, Glycine max
  Clone ID: 700958533H1
caatcaatcttctgagagtgtttggttgaaagtagcaaagatgtttcctttcgggcaaaagggtcaaaatataaaggggactatggtggttatgcagaagaatgtgttggatatcaacagcatcaccagtgttggagggatcgttgaccaaagcttaggcttcataggcagtgcagtcgatgcacttacttttgcagccaccaaaatctccatccagttgattagtgctaccaaggctgatg

SEQ ID NO: 82442 - DNA, 240 bp, Glycine max
  Clone ID: 700958534H1
gaattttatcagcaattattgaaagaattttttgagacagttgatccttcatcgtctgagaaagcattttatgctttgaagagaatgcaaccaaagacaagaaaaattgttgatcgtcgtgcctcaaaaagtcggaagataaggtataatgttcacgaaaagatagtaaattttatggcaccactacctgccaatattcctcctatggctccgaagttgtttgagaatctgtttggattg

SEQ ID NO: 82443 - DNA, 77 bp, Glycine max
  Clone ID: 700958535H1
accatttcttcgtctggcgttgtagacgttcacagcatcatcctctgctctagaagatggttcctaccataggtggt

SEQ ID NO: 82444 - DNA, 237 bp, Glycine max
  Clone ID: 700958537H1
agctaatctcccctgcatcctccactggcgagaacgtgcagcacaacgccaccaccacttccaaggcggcctcatcagattccgagaattttgccgagtcagtgatcaaggggccaaagcaggcctctggggagcacaagaacaaaaggaagatcaaggtgactttctcatcaggtcaagagcagcagaatgcaccatcacaggcagttaggaaatgcttgcactgtgagataacca

SEQ ID NO: 82445 - DNA, 237 bp, Glycine max
  Clone ID: 700958538H1
ctcgagccgctccgcagcagccacacttcttcgccgtttcagctgaagagccatccgcaggtaagcaatggttaagcataataatgttatccccaatgggcacttccggaaacactggcaaaactatgtgaagacttggtttaatcaaccagcccgaaagaccagaagacggttggctcggcagaatcaggctgtcaagattttccccaggcctactgctggatctctcaggcctat

SEQ ID NO: 82446 - DNA, 235 bp, Glycine max
  Clone ID: 700958539H1
ccatccacccgtggtgatccacatggttaggaggctcatgcctcttgtatgttgtcgagcgagttggaacccggtacacttttctcattcgtgagccactctgtgcactaacacgtgatgcacgtgccgtcgactgggctacagtgtcgcttgagttacaccttggggttgagaaccttctggagcttcctctgctgataggagtagccacatctgctggcccatttgctcttac

SEQ ID NO: 82447 - DNA, 238 bp, Glycine max
  Clone ID: 700958540H1
gaaccttaaattaattatagaaccatgtttgcaactaccaattcctccactttgtcacctttattctctttcagtagaacaacagcaacctctcacccttccaaacccacattctggaatttggttccaatgaaacaatcttcttctccggggcacttggccttagccttagacaatccacgtagaacacttcacgtgtcttgtggctccacatcaccacatgcttcccagagatcat

SEQ ID NO: 82448 - DNA, 235 bp, Glycine max
  Clone ID: 700958541H1
cggagctttgctcaaggtactgatggctgctctcaagcaggacctgggatggtagtggcaaaattggcaataggacagtgaagcaataatcatgtacaggggttgagactgttgcacaatttggtgtagtgtttcttctctttgctttggggctggagttttccctggcaaagttaaaagctgtgggacctgttgctgttcttggagggctacttcaaattatcatttttatgtt

SEQ ID NO: 82449 - DNA, 236 bp, Glycine max
  Clone ID: 700958546H1
ccgcactttaccgcaccctgcgactccgcgtgggtttggcgaaaccttctagaattttcttccatggaggttatcagagttctaacggcggcgttcacggtggcggttcttgtgacggcgcttgccttgtagcgcctccactggtggcactgtcataatccggcgcgaagttgccccctcaacgtgggagagtgtcgctgaagaagttgtttcgggtacggctaagagatttctgg

SEQ ID NO: 82450 - DNA, 182 bp, Glycine max
  Clone ID: 700958547H1
cgtcatcatcatcatcatcatcagcgttgattgaagaagatgccgatcagaagcatcgccatcgtaaggcctgaagaggctactcaccccggaccgttcaaggcggggttggctgagtgcatctccaccgtgatcttcgtgttcgccggttcaggttccggcatcgcctacatcgagctcac

SEQ ID NO: 82451 - DNA, 235 bp, Glycine max
  Clone ID: 700958548H1
atgctcctgtcacatctccaaacactgatggcactggcaccatggagatactgtccaagatgttgaaaattgccgaagtgaaaccctatgtggtgggccagtttcacaatgactcattcacgggcgatgttcgagaacgtgtgatggatcattgcaaaggtcgggcatttgcctcttgcgtgcatcactgcatcagtccatgggctacctggtggctcagaacggcttgcagctg

SEQ ID NO: 82452 - DNA, 238 bp, Glycine max
  Clone ID: 700958549H1
aaagaaatataactaatattctttagaataatcaaaaagaatattaaattcaaataaattttagatagaaaaaagacttaaaaaggaggatttgaaatgcgagatctaaaaacatatctttccgtggcaccagtagtaagtactctatggttcggggctttggcgggtctcttgatagagatcaatcgtttttttccagatgcattgatattcccttttttttcattctagttattga

SEQ ID NO: 82453 - DNA, 234 bp, Glycine max
  Clone ID: 700958550H1
gaagagatttttttttcttttcaatttgaattatttattatctatgaaaagcccttgactgatgcgtcccaaatccaaaattgctatattttctgttcagttctggctagtggctacaaaatctttgtacaaatttctgaacagtttctaggtatggaaactctttcatatgggtcagcaccatgctgccaagttgtgaactcaaagtggaaattagttgaaaatagtttgagt

SEQ ID NO: 82454 - DNA, 234 bp, Glycine max
  Clone ID: 700958552H1
gcaacctagcaatggaggcgattaggaagagtttgattcttatagttggaggaactggttacatagggaagtatatggtgaaggcaagcgtcacgttaggccatccaacttttgtctacactcgccctcttgatgcacaaactccttcctctaaggcacagctttgcaaggagttcaactctatgggggtcacacttgtccatggagaacttgagcatgaccagattctggcag

SEQ ID NO: 82455 - DNA, 233 bp, Glycine max
  Clone ID: 700958555H1
cgccctcttcttgaggttgaccctccaaacacttctgctagctctgatcaaaagatttcagagaagccccttgagcaggaacctaggtttgctgcaagagtcacaattgaggatggtctttgtcttcttcttgatgtggatgatattgatcgttacctacagttgaatcagccacaagatagtggaacacatttaagacgaagaaggcaagtcctgttggaaggactagcaac

SEQ ID NO: 82456 - DNA, 233 bp, Glycine max
  Clone ID: 700958557H1
acgaaatatggcttcaactcatctgcttcccctagcaaccttcttcttacttctctccgcttcttatctccagattgctggggcggaagcacaaccgttgactagtctcaagcttaactctcatattcttcaggagtctactgctaaagagattaatgaaaatcccgaggcaggatgggaggctgctataaatcctcgtttctccaattatacagttgaacaatttaagcgcc

SEQ ID NO: 82457 - DNA, 225 bp, Glycine max
  Clone ID: 700958558H1
agtacttgtgttacttctccttggttgcaccatgtcttgctatttgtatcatcttgtgtaccttcttaagctttgagcaattcccttttacttttatttcactccatgatcatcactcacacatcaaatactattactagctccttgtatgagtgtcattccttctagctaaatctctctcttttggggtatggaattcaacaagttcagaatcagaagctatga

SEQ ID NO: 82458 - DNA, 230 bp, Glycine max
  Clone ID: 700958559H1
atttattggaccgtttaatttgtgattcacattaatttctcaagcaccagagtttttagattcactcttctgaatgtggttgtagtgagagagaaaaaaaagaggccaaaattgtttgtttgtttgtttgttgagtaagggttttgcgttgcgttatggctgaatcatcggcgtgtcttgttcgatccttctcctctcccgcagaaactacttgttacgagggtaacccc

SEQ ID NO: 82459 - DNA, 233 bp, Glycine max
  Clone ID: 700958562H1
ttcactttcacccttcggttctcgatgtcagcgtttgacaatgttgttggtgggaaattgaagttgaagggaaaagcactggatgtggctggtggagtgaagaagaagaaaaagaagaacaagagaaatcaggaacaacttctgcaagtcgccgaagatgaagtttcagcaggtggaaatacagaacaggccaaagatcctaatgatggagatataaatgatgtgagtgaatt

SEQ ID NO: 82460 - DNA, 231 bp, Glycine max
  Clone ID: 700958571H1
ggctcgaggtactcagctgggataacaagcttgctggtgctcaggttcttctgagtcgtttgaggttgttcttgagtcctgggtatccatatgaagaaattttgaggacctttcacaatcagacaagcataatcatgtgctcctatctaccagttttcacaagctttaacagaaccaaaggtggcttgattcaattaaaccatggtaggcctcagcctctccaatatgtgg

SEQ ID NO: 82461 - DNA, 82 bp, Glycine max
  Clone ID: 700958572H1
gcattccgcaatcgtccagatcggagtgtgaaatctatgagattgtagtgctggtttccttcggaatggctgccataggtca

SEQ ID NO: 82462 - DNA, 229 bp, Glycine max
  Clone ID: 700958573H1
actccgtgccctagcttcttcttcctcctcctcctctgccattgcagcaaggcacacacctcaggctccaacccatttcacgagtgatcggattcgctcgccatcatggggaagaagaagaagagagtttcctcgaaggtgtggtgttattactgcgatcgcgaattcgacgacgagaagatcttggtgcagcatcagaaagccaagcactttaagtgccatgtctgcc

SEQ ID NO: 82463 - DNA, 230 bp, Glycine max
  Clone ID: 700958574H1
cgagtttcgtttaatatttgttcctcacagatcttaacactttaaagttcaatctccccattttccatatcatacgctaacaaattaagaatatataaaagaagatgaggtcttcaatcatatttctttgcattctggtgtatctgaacgtgttagctgcggaattgtcagcttacgacgttcttgagaaatacgatctcccagttgggcttcttccaaaaggtgccaca

SEQ ID NO: 82464 - DNA, 229 bp, Glycine max
  Clone ID: 700958576H1
aaaagaaagaatatcttttatgtatccaccaaatttatcaacttttcataaaatgatggaaaccaaattttatctcttcacaaaagataaaatttcctatgatgaattgtctaattattggagctatactaatgaagaaaaaagaaacaaattgagcaatgaatttgtaaatagggcaaaagtaatggataaggaattaatttctctggatatattagaaaaccgaatt

SEQ ID NO: 82465 - DNA, 225 bp, Glycine max
  Clone ID: 700958577H1
ctcactcactagcttctgctctgttctcaccaatggcatcaacaatatcagcaatggccatgatcaacgccaaatgcgtcaacccaaagttccccagtcccaccaagctcgcaccatcgtaaccctcccttcagatcaaccgtccaaagggcctcatatcctcacccgaaagcactaaactttcccccgcgacagctatcgcaggagcaatattcacaaccctcg

SEQ ID NO: 82466 - DNA, 75 bp, Glycine max
  Clone ID: 700958578H1
actttttccttattcaccaaaacggcgtcgttttgatttggggggaaacagcacaacacgtcgaactaccctccg

SEQ ID NO: 82467 - DNA, 129 bp, Glycine max
  Clone ID: 700958579H1
ccctagggctttgagaaaaccacattgcccgaaggcagataagcaaacgcagggaagaaaaaaagataaaagagtttcataataatcataagctgttagagatgaagaatggactcgacaccacccatg

SEQ ID NO: 82468 - DNA, 238 bp, Glycine max
  Clone ID: 700958580H1
atgctgctgtcagatctccaaacactgatggcatcaacccagattctatgcacgaatgtgagaattgaaggtggcgaggtagtttctggggatgactgtgtggcggttaagagtggatgggatgagtatggcataaaatttgggtggcccaccaaacagctagtgctaagaaggctaacatgcatctcaccatacagtgcaaccattgccttgggaagtgagatgtcaggtggaatcc

SEQ ID NO: 82469 - DNA, 269 bp, Glycine max
  Clone ID: 700958581H1
tacgtaatctccgcgttcggctcctcggaatttcgctcgagaagtgctatctttactttatgtcccatggaaggtccttagttttctctctcttcatctcatagtttcactctcactcttcttcttcttcttcttcatcctttctgatctgtgctgttttttcagggtacaacaaaatttggtgctttcggttaaactgtgatgtctccgccagtgctgagcataggggatgacgtctgttatagcaatgtcacttcgttagtgtcctc

SEQ ID NO: 82470 - DNA, 208 bp, Glycine max
  Clone ID: 700958583H1
gttgaagaaagtggcgatgatgccgtaccccaaaaacacgaacgaggaagccaaagccaacaaagccagaaaacccaaaccaccaccgagtttcgtttctcgtttcaccaccactttctcctcgatggcgcgaaaactccttctgaagcaaaccctagctacgcactttctcttcttcgtgctttatgcaatcttcaacgccttcttc

SEQ ID NO: 82471 - DNA, 230 bp, Glycine max
  unsure (1)..(230): unsure at all n locations
  Clone ID: 700958584H1
cagtccccaaaagcgaaaggcntcttccagtgaacaaccgggccgttgtcgccgacaatggcggccacgccaccccctccgtctttctcgcttcattcaaacaaaccctctcactctcactctctgcttcgcctctcttccaacgaaaacagaacctttttctctttcaattcgaatctgaggtgcgagatcaaaggcttcgagagccaccgtggctggaccatcgagcg

SEQ ID NO: 82472 - DNA, 232 bp, Glycine max
  Clone ID: 700958585H1
tgatatcactcaaaaaaaacaaaaacagaaacaaaagatggttcatcagaggcaaaacaacatccatgttcttgttcttccataccctgcccaaggccacatcaacccccttgcccaattcgcaaaaagattagcttcaaagggtgtcaaagccacagttgccaccacccactacactgccaactccatcaatgcacccaacatcacggtcgaagccatctccgatggtttc

SEQ ID NO: 82473 - DNA, 228 bp, Glycine max
  Clone ID: 700958587H1
atttatattagatgctgagttgcttagccggaatccatcgccgttaatgttaacattttgcaaatatgtctctctctctttggggctgcttgcatatatttaggaaggataacagaaggatgtagattttgtatcatagctattttcccaagtattttgccagcaagctttagaattagaagcttggagcatattttgattgatttgctgcacaggtagctgctgatc

SEQ ID NO: 82474 - DNA, 231 bp, Glycine max
  Clone ID: 700958588H1
gtcgaggagtctttctctctctcccttgaaggctgctgcttctgagaacggcgtcgggaccgccgtggagcctccgccggagcaggccgtgccggtgccggagccttctctgcctccggtggacaatagttctgtggggaccaatgggtctgctgttgcggttgagagtgaggtggttaaggttcaaagtagtttcgtggatccgaggtgggttgcaggaacatgggattt

SEQ ID NO: 82475 - DNA, 225 bp, Glycine max
  Clone ID: 700958589H1
caaggcgcttggagtggataccattcccgtactcgttggccctgttacatacttgttgctctccaagcctgccaagggagtcgagaaatccttttctctcctctctctccttcccaaggttcttgctgtctacaaggaagttattgctgaccttaaggcagctggtgcttcatggattcaatttgatgagcctacccttgtcttggaccttgaatctcacaagtt

SEQ ID NO: 82476 - DNA, 229 bp, Glycine max
  Clone ID: 700958590H1
aatccatcatccaaacctttccgatccaatgacctctaaactaattgcttccaatctccgtcaccaaatcacaaaatcagctcaaaaccttcgccgccagcttctttccacggcggcggcggtggccggtgcctgaacacgatgggaacaactccaactcgtcgggaatgacgatgaagggcgttcgaatctccggaagacccctttacctggacgtgcaggcaacatc

SEQ ID NO: 82477 - DNA, 223 bp, Glycine max
  Clone ID: 700958591H1
caagtgataggttgcaaatatgggatggtggggagagtgatgctagaactccaactatggggagtgatttggatgaagatttgatggctttacgtgtagatgatggtagtgaaagtttgactcaactccaacctctgaaagcacccaagaaatcaaagaggcagggagagaccatatgcaaaggacacaaaaattatgagcttatgcttaatttgcagctggg

SEQ ID NO: 82478 - DNA, 70 bp, Glycine max
  Clone ID: 700958593H1
ctccatatccccccctagcttcagagcagctaaaggggaggaataataataagcctatattctaaggccg

SEQ ID NO: 82479 - DNA, 228 bp, Glycine max
  Clone ID: 700958594H1
ttaaacgatggcaggaggagcttatgtagattcgggaaatgcaaagcaatttgatgggaaggtcacggcattcgtattggttacatgctttgtggcagccatgggaggcttactcttcggttatgatcttggaataaccggaggagtgacttctatggaaccatttctcatcaaattctttcccggtgtttataaacaaatgcaagatgatgttggccatagaagcca

SEQ ID NO: 82480 - DNA, 236 bp, Glycine max
  Clone ID: 700958596H1
cttgtcctgcttttccatccatttatgtgacaaaggaaaaattgcctgagctggttcaatcactatggaatcctgcaattgtattgacccacaagtgccagctgatgacttattgatgaaataccaatatatctctgatttcttcattgcccttgcttatttctcaatccctttggagcttatctactttgttaagaaatcagcagtatttccatatagatgggtccttgttcagt

SEQ ID NO: 82481 - DNA, 272 bp, Glycine max
  Clone ID: 700958601H1
ctctcatttttttaggctcataaatcttttttatgggtttcagggtcactactactctgtctctgctctccctgttttggctcttgtccctgcaccaagcaagagctgcaaagttccacaatgtgagtggcttgagagggaaaaagcagttgtagcaaatgggtgcaatttgttcctgggaagttgggtggttgacacgtcttatcctctctatgactcttcaacatgccccttcattgatcccgagtttgattgccaaaagtatggaagac

SEQ ID NO: 82482 - DNA, 265 bp, Glycine max
  Clone ID: 700958603H1
gtttagttatctactcttttctgcatgtttgttctctcaacgactcctccgcgaaagagtattattcaatattttggttcggttgaatcccggggttgaagcgttgcagacatcacggctattctaagagtgtctcgctccctattcatgtccgatctgtacgacggatgacgggtagttgcgtaactgccgttaacccttcgccgcacggtgggcgtggtgctttgccttctgaaggtggtagcccttcagacttgctcttcct

SEQ ID NO: 82483 - DNA, 264 bp, Glycine max
  Clone ID: 700958604H1
tcaacacctcctccctcactcactcatcaatggcatcaacaatatcagcaatggccatgatcaacgccaaatgcgtcaacccaaagttccccaaccccaccaagctcgtaccatcaaaaccttcccttcaggtcaaccttccaagggcctaatagcctcacccgaaaacaccaaactttccactgcgacagaatcgcaggagcaatattcacaaccctcggaacctgcgacgccgctttcgccgttcaacaaatagccgacata

SEQ ID NO: 82484 - DNA, 271 bp, Glycine max
  Clone ID: 700958605H1
cagaattctgctcaattgtgtattggcacagataagtggatgattccgatgctattagagacatattctggacacatccagacgccattaaacttctgggtgctttcaacactgtattggtcattgatagtaacgataaaaccactaggtatcagtaccactacttgagatcgttggagttacttcaaccgagttaacattctctgctgcatttgcttttgtggagtctgagcgagctgaaaattttacttgtgcactaaaaagattaaga

SEQ ID NO: 82485 - DNA, 260 bp, Glycine max
  Clone ID: 700958608H1
ttctctttcgaggaatggggtggtggagaaggtggcaaatgacaattcaagtgaataatggagaacaactacaacaaccacaacctcatcgtccctaatcctcaagattcactgtggatgatgaatttgaggactggggaacaatggattctggatcttatccggagcgtccaggggagccggattgttcatattacatgagaacaggcctttgtagatttggtgcaacgtgtcgatttaatcatcctcctaacaggaag

SEQ ID NO: 82486 - DNA, 259 bp, Glycine max
  Clone ID: 700958609H1
gatggtaagagtggaacgaataaggcgtatgcaaagtgtgtttaacagagaaaggaataagtataaaagaagctatgagagctggaggggaagtggtcctggtgcatatcatcagcatttccaaagagaagattggtgcggaaggctgatacatcctttagagacaagaggactaattatcaagaaactccaagagagagtggaaactatgcattatcacatcattactcagttttgggtctcgacaggtactcacaga

SEQ ID NO: 82487 - DNA, 255 bp, Glycine max
  Clone ID: 700958610H1
cgtaaaatcactattgctcctctggctattggaaatatcagatcatcgaaccaaccaaacgaaggcagaaacaggcaaagagctcatagaaattctcgtcctcttcctacataagtcttctcttatcataaacgcgtgtgctcggataaggttgtgctgcggtgattcactcgtactttgcttaatatggcggttgagaagttgagcattgcaaaagatgtgactgaattaattggcaaaactccattggtatat

SEQ ID NO: 82488 - DNA, 257 bp, Glycine max
  Clone ID: 700958612H1
cactcgtcttgtctcaaacaaatgcaacaaccacttattcttatagttactatggactaggaacaagatttgattctcattctgatatcagattcagatttttttaaaagagactcacgctggcggtgaagaacgttctgcggcggcggcggaggaggaggaacaggttaacatgactctgatttccaattccgacgtcgaaagccacgccgacgtccaaatccccgacaccgcgcatcaaattagcaccgattcat

SEQ ID NO: 82489 - DNA, 257 bp, Glycine max
  Clone ID: 700958613H1
aactactactcacactcactgcagatctcaatccatggctaccattgttagcatcaaggcccgccagatctttgacagtcgtggcaatccaaccgtcgaggtggatttgacatgctccgatggtacttttgctagagcgctgttccaagtggtgcatccactgggatttatgaggcccttgaattgagagatggaggatctgactaccttggaaagggtgtatcaaaggctgttgacaatgtgaacaccattattgc

SEQ ID NO: 82490 - DNA, 256 bp, Glycine max
  Clone ID: 700958614H1
atctcctgctacattcagagttcttcccctaaactggactgttgggatggttggaatactagcaggcactgttgaggacgcattcattgtttatgcagctatcagtggtgagattccatatcataaaaccttcagtgtacgaccaagataaatcttccacggctgagcttgacaaagtccatatctgacatcaagttagcaaaatacgggaagtggtttgatgattgcagtgatgatgtcagaatatgctgcacca

SEQ ID NO: 82491 - DNA, 261 bp, Glycine max
  Clone ID: 700958615H1
ctcagacacacacacacaacgcagtgagagagagtgagggtttctattttaacgttttcgttgttattcctttacagctcaacctgcatttctctctcacacactcgcatctcagatcgaaatcgaggtcactgagtgagagtgtttacgttattctgcgctgttgatgttcatacaaactagatagctacatggtggagagagacatttttctcatatgacttctattagctatattattattgagcggtgttgctatgg

SEQ ID NO: 82492 - DNA, 263 bp, Glycine max
  Clone ID: 700958616H1
tcgattccaaaagctgcttcctctcataaattctctttcaacgcataatcattccatttagttatcatctgtgacaccatcacactgcgatcatcatcctcattcctactttgcacacccttatgacaatgatgatgtcatgacttagattcattggtcacagtcacagactctgaagaagaaaaacaacagctttgaattgattacaatacaaccttaaacgatgtcgttgaaccgtggtggaggaggagaagaagatgaac

SEQ ID NO: 82493 - DNA, 258 bp, Glycine max
  Clone ID: 700958620H1
gatcgttggactgacgggtggaatagcgtctggaaagagcaccgtttccaatctgttcaagtcccatgatgtgcccattgtagatgctgacgttgtcgctcgcgaggtgttaatgaaagggagtggtggttggaagaaatcgttgcagcttttgtggacgaaattcttcttgaaaatggagaagtcaatagacccaggcttggccaaattgtcttctccgatccggataagcgtcaatttctcaaccgattgctagct

SEQ ID NO: 82494 - DNA, 258 bp, Glycine max
  Clone ID: 700958624H1
ctcgagccgtttgtcggaaaccaaaccccgaccaacctctctcccccaccttcgcgttctgcttcagctgagagtggttgggctctgcaaaaattagctgcatgagctggtttgggaaactccgtttattctccaatttaatccctttcacttcattacttctttgttaatttttaccctccatttttcaccccaatcgcgcttctccctccaacccctgttattgatccacgctaaaaccaatctcaatcgtaattt

SEQ ID NO: 82495 - DNA, 254 bp, Glycine max
  Clone ID: 700958626H1
gcatcctagtgatgacagaagacagtttcaaggtagcagggaaaggggatggttttctggcagccgagacttgaataggtcaacgtcaagagagagatggtgaacagcagttttgtgtggattaagagttatcttaacttttgatgaccagaacctaatactactattttattacttgtcttttctaatcgttttgttcattttactccaggcaattggagcaacaatcattgagtactggcactaaaactttt

SEQ ID NO: 82496 - DNA, 254 bp, Glycine max
  Clone ID: 700958627H1
ggcaaacagaaacaccctttctagcattgcgatttgatctctccaccttggtgaaagccttgtgaaacataaggcttttacagaaggtggaattttgactagaagggatgtttggctgttgagtttatggagggtcagctctttgttgaatagtgtttgtgttgcctttatctgcaacttttaattgaaccaatcctaccctttttatgaacatatgaaaagatcggttttttgtggttcctccactcattgtt

SEQ ID NO: 82497 - DNA, 254 bp, Glycine max
  Clone ID: 700958628H1
actgatgctaatccagttaagaagtctattgttagtcttggaaagtctccttcatacaaggaagtggccttagctcctccagggacaatctctaagtttcaggtctaacatcctcaaagtctgatttctgttagcatgagcatgatggtggaaaacatgaagaggaagatattgaagctgatagaaatgttaatgttgatccaaccccgacagaggtaaatgatatggttaaagagaagaatgatgattcttta

SEQ ID NO: 82498 - DNA, 258 bp, Glycine max
  Clone ID: 700958630H1
tctttctgtctctctccattgcaccttcccttcttccccttcttcttcttttctgtcatttgtgagattccttcacttgttttctctattccattggagtgtacagattcctagctaaaacacccagatgtcaatctcgtaattctatttgatttgtgggtgtttctgtgaaaaaaagaattttttttaaggactgtcaaacccaaaactttttttttgggtcttttggtttctgcttctttcatttttgcaaactgg

SEQ ID NO: 82499 - DNA, 259 bp, Glycine max
  Clone ID: 700958631H1
gtggattttatccatgctaaagcaaaacacctgactctgaacgccgtcgtttcaccgtctctcgttgatgttcacccttgctttaaggaggagtttttcgcttacgacatgacaatctcctacgccggccacaacaccccctcgccgccgtccaggtgacggaactcgccgacggcgtcttcgtcggctgcaccgtcaaccactccgtcaccgacggcacctcgttctggcacttcttcaacacgttcgccgccgtcac

SEQ ID NO: 82500 - DNA, 268 bp, Glycine max
  Clone ID: 700958633H1
gtgacacagaaattaagctagagcttcatagtttcttcttcttttctcaccttccttctctcccttcagacaaagggacaaaaaatcagtgtgtgagagagagagagagaaattccaaaaccatgtcccacagtcatctaagttcgcctttgggattctaggtaacattgcctccttcgtgtgctttctggcaccactaccaacattttatagagtttgtaagaagaaatcaaccgaagggttccaatcaattccatatgtggctgca

SEQ ID NO: 82501 - DNA, 262 bp, Glycine max
  Clone ID: 700958634H1
cataaataccgcggacacacattggatagggggcagagcttgaattgaatcatctcccacacccatcatccattggcatctccgatgagatgttcctttattaggcctatcgtgggcttttatttgttgggctctaagacttacctacgtgggcttttgttataggcccacagaagccggcccatggtgtaaggtgaaagccgtaattcaactttctcaggggtgggtggatgggtgtttgtttcaattcgattgcttctct

SEQ ID NO: 82502 - DNA, 259 bp, Glycine max
  Clone ID: 700958639H1
ctctgccttgctcatttacacacctctccaacctttcactttcagctttatttgaatccctctctctcctttccaaatggccagcgttgaggttgcacatcaaacaccaacaacagttccagaaaatgaaacaaccgagtaatcaagacccaggaaacaaccccggaaccagtaccagccactgaggctcctgcaacagaacaagcagcagctgaggttcctgctcaagaagaacaacaagcaactgaggttcctgccc

SEQ ID NO: 82503 - DNA, 261 bp, Glycine max
  Clone ID: 700958640H1
gagaccaagtaaggtataccatttgagaatggcttcttgtgtagcatccatgtcttctaccatcctcatcctaattgccatctgcacactgtcctcacttctgtcagctgcatctgcagcaacagaggagggacgaacaagcccttcaaaagggtctatgcctttggagactctttcacagacactggcaacaccaaaaatgccgaaggtccaagtggctttggtcatgtttcaaactctccctacggcaccactttcttc

SEQ ID NO: 82504 - DNA, 252 bp, Glycine max
  Clone ID: 700958641H1
ctcgagccgttatgatcgatgtttatgtgtgcatgtatgttcattttctttcgagggatatgatgtattatgcgtctcttatgctgagttacttgtcgctgtatggagatctgagtgagtgacctttcaccatgagatgaaaccatcgacgtgggacctgtcaagaaaatcaaatctcgagagatacaggtgttgccagcggaaatagatctggaagtatcagaggtgatgaagttttgttccgagatggca

SEQ ID NO: 82505 - DNA, 253 bp, Glycine max
  Clone ID: 700958642H1
aaaaaacacagttcagcccctagggttcagttggggtttagggttctctcatcacatcggtgttatcactgtcacggcgtgagcgcatctcatcgttgagtataataatggattcggacactgaagaaacaaaaccaagcatcccaagaaggagaagaaaaagaagaacaagaagaaagaggttgaggttgtccaacctcaatctgaacagattgaggttgaggtcgaggttgtccgtgagcaccccaataaa

SEQ ID NO: 82506 - DNA, 251 bp, Glycine max
  Clone ID: 700958643H1
ctttgaggaaactctcattgtgcaattataggattcgtagtgccttgaaatcatctggacttggacttgtgctcttgtagtttgatactattcagttttggtttcactatgtaattggtaaaaccattcatttgtttgttttattagcttgttgtttcaacattatttcttgttcctttcaaatattggcaattaacatattaggttttcagggtatgtgagagcccatcttatggcagactttctgctaa

SEQ ID NO: 82507 - DNA, 253 bp, Glycine max
  Clone ID: 700958644H1
gtctggtgcataaacctcaacaacacactcttcaattttctagggtttgagttttgctccctttttcttcgccttctccaatggccgcttcctcgctcctgagatccgcgcttctcgctccttcctcctgcgatgccccaaggtatataccaatgcctcaagttctaatttaaaatccaagggattacatagcagcatttttggtacttcaattcaatgtgactccttagtcttacaaaattgcaatggtcgt

SEQ ID NO: 82508 - DNA, 193 bp, Glycine max
  Clone ID: 700958649H1
cgcaaaacgcctatacttagtcctccaccacttgaagacgttggttataaacttgctatttatccaatttccttgattggggtttacatacgagcaatgcaggatgcactcactgctattaaaggaggcgctgttcctcctcgggaagcatgccatcttttgaagacatcaaggacatcgtaggtttcaactc

SEQ ID NO: 82509 - DNA, 253 bp, Glycine max
  Clone ID: 700958656H1
gtgccccttctgtaagtttgactgtggcattgttggtggcttgcgtgagaataagaagattttcttggccttggatggtaatgtgctcccagttgtgtttgagagagcataataaatgtgtatcttcaattaattgtgtttgtgttgtgtgcttgaaatttcttttcctgtaatgttggctaataattggagctaccgtatgtcgatgtataagaccaaggaaagatatacatgtctcttttttattttatta

SEQ ID NO: 82510 - DNA, 252 bp, Glycine max
  Clone ID: 700958657H1
gcaggtctggaagggccaaggatcaagaaagtggaaacatgcccagagtgatggtttctttgttcaatttgagtcaccttccctgcgaaagttgtggtttatacccagttcgaatgaaaagggacagacctggtgcaggtttctctcccacttttactcgcaacacttatttactgaatataagttttgtagtttatggagggtgatattgcgaggattgattgttcttttatcaaaatgaaaaacaaggag

SEQ ID NO: 82511 - DNA, 250 bp, Glycine max
  Clone ID: 700958658H1
caaaaacaaagtttcatactttacgacacccttttctgcaactgatgatcgaaggaagctgaaacagtgaaaaacagcaacaacgaccaccctgtctttgttttttgtttgttgagttgaaactttagagaaatgaatagtgatatggaggcaaagggtgtgcggttcttagcgtatcaatcaatattttcgagcgttggatctggggacttcgatggggtgaagaaactggtggaggaagtgaagaagg

SEQ ID NO: 82512 - DNA, 238 bp, Glycine max
  Clone ID: 700958661H1
gtcacttttatacaaaatcagttagtgaatgatgaggtgctttctaccgtgctttcgtacttctaaaccggggaaccactaccgtgccgccgatgaagcccaaaaccatgtgggagaaggagctgttgaagactcattgattccatagcagagtcaaagtaagcaatccattcattcctgtgagtattttgagaatatatatttattatcctgtcatttacgctttcagaacaacaaa

SEQ ID NO: 82513 - DNA, 262 bp, Glycine max
  Clone ID: 700958665H1
caaagggatttttagaagttagtttttcccttgctggaaattcttgttgagaaccccagcaaacagccaaccccaatatcttctatttgacctttcctattttcaaggtttcacttgtggttcgagttcaatttgcaattaattgataagtttctgttatctgctattgaggatgactaacggttttgtaatacaggaagtttagacgtggttcagcgaacacattaaaaaaatcgtgtttttattttatatttatactgta

SEQ ID NO: 82514 - DNA, 255 bp, Glycine max
  Clone ID: 700958666H1
acagggcatgaatctagtgtggatcgtcttatgaagcagatcataaatttcctgtctgatattgctgatgtcttcaaaattgttgttgttgaagcaataagatcattgtgcctgcagtatcctttaaaatatcgatctcgatgaacttcctgagtaatattcttcgggaagaatggggttttgattaccagaaggccattgtagcttcaattgtgattctcattatagatatccctgatgcacaggtcatggggt

SEQ ID NO: 82515 - DNA, 253 bp, Glycine max
  Clone ID: 700958668H1
ggaaggttgcttgtattggtgcctggcatcctgcaagagtttcattcactgttgccagggctggtcagaatggataccaccaccgaactgagttgaacaagaaggtttacaagcttggcaaagctggagatgaactcactctgctcttactgagtttgataggtaagtgttttgttgattatggttttgtgcaataaatttagcaggaagtattgtgtttgtaagtcaaactaacccctctacttgttttctg

SEQ ID NO: 82516 - DNA, 255 bp, Glycine max
  Clone ID: 700958671H1
tggagagaaatcgaaagacatcaggttccaagtctgatggatctgcaagacggatgaaggaagttgcatgtcccatttgcactgtccatctgcaggttcaggtgcctagctcgggttcagagacaattgagtgtgagtttgccagcacccatttcttgtgagcgctcattgagttcagataaacatgaatacggaagcggtgtctacgtgtttcataagtttaaaatgcatttgttctactgatctatctcttgc

SEQ ID NO: 82517 - DNA, 249 bp, Glycine max
  Clone ID: 700958675H1
gtttgtgttgaagaatttgacagagtgagaaatatagaaatggcgtcgtggtgcggtgctcggagcttccagattccggcgatggaagacagcgcactgcgcaaccgtgcttcattggccgccggagtaggtgtttgtcggtggccggcacctccttctggcgctcctcttcgtcaccgaagcgctctttgccattcacatgcttgagcatttcttccgatactcgtattaaggaaagtgttcaaactg

SEQ ID NO: 82518 - DNA, 250 bp, Glycine max
  Clone ID: 700958677H1
ttaacaacagcacaaagcgggttactgtctgttcaagctaccatctctctctctctttcttagtgcctccttgccagaagttaaaatggcccaagaaactttcctattcacatctgaatcagtgaacgaggggaccctgacaagctctgtgaccagatctccgatgctgtgctcgatgcatgcttggagcaggaccctgacagcaaggttgcctgtgaaacctgcaccaagaccaacatggtgatggttt

SEQ ID NO: 82519 - DNA, 253 bp, Glycine max
  Clone ID: 700958678H1
aaaggactcaccgatgcatcaaagatagccattttgaatgcaaactacatggcaaaacgattggagaattattacccgcttcttttccgtggagtcaatggaacagttgctcatgaattcatcattgacttgaaggctttaagaatactgctggaattgagcctgaagatgttgcaaagcgcctcatggactacggttttcatgcaccaacaatgtcatggcctgtgcctggcacactcatgattgagcctac

SEQ ID NO: 82520 - DNA, 255 bp, Glycine max
  Clone ID: 700958679H1
atcagtttttgtggagggtgttgcctttgcttacaatccttgtttcctttggagtgttcttctacttgcaggattcttacacagcacagttatttcctctcataaagttaccgcgggataagtgcagccttcttcccatcgccacttctggatatccagcaaacgtattgtgaccccacaagggatcatttctggttcagtggagataaatgatgggaaaataatatctgtcgttgagggacatgctattcaggg

SEQ ID NO: 82521 - DNA, 249 bp, Glycine max
  Clone ID: 700958684H1
ctcaatttgtggcttggacaggttgacgaagaatccaatttctcttgctattgtatgcatttcgttgagaaagagtgtttcagatcccgaaccgcatcgtacggtaccacaagtacgagttactgttatagtattggtagtagcgttagcgtgatcagatcagaattgtgatcgtggatcgaagcaatgttcaaattcttgaaagaggtggtgagtggatctggcacgggcctcaaagatctcccacac

SEQ ID NO: 82522 - DNA, 252 bp, Glycine max
  Clone ID: 700958685H1
caggaaacagaagccatgagaaggaaattgcaggctacgaagcagaacaagtttatgctggaagatgaagttaggtaatgtttttcatgcctcaaagtagtaggtggtttttcatagtttgcagtttattgtattcataaaatggttattgactgttcatagtttgcggtttgttgttatcctcaccactgtctctcttgtaagctgcagatttttgaggcaacgttacaattacttgctaaaacaccctat

SEQ ID NO: 82523 - DNA, 254 bp, Glycine max
  Clone ID: 700958687H1
agcagatgcagcagctggggacacttggctgacacccaccagcagaagaagccgaacccacatcgaacccaccactgaaccttagaaactcctgctgctgttggtgttcgtaactcctaaacatctcttgctgtccctcgccgccacagcggcagccaactgctgcgcctccaagatctgctgctgctgctgctgaggcgccggctgtgcgtcgcgaatcaccaactgcccgccgtgaacagcggccgtcgcag

SEQ ID NO: 82524 - DNA, 252 bp, Glycine max
  Clone ID: 700958688H1
tgcagatgcagcctatgatggcagcctactaccccaacaacgtcactactgatcacattcagcagtatctggatgagaacaagtccttaattctgaagattgttgaaagccagaattcaggcaagcttagcgatgtgccgagaaccaagcaaggcttcagagaaatctcatgtacttagctgcaatagctgattctcaaccccaaccacccaccatgcctggtcagtaccctccgagtgggatgatgcagca

SEQ ID NO: 82525 - DNA, 239 bp, Glycine max
  Clone ID: 700958020H1
agctatttctttgttttcttgcttggaggcattcttgactgaagaacctcttggaccagatgacatgtggtactgccctagatgcaaggaacacagacaagctacaaagaagcttgacttgtggaaattgccggagattcttgtttttcacttaaaacgattctcatacagcagatacctgaaaaacaaacttgacacttttgtaaattttcccattcacaatctggatttaaccaaat

SEQ ID NO: 82526 - DNA, 237 bp, Glycine max
  Clone ID: 700958021H1
aagccttgctttcaattttcccttacaaaaaaatcctatcccttctctagtccccataactagcaaaaagagccaatagaaaactgttccatatagtttcccattcaaacttgttttgattttcattttaactcaatggagaatagaacaagctctgtactcccacctggcttcaggtttcaccccactgatgaggaactaattgtgtactacctttgcaaccaagcctcatcaagg

SEQ ID NO: 82527 - DNA, 176 bp, Glycine max
  Clone ID: 700958022H1
gatctaccgccttggtctatcagtattcttcctgattgcaaaactgttgtttacaacacaacaaaggttggttacggctggctgaaaaagatgactcctgtaaacagtgcatttgcttggcagtcatacaatgaagaacctgcctcatccagtcaagctgattccattgcagcata

SEQ ID NO: 82528 - DNA, 238 bp, Glycine max
  Clone ID: 700958023H1
aggtggagctgcttttgggttccagagactcctgaagatgctgccagagtggggcttgtcagtgggaaggataatataatagatcgtagtattcaagatgcttatgttaatgccattcgacgtgcgaaaaatttcatctatattgagaatcagtatttccttggaagcagttatgattggagtgctgatggaattaagcctgaagccatcgatgctttgcatattatcccgagagagc

SEQ ID NO: 82529 - DNA, 237 bp, Glycine max
  Clone ID: 700958025H1
gattaacaagctatgtgccccatatattgataccgttgggtatcgggtgttcttgggcttgaaccagtactttgttgcttcagatgttggccatgggaagatgcagtggtatgctttccatggggaacccccttcaagtgaccctttcccagaaggtaagaagaagaggcttttggatctctttggtaattggtgcgatgaagtgattgcactcatatcagaaattcagaacatatg

SEQ ID NO: 82530 - DNA, 122 bp, Glycine max
  Clone ID: 700958026H1
aacacgttcccattcctctctcgctaacctcaccggcagcgccttcacggtcatcgtagccgacaccccccctccctgtcttaatggcatcaatcccagtcgcgtgttccacacaacatagg

SEQ ID NO: 82531 - DNA, 240 bp, Glycine max
  Clone ID: 700958028H1
tggcgttggagcaagcagtatcatcgtcatcaagcacattgaggaacgttatcaccttccccagaaccctaatttacagaccccaattccaagtcgctgcttctcactcatggaaaacacagcggcgttgggggaacttgaagtgctccatgacgacaacgccaacataccctaagccctcggagattccgtggcagaaggagctctgcaactccgtcaacctcatcggcaatgtcgcgg

SEQ ID NO: 82532 - DNA, 244 bp, Glycine max
  Clone ID: 700958032H1
cacaatgtctgaagtgaatgcgaccctgaaattcctcaaagcaacaccatctacatcagcaacctcaacgagaaaattaagattgatgagttgaagaagtctctgaacgctgttttcactcagttcgggaagatacttgaggtgttagcattcaaaaccctaaagcacaaaggtcaagcttgggtggtctttgaagatgcatcttctgcttccaacgccctaaggcaaatgcaagagaatacag

SEQ ID NO: 82533 - DNA, 197 bp, Glycine max
  Clone ID: 700958033H1
gctcccggtattatttcgagacgttccgtatatgagcctctccaaacaggacttattgatattgattcgatgatccccataggacgtggccaacgagaattaattattggagacagacaaacgggtaaaacagcagtagccacagatactattctcaatcaacagggacaaaatgtaatatgtggttatgtagctat

SEQ ID NO: 82534 - DNA, 108 bp, Glycine max
  Clone ID: 700958034H1
ctcaaactcactctttctaagttttttctatctctttctctctctctctgtctgccatggttctctccaaaaccacctccgaatccgacgtctctgtccacacaacat

SEQ ID NO: 82535 - DNA, 221 bp, Glycine max
  Clone ID: 700958035H1
atcatggccctcctcgtgattgagaaaatccattaaccgttccttgaaagaaagataaccgagctttgagaaggtaggaaatgaatgattgtaagaatcttgtttatgtaagtaggatttggtttcatcacataacctcattttcttttatttttctttccttgtcttttgcagttaaacctgccctgttttttaatgttttgattgtggtgactaagaat

SEQ ID NO: 82536 - DNA, 73 bp, Glycine max
  Clone ID: 700958036H1
ggccacatggtgccagccgccgacatggccaaattatttgccgagaagggtgtgaaggccactataatcacca

SEQ ID NO: 82537 - DNA, 236 bp, Glycine max
  Clone ID: 700958038H1
acaacacaaggagtggtctggtgtgaaccatagccatggctacttcatcatccacttcactgtatcatcactcatacctgcaagcatcccatcattcaactatggaaaccatttagtttttttgctacaaaaccgttctttgaatcgtcccaagaagagagtttccttcgttgttcaagcagccaagccccctaatggtgtggaaattccaaaggtgaagcctcgatttaagcctc

SEQ ID NO: 82538 - DNA, 240 bp, Glycine max
  Clone ID: 700958039H1
gatggatccagacgcgttggcaaaggcattcgtggagcactactacagcaccttcgacaccaacaggaacggcttagcgaatctctaccaggagggttccatgctcactttcgaagggcagaagatccaaggcgcttccaacatcgttgccaagctcacctccctcccttttcagcagtgccaccactcaatctccaccgtcgactgccagccctccggcgtcaacgccggcatgctcgt

SEQ ID NO: 82539 - DNA, 240 bp, Glycine max
  Clone ID: 700958040H1
aattgatgctgctatacatgtatggaggctgaaggaccataagaaacatctaagttcagcaaaatccagacggtcttggggtggaaaggtgaagggacttgttgctgatggtgagaagaacaagaacaactttcttgcccaacgggctgagacgcttctagaaagcttgaaacacagatttccagggctccctcagactgcactagatatggccaaaattcaatataataaggatgttgg

SEQ ID NO: 82540 - DNA, 191 bp, Glycine max
  Clone ID: 700958041H1
ggagaaaagaagtagtacggtttacgtgcctagagacgaaagcttctcggaagttaagcaactaacgttttcgacaaagacgttatcgtcggggttgaaagcgatcgtgccggcgctgaagacattgatagttgacaagaatctagggtttcctgtgttctcggacatagatgaccttttcgatgaaggcc

SEQ ID NO: 82541 - DNA, 238 bp, Glycine max
  Clone ID: 700958042H1
ctctcaggaactttctttcaaatttgcaagacggtattcttggcaccaagctttccattctcatccctgctattccagctgccatcgttgcatagtgctttggctttggaagaccttggatttttatattaagcttacttggacttacaccacttgctgaacgtgtgagcttcattacagaacaagttgccttttacactggtcccacagttggaggacttctgggtgctacatgtgg

SEQ ID NO: 82542 - DNA, 235 bp, Glycine max
  Clone ID: 700958043H1
aggaatagtaatccaaggcggatccattgtgtctgatcctgaattctactcagtgagatttgagaacaaggcttacctagctcgtccatggaagaattactctaggaccattatcatggacacatacattgatgatttgattgacgcggatgggtatttgccatggcaaggactagagggtccttctggtatggatacttgcttctatgccgagtaccacaacattggccctggt

SEQ ID NO: 82543 - DNA, 235 bp, Glycine max
  Clone ID: 700958044H1
actcgagccgaatcggctcgagggttgttcggattgcttgactcactgactctgcgagcccagcgccctctgtcaagaatatcgtgagcttcaacaccgtggatttgacatgattattgggtggcatggaaatgtcgagcaacgaagtcggggagtagccatgactgctacaacagctccatcagtcgaaaatggcatgagccgttgaatagtatgcagttctgtaactaagaca

SEQ ID NO: 82544 - DNA, 235 bp, Glycine max
  Clone ID: 700958046H1
aattaatcatatttttcaattttattgcaggattgtggagacggataagatgagagaaaagtgatgaagctcgtgatttaccctgtcatcattagttactttgattccttgttttcttatcttttagcacagaaaaagttcaattaatcatatttttcaatttttattgcaggattgtggagacggataagatgagagaaaagtgatgaagctcgtgatttaccctgtcatcatt

SEQ ID NO: 82545 - DNA, 208 bp, Glycine max
  Clone ID: 700958047H1
gcagtacagggcaccagaacagttgaaagacaaggtgatgttgtagagcaacagactgactctgcatatgggaatattagtaaagtttttaaagatttggacaatgtgtctggatcagcaaatgaattgaaatctgagaaagttgaagcagatctgagtccaacagaggttggaaataagcaaaatagtgaagatccgcactatatga

SEQ ID NO: 82546 - DNA, 244 bp, Glycine max
  Clone ID: 700958048H1
ccactctgaagccatccgccacttctccaaaatcctcgagggccgccgcggcgcccctcaggtcttcctcgcagagtgctacaagcacagagtctccgcaaatcgctccgccgggcgaatcgccgactcaatcgccgactgcaaccgtaccctcgccctggaccccaccagcatccaagccctcgaaacccgagcctcactcttcgaatccattcgctgcttcccagactccctccacgacctc

SEQ ID NO: 82547 - DNA, 232 bp, Glycine max
  Clone ID: 700958050H1
aaaacatacaagacattgatgtcactatcccagacatagaagcaatgcgcctagcacattacttaacaattggatcagagtgttccacttggtttgattctattggagaaaaacattttgcagaatttggatgggacgcaagggtagcacttagtatctacggtgctttcagtggcaaggagtacattaaagctcagaaactgaggaatcgccatttgcaatttcacatgaa

SEQ ID NO: 82548 - DNA, 74 bp, Glycine max
  Clone ID: 700958051H1
cttggttatccagcgctcgtcaggtcaattcccgctcttcatcaattggaaatagttcaccctgccgcccccac

SEQ ID NO: 82549 - DNA, 240 bp, Glycine max
  Clone ID: 700958054H1
agatactcgatcggttcggctcgagccatgaaaggacaggtctgcatcacgcttgaggcaagaagagacgtagaaactgtattgactatgggaatcatggaagatggtagcattattccccatccagctggtacagagaaggttgatttggtgatgaatgtggtggaaagtcccagtggaaggttttatgctggtgggtgggatatcaagtgggattacaaatggtccactaagagggct

SEQ ID NO: 82550 - DNA, 239 bp, Glycine max
  Clone ID: 700958055H1
gctgcctatccccttgcgatcgaacagaacagaagagagatgggggacggaagtgggagccggtggagcagggcggagtgggtgcagcagtacgatctcttaggaaaaatcggcgaaggcacttacggcctcgtcttcctcgcccgaaccaaatcccccgttggcactccctccaaatccattgccataaaaaagttcaagcaatccaaggacggcgacggcgtctcccccaccgccat

SEQ ID NO: 82551 - DNA, 115 bp, Glycine max
  Clone ID: 700958058H1
aaaaaagacgacgcagagagaagcgtcttaatagacgctcttctctgaatagcctgatttcttctcttgattctcgtctcattcgtttcgatcttcgatctctgaaaatgagaga

SEQ ID NO: 82552 - DNA, 114 bp, Glycine max
  Clone ID: 700958059H1
tcaataggtcctggacggagaattcagtgtcagattggaacaaagccggagatactatcaaacatatgtgaattactatggcttttgtgtcctacatcatccacacaacatacg

SEQ ID NO: 82553 - DNA, 236 bp, Glycine max
  Clone ID: 700958060H1
caccgtggatcgttgagcgtgaggctgtttccggtaacctctcccggcggcgctgagtggtgatcaaggatatgggtcagactctgagttgcgtgcaacagcacgaggaccatggtgtgctcttccctgcacttgcaagtggagaattggaggttgttgacgccatagtggatgaagaccccactgtgttggaacacaccattggctgtgacaggctttctcctctgcatgtcgct

SEQ ID NO: 82554 - DNA, 225 bp, Glycine max
  Clone ID: 700958062H1
atcccttgggggttcatcaactttaaactttactgttaagggtcccttgggggttccttagttgcaagcttttatagattatattttgttacttaaggattagctcatcctcaacttcacttgttaatggtaaaatgctgttaaaatatgattatcatattagcatcaaattaactcaatttggtgcttagtaatgtaagaattagtgttgccaatgtactgatt

SEQ ID NO: 82555 - DNA, 126 bp, Glycine max
  Clone ID: 700958063H1
atctgttctttctctggaaccagaacaagaggaattaaagttcattcatttaaaaaagaaagtaaagatagaaatagcatgcacaacaacatgagcactctgtctttcttcatccttctttcaaca

SEQ ID NO: 82556 - DNA, 161 bp, Glycine max
  Clone ID: 700958064H1
gttcggatcgagtggagtaacggggtgggttcactagatcagtgagaggcttgacagtattggtggacatcctcatacagatacttatgatcgtagtctactagtagtctccgaaggcaggagatcactatccagggcagtctcactttctcccttcaatg

SEQ ID NO: 82557 - DNA, 228 bp, Glycine max
  Clone ID: 700958067H1
ctggaacaagtagcttctaaacatggcgtatcgatcgcaactgttgctgtgaagtatatactagatcagcctgcagtagcaggatcaatggttggtgttagacttggcttggcagaacatattcaagataccaatgctatcttttcacttgttctcgatgaagatgacgtgaacagcataagagaagccacagcgaaaggaaaggatctgcttaaagtgattggtgat

SEQ ID NO: 82558 - DNA, 233 bp, Glycine max
  unsure (1)..(233): unsure at all n locations
  Clone ID: 700958068H1
caaagaaacaaactttgagtggatatgaatatgataggtgtcctttatcaaaagtaaaatcatatagctaagccagcggtgngactgaaggcatattttgtatgcccggaatatatgtaaatattttatgtcgtttgcttttgtaaagtatctttctggtgagtagcagacacggaaatttggggtttgcccaggtgcatttctattgttttgttgtagatctaatgatgccg

SEQ ID NO: 82559 - DNA, 233 bp, Glycine max
  Clone ID: 700958069H1
atatttccctacctctcccttcaagatgcagatattcgtcaagaccctcaccggcaagaccatcacccttgacgtggaaagctctgacaccatcgacaacgtcaaggccaagatccaggacaaggaaggaatccccccggaccagcaacgtctcattttcgccggatagcaacttgaggacggccgtaccctggctgactagaacattcagaatgagagtactcttcacctcg

SEQ ID NO: 82560 - DNA, 223 bp, Glycine max
  Clone ID: 700958071H1
gataatctaatatgtcaaagcgagaaaaaatggggtccgcaaaatttgctttgataataacaattgttattatctcaatgtgtagcatttcctaggcacagaattcgcccaaagatttccttgacgcgcacaatgcagctcgtgcagaggttggtgttgagccactcgcatgggacgacaccgtcgcatcctacgctcagcaatatgcggactcgaggatcaa

SEQ ID NO: 82561 - DNA, 236 bp, Glycine max
  Clone ID: 700958072H1
aaaaagattaacacaatggcttcctcaccatcaatagccagccagctgtcaatggggaaaagtcagattctcctactgttggctggggtggaccaggcgggtatgtttaccagaaggcatatgtagagttcttctgctctaaggaaaagctggatgcacttgttgataaatgcaaggatcggacatctttaacttatatggctgtggataaagacgggagctggaaatctaatgtg

SEQ ID NO: 82562 - DNA, 237 bp, Glycine max
  Clone ID: 700958073H1
ctccaacggcagttccagcggaagcaagagttgggacatcgacggcgacctcgccggcttcggctatagagtccggtcatcggagctgcaacacgtggcagaaaacatggagcgtttagagaacgtgatggacattgtgaactcatcaaccaacaacaatatatctcagcttgcctccgtcacaatcttctacagcccctccgacataggttcctggatcgacacgctcctctcggg

SEQ ID NO: 82563 - DNA, 232 bp, Glycine max
  Clone ID: 700958074H1
cgaaattgcggctgacctcaaggagcatgtgatcaagcctgtgatcccggagaagtaccttgacgagaagaccattttccacttgaacccctctggccgttttgtcattggaggtcctcacggtgatgctggtctcaccggccgcaagatcatcatcgatacttatggaggatggggtgctcatggtggtggtgccttctccgggaaggatcccaccaaggttgataggagt

SEQ ID NO: 82564 - DNA, 232 bp, Glycine max
  Clone ID: 700958075H1
actagatcgcgaggagccacccttgtttaatttttttcagaatccctagtctgaatcccaatgccattgatgtgaattggtgcaaagcaatgatttcgaatccggaattgatccactacgcctgcatcgatcgatcggagactatcctggggcagcaccagagcgagaaggagcccaacatggaggacttggaggcccaatgcgtggcccaaacacctcccaaccactccct

SEQ ID NO: 82565 - DNA, 220 bp, Glycine max
  Clone ID: 700958076H1
acacaggcagataccgtgtacaatttcatcaggaccagatccatttcttggttgtacatgaaacacagcatgccatttatgaagcaacaaagctagaatgtttaaagcagtggttcccacgggattcatcagcaccaatatcacatgcaactttctcatagtgatagccagctcatatatgccagctttttagatgcaacattctgtgtattgagtgttt

SEQ ID NO: 82566 - DNA, 233 bp, Glycine max
  Clone ID: 700958077H1
atctgaacccattctgaagctaacgatgaacctgttaaagtggtagttgggaacagtcttgaggacattgttttcaaatctgggaagaatgttctgcaggagttttatgctccctggtgtggtcattgcaaacagttggctccaatattggacgaagttgctatctcatatcaaagtgatgctgatgttgttattgcaaaactggatgcaaatgccaacgatatcccaagtga

SEQ ID NO: 82567 - DNA, 83 bp, Glycine max
  Clone ID: 700958078H1
caagcaccttgcgtgctctttgtcccattgttagtgcgctttattgatttctgggtcagtgtggttttgtcctgttccacgag

SEQ ID NO: 82568 - DNA, 238 bp, Glycine max
  Clone ID: 700958079H1
aaagaagaaaaaaaccttagccaacacaaccatcatggccacctctgctattcagcaatcagcattcactggtcaaactgctctgaagcagctcaatgagttcgtccgcaagaccggtggcgccggcaaaggtcgcactaacatgcgccgcaccgtcaagagtgctcctcagagcatttggtatggccctgaccgtcccaggtacttgtatccattctcggagcagattccatcatac

SEQ ID NO: 82569 - DNA, 241 bp, Glycine max
  Clone ID: 700958080H1
tcggcgtcgcctcccgcgcctccctcgacgagctctccgacgacgagatcatcctcaatgaagactcccgcgccccgggcccgtgctgcagggcgctggtcggactcctgctcactccccaacaacaaaatccaagaccaattccctctgccacccagggctgtccacagtttggcgaaggaaaaacaacatattccttcgccaccacaagtggacagtcctgtctctgtctcagtctcgg

SEQ ID NO: 82570 - DNA, 233 bp, Glycine max
  Clone ID: 700958081H1
acacaattaagctaccttgtatctgccgacatggcacatgcactacacccaaattacatggacaagcatgaagcaaaccatcagcccaaactacatggaggacttgtcattaaaaccaatgcaagccaacgctatgcaaccaatgttgtcacatccttcatattcagggagatagcatcaaaacataaacttcccgttcaggactttgtggtgcgcaatgacatgtcatgtgg

SEQ ID NO: 82571 - DNA, 200 bp, Glycine max
  Clone ID: 700958082H1
attgtcgtcacaacaaaatcaacatagttattgattaatggtcctgtgtttgttgttttgtgtgtccaagtctatcaaaatcattctttggttttgtgttctattgtagattgtaggtactgcttcaatacatctttcaatcaccgagatcttggattcttcagtttcaagacaataattgaagttcaaggccattagtt

SEQ ID NO: 82572 - DNA, 230 bp, Glycine max
  Clone ID: 700958084H1
cgggaaatgtggtaatacaagacaatctgcagtttccaagtggtgctggtggcggttgcggcggcggcggtgctggcggagagatccaccagccccaccactaccgcccgcaatggtttgttgatgagagggatggacttattggttggctgcgaagtgaattcgcagctgccaatgccatcatagactccctttgtcaccaattacgtgttgttggtgatcctggggag

SEQ ID NO: 82573 - DNA, 231 bp, Glycine max
  Clone ID: 700958085H1
aggatacctaggtctcctcgtcgatgggtaacattgcccccattcctgtagaagccaaagcaactgatgaagtcaccactctgctcacaggattctgagatttaaattgtagcataatggaattttcgtgatctctttttataagatatggatttgtcttgcaatgcttttgactatgaagttgattgctaaatcattgaatcagtgttttgcagaatatttgtaatcatt

SEQ ID NO: 82574 - DNA, 231 bp, Glycine max
  Clone ID: 700958086H1
attacaaggactgggttttcactgatcaagcattgcctaatgatcttgtcaagataggagttgcggttaaggatacatctgctccccatggagttcggcttttgattgaggactatccttatgcttctgatgggctagagatatgggatgccatcaagtcctgggtgcatgaatatgtatcattctactacaagtcagatgcagcaattcaacaagatcccgagctccaag

SEQ ID NO: 82575 - DNA, 234 bp, Glycine max
  Clone ID: 700958087H1
atccttggttatgagtttgacaatgacgagtttcatgcttacgtgcatggaaggttaccatacgagaaactgaagcctgatccagtattaaggaaccttctgctttccatgcctcagcgtaaaataatattcaccaatgcagatcatgcacatgcagttaaagttctcaacagattgggtttggaagattgttttgagggcatcatatgctttgaaacgcttaatcctcccaaa

SEQ ID NO: 82576 - DNA, 233 bp, Glycine max
  Clone ID: 700958089H1
aatgtttggacatcaaattgaagttagtttgttttcatacagttttcctatgcatcactattatcaggtacggaccattccctccaacattttagcacttctaatgtctccgctgattacagcattatggtgtatttgctgctacttgaccattttgcggggagaccaaactatcagagcaagttctatgcaccaaaccacagacttcggctctgtatttctgaataaaatgg

SEQ ID NO: 82577 - DNA, 231 bp, Glycine max
  Clone ID: 700958090H1
aaacaacaaccctaacaccttcacctacgaacccacctcggtcctcgacctatgccggagcccaagccccgaaaagaagctcactgttcccaagccagaaccacaacacaacaaccagctagacctggatgatcatgttctgcctaattctgattggtgggagtccatcatgaaggacttaaccctacccggagactctcccactccccttttgaaaaccaatccatcatg

SEQ ID NO: 82578 - DNA, 231 bp, Glycine max
  Clone ID: 700958091H1
aatagtgcgtagtgagccgagctttgaatatcatgtctagcttcagcaagttgcagatcgagcacgccagcattgatgcatcaggtataggcactggcactgtgcagagaaatgggagtcagggacttcgattcattctctggtctgttctcgttgcatcacgtggtcgatgtcggaggttagtagggaacttaagactattaggtagaagtatttctacttgaatacgtt

SEQ ID NO: 82579 - DNA, 229 bp, Glycine max
  Clone ID: 700958092H1
gcaactagagaaaaaaaaaagagaagaaaaaaaaacttggttttatcttcttggttattattatattcacttcttcaatatcttggttctttgatattattattcgattgagcaaaaaatgggagttccagagagagaccctcttgcacaattgagcttgcctcctggatttagattttatcccactgatgaggagcttttggttcagtacctttgccgcaaggttgct

SEQ ID NO: 82580 - DNA, 182 bp, Glycine max
  Clone ID: 700958093H1
ccaaagcatccccccaagctacaagcacccaaaggggaggaataataataagcctaacttctaaggccaaaaataagaaaaaaaattaccaaatatgtcaggaaagttcattatctcggctgttcctctcatcctggtggtgggtttggaaatcggcgtggtggccccgttaacaagaaggg

SEQ ID NO: 82581 - DNA, 234 bp, Glycine max
  Clone ID: 700958094H1
aaatcattcttcctccaaaccagacacacgcattctttcctcccaagaaagcgggatcaccctttctccattcgtcaaccgcatttcttcaacttcaaggtttatgtctcattggatgattgatccaagggagaaggtgcttgacattggagggaggggaagagagtgcttggtggtggtgttttgaattgaaaaacgagaggatatcgcagatttttttcttatcgtttactt

SEQ ID NO: 82582 - DNA, 236 bp, Glycine max
  Clone ID: 700958095H1
attttgtccgaaagcttgaatttttcgcctaccctttacaatgatctcttcatttagacaacctgttgtagggatcagtggttcatatcttctttagaggcaaagacatgcaaccctaattaaggcaaggtccaatttacactctttgtcaagagaaaagggtcaaagatctcttgtttcagttcaaaagccacttcacattgctgcttctcttggtgttggaaattttgtgtcag

SEQ ID NO: 82583 - DNA, 237 bp, Glycine max
  Clone ID: 700958096H1
aacaagttctgtggtatcaaccaaaacacggtcatagggcagttggactttttccttagagagtgtcccaaagggatgaaaacaatgagcacgggattgttcttgagcacactctctttggggtttttctttagcaccttgttagtgtctatagtgaacaaaatgacagcacatggtaggccatggctcgcaaataatcttaaccaagggaggctctatgacttttactggctcttg

SEQ ID NO: 82584 - DNA, 272 bp, Glycine max
  Clone ID: 700958101H1
aaacactagtaaagggaaggaaccgtaccttcctcaataaaactttctctccgatttggcttctcagtttcggttgtcatcgtcggggagaaacaaaaaaaaaacccacaaaaagattataacccaaaaaaccagaaatagaataaaatatgaaaggtaaagtactaggatccactgtttctcttatcatagtggtggatgtcgtaattggcgtggttgctgaagtcaaaggtccaaagggggtaaaaaacagcaatggaggagaattaaaa

SEQ ID NO: 82585 - DNA, 265 bp, Glycine max
  Clone ID: 700958102H1
cggctcgagacccagtcaccaaccccgttgtccggagccaccattttgcgctccggcaatgttcttcccggtggccatcgtcccttaaacccaccacacttcaaagtcatgggtattccatgggacgacgtcgttgtgatccagcaagggaaggatcacaatgagccctgcatcgtcaccgtcaattgccccgacaaggctggtctcggctgtgatctttgcagaatcatcctcgagttcggtctccgcattacccgtgctgata

SEQ ID NO: 82586 - DNA, 269 bp, Glycine max
  Clone ID: 700958103H1
ctcttttttctctctcttgcaaaacctaattttcatttcttccctcaaatttcaaaatgcgtgagatccttcacatccagggtggccaatgcggcaaccagatcggcgccaagttctgggaggtggtttgcgcggagcacgggatcgaccctaccggaaggtacggtggggactcggagttgcagctcgagaggatcaatgtctactacaacgaggccagttgcggtcggttcgtgccgcgcgcggttctcatggacctcgaaccgggc

SEQ ID NO: 82587 - DNA, 272 bp, Glycine max
  Clone ID: 700958104H1
gttttccccttctctctctctctctctctcttccaaccttttctctgtttcttctaaaagtctcagcacagcataacataacccttcttcatcttcttcttatgtgattgacttgtgtccaccacggtgacccatttctgtatcttctcgtgaaaagctaatttgttcactctaataggtgtacagtgctaaagggtaaactttgaaacctagcttcctagttgaatcatcagaagcttataagtcgaatccatatttttctggacgtttag

SEQ ID NO: 82588 - DNA, 268 bp, Glycine max
  Clone ID: 700958106H1
ggcccttgatgattgcaaggacctcttgcaatccgctatcgagagcctccaactcagcattgacatggttcacaacaacaacttgcaggccgtgcataaccaacaggctgacttcaagaactggctcagcgctgttatctcgtaccaacaggcctgcatggagggttttgacgatggcaaagaaggtgagaagaagatcaaggagcagtttcataccgagaccttggacaatgttcagaaactcactggcatcacccttgacattgtg

SEQ ID NO: 82589 - DNA, 269 bp, Glycine max
  Clone ID: 700958107H1
gagaaacagttttccgcggaagagatatcctccatggttcttatgaagatgaaggagattgcggaggcgtatctaggttccaccataaagaatgcgcttgtcactgtgcctgcttacttcaacgactcacaacgtcaagccaccaaggacgctggtgtcatttctgggctcaacgtgatgcgaattatcaacgagcctaccgcggctgccattgcttatgggctcgacaaaaaggccactagctctggggagaagaatgttctcatttt

SEQ ID NO: 82590 - DNA, 268 bp, Glycine max
  Clone ID: 700958108H1
caataagctgtcggagggcaaatatctcaacactcaggagctctggttcgaccaaaccctcgatcacttctctccctatgatcaccgacaattccggcaacgttactatgagtttctagactatttccggattcccgatggaccaatttttttggtaataggtggtgaaggtatattgaatggggtagcaaatgactatcttgctgtactggcaaagaagtttggagcagctatggttactcttgaacatcgctactacggaaagagt

SEQ ID NO: 82591 - DNA, 269 bp, Glycine max
  Clone ID: 700958110H1
cttctccgagaccagacccatgccactcctcctgctccttattctcctctttcacgcggcggcagcaatgggatagtggcagctcctccacagaacgcatcggcactgtcgccatgcacatgcagcttctccagaacgaccgcgtcctactcttcgatcgcaccgacttcggactctccaacctgaagctcgccgacggaagatgctgcaacaaccaaacgagttggtcgtcgaacgcgactgcaccgcgcactcgatcgaatacgacg

SEQ ID NO: 82592 - DNA, 264 bp, Glycine max
  Clone ID: 700958111H1
tgagtggtagggtgaggatctcttcaatagtcttgttgaccaagagaccgttgagatggacgcgctagggttgttgagatcggtcaccccgaagacggtagagtccagggaagctgacgcagcgatgatggcggaggacgaagcactggagaaagtggatatcgcagtgatggtggccatggtggaagcggtaactgcggtagcataggagagtcgacgcgcacgagtctcacgcgggtgaagggaaacagagaaagatggatg

SEQ ID NO: 82593 - DNA, 267 bp, Glycine max
  Clone ID: 700958112H1
caaattacatagcctcagtaatctgagagagaaacaaaaacaatgaaggtttccattgccaagttccactcccttcccctatgttttttcactctcttggccttcaacacaaaacccctcctagcagcagaaccagagccagtggttgataagcaagggaaccctttggagccaggagtagggtactacgtgtggccactttgggctgatgaaggaggcctcacactaggccaaacaaggaacaagacatgccctctttatgttatc

SEQ ID NO: 82594 - DNA, 265 bp, Glycine max
  Clone ID: 700958113H1
ggaaggagaagtttagggctgatgctaagcaggttatggaagttcttatgtcccttcaagtatctcaaatggagacagatgatccaacaacaagttacatgctacaggcatgggctagactctgcaaatgtctgggacaagattttcttccttacatggagtttgtcatgcctccactacttcaatctgccgcacttaagcccgatgtaaccattacatcagcagattcagacatcgtcattgaggattctgatgatgaaagtat

SEQ ID NO: 82595 - DNA, 263 bp, Glycine max
  Clone ID: 700958114H1
cttttctgcatgtttgttctctcaacgactcctccgcgatagagtattattcaatattttggttgggttgaatcccggggttgaagcgttgcagacatcacggctattacaagagtgtctcgctccctcattcatgtccgatctgtacgacggacgacgggtagttgcgtaactgccgttaacccttcgccgcacggtgggcgtggtgctttgccttctgaaggtggtagcccttcagacttgctcttcctcgctggtggtgg

SEQ ID NO: 82596 - DNA, 272 bp, Glycine max
  Clone ID: 700958117H1
agcacatttgcaaagtgttatttttctttttttctcatttgcactgcaaattgcaatggcttccaacaaggttattgccaccatcatggtgctttctctccttgcctactcaacatcattcaccaatgcatgtggcacatgccacccaaaacctaccccttctcctcctcctccatcaggaaagtgccctaaggacacattgaagctaggggtgtgtgcagatattctaggtcttgttactggttgttgttggctccctgtctccagcaatg

SEQ ID NO: 82597 - DNA, 267 bp, Glycine max
  Clone ID: 700958118H1
agatgatgtcttcatcacttgtggatgcacacaagccattgatgtttcggtggcgatgcttgctcgccctggtgcaaacatcttgcttccaaggccaggcttcccaatctatgaactttgtgctgcatttagaggggttgaagtgaggcattatgatctgcttccagagaaaggttgggaggttgatctagatgctgttgaagctcttgctgatcagaacacagtggcgttggcgatcataaaccctgggaatccttgtgggaatgt

SEQ ID NO: 82598 - DNA, 267 bp, Glycine max
  Clone ID: 700958119H1
aatattatgtggaggaatttgctgatacaggcaatgtaccaagtgtctgtcatgcttgtgctcaatttccgaggcataagcatactgggtctgagccatgacagaaaagctcatgcaatcaaagtgaagaatactttgatattcaatgcatttgttctctgtcaaatctttaatgaatttaatgctcgaaagccagatgaattcaacatattcaaaggagtcacaagaaactacctctttatgggtatcattggattaacggttgtg

SEQ ID NO: 82599 - DNA, 265 bp, Glycine max
  Clone ID: 700958120H1
gagacagcagagcagagatctagcgtattctctcgctctttctttcactgtcacagagccacatccatgggcttcccagccaacggcgcctctgcggcccagcccctaaacttcctcatctacagccgcacaggctggattggcggcctcctcggctccctctgccgggcccagggcatctccttccattacggctcgggccgcctcgagaaccgggcctccctcgaaaccgacatagccctcctcaagccctcccaggtcttca

SEQ ID NO: 82600 - DNA, 267 bp, Glycine max
  Clone ID: 700958121H1
atttattttatagcttctgctgtgcagggtccttcaatctcacttgggggaacatccgtcatggagccttaattagatttttcatgctctcaatattgaatgaagatattgcttagtatcaaaacctgaacatacatactatatctaccaaccgggaatcctcttcctggacgtgttgtgtatatattctagacactcagaaaaatgaattgttttccgtgtttttcaaagactaagagaaccaacagcaagagtgagcaacaaggc

SEQ ID NO: 82601 - DNA, 264 bp, Glycine max
  Clone ID: 700958122H1
cgtggcgcatgcacacaccactttttttatgatctctctctctctatatatatgcactatcacacgttatagagggacacataagccaccacagtctcacgttgtagagctacattcatagttatagggagctcaaatctcaatggccctgaaaaggaaccaagggtggtgtgagaggagcacattcaatgaatgaagctttttggtttttgagtttctgggagtggatcaagttggcccccagatcttcaatttgtttgattg

SEQ ID NO: 82602 - DNA, 266 bp, Glycine max
  Clone ID: 700958123H1
gaaactacttctgtatggctagaggtatctgaagtcaaagggcaagatgttgtttgtattataaagaacacagctacattggctgggtcattgttcactttgcatgcctctcaaattcatattgatttgcctactctcactgagaaagacaaggaggttataagcacctggggtgttaaaaacaaaattgattttctgtcactgtcatatactcggcacgctaaagacgttcgccaggctcgcgaatttctttccaagttaggtga

SEQ ID NO: 82603 - DNA, 265 bp, Glycine max
  Clone ID: 700958124H1
aaaaaaaccaggaacagggcttatgatattctcgtcgaaattgcccgtgcatttgcggatgaagagagtggtgggaacagagaaagcttgaataatttttttcagatggttgctggacactttactggggaaactccacatatgataagtgcagcagccaaagggttagcccgtttggcttatgagttctctgatcttgttttaacttccttcaaattgctccctggcacacttactctcctgaggagtgataacaaagagataa

SEQ ID NO: 82604 - DNA, 264 bp, Glycine max
  Clone ID: 700958128H1
cctgctttcagagtcggatcttcaagcatggattttgcaatcacctttacagatttcatgttctttatatgcaggaatcggaatagcggttagcttcttcattcaatcctggtgcatctcagaaagaggtcccctgtactgtgcaatgttcaaccctttggcaacagtcatcactgctttgataagtgcaactttcctagaggaagaggtgtacgttggaagtttggtaggggctgttggagttattgccggtttatatgttgt

SEQ ID NO: 82605 - DNA, 263 bp, Glycine max
  Clone ID: 700958129H1
accaaaaggagagtgcaataactcgttgtacattcctagtgtgtgggagagacatggctaagatgtgtgttttggtgttggttcttgctctggctgtggccacaagtgccagaaacgttcccaaccccaaggatgctggtcttaaggaccagaagaacttcatcagctatggtggagttggtggttattccgggattgggaacaatggactgccttttggaggagctggtgccggaataggtggtggttttggcggaggtggt

SEQ ID NO: 82606 - DNA, 155 bp, Glycine max
  Clone ID: 700958131H1
cgcattcttcctttccccttctgttctctcttactcgttgcagtgcacgtcgattatctctagaagcttccccattatctggtcggcccagaccgtaaaatcgggtctgaagtggctcgagtcgcgtcaggtcgatgaagggtatctccaccggc

SEQ ID NO: 82607 - DNA, 265 bp, Glycine max
  Clone ID: 700958132H1
gctcgcgcaggcgcaggagtgcgtcttcgagaacaccattgccaaagggagcactcccggtgtctgtgccaagatctctaggcaggttgggatatattatgaggaagctttagctgcgctcaatgttgcacccttgagccagcattttgataagtcctggatagttcacgtgcagttcaaggcggcactgttttatgcggcacttgttataggtatggattggagctgcatgataaagaggagatagcagaggagattgcacgac

SEQ ID NO: 82608 - DNA, 268 bp, Glycine max
  Clone ID: 700958135H1
cagaaaaagaccctcactctgttttttcttctttccttcctcaaccctaagcaagcggcatggttgtcttttcgcgaagtgcgacgacgacgacgacgacgacgacgacctatacgcgccacaacttaatacgacaaacgagaacctgcgttggcaataataatagtttgtgttactgctgctactaagaaggctcctccgcagaggattcttggtggtgcacgtggcagtagagtgattcttggctgccagccctcccaccgaagac

SEQ ID NO: 82609 - DNA, 265 bp, Glycine max
  Clone ID: 700958137H1
gtaatactgaacataagttcctgtactgatttggaagagataccagattctattgtaaaactttctaagctaagacttcttgacctctcaaactgcataagcctttcaagtttaccagaggacattggtgatctatgtaatctcaggaatctcaatatgacaagctgtgcaaggtgtgaattgccatactcagtaaccaatcttgagaatttgaaggtggtggtcatgtgatgaagagacagctgcttcatgggaagcattcgaa

SEQ ID NO: 82610 - DNA, 264 bp, Glycine max
  Clone ID: 700958138H1
tgcaggtggaatctcaatggccacgcttagcttcggcatcgccacgacatgtctgagtgctgccgctgattatcgtagaagaagcaactggaaatggagcagacccagaattgtgtgtgttggatgggacccggaaggcgtgcttggtccaccccaaactgggcacctcgccaggttcgagtttaagaagcgcctcgagagagacgcagatgcccgcgaagcttccaacgtcaagtccgtgaagagaaagaacgccgtcaatcc

SEQ ID NO: 82611 - DNA, 263 bp, Glycine max
  Clone ID: 700958139H1
tgcaacttcacttttagttctctctctccctggtcctttgagcttcaagaagttgttcctgtttgttgtagcagttcctgtccttaatttcttcaaccttctcaacacataaccaccttcgtctgtgtttgtttgtgtgtgcttattacttggtctcttcatattgtacatataaaaattatggatgatgaatatgccaagcttattagaaggatgaacccaccaagggttgtgattgacaacaatgcctgtgaaaacgccat

SEQ ID NO: 82612 - DNA, 264 bp, Glycine max
  Clone ID: 700958140H1
caaaggattctacccgccgctcgatgggaattgcgcttcaagacgtctcgtagggctaatccgcctcacgagggtcaccaacggcacgtccctttggggggccgaagccccctactgctggtcggcaaacggacggcgggcgcacgcgtcgcttctagcccggattctgacttagaggcgttcagtcataatccaacgcacggtagcttcgcgccactagcttttcaaccaagcgcgatgaccaattgtgcgaatcaacggttc

SEQ ID NO: 82613 - DNA, 262 bp, Glycine max
  Clone ID: 700958141H1
gtgcccaaagcggacagcaggctctgatcttaccacttaccctttacttttctagtacgcaagcttaagcagctcgatctcttcatcaatcagaaataccacattcactcaaatttcaataagaatatgacttgtgatcgatatcttaagttatgcacccgtacgtgcagtttgtacttaaccacaaaacaatctcacgaatcttctcttctcggtcgatcgcatatatgcatgtgtgaattattcagttgcaactgatgaa

SEQ ID NO: 82614 - DNA, 260 bp, Glycine max
  Clone ID: 700958142H1
atataacgcaccttcttcttgttcacttctctctctctctctctctctcactttttctcttgacacggagagaaacaacatctgaattctgatgggttacccagtggggtactcggagctcctcttcccgaagcttctccttcacatcctctgactattgggcctcctcaggaagctgatttgcagcctcctccgcttcatgggcctccacgacttcctcgagcccgacattgcctgggccgaaacccagacccgagtgc

SEQ ID NO: 82615 - DNA, 261 bp, Glycine max
  Clone ID: 700958143H1
tgaaggagttgaagcttacatttggttactggcaaaggcttacgttgttgtgaatgatgcttgctaccatcaaatcattagccattggctaaacactcatgcggttgtggagccattcgtcatagcgacaaacaggcatctgagcgtggttcaccctatttacaaacttctgtttcctcactatcgtgacaccatgaacattaattcacttgcccgcaaatccttggtcaatgccgacggtattatagagaaaacattctt

SEQ ID NO: 82616 - DNA, 80 bp, Glycine max
  Clone ID: 700958144H1
tccagacacgataaaggcagtcataaagtgagaatggatctgtgtgctgctcatgcgaagaaccttttccacacaaattc

SEQ ID NO: 82617 - DNA, 259 bp, Glycine max
  Clone ID: 700958146H1
ctttaatttgtctcaacgttgaagtgaattgcttcaagtccaaaaatggagcagtatgaaattcttgaacagattggaagacgttcctttgcttcagctctacttgtcaggcacaggcacgaaaacagaaggtatgtccttaagaagatacgtcttgcacgccagactgatagaactcgtagatctgctcaccaggagatggagcttatctctaaagttcgcaatccatttatcgtagagtataaagattcctgggtgg

SEQ ID NO: 82618 - DNA, 260 bp, Glycine max
  Clone ID: 700958147H1
ctttcaatcaccccatattcaaaaatgctcctcattgttcacacacattcttgaaaggtacctgtttttccaaccaccccatttcttaaaaaaactatttttccttcaagttccttcatcatttcttgtagttttgagtctttggttattggggtggttgcacttgcactatggaaacttgcacggctctgttgtttttaacggccatcacagcatacttgatatggttcacgttcatctcacggtcgctgaagggtcca

SEQ ID NO: 82619 - DNA, 273 bp, Glycine max
  Clone ID: 700958148H1
cggatcgagctcaatatgatcaagttcaaggttgtatctctaggctttactttatgttttttttcttcattcttctcccattccatcttcacttccttcctttttccttgtcattttggattttagatattttctgcttggctggaccagtaatattatcttgtggtgcttgtgattttagattagatattttctgtttatcagttaccatgactactttagttgtaactgtgcctctattctgccattgtcactatattaccgctatctttg

SEQ ID NO: 82620 - DNA, 243 bp, Glycine max
  Clone ID: 700958149H1
gcaagaacatgaataacttggtcctatctcttgttcctaaattcgcaaaactgcaaactctaatcctccgtcaagacaagcctcaactagaggataatgctgttgagactattgcaaaatgctgtcatgaactgcagatcctggacctcagcaaaagtttcaagctaactgatcgttcactctatgagctcgcccttggttgtcgcgatcttacaaaactcaacatcagcgggtgttcagcat

SEQ ID NO: 82621 - DNA, 264 bp, Glycine max
  Clone ID: 700958151H1
aatgaatattgcctcgttgtacacctgcatagggatcactcacattgctgctagcctgaggataaaacattgatagcaatggatttcttgctgccatgttattgttcgcatccaaattcctgttagcagaatctatattagacatgttcttcttgagcagttgttccaaggtattactgtttgatccattgctctcatagtgccatggctgagtgtaggatcctggaatgtgatctagaacactgtttctattcatcaagtggc

SEQ ID NO: 82622 - DNA, 263 bp, Glycine max
  Clone ID: 700958152H1
ctcttacattagcaaaaaccaaaacccgaaaaaacgcacagcacagcatcgagcacagcaacacctgaaaaaggaagggttagtgagtgtgtgtgtggaaattgtcatcgctcgcaagagcaacaacaactagtacttaaagagacagagagtgtgcacatcaatgtctgctcaggtcggtgtcaggacacgagcccaagccgcattagccatggaagctgttagttctgctgaaccatcatccaagagaaagaagatcagca

SEQ ID NO: 82623 - DNA, 230 bp, Glycine max
  unsure (1)..(230): unsure at all n locations
  Clone ID: 700958155H1
ctaaaaaactcttagttcggtctaaaaccctgaactgctgaagaacacaaggcaaaaagaggcacaaaatttacatattatgaagtgagaaaatcctaagagatgtttgttacatcccttgcttgctcttacttcacttatcccacccttttgcattctttttgttccacatttacttcgtgccgtnagcagtgcacgttgctgcagctcaatagacacagtcagaaata

SEQ ID NO: 82624 - DNA, 262 bp, Glycine max
  Clone ID: 700958156H1
cagcatcttgcatgcccccatgtctttctttgacaccacgccatctgggagaattctaagcagggcatccactgatcaaaccaatgttgatgtctttatccccttgttcatcaattttgtggtggctatgtacattacagtgatcagcatcttcataatcacgtgtcaaaattcttggccaacagctttcttgttaattcctcttgcttggttaaacatttggtaccggggttattttcttgcttcatctcgcgagttaact

SEQ ID NO: 82625 - DNA, 261 bp, Glycine max
  Clone ID: 700958157H1
aagattctcaaaaactcttcatagtttacaacatcatttaaatctattgagcacaatggggattcatgattgcctaggatttgtactctttcaagttgagactcttgacaaatgaagagcaacaacaattactgaagttacttcctgtggttgatactgctaaactccctgatagccttgtcgtcatgttcagtagctctcagttcaaggagaacttcacttagttgcagcagctgctagcgggaggagtctctgatatct

SEQ ID NO: 82626 - DNA, 207 bp, Glycine max
  Clone ID: 700958158H1
cacgtttcctttttatctctatctttcttcagatcttaaccttattcttaccagatggatggctcagttaaactcttatttttgtcctttctctcgttgatcatctctttctccatagctcaaacctgctttcagaccataggcacttgttcttcctgtaaccaaagatgtttctgcctcagttcctcagtatgtcagacaaatcaa

SEQ ID NO: 82627 - DNA, 260 bp, Glycine max
  Clone ID: 700958161H1
caagtttggtgtgaggccattgagacatagccccgatgaaatgatggcagccttataccttcaagtcagcataattagccaggctctaatcttcgtcacaaggtcccgcagctggtcttttgttgaaagacctggtcttctcctactaggtgcattttttattgctcagttggtggcaacttttatagcagtgtatgctaactggggctttgcaagaataaagggaatgggatgaggttgggctggtgtaatctggctgt

SEQ ID NO: 82628 - DNA, 256 bp, Glycine max
  Clone ID: 700958162H1
taaagtgttgtcttttttgggggatttgcaacgcaaaggttgtttgttgttgccccaggaaatcatagagagcgaggcataaacatcaatctctctgtgaaaaaaatggggacgacgaagaacaacaacaacaacttcaattctacctcaaaatctgataacagtgccaatgacaacaaaaacaacacacgtgtggtgttgaatgtctacgacctcacccctctcaacaattacctttattggtttgggtttggaa

SEQ ID NO: 82629 - DNA, 261 bp, Glycine max
  Clone ID: 700958163H1
aacaactgtgaaatctgtggaatcaaaggggcaagctgagaagtgtgccaagagaaagaggaagaaccagtatcgcggaatccgccagcgtccatggggaaagtgggctgctgagattcgcgacccaagaaagggggttcgtgtttggcttggaactctcagcactgctgaagaagctgcaagagcttacgatgctgaagcaaggaggatccgtggcaagaaagccaaggtgaatttccctgatgagccttcaggcgctgc

SEQ ID NO: 82630 - DNA, 263 bp, Glycine max
  Clone ID: 700958164H1
tacgcgtgcttggacttcggctcgagagcaaacgatccaaactcttttttcatttgcagcatcaaaatgagtggtagcaacgatggtagcggcagtggagctctaggtttttgaaggtggctagtgcagctgccgctacaaccgccgttgccggcggtttatatgccattctttcatcctcaacctctgctagctctgagatggaagtgccgtttggcagcgcacggcgtgagagcaaagaacgtgacgatggtggctccggg

SEQ ID NO: 82631 - DNA, 260 bp, Glycine max
  Clone ID: 700958165H1
gtagtattatttcattgatttctccctcttcgctctctctcagtgaccagagacagatgatgatggagatggcgaacgaaacgctgtcgttgcggcactcgcggcgttggtgctactcgcggcgagtgtggcggtggatgctcaggagaactcggacgtgaagacgctagtgaagtacaagcacgggaagaagtactgcgacaaaggtgggaatgtaagggctggtcaatttactgttgtaacctcaccattaccgatta

SEQ ID NO: 82632 - DNA, 77 bp, Glycine max
  Clone ID: 700958166H1
ccgaggccgtgctggtggagggtttggaaaaggtggtggcattggaggaggtgctggtggtggctttggcaatggtg

SEQ ID NO: 82633 - DNA, 263 bp, Glycine max
  Clone ID: 700958167H1
ctttttctgagcaaaacattcaccttttggaattattaggttatctttgcatccgattttcaatggagaccccatcatccaccagaagagtaacaagatcacaggctttgtctgcttccaatgatgccctcatcacagtttccagaaagattgaagattctgaaaagaacgcatcaaagtcaaaatcaagggtgcaacaacaagaccaatccgcactaatagacataccaaatgattccccaatcgtgggacttgcgaatggg

SEQ ID NO: 82634 - DNA, 260 bp, Glycine max
  Clone ID: 700958169H1
atatatggatggtgccaacatgaatgctcaggtgggactcacaagcccaggttggataggagcagatgtatgccatctcaatctccacaagacattttgcacccctcatggaggaggtggccctggcatgggtcctataggtgtacagaaacacttggcaccatttttaccatcacaccctgtgatagcaactggtggaattcctgcccctgacaaacctcaaccacttggtaccatcgctgccgcaccatggggctcag

SEQ ID NO: 82635 - DNA, 260 bp, Glycine max
  Clone ID: 700958170H1
atgaaagaaaaaaaataatagtactgtaattagtttgggatgcgaaaagaaaagaaaaggtggggtaaaagggatccaatccagtggtagatgagatgaggtgaaatgagactggatcatagcattgtgatagttgagagtgagtgagttaatatgttatcattgttatggtgaaagtgaaaccaaacaccgaagctgttgagtgattttcattgatccagatcgtgtctgttctacgtacgatgtacagcggctccagc

SEQ ID NO: 82636 - DNA, 253 bp, Glycine max
  Clone ID: 700958171H1
acaacttacggctaaattctcaaagatttaaactttgtctcagagtttccaaattcacccaaccccagagacaaaatgtctctaatcccaaatttcttcggtggcagaaggagctacgttttcgatcctttttccctcgacgtctgggaccccttcaaggattttcctttcccaaacactctttcttcagcttcctttcctgaattttctcgggaaaattctgcattcgtgagcactcgtgtggattggaagg

SEQ ID NO: 82637 - DNA, 258 bp, Glycine max
  Clone ID: 700958172H1
gaatcttctcatgaaacctcccacgcaacactcgatttcctcagaatcaggttcgattccctaaccctccacaaatcccctttctcttctttgcagtttctccatggagggctctgcagaggatctcggagcccccgagtcatgggaggtcgctgatttggacgagtccatgaaccgcttgaacctcatggtcttttccaacaacgattctaagcaagctcaccagcgtctcgccgattatcatgacgatgatgctcc

SEQ ID NO: 82638 - DNA, 259 bp, Glycine max
  Clone ID: 700958173H1
cacagagaataagctactggatttaatggacccatctctttgtgaaacatgcaacgaaaatgaattcattaagtgtgcagtcattggactcttatgcgtacaagatgaaccaagtgatcgacccactatgtcaaatgttttgttcatgctcgacatagaggcagcaagcatgccaattcccacgcagccaaccttttttgtgaaaaagcatctttctagctcagcttcctcttcgagcaaaccagatataggtcagtat

SEQ ID NO: 82639 - DNA, 259 bp, Glycine max
  Clone ID: 700958175H1
ccccgttgtccggagccaccattttgcgccccggcaatgttcttcccggtggccatcgtcccttaaacccagcacatcttcagagtcattcggtattccatgggacaacgtcgttgtgatccagcaagggaaggatcacaatgagccctgcatcgtcaccgtcaattgccccgacaaggctggtctcggctgtgatctttgcagaatcatcctcgagttcggtctccgcattacccgtgctgatatttccacggatgga

SEQ ID NO: 82640 - DNA, 258 bp, Glycine max
  Clone ID: 700958176H1
catctcacaattcattcaccttttaattcatctcactcacaaatcacaatgctcttcctttcttccttaataataataccataataatctgttacgttacggggcccaaatgtctgttacggagctcaaggagcgtcactctgctgccaccgacaccgtcaacaatctcagacaccgtttaaagcagaagcgcctttcgttgctcgacacagatatttctgggtatgcaaggtctcagggtagaacgcctgtgacctt

SEQ ID NO: 82641 - DNA, 150 bp, Glycine max
  Clone ID: 700958177H1
tctctgtctctctctctctctatcgatcaatcatggctgtgcccaatcagcaaaccggcgattaccctagtttcaaactcgtcatcgtctgtgacggtggtacaggagagataacgttcgtaaaaaggcatcttaccggtgaatatgaga

SEQ ID NO: 82642 - DNA, 258 bp, Glycine max
  Clone ID: 700958178H1
cactccctcctcttcacacattttcttacccctctccaacaatccctctcgttcacactttcagattgtatgaagatgggggctggtggccgaactgctgttcctcctgccaacaggaagtcagaggctgaccctttgaagcgggtaccatttgaaaaacctcagtttagtctcagccagattaagaaggccattccacctcactgtttccagcgctctgttctccgctcattctcctatgttgtttatgacctcacc

SEQ ID NO: 82643 - DNA, 255 bp, Glycine max
  Clone ID: 700958179H1
agcgaaccggtgatactatcgacgatggagagactcggactgggttcaccacacctgccatggaagtcaccacattcaatcgaaccactttcaccgatgctgctgactttcccgtttgggaaaagattggtgctgtcgtcagactcagttatggcctcgggatttatggtgccatggcagttgcggggagttttatatgttcaatcacgggaattgactctctggggggtttccatctatcgttagatgccattt

SEQ ID NO: 82644 - DNA, 261 bp, Glycine max
  Clone ID: 700958180H1
cagcggagtgcttcgccttccgttacggccccgtgccaccgttcctcacctacttccgtttcgacggtaacggcaaaaaacacgaggacgttcctattttctccatgctaacaccttcgttcctccacgatttcgccattacgaagaaatacgcgatcttctgtgatattcagctcggattgaaccctcttgacatgatctccggtggctcccccgtcggctccgtcgcctccaaggtcccaaggatcggaatcctccctc

SEQ ID NO: 82645 - DNA, 257 bp, Glycine max
  Clone ID: 700958181H1
gtgttatttgttggtatggctggcctgctaaatttcaatggattatgcatagaagagattttgcttctgtctttagttaaattgctcaaatgttttgatgactccaaaaccttctttgttggatgggttgttgtggacagtggctctgtctttatgcttttaattcttaaggaaattttgtactattgtatggtgttggtcctagcagcctttctttttatccttcttctccaatatgatttacagttaataccttc

SEQ ID NO: 82646 - DNA, 259 bp, Glycine max
  Clone ID: 700958182H1
gcctttccttacactacttcatttcgtggcatagataataagggggagtaggtattgcacacatgattcaaaagattgaaaacaaagagtacatgggatttggagacctttgcagatatatgaaggactccaaagtctattaggaaagccacttatagtgggtgcgaacaatctaacatggacattggtgaagtttatcaactctgagagttgtgatgttggtagtactaagaatgacttattggcagagaaatacagc

SEQ ID NO: 82647 - DNA, 260 bp, Glycine max
  Clone ID: 700958184H1
cttaacaccaacacacccaaaatctcaatcttgttcagatccctcacaccctttttccattcaaactaagggtgtgagaagatgagtgaggtcttcgaagggtacgagcgccagtactgtgaactctctgctaatctctctcgcaaatgcagttctgcctctcttgtttctgaccaagaacagaagccgcagaagttgtctgagatcaaagcggggctagatgatgctgatgttctgattcggaaaatggaccttgaagc

SEQ ID NO: 82648 - DNA, 258 bp, Glycine max
  Clone ID: 700958185H1
ccgcgctctctttgtccaaaccaatgtctggtcctcctccggttcggtctctcccgacggaacattagtccaaaccggtggcttcaacgacggctaccgtgcggtcagaaccttcaccccgtgccgctcgtgcgactgggcagaagttcagcatggactcgcggcgcagagatggtacgccaccaatcacatcttgccagatggacgtcaaataattatcggaggaagacgacaattcaactacgagttttaccccaa

SEQ ID NO: 82649 - DNA, 257 bp, Glycine max
  Clone ID: 700958186H1
gctgaagtttcggtgtctttgggaggaggtccttcatggaacgtactactaggaagaagggacggtttgattgcaaaccaatctagtgcgaacacatccattcccaatccaacagaaagccaggccaatgtcactgccaaatttgctgccgttggcctaaacataactgatctcgttgcattatctggtgcacatagttttggtcatgcgcagtgtagatttttcaaccagagactgttcaacttcagcggcacagg

SEQ ID NO: 82650 - DNA, 256 bp, Glycine max
  Clone ID: 700958187H1
cttgtttcagttctttctttggtcactgctctctaacctagttccacattttcactcaccaagtctcatctttaagttcatatttctcttcattcacatcacttctctgatctgtctcttcacactctttgaccccgatcaaaattttgacccttttttctctctctgttaatgctttccatcaagccattcacagaaaaacccctgtttccatctgggtctaccctctttctggatttttgttatctgattttgt

SEQ ID NO: 82651 - DNA, 255 bp, Glycine max
  Clone ID: 700958189H1
caactcactcccaagagtgacgtttattcatttggaattttgcttttagaaattgtgacagcccgccgtcctgttgagttgaagaaaactgtcgcagagcgggttacactcagatgggccttcaggaagtataatgaaggaagtgtggtggaacttgtggatcctttaatggaagaagctgtaaacggagatgttctgatgaaaatgcttgatttggcgtttcaatgtgcagcccccattcgaacagatagacct

SEQ ID NO: 82652 - DNA, 253 bp, Glycine max
  Clone ID: 700958190H1
aagaagagggggtcagagtgagaaagagaaagagagaattcgtaaaccctaatttcggaaagatcggcgatgactgcatccaaggatcgcaagaacttcgtctacatcgccaaactcgccgagcaggccgagcattacgaagagatggtggaatcaatgaagaacgttgcgaatctcgacgttgaactgacggtggaggagcggagattgctttctgttgggtacaagaatgtgattggagctcgcaggcgtc

SEQ ID NO: 82653 - DNA, 253 bp, Glycine max
  Clone ID: 700958191H1
gattgatggtggtgtgcatgagtatgagatgggagattacaatcaccctgaggcggaggaaatatttgtcgaattggctgaggtgatggataagataagaaaagaagggtatgatcccagagtttcggaggtcttgcttgagatggatgatgaggaaaaggccgttcagttgcttcaccatagtgagaagctggctcttgcttatggtctaatcaggataggtcatgggtctacaatctggattgtgaaaaac

SEQ ID NO: 82654 - DNA, 208 bp, Glycine max
  Clone ID: 700958192H1
ggaggtgtattggtccattatccgttgttaatggtaatggaagtggaagtagcacttccattttccaatttccaatttccagtggagtagaacacattcattcaattgcacttttttataatttcatatatcctccaatattgctggtggttagcactcacaagagacaggctcaactaccatacaaattttccattcccggcatctc

SEQ ID NO: 82655 - DNA, 252 bp, Glycine max
  Clone ID: 700958193H1
cttcaactcaacaacccttctcttctcaaactcattcttgcctttctttttgttcatacttttattcttattgctacttactttttatttctatccaatcatccatgcccgaggaaccccaaacaccagcctccgctgaagaagtggtgcctgttcctgcggacacgccaccaactacccaatctgaagctgaagctgaagttgaagcaaatgcagaaagcatcgaagaagtggtggcggaagcagagcagg

SEQ ID NO: 82656 - DNA, 255 bp, Glycine max
  Clone ID: 700958194H1
cgctactctttcttcttcttccttttttattgatcctctctgcgatcacgaattttcccattttctccgtttcctcggcgaccaaacggaggagaagaacgcattctgaaaacgattggaaaatgctgggaactgcactgcaattcagcgtcgttcgcggcgaggatcggttttacattccggtgaaggcgaggaagaaccagaatcagcggaaacagagtcacagagccaagaacaacgaacctgaaaacgcgg

SEQ ID NO: 82657 - DNA, 272 bp, Glycine max
  Clone ID: 700958201H1
tctcacggcaattttataggtcctccaagaaagagagagagagagagtgaaacgataccaagggagaaaaacaaccaccgtccaaaccaccaccaacaacgtacgtcttacgttgttacatggccactcgtgttatcccaccaagaatcctaaggaagcttcgctacaacaccgccacaaaacccctcaactcctctcaccctcctctctccccgtctctctctccttctctctgcctcctacctgctccgcttgtcgtcccccgccgtgct

SEQ ID NO: 82658 - DNA, 264 bp, Glycine max
  Clone ID: 700958202H1
ccaccacacaatttcatttcatttttccttttcacttcactttcccccaattttctttctcaacaatggccgcagcaacacaactccacttaccccctggattccgattccaccccaccgatgaagaactcgtcgttcactatctctgccgcaaatgcgcttcgcaagaaatcgcagttccaataatcgccgaaatcgatctctacaagtacgacccatgggaccttccaggaatggctttgtacggagagaaagagtggtatt

SEQ ID NO: 82659 - DNA, 263 bp, Glycine max
  Clone ID: 700958203H1
gagaaaacagagctggctgctcctgtggatttgtctatgtatgcagcgaacgcatccaagcagaataccggggaaactgctgaaatcaagaagttaggaggtttaaccctaaaggggtctgctgattccatgagcattaaaagtggttctggtgcttcctcatctgttctcgacaaagtagttcatgctgctaatgagaacataggctcacaggaaagctctattgatcttgacaaaaagacgtcggaagatggaagtgtgaa

SEQ ID NO: 82660 - DNA, 262 bp, Glycine max
  Clone ID: 700958204H1
gttttcttcagatatttttctttttttcgttttttctgtcgtttcaccccaaacagatattttggtatccaaacagacctcatctctacattttttctttaccagcagaacagaagaaacacgttcgtttcgtttcgttcccatggcggtctccgtttccgcgtcctccgcgattgcttctttgaactccgaactctccacgcgcttgccaccctcactcgcctccgcatcttcttccgccaagcaatcctttctgcaattc

SEQ ID NO: 82661 - DNA, 260 bp, Glycine max
  Clone ID: 700958206H1
cttagaagcagatgaaggaagagatcctggtagcaatggttcgcgtctataatgcgccttcctataatggttcatctgctcctacaacttcacaaccacttgcagatttggcatttccaagtactggcatatctggtcaagctcctgcttctagcttggcaattgatgatctgcttggtttagattttccagttgagactgcagccatgccttcacctcctccattgaacctaaacccaaaagctgtactggatcctggc

SEQ ID NO: 82662 - DNA, 259 bp, Glycine max
  Clone ID: 700958207H1
cggaaaccaaaccccgaccaacctctctcccccaccttcgcgttctgattcagctgagagtggttgggctctgcaaaaattagctgcatgagctggtttgggaaactccgtttattctccaatttcaatccctttcatctcattacttctttgttaatttttaccctccatttttcaccccaatcgcgcttttccctccaacccctgttattgatccacgctaaaaccaatcccaatcgtaatttccggttttcgtcac

SEQ ID NO: 82663 - DNA, 256 bp, Glycine max
  Clone ID: 700958208H1
aatactttataataataataacaacgagaagttgatacaaacgataaaataaataagtatcatcgtctcctccgttattggacatatttgagtcttcttcgattcacgctgtaaccatcatctgtgatcgattctaaaatcttcatcaagaagatgcagctacaagatggttctgttggtaaagtcattaataacctctcacaagttctggcaagggtggtgggagaccagagcatctttccccacctacacaaaa

SEQ ID NO: 82664 - DNA, 260 bp, Glycine max
  Clone ID: 700958209H1
cctaattctcatttcttcatcgttcgattcttctcctcctaaagatgcagatctacgtgaaaactttgaccggtaagaccatcacccttgaggtggagtcctccgacaccatcgataacgtgaaagctaagattcaagacaaggaagggatcccacctgaccagcagagacttatctttgcgggtaaacagcttgaggatggtcgaacccttgccgactacaacatccaaaaggaatccactctccacctcgtgcttcgc

SEQ ID NO: 82665 - DNA, 258 bp, Glycine max
  Clone ID: 700958211H1
aaaaaagaaaaaagaagacagaggaaagaaaggagagctggaatcacatggacttgtctttctctttctgggtctccattaaatttttcttctctcccttctttctctctctctctctctgaccattctcttcttcttctttttcttctcctctctctctctcccctccgccatggctgaggataaggagatgtctacctctgtcatcaatgggaatgattccctaactggtcacatcatatctacaactattggagg

SEQ ID NO: 82666 - DNA, 260 bp, Glycine max
  Clone ID: 700958212H1
gtgggaggagagtcacaactcacaactaccagtccttgctttgcatcgtgtgagtttgggagaggaaggaagctactcggaaagtgattccttcctcggcgaaaaaaaaccaaaccattcctttataaccataaagtgccttcttttttcttcaccaccactccattactctcttcacactccacacacacacacatacacacctctagcttgtgtttgagattgaggaatataagaaaatgaaaatgggtaaagggatg

SEQ ID NO: 82667 - DNA, 259 bp, Glycine max
  Clone ID: 700958214H1
gcgattcagatcttagggtttcaatttttttttctgtggagccccattggccatagccgccagccagagaagagtagaagccttcgatcctaggttttctttccccccctttctctcaaatcggacctttttcgcttctcgattcgcttccgtagccgggcgatttgaggacccagaaaagaacgaaccgaacgttttatattttttcggataatcaatcgaagatgtctcgttgcttccctttcccccctcctgggta

SEQ ID NO: 82668 - DNA, 261 bp, Glycine max
  Clone ID: 700958216H1
caaggactactttaatgattaaaaacattcctaacaagtatacgtcgaagatgctgcttgctgcaattgatgagaatcaccagggtacttatgacttcctctacttgccaattgacttcaagaataagtgtaatgtgggttatgcttttatcaatatggtgtctccttcacacatcatcgccttctacaaggcctttaatgggaaaaagtgggagaagttcaacagtgaaaaggttgcttcactggcatatgcacggatac

SEQ ID NO: 82669 - DNA, 261 bp, Glycine max
  Clone ID: 700958219H1
aacgaagacgaaataattaacccatcagagagagagaggtaataatgggagtgataaaggatggcacaatctcaggggttctaccggaacctcaaggatttatggtgcactatcctgcttatccatcatccatctctcgagctgttgatactcttgggggaattcaagccatccagaaggctcgctgttccaaatccaacaaattacagcttcgtttccgtcctgaagacccctattctcaccctgcatttggggagcttc

SEQ ID NO: 82670 - DNA, 256 bp, Glycine max
  Clone ID: 700958222H1
cgactctgtcagccaggaggttcattattggaactgggaaacatcatggggttggagtgagtgaaacttaacataaaaaagacttttttattcatagtgctctgtgttaatatgatttttttttaatatacgtgacctttttgttttatgagaattaatggtaaataatattttttatggacctaaaggtttagctttaataatcttaacttttggccgacctcttttaattgcatacactcgtacattatatgtg

SEQ ID NO: 82671 - DNA, 258 bp, Glycine max
  unsure (1)..(258): unsure at all n locations
  Clone ID: 700958223H1
ctctcactctcacactctctcactcacactcacactcacatcattgtatagnagattagagagagagaaccctaaactaaaaccctaaaattccattgcagcaagcaaaggcattgatcgatctgcatgggtcacgtaggttccagcaaggacggcaccgaggctgggccttccgccgccgcgatgggcatcgacgacgacgaagacatcgacctcggcgacgtcgatctcgacccgaccaacgccgaaatcctcgaa

SEQ ID NO: 82672 - DNA, 258 bp, Glycine max
  Clone ID: 700958225H1
gcaaaacgcgttcgtaacagaagaaagaaagaaaagagtaactgacaactgtaccagtagaaaaatcatcgacgcgactcgctgaagcggtgaattaaacaaaccgaagcgtgaagagaaggttctggaagaagcggatgggaaaatcgacgaataataacagagactggacgcagatgtacgcgatctacggaatggagcaatggcagaccctaattttcctcttgtgtcaggcgatgctgttttcagtgttgtctg

SEQ ID NO: 82673 - DNA, 254 bp, Glycine max
  Clone ID: 700958226H1
atttcaccagaatatacctatcttaattgatgcggaaaggcctagggaaggattgaatgacctcctgagtttggctgattatgttgtatgttcagaaaattttccacgggcctggacagaggcatcatctattccaagagcactagtttcaattattttaagattgccaagacttaaatttgctattgtaactttgggaaaagatggctgcataatgcttgagcgatgtgtggatgatgaaggttctcacatag

SEQ ID NO: 82674 - DNA, 256 bp, Glycine max
  Clone ID: 700958227H1
cgaccagctatgtggaggcatctgatagtttgatagttatggttttctggtaactacaagctttacttgtgtactcttacaaaacaggaatttgcttaaagtttaaggttgtgtttctgcttttgttttttcttggttttctttttaaggaccaaagttatactttagaggaaattatgttagatgtggatgcttggttgttagtattttatgcaagagccttgtacttttcccgggtaaccacttgtcactgatc

SEQ ID NO: 82675 - DNA, 257 bp, Glycine max
  Clone ID: 700958228H1
aagaacagttggtgctcttattgggctctatgaacgagcagtaggaatttatgcttcccttgtcaacataaatgcttatcatcaacctggtttaggcaatatggcttgtgggagaggtatgctgaattgtatccaaatgaagacctagtttacactgttggcattagtgactacagaaaagattggttctttgcacaggttaacaggaagaaagacaatggcactgacataggaaccacatggcaaattaatttcaa

SEQ ID NO: 82676 - DNA, 254 bp, Glycine max
  Clone ID: 700958229H1
ggcatcttgtgttgtgtccctcttttaagctatttccttctcttaacacaattggttgtgccaattgccatagtcaccaaccaattaacaaaggtatatatatcatcatatcatcaccaaatgaaaaatattgggttgttttttcttgtggtggtggctacttttgtggtggcagccacagctggtagcttttaccaagactttgaaataacgtggggtggtgagcgtgccaaaatctatgagaatggaaacct

SEQ ID NO: 82677 - DNA, 255 bp, Glycine max
  Clone ID: 700958230H1
caaccatgacatgtctgcagtagctgacatcatcgttgtcactgcggattggctaaactacagagctgtatgccgttgtgacaggtgctggtaatggaattggcttagagttagttatacaattagcttacacctggagtcaacgtggtgctcactgcactagatgcctcgacaggtatccaagcactgcacgcactcaaggactacgggtctatctgagcttgtactgaatcatcaagctgatgtggctgatgc

SEQ ID NO: 82678 - DNA, 259 bp, Glycine max
  Clone ID: 700958231H1
gcttcttgcaagaagtttctgagcttttatatcctctatatatagttctctggcaattaaggtctcatccaaataagcacaaatgggtagccagagttacttcaaggctttgattatttgccttatagcactaattggatcaactcaagctcaattgcagcttggtttctatgccaaaagttgtccaaaggctgagcaaataattctgaagtacgttgttgagcatatccacaacgctccatcactagcagctgctctc

SEQ ID NO: 82679 - DNA, 259 bp, Glycine max
  Clone ID: 700958232H1
gtggaattaacactgctatggaacgacagataacattgctacatgaactgatgtccactgttaaggatatgttacgcaacacagaggttgctgttcgttcctttatgatgctacgccctaggttccttcatccgagtgggggtacatcaagtgccactgccccatcacagactcctggtgcaactatagcacctagttcgagtagccaaccaacaactgcttctatagtgcctgtttttgatttctacagtggtcttcc

SEQ ID NO: 82680 - DNA, 259 bp, Glycine max
  Clone ID: 700958234H1
aaatctcatgtctgttcaaagctttcttattcttcgtattcatcatacaccacgccaaatcacaatacccttcaggaacaccgatgtcaccaatttcacatcttgtgggttttagttggatgttttcaagggtttgattctagggttacttatgcagtttttgggaattttggctcagttgagatctctgtgaaacgggtttggaaaattttttgatcttgaggtttatgagattttaactgtggaagaaagatggtgg

SEQ ID NO: 82681 - DNA, 256 bp, Glycine max
  Clone ID: 700958235H1
gaggaatcaagatagctcctttgaattttctatcagaatctgaggacccataatctagggttttctgttcttctctggggatctgaagacatgcagtccaagtctgaaactgcaaatcggctgaggtcagatcctcattcctttcaacctggcggtgtttattctgagccttggtggcgtggtattgggtacaatcccatggcccaaacaatggctggggcaaatgcgtccaattcgtcatctcttgaatgcccta

SEQ ID NO: 82682 - DNA, 255 bp, Glycine max
  Clone ID: 700958237H1
ttcatccattcctaatccttgcttggccactttgcgcatttcaattcttctttcggttttttcctgttttgggaaattgcataatattctccttctgttctttcatttcatctactgtgccacgcgttatacgtaaacgaaatacgggggaacgagtgaaagaagaagaagaagaagaagaatggtgattataaaccttgggaagaagaagagcgagagagaaggaatgcgacttgggaaatacgagttgggtag

SEQ ID NO: 82683 - DNA, 129 bp, Glycine max
  Clone ID: 700958239H1
cacagactcccaagtctgttgaagatgacttctttactacagccactgatgcattcagccatgctcatgttgatgccgagtccaatgtaattgatttcagttaccttgaaccacctccacacaacatac

SEQ ID NO: 82684 - DNA, 256 bp, Glycine max
  Clone ID: 700958241H1
gtaactttttgcattgtaaacccatgagttgcaaacaaagtgaatggttccatgatttggaatgtcttcaagagtgacaaaagggatcgcattttctttgctaataagacatatcttccaaatgaaactccaactccactagtgaagtacagaaaagaagaattggaaaatctaagaggagatggaaaaggagagcgcaaggaatatgataggatctatgattatgatgtctataatgatttgggtaacccagaca

SEQ ID NO: 82685 - DNA, 255 bp, Glycine max
  Clone ID: 700958242H1
cttactcgttacactactttccccccttttcgccttgcagcagtggatcgagatgctgggaaagacgaggaaggtttctgcgcgtggcgaatccgtggcggcgaactacgccttcggtccctccgaagatgacgtaatcatcaagcacaggcttctcacgcgcaccaccaccaccaggggcgaccctcccttgaagaagcttcagaagaagttcacctcgttcgtctccgaagtggacaaggacgaagacaacaa

SEQ ID NO: 82686 - DNA, 253 bp, Glycine max
  Clone ID: 700958243H1
cttggatatattagcaaggttaagatacttcatcttctgcaaggagctaccagtggtgttgaaggccgtcgttcacggcgatgaaaacctattcaacagctacccagaattgcaagatgccttggtttgggtctactttcactcaatcattccagaattcaacaaggtggaatgttggggcccactgaaggaagcgtcacacccacaggtggggtccaggaggaggggttggcaattccacagccatgccaag

SEQ ID NO: 82687 - DNA, 254 bp, Glycine max
  Clone ID: 700958245H1
gaaaattaatctccctttcattttctctgcatctgtactctccaaaatgccgtccttagaggaggagctcttcccttcaaccccaggcaagttcaagatcgagcgggcccaccacatgaaccgccagctctaccgctgcttcgcctccaccagcaccatgttcctgtgggccctctttttaatcgccctcaccgcttcatatctcagcttccaaggcttcgttgattccggcagccgctacctctccgcctcct

SEQ ID NO: 82688 - DNA, 254 bp, Glycine max
  Clone ID: 700958246H1
ggagatgttacttgatgcagcaacatgatgatctttgggctaagattctgcattctaagtatggaggttggagggctctagatgaaggaacatcagtcaccaatgaatccatatggtggcaggatttaaggtcagtcatccatgaacaaggtgtgcaggccttgcttcaatctgcaatagagtggaaagtggggtgtggggatgaagtaaggttttgggaggactgctggcttacagatcaggaatccctaagg

SEQ ID NO: 82689 - DNA, 255 bp, Glycine max
  Clone ID: 700958247H1
gttcccactatctctattacttggtcgctggacgcacgtgccaatccttcccaggtgagcacggtggggcgctccgcatcggataaaccgccgcagaggtcgctgttttcgagattttccttttggtaccctttggaatctctctggcctcgggggaacaacagcaggtacaaggggttggccctcgacgacgccgttttgtcggacaacaacgccgaagcgaaggccgttggagatgacggaacggaacggcag

SEQ ID NO: 82690 - DNA, 256 bp, Glycine max
  Clone ID: 700958248H1
cacagcctcacaagtaacaaacttataacacacactctctctctctctctctgcaatggctggaatggttcccctttgcattgcatcattggtcactctttttgttgcaacaagtgctagaattcctggggttttcaatggtggtgcatggcagggtgcccacgccactttctacggtggaaatgatgcctctggaacaatgggtggggcatgtgggtacgggaacctatacagccaagggtatggcgtgaacacc

SEQ ID NO: 82691 - DNA, 258 bp, Glycine max
  Clone ID: 700958249H1
cacttataaaaccctcttttctgcttcttcgtccattggcattggctttcaatggcgaagtgcatgaccagttcttcttcttcttcctatgcactgcttctctttttcttctgctttctacaactggaggctattttggaccctgctgatttcctcgctctgcaaaacattcgtaaagctctgcaagacatgcctgcttccgatttcttctcttcctgggatttcaccgcagacccatgcaacttcgccggcgtttac

SEQ ID NO: 82692 - DNA, 253 bp, Glycine max
  Clone ID: 700958254H1
cagcaagaagccatgaataaagtggtagaagttttgagtgtagcaccaattttggaatcagaagagttaccaactcaaacatcgcttcccctcaccttctttgatatactatggttaaggttaccacctgttcaacgcatcttcttctatgaatttcctcacccaacccatctcttctttgatacccttcttcccaaactcaaacactctctttctcttgcacttgcctactttttccctcttgctggacacc

SEQ ID NO: 82693 - DNA, 250 bp, Glycine max
  Clone ID: 700958257H1
acattattctcgaattagggttttccactgatctccgagcatacaccactactctgttcctcagattcaacaccaccttgcgtgtcgccaatgggaaaagccttcgacatcggagccgttccgttcaacgccgacgggtggggtccgccggacaacgcgacctcaggcagcaacaacaacaacctccctctgaacgtccccttcgcccccttctcccgctccgacaaattgggccgcatcgccgactgga

SEQ ID NO: 82694 - DNA, 251 bp, Glycine max
  Clone ID: 700958258H1
cttttgctatgacagaaaattgatggtggattttgctggaccagcaggaacctgttaatattttatacgcctctgagcatcatctacatgagataaatgccatttatccttagtgtttttgttttcatttgttgaataaaggaagtgctgctttgtgttccacgggaacaatggagaggtacaagttaattaaggaagttggtgatgggacttttgggagtgtctggagagctattaataagcaaaccggt

SEQ ID NO: 82695 - DNA, 253 bp, Glycine max
  Clone ID: 700958259H1
cttttgagatttttccaacctgaagactccctcttcttggttggttttttctcctacacaaccaaccaatcaagaaccatgcacatctttttctctgcataacttctcccgcccctgccaacatgacttgcatgcatgtgtgtgttaactcttcttcacttttacatgcatgcttgaggttttgaggtttcaacattagatgggcttataaagtcatcatatacacactcacatatatatatatatggttaat

SEQ ID NO: 82696 - DNA, 253 bp, Glycine max
  Clone ID: 700958262H1
ggccagcacaagcatattgtgggttcctttggggcatcaatggttgctccttggttggctgctcatggaaatccttcaaggtgtgttcttcttggcgtgagttgcggtgcaaatattgcagaccatgtggctcgaaaagctgtagaagcaggcaaacttctggaccctgttaaggtggtggcacaggtcctgatgtatccattttttattggaagtgtgcccactcgttctgaaataaagttggcaaattctt

SEQ ID NO: 82697 - DNA, 254 bp, Glycine max
  Clone ID: 700958263H1
gaaaaattacctgtataccagagtattgcaagtgtaaaaaggtcttaaaattatgataatttcaggaaccatgaaaaattacctgtgtaccagtgtattgcagtgtaaaaaggtcttaaaaccatgataatttcaggaaatgacaaactatgtgccaattactccattaatcaggtaactggtggaaatttatttccttgatatgtaaattctactattgctgcatcagattttgatttttcagaatgtgagaa

SEQ ID NO: 82698 - DNA, 267 bp, Glycine max
  Clone ID: 700958264H1
gttcggctcgagggaaatttagttcaaggaactggtgtgagtgctgggacctatgagcatacttccatttcacaagaggctttaaaacccgaaccccctgaaattgctcaggaaaatcagtattcatttccatcacattctcatggatttaattatgaaaatgcccaacagccggaggtcccatttcctgtttcacagaccagctcacagaatcagaatcttgctcccttctctggtgtaatgcaggcacatacaaattctttgccc

SEQ ID NO: 82699 - DNA, 258 bp, Glycine max
  Clone ID: 700958265H1
gccagtgtgtcaccaccatggccaccgtcacaacccaagcctccgccgcgattttccggccatgtgcctcgaaatcgaggtttctgaccggctcttccggtaaactcaaccgggaagtgactatgaggccaatggggtgccctccttctgcctctttcaaggttgaagccaagaagggagagtggttacctggcttggcctccccaacttacctcaatggcactcttcctggtgacaatggatttgaccctctgggac

SEQ ID NO: 82700 - DNA, 255 bp, Glycine max
  unsure (1)..(255): unsure at all n locations
  Clone ID: 700958268H1
ccttttccccaccacattatttttccttctcctacttccacaaaatcggcattctatcncacaaccactattgcgtagctccaaatttttatatctagctctttcttatgctagaatttgattcctcttcattcttcaacaactccaatgtattccttagcccaacacaagtacataccacgcttccacctccaagcttgcaagaaccacccaccccaccacccatcgtctccagtgttttgttccaccacaacc

SEQ ID NO: 82701 - DNA, 245 bp, Glycine max
  Clone ID: 700958269H1
gtcatctcgtcgagtattggctagtttggataagaaacccgaaaccaccgatgttttatcagcctcaaatgaatcccatttttatgttctcatcactttggaggcagtcgtggacaagcttggtggatttttaaatccatatctcacaaatatcatggagcttctggtgctttatcctgaatatgtttcaggagtagatgcaaaagtggagtctagagctcatggagtacgaaagcttcttgctg

SEQ ID NO: 82702 - DNA, 251 bp, Glycine max
  Clone ID: 700958270H1
catatccccccctagctacagagcagccaaaggggaggaataataataagcctatattctaaggccggaaaaataaaaaaggaataacaaaaatgtctggaaaggtaattatctcggctgtttctctcatcctggtggttggagtggccataggtgtggtggtggccgtcaacaagaagggcgaggatcccacacttcaatctcaacaaaaatcagtaggggttatctgccaaaacactgatgaccagaag

SEQ ID NO: 82703 - DNA, 251 bp, Glycine max
  Clone ID: 700958271H1
gacctctgttttgtttaacacaaaatctaaaaggaaaaaaaaaaaaaaaaaaactatttcaccgattctcgggatctttggcctcgaatcgactcgaatcgattcgagaggtaaaagatccaaccccgcctggcctctgttttgtgatcgaaagccataaaaagttgttttcgatcacaacctcaatcgtattaagctgttgttgtcccccgtcgtcaatttcgaatattgaaaggttttagttgttgatt

SEQ ID NO: 82704 - DNA, 251 bp, Glycine max
  Clone ID: 700958272H1
ctgctatcaccttttccgtttcttgcgattcgacgatggccgatcaaaagctttcagaaccggcgcttaaacgtgagcagcttgatgaattcgtgagtagtctatattttgaacaacgaattcttgaactccgacttcttcaagacctcgagaacaatgatgaatgtaggaaaaatgggagcctgaaaaggttaaatgaccagagtgatgtctgtggatttagaagttgcttcaaaaatcattatgattcg

SEQ ID NO: 82705 - DNA, 251 bp, Glycine max
  Clone ID: 700958274H1
caccttcaaacccgaaccctaaccctagaagaaagaaaaaaacccacaacacacaatcagtactaccaactagggtttttgtcatggctagtttgcaaactagggttttcttgatggcccttctgtgcctgctggctcttggtgtcaaccattattccaatggcacaaggggaagtgtcatgtggccaagttgtgagtaacctgaccccatgcatctcctatgtgctatatggtggagccacggttcctgc

SEQ ID NO: 82706 - DNA, 253 bp, Glycine max
  unsure (1)..(253): unsure at all n locations
  Clone ID: 700958275H1
gtgagttgcaggcagtgtcatctctcctttgacgacaagatgagcatcccaattccccatcggcagttattcatagacggagactggaaagtccccgtcctcaagaatcggattcccatcatcaacccttccacccaacacatgatacagggntatcccagcagctactaaggaagacgttgatctcgctgtcgctgccgccaaagctgccctctcccgcaacaagggcgccgattgggctngggcttccggc

SEQ ID NO: 82707 - DNA, 250 bp, Glycine max
  Clone ID: 700958276H1
gacgggcatcgtgggcaacagcctcgccgagatcctccctctcgccgacacccccgccggtccatggaaggtctacggcgtcgcacgccgcccccgtccgccgtggaacgccgaccatcctgtcgagtacatccagtgcgacgtctccgatcccgccgacgccgaagccaaactctccgccctaaccgacgtcactcacgtcttcttcgtgtcgtggaccaaccgctccaccgaagcagaaaactgcgaa

SEQ ID NO: 82708 - DNA, 250 bp, Glycine max
  Clone ID: 700958277H1
ctacacatccctagctctgtcgttccgtcgttgacgatggcgtttcgggtgcgaaccctgacctccgctctctctttcttctctctctcttgtccatcgctttcgccaatgtcttcttctaagagcgtttcgatgacgggtgggaaaatcgatgggttaaatcagattggaaaaaagatgagaacgtggctggggagtggaaccacacctctggtcaatggaatggagacgctaatgacaaaggtattca

SEQ ID NO: 82709 - DNA, 249 bp, Glycine max
  Clone ID: 700958278H1
ctctgctcgtgcctctagggttatcatatctccatttccatttcctctctctcagtttccaagaatcttaagctatgggaaagtcttacccaaccgtgagcgctgattaccagaaggccgttgagaaggcgaagaagaagctcagaggcttcatcgctgagaagagatgcgctcctctaatgctccgtttggcatggcactctgctggaacttacgacgtgagctcgaagaccggtggtcccttcggaa

SEQ ID NO: 82710 - DNA, 254 bp, Glycine max
  Clone ID: 700958281H1
aagcatttgcccaagagcgcgttttttattctcaatatccttcttcttgttattattattattgttattgttccttgttgttaacatatattaataactctttcttaaacccaaatcttgtgacatcacaaaccgtaccctttttgtttatttcctttgtgggttttcaattcgtgcaaatttctgcgacacccagatggattttgcgctgaatccgtgtcctttgcgatcttctacgttcgtgaatttcgtcg

SEQ ID NO: 82711 - DNA, 252 bp, Glycine max
  Clone ID: 700958282H1
gaaagaaagaagttctaaggaagagggaatatgcagaatacaaggtgctagttgtctatttgcaataacaacatcagcgatccaaccttagtattcttcaacccagagagatttgtaataataaattacaacaacttaaacgatggcaggaggagcttatgtagattcgggaaatgcaaagcaatttgatgggaaggtcacggcattcgtattggttacatgctttgtggcagccatgggaggcttactctt

SEQ ID NO: 82712 - DNA, 253 bp, Glycine max
  Clone ID: 700958283H1
ctctttctctagtcctgttatttctcagcgcgtaaagcatggctttgttggtggagaaaaccacgagtggtcgcgagtacaaggtcaaggacctttcccaggccgacttcggccgcctcgagatcgagctggccgaggttgagatgtccggcctcatggcctgtcggaccgagttcggcccctcccagcccttcaagggggcccgcatcaccggctccctccacatgaccatccagaacgccgttctcattga

SEQ ID NO: 82713 - DNA, 248 bp, Glycine max
  Clone ID: 700958285H1
gaaatcctcaagcttcaatttgctttgtgctcactcatctatctattataaccaaacactcttcttcatattcttcttcttcttcttgttcttgttctatctgtgacgagcatcatggcctcgagagcagtgctattgttggctatgtgtgtgcttccggccatggttgtggccattcgcccagcaaagaaccctttttgcgtgaagggtcgcgtctactgtgacccttgccgtgctggttttgagac

SEQ ID NO: 82714 - DNA, 246 bp, Glycine max
  unsure (1)..(246): unsure at all n locations
  Clone ID: 700958286H1
tttccccactcactctctcatctttctcctaaaacatctccagtgggttcttcttcttctattacaacaacgtcacacaagaccatgaccatggccatggccacgatcctgctcctgttcacggtcttcgcggtttcatcggccctagacatgtcgataatctcgtacgacaacgcccacgccgccacgtcgcgcagactnaggagctgatgtccatgtacgagcagtggctagtaaagcacggca

SEQ ID NO: 82715 - DNA, 123 bp, Glycine max
  Clone ID: 700958287H1
ttcaaaagtttttgaaatgttgtcaccccttcttctatttctatgcctaactcttcctttgtttttgttgtccttcgtcaaataccgtaaaaccttcaagaatccaccacttccaccaggtcc

SEQ ID NO: 82716 - DNA, 166 bp, Glycine max
  Clone ID: 700958289H1
ctggcgactcagatcctctctcgcatcttccccaaaaccctatcccccttcctctcccgttctctctccaccgccccctctcctccctccctctccgcgctctccttcctccgccgcatctccgttgccgccaacccctccctccaccgcgccctcctccccaact

SEQ ID NO: 82717 - DNA, 247 bp, Glycine max
  Clone ID: 700958290H1
ggatttcttgcgcggtttatcatgggggatagtcagtattcgtattctctcaccacatttagcccttctggaaagcttgttcagattgagcatgctttgacggctgtcgggtctggacaaacgtctttgggaattaaagctgcaaatggagttgtcattgctaccgagaagaaattgccatctatattggttgatgaagcatcagtccagaaaattcagttattaacaccaaatataggtgtcgtat

SEQ ID NO: 82718 - DNA, 247 bp, Glycine max
  Clone ID: 700958294H1
gttctctcacacactcactctccttctctctcctattgcggctagggtttgggtttttcactttcagcctctccattccttcaaccttcttcttctctttgatctctgatggagacgttccgtgtttagtagcaagggttagttgaggccttgtgtttggaaacgtacggtgtcgttttggagttgggaaaacaaataattctgagagatggcaaccacgaacccttttgatttgttgggtgacgac

SEQ ID NO: 82719 - DNA, 262 bp, Glycine max
  Clone ID: 700958301H1
cgcgttggtgcaaagcatccttcgcttcaatctctctctctctctttgcgctttctgcaaaccgaacatttcatctccaaagggatcaacaggtcgaaggagaaatggggctgacattcacgaagcttttcagccggcttttcgcgaagaaggaaatgcgaattctgatggttggtcttgatgctgctggtaagaccactatcctctacaagctcaagctcggagagatcgttactacaattcctaccattgggttcaatgt

SEQ ID NO: 82720 - DNA, 261 bp, Glycine max
  Clone ID: 700958302H1
cgagggaaacagaaccgggcaaccttatatttcccaagatctcaaagtctatttcatcatgttctgagtttgtggatgataaatagaaagcagtgactgtgccagctgaatcaccagcaactcagaacatgatgaaatagactttgagttcttgggaaacagaaccgggcaaccttatattttgcaaacaaatgtgttcaccggtggcaagggtgacagagaacaaagaatctacctctggtttgacccgtcaagagaata

SEQ ID NO: 82721 - DNA, 262 bp, Glycine max
  Clone ID: 700958303H1
ttcggctcgaggcgattgtttcagtcgaaccatgaaggatgaaggggtgattgctctttggagaggaaacactgctaatgttatcacatacttccctactcaggctctcaactttgcttttaaggattatttcaagaggcttttcaatttcaaaaaggataaagatgggtactggaaatggtttgctgggaatttagcatctggtggggctgctggggcttcctctctgttgtttgtctattctttggactatgcccgaaca

SEQ ID NO: 82722 - DNA, 249 bp, Glycine max
  Clone ID: 700958304H1
cttcttttttagctatccctctcttgaaaaatctagatctcgtgcttccttgatctacgttacgcttttagtgaccggatacgtatggatctgaaccagatctacacgccgatggtggttttggcctggtctttcatagatctgatgcatggaggctcagatctactgtacagaggtgtgcgattcatgttcgtctctcttttggaatctgtttcgtagaaagtcgtttggtcttccatgtcgcatggc

SEQ ID NO: 82723 - DNA, 250 bp, Glycine max
  Clone ID: 700958305H1
tggggatcaatgagaaatctgtcaagtcaatgccttttgaacagcttgctcttctgattgaatcggcttctactcttcagactgtgtaaactttacttgaccggtttgagagccgccttaaagtgtctacagcagtggctcctgccaagaatttgtctagcttggataacatcgatcatcttcttaaacgggttgcttcccccaagaaaagggctactccccggagttctgtgagaagcaggcaggcaaa

SEQ ID NO: 82724 - DNA, 248 bp, Glycine max
  Clone ID: 700958307H1
ctcgagccgaaagaataatggttggaagtgcaacaaaggttgctttcaccctcttggccactttcgccattgtcattccatgccttgaggctggcattgctgagtttgacgattttctcaaagcccaagctgatgaagcccataaaattgctcttgattcctatgtcccagagccccacgatgtcgcccatgaactcaatttccatgttcatatggcactggaaaactccacaaggagggaactaagg

SEQ ID NO: 82725 - DNA, 250 bp, Glycine max
  Clone ID: 700958308H1
caacaaaataccttccaattttcatcacaaagctttcaatttattgcttcaaccgaccattcaccatggcatcatcagcaacaaacacttggattaaaaccacactcccttctcttccgacatcttctccgactaccttaaataataggtttccttcctatcctaattccaattccaattccaacaccatctcatgatcccttcaaacactccacttccccaaaaagtaccaacgaacctccacaaccac

SEQ ID NO: 82726 - DNA, 248 bp, Glycine max
  Clone ID: 700958309H1
cttctgctctctcacgagaagaatactactaactgtgttgtaatacctcagtggagaacaagatgaatccatggaacatgagaacttccaagttactctctcaacaacttgcttatcctccttatcgcttggtagaagagattccaaacatgggaaattccagttgtgtgagcaaggagccaagaggttcacagatgacaatcttttatggtggccaagttcttgtcttggatgatattcaagctgac

SEQ ID NO: 82727 - DNA, 144 bp, Glycine max
  Clone ID: 700958310H1
attcattcaagattcagcaagtgcgttttggaagcagagaccgaaatacttcgagatggcccgtacaaagcaaactgctcgtaagtcaactggaggaaaagctcccaggacagcagcttcgcaaccataggctcgcagcgtaag

SEQ ID NO: 82728 - DNA, 243 bp, Glycine max
  Clone ID: 700958311H1
ctagtaacccttcttttctctctctctctctcgtgttctgagctgttagaagcaatggagaggatcagaagccatgcttctttcaccatgtttgcaatgcttgttggattgctctctcagagccttgtcattcctgtaatatccaccactgttgcagatcagaagaactactacaccccagatccacatgctggaagtccccccacaggtttctccgattctctgtgctcacacaatagtagt

SEQ ID NO: 82729 - DNA, 244 bp, Glycine max
  Clone ID: 700958312H1
ccctggtcttgctatggctcgggcatttggagatttttgccttaaggactttggattgattgctgttccagatatctcgtatcaccgtcttaccgacaaggatgaatttgtcgtgttagcaacagatgggatttgggatgttttatcaaatgaagaagttgtggacattgtagcacctgctccacggtctagtgctgctagagcactggttgagtcagctgttcaggcatggaatacaaaattt

SEQ ID NO: 82730 - DNA, 244 bp, Glycine max
  Clone ID: 700958313H1
cggctcgaggagagcgagcagtttcagacacagagagaggggtttgggattggagggattgacgctgcgtctcttcctcttctctttcgatccatccctcattcctaatcctccaatccaaccacctcagcctcacactcacatatacacatatctgaacgcgtatcgtccctcctatggcttcaaagcgcatcctcaaggagctcaaggacttgcagaaagacccaccaacttcttgcagcgc

SEQ ID NO: 82731 - DNA, 247 bp, Glycine max
  Clone ID: 700958314H1
cttaacaacagcacaaagcgggttactgtctgttcaagctaccatctctctctctctttcttagtgcctccttgccagaagttaaaatggcccaagaaactttcctattcacatctgaatcagtgaacgaggggcaccctgacaagctctgtgaccagatctccgatgctgtgctcgatgcatgcttggagcaggaccctgacagcaaggttgcctgtgaaacctgcaccaagaccaacatggtgat

SEQ ID NO: 82732 - DNA, 248 bp, Glycine max
  Clone ID: 700958315H1
atcttgttctgattatggaacagctgaagccaagtgctgctaactcttcccctctcactcccctcggcttcttggacagagcagccaccgtccacggcgacgtcccttccgttgtttataacaacaccaccttcacgtggtcccagacgcgccgccgatgcctccagctggcctccgccctctcctcccttggtatccgccgcggcagcgtcgtctccgtcgtggcccccaacatccccgccatgtac

SEQ ID NO: 82733 - DNA, 254 bp, Glycine max
  Clone ID: 700958316H1
agtagagagaaacttgctgagctttatgaatctgagaagcaatggtcaaaagcagctcaaatgctcagtggtattgaccttgattcaggaatgagggtgattgatgatggattcaggttgtcaaagtgtgtccaaattgcttgtttatatcttgaggtattgactcttttctgcaatgaaatctatatttgattgaagtagcggctattgggagtcatagcaagccacacaagaacatgagtatccatatctat

SEQ ID NO: 82734 - DNA, 129 bp, Glycine max
  Clone ID: 700958318H1
aaagacacatgtcaaaaatggaacttcatgtaaaataaactatggaactggatcaatatctggtttcttcagtcaaggtaatgttaaagttggcagtgctgttgtcaagcatcaggatttcattgaggc

SEQ ID NO: 82735 - DNA, 247 bp, Glycine max
  Clone ID: 700958319H1
cggctcgagcttctgccttggcctgcagtaatggttttttcttggttgtgtcttcgtcaaagtctgctgctttgtacagtttgactacttctactactactgcatgtaaagagaattaagaatgtgaacacaggggatttgcactgctatcgcgagctacacttctgttgcataatgggtttgttttatgagatatgtgcttctacacttaacctatggggaccatgtgcgtgctgcctctgtgctg

SEQ ID NO: 82736 - DNA, 249 bp, Glycine max
  Clone ID: 700958320H1
cttgggagaagaggtcgagtttcacagcagcaatggtgtacgtcaaggctcagaaatcagaagcctacttcaagagatatcaagtcaagttgaagagaagaagagagggaaaaaccgattaccgtgccaggattcggttgattaatcaggacaagaacaaatataacactccgaaataccgatttgttgttcgctttagcaacaaggacattgttgcacaaataatatctgctagcattgctggcgata

SEQ ID NO: 82737 - DNA, 248 bp, Glycine max
  Clone ID: 700958321H1
aagaaatccatcattactacccccacctcttcctttccattcctctctccagaagtcctagccctacaatctcaaagacaaacccatcattcaaagtcataaccgatacctaaaatcctcattccaatcaaaaccaaccccaccatgcccacaaaattaagtcatcaaattaaagcaccgatgatcctcaatttgatccttgtgcttatttgtgtcactactccaatcaaaggtgagaaatcaaggaa

SEQ ID NO: 82738 - DNA, 245 bp, Glycine max
  Clone ID: 700958322H1
gatcctcttctcggtgatcctcaggtctatccagagaaaggaacagttgctttttctgctggtttgcacggctgggcttttaccctgactaactttgccaagatgtatgcatctgagtttggagttgatgaaggaaaaatgatggaaaggctctggggtgaaaacttctttgatccagccacaaagaaatcgtccggcaagaatcatggctctgctacctgcaagcgtgggtttgttcagttctg

SEQ ID NO: 82739 - DNA, 248 bp, Glycine max
  Clone ID: 700958324H1
ctcagtttctttcttcaacgtttccatcatacacagatccgaatcctctctcaagccctaatttcccctcatttccatggccacagaagaagacactgtcgcggtggaacccgctcccgaacctgcctccgccgatcctcccccggaggagaaggaggagaccaaacctgaagccaaggctaagaaaaccaaggagcccaaacctaaaaaggtttccagacctcgcaaccctcccactcatccttcct

SEQ ID NO: 82740 - DNA, 243 bp, Glycine max
  Clone ID: 700958325H1
cagttttgcacttgatggcaatgctattactgtcacaggctaatttattacttcttcccagaacatccactgatagtcatcagccaaaagtatcagaagaaagcagacgagcttctgttgatatcttcttaaaggcagctgggtatcttgactgtgctgtaaggcatgttcttccacagttgcctggcgaactgaggagaaacttaccagtggatctcacagaaggagttcttggagcactct

SEQ ID NO: 82741 - DNA, 242 bp, Glycine max
  Clone ID: 700958327H1
caaaaacccattttttcctcttctttgcatcatcattctcattccttctttctaaactaaccaactttttttcaaacaaattcgattctttcttcatttttaacctaattttcttttcgatccaaaaaatggctctctcgcgcgttgttgctcaatcgtcgcaatcgaatcttctgaaacccctagcgtcgtacttatcactacgacgccgttcggtttcgacttcgtcagacccactcacg

SEQ ID NO: 82742 - DNA, 243 bp, Glycine max
  Clone ID: 700958328H1
caaccaacaagtagagacaaaccccagctacataaacatatgggtctttttatgaagctcccttttcctcctcatcttgcagcttcctcactgctccatttcatattattattattattattgatttttgatattgtgtgtaaaacaagggcagttgtgaaaattccaccaaatgtttcagttccagcagtgttggtgtttggagattcgatcgtggacactggcaacaacaacaacaacttg

SEQ ID NO: 82743 - DNA, 244 bp, Glycine max
  Clone ID: 700958329H1
gcttgtttcaattcaagagaagataaaatgggctgatgcaatgagtgaaattgacaagaagcacaggaaggatgtggaagagaaggtagaagaagtaaagaagtccattttcaagaagttacacactgtaagcaggccgacatcgacttcagagggcatgaggagatctgctctgaatctggtggagtgatggattatgaagaagatcgaagccgaccaaagaggaggcggcatccaatttctt

SEQ ID NO: 82744 - DNA, 249 bp, Glycine max
  Clone ID: 700958331H1
gttcatcagcgtgtgtctcagccatggcgtttccctacatggaagccgttgtcggatttatgatattaatgtacatttttgaaacttacttggatgtgcgacaacatagggccctcaaacttcctactcttccaaagactttagaacgtgttatcagccaagagaaatttgagaaatctagagcctatagtcttgataaaagccacttccattttgttcacgagtttgtgacaatagtgacagactcta

SEQ ID NO: 82745 - DNA, 252 bp, Glycine max
  Clone ID: 700958332H1
atcaatggtggttgcatccattcggcttcttccttctccactcctctctttcgctcctcgtcgctctccatattcatattcatggcgctctcatccctctttaaccattcccttctcttccatccactccaaagcttctactaagggagatggtggagcagtggaattgggtggtgatcaaacagagcttatatttttggggactggaaccagtgaaggggttccacgtgtcagcggcttgactaacccttt

SEQ ID NO: 82746 - DNA, 227 bp, Glycine max
  Clone ID: 700957689H1
cctcattctacttaaaactcccaccagtgatggcaggtttggctccagagggaacacaattcgatggtcgccaatatgatgctaagatgagtgaattgctttccactgatgggcaagaagtcttcacctcttatgatgaagtgtatgacagctttgatgcaatgggattgcaagagaatcttctgcgaggcatatatgcttatggttttgagaggccttctgctata

SEQ ID NO: 82747 - DNA, 225 bp, Glycine max
  Clone ID: 700957690H1
accaactgcaacattgatatggaaagtttaatctctgaccagaacagaagcgttgctacccttgctattactacacttttgaaaacaggaaatgaatctagtgtggatcgtcttatgaagcagatcacaaatttcatgtctgatattgctgatgagttcaaaattgttgttgttgaagcaataagatcattgtgcctgaagtttcctttaaaatatcgatctctg

SEQ ID NO: 82748 - DNA, 62 bp, Glycine max
  Clone ID: 700957691H1
caaatgagtgtgaagaaagagacctgaaagtgctgttgagccggtgtgttgctcagacaaaa

SEQ ID NO: 82749 - DNA, 161 bp, Glycine max
  Clone ID: 700957694H1
caatgattgtgattagtggcaatatgagaagtatctggcctgtgctgctgttcagtttgtctaagaaaatagaatgtttaactgcaagatgtatgttgaagtctaagcttgtatggttcttgagaaggtggatttgttaatatttggggttagcaaattga

SEQ ID NO: 82750 - DNA, 227 bp, Glycine max
  Clone ID: 700957695H1
cacccagagacgaggaagggcgtagtaagcgacgaaatgcttcggggagttgaaaataagcgtagatccggggattcccgatataggtcaacctttcgaactgctgctgaatccacgggcaggcaagagacaacctggtgaactgaaacatcttagtagccagaggaaaagaaagcaaaagcgattcccgtagtagcggcgagcgaaatgggagcagcctaaaccgt

SEQ ID NO: 82751 - DNA, 141 bp, Glycine max
  Clone ID: 700957696H1
ttcattctcatctttcgctcttctctctccacccaaaccctaactcccgaccctgttcccctctcgtatccgtcatgaaaggaggaaagtccaagaccgaatctaagagagccgatcccaaacttgctgtgaataagaagg

SEQ ID NO: 82752 - DNA, 273 bp, Glycine max
  Clone ID: 700957701H1
cagatattgtgtttgtcgtttgcctttgtgcaagatttcagtcttatccaaaaatttctcatgttactgcagttaaaaggatcttaagatatcttgttggaactactaatcattgtctatggtttaagaaaaggtctgagtttgatcttttaggatattgtgatgtttattttgctggtgataaagtagaaaggaagagcactagtagaaatggatgacccgttgtggcgagtgtctctaaacttcaagtctttagctttgtagattgttgtg

SEQ ID NO: 82753 - DNA, 132 bp, Glycine max
  Clone ID: 700957704H1
ttgaattagagttagtatttgaatatgcacatgttcttttgcaaggttttataaacctctacttcttacttcgttttttatttcctctctttttttaattttttatttgggtcttttcgatcactttgattg

SEQ ID NO: 82754 - DNA, 271 bp, Glycine max
  Clone ID: 700957705H1
cagtaccttgccgtttattatcacacaagacagcattacccttctattgttatcatcgacattcttaactcttaagaactgattcaccaacgacccctctgaatttcagaaactatcaatgaagggggaagtgcagcttcagcctccagcggttatgcaaaaccctagtgattcggaccctttgctccataaccaggaggaggaggaggaggatgagtcaccgggaagctctggtgagatcaagaatgaggaagaagacgttgaggctgga

SEQ ID NO: 82755 - DNA, 265 bp, Glycine max
  Clone ID: 700957706H1
gcacttagtgctattcaataattacgaaaaaccaacagcgagtgttgtttttgtttggtccaggctggaccagggaatgaatagagatgagaggctttcggttgaagagaactgagttaagcggcgaagcaaacgcagaatcggcggcagaaattgccaccggaagcacgtcgaagacgggtgaaccaaacacaaaattccatccaccacttctctcttcaatccccaactcaaatctgtgaagaaaatctcaatttctaaattg

SEQ ID NO: 82756 - DNA, 266 bp, Glycine max
  Clone ID: 700957708H1
tgatctttctgacggtgaaagtgatggggctggccaccatttctcacatgctcaatcaatggatcgagagtgatgaggacctgttactttgtacaatgagcagaggaggcattatgatagcataattctggaaagggtgtatttctcttgtattatcacataaagattattaccctctctaacagtttatagctgtaggcatggttcttgtggattaggcattatgtaggatggcaaatattgtagtttggtaataattatttatt

SEQ ID NO: 82757 - DNA, 221 bp, Glycine max
  unsure (1)..(221): unsure at all n locations
  Clone ID: 700957709H1
gtagagtggacaccctcattgacaaggcccttgagnaaattggcaccccagtggcccttaatctacgcgggaaggcagcggtagcccaagcagcattggcttaccagctctaccaaaggaaattttctggtccaaggtgggaagctctagttaaaaagggggccaagaagcaaaggctcctctgggcctcaaccagtgtaaagaatcctgcctattctgac

SEQ ID NO: 82758 - DNA, 268 bp, Glycine max
  Clone ID: 700957711H1
cttctcttcgtcgtctattgcatatcttataattttcccaaactcccctttcttactatacttttctttcctcgtacaacccaccacattcaccaaatccttcaatattaacatattcacctccaacttctatacttgtagtttttatttcatttccctttcactctttttgcttatttgtttccagagagaggaacattaatatatacaaactaaacatggtgttggcttccccaaactcaataaggcgcgaagggattctacccag

SEQ ID NO: 82759 - DNA, 263 bp, Glycine max
  Clone ID: 700957712H1
caaccagcttgcagaagcagatgagtttgaggacaaaatgaaggaattggaaagcatctgcaatccaatcattgccaagatgtaccaaggtggtgctggtccagacgtgggtggtgctggtgcagcagaggatgagtatgctgctcctccttctggtggaagtggtgctggccccaagattgaggaagtggactaaatgtagttgctttcctccagatacctgttttaaaaacttattttactttatgcttttttaattggat

SEQ ID NO: 82760 - DNA, 264 bp, Glycine max
  Clone ID: 700957715H1
ggactgtggttgagaagtatctgttgtgatggacatggcaatgtggtcagttcagttgcctttggtggttgtcttccattggatctcttaatttgtactttttattcacgtgcatttaccaagaattggaagagattttcccgaatgcattacaggtgaaccttagctatggaattttggctgtaactttttgttcgtaaacacaaaaggaacaatagtttaggttaatgtttgtttttcctcacttttaatgaggcattctac

SEQ ID NO: 82761 - DNA, 265 bp, Glycine max
  Clone ID: 700957716H1
agagaacttcaactgagggtgagagtgacacaaatctagggagcactactctaaaagttctattagattcttcaaaacatgaccatgcatcgcgagtcttgggcttttgtcttcggcgttatgggcaacatcatctcctttggagtgttccttgctccattgccaaccttttaccaaatctacaagaagaaatccactgaagggttccagtcacttccttatgttgttgcactgttcagtgcaatgctttggatttactatgctt

SEQ ID NO: 82762 - DNA, 271 bp, Glycine max
  Clone ID: 700957719H1
gagagtggtttcagtgagtgatcggtgttcacttgatccttcataagtcgtcatcatcatcatcatcatcaccgttgattgaagaagatgccgatcagaaacatcgccatcggaaggcctgaagaggctactcaccccgacacgttgaaggcggggttggctgagttcatctccaccttgatcttcgtgttcgccggttcaggttccggcatcgcctacaacaagctcaccgacaacggcgccgccactcccgccggcctcatctccgctt

SEQ ID NO: 82763 - DNA, 267 bp, Glycine max
  Clone ID: 700957720H1
ctcgagcccaagaaaaaaaatgaacaaacaaattggggtttgaaaagaagccggtgctgactccttgttctccatcgtaagatataactaattatttttatatcttcatcaagatgcgccgagggagaaccgccgccgccgctgccgccgttgtggatcccacgccggaccaggccaaggagacgacgcggttccgtggcgtgaggaagcggccgtgggggcgattcgcggcggagattcgagatccgtggaagaagcagcgctttg

SEQ ID NO: 82764 - DNA, 252 bp, Glycine max
  Clone ID: 700957723H1
cgagttaactgataaacttgaaaaaaatgagaaaagtcttgaagaaacggagcggtcattatttgatcttgaggagagacacacacaaggcaaatgcaactattatggcgaaggaatttctaatatcgaatctactgaaatctgaaaaagcacttgtggagcatgcaattgagctacgagctgatctatagaatgctgcatctgatgtgtcaaacctgttttctaaaattgagcggaaggataagattgaag

SEQ ID NO: 82765 - DNA, 265 bp, Glycine max
  Clone ID: 700957726H1
atacacacactctgcacaccacattcccagtaacatcgtcaacaacacaacaaacacaaaccctctctctctctctctctctctcccgctctgtttctctccacaggagcagagaattcatcgcttcatcatcctcaccattctcctttccctggcactctcagatggaggttccattggagttaactacggtcgtatagcgaacaacctcccctccgcggtgaaggtcgttcaactcctcaaatcccaaggactgacacgtgtc

SEQ ID NO: 82766 - DNA, 262 bp, Glycine max
  Clone ID: 700957728H1
atttggaacaaacaacaatacatgggttgtggtgctctgtgtgctgcaatttccttttgagcttgtgtttgattcatcaaatcatcaaagatgactgtaggggcaggaatatctgttgcagatgggaacttgatggtgttggggaacaaagtgctgagccatgtccatgacaaggttcttgttacccctgcatgtggtggtgctttgctcaatggggcattcattggggttcaatcccatcacaagggtagccgcacagtct

SEQ ID NO: 82767 - DNA, 110 bp, Glycine max
  Clone ID: 700957729H1
cgtgaaactcactcttcaatcatcgattttttggtttctgggtttgtgttttcctgtgatttagggtctgattctgatcgatacccgcgccatggccatgttcgattcca

SEQ ID NO: 82768 - DNA, 262 bp, Glycine max
  Clone ID: 700957730H1
tggggaaagcatatcagggttgttctagatgttggctgtggtgttgctagctttggtggctatctgctggacaaaaatgttattactatgtcatttgccccaaaagatgaacatgaagctcagatacaatttgctttggaaagaggaattcctgcaacactttctgtcattggaacacaaaagttgacttttcctgataatgggtttgatttgatccattgtgcacgatgcagggttcactgggatgcagatggtgggaagc

SEQ ID NO: 82769 - DNA, 88 bp, Glycine max
  Clone ID: 700957731H1
cacactcacactcctcccaaaaacccaaagccctaactctcgttcgcacactttctcacgacacgctgcagccctgagttgctccatc

SEQ ID NO: 82770 - DNA, 266 bp, Glycine max
  Clone ID: 700957732H1
ctccatcttcgcctcgcataaccttcgcgtcttcggtcccggcttgaatcccttcgcaccttattgcatcgccaatcactcccttttcctttccctttcctctcgctaaattacaattccctttctttttcctctccaacttctccttctccgtttctacgaacatgtaaattcggaggacaccgtctttaattcggtctatttttttgggggttactttacttcggttacgcgtcgtcgttttgcttttctttgtcgtcgttttt

SEQ ID NO: 82771 - DNA, 171 bp, Glycine max
  Clone ID: 700957733H1
tgggggttgggtttcaagatccaaacctcttcccaatgaagaacctctctttcttcctcatcaccaccctatccgccgccttctccgccgtcagatctgatccctcagatcaccgctacaaagaaggcgactccgtccctctctacgccaacaaagttggccccttccaca

SEQ ID NO: 82772 - DNA, 156 bp, Glycine max
  Clone ID: 700957734H1
cgacaggcgaaagacatggggaggatgtttggggtgcatttttctggtgtaattcacagaaaggtgggatgcgcattgtacctgcatctcgcattcctgacagtagtggggcagcctctcatccagatggacctcaagtgattgggttgaccagtc

SEQ ID NO: 82773 - DNA, 187 bp, Glycine max
  Clone ID: 700957735H1
cgacctaacacgagaggagtagagagaagagaggaagttttgggcgttgaatctatagaatagaatcagaccaaattgaaagaagatcgatcgatcgatcgatggctctggtcggagttgagatgaaacatgcggcggagggcgcacgggggaagaattgctccgccaggcccaccaggcagggcga

SEQ ID NO: 82774 - DNA, 266 bp, Glycine max
  Clone ID: 700957737H1
cttcgttccttcgattcattccatttcttccaaaatggccaaagacccagttcgcgttctcgtcactggagccgcagggcaaattggatatgctcttgtccctatgattgctaggggagtgatgctgggtcctgaccagcccgtgatcctccacatgcttgacattcctccagcagcagagtacttgaatggggttaaaatggaattggtggatgctgcattccctcttcttaaaggtgttgttgctacaaccgatgtggttgagg

SEQ ID NO: 82775 - DNA, 265 bp, Glycine max
  Clone ID: 700957738H1
cactcataacacaaagcacaaagcaaagctcatccttgagttaaaaaatggcagcagcttcttccatggctctctcatccccatccttggctggcaagcccgtgaagctgggcccatcagccccagaagtgggaagggtgagcatgaggaagaccgtcaccaagcaggtctcctcaggaagcccatggtacggcccagaccgagtcaagtacttgggcccattctctggcgagcccccgtcctacctaaccggtgagttcccagg

SEQ ID NO: 82776 - DNA, 264 bp, Glycine max
  Clone ID: 700957740H1
agaacactaccctgaacatagtaaagaagccagtgctaggatttgttagtgaagcaatggctcaaaccatgttgctcatgtctagtgtctctagcagttattccgtggatttgaagaaagaccttttcctccaattgcagagtcaaagtttaaggcctaagttctctcagctctcattcaacccacttccatcatcaacttcttccttttcttcaccccgtacattcacaactctggccctcttcagatctaagaccaaagccg

SEQ ID NO: 82777 - DNA, 264 bp, Glycine max
  Clone ID: 700957741H1
gcactacgcagcatagctgttatcttcttccccttcccctctcgtggcaaacgcgccgcaaatgacagaacgagcaactccaaggatccatcgacacagataaaagagtattccctcgctccctccacagttctagggttcacttttgaacacacgttgccaaaccccggttcatccaaatccaaagtcataagaacaagaagatgggtgtgggcatatcatttctgatagcactaaaagcaacaatcctcttcttatgcttcg

SEQ ID NO: 82778 - DNA, 261 bp, Glycine max
  Clone ID: 700957744H1
agctaattaacagaacaaattaggtaataaattacttatcatagaaacatggcagccctcaaacaagtttcatccctcttgctattccctttgtttctcatttttgccctattcaaatcctctcatgctggtgggattgcagtctatctggggtcaaaacggcaatgaaggctccttggaagaagcttgcaacactgacaactaccaatatgtgaacataggtttcttgaacgtttttggcaacaaccaaatcccacaact

SEQ ID NO: 82779 - DNA, 260 bp, Glycine max
  Clone ID: 700957745H1
caggaggagagatatgaggatagcgtttagtgtcagtgcaaaagagaccgtgacatttaaatttcgactgaatagatattttagtccgtgatatttaaatttctcattcactttattattttcgcttctcttttcatttttatcaccctgccacacattcacatttccacttcctatgtacaattttatataattatatcctatcatgtcagtttctccttgaattattaattatttaatatgaccaaaataattattca

SEQ ID NO: 82780 - DNA, 260 bp, Glycine max
  Clone ID: 700957746H1
gccggcgccgctggttgacccgacggagtttacgtcatggtcgttttacagagcagggatagcagagtttgtggccacttttctgtttctctacatcaccgtcttaaccgttatgggagtcgccggggctaagtctaagtgtagtaccgttgggattcaaggaatcgcttgggccttcggtggcatgatcttcgccctcgtttactgcaccgctggcatctcagggggactcataaacccggcggtgacatttgggctgt

SEQ ID NO: 82781 - DNA, 261 bp, Glycine max
  Clone ID: 700957747H1
ctctgtcccaattccctataattcacttctctctctctctcgcttaacctctcctccacggtggctcttccgcattctgccaccgcctccgccgtcgccgataatcactaatcaatagatggatgattcggcgttcaaacgagacggtcactttaactgaacttactcctgctcttctcagagagatgtccgttacagctgtggcacttgtggttatgagctgaacctgtcctcctcgaaccggaacactgcatccattgg

SEQ ID NO: 82782 - DNA, 71 bp, Glycine max
  Clone ID: 700957748H1
cttttaactctcagatcaagtcctcccgctatagactggatccacctgtaggtaggtccaaaacacctaaa

SEQ ID NO: 82783 - DNA, 267 bp, Glycine max
  Clone ID: 700957749H1
gaaacggtggcaagggacttggagaggaaagcagcagccgtgggatgcatctgtgagttgactgtactgtgcaatttttcttgaaattggagattagaatataacctataaaaggcttggctgcaagttatgccatgtacttttgtttcaggatcatcttcacaccctctggcctcgtgcttagtggggtcaattatgttactgaatgatgtaaacgtcccttatatgttcatatgatcaagaaatacttcattcagcgttctagaa

SEQ ID NO: 82784 - DNA, 263 bp, Glycine max
  Clone ID: 700957751H1
gagggttctgtgaaaggaggagaaggtgctatatacctgtgggcaaagctcccagacttagacgctcacgatgattttgatgttgttcgctggctagctaacaagcatggggttgcagtaatcccaggaaaagcatgtggttgtcccagcaatcttagaatttcatttggaggcttgacggagaatgactgcagagctgccgcagaaagactgaagaaaggcttagaagaattggttagagacggactgcgggagtaactgaa

SEQ ID NO: 82785 - DNA, 164 bp, Glycine max
  Clone ID: 700957752H1
caaatatcttcataagaagacctctgtccaagattttgtcaaacagtatgaagcaatcttgcaagacaggtatgaagaggaagcaaaagcagattctgatacatggaataaagtggcaaccttaaaaactccttctcctttggagaagagtgttgcagggattt

SEQ ID NO: 82786 - DNA, 262 bp, Glycine max
  Clone ID: 700957754H1
cttttattctacctaacaccacatggatacgttgacagaggcttgtgtttcctacattctgtcttagacatctgcaccagacgcatgtcgcctctctatggtctcttcatccctacgctcttccgctgactctgaccttctctggcgagctttctccccttctgattactctgacattgtctcaagggctctcagccgcctctcgcttaattcctgttcttcatacaaacacctatgctatgctctgtgtcatccactcctc

SEQ ID NO: 82787 - DNA, 218 bp, Glycine max
  Clone ID: 700957755H1
agcaaacgcagcattgggagatagaaagagagagagaaagagagagagagaaagacccttacccttctctatcgctcgctttcctttgacgcttctgacccttgctttgtctgcgtcttccttctttctttctttctgtctctgtgtgtcgtaatggctctcccagactcttcttcccgtcgcaactccctgatcccctccttcatctactcgtcttc

SEQ ID NO: 82788 - DNA, 263 bp, Glycine max
  Clone ID: 700957756H1
gctcgtcactccttgctcttagccctcctcctcttcgccgccgtccccaccgccgcgatggcggtggccgcgtgccgacgccgacgacatcctgatccgtcaggtggtgccagatgttggcgaaccgaagaggaggacaacctgctgaacgccgagcaccacttcgcgcgcttcaaggccaagttcgccaagacctacgccaccaaggaggagcacgatcatcgcttcggcgtcttcaagtccaacctccgcagagccaggct

SEQ ID NO: 82789 - DNA, 261 bp, Glycine max
  Clone ID: 700957758H1
attacatagcctcagtaatctgagagagaaacaaaaacaatgtaaggtttccattgccaagttccactcccttcccctatgttttttccttctcttggccttcaacacaaaacccctcctagcagcagaaccagagccagtggttgataagcaagggaaccctttggagccaggagtagggtactacgtgtggccactttgggctgatgaaggaggcctcacactaggccaaacaaggaacaagacatgccctctttatgt

SEQ ID NO: 82790 - DNA, 257 bp, Glycine max
  Clone ID: 700957759H1
tcataagcgaagaagaagccacagagaactagtcttctactctcacccgcaatagagaaatcccatctcacatcgttggatacccccgtatgggtcccaagagagagctcaagttcgctctcgagtctttctgggatggcaagagcagcgccgaggatttgcagaaggtgtcttctgatctcagggcatccatctggaagcagatggctgatgctgggatcaagtacatccccagcaacactttctctcactatgac

SEQ ID NO: 82791 - DNA, 259 bp, Glycine max
  Clone ID: 700957760H1
atatggatcaatttccaatagaaaataagggagcagtccaagggtcgcagagaacaacaaagaaggtgccaccttgtgcaatgccttgtaaagtacttcatacaagaagaagaagccccttgccctttgaaatatgatgaagccatgttggaggaggaagaagatgaaaaggactttgttcttttgacttcaattattagtgaagtttatatatatatggtaatgttagaatttggaaagatgtgttcgtgttcatgtt

SEQ ID NO: 82792 - DNA, 257 bp, Glycine max
  Clone ID: 700957761H1
ctgcgactcactctagtgacagaaagaagaagcgaagaaaaaaaacacacacacacaaacacaagcacagttgaaaatggctctgcttaccctctcttcgctgcaatgaagacacgtttgtctttcttctccgaagaagaaaaatggctctcggcgacgatgcgcacaccactctccctcgttcctcgatgcccttctctgcgaagagcgagaaaccttcgaggaagactttgatgagaacggttatgagcgtgaga

SEQ ID NO: 82793 - DNA, 259 bp, Glycine max
  Clone ID: 700957762H1
tttctctctttgatcaaattcccttcccatggtctctctctcttcaattaattccatttagctttccccaaatcccaaaccccttttcgcttagatcccaatccaattgggttatggacatggcttccagtccccgcaccgtagaagacatcttcaaggattacagcgccagaagaacctctgttattcgcgctctcactcacgacgttgatgaattttacggcctctgtgatccagataaggataacctgtgcctcta

SEQ ID NO: 82794 - DNA, 261 bp, Glycine max
  Clone ID: 700957763H1
ggaagaacccgtcatggaacaacaaccctccgctgctgcctctgggaacactgccagacccaggcttcagaagtacgcactccgatctgccaataagttgaaggaagagaagtcagaaactcccaattgctccattcctacttctgaaaccatgagggggagaagtgtaggtgcttcaagtgtaagtaaaagtgtgagtgttcttgatttttctggcaaggacaagtctggtagtgccaagccacccagaaggctctcaat

SEQ ID NO: 82795 - DNA, 261 bp, Glycine max
  Clone ID: 700957764H1
cctttctccgccgtcgcatcgttgctgtcatacaccgctgcccccgcccatgttgcacctccttcctccatttttcagtttttctccactgtgcatcagaatccacttttcatgtattctagagcgttcaatttgaagagttgcatttgagaaatggcatcggctttgatctcgcgttcttcgcgtaggtttctcaaaccttgttcttcttcggtatctctttaccctgccatcttcaatcctgtgatttcttctcaacaa
